United States Patent Application Publication US 2008/0066201 A1 - sequence listing, part 6

SEQ ID NO: 34927 - DNA, 396 bp, Glycine max
  Clone ID: LIB3138-075-P1-N1-H8
cacacttatacaaaattctccaattagtaacttgttgagagttgctgcttggaagaaaggctgtttaatggtcaagattgtgatgtctgggaatgcagcagtcaaaaggagtgattgggcctcattggtacaagtgtttttaacaaacagcaacagtacagagcattttgatgcatgtaagtggacaaaatcagaaccacattcctgggaattgatcttcccaatagaggtatgtggtcctaataatggttttgaaatgtggagttctgagtgggcaaatcaaacttcatggcatttgagtttccttattgacaatcccaaacagtctacagtttttgatattctcttgggaatctctcaagattttgaaattgctggtaatactcttatgccagc

SEQ ID NO: 34928 - DNA, 157 bp, Glycine max
  Clone ID: LIB3138-079-P1-N1-A1
ggcaagcttttgtgttcatacatgagaagcaaattggtcatgctgtatatgcagaggttccagaacgttatgatgaaagaaacgggcgatatacacgaattataagaaccctaccaaggcagtgtgataatgcacctatggcatatatagaacttgt

SEQ ID NO: 34929 - DNA, 175 bp, Glycine max
  Clone ID: LIB3138-079-P1-N1-A11
cgttttgattgaaattctgagttctaacgccacgaagcctattctgacgcgacttcttgagaactgtaagagtctcaaatatctggttgatgagtgtccttttgcatttgtgaactagtatgtagtattttattcacttaaataaagcgcattactatgtgcaatgagtgtgttt

SEQ ID NO: 34930 - DNA, 412 bp, Glycine max
  Clone ID: LIB3138-079-P1-N1-A2
gaagagccatgacgtggcacgcacccgtacgttcgcaattcgtttcgcgggagaaagttctttgaaatgggaagttcattggtgggaatgcaagttcccgggcagaagtttgtgaaccgagttccgttccccgctgtggtgtctcctccacctgcaactgcaagtgcggttcctcttacggactccgtcaaaacccagaaagctttccttgaatcattgctactccaatcgggtgctgtccttttcaggggattcccactctccaccgcttctcacttcaacgacgtcgtcgaagcattcggctacaactagctttcctacgtgggcggcgccaattcccgcaccaacgtggtgggtcgcgtcttcaccgccaatgagtccccacccgatcagaagatccctttccaccacg

SEQ ID NO: 34931 - DNA, 363 bp, Glycine max
  Clone ID: LIB3138-079-P1-N1-A3
atctctctttatttttccttcccttttctccatacacgaggtgcttcagatttgctcataataggaggcaatcgaatcgaatcgaatcgaaaggaaagtgcagaatggatgacatgccgttgcccgcgctctttgagcaagcccgcaagatccacgccgcaaccaccgattccggcgccgaccaggacgttgtgaagaacgggtgcgaggctctgcatagatgcgaggacatggtcaataatctaggtttgttctctcccaacgagaccaaagaagatatcagcaccacgaatctcaaatacattctggtgccattttatcttgcggagttgacagaaaaaatagcacaggatgacaggatac

SEQ ID NO: 34932 - DNA, 387 bp, Glycine max
  Clone ID: LIB3138-079-P1-N1-A5
tcgcctcgagaaaaaataaataattaaaaaaaaaaaaaaaaaaaaccccccccctttttttatttttccccccccccccaaaaacaaaaaaaaaataatccccccccctttcccccctaccttttcccttttctccccctccccctttctcctttttcttccctcttaatcctttcctctctttctttccttctctataacccccccccccctctttttccccccccccccccttttttttcccccccccctccccctccgtctccccttttttttttttttttctttttttccccccccccccccttttttcccccactctttttttctcctttattattatttttcctccctccctttccccccccccctcttctctcccccttt

SEQ ID NO: 34933 - DNA, 359 bp, Glycine max
  Clone ID: LIB3138-079-P1-N1-A7
caagtctgttgcatggcttcatgtagcgcaccggccgccctgatgctggtccaccctcaagacctctctcgctctcagagaaccacattctctctctatcctctcctttttaagccctccaaatgcctccacatagagcccaaatccaagacttgccatgccctcgtcgccgctttggctgcagaggtccaagtgcctttaactgtccacgacacggaagaagacgacggttctgattggttcaaccgcaacttcggcggcaacaacaacaacaacaacaacaaagcttaagaaaggcagggccgctttgcctcttaagagggccaggacgagatctaagaggttcttggaaattcaac

SEQ ID NO: 34934 - DNA, 361 bp, Glycine max
  Clone ID: LIB3138-079-P1-N1-A8
gttcattgtctacaataccaggtgattttgtcgggggggtcaagttgacaaccataaacaatatgtgtgcatatgggctcaatcctggtatttcaggttctcgtcttttgggcaccattcctcagtccatttcacagcaaactgtttggaatcaaatggcaacagtgagaacaccattgaattttgattctagcaagcagagcttttgtcagttttctattgaccttctcggtggaggaatcttagtggacaaaactggagattggatcacacttatacaaaattctccaattagtaacttattgagagttgctgcttggaagaaaggctgtttaatggtcaagattgtgatgtctgggaa

SEQ ID NO: 34935 - DNA, 361 bp, Glycine max
  Clone ID: LIB3138-079-P1-N1-A9
ggcatcatttttgagatattggaaatgaacccggaagacgaagctgaagaagatggtgccaatattgatcttgactcacaaaggaagggaaagtgtgttgtgctaaagacttctactcgacagacaatctttctacctgttgttgggcttgttgaccctgacaagttaaaacccggtgatctggttggtgttaacaaggatagttacttaatcttggataccctgccttccgagtatgattctagagttaaggccatggaagttgatgaaaagccaacagaggattacaatgacattggcggattagagaagcagattcaagaattagttgaagccattgttttgcccatgacccacaagg

SEQ ID NO: 34936 - DNA, 367 bp, Glycine max
  Clone ID: LIB3138-079-P1-N1-B11
gctctgattaggttgagaacagcatgtgagcgggcagagaggactctctcttccactgctcaaaccaccatagagattgattccttgtacgagggtattgacttctacacaaccattacccgtgcccgttttgaagagctaaacatggatttattcaggaagtgcatggagcccgtggagaagtgtttgcgggatgccaagatggataagagtaccgtccatgatgttgttcttgttggtggttctactaggattcccaaggttcaacagttgttgcaggacttcttcaacggaaaggaactttgcaagagtattaacccagatgaagctgttgcttatggtgctgcagtgcaggctgcgattctca

SEQ ID NO: 34937 - DNA, 362 bp, Glycine max
  Clone ID: LIB3138-079-P1-N1-B12
gaaaattgtctttcccccagggcacttcccgaagggtgaagagaatgcctctttctatagggggaggagctggtgcaaagaatgctattctcatgaatatgccaaatgctgttctttcaatgtggagatattttgttggagatctcgtctttgaagtttctaagatgacttctccctacattaaatgtacagtctctttcttcatagcatttggaaatttggctgatgataccatcaattttgaggcttttccccacaagctggtgcagttgggagagattcaggaaaaagttgtattgaaattttcacaagaggaatttcttacagcttggtcaactcaggtgcgtcctgcaacaactctg

SEQ ID NO: 34938 - DNA, 344 bp, Glycine max
  Clone ID: LIB3138-079-P1-N1-B4
gagaagagagttttaacaaccgagagaaacacataggggagaggaggcatagccaacctattcaaaccatgatgcaaggctgtgaggttgatgccattggcataaactacacgatccacacacacaaatcggagcacccttttaaaatcttcagcaacaaatctgcacatcttgacactgaacaagatggtaaagagccagaagaggaagcagaagttgaacaaagttgcagtggagtaaggcatgtgctgaagaatgtgagttttcaagccaagccatgggagattctagcaattgttgggccaagtggagctggcaaatcatcactgcttgagattcttgct

SEQ ID NO: 34939 - DNA, 366 bp, Glycine max
  unsure at all n locations
  Clone ID: LIB3138-079-P1-N1-B5
gctttttgtttattccaatcctaactgaccaacaaatggccgcctgttttgaaaatgtgttgtctaaccaaaaaaaatcggtaagtgatgataaggacaaagcgaagtgccttatggatgcctcgcaatctaccctctcacagcagtttcaccagaaaaagcatcttctgctgagttctcttggcaacttggcttggatactggtcattgcaaagttttcttggagtcggaagatgtangaaggaccctagacctatcgctgtttggttcttatgaagatctgtataggagacttgccatcatgtttgggattgaaaggtctgagattttgaaccatgtgctctaccatgatgcagctggtgctgc

SEQ ID NO: 34940 - DNA, 349 bp, Glycine max
  Clone ID: LIB3138-079-P1-N1-B6
gacaaaacttgatattggatcacacttatacaaaatggtcgattagtaacttattgagagttgctgcttggaagaaaggctgtttaatggtcaagattgtgatgtctgggaatgcagcagtcaaaaggagtgattgggcctcattggtacaagtgtttttaacaaacagcaacagtacagagcattttgatgcatgtaagtggacaaaatcagaaccacattcctgggaattgatcttcccaatagaggtatgtggtcctaataatggggggggaatgtggagttctgagtgggcaaatcaaacttcatggcatttgagtttccttattgacaatcccaaacagtctac

SEQ ID NO: 34941 - DNA, 338 bp, Glycine max
  unsure at all n locations
  Clone ID: LIB3138-079-P1-N1-B7
aagggttctactaaccattgtgtactctagagagtcgtggaagaagggtcaatccccaggactcttggtaagctacggggcatatggagaagatctggataagagctggtgttcagatcaccttagtttactggaccgtggttgggtagtggcattcgctgatgttagaggtggtggtggtggaggtnctttatggcataaatntgggagtggattaaacaaacttaatttaatatttgaatttgtatactgtggcaactaccgggggaaggggggttatgttcagagtgatcttgtttagtgctatggaatggagtgcaggctgcctttttgttggt

SEQ ID NO: 34942 - DNA, 361 bp, Glycine max
  Clone ID: LIB3138-079-P1-N1-B8
acagtcttttatgcaaactgtttggcagaccaaaggggacctgagcattccaccaacaaatgatttcaagaatcatcaagctccagcagttggaatgaacactgacattcaaaaggtatccgagtttggttttgataagtcaaaaagggtcaattttgatccttttgatcttccaagtgatgttagggcacttgcacgaattgtatactctcctcatggtggtgaaattgccattgcttttcttcggggtggagtgcacatcttttctggtccaaattttgcacctgtagacaactatcagattagtgttggatctgcaattgctgctcctgctttttcttcaacaagctgctgttcagct

SEQ ID NO: 34943 - DNA, 363 bp, Glycine max
  Clone ID: LIB3138-079-P1-N1-B9
gttttaaattcacaaaatccttttgtgttaaagagggggatgggaaaattgactttcccccagggcacttcccgaagtgttaagagaatgcctctttctatagggggaggagctggtgcaaagaatgctattctcatgaatatgccaaatgctgttctttcaatgtggagatattttgttggagatctcgtctttgaagtttctaagatgacttctccctacattaaatgtacagtctctttcttcatagcatttggaaatttggctgatgataccatcaattttgaggcttttccccacaagctggtgcagtttggagagattcaggaaaaagttgtattgaaattttcacaagaggaattt

SEQ ID NO: 34944 - DNA, 364 bp, Glycine max
  Clone ID: LIB3138-079-P1-N1-C1
ccacatccatctttgccttctgcatgttggttctctggaggcagatactgcaaaagaagaataatattgaatatttggttgggttgaatccctgggttgaagcgttgcagacatcacggctattctaagagtgtctcgctctctcattcatgtcccaactgtacgacggaggacaggttgcgtaactgccaccaacccttcgccgcacggtgggcgtggtgctttgccttctgaaggtggtagcccttcagacttgctcttcttagctggtggtggttctgctgtcttctagcttcttcttaactcttttttctttttactacttttaagctaccttgttttcaaaataacaaaaacaaacact

SEQ ID NO: 34945 - DNA, 366 bp, Glycine max
  Clone ID: LIB3138-079-P1-N1-C10
tagtgatctattggcaaattttttgacagagggcagggttagagcaagtgttgatttgcaccgcactcatcgtattagaggaatgattaaaatggtggccacagttggtattcctgagaatacaggtatatcattggcctgtgctatgaatagttcttttagggggcgcgccagttctgatatttacaccatctgctctcaagactgtgaattgtggaatcctgcttgcacaaaagcaatgactatgtcatttaatccaaacccgtgttctgatgcatggagtttggaatttctgaagcgtactggatttcattgcgatatcatttgtgtcactggatggactgccaccccaatgcaggatgttca

SEQ ID NO: 34946 - DNA, 342 bp, Glycine max
  Clone ID: LIB3138-079-P1-N1-C11
ctcgagcttattcggctcgagcaaaaagctgatgtcgctaccatagcacagattgaagagttccattcaatgcagaggatgatgaatgctcctgattcaaatgataatattgatttactgttgagcattgatttgttgggtttacaaggagcaggtaaagcttttccaaacaaaattgtttttgatgataagcttgtgttggctaacacacaagaattctttgatggaaattttccagtggattcttggttaccaatttttgtgaattgtctttatcctgtaagtcaattaccttcagaagctgtcgttgtaaatgttacatgtggtagtggacgtggtggt

SEQ ID NO: 34947 - DNA, 365 bp, Glycine max
  Clone ID: LIB3138-079-P1-N1-C12
tgggctctttcctggtatttcaggttctcgtctgtggggcaccattcctcagtccatttcacagcaaactgtttggaatcaaatggcaacagtgagaacaccattgaattttgattctagcaagcagagcttttgtcagttttctattgaccttctcggtggaggaatcttagtggacaaaactggagattggatcacacttatacaaaattctccaattagtaacttattgagagttgctgcttggaagaaaggctgtttaatggtcaagattgtgatgtctgggaatgcagcagtcaaaaggagtgattgggcctcattggtacaagtgtttttaacaaacagcaacagtacagagcattttg

SEQ ID NO: 34948 - DNA, 373 bp, Glycine max
  unsure at all n locations
  Clone ID: LIB3138-079-P1-N1-C2
gggagattctcttatgggatgnaaaaaccttaacggattggacgcattttcaatgtgtctgataaacccaaatctcagggtcnagtcccagaccgagattcgcttcatggttgagtctcaccacgcctggatctctcctacaacaatttcatcggcaaggtccctaccggtggtcagtttttggtcttcagcgacaaatcctttgcagggaacccgaatctctgtagttcccactcttgccctaattcctcgttgaagaagagacgcggcccttggagtttgaaatcgacgagggtgatcgtcatggtgattgcactggccactgcggcgattctcgtggcggggacggagtacatgaggaggaggaggaagc

SEQ ID NO: 34949 - DNA, 368 bp, Glycine max
  Clone ID: LIB3138-079-P1-N1-C3
gagagttgttgtttggaagaaaggctgtttaatggtgaagagtgtgatgtctgggaatgcagcactcaaaaggagtgattgggcctcattggtacaagtgtttttaacaaacagcaacagtacagagcattttgatgcatgtaagtggacaaaatcagaaccacattcctgggaattgatcttcccaatagaggtatgtggtcctaataatggttttgaaatgtggagttctgagtgggcaaatcaaacttcatggcatttgagtttccttattgacaatcccaaacagtctacagtttttgatattctcttgggaatctctcaagattttgaaattgctggtaatactcttatgccagctttttctg

SEQ ID NO: 34950 - DNA, 371 bp, Glycine max
  Clone ID: LIB3138-079-P1-N1-C6
ctagtttcttactaggctctactctactgcttcacctggctgctctagaaaattcagtggtgatacatggcttcggctactctctctgtagccaaaccagcccttcaggcaaatgggaaaggcttctctgaattctctggcctccgcagctcatcaggcttccttcccttttctagaaaatcttcagaggatttccattctgtcattgccttccagacctatgcagttggaagcagtggaggatacaagaagggtgtgacagaagcaaaactgaaggttgccataaacggatttggaaggattggaaggaacttcttgaggtgctggcacggtcgcaaagactcccctcttgatgtcattgccatcaacga

SEQ ID NO: 34951 - DNA, 364 bp, Glycine max
  Clone ID: LIB3138-079-P1-N1-C7
gaaattcgttattgagagtcagagttccttcgcggcggctcattattctctctctcgccattttcgccattctccctcccattttcttccacttccgcctccgacgcctccaacagctgcaactcacaaagtgccgttggctcaacgatcctcctctagtctgcgcccacggtggcgattcctccaaggcttctccaaacactatggcgtcgtatttccacgctcttcagtctcgcgtcgactgcattgagatcgacgtttctcgttcttctgacggagttctctttgctctccatgacagggatttgcagcgcttaaatggaaacactagttctaaagttggttacatgaactcagaagagat

SEQ ID NO: 34952 - DNA, 363 bp, Glycine max
  Clone ID: LIB3138-079-P1-N1-C8
ggctgcattatcgaatacgtgttgtagtttctagttgctttgtgaaggttctgcagcttccttggagatggggaatgaagtatttctgggatacccttttggatgccgatcttgagagtgatgctcttggttggcagtacatatctggtagtctccctgatggtcgtgaaattgaccgaatagataatccacagtttgagggctacaaattcgacccaaatggagaatacgtgcgacgctggcttccagaactttcaagattacccactgagtggatacatcatccttggaatgcaccagagtcagtgctacaagctgctggaattgagctaggatcgaactatcctcttccaattgtgggaa

SEQ ID NO: 34953 - DNA, 362 bp, Glycine max
  Clone ID: LIB3138-079-P1-N1-C9
caattgattttttaaaaatgactgggataaactgaagaattcaattattgaaattgaataagtaaacaatttaattggattggtcgaatggtatcaaaaaaatggagtactaactcccatttcttatttattattgaattaaccgatcaacttgctttgttatcgaacatttctttttgatttcaaaaattttccggaaaaaatttgaatctatttttatatgcgaatcaatcctactacttctggtcctgaggtttctgcgcttgaaaaaaaaaatctgggacgtatcgcccaaataattggtccggtactagatgtagcttttcccccaggtaagatgcctaatatttacaacgctctga

SEQ ID NO: 34954 - DNA, 340 bp, Glycine max
  Clone ID: LIB3138-079-P1-N1-D1
ttaggatattctttttgcccatacagatcatacttgggaaggaacttaagtaccgagagaaagggtgttttcattaatccagctttcattgagccatttggtcttaccttaattgaggcagctgctcatggtttgccaattgttgctactaaaaatggaggtcctgttgatattcatagggtacttgacaatggtctgctcgtagatccccatgatcagcagtctattgctgatgctcttttgaagcttgttagcaacaaacaactttgggcaaaatgtagacagaatgggttaaagaatattcatttattttcatggcccgagcactgtaagacttacc

SEQ ID NO: 34955 - DNA, 357 bp, Glycine max
  Clone ID: LIB3138-079-P1-N1-D10
ggacaaacttgttgttcacattaccaagaacttcatgaccctgcccaacatcaaggttcctctcattcttggtatctggggaggcaagggacaaggaaaatctttccaatgtgagcttgtctttgccaagatgggaatcaaccccatcatgatgagtgctggagagttggaaagtggaaatgcaggagagccagcaaaactgatcaggcagagataccgtgaagccgcagacttgatcaagaagggaaagatgtgtgctctcttcatcaacgatcttgatgcaggagctggtcgtcttggtggaaccacccaatacactgtcaacaaccagatggtgaatgccaccctcatgaacat

SEQ ID NO: 34956 - DNA, 367 bp, Glycine max
  Clone ID: LIB3138-079-P1-N1-D11
ggcgttcttggccactttcttcacccaaacctcgttcccctcccactctctctccaaaaccttcgatacccatttcgccccatccccgaaagtcaacgtatttgcgaacttcccggcgaggaggcacgtgggggttcgagtttcgaacgcgctgatcgaaccagacggagggaagctggtggagcttgtggtgagggataattcagaaagagacttgaagaagggtgaggctctttcgttgccgaggatcaagctttcaaggattgacctggagtgggtccatgtcctcagcgaaggatgggccacacccctcagaggcttcatgagagaagccgagttcctccaaacgcttcatttcaactctctc

SEQ ID NO: 34957 - DNA, 366 bp, Glycine max
  Clone ID: LIB3138-079-P1-N1-D12
agcatttttatgcatgtaagtggacaaaatcaggacgacattcctgggaattgatcttcccaatagaggtatgtggtcctaataatggttttgaaatgtggagttctgagtgggcaaatcaaacttcatggcatttgagtttccttattgacaatcccaaacagtctacagtttttgatattctcttgggaatctctcaagattttgaaattgctggtaatactcttatgccagctttttctgttccacaggctactgccagatcttctgaaaatgcggaatcctctgcatgatctggaatttgtgttttctttcgcttgttcgtttgtttaattcaataaaggaaattaggcatgaccctcttgt

SEQ ID NO: 34958 - DNA, 398 bp, Glycine max
  Clone ID: LIB3138-079-P1-N1-D2
agcatgacggccctgcacgccttccaaacctcgaatttcgttcgagctccaaatttttgcctactgcctgcttttaaaggcagtaatttaatctgaagatagaaatatcatcatgggagaggtggcagtaatgcattctgagcctctgcagtttgattgcaatgccatgaaccatatcactgagaaagatgtatataatctattgtcaaacgaagagcacatacttggagaagaatcaagtcaatcatcaaatgacaaaaagatcaatgatttgagagagagaggatacatgaaatgtcaacattaccgaagaagatgccgtattaaggccccctgttgtgatgagatttttgattgccgccattgtcacaatgaggcaaaaaataatatcaacattg

SEQ ID NO: 34959 - DNA, 367 bp, Glycine max
  Clone ID: LIB3138-079-P1-N1-D4
ctctccttttttttcttcttccacctttgtaatattggccgaaaggtagaccgtttcagttccataatattgtactgatccctctctctctctctctcccttggatctctttgtgattaggtttgactgtgtgtgcgtttttatatgtgtgtacctgcatcatgattccagcctatcgccactcagtatcttctgttatgcctctggatcttaatgaagatcaaaaccacgagttcttcagtccaactcaccacccttactattcgtgttcttctctatcttcatatcctattctcttcaacccgccaaatcaagatcaagaagctcgatcatactactgggaaccaacaaagcagtacttaccaag

SEQ ID NO: 34960 - DNA, 366 bp, Glycine max
  Clone ID: LIB3138-079-P1-N1-D5
tcctgtttttgttttaaatgtagagcttgcatatagggtgggtgtgagtgaaaggtgtgatgtgtacacctttggagtggtggcactcgaaactttggtgggatcgcatcctaaggaaatactctcatcacttcaatcagcatctactgagaatggcatcacattatgtgaaatattggaccaacgcctcccacagccaacaatgtcagttttaatggaaatagttagtgttgccatagttgcatttgcgtgcttaaatgccaatccttgctctcgcccaacaatgaaatcggtctctcaatgttttcttactcagcttatgttggaagaagaagaagattttatttcatttgccacaccaaatac

SEQ ID NO: 34961 - DNA, 370 bp, Glycine max
  Clone ID: LIB3138-079-P1-N1-D6
atggctacttttttaaccacattattgctatcatcacgcaggcctgcaagcatcccatcattcaactctggaaaccattcagtttttttgcttcaaaaccgttctttgaatcgacccaagaagagagtttccttcgttgttcaagcagccaagccccctattggtgtggaaattccaaaggtgcagcctcaatttaagcctccgtttcttgggttcactaagactgcagaagtatggaactctagagcttgcatgattggaatcattggagtttttattgtagagtttataataaacaagggcatacttcaagtgattggggttgatgttggcaaaggccttaatattcctctctgaacattatttttgg

SEQ ID NO: 34962 - DNA, 74 bp, Glycine max
  Clone ID: LIB3138-079-P1-N1-D7
ctcatttctaacattaaactacaagctcagaatgacgcacctattcgtcgtttggaatctgaacattttctgtt

SEQ ID NO: 34963 - DNA, 365 bp, Glycine max
  Clone ID: LIB3138-079-P1-N1-D8
ccagttgtttcaaagagtaatatgttgaagttaacacctgatacttatgttggagcagctgttgaattggccagaacagtggaaaatgtggtgaatactgtgattggaataaagatctaggaaacaaacaaatggttgaaacagtttgctcgagatattcattagttgatgatactattggcaaggcaattttgcatcctcgccaccatttaccaaatggctattagttgatatattaacttttaaataagatgttccattttgggaaaaagggagaaaagacatgattttccctgattataaaaccattttgatatagaatggtgttaaggattttgtaacatagtgtacgagtttaaagtgcc

SEQ ID NO: 34964 - DNA, 364 bp, Glycine max
  Clone ID: LIB3138-079-P1-N1-D9
ttttagtgtaagtgttgatttgcagcgcactcagcggattagaggaatgattaaaatggtggccacagttggtattcctgagaatacaggtatatcattggcctgtgctatgaatagttcttttagggggcgcgccagttctgatatttacaccatctgctctcaagactgtgaattgtggaatcctgcttgcacaaaagcaatgactatgtcatttaatccaaacccgtgttctgatgcatggagtttggaatttctgaagcgtactggatttcattgcgatatcatttgtgtcactggatggactgccaccccaatgcaggatgttcaggttacaattgattggtttatttcctctcaggaa

SEQ ID NO: 34965 - DNA, 368 bp, Glycine max
  Clone ID: LIB3138-079-P1-N1-E10
ctcccatttcaacccactccgtctattctccaccgcgcaccgtcaacaactctcaccatgtctgccccacgcgctacctctccctccaacacggcctcttcaggctcgacaaccgcgcgtcctgcgtcgccaaagcccccgggtggccctgcgactgttatgcgaaggaaggctgccgctgaccgcgccgagaagaccgcaaacctgcgtccaagcagcacaagggcggccggtgccggtggtagctcaagcactatgctgaggctatacactgatgagtctcccggtctgaaggtcgaccctgttgtggtcatgaccctgtccgttgtcttcatcttcagtgtcgtcgctctgcacgtcatcgccaa

SEQ ID NO: 34966 - DNA, 360 bp, Glycine max
  unsure at all n locations
  Clone ID: LIB3138-079-P1-N1-E11
ctgatagttacatccaggtcgtcacagcccgcgagagcgtggtggtgtttttgacaaatcccctcgangtggacttgcagccacgtagtataatggagatgtatcgagcgctgtgtagctgcatctcgtcttctaatttagaggtgcgtcagcttgtgcagcggctgctgttgagtggtcgactccccgaattctgcctagagctcatggatgcgtgggagcgtcagtctcattagaattccacaagagctgccattactgacgaccaaagaaatgttgatactacagtttgttgggtgcggcaggatcgcgaactttggtgagactgccggaaagcttgttcgaaccttacacattgtg

SEQ ID NO: 34967 - DNA, 366 bp, Glycine max
  Clone ID: LIB3138-079-P1-N1-E7
ctctttcatagcacactcctcccagggtttctccgccgggagggaaatggctcccaaaccgcctagtacgggtctgtttgttggactgaacaagggacatgtcgtcaccaagaaggaattgcccccacgcccctcggatcgtaaggggaaaacaagcaagagggtgcactttgtgaggaacctcataagagaggttgctggttttgcaccctatgaaaagcgtataactgagttgctgaaggttgggaaggataagagggcacttaaggttgcaaagagaaagcttggaacccacaaacgtgcaaagaagaagcgtgaggaaatgtccaatgttcttaggaagatgagggctggtggggctggaga

SEQ ID NO: 34968 - DNA, 365 bp, Glycine max
  Clone ID: LIB3138-079-P1-N1-E8
gcaagaatttaatgggcatgcggctgatggaacgcaggttgaaccagctctagagacacggcaagatagcaatgacaaagctgcaccatgtcattgagctgtaccataattacagagataaagagagaaaagagaggaaaagcttatcacacgaacacgataggcggtgaacttgacttgagtttgaagcaaatgtaaagcgcggcaacacgagatatcactatactgcaggggagaacaagggaaggaggtagaacttttggttctctctgagtgctttctttgctccattccttttttgttgtcttaaaatattaactgttacagcaagggaaacccattcttaattctaattttggcctttc

SEQ ID NO: 34969 - DNA, 86 bp, Glycine max
  unsure at all n locations
  Clone ID: LIB3138-079-P1-N1-F1
agaccgacctgataagcgctgtaaaattgacacgcaaggcaggaagatggaagcgctcacggggaanggactggagagaaagagag

SEQ ID NO: 34970 - DNA, 365 bp, Glycine max
  Clone ID: LIB3138-079-P1-N1-F10
gcaattgttgttaaaagccttagccttccctaggacgccaaacacaaagacatcatcatccatggctgcctccgtctccactgtcggagctgtcaacagagctcttttgaacctgaatggttctggagctggagcttcagctcccagttcagccttctttgggaccagcttgaagaaggttattgcctcaagggtccccaacagcaaggtttccggtggaagcttcaagattgttgctgtagaagagaagaaagagattgaagagacccagcagaccgacaaggacagatggaagggtcttgcctatgatatctcagacgaccaacaagacatcacaagaggaaagggtttggttgactcccttt

SEQ ID NO: 34971 - DNA, 363 bp, Glycine max
  unsure at all n locations
  Clone ID: LIB3138-079-P1-N1-F11
gagagttgttgcttggaagaaaggctgtttaatggcgaggattgtgatgtctgggaatgcancantcaaaaggagtgattgggcctcattggtacaagtgtttttaacaaacagcaacagtacagagcattttgatgcatgtaagtggacaaaatcagaaccacattcctgggaattgatcttcccaatagaggtatgtggtcctaataatggttttgaaatgtggagttctgagtgggcaaatcaaacttcatggcatttgagtttccttattgacaatcccaaacagtctacagtttttgatattctcttgggaatctcttaagattttgaaattgctggtaatactcttatgccagcttt

SEQ ID NO: 34972 - DNA, 360 bp, Glycine max
  Clone ID: LIB3138-079-P1-N1-F12
cacatacaaattgttggtttccatgttgctgggggcggaggaagactgggatatgcttcattgataccatatgttgagccagttgtgcaagctcaaagtgctgaagtttactttgacttcttccctgtggaggttgatagtcaagagggagttgctcacattggtgaactgaaatctggtgtctatgttccactgcctacaaaaactaatttggtggaaactcctaaggaatggcaactggatctaccttgtgacaaaattcctagtgtcttgactacaactgatgagagattggtaggcacaaaacatgagggatatgatcctttttttggtggaaatcaaaaatatgccactcccatg

SEQ ID NO: 34973 - DNA, 335 bp, Glycine max
  Clone ID: LIB3138-079-P1-N1-F3
gctattccctgctgatgcaattgcaagagctaaacacggtggttcattgacctcgggcggtttaagcgcttatagtgactcccgcggcctttcaagagtgaggaaagaagtggctgagttcatactcaagcgtgatggttatccaactgatccagaactcatatatctcactgatggtgccagcaagggggtgatgcagatattaaatactatcatcagaggtcaagacgatgggattttggttccagtcccacaatacccactctactcaacaacaattggtctgcttggtggtacccttggtccatactaccttgaaaagacagcaaattggg

SEQ ID NO: 34974 - DNA, 308 bp, Glycine max
  unsure at all n locations
  Clone ID: LIB3138-079-P1-N1-F4
gctagttttgattgtttgattaccaagcaagttatcaggaanatggcagaaatgataaacagtctttgtggtggtgatgaaaaattgatgcgtgaaaggacgcacctgctgttggcttgttgttcaaggatggcaacttgtaagaaagatgtttggagagttgaatgtggaatcccttctggatttccgctcacagttatttgcaatagcatttttaatgagatgctcattagatatagctatgaaaaattactgggccaggctaaagctgcggggatgtttttacaatccttcaaaaattttggttc

SEQ ID NO: 34975 - DNA, 366 bp, Glycine max
  Clone ID: LIB3138-079-P1-N1-F5
cggaatacttgtttcactgaaaagaaaagcaaggctgagggctgatggattcaacagttgcagaaatgtggtttgtaattttactgaaggtgccatgtattcattccctcaaatacgtttgccgccaagagctttagaggctgctaaacaggctgcaaaggttccagatgttttctactgcctcaaacttttggaagccactggcatatccactgttcctggttcaggatttggacagagagaaggggtcttccatttgaggactactattttaccagacgaggaagacatgcccgctattatggatagtttcaaaaagttcaatgatgaattcatggagcaatacgaagacaatagaggttattc

SEQ ID NO: 34976 - DNA, 90 bp, Glycine max
  Clone ID: LIB3138-079-P1-N1-F7
cgcaactctcctcttccgcttcacacacacctcaccgccctcctctcgctctcttcgattgaatgaaacacatgatgttccctctctctc

SEQ ID NO: 34977 - DNA, 364 bp, Glycine max
  Clone ID: LIB3138-079-P1-N1-F8
ctcgttcttttctagtactagtataataactagcagcagtgatacaaatgatagtgattccactataggagaaagttctaataatctcgatgaaagtcaaaaatataagcatttgtggcttgaatgcgaaaattgttatggattaaattataaaaaattttttaaatcaaaaatgaatatttgtgaatactgtggatatcatttgaaaatgggcagttcagatagaatcgaacttttgattgattcgggtacttggaatcctatggatgaagacatggtttctctggatcctattgaatttcattccgaagaggaaccttataaagatcgtattgattcttatcaaagaaaaacgggattaact

SEQ ID NO: 34978 - DNA, 362 bp, Glycine max
  Clone ID: LIB3138-079-P1-N1-F9
ggagagtttaatgtggaatcccttctggatttgcgcgcgacagttatttgcaatagcatttttaatgagatgctcattagatatagctatgaaaaattactgcgccaggctaaagctccaagtatgtttttacaatccttcaaaaattttgtttctttgtgtgtgtatggtgatgataacttaattagtgttcatgaatatgtcaagccttactttagtggttctaaattgaaaagctttctagctagtcataacatcaccattactgatggtattgacaaaactagtgcaactttgcaatttagaaagttagcagattgtgattttctcaagagaaactttaagcagatgtctaatgtttt

SEQ ID NO: 34979 - DNA, 363 bp, Glycine max
  Clone ID: LIB3138-079-P1-N1-G1
atcatattttatattaaatactgaaaatcaaccactcgttggtgataacctaatgttcaaaggactagaacggtcatttatgacactcatttctatggcagtttaccttgacaacagccttgatgatacaatatcaatactaaaacggtgaaaagatgaagaagatcttttggacatatatccacctacaaaaagattcattgacactttctctgagcatattaccaaagcaggattggtggccttgctcgagtctaatgaaaagaaaattttggaggtgcaacttaatgaaatgaagtcttctttaacagcacagataacagtggaggctgttacatctgaagtcattgagactgtgaagct

SEQ ID NO: 34980 - DNA, 366 bp, Glycine max
  Clone ID: LIB3138-079-P1-N1-G10
cacatgtgtatattctgtcttctagtgcaagggggcgcagaactgcaatggtgagtaaaaatagcaagcctcaagctactgcaatgcatgtgggagctatagaaattatcattgatagtttcgcaagtcctgattgcaacatagttggtgcaatgcttttggttgatacttatcataccaatcctgaaaatgcagttcgtagtatttttgttgcgcctttcagaggcggaaggcccattcgggtggttacatttccgaataccattgtgcagattgaaccagacatgaattcaaggtttcagcttttgagtaccactaccaatggtgattttgttcaagggaaagatctcgcaatggttaaagtta

SEQ ID NO: 34981 - DNA, 368 bp, Glycine max
  Clone ID: LIB3138-079-P1-N1-G11
gaaagctgtagccaaagcagccatcagagcacgggaggaagctgagaagaagcttaaggaccgtgagaagaaagcaaagaagaaatcaggcactgcagccgtggccaaccctgaggacgaaccgaaggatgaagttgtcgaggttacagagccagaaaagattaacgatgatgtccaagccccggctccagtgaaggaaaaggtccaaaaggagagtggcatcaggtccaggggccgagcaagaggcccggactcgattccaaaagctattattaagcggaagaagtctaacaattacctgatatgggctgcagctgccaccttgctagtcctcctgttggctgtgcttgggtacatctatctttttt

SEQ ID NO: 34982 - DNA, 361 bp, Glycine max
  Clone ID: LIB3138-079-P1-N1-G12
ctcaatgtttatatatatagaaggagatctcgggtcggaagtttctaagatgacttctccctacattaaatgtacagtctttttcttcatagcatttggaaatttggctcatgataccatcaattttgcggcttttccccacaagctggtgcactttgtatagattcaggaaaaagttgcattgaaattttcacaagaggaatttctcacaacttggtcaactcaggtgcctactgcaacaactctgttggctgatggctctccatatttgcatgcaatggtacatgataattcattatcttcaattccaggtgatactatcatctgtgtcaagttgacaaccatgaacaatatgcatgca

SEQ ID NO: 34983 - DNA, 370 bp, Glycine max
  unsure at all n locations
  Clone ID: LIB3138-079-P1-N1-G3
attcctcagtccatttcacagcaaactgtttggaatcgaaggggaacagtgagaacaccattgaattttgattctagcaagcagagcttttgtcagttttctattgaccttctcggtggaggaatcttagtggacanaactggagattggatcacacttatacaaaattctccaattagtaacttgttgagagttgctgcttggaagaaaggctgtttaatggtcaagattgtgatgtctgggaatgcagcagtcaaaaggagtgattgggcctcattggtacaagtgtttttaacaaacagcaacagtacagagcattttgatgcatgtaagtggacaaaatcagaaccacattcctgggaattgatct

SEQ ID NO: 34984 - DNA, 345 bp, Glycine max
  unsure at all n locations
  Clone ID: LIB3138-079-P1-N1-G4
gaagcccgttccattgaagcacgtgggcgggcctccggagcgcacgaagctgtaccggggcgtaaggcanaggcattgggggaagtgggtggcggagatcaggctcccgaagaaccgaaccaggctctggctcggaaccttcgacacggcggaggaagctgctttggcttacgacaaagccgcgtataggctccgaggcgacttcgcgaggctgaacttcccgagcctgaaaggctcgtgccccggggaggagtacaagcctgtgcatgccgcggtggacgctaagctcgacncgatttgcgccaacttggcggaaatgcagaagcaagggaagactgagaaagg

SEQ ID NO: 34985 - DNA, 361 bp, Glycine max
  Clone ID: LIB3138-079-P1-N1-G5
atttaacctatatgtttcagcatgccacaaatgacagtgcggataccatgaagcatctgactcatacaattcaaaattagaatgacaaaatgctcaagctgaatgagttgcaaaggtcacactaaagatgaacatgctggacttagaaatactattactgatatccatgaatacttgggatatttgcaacaaacactgcaaacattggattatactgtgcctgaatcgagtactaaacaggattatgcaaattatggattgtcatatgtcatcgactatgtacactgaaaaagccagaaaaagcctgaattggtgcacgagcaactgaaactatgaaggaagtcccctaatttgatcacat

SEQ ID NO: 34986 - DNA, 373 bp, Glycine max
  Clone ID: LIB3138-079-P1-N1-G6
ggttgaacatgttaaggccaaatcaagcacattggaaggtagtttattggcagcacaaaaggagattgaagcagccaaggttgccgagatgttggccagagatgcaatcacagcattggagaagagtgaatcagctaaaggcaacaaaaatgacaaggactcttcctcaatggtgacactcacactagaagaatatcatgagctcagcaggagagcctataaggcagaggagcaagccaatgcgaggatcgaagctgctacttctcagattcagatagcaagggagtctgaattaagaagcctggagaagttagaagaactgaatgaggagttgtctgtaagaagagaatctctgaaaattgcaactgggaat

SEQ ID NO: 34987 - DNA, 357 bp, Glycine max
  Clone ID: LIB3138-079-P1-N1-G7
ttcattatttactcctataccaaatgtcacaaccggggtttcttacatcttggtcaacacaggtccatcctccaacaactttaatggctgatgggtcatcatatttgtatgcaatgctacatcatagttcattgtctacaataccaggtgattttgacattgatgtcaaggtgacatccataaacaatatgtgtccatatgggctcaatcctgggatttcaggatctcactttttcagcaccattcctcagtccatttcacaacaaactgcatggaatcaaatgccaacattgagaacaccatagaattttgattctagcaagcagagcttttgtcagctttctattgaccttctcg

SEQ ID NO: 34988 - DNA, 365 bp, Glycine max
  unsure at all n locations
  Clone ID: LIB3138-079-P1-N1-G8
gtggatggtagctatgtgtttaataaaggaaagggtgagtaaggtgcctgcaaacgacatggangccttgaagtccccacttatggggctatttgaaaaacgccgggcacgcaagtttttcatttatgtgcaaaactacaacgagagcgatcccaagacccacgaggggatggacttgacaagagtgactactaaagagttgatagcaaaatacggccttgatgataacactatagacttcattggtcatgctttggcgcttcatagcgatgatcgctacttggctgagccagcactggacaccgtgaagagaatgaagttatatgcagagtctcttgcacgctttcaaggagggtcaccttaca

SEQ ID NO: 34989 - DNA, 364 bp, Glycine max
  Clone ID: LIB3138-079-P1-N1-G9
cgttatggtagtcgccggggctaagtctaagtgtggtgccgttgggattcaaggaatcgcttgggccttcggtggcatgatcttcgccctcgtttactgcaccgctggcatctcagggggacacataaacccggcggtgacatttgggctgtttttggcgaggaagttgtcgttgcccagggcgattttctacatcgtgatgcaatgcttgggtgctatttgtggcgctggcgtggtgaagggtttcgaggggaaaacaaaatacggtgcgttgaatggtggtgccaactttgttgcccctggttacaccaagggtgatggtcttggtgctgagattgttggcactttcatccttgtttacacc

SEQ ID NO: 34990 - DNA, 369 bp, Glycine max
  Clone ID: LIB3138-079-P1-N1-H1
ccaatacctagacagaccatctcgccgccacagcacactggagcgttgtgtcttcgcactccgccgtcgacgtcttccgccaccgtcacatctcgccggagcgtcgcgtttccgtcagggctaagtgccaagtgttgctgctgatattgtgacttgttgataaagatgagacttataacacataacatgctgtcatcgaacataaagggtgtggtgaatggatttcctttgcgcattgaagcagagaaagtgatggaaaagaccatggaaatgaacagtgagtttctggaaaagatgtttgagaaggttgattggaaggcttttgttgatgcatcgcgggcaatgggatatactgaactacctgaggag

SEQ ID NO: 34991 - DNA, 361 bp, Glycine max
  Clone ID: LIB3138-079-P1-N1-H10
gtgcttattatagcacagattgaagagttccaggcggggcagaggatgatgaatgctcctgattcaaatgataatattgatttactgttgagcattgatttgttgggtttacaaggagcaggtaaagcttttccaaacaaaattgtttttgatgataagcttgtgttggctaacacacaagaattctttgatggaaattttccagtggattcttggttaccaatttttgtgaattgtctttatcctgtaagtcaattaccttcagaagctgtcgttgtaaatgttacatgtggtagtggacgtggtggtttacccaccactgcttggattagttctgcagtttacaatcgctccttagata

SEQ ID NO: 34992 - DNA, 354 bp, Glycine max
  Clone ID: LIB3138-079-P1-N1-H11
aaaaagggggagtttcttattgcgcgggacgcttccattgatcggcgatttctgatacatggcggagcatcacgaacacgaggaagtgaagggtgagtccttgttggagaagatttctgggaagatccacgaccacgattcctcgtcttcgtcggattccgacaacgacaaaaccagcgccactgattccttcaagtctaatgttttcaggcttttcggcagagaaaagcccattcatcatgttcttggcggtggaaaaccggctgatgtttttctatggagaaacaagaagatatccgcatcgacactcggagttgcgaccgctatatgggttctgtttgaattgcttgagta

SEQ ID NO: 34993 - DNA, 357 bp, Glycine max
  Clone ID: LIB3138-079-P1-N1-H12
cttctctttatatggagggaggtaatcgcacattgcggattccatctagcgagttattcagattctctcacagggttccatcttttaaaatgactggtcaggaaagagctggtgttcctgtaggatcttatgaacttgatccggtatccttgccaatgaatcttgaagagattgctgttcctgaacatttggaagtaaaggatggtcattgtccatctagtggggtgggcacaagatcttcagatatgtggaaattcacgatgaactcggagggagatgcttctactgcaaaggttaagttgcaaagaaacaattcagcaaaggagaacaaggatcctgttaatcatattggttggt

SEQ ID NO: 34994 - DNA, 372 bp, Glycine max
  Clone ID: LIB3138-079-P1-N1-H3
cttcgcgatcgaaagcaaagaaccctagaccgtcacagaacgattccatagccatgtctggtgttggccctctttctcaggattgggaacctgtcgtcctccgcaagaaggctcccaccgccgccgccaagaaggacgagaaagccgtcaacgccgcccgccgctctggcgccgaaatcgaaaccctaaaaaagtataatgctgggacaaacaaagcagcatctagcggcacttcattgaacactaagaggctggatgatgatactgagagtctagctcatgagaaggtgccaactgaacttaagaaggctataatgcaagctaggatggacaaaaagcttactcagtctcagcttgctcaactgatcaatg

SEQ ID NO: 34995 - DNA, 203 bp, Glycine max
  unsure at all n locations
  Clone ID: LIB3138-079-P1-N1-H5
ttttagntttttctaggcagtagtcaccagtcaggtgaccgaccataatattaggaattacgtctaattaggcattgattgtttgtaaggttgtatcgtatcccattttcctagcgttgttgattttatttaatgtaatacaaatagtttaagttaactggaggaagagcggtttaattatgaagattatttaaagtttgggc

SEQ ID NO: 34996 - DNA, 368 bp, Glycine max
  Clone ID: LIB3138-079-P1-N1-H8
gtcttgcccttctctcttcaactccaaacacaaggcagcatcatccatggctgcctccgtctccactgtcggagctgtcaacagagctcttttgaacctgaatgggtctggacctggggtttcagctcccagttcatccttctttgggagcagcttgaagaaggttattggctcaagggtccccaacacaaagatttcctctggaagcttcaagattgttgctgtagaagagaagaaagagattgaagagacccagcagaccgacaaggacagatggaagggtcttgcctatgatatctcagacgaccaacaggacatcacaagaggaaagggtttggttgactcccttttccaagctccacaagatg

SEQ ID NO: 34997 - DNA, 357 bp, Glycine max
  Clone ID: LIB3138-079-P1-N1-H9
cgaagtgtttagagaatgcctctttctatagggggaggagctggtgcaaagaatgctattctcatgaatatgccaaatgctgttctttcaatgtggagatattttgttggagatctcgtctttgaagtttctaagatgacttctccctacattaaatgtacagtctctttcttcatagcatttggaaatttggctgatgataccatcaattttgaggcttttccccacaagctggtgcagtttggagagattcaagaaaaagttgtattgaaattttcacaagaggaatttcttacagcttggtcaactcaggtgcgtcctgcaacaactctgttggctgatgggtgtccatatttg

SEQ ID NO: 34998 - DNA, 362 bp, Glycine max
  Clone ID: LIB3138-080-P1-N1-A10
cacaaattcacaatggaccccctctctctctgctcgaccggagccctcctcgccggcggcctctactggttcgtgtgcgttctgggccccgccgagcagaagggcaaacgcgccaccgatctttccggcggctccatctccgccgagaaagtccaagacaactacaaacagtactggtccttcttccgccgcccaaaggagatcgagaccgccgacaaagtccccgacttcgtcgacaccttctacaatctagtcacagacatctacgagtgggggtggggccagtccttccacttcttcccctccattcccggcaagtcccaccgcgacgccacgcgccttcacgaggagatggccgtcga

SEQ ID NO: 34999 - DNA, 359 bp, Glycine max
  Clone ID: LIB3138-080-P1-N1-A11
ctcccttctcttcacacattttcttagctctgtccggcaatccctctcgttcacactttcaggtctctctctctctctctcattatctctttattttaatgtattttattctcgattaaatatgaatgctatgcttctcttctcaccgcttcaatcgcaccttcttattttccaatttccctattctcgttcgatctaaccttttccgctcttcgtgcttcgaatgactgagtaaatctacgattctctgttcattcatttcatagatttcgcgtgattttggctattttttatttgcggccattccttacatgtagtggttgattttcaaacttttctcctcgatataactcttgtgc

SEQ ID NO: 35000 - DNA, 355 bp, Glycine max
  Clone ID: LIB3138-080-P1-N1-A12
ctcattttccaattcccacacccactcgttcgtcggcccactaagctagcagaatttcatcgagaaattttgtatttttttggcatattatcctgctgaaaatatattagatggctattgcaccttttggtaatacatcagctactcaatgggggattcatcctcagattttcgcagggtcaactgggttgggaaagattgcatcatccaggaacaatgctacaagcaggataaggtttatggctgccccatgttcgagctttttttctcgagattccttgcatgcactatttgacaaaggttcatcacaaactttgcatcgtcgcaagggatcgaggttgatagttagagcaga

SEQ ID NO: 35001 - DNA, 368 bp, Glycine max
  Clone ID: LIB3138-080-P1-N1-A4
ctgaaacttgtgtgcgattccttcactcacaacagcgacggacatcactatggctcttctgagtcgagcctcttcacgcttccctcagctggtttcccctcaaagggtagtttcactccacacaacgctcccatctctgaacgcatccccatccacagccacgcctacaccatatgccccgccaccgcctccgtccgcttcctctcccgccggcgtttcgaaggcggcggagttcgtgatctcgaaggtggacgatctgatgaactgggcccgccgcggctccatctggcccatgaccttcggcctcgcctgctgcgccgtcgaaatgatgcacaccggcgccgcccgctacgatctcgaccgcttcg

SEQ ID NO: 35002 - DNA, 362 bp, Glycine max
  Clone ID: LIB3138-080-P1-N1-A5
catggcactgctaatttccttctagttgaagccttgtctgtaaagaaaaagcatgtgcaataacccttgcaacaattatggacaactatcaaagtgatttaagtgacataattcgtgctagtggtgcatcgtatggcacttgcagcacgggaactccatcatctgaagctgctaatcccttctctcgtggtcacttgcaattctcttctgatcccatgattttctcttgtgttttggaagggttcaatagcaacttcggtgatcctttctcaaacatgagagatccctttctacacgagcttgatttgcctccttctgcctactttaacatcacaacaagttcatctgcagaaatgagcagt

SEQ ID NO: 35003 - DNA, 312 bp, Glycine max
  Clone ID: LIB3138-080-P1-N1-A6
aaaagcttatgtgcctaccatagcacaaattgaaggggtggattccatgcaaaggatgatgaatgctcctgattcaaatgataatattgatttactggtgagcattgatttggtgggtttaccaggagcaagtaaagcttttccaaacaaaattggttttgatgataagcttggggtggctaacacacaagaattctttggtgggaattttccagtggattcttggttaccaatttttggggattgtctttatcctgtaaggcaattaccttcaagagctgtccgtgtaatgttacatgtggtagtggacgt

SEQ ID NO: 35004 - DNA, 320 bp, Glycine max
  Clone ID: LIB3138-080-P1-N1-A7
gctggttatagatactgtacactgagacaggagcggggtcttgttgcgctggactcgtacaactgtctttaacagatatatcttactcgaaggtcaaataatgcgcattcttaagagcgtagacccgttcgatgatggcggaaggtggttgtcaataggctactatagttctgaacacattttaaaaacttcgcagaatacttgtatccatggaagtatatggagtgcaagctcttgtatgaatctacccaaacgttctactcgcacaaaggttgatagatagaacagcggataacgcgtaataatgaattcgtccgttg

SEQ ID NO: 35005 - DNA, 366 bp, Glycine max
  Clone ID: LIB3138-080-P1-N1-A8
gagcgtttccccaaataccaatccaatcctggcccggctcacaaagccatgtctccaggtcccgttgtcgacgcttcccctgaggttgatgcagagcaacaacttccctccgtcgatgacgccactcagaagaagataccccaaccacaggaggacgatgctccccttgtcgaggacttgaaggatgatgacaaagacgacgacgatgaagacgacgacgacgacgacgaagatgacaaggaagacgatgctcaaggtcctcttctctttcactgtgttttcctcttagcctaataaaatccttatttggtcctttttttatgtttttgttagtaaaccctatggttctaatcgattatttggttt

SEQ ID NO: 35006 - DNA, 361 bp, Glycine max
  Clone ID: LIB3138-080-P1-N1-A9
cacaaatttcagcaccgccaggattctctgggccggacagggcaccacctcctgggttctcttcagttgagagaatggggcaggcttttgactccctctctgggaattcattgctggacccttctttcttactgagaaattcttatcaaacaccctcaaatggaaatattggtggtccaggtgacgttgaatttatggatcctgctattttggcagttagtaaaggccctgaacagtttaactactttgaaaatgaggccagagttcaattattgatgcaaagatctccctcaccacagcaagaccttcgattttctgaaattgggaattccttttctcagtttggtgattcttatggcat

SEQ ID NO: 35007 - DNA, 362 bp, Glycine max
  Clone ID: LIB3138-080-P1-N1-B1
ccaggatttgaggtgctggagaaagaagggataaagtgtagggtatgggggcgtggtgaccgaaggcaccaaaggaggaaactattggctacagaaagtcgtttctttagccgggtttctttcaaaaaatggtgcagagtctctgtttgatggcttctcatggttaccctcctggccttgtcttgcacccacaagtactgggcttgccctgcgctaccatgaagggctaccaaacattctttccttctccagtagcaaaagcagacctgatcagatatcagtctcgttgtcttgagccaagtccatgtgaggagtcaatgaaatctcaaaatgaatggtttgattataacaaagttgtcaat

SEQ ID NO: 35008 - DNA, 362 bp, Glycine max
  Clone ID: LIB3138-080-P1-N1-B10
atttaccttctattgctgaaaatggtgaatggcgggatcccagactagacattccagcacctgattacatgcaatccatcacaaggatggtggggtttctgtaagttcaactacatcaaaacttgccaatcccaatactcgattaccaggaacaagttcagcaaattccagtgcttcttcagctgcacttggtcaaaagaaattgtatgcagaatcccagacaggaaagtccacttttcaaaagcttttggagccaatgcttcctcaacttcctggaattgctccttatagaattgtcctggggaatgttaaggataagcttgagaaaagtcgtagacggttagaaattcttcttgaggatg

SEQ ID NO: 35009 - DNA, 361 bp, Glycine max
  Clone ID: LIB3138-080-P1-N1-B11
cggctctagctcgagccgaatcggctcgagtgcagctacaaaggttgctgtaggagataagatattgaagtagtgctaagtgcctaacacctgcagtgaacaatggcctctgcatcagcatctcttctcaagtcttcacttgttcttgacaagtctgagtgggtgaagggacaaacacttcgccaaccttctgctgcatcagttgtgagatgcaaccccaccaccccatcaggcctcaccatcagagctggttcctatgctgatgagctcgttaagaccgcgaaaacagtggcttcaccagggaggggtattttggccatggatgagtccaatgctacctgtgggaagcgtttggcttcaa

SEQ ID NO: 35010 - DNA, 358 bp, Glycine max
  unsure at all n locations
  Clone ID: LIB3138-080-P1-N1-B12
aaaacatctttcaaactctgagaaagaatggcgggcaacacattgatgagtactgctatctcanccttcccatctctcctttcttcctcaaaatccagatttgccaccgcagttcctctttctagctttggtgtcaccaatgcctcttcttctcgcttttctatgagtgctgactggatgccaggccagcctagacctccttaccttgatggttcagcacctggtgactttggattcgaccctcttcgtcttggtgaagtaccagagaatcttgagaggttcaaagagtcagaactcattcactgcagatgggccatgcttgctgttccagggattttggttccagaggcattgggct

SEQ ID NO: 35011 - DNA, 283 bp, Glycine max
  Clone ID: LIB3138-080-P1-N1-B2
ataagatattatgattatgttgtcatatgacacagggtggaatctactcgcaggcaatgaatgaacaacaccaattctgaaacttcttctacgacgtcttcttcttgtgtacctctcgggtactattactactgctgaacatggaactgttgtctttgagactcaccactgcacatacgcgttcgacttcatcgctgcctgcagcacttgctcactgatccaagctatgcgaatttcagccgaggtagaagaagaaggcgtgcttcgacgcgcctaagcttgc

SEQ ID NO: 35012 - DNA, 352 bp, Glycine max
  Clone ID: LIB3138-080-P1-N1-B3
tgataatatcttctcattattcctttgatctctctgccagtcttcgatcatgggcctctgtttctcctccaccaaggtcagcggctccagcagcaacaacaacaacaacaacaacgcctcatccaaccgtaaccgcaaatgttcggccgcgccggcggctgcagcgccgccggagccggtgacgccgcagaagaaacaaccgtcgcaggctcaacggcggcgagtgccagaggagtcgcggaagaacccacgcgccaaagacaaagcgggtgcgcgtcggcaagggacacgtgttccgtgcggaaagcgaacggatttcgggtacgagaaagacttcgagaatagattctcg

SEQ ID NO: 35013 - DNA, 363 bp, Glycine max
  Clone ID: LIB3138-080-P1-N1-B5
gttccctacaagctggtgccatttggagagattcaggggggaggtggtttggaattttcacaagaagaatttcttacagcttggtcaactcaagtgcgtcctgcaacaactctggtggctgatgggtgtccatatttgtatgcaatggggcatgatagttcagtgtctacaataccaggtgattttgtcattggtgtcaagttgacaaccataaacaatatgtgtgcatatgggctcaatcctggtatttcaagttctcgtcttttgggcaccattcctcagtccatttcacagcaaactgtttggaatcaaatggcaacagtgagaacaccattgaattttgattctagcaagcagagcttt

SEQ ID NO: 35014 - DNA, 360 bp, Glycine max
  Clone ID: LIB3138-080-P1-N1-B7
tgcaattgaagttgaagtcttgcccttctctgtcggctccaaacacaagacatcatcatccatggctgcctccgtctccactgtcggagctgtcaacagagctcttttgaacctgaatgggtctggacctggggtttcagctcccagttcatccttctttgggagcagcttgaagaaggttattggctcaagggtccccaacacaaagatttcctctggaagcttcaagattgttgctgtagaagagaagaaagagattgaagagacccagcagaccgacaaggacagatggaagggtcttgcctatgatatctcagacgaccaacaggacatcatcaagaggaaagggtttggttgact

SEQ ID NO: 35015 - DNA, 364 bp, Glycine max
  Clone ID: LIB3138-080-P1-N1-B8
ctctctttctctctctagaattctcagattggcggggcgagatgatgcagcagccaggacccggcatggcacctcccaccatgggccagcagccgccgcaacagtaccagcagcctccgccgcagcagcagcaaccctacgtcatgatgccgccgcaggcccaggccccgcaggccatgtgggccccctccgcccagcctccgcctcagcagcagcccgccagcgccgacgaggtccgaaccctctggatcggggatctgcagtactggatggacgagaactatctctatacctgctttgctcacaccggcgaggttacatcggttaaagtaattcgaaacaagcaaactagtcaatctgaagg

SEQ ID NO: 35016 - DNA, 361 bp, Glycine max
  Clone ID: LIB3138-080-P1-N1-B9
tgtcaatctcgtaaatgtgttacgagaatgggatgtgcacagtccagaggaagctcgccaattgagaaggaaagctctctctcgtattgaatggctgcaaaaagctgatgtgcctaccatagcacagattgaagagttccattcgatgcagaggatgatgaatgctcctgattcaaatgataatattgatttactgttgagcattgatttgttgggtttacaaggagcaggtaaagcttttccaaacaaaattgtttttgatgataagcttgtgttggctaacacacaagaattctttgatggaaattttccagtggattcttggttaccaatttttgtgaattgtctttatcctgtaagt

SEQ ID NO: 35017 - DNA, 361 bp, Glycine max
  Clone ID: LIB3138-080-P1-N1-C1
gcaagagagagaaactaagacagaaagagagagagagagtggttgaaagcgtccattgaaggtatagagagagaggttttgtgaattggtgctgcttcgtgtctgtttatttcctcgcgaggtttgaattccggaacagtgaagagaaacggaggttccgatcctgcgatgtgatatatgagagatctgtgaggaaattgaactggaaaaaaaaaatggcgacgtcggaggtatccatcaagggaaattcggtgaacggaaaaggagataatagttctggtggctacaccaacgatgttaggaacggttctggtggaggcgaggctcggaattcttcttcttcgtcttcatccgcgagaga

SEQ ID NO: 35018 - DNA, 94 bp, Glycine max
  Clone ID: LIB3138-080-P1-N1-C12
aagtgtatcacgccttactcaagtacgcgggatcggaaatggtctctagctggatataacattaccatcactcctgctattgacacaactacca

SEQ ID NO: 35019 - DNA, 363 bp, Glycine max
  Clone ID: LIB3138-080-P1-N1-C2
ctcgagctccatatggcaacagtgagaacaccatggaatgttgattctagcaagcagagcttttgtcagttttctattgaccttctcggtggaggaatcttagtggacaaaactggagattggatcacacttatacaaaattctccaattagtaacttgttgagagttgctgcttggaagaaaggctgtttaatggtcaagattgtgatgtctgggaatgcagcagtcaaaaggagtgattgggcctcattggtacaagtgtttttaacaaacagcaacagtacagagcattttgatgcatgtaagtggacaaaatcagaaccacattcctgggaattgatctttccaatagaggtatgtggt

SEQ ID NO: 35020 - DNA, 364 bp, Glycine max
  Clone ID: LIB3138-080-P1-N1-C3
aggctactctttccaagtgaagagagtgtgtggatgatagtgttgataacggttagggaagcttcttcttgttcttcttctcccctcagcttctggcttaatcgtttcaacgcaaaaccctccaaaacactcaaaacaacatccatttgccaagctagtttctctgtccaaagaagacccactcattcatggaatactcgccatctctctaccagcagtgagctagcaaattttgatcccttgggttaactcaaatttatcttctggtctgaattctacctggaaaaatctggtgtgctcaattacacaaacatttgagagtacttcaagtgcagaaaagggaaaacctaactcttctaagggg

SEQ ID NO: 35021 - DNA, 360 bp, Glycine max
  Clone ID: LIB3138-080-P1-N1-C5
attctcttgtggctgctgctggtattattgctcaggaagtggcaggtgatgtccgtatgactgatacccgtgcagatgaagctgagcgtggtattacaatcaagtctacgggtatctcactctactatgaaatgactgatgaagctctcaagagttttaagggagagcgcaatgggaatgagtatcttattaatctcattgactcccctgggcacgttgacttctcttctgaggttactgctgcacttcgtattaccgatggagctcttgttgtggttgattgtgtggaaagagtttgtgtccaaaccgaaactgttctacgacaagcccttggagaaaggattaggcctgttctgactg

SEQ ID NO: 35022 - DNA, 364 bp, Glycine max
  Clone ID: LIB3138-080-P1-N1-C6
ctcgagtcgtatcggctcgagataaaccctactgggacggcccccctttgctctcaaaccttatcacctaatccttatcctcccaaaccagaaaaccatgtctacctccgcagcttccctcgcactcccaaccctcactctccgaacccgacaacctctatgttctccccaatgcttctcctcgtccctctccctcacacccaacaacaaacccatttccatttctgctgtttttctcaaaccaacaactctgtcgtcgtctcgcttcgttccccacgtcgtggtgtcgtcggatttggggcaggaggaggacaccttcagtgacggagacggccccagcttctcccccgaccttaagctcttt

SEQ ID NO: 35023 - DNA, 359 bp, Glycine max
  Clone ID: LIB3138-080-P1-N1-C7
tgcgtctatatcaatggaatcatggaaaatgagaggccaaagctgctgaggccttcgaaacgttaatgttgttgggtaaaggctgtttccaaggtttgaatctatggcccgagagtgcaaaacagcaaactttctgttgccccaaggctcgctcaccttcaaattgatgatcttagtattgacagatagctaatgctttctgcatgatgggctctctgaaattcttcgagctaactaaatttgctaaaagcattcttggatagttgccttaattgcagttacccctagcctgccttaagtgcagtatctttgggctgcctaatttcagtatcgagaggttgtgtttagttccacatcaa

SEQ ID NO: 35024 - DNA, 359 bp, Glycine max
  Clone ID: LIB3138-080-P1-N1-C8
gtcaaaagtttttaaattttgtgaggttcatgatggggaaaagggacaaacttagttgtcaagttggaatcaacccatactccatggaatggactggtttggccaatagattactgagtaagggcaatgatattctgtgttgcgattatgctagttttgatggtttgattaccaagcaagttatgagcaagatggcagaaatgataaacagtctttgtggtggtgatgaaaaattgatgcgtgaaaggacgcacctgctgttggcttgttgttcaaggatggcaatttgtaagaaagatgtttggagagttgaatgtggaatcccttctggatttccgctcacagttatttgcaatagc

SEQ ID NO: 35025 - DNA, 359 bp, Glycine max
  Clone ID: LIB3138-080-P1-N1-C9
gcttcttctatttctctagaatgttttaatgtctgagtactctaggtttccagtttgctgacctgaaattcctgttttctcttggcagaacttgatcagttacttgaagatgcacctttgccattcataatgcagcatgctgccaagatttctagtgttaggaaaagagtttcatcactgaattcacttctaaaatccatacaagggcggattgataatatagatcgtatgctgtcttttggcaccactcatggtatagagaaaaacaaccactgaaggttctgggtgaaatgtcatcagcttaatcagcctccattctttccaaatgtactatgcaatgcccccttaaccccttaaat

SEQ ID NO: 35026 - DNA, 360 bp, Glycine max
  unsure at all n locations
  Clone ID: LIB3138-080-P1-N1-D1
gcttcagcgtggcgctggagcgattgcctacttcgcagagacctgcgaggttgaaggagttgggggatttgattgagaccaggatcgggaattctgggtgtggaggggttttcgttgacttgggtgacttgaagtggctggtggagcagcctgtggggtttgggattggcggtggtttgggtaacatgcagcaactgaccctcgccgaggctggcagggcggcggtggctgagatggggaggttggtcagcaagttcngcgagggtggcgctggaaggctttggttgttaggtactgctacttgtgagacttatttgaggtgtcaggtttatcatcctaccatggaaaatgattgggatc

SEQ ID NO: 35027 - DNA, 358 bp, Glycine max
  Clone ID: LIB3138-080-P1-N1-D10
atctgttcatcaagaggaacagtttgattggaggggattactttaagagtcgtctgaccaaaatgaaatctgtgttggtagatctcctagttggggccggcatcaagccaacatctatagtgagttacaaccattttggcaacaatgatggcatgaatctctcagcccctcaaaccttccgctctaaggaaatcttcaagagcaatgttgttgacgatatggtcaacagcaacgccatcctctatgagcccggtgaacatccagaccatgtggttgtcattaagtacgtgccttatgtaggggacagcaagagggccatggatgagtacacttctgagatattcatgggtggaaagaa

SEQ ID NO: 35028 - DNA, 273 bp, Glycine max
  Clone ID: LIB3138-080-P1-N1-D11
ataacttttaaaatcataaccgttttccagagcggagccacatagacctaccacaggctttcataccaagaacttaccatctatatacatcaagggagattcttactacagaatggattgatagacataatctcatacagagcacacatagtgactatcccaaactggctaaagtttgagatattctctttctaaaacctctactatatgctagtttttgtcatacttatacacccccttttaattttatacacacttctgacagaaaatttg

SEQ ID NO: 35029 - DNA, 357 bp, Glycine max
  Clone ID: LIB3138-080-P1-N1-D12
ttgccatggcagaacttcgtactatggttcgttcgctcttcttagaatcatgtgcatctgtagagcttgcttcacgcctactttttgttgtcttaactgtctgcgtcagtcatgaagctcaattcagtggaagcaagagaccaagaggtgaagataactattcagctgaggatattattgaggacttgcaaacatctgaaaaccagaaagtatcaaaaaataggaaattgaagaagcaaggtcctgtagcagcatttgattcttatgttctggctgctgtttgtgctcttgcctgtgagcttcagttgttccctttgatttcatgtgggaataatcgtttagcttccaataatgtgc

SEQ ID NO: 35030 - DNA, 358 bp, Glycine max
  Clone ID: LIB3138-080-P1-N1-D2
aatgtttttgtcaatggtttcttttttctttttccgttgtcttttggtgtttttgtgttcttgatgattttcatgccttaggagagatatgaaaagaaatggtcgatgtggtgcctgtagtttggaattggacttgtgggttgaattgggatttgcatgctgaatgaggtgtcatgagaattgagccttttcttgtttgcatgtcgctgtaaactattagtttggtgtttggtaagttctaagataaacatcttggtgggtttatctaatcttttttatctcttgcttcaaaattaggaaataagttggtttctctgcaccgccatagttgttgttctgtgaaaagttaccttccttt

SEQ ID NO: 35031 - DNA, 363 bp, Glycine max
  Clone ID: LIB3138-080-P1-N1-D3
tagatatatgtcgccctgcccccacaacatgagaggttgggtatagaattagaacctgtgaccttcaagttacaagtaaccttactgattctcataggctaaggtctagggatcacttcctttcacatatgatcagttttcattcttactttctgaaaaaaatttggcttctgatcaatgtcacatttggatttttgcagtaaaatgatccagttgtttgcctgacggagcctgcacaataaagggaatgcaaagttacagaccccaatgacatgattattactgaaaacagattggcattgttaaccatgttggcaggtttaaacccattatggttcatgtctccataaattgaatatttca

SEQ ID NO: 35032 - DNA, 361 bp, Glycine max
  Clone ID: LIB3138-080-P1-N1-D5
ggtacaacttcattatgtttcgtgtaataatctggagaggcaagaagcttatcttgtcaatctcgtaaatgtgttacgagaattgtatttgcacagtccagaagaagctcgccaattgagaaagaaagctctctctcgtattgaatggctgcaaaaagctgatgtgcctaccatagcacagattgaagagttccattcgatgcagaggatgatgaatgctcctgattcaaatgataatattgatttactgttgagcattgatttgttgggtttacaaggagcaggtaaagcttttccaaacaaaattgtttttgatgataagcttgtgttggctaacacacaagaattctttgatggaaat

SEQ ID NO: 35033 - DNA, 359 bp, Glycine max
  Clone ID: LIB3138-080-P1-N1-D7
gtatcattcaaaaggagtgattgggcctcagggcgacaagtgtttttaacaaacagcaacagtacagagcattttgatgcatgtaagtggacaaaatcagaaccacattcctgggaattgatcttcccaatagaggtatgtggtcctaataatggttttgaaatgtggagttctgagtgggcaaatcaaacttcatggcatttgagtttccttattgacaatcccaaacagtctacagtttttgatattctcttgggaatctctcaagattttgaaattgctggtaatactcttatgccagctttttctgttccacaggctactgccagatcttctgaaaatgcggaatcctctgcatg

SEQ ID NO: 35034 - DNA, 359 bp, Glycine max
  Clone ID: LIB3138-080-P1-N1-D8
ctcgatccgtcaattttgaggcttttccccggaggctggtgcagtttggagagattcaggaaaaagttgtattgaaattttcacaagaggaatttcttacagcttggtcaactcaggtgcgtcctgcaacaactctgttggctgatgggtgtccatatttgtatgcaatggtgcatgatagttcagtgtctacaataccaggtgattttgtcattggtgtcaagttgacaaccataaacaatatgtgtgcatatgggctcaatcctggtatttcaggttctcgtcttttgggcaccattcctcagtccatttcacagcaaactgtttggaatcaaatggcaacagtgagaacaccattg

SEQ ID NO: 35035 - DNA, 356 bp, Glycine max
  Clone ID: LIB3138-080-P1-N1-D9
ttggctttggacgaatttgtagagtgtgtggccgggtctaagttgatgtgattgataatcaatttttttgggttacatctgaagctctcattagtagaaagttgctaagcctttcagggtgctcaagatatgtatgtggctttgctccaattatacaagtttgtgcatgacgaatgattaactaaattcttttgccatattgatatcctttattaagtgcacgtgtgccggatagaagttaatggatactggatcacttgttcattctgccccgatttcctccatctcactctttgtagtatttctgtgtggctgtacctgtggtgattcataaaaataatgattctgacaaatgt

SEQ ID NO: 35036 - DNA, 341 bp, Glycine max
  Clone ID: LIB3138-080-P1-N1-E10
tagagttatatgttggtatgggtgcttcccggggggagatctctttgcaagggcaaagaaagaaacaccatccataatatttattgatgagatagatgctgtggctaaaagtcgtgatggtaaatttcgcattgtcagcaatgatgaacgggaacaaaccttgaaccagctgctcactgagatggatggttttgacagcagttctgctgtcattgttcttggagcaactaatcgtgcagatgtcttagaccctgcactccgaagaccagggagatttgatcgagttgttatggtggaaacacctgataggattggaagagaagctatccttaaagttcatg

SEQ ID NO: 35037 - DNA, 361 bp, Glycine max
  unsure at all n locations
  Clone ID: LIB3138-080-P1-N1-E11
accgatcactcttcttcaatcaagcgaagggggtgtcgattgcaagtgatccacgatacactctacgcttcacaaaaccttcaaacccaattccacagaattcttctgcttcaccatgccaccaaagcctttagactatgggtcaataaatgaaaacgtgaagaagagtcaatatgctgtcagaggtgaattataccttcgagcttctgaacttcagaaagagggcaaaaagattatctttactaatgttggcaacccgcatgcattgngacagaaaccactgagcttccctcgccaggttgttgctttgtgccaagctccattcctacttgatgatcctaatgttggactgctattccct

SEQ ID NO: 35038 - DNA, 363 bp, Glycine max
  Clone ID: LIB3138-080-P1-N1-E12
attcatgaaaaagttgtattgaaattttcacgaggaggaatttcttacagcttggtcaactcaggtgcgtcctgcaacaactctgttggctgatgggtgtccatatttgtatgcaatggtgcatgatagttcagtgtctacaataccaggtgattttgtcattggtgtcaagttgacaaccataaacaatatgtgtgcatatgggctcaatcctggtatttcaggttctcgtcttttgggcaccattcctcagtccatttcacagcaaactgtttggaatcaaatggcaacagtgagaacaccattgaattttgattctagcaagcagagcttttgtcagttttctattgaccttctcggtgg

SEQ ID NO: 35039 - DNA, 300 bp, Glycine max
  Clone ID: LIB3138-080-P1-N1-E2
ggctcctttagaggccgcttcggcttgcacacagggtacgcggcagatcttcttaacctgcttattccggtccatgatctcgaaataaggcaacctttgccaggtacaattcgcatagtgcaaaaaggaagaggtatctcacgccatcgatgagggacctgcacacattgacatgcaagaccatcttctgaagactgccacatgacgaggtaagtgatggttgttgaatagaacgatgggaacggaagcagggaatgggttatcgacgtcgtgatagctttggtacccactaattaattc

SEQ ID NO: 35040 - DNA, 360 bp, Glycine max
  Clone ID: LIB3138-080-P1-N1-E3
agagcattttgatgcatgtaagtggacaaaatcagaacggcatacctgggaatggatcttgccaatatacggatggggaactaataatggatgcgaaatgtggagatctgagagggcaaatcaaacttcatggcatttgagtttccttattgacaatcccaaacagtctacagtttttgatattctcttgggaatctctcaagattttgaaattgctggtaatactcttatgccagctttttctgttccacaggctactgccagatcttctgaaaatgcggaatcctctgcatgatctggaatttgtgttttctttcgcttgttcgtttgtttaattcaataaaggaaattaggcatgac

SEQ ID NO: 35041 - DNA, 120 bp, Glycine max
  Clone ID: LIB3138-080-P1-N1-E5
ctcccgtttcgtatgacgatgactattcctataggggggggatcttggacagaaaatgctactctgatgaataagccaaatgctgatcggtcaatgtggacatatcaagagcgcaatctg

SEQ ID NO: 35042 - DNA, 341 bp, Glycine max
  Clone ID: LIB3138-080-P1-N1-E6
gcttgatcagggtggtgctagtcaaggaactgtaggggaggagttttcaagaggtcaagcacctccaagcatgcctcctacatctactggcttgctgccacaaagttctgcttccccttctgtaatgacccaactagaccccagtgtctcgatcccatcaaatgcttctggaattggtgcaaggacatctcttaaaaagcctgctgctgcccaaaagaaaccacatgaagcacttggttcctcacctcctcctgcaaataaaaaacaaaaaacttctgggggatctgtagaacaaagcattgaacaacttaatgatgtcactgctgttagtggagttgacc

SEQ ID NO: 35043 - DNA, 357 bp, Glycine max
  Clone ID: LIB3138-080-P1-N1-E7
ctctattcaaattatgctattggaaaggatggccgcgcaatgaaagcagtggttggagaagaagcactttcatctgaggacctgctgtatctggaatttttggagaagtttgagaggaagtttgttgcccagggagcctatgacacccgcaatatattccagtcacttgatcttgcatggactttactccggattttccctcgtgaacttcttcatcgtataccagccaagactcttgaccagttttacagcagagatgctggtaattgatgattaagcaagcaagttcatataccttggtctcctgctcaaccaatgcctactgtcatcagcaatttatttgtttctttgctttct

SEQ ID NO: 35044 - DNA, 262 bp, Glycine max
  Clone ID: LIB3138-080-P1-N1-E8
ctgggttgaaaggaattgtaacattatctcgttaaatcatctacagatttggcaacaaaatcatacaattcctttcaacccagccacataatttaattcaacctggcctgcatggatgcgaagtacaaaaatagacctgagtagcaatggaatcaagctcatcaaagaagaggacacgtggagctgattgtttggctgggttgaaaggaattgtatgattttgttgccaaatctgtagatgatttaaggagataatgttaca

SEQ ID NO: 35045 - DNA, 357 bp, Glycine max
  unsure at all n locations
  Clone ID: LIB3138-080-P1-N1-E9
caattcacgcgtttctttcctttcaagactgtctgtctcgctctagttttttcggtccgcgactcancctttcgaatcctctcacccagaggtacgattcgtaccatgtagttgtgggatttcggctttgccacttcttgattccaataattttggtttctttttttcccctaatttgatttccccagttagggtttttaactctattcgatcggcgatttcgaatactcggaggctcgaatcgtgttgggggttttccgttttgattaaaaaagtttccgttttttgtgttgggtgatcaagggttgtttgatttttttcttgcgatcgagaatgggtgaggcttcgggagctggt

SEQ ID NO: 35046 - DNA, 363 bp, Glycine max
  Clone ID: LIB3138-080-P1-N1-F1
tcacagatcattttcgtctaacaaattggtagaagacattgttggaactctggcctttatgcctctgatttatccatatgagccttggcgatttaagcatgacaggcatcatgcaaaaacaaacatgttacgtgaagatactgcttggcaccctgtttggaaggacgagtttgaatctactccacttttgaggaaagcaataatatacggatatggtccatttcgatgttggatgtctatagctcactggttgatgtggcactttgatttgaagaagttcagaccaagtgaagtaccaagggtgaagataagtttggcttgtgtttttgcctttatagcaattggatggccattaattattta

SEQ ID NO: 35047 - DNA, 359 bp, Glycine max
  unsure at all n locations
  Clone ID: LIB3138-080-P1-N1-F10
ctcgattctacttgctctacctctgccactggctgagtacaatacaacactgccatggctgcctcagtctccactattggagctgtcaacagagctccactgagcttgaacagctctgaagctggagattcggttcccagttcagccttctttggcacaagcttgaagaaggttactgcctcaagggtccctaacgtcaagatttcttctggaagtttcaaaatcgttgcggcggagaaagagattgatgagcaacaacagacaaacaaggacagatggaaaggtcttgcctatgatatttcagatgaccagcangacatcacaagaggaaagggtatggttgattccctcttccaagc

SEQ ID NO: 35048 - DNA, 363 bp, Glycine max
  Clone ID: LIB3138-080-P1-N1-F11
gagatatctagaaacagtgtgatgaaaatgaagggccttgttttcttcgttgctacaattttggtagcatggcaatgccatgcgtacgatatgttccctctccgaatgaacactggctatggtgcccgtactccggaggtgaaatgcgcaagttggaggcttgctgtggaagcacacaacatctttggctttgagaccattcctgaagagtgcgttgaagcaacaaaggaatacatccatggcgaacaatatagatcagactccaaaacagttaaccaacaagcttacttttatgccagagacctcgaagtccatcccaaggacacatttgtgttcagtatagatggcaccgtactctctaat

SEQ ID NO: 35049 - DNA, 360 bp, Glycine max
  Clone ID: LIB3138-080-P1-N1-F2
gtcaagttgacaaccataaacaatatgtgtgcatgggggctcaatcctggtatttcaggttctcgtcttttgggcaccattcctcagtccatttcacagcaaactgtttggaatcaaatggcaacagtgagaacaccattgaattttgattctagcaagcagagcttttgtcagttttctattgaccttctcggtggaggaatcttagtggacaaaactggagattggatcacacttatacaaaattctccaattagtaacttattgagagttgctgcttggaagaaaggctgtttaatggtcaagattgtgatgtctgggaatgcagcagtcaaaaggagtgattgggcctcattggta

SEQ ID NO: 35050 - DNA, 364 bp, Glycine max
  Clone ID: LIB3138-080-P1-N1-F3
tgatggtattgacaaaactagtgcaactttgcaaggtagagaagttagcagattgtgattttctcaagagaaactttaagcagatgtctaatgttttgtgggtggctcctgaggacaaggcgagtttatggtcacaacttcattatgtttcgtgtaataatctggaaatgcaagaagcttatcttgtcaatctcgtaaatgtgttacgagaattgtatttgcacagtccagaggaagctcgccaattgagaaggaaagctctctctcgtattgaatggctgcaaaaagctgatgtgcctaccatagcacagattgaagagttccattcgatgcagaagatgatgaatgctcctgattcaaatga

SEQ ID NO: 35051 - DNA, 365 bp, Glycine max
  Clone ID: LIB3138-080-P1-N1-F5
ctcgattcgttaggagctggtgcaaagaatgctatgctcgtgaatatgccaaatgctgttctttcaatgtggagatattttgttggagatctcgtctttgaagtttctaagatgacttctccctacattaaatgtacagtctctttcttcatagcatttggaaatttggctgatgataccatcaattttgaggcttttccccacaagctggtgcagtttggagagattcaggaaaaagttgtattgaaattttcacaagaggaatttcttacagcttggtcaactcaggtgcgtcctgcaacaactctgttggctgatgggtgtccatatttgtatgcaatggtgcatgatagttcagtgtctac

SEQ ID NO: 35052 - DNA, 365 bp, Glycine max
  Clone ID: LIB3138-080-P1-N1-F6
cttggacatgcttcagttccattggtatttaatcgctcggtgttgtggttttttatctactaactatcacggttcaagcagcacaattcttcaaattttagggagaattagaatcataaccattaacattatccatgacaaaatcatccattttgcttctttactgaaatagtgaaaaagagtacttaatttccattatctagctaaactacttattaaaataattctgattctctgaagttaaggattcttgttacaattctcctctatctctaatggatttaggtgggattattcgaatccaggctacctggatgcactaaaacacctaacagatttgaaagaagaaggttagtttcatttct

SEQ ID NO: 35053 - DNA, 356 bp, Glycine max
  Clone ID: LIB3138-080-P1-N1-F7
caattttgaggcttttccccacaagctggtgcgggttggagagattcaggaaaaagttgtattgaaattttcacaagaggaatttcttacagcttggtcaactcaggtgcgtcctgcaacaactctgttggctgatgggtgtccatatttgtatgcaatggtgcatgatagttcagtgtctacaataccaggtgattttgtcattggtgtcaagttgacaaccataaacaatatgtgtgcatatgggctcaatcctggtatttcaggttctcgtcttttgggcaccattcctcagtccatttcacagcaaactgtttggaatcaaatggcaacagtgagaacaccattgaattttg

SEQ ID NO: 35054 - DNA, 362 bp, Glycine max
  Clone ID: LIB3138-080-P1-N1-F8
agattctgtttatataatacttgaagttggggccgttaacgccactctttctttgtgcacaccccacatggctcttctccacaagctcgcacctttcacctctctccacacaccctccaccaaaacctcccattccccaccaccccgccgccgcgtcatctccttctccgcctcccccttcaccgagaagcactccctagagcgctaccagagggaccaatgggtctacgagagcaccatccaagagggtcaatctcaaacgacgccgtttcctctctcgtgcgattcggcgtccttaaaggagcacgacatagcgttgcagctaccagagctgaagaagctgcttcaggttctgagggaga

SEQ ID NO: 35055 - DNA, 360 bp, Glycine max
  unsure at all n locations
  Clone ID: LIB3138-080-P1-N1-F9
gggagttccgtgtgttggacatcaatggctgagagggttttcttaccaggacagggtatactggggaagatggatttgagatctcagttccttcagagcatggagtagatcttgccaaagcaatactggaaaaatctgaagggaaggtaagattgacaggattgggagctagagatagtctgcgacttgaagctggattgtgcttatatggaaatgacatggaacagcacattacacctattgaggcaggactaacatgggctatagggaagaggaggagagcanaaggtggttttctaggagctgatgttatcctgaaacagcttgaagaaggtcctaaaatcaggcgtgttggtttct

SEQ ID NO: 35056 - DNA, 300 bp, Glycine max
  unsure at all n locations
  Clone ID: LIB3138-080-P1-N1-G1
gaagagttccattcgatgcagaggatgatgaatgcgccggattcaaatgataatattgatttactgttgagcattgatttgttgggtttacaaggagcaggtaaagcttttccaaacaaaattgtttttgatgataagcttgtgttggctaacacacaagaattctttgatggaaattttccagtggattcttggttaccaatttttgtgaattgtctttatcctgtaagtcaattaccttcagaagctgtcgttgtaaatgttacatgtggtagtggacgtggtggntnacccaccact

SEQ ID NO: 35057 - DNA, 360 bp, Glycine max
  Clone ID: LIB3138-080-P1-N1-G10
ctttcttctaaaacatctcaatgggttctgggtcgattacaacatcgcccgcaaccatgaccatggctgcgatcgtgctcctgttcacggtctttgccgtttcctccgccctagacatgtcgataatctcgtacgacagcgcccacgcggacaaggccgccacgttgcgcaccgaggaggagctgatgtccatgtacgagcagtggctcgtgaagcacgggaaggtgtacaacgcgctcggcgagaaggagaagcgcttccagatcttcaaggacaacctgcgattcatcgacgaccacaactccgcggaggaccgaacctacaagctcggactgaaccggttcgctgatctcaccaacg

SEQ ID NO: 35058 - DNA, 290 bp, Glycine max
  Clone ID: LIB3138-080-P1-N1-G11
gggaccaacctcgcattcttccccgcgcatggccgggattatgaaaaatttgctcctcatttgagccaagtttgtataatgtggtgcagaacaatggaggaaacagttctatatgtgtttcatgaacctcctttcttttcctttttggagaactcatttaaggttgtatttggaaaactctatgcttaatttcttttaagcattatatgatgatacttgtgtgactactgctgctgctgcattaattcactcattgtatattcttaattttgagaaatttattaactttc

SEQ ID NO: 35059 - DNA, 355 bp, Glycine max
  Clone ID: LIB3138-080-P1-N1-G2
cagcaaatgcacctttgctgatctgattcgcgaagagtcgcctttcacaaggatcatgcataaattggatgaccacattaataacattagcaatgatcttgtttggagacaaggctaaaagtccttttgtcagcttctctactggaaaaaaaattatattttcaatagatactttcaaaaacacttataccttgtattcaaacagacccattgtctggtctaatgtaagataaataaattagcttgtccatgagtctttggtattgggacttttctaaaaaaaaaaaataaaatataaatatataatatatttttttttatttttttttttttttttttttttttttttttttat

SEQ ID NO: 35060 - DNA, 335 bp, Glycine max
  Clone ID: LIB3138-080-P1-N1-G3
cttggttaccaatttttgtgaattgtctttatccggtaggtcaattaccttcagaagctgtcgttgtaaatgttacatgtggtagtggacgtggtggtatacataacacttgttgtatgagtgtttcgctctattattcatgtcccaactgtaccacagaggactaggtcgcgtcactggcacggacacttagtcgtacggcggactagaggcgttgccttttcaaggtgtttactgtctagacttgttggcgttaacagtggaaggttgggttgtaactccactaattctatactgactcgactttctacgaactgtaagagtccttaaatttc

SEQ ID NO: 35061 - DNA, 335 bp, Glycine max
  unsure at all n locations
  Clone ID: LIB3138-080-P1-N1-G4
gacgaaactaaaccctggtgaaaccttgaatattgcaaggtcaactgacccacttgagattcaagtgaacaagcaatctgaggaccttcactttggattatatgaagtgtggagcggaaaatggaagggaggccttgaaattgtcagagccctcatcaaacctttaacttaattgcatgcaactcatcataccatatatcngtttcttcatttgccaactttgacaagtggattaattggttgtggtttaattattattattactttgtatttggcgttgagtactactgtatgatatatagatgataatatgtgtccatgctctgcactagctg

SEQ ID NO: 35062 - DNA, 366 bp, Glycine max
  Clone ID: LIB3138-080-P1-N1-G5
tgtttttaacaaacagcaacagtacagagcatttgggtgcgtgtaagtggacaaaatcagaaccacattcctgggaattgatcttcccaatagaggtatgtggtcctaataatggttttgaaatgtggagttctgagtgggcaaatcaaacttcatggcatttgagtttccttattgacaatcccaaacagtctacagtttttgatattctcttgggaatctctcaagattttgaaattgctggtaatactcttatgccagctttttctgttccacaggctactgccagatcttctgaaaatgcggaatcctctgcatgatctggaatttgtgtttttttttcgcttgttcgtttgtttaattcaa

SEQ ID NO: 35063 - DNA, 364 bp, Glycine max
  Clone ID: LIB3138-080-P1-N1-G6
gttcagtgtctacaataccaggtgattttgtcatgggtggcaagttgacaaccataaacaatatgtgtgcatatgggctcaatcctggtatttcaggttctcgtcttttgggcaccattcctcagtccatttcacagcaaactgtttggaatcaaatggcaacagtgagaacaccattgaattttgattctagcaagcagagcttttgtcagttttctattgaccttctcggtggaggaatcttagtggacaaaactggagattggatcacacttatacaaaattctccaattagtaacttgttgagagttgctgcttggaagaaaggctgtttaatggtcaagattgtgatgtctgggaatgc

SEQ ID NO: 35064 - DNA, 361 bp, Glycine max
  Clone ID: LIB3138-080-P1-N1-G7
gaaactttaagcagatgtctaatgttttgtgggtggctcctgaggacaaggcgagtttatggtcacaacttcattatgtttcgtgtaataatctggaaatgcaagaagcttatcttgtcaatctcgtaaatgtgttacgagaattgtatttgcacagtccagaggaagctcgccaattgagaaggaaagctctctctcatattgaatggctgcaaaaagctgatgtgcctaccatagcacagattgaagagttccattcgatgcagaggatgatgaatgctcctgattcaaatgataatattgatttactgttgagcattgatttgttgggtttacaaggagcaggtaaagcttttccaaa

SEQ ID NO: 35065 - DNA, 361 bp, Glycine max
  Clone ID: LIB3138-080-P1-N1-G8
caggttttcgtcttttgggcaccattcctgagtccatttcacagcaaactgtttggaatcaaatggcaacagtgagaacaccattgaattttgattctagcaagcagagcttttgtcagttttctattgaccttctcggtggaggaatcttagtggacaaaactggagattggatcacacttatacaaaattctccaattagtaacttgttgagagttgctgcttggaagaaaggctgtttaatggtcaagattgtgatgtctgggaatgcagcagtcaaaaggagtgattgggcctcattggtacaagtgtttttaacaaacagcaaccgtacagagcattttgatgcatgtaagtggac

SEQ ID NO: 35066 - DNA, 346 bp, Glycine max
  Clone ID: LIB3138-080-P1-N1-G9
gtggagttctgagtgggcaaatcaaacttcatggcgtttgagtttccttattgacaatcccaaacagtctacagtttttgatattctcttgggaatctctcaagattttgaaattgctggtaatactcttatgccagctttttctgttccacaggctactgccagatcttctgaaaatgcggaatcctctgcatgatctggaatttgtgttttctttcgcttgttcgtttgtttaattcaataaaggaaattaggcatgaccctcttgttgagtatgctctgcctatttgaaaatttccacacctcttttaattgtcgtaatgatgtgtgaagtgtgtgttatttt

SEQ ID NO: 35067 - DNA, 58 bp, Glycine max
  Clone ID: LIB3138-080-P1-N1-H1
tgactccagcagcgtactaactcgaattggctcgagtggagttgagggatgaagggag

SEQ ID NO: 35068 - DNA, 363 bp, Glycine max
  Clone ID: LIB3138-080-P1-N1-H10
gtcacatcttcattatgtttcgtgtaataatgtcgagatgcaagaagcttatcttgtcaacctcgtaaatgtgttacgagaattgtatttgcacagtccagaggaagctcgccaattgagaaggaaagctctctctcgtattgaatggctgcaaaaagctgatgtgcctaccatagcacagattgaagagttccattcgatgcagaggatgatgaatgctcctgattcaaatgataatattgatttactgttgagcattgatttgttgggtttacaaggagcaggtaaagcttttccaaacaaaattgtttttgatgataagcttgtgttggctaacacacaagaattctttgatggaaattt

SEQ ID NO: 35069 - DNA, 366 bp, Glycine max
  Clone ID: LIB3138-080-P1-N1-H2
cacaaatagattcattagcactaggagcagcaacagctgggctcagctgaaatggcctcttcagtgatggcatctgtggccctcaaacctgcccctttcactgttgagaagtcctcagtgagaggccttccctctctctcaaggaactcttcttcattcagagttgtggccagtggcaagaagatcaagactgacaaaccttatggaattaatggtggcatggctttgagggatggaactgatgcatctggcaggaaaggaaagggaaagggtgtttaccagtttgtagacaaatacggtgctaatgtcgatggttacagtcctatctacgacaccaaggactggtcttcaaccggtgatgtctac

SEQ ID NO: 35070 - DNA, 344 bp, Glycine max
  Clone ID: LIB3138-080-P1-N1-H3
ctttgtcttcttcatgttggttctctgtaaacacggacggcaaaagaagaataatattgaatatttggttgggttgaatccctgggttgaagcgttgcagacatcacggctattctaagagtgtctcgctctctcattcatgtcccaactgtacgacggaggacaggttgcgtaactgccaccaacccttcgccgcacggtgggcgtggtgctttgccttctgaaggtggtagcccttcagacttgctcttcttagctggtggtggttctgctgtcttctagcttcttcttaactcttttttctttttactacttttaagctaccttgtttttaaaatatcaaa

SEQ ID NO: 35071 - DNA, 359 bp, Glycine max
  Clone ID: LIB3138-080-P1-N1-H4
cggagtatcttttctacagggaggccctctactgcggccgattggaccacgtgcgcgccgccaagtggggcccattcgacggcaacaggttaaggttgtcgcggtctctgcagggccaggcaccgggcgacggaaccgccattcgggcgggcccggatggcggctgctgcgttgcgcatggcagcatggttcatgtctatgattggatgttggatgaacacccacctcttaaccttgattaccagagggtcaacgatgttggttgggttgactccgacaacatcgtcatcggagtcagcgagcgccttgggcggggcgacggcgggatggggctgttcagctcccacaccggagagctt

SEQ ID NO: 35072 - DNA, 349 bp, Glycine max
  Clone ID: LIB3138-080-P1-N1-H5
gttgtttatttattctttcagaatcgatctcctacggccgctctttagactacactatcgttaataaaatccaccgtctctaccacgactcgaatcgaatcgaaccaacctttcatacccaccaacactcctacttcaaccgctaatatgctcggacgtaccgttttcgccgcgactttctttgcgctcgctcaattcgccatggccagcccccctggctgcctcctcggcgctgtcaaccaatatgaagacccatctgacatcaaagccgtctgcaaggccaaagacctgagcgagaaggtagcggaaatctgcggtgacgatgctaaggacgctatggctgcgatcg

SEQ ID NO: 35073 - DNA, 358 bp, Glycine max
  Clone ID: LIB3138-080-P1-N1-H6
atgatgttcatttttagttatggaaagaagtgaagctgggttagttccagaatggttgagaagtgctggaagtgttgccggggctggcagttcagcccaacagtttgccttctcatatggtcatactgattctctttccgtagctcatcactcaaggaatagatcttctaagaatggtagtgattttgatagtgctcgttctgtgtttcttgaacggacatcctcatcaaattcccggaggagttctataaatggttctgccaagcatgcctacagtagtttcaacagaagtcatcgtgacaaggaccgtgacagagagaaagatagatccagttttggagatcactgggactgtgat

SEQ ID NO: 35074 - DNA, 245 bp, Glycine max
  Clone ID: LIB3138-080-P1-N1-H8
aagattttgaaattgctggtaatactcttatgccggctttttctgttccacaggctactgccagatcttctgaaaatgcggaatcctctgcatgatctggaatttgtgttttctttcgcttgttcgtttgtttaattcaataaaggaaattaggcatgaccctcttgttgagtatgctctgcctatttgaaaatttccacacctcttttaattgtcgtaatgatgtgtgaagtgtgtgttatttt

SEQ ID NO: 35075 - DNA, 302 bp, Glycine max
  Clone ID: LIB3138-080-P1-N1-H9
ctacattatcataactgctaacaaatcaaaggacgacctttatctacttgtgcccattgattcagctcccatacaatgctcatttgaaagcatttcaaacaagattattgtctaaaatatgctcaacacaaatatcacacatgaatgcttcaatataaatgctgcagaagatactaaagtgctaattttgaccaatcagacctacacggacagatgaaaaagccttagcctattatatttgagactaccaccaggacttacaacggggaagggtttggttgacctcctttttcaaacttcac

SEQ ID NO: 35076 - DNA, 362 bp, Glycine max
  Clone ID: LIB3138-081-P1-N1-A11
agctcctggacgatgaacatagccaccaacacaggcgttcataaacttccccttccaactctcaccactcgcatctcgcgcgtgccaccaacgcgccactctctccctctctttccctcctcttcctctctccaaacccgccatgtcctccgccgctccggtcaccgaactcagcgacgagtccgacttcgaatctctcctctctcccgacggccacatctccatctgcggcttcggctctctcctctccgagagaagcgcccgaagcactttccccgacttggccaacttccggaccgcacggttgaaccggttccgccgcgtcttcgcgcacgtcgctccggttttcttcgagcgcggca

SEQ ID NO: 35077 - DNA, 369 bp, Glycine max
  Clone ID: LIB3138-081-P1-N1-A12
tggtggtcctgctcctgcagctgctccagctcctggttctgagctagcaaaggcatagaatgtccaatgatgacaagcaacaatgttgtacgaaacttagaaagccagtgaatagggaccataaataaatagaggactgctgaatgaagttgcttgagtggaactcaagcttggttggataatattcttttaaagttcagacattgtttccatttttcttatatttaagtattttgaatttttgggaggatggttttgctctcatccttccacttgctgaaaactttgtaggtaggaatgatataattttgcatgttaggttctctacatgccaattgtcaaacgggaacacatttgttttcttgtctg

SEQ ID NO: 35078 - DNA, 424 bp, Glycine max
  unsure at all n locations
  Clone ID: LIB3138-081-P1-N1-A3
actagctacgacgcacgcacgcacgcctaaagcagctatttcggctcgagcggctctatttttgaagagttgaatgtggaatcccgtgtggattttcgatcacagttatttgcaatancatttttaatgagatgctcattagatatagctatgaaaaattactgcgccaggctaaagctccaagtatgtttttacaatccttcaaaaatttagtttctttgtgtgtgtatggtgatgataacttaattagtgttcatgaatatgtcaagccttactttagtggctctaaattgcaaagctttctagctagtcataacatcaccattactgatggtattgacaaaactagtgcaactttgcaatttagaaagttagcagattgtgattttctcaagagaaactttaagcagatgtctaatgtttt

SEQ ID NO: 35079 - DNA, 305 bp, Glycine max
  unsure at all n locations
  Clone ID: LIB3138-081-P1-N1-A7
gcgtgcgaagctagctatnaatttggctcgagcgatcaatgatactactacttcttcaatcacagcagatctattcaaccacataattactactagcaatcatgcaaatcttcgtcaagacccttactggcaagaccatcactcttgaggtcgaatccagcgataccattgacaatgtcaaatccaagatccaagacaaggaaggcatccctcctgaccagcaacgtctgatcttcgccggtaaacaactcgaagatggccgaaccttgagcgactataacatccataaggagtcaacccttcac

SEQ ID NO: 35080 - DNA, 369 bp, Glycine max
  Clone ID: LIB3138-081-P1-N1-A8
gtgaatgcctcggcggagcgaaccggtgatacgagcgatgatggggaggctcgtagcggcttcaccacacctgccatggaagtcaccacattcaatcgaagcactttcagcgatgctgctgactttcccgtttgggaaaagattggtgctgtcgtcagactcagctatggtatcgggatttatggtgccatggctgttgcggggagttttatatgttcaatcacgggaattgactctctgggtggtttccatctatcgatagatgccatcttggaagggcttggatatgcagctcctccaattatggcactattgtttatactcgatgatgaagttgcgaagctatcaccccatgcccgtgccatcaga

SEQ ID NO: 35081 - DNA, 364 bp, Glycine max
  Clone ID: LIB3138-081-P1-N1-A9
cagcattctcaacacctcctccctcactcactcatgaatggcatcaacaatatcagcaatggccatgatcaacgccaaatgcgtcaacccaaagttccccaaccccaccaagctcgtaccatcaaaaccttcccttcaggtcaaccttccaaagggcctaatagcctcacccgaaaacaccaaactttccactgcgacagcaatcgcaggagcaatattcacaaccctcggaacctgcgacgccgctttcgccgttcaacaaatagccgacatagcagaaggcgacaaccgcggtctggcactgttgctgcccataattcctgcaatagggtgggttctgttcaacattctgcagccggcgctg

SEQ ID NO: 35082 - DNA, 365 bp, Glycine max
  Clone ID: LIB3138-081-P1-N1-B10
ctcgatctcgaatcggctcgagcgataccttggtggagagggagtgaattaggaattaggaaacgttcggaattgggtagtaaattaatgggttgagccgagttggttcgtggaaggaagaaataaagaaatcaacaaaggcagacaaagagcttaggaaaagaagaataagaatggtgtggtgagaaagatgaaggtccgttcggaaagggaaaagacgaaagttgtgattaggcatttgcccccttctctcactcaatccgatctcttccaacacatcgattctcacttcgcttctcgctacaattggttctccttccgtcccggcaacaacagtcacaagcgtcagaggcattcccgagcgt

SEQ ID NO: 35083 - DNA, 165 bp, Glycine max
  Clone ID: LIB3138-081-P1-N1-B11
ggaaaaggtggttttgaaattttcacaagaggaatttcttacagcttggtcaactcaggtgcgtcctgcaacaactctgttggctgatgggtgtccatatttgtatgcaatggtgcatgatagttcagtgtctacaataccaggtgattttgtcattggtgtcaa

SEQ ID NO: 35084 - DNA, 390 bp, Glycine max
  Clone ID: LIB3138-081-P1-N1-B3
agctcgaatcgctcgagtcgacatccttctatgaacggcgtccacatttccggcggcgagggcgaataccccaacagcttgttcaacatcataggcaacttgctcttccccttactcgcattcgcgggcctgttcttcctcttccgcagagcccaaggcgggcccggcgggcctggcgggctgggagggcccacggacttcgggcggcacacgtccaagttccaggaagtccccgagaccggcgtgagcttcactgacgtggcaggcgcggaccaagcgacgctcgaattacaagaggttgttgatttctttgagaatcccggtaagtacaccgcgctgggcgcgaagattcctgaagggtgtcttttggtaggcccaccgggaaccgca

SEQ ID NO: 35085 - DNA, 294 bp, Glycine max
  Clone ID: LIB3138-081-P1-N1-B5
aaggctttgaatggtgtaacttggaaaatggtcaacataaaggaagaaaatccacacggttatggatgctgaaccacctgattttgaagagtcagttggacaggcattgtttgatctggaaaataccaatcaggagcttaaaagtgatctgaaggatttatacataaactcagccgtgcaagttgatgtttctggaaaccgcaaggctgatgttattcatgtcccttacagattaaagaaagtgtttcgtatgattcatgttaggcttgtcagggagcttgagaagaagtttag

SEQ ID NO: 35086 - DNA, 327 bp, Glycine max
  Clone ID: LIB3138-081-P1-N1-B6
gtcaaaagttttttaattttgtgaggttcattatgaagaaaagggacaaacttagttgtcaagttggaatcaacccatactccatggaatggactggtttggccaatagattactgagtaagggcaatgatattctgtgttgcgattatgctagttttgatggtttgattaccaagcaagttatgagcaagatggcagaaatgataaacagtctttgtggtggtgatgaaaaattgatgcgtgaaaggacgcacctgctgttggcttgttgttcaaggatggcaatttgtaagaaagatgtttggagagttgaatgtggaatccctt

SEQ ID NO: 35087 - DNA, 363 bp, Glycine max
  Clone ID: LIB3138-081-P1-N1-B7
ccacaataacttctccatctccatctaccaacaacgtggcccgcactaagcagaccgcccacaagtccactggtggcaaagccccccgcaagcagctcgcatccaaggcagctcgtaagagtgcgccgtctaccggtggtgtcaagaagcctcaccgctacaagcccggaactgtcgctctccgtgagatccgtcgctaccagaagtcgactgagctcctcatccgcaagctgcccttccagcgtcttgttcgtgagattgcccaggactgcgagtccgatctccgctttcagtcctccgccatcggtgctcttcaggagtccgacgaggcctacctcgtctacctcttcgaggacaccaacc

SEQ ID NO: 35088 - DNA, 372 bp, Glycine max
  Clone ID: LIB3138-081-P1-N1-C1
cagaaatgttcagtgcttctctgattccagtttcctggttgccttggcggccactttctcctttcaagggaacggtgaaaaccttggtcgcaaaaccatggctgaagaagattcagcaagcaagacccctcatttccgtggttaacaaggctgcctctctatcttcccccgtgacagcacccagcgtcggcgttcggtttcggctggacaatttggggccgcaaccgggttcgaggaagagggctaagagaaagggtagaggaatatccgcagggcaaggggcaagttgtggttttgggatgagaggtcagaaatctcgatctggacctggcgttaggaagggtttcgaaggtggccagatgccgctttatc

SEQ ID NO: 35089 - DNA, 370 bp, Glycine max
  unsure at all n locations
  Clone ID: LIB3138-081-P1-N1-C10
aaacatacgaaacctcatccatggcttctcttctgcggtgcaacggagtcttcctctcccccttacctccccaacccagacgcgaccccatccttcccaaattctttctcccccaatccccaaatcctaaaccgtcacgcctcctgacggtgcgcgcggaggtgaaagagacctnctncgncgncgncaccaccaccaccaccacttcctccgacgacaagatccgcgaaatcctccgcaaccgcgactacgacaagaaattcgggttcagcgtggacatcgagtctttgacaatcccaaaagggctctcgaaagaaaccatccgtctgatctcgtccctgaaagaggagccccagtggatgctcgaatt

SEQ ID NO: 35090 - DNA, 315 bp, Glycine max
  Clone ID: LIB3138-081-P1-N1-C12
gttcattctggatgaaatgaggaagaagtctaaggaggaagggaagagtaccactggagaagggttagagtggggggtgctattcggattcgggccgggtctaaccgttgagaccgttgttcttcacagtgttcccttggagggataaatcatgctgatgcggggactagtgatttaagagtgatcaataaggaaccctcggaaataccagggaaagtttgttattattactagtttcacttgtggatttatcgtagcataatgttgtacaagaattatttaatatgaacaagatcgtgtgtttgttattgtacc

SEQ ID NO: 35091 - DNA, 362 bp, Glycine max
  Clone ID: LIB3138-081-P1-N1-C6
ttttggcctcaatcctggtatttgagtttctcgtcttttgggcaccattcctcagtccatttcacagcaaactgtttggaatcaaatggcaacagtgagaacaccattgaattttgattctagcaagcagagcttttgtcagttttctattgaccttctcggtggaggaatcttagtggacaaaactggagattggatcacacttatacaaaattctccaattagtaacttgttgagagttgctgcttggaagaaaggctgtttaatggtcaagattgtgatgtctgggaatgcagcagtcaaaaggagtgattgggcctcattggtacaagtgtttttaacaaacagcaacagttcagagc

SEQ ID NO: 35092 - DNA, 335 bp, Glycine max
  Clone ID: LIB3138-081-P1-N1-C7
gacctattgtgttttaaatccacaaaatcctgtggggttaaataggtggatgggaaaattgactttcccccagggcacttcccgaagtgttaagagaatgcctctttctatagggggaggagctggtgcaaagaatgctattctcatgaatatgccaaatgctgatctttcaatgtggagatattttgttggagatctcgtctttgaagtttctaagatgacttcttcctacattaaatgtacagtctctttcttcatagcatttggaaagttggctgatgataccatcaattttgaggctattccccacaagctggtgcagtttggagagattc

SEQ ID NO: 35093 - DNA, 246 bp, Glycine max
  Clone ID: LIB3138-081-P1-N1-C8
atcatttccacattcctgggaatagaacttcccagtggaggtatgtggtcctaataatggtactgaaacgcggagctcttagtgggcaaatcaaactatatcgcattttattttccttattgacaatgccaaacaggctacagtttttgatattctctctgcaatcctttaagattgtggaattgctggtgatactcttatgccagctgtttctgttacacaagctactgccagatcttctcaaaa

SEQ ID NO: 35094 - DNA, 369 bp, Glycine max
  Clone ID: LIB3138-081-P1-N1-C9
cagcattgttcatgagagtggcattcaccatctgggtgttcacagtgtattgtgtggttccaccaagggaagaccgcattggtgtttgcaccggaattttccgcactgatggtattcctgaacaggacattgtcaagcttgttgacaccttccctggccaatccattgatttctttggtgcactgagggccagagtatatgatgatgaagtgaggaagtggatttctggtgttggtgttgacagtgttgggaagaagcttgtgaactcaaaagatggacctccaacctttgagcagcccaagatgactctggagaagctcttgctgtatggtaacatgcttgtccaagaacaagagaatgtcaagagag

SEQ ID NO: 35095 - DNA, 379 bp, Glycine max
  Clone ID: LIB3138-081-P1-N1-D1
aatccctatcatcaagataggaaaagaatggaggccatgtgttccaagcaccttatgacatcccttgtcataattcttgcttctagtttgaccttatcacagggtgccaagaaaggcagtgacagtgaaaggccataccaagaagcgagcacggtgttcattagaacatcttgcagctccacgacctatccaagactctgctacagctccttagtgaagcatgcagacttgatccaaacaaaccgtgtggttctgacaggcacagccctgaatgtgacccttgcgtctgccaagtcgacctcggcaatgatgtcgacgctggcaaagaggcaaggcctgaagccaagagaggttgcagcgatgaaggactgtgtggagg

SEQ ID NO: 35096 - DNA, 373 bp, Glycine max
  Clone ID: LIB3138-081-P1-N1-D10
cggctctagttttgtgttaaataggtggatggggagagattgactttcccccagggcacttcccgaagtgttaagagaatgcctctttctatagggggaggagctggtgcaaagaatgctattctcatgaatatgccaaatgctgttctttcaatgtggagatattttgttggagatctcgtctttgaagtttctaagatgacttctccctacattaaatgtacagtctctttcttcatagcatttggaaatttggctgatgataccatcaattttgaggcttttccccacaagctggtgcagtttggagagattcaggaaaaagttgtattgaaattttcacaagaggaatttcttacagcttggtcaactc

SEQ ID NO: 35097 - DNA, 374 bp, Glycine max
  Clone ID: LIB3138-081-P1-N1-D11
gttcggtcgtttcgttgccggcatcggcatcggctgcgccctcatgatagcccccgtctacaccgccgaggtctccccggcctcctctcgtggcttcctcacatccttccccgaggtttttattaatggagggatattacttggatacatatcaaactatggattttcgaagctgacactgaaggtgggatggcgaatgatgcttggagtgggtgcaattccttcggtagtcctaacggtgggagtgttagcgatgcctgagtccccaaggtggctagtgatgaggggtcgtttgggagaggcaagaaaagtgcttaacaaaacctcagacagcagggaagaggcccaactaaggctagccgaaatcaaacaag

SEQ ID NO: 35098 - DNA, 377 bp, Glycine max
  Clone ID: LIB3138-081-P1-N1-D12
caccatttcacctatttttctctctctctctctctgtctctcgcatcacaatttcatcaaaaccttttaagtcttcatagttttccttctttctttctttgtgaaaaaacaaaaagtccaaaccatggctcagaaaaccgagaaagaagaaaccgacttcaaggttcccgaaacgattacgctttgcgttaacaactgcggcgtcaccggaaaccctgctacgaataacatgtgtcagaagtgcttcaccgccttcaccacctctaccgccaccacgtccggcgccggaggtgccggaatagcttctccggctaccagatccggcatctccgcgcgtccactgaagagatcttttcccgaggagccctcgccgccgg

SEQ ID NO: 35099 - DNA, 362 bp, Glycine max
  Clone ID: LIB3138-081-P1-N1-D2
tttgaagcttttttgtggagttgggagagggcttttttgaaggtggaaaaagacaaaggcttccagaatctgattcttgtgggactcatctttacgttggacacatcacaggaattcagaagcagcaagaacaagctcaagaggttgctcttgtgtgaacacatatagcatcatgtggagggatcattgtgtatactgtgtagttaaattaaaagcatcatagtttttatagaagagaaaaggagggcaaaagagatagaattatgatgggtatacgcaaggaaaatggcatattctaggcctaaccctgagattaataggaaaattattattttatttcatgttagaaatccaataagtgc

SEQ ID NO: 35100 - DNA, 335 bp, Glycine max
  Clone ID: LIB3138-081-P1-N1-D5
gcggaattttattgattttggtgggtggatattgggggggttttctggccctttggtaatactaatcgtgcattgtttttgtaacaaactgatcagaccaggctatttattcagtgcttcatatgataaatcgatgataagagcttaaaggggatcgaccatttgacatctagttctgaggtaacgcatctacgtatcctattttgcatgcttaggtgatactttcaggtgctgctatttttaaaatgcgaaccaaagaaagctcgacacgaattgtctgtagcatgtacatatgcaggctgatgtactaagacactgttgtagctcgagcatgc

SEQ ID NO: 35101 - DNA, 376 bp, Glycine max
  Clone ID: LIB3138-081-P1-N1-D6
ggaatctgttcaaaaggccattgagaagctgaatggaggctgctgaatgataaacaagtgtatgtgggacccttccttcgcaagcaagagagagaaagtactgctgacaaggcaaagttcaacaatgtttttgtgaagaatctgtcagaatcaaccactgatgatgaattgaagaatgtttttggtgaatttggaactattactagtgctgtcgtaatgagggatggagatgggaaatcaaagtgttttggatttgtgaattttgagaatgctgatgatgctgctagggctgttgaggctctcaatggcaaaaagtttgatgacaaagaatggtatgttggaacagctcaaaagaaatctgaaagggagaatgaat

SEQ ID NO: 35102 - DNA, 331 bp, Glycine max
  Clone ID: LIB3138-081-P1-N1-D7
agcgtttccattctcatcctcctctgtctctctcggtccaccattgccatggatccttacaagctccggccatccagcgccttcaattctcccttctggactacaaattctggtgctcctgtttggaacaacaactcctctttaaccgttggagctagaggtccaattctgcttgaggattatcatcttgtggagaagcttgcaaactttgacagggaacgtatcccagaacgtgttgtccatgccaggggagctagtgcaaagggtttctttgaggtcacacatgacatttctcacctgacatgtgcagatttccttcgagcccctggag

SEQ ID NO: 35103 - DNA, 291 bp, Glycine max
  Clone ID: LIB3138-081-P1-N1-D8
agctttttcattctaatcctacatatgactatcgggggtacactattgccatggatgcttacaagctccggacaatacagggcctgcaatcgtctattgtggactacaaaccgtgatgattctgttacggacaccagctggtgttcaacctttgcatatagagggccaatttatgcctgaggattatcatgttgatgagaagctcgcagactaagacagggaacgtatacaataacgcacagtacatgccccgggagctaaaacaaaaaggccctttgaggccacacatga

SEQ ID NO: 35104 - DNA, 373 bp, Glycine max
  Clone ID: LIB3138-081-P1-N1-D9
gcaagcagagcttttgtcagttttctattgaccttgtcggtggaggaatcttagtggacaaaactggagattggatcacacttatacaaaattctccaattagtaacttgttgagagttgctgcttggaagaaaggctgtttaatggtcaagattgtgatgtctgggaatgcagcagtcaaaaggagtgattgggcctcattggtacaagtgtttttaacaaacagcaacagtacagagcattttgatgcatgtaagtggacaaaatcagaaccacattcctgggaattgatcttcccaatagaggtatgtggtcctaataatggttttgaaatgtggagttctgagtgggcaaatcaaacttcatggcattt

SEQ ID NO: 35105 - DNA, 364 bp, Glycine max
  Clone ID: LIB3138-081-P1-N1-E1
aaccattctgcgtagtgatctattggcaaatttttgccagaggcaatttagagcagtttaattcacgcactctcgtcttagaggaatgatttaaatggtggccacagctggtattcctgagaatacaggtatatcattggcctgtgctatgaatagttcttttagggggcgcgccagttctgatatttacaccatctgctctcaagactgtgaattgtggaatcctgcttgcacaaaagcaatgactatgtcatttaatccaaacccgtgttctgatgcatggagtttggaatttctgaagcgtactggatttcattgcgatatcatttgtgtcactggatggactgccaccccaatgcaggat

SEQ ID NO: 35106 - DNA, 366 bp, Glycine max
  Clone ID: LIB3138-081-P1-N1-E10
caacttctttcaagtctaaacccacctcacgtgtggaaccaaccttctccagtctcagcttcaccatatctccaaactacaaacccaccacaccacatctcatgtaccaccttatcccaacaccaaacaacctcaaatttaaattccaccttatcaccattaaaccaaactcaaaccccaaatgaagaatctcaatcaaactctaacaacctgtacacatgctcatcacttcctgcaaatgcaaatgctcttcccccatgctctaagactgtactctcgacttaccccatggtgactcgctctaagaatggaattctcaaacctaaacaagttcacctagccaccaaatttccctatcattctctg

SEQ ID NO: 35107 - DNA, 373 bp, Glycine max
  Clone ID: LIB3138-081-P1-N1-E11
gtgatgataacttaattagtgttcatgaatatgtgaggccttactttagtggttctaaattgaaaagctttctagctagtcataacatcaccattactgatggtattgacaaaactagtgcaactttgcaatttagaaagttagcagattgtgattttctcaagagaaactttaagcagatgtctaatgttttgtgggtggctcctgaggacaaggcgagtttatggtcacaacttcattatgtttcgtgtaataatctggaaatgcaagaagcttatcttgtcaatctcgtaaatgtgttacgagaattgtatttgcacagtccagaggaagctcgccaattgagaaggaaagctctctctcgtattgaatg

SEQ ID NO: 35108 - DNA, 366 bp, Glycine max
  unsure at all n locations
  Clone ID: LIB3138-081-P1-N1-E12
agaaattgttgtccctgactggcgtgggcgtcggggtatgaatgtgtttgggagaaaatggaagctgcaatgggactgatgcggaggattcctccgaaacacacagaaacagctctgtcagcgcttctgagccttatgcctgacaactccttcgatctcctctctaaagtcgatcagcccttccaggttctgtgcgatgtggaatgcggcaaggagttcattttgtgcgaatacaatagagatgccgactcttacagatcaccttggtccaataaataccatccaccattagaagatgggtccctcccttcttcagagtcgcggaagcttgaaattgagcanatgacatattttgcatatatcgtg

SEQ ID NO: 35109 - DNA, 382 bp, Glycine max
  unsure at all n locations
  Clone ID: LIB3138-081-P1-N1-E4
cttatttgactcangttttcatggctgcatttcctagtggtctacaaaacgccttacaaggaccaaaatctgccaacccaaaatgtaatgaggcagaatgagaagaggttcatgtatgagtgtgataatatgaagaggttcatctcttcaactcctggtcaaatttgcaggagtagccaaccatggaacaaagtcaacaatgtcctcacaaaatcaaacacaaaagagaggaatgttcctaggagcatacttcatggcagatgctctttgcataagaatgtcacaaaactttgtggttcagacagtcacctaagcctcattaaggaatgttattcaaagacagaaaacctttccagagtttggtgttcagcaggttctagct

SEQ ID NO: 35110 - DNA, 379 bp, Glycine max
  Clone ID: LIB3138-081-P1-N1-E5
gccaaatgtattggataaaacattacaggaattgggagttgactatatcgacctatatgtgatccactggccagaccgaatgaaaagtgggacatttggactcaatgaagaatattttgagcgaccagacattccgaatacatggagagcaatggaggcactctatgactcatacaaggctagagccataagagtgagcagtttttacttaaagaagcttcaagaattggtaggtatagcaaggagtgtttcttgtgttaaccaagtggaattgcacccaagatggcatcagccaaagttgagcgcattatgtgaatctaaagaaatgcatctatcgggagattatccactaggagcaccagcagctctcaaaagtgat

SEQ ID NO: 35111 - DNA, 377 bp, Glycine max
  Clone ID: LIB3138-081-P1-N1-E6
atatcttcattactgatggtattgacaaaactagtgcgggtttgcaatttagaaagttagcagattgtgattttctcaagagaaactttaagcagatgtctaatgttttatgggtggctcctgaggacacggcgagtttatggtcacaacttcattatgtttcgtgcaataatctggaaatgcaggaagcttatcttgtcaatctcgtaaatgtgttacgagaattgtatttgcacagtccagaggaagctcgccaattgagaaggagagctctctctcgtattgaatggctgcaaaaagctgatgtgcctaccatagcacagattgaagagttccattcgatgcacaggatgatgaatgctcctgattcaaatgat

SEQ ID NO: 35112 - DNA, 127 bp, Glycine max
  Clone ID: LIB3138-081-P1-N1-E7
gaaagcttatgagttaccgaccaatggccaccagggcttcttcctcattcactgtgctcttctcttcataccctttccaacccttctcatatttacacactcttacttttcgcccctttttttcttt

SEQ ID NO: 35113 - DNA, 364 bp, Glycine max
  unsure at all n locations
  Clone ID: LIB3138-081-P1-N1-E8
ctaatctgtctatcaaccttagaagggccaccaggggttcttcctcatccactgtgctcttctctncatcctcttccaacctactcccattttcacacccttctacttcgcgcctttctttctcttcttcccttcactcctcatccttctctctatcaatttctccttcctttttgtcatactattcttcaagttctacacactttgccactcatgctgccttcagcatcagtgccagtgccgccgagaataacaaagtgctcatcgtgaataccaacagcagcggacatgccatcattggcttttactttgccaaagagcttcttggtgcttgccactcagtcaccatactcactgttggtta

SEQ ID NO: 35114 - DNA, 370 bp, Glycine max
  Clone ID: LIB3138-081-P1-N1-E9
aattttgtttctttgtgtgtgtatggtgatgatggcttaattagtgttcatgaatatgtcaagccttactttagtggttctaaattgaaaagctttctagctagtcataacatcaccattactgatggtattgacaaaactagtgcaactttgcaatttagaaagttagcagattgtgattttctcaagagaaactttaagcagatgtctaatgttttgtgggtggctcctgaggacaaggcgagtttatggtcacaacttcattatgtttcgtgtaataatctggaaatgcaagaagcttatcttgtcaatctcgtaaatgtgttacgagaattgtatttgcacagtccagaggaagctcgccaattga

SEQ ID NO: 35115 - DNA, 280 bp, Glycine max
  Clone ID: LIB3138-081-P1-N1-F1
aaaaaaaaaaaaaaacactgcttatctaaaatttttgtggcccccaaacctcactttaataaaactaaaattaaaaatctttcttcctaaccataacattaccaacaccctaccaatttacaaaactcctgccccttttccacttccaaatttatcaaaatataactctcctaaaaaaaaacccaaacccccattcctacattctttcttttttctctcctactccaaagccaatttattttcacacctccattattgttccgttaataattcttaaatc

SEQ ID NO: 35116 - DNA, 367 bp, Glycine max
  Clone ID: LIB3138-081-P1-N1-F10
gtgagatatggcgtattgaatgggcgaagattgggacgctttgcttttgcctccaaattgatctctctctgtcacgagctttgatctgaagcgaagcacttcctctgcgaacatggaagcaagtgcgggaatggttgccggttcgcataaacggaacgagttcgttcggattcgccacgattcttctgacagcgggtctaaacccatgaagaatttgaatgggcaaatctgtcaaatatgcggtgatactgttggattaactgctactggtgatgtgtttgttgcttgcaacgagtgtgctttccctgtgtgtcgtcctttgtatgaatatgagccgaaggatgggaaccagtcttgtccacagtgc

SEQ ID NO: 35117 - DNA, 121 bp, Glycine max
  Clone ID: LIB3138-081-P1-N1-F11
accaaacagcatccgcggcagcgacggtaaccgtggaacaacaacacttccgctgcaaaaaatgtctctggtggcgaacgaggatttccagcacattctgcgtgtggctgaacaccaacgt

SEQ ID NO: 35118 - DNA, 379 bp, Glycine max
  unsure at all n locations
  Clone ID: LIB3138-081-P1-N1-F12
accgttttagttggaaacagccttggaggatgtagtgctttggttgcagcaactgggttgcctgatcttgtcaatggtgttgctcttctaaattctgccggacaatttggcgatgggaaaagggaaagtgaaacttctgaagaaacagctctacaaaagtttctcctaaagccattgaaggaagttttccagcgtgtagttcttggatttttattctggcaggcaaagcaaccagctcgggttctgtcagtcctaaaaagtgtgtatataaattcttccaatgtggatganctatcttgtggaatctataacaaggccagctcaagatccaaatgccggagaagtctactacaggttaatgacgcgcttcatgatgaat

SEQ ID NO: 35119 - DNA, 278 bp, Glycine max
  Clone ID: LIB3138-081-P1-N1-F2
gcaaaaagctgatgtgcctaccatagcacagattgaagagttccattcgatgcagaggatgatgaatgctcctgattcaaatgataatattgatttactgttgagcattgatttgttgggtttacaaggagcaggtaaagcttttccaaacaaaattggttttgatgataagctggtgttggctaacacacaagaattctttgatggaaattttccagtggattcttggttaccaatttttgtgaattgtctttatcctgtaagtcaattaccttcag

SEQ ID NO: 35120 - DNA, 381 bp, Glycine max
  Clone ID: LIB3138-081-P1-N1-F4
cctagtcataggatgccaactatgagcattgaggagggcgggctaaaagaaatggaaataatgaacaaatggcaagagagaaatgtcaaactcatggaagaagtcaattcatcttggcacaatgataggaagtcaaagctaggagaagacgatgatgatgaagatgatgatgctgcacaggagaaagcaagggcttgggatgactggaaggatgataatccacgtggtgctggaaataagaaacttaccccttgtgggtaaactgaggtcttccctggcttaagtaacgggcttaggataaaactgtttttaacgaaatcccgtaatttggagttgatatactacttgtagttagattgtgttaagattatatgtatacca

SEQ ID NO: 35121 - DNA, 381 bp, Glycine max
  Clone ID: LIB3138-081-P1-N1-F5
ctgctgttactgccatgatatagggtatgatactcgggagcaagctaagctgctgaaagctgacttagcctttctggagtgtttggagaagcagcatgggagtactaaaggagaccctcatgttgctcatctttataagacaatgtgtgttaatggtctgaggaattttctgataccgtacagaaggaatattgtgaatctacaacagtgtgggcaacctatgattcagtttggatggcttagcaatttgagatggggaggttggaactttcagaaaactcatagattgagctcactggggggaagtactgggtcataaaatggtgatttcatcggatactgaaagtatgtgatcctgaccccgcagtcttcaaagttcct

SEQ ID NO: 35122 - DNA, 313 bp, Glycine max
  Clone ID: LIB3138-081-P1-N1-F6
aaaatactttcgaaagatgatatcctattgaaatggtggaactgactggcataaacttaagaattcaattatcgaaattgaatatagataatacactttaattggattgcacgaacggtattaaagaaatggagtactaactaccagttcttatttattattgaattaaccgctcaacttggctttgtatcgaacatttgttcgtgatctcaaaaattcttcggcaaaaaatttgaatctatttctatatgcgaatcaattctactactgccggtcctgaggtttcttagctcgaaaaagaatctgggacgta

SEQ ID NO: 35123 - DNA, 357 bp, Glycine max
  Clone ID: LIB3138-081-P1-N1-F7
gctctctctcgtattgaatggctgcaaaaagctggggtgcctaccatagcacagattgaagagttccattcgatgcagaggatgatgaatgctcctgattcaaatgataatattgatttactgttgagcattgatttgttgggtttacaaggagcaggtaaagcttttccaaacaaaattgtttttgatgataagcttgtgttggctaacacacaagaattctttgatggaaattttccagtggattcttggttaccaatttttgtgaattgtctttatcctgtaagtcaattaccttcagaagctgtcgttgtaaatgttacatgtggtagtggacgtggtggtttacccaccact

SEQ ID NO: 35124 - DNA, 214 bp, Glycine max
  Clone ID: LIB3138-081-P1-N1-F8
gggatatatccaacgactatactcgaaaaacatggtgggagtatgaactatcaaccttatctttcatatcacatacaaaagataaaaattcctaacttactaaactattacccatagtaatctacctgaacagttaaaaatgatcaacaacgattgcttaaacctttaaaaaaaaaaaataatagggctgtcaaccgcttttgctctcacacac

SEQ ID NO: 35125 - DNA, 369 bp, Glycine max
  Clone ID: LIB3138-081-P1-N1-F9
gttttcttcatatcttccttgtcactgcccgtgtggcggcgtcatggccaccgtcaccacccaagccttcgccgcaattttccggccatgtacctcgaaatcgaggtttttgaccggctcttccggtaaacttaaccgggaagtgactatgcggccaatggggtgccctccttctgcctctttcaaggttgaagccaagaagggagagtggttacctggcttggcctccccaacttaccttaatggcactcttcctggtgacaatggatttgaccctctggggctagctgaggacccacagaacttgaggtggtacgttcaagccgagcttgtgaatggacgatgggccatgttgggtgttgcaagaat

SEQ ID NO: 35126 - DNA, 287 bp, Glycine max
  Clone ID: LIB3138-081-P1-N1-G11
cttgacttcaacgaattttataggcgggtgcgggcgagcatgtatgaaatttgtgaataaggctgaaggtcaggctgaagcattgtttcttcaaaaagacaaggcattaaaagcgttgcacccagctaacttccattgtgtgtttgagtggaacaattctattgttgctaactttctttggaccaacagaatgggtcattaattgaccatataggtagtcacattatgtgatttgcaagattgtttgttgcagatatgaagctattaatattcaattggatgcccga

SEQ ID NO: 35127 - DNA, 356 bp, Glycine max
  Clone ID: LIB3138-081-P1-N1-G2
taatccacctttgcctggggtgtaaattaaggttcaagaagcaacaagtaatcactcataatacatatatataatggcggattggggtccagtggtgatagcagtggtgctgtttgtgttgcttagccctggtcttctgtttcaattgcctgggaggagcagagtggtagagtttgggaacatgcaaaccagtgcaatttctatcttggtccacacaatcatcttctttggtctcattaccatctttcttattgctattggtgtgcatatctacactggctaggctttattctattctctttttggttaaaggtttaagaaatttttatcttgctattcttttaaggttagttgat

SEQ ID NO: 35128 - DNA, 380 bp, Glycine max
  Clone ID: LIB3138-081-P1-N1-G4
cttacttctttgtcaactcaggtgcgtcctgcaagaacgctgttggctgatgggtgtccatatttgtatgcaatggtgcatgatagttcagtgtctacaatccaagtgaattttgtatttgggtcaaagtgacaaccataaacaatatgtgtgcatatgggctcaatcctggtatttcaggttctcgtcttttgggcaccattcctcagtccatttcacagcaaactgtttggaatcaaatggcaacagtgagaacaccattgaattttgattctagcaagcagagcttttgtcagttttctattgaccttctcggtggaggaatcttagtggacaaaactggagattggatcacacttatacaaaattctccaattagt

SEQ ID NO: 35129 - DNA, 323 bp, Glycine max
  Clone ID: LIB3138-081-P1-N1-G5
gcgcgttatctacgatcagaggctcttccggcgacgacggccgttgtcgacggcggcggttttctccggttatacgcgtctgaactgggaaacggatcagtgttggtagtgagtcactgagtcgactcgctcgagtgaatgggaaaagacgcggttgttgaagcgccttttcttgcatatagttaaattaatcactaattagttagtcggtagagtttgtattatactacgtatatgtatagctacaaacatacatatacgcgtagagtagagtagactgccacttgtacttactctctcccacttatcattaaaattgtatg

SEQ ID NO: 35130 - DNA, 368 bp, Glycine max
  Clone ID: LIB3138-081-P1-N1-G7
gagatattttgttggagatctcgtctttgaagggtcgaagatgacttctccctacattaaatgtacagtctctttcttcatagcatttggaaatttggctgatgataccatcaattttgaggcttttccccacaagctggtgcagtttggagagattcaggaaaaagttgtattgaaattttcacaagaggaatttcttacagcttggtcaactcaggtgcgtcctgcaacaactctgttggctgatgggtgtccatatttgtatgcaatggtgcatgatagttcagtgtctacaataccaggtgattttgtcattggtgtcaagttgacaaccataaacaatatgtgtgcatatgggctcaatcctg

SEQ ID NO: 35131 - DNA, 362 bp, Glycine max
  Clone ID: LIB3138-081-P1-N1-G8
gagatatttaaagaaattaataaaaaatggcaggcggcactgtctactcaacacactctctgagcacaaattgctccatcttaaccccatcaaagacacatctgagtttcttccaccaaaagcacgttgttttctggaggaacagcaacaggggcgacagcagcagcagaagaagctatgtgataacatgtgcagcaggtgactcacagacagtgttgattgctctcgctgccaactcagggtgctggaagagcaccatcattaggtggctggcaagtttgtttggaagagcctccaatccaccgaaaggttgcaaccctgactcagacaccctcattagtgacaccaccactgtcatatgc

SEQ ID NO: 35132 - DNA, 371 bp, Glycine max
  Clone ID: LIB3138-081-P1-N1-G9
attgaattttgattctagcaagcagagcttttggggggtttctattgaccttctcggtggaggaatcttagtggacaaaactggagattggatcacacttatacaaaattctccaattagtaacttattgagagttgctgcttggaagaaaggctgtttaatggtcaagattgtgatgtctgggaatgcagcagtcaaaaggagtgattgggcctcattggtacaagtgtttttaacaaacagcaacagtacagagcattttgatgcatgtaagtggacaaaatcagaaccacattcctgggaattgatcttcccaatagaggtatgtggtcctaataatggttttgaaatgtggagttctgagtgggcaa

SEQ ID NO: 35133 - DNA, 375 bp, Glycine max
  Clone ID: LIB3138-081-P1-N1-H1
gcatctaagtgagatacacagtagttaggtagcaagcgagaagtgtctaaccttagaaacatatctgctacatatcgtgtgcattttggaattgtgccactaaaattctattcatctatggctgcctcatcttatgctatgcaatcaatccttgcaaaccctatgatccgcatttccagcgggtctagggagaaccattttggtgttcctgcttatcacatgagaaggaatgttggcctgagagttaggtccatggctgaggaagagcaaccaagtcagcctgcgaccccagttacaccaccaccagcagaacccaaaccacagccagtctctactccttcaccaaaggtgagcaccaagttttctgatgtgttg

SEQ ID NO: 35134 - DNA, 251 bp, Glycine max
  Clone ID: LIB3138-081-P1-N1-H11
ttttgtttactcatgatcaatataaatccatggcgatataccactcctaggtaggaaaatttaaaatcgaccttgctcattacacgtctactaaatatgtgagcttctcaaaacagcctatcgcgtagcaacaagaaaaaattgtaaataatgtactatctgtgctactttcttatcctaaggttggttgttattgccatacacctgtttggctagagacgataaattaggcggtcaccgactcgtgagca

SEQ ID NO: 35135 - DNA, 369 bp, Glycine max
  Clone ID: LIB3138-081-P1-N1-H9
gtttgttaaagcttttgcaatcaagtttcctgctggctctattgctgccaagaggcacattgattccagcaccacaatcttagatgttcacggagtgggccttaagaactttacaaagtctgcccgggaactcattacccgattgcagaagattgatggtgacaattaccctgagactctttgccaaatgtttattataaatgctgggcctggatttaggctgttgtggagcactgtcaagtcttttctcgatcccaaaacaacttctaagattcatgttcttggaaacaagtatcaaagcaaattgcttgaagttatagatgccagtgagttgccagaatttctgggaggtacctgcacttgtgaaga

SEQ ID NO: 35136 - DNA, 355 bp, Glycine max
  Clone ID: LIB3138-082-P1-N1-A1
ccaaaatggactggtttgatctggattttcccaaggctgaagtgttgatcattaatttcacatccactgaatactttttgcctccctttatcaataaaatgccaaatttgagggcattgataataataaaccacagtacctcacatgcccgccttcaaaatgtttcagtttttaggaatttgaccaacttgaagagtctctggcttgaaaaggtttccatccctcagttatcaggcactgtcttgcaaaacttgggcaaattatttgtagtcctctgcaagattaataatagtttggatgggaaacagttccctaacctctctgagctcactcttgatcactgtgttgatctaac

SEQ ID NO: 35137 - DNA, 239 bp, Glycine max
  Clone ID: LIB3138-082-P1-N1-A10
ggcttgtgagtccagtgagtgagtgttagcggggcgggaaattgattgagtcgaaaagaaccctaacataaaatggattctcaggttgccgtagctcttgctctttcacttgttggtggtgtcagcacttctatcggtgcactttttgtaattgttaataaaacgcccagtttgaagatgcttgggctattacagggttttgctgctggtttgatgcttagcatatcgttctttgattt

SEQ ID NO: 35138 - DNA, 367 bp, Glycine max
  Clone ID: LIB3138-082-P1-N1-A11
aaaaaaaaaaaaaaaacaaaaaaaaaaaaaaaaggcgcaaaattaaaaaaaaaaaaaaaaaaaaaaaaaaaaaaaaaaaaaaaaaaccaaaaaaaaaaaaaaaaaaaaaaaaaaaaaaaaaaaaaaaaaaaaaaaaaaaaaaaaaaaaaaaagggcccccccccccccaaaaaaccccctcccccccaaaaaaaattccaacccgttcccttaagcctacccatttttccctaaaaaaaatttattaaaaccttccctaaaaaattaaaaaactttttcccttttaaaaatttaattcccttaaaaattccaaaaaaaaaacaaccctaaaccaaaaatttaaaaccctgggttcccaaaaaattac

SEQ ID NO: 35139 - DNA, 362 bp, Glycine max
  Clone ID: LIB3138-082-P1-N1-A2
ctagttttttgaggaagatcaacactgaaccctagcggcgctctttacattgctgccgcgtttcgccaagtggaggatttctctccggaatggtggcagctggtgacgacgctgacatggtaccatgactactggctaagccagcagcacgatgagggagccttttacggcgaggacgacgggtttgatggcaatgatgtcgttgatttgcttcctgattcgtttgatcttgatgctggcgaggatctttttgaagagtttataagatcttctgaatcccaagaagaaactggacccaaagtaactgcatgaggcttagagatgaacccatttaaagaatctacctaccaacctaagagact

SEQ ID NO: 35140 - DNA, 365 bp, Glycine max
  Clone ID: LIB3138-082-P1-N1-A3
ctcaattttttgagcagccaaacactctctctctgggtgtcgaaaattctcagtttgcagagaaaatctgaatcatgtcgtggcaagcgtatgtcgacgatcaccttctgtgtgacatcgaaggtaaccacctcactcacgctgctatcatcggccaagacggcagcgtttgggctcagagtaccgacttccctcagttcaaacctgaggagataactgccatcatgaatgactttaatgagcctggatcacttgctccaactggattgtatctcggtggcaccaaatatatggtcatccagggtgaacccggtgctgtcattcgagggaagaagggtcctggtggtgttactgtgaagaagacc

SEQ ID NO: 35141 - DNA, 230 bp, Glycine max
  Clone ID: LIB3138-082-P1-N1-A4
ttttctgcagaattgctctctgttgaaattggatactgttactggcgcaatattatcctgagtgggctccaattaattgtcgagttcatcgacaaccaattcacattactgtagggaattatgtcagaaagcgagatgtcagcattggatatgatgcatgtacaaatcccaatggttgggggtcattgggtggtggccaaggtgggaattacaaacccaaatgtgggttt

SEQ ID NO: 35142 - DNA, 175 bp, Glycine max
  Clone ID: LIB3138-082-P1-N1-A5
tgaaaattcttaatcctctgcatgatctggaatttggggtttctttcgcttgttcgtttgtttaattcaataaaggaaattaggcatgaccctcttgttgagtatgctctgcctatttgaaaatttccacacctcttttaattgtcgtaatgatgtgtgaagtgtgtgttatttt

SEQ ID NO: 35143 - DNA, 365 bp, Glycine max
  Clone ID: LIB3138-082-P1-N1-A6
actcttttgagcagacgtggatgatgtttccaggaacggatctgtttgccagaattccatttcatgcggctcatactatattggaaacagatcaaacgcagcttgacttcgagtcaaagagactacagagcattgtgaaggaaaaatcttacattatatcagaggcaggtgttcttgcagacaagataagtcctggagtgctcaaatcacttgtatccttaaacgacaagccaaagtaagatgctttgagctgactatttagtgagaaaccttgtggtggcagtatcaactgggtggaaaatggcaagtgttttctggaagtctttcatgaggcatttaggctgaggtttatctattctgttgct

SEQ ID NO: 35144 - DNA, 305 bp, Glycine max
  Clone ID: LIB3138-082-P1-N1-A7
gttttgttctatgaaaagaaaggatcaaatgcgtgctcttgatatagttcagaatgatccagaactctccagtttatcaatgatccaggcaccactcgtagatgttgagataagaggtgttccagctctcaaatttcttggtgacattatttggaaatgatttacacagttactcaagcaatgattaggttaaatttagtaatttgctgaagttggcagttgaaaccatagacacatggcatgatatcagggctcatcagattttgtatgatgaagttttggagcacttgagatgttcagattct

SEQ ID NO: 35145 - DNA, 364 bp, Glycine max
  Clone ID: LIB3138-082-P1-N1-A8
gtgtattatagttcagtgtctacaataccaggtgagtttgtcattggtgtcaagttgacaaccataaacaatatgtgtgcatatgggctcaatcctggtatttcaggttctcgtcttttgggcaccattcctcagtccatttcacagcaaactgtttggaatcaaatggcaacagtgagaacaccattgaattttgattctagcaagcagagcttttgtcagttttctattgaccttctcggtggaggaatcttagtggacaaaactggagattggatcacacttatacaaaattctccaattagtaacttattgagagttgctgcttggaagaaaggctgtttaatggtcaagattgtgatgt

SEQ ID NO: 35146 - DNA, 358 bp, Glycine max
  Clone ID: LIB3138-082-P1-N1-A9
tggtactctatgccatcatttgccaggagaatggccttgtgcccattgttgagcctgagattttgactgatggggctcatgacatcgccaaatgtgctgctgttactgaaactgtgcttgcagctgtttacaaggcactcaatgagcagcatgtccttcttgaaggaactcttctcaagcccaacatggttactcccggctctgatagcccaaaggtaccaccagaggtgattgctgagtacacagttcaagcactccgcaggactgtcccagctgcggtgccaggggttgtgtttctgtctggtgggcaaagtgaagaagaagctaccctcaacctgaatgcaatgaacaagttgga

SEQ ID NO: 35147 - DNA, 365 bp, Glycine max
  Clone ID: LIB3138-082-P1-N1-B1
gcgtatttatctattggcaaattttttgacagagggcagttttagagcaagtgttgatttgcagcgcactcatcgtattagaggaatgattaaaatggtggccacagttggtattcctgagaatacaggtatatcattggcctgtgctatgaatagttcttttagggggcgcgccagttctgatatttacaccatctgctctcaagactgtgaattgtggaatcctgcttgcacaaaagcaatgactatgtcatttaatccaaacccgtgttctgatgcatggagtttggaatttctgaagcgtactggatttcattgcgatatcatttgtgtcactggatggactgccaccccaatgcaggatg

SEQ ID NO: 35148 - DNA, 366 bp, Glycine max
  Clone ID: LIB3138-082-P1-N1-B10
cttaattagtgttcatgaatatgtcaagccttactggagtggttctaaattgaaaagctttctagctagtcataacatcaccattactgatggtattgacaaaactagtgcaactttgcaatttagaaagttagcagattgtgattttctcaagagaaactttaagcagatgtctaatgttttgtgggtggctcctgaggacaaggcgagtttatggtcacaacttcattatgtttcgtgtaataatctggaaatgcaagaagcttatcttgtcaatctcgtaaatgtgttacgagaattgtatttgcacagtccagaggaagctcgccaattgagaaggaaagctctctctcgtattgaatggct

SEQ ID NO: 35149 - DNA, 365 bp, Glycine max
  Clone ID: LIB3138-082-P1-N1-B11
ccatcattgagaccatgaagaagcagggcatcaagtgccatatgaaggctgagatcgagaagatcctccctgctgagtccaactcggcgcactgcggctccgttcagctcaagggcgccccgtccctccccgccaacctgatcattatgggcacgggtgtcgggccatctacgtcgttcctgaaggactcgggcttcgagctcgagaaggacggcggaatcgccgtggacgagtacctccgcgtcaagggccaccagaacatctacgccatcggcgatatcgcccactacccgcagtaccccgccaagttccagcgacgggtcgagcactggaacgtggccggcaaccacggtcgagaggtggcg

SEQ ID NO: 35150 - DNA, 367 bp, Glycine max
  Clone ID: LIB3138-082-P1-N1-B12
gaaatttctgagattgagaaaggaaatgctgacatggacaacaatgtacttaagagcgcccctcatccaccatcactgctcatggctgatgcatggacaaaaccatactccagggaatatgcagccttcccagctccttggctccgtgcttcaaagttctggcctaccacaggacgtgttgataatgtgtacggtgaccgcaacctgatttgcacccttctgccagcatcacaggctgttgaagaacaagctgctgccacagcatagtgtgttcaaatgacaactattttcatttcccgttgtacataaactcttattcctattcatacagttcttgcacctcttgaatattgcttcatcatatgtg

SEQ ID NO: 35151 - DNA, 366 bp, Glycine max
  Clone ID: LIB3138-082-P1-N1-B3
ctcgattttttgatgataacttaattagtgttcatgaatatgtcaagccttactttagtggttctaaattgaaaagctttctagctagtcataacatcaccattactgatggtattgacaaaactagtgcaactttgcaatttagaaagttagcagattgtgattttctcaagagaaactttaagcagatgtctaatgttttgtgggtggctcctgaggacaaggcgagtttatggtcacaacttcattatgtttcgtgtaataatctggaaatgcaagaagcttatcttgtcaatctcgtaaatgtgttacgagaattgtatttgcacagtccagaggaagctcgccaattgagaaggaaagctc

SEQ ID NO: 35152 - DNA, 232 bp, Glycine max
  Clone ID: LIB3138-082-P1-N1-B4
ctcgatttgctaaatgagctacttttagtcctttggcggtatctttgtattactgtggcagatgctactatcctcaaatttgaaaaacttactaagtttctttaccttgtccataccctatagctaacaaccctaaaaatggtttcattttctgcatggtagtatatcttggagtttttaaagatggtcatagtagaaaaattgctttaggagaaattaatacatggatcag

SEQ ID NO: 35153 - DNA, 356 bp, Glycine max
  Clone ID: LIB3138-082-P1-N1-B5
atacttttgtaggcacttcaatattttagtaaggatttgggctgaatgacagcaatggtcataaatatgtacatgatacttgtgacctatttatatggatatatattgagatgagttgaggtgaaaaaaaaaaaaaaaaaaaaaaaaaataaaaacaaaaaaaaaaaaaaaaaaaaaaaaaaataaaagaatatgacattaaaactaaaaaaaagaaagaaagagtcgtcgtggacaaattaccttcgcgttaaagggcaccaaaacatgtacggcatcggcaatttcccccacttcccgaagtaccccgtcaagttccagttactggtcgagcactggaacgtggccggcaacca

SEQ ID NO: 35154 - DNA, 371 bp, Glycine max
  unsure at all n locations
  Clone ID: LIB3138-082-P1-N1-B6
gtaatgtcttatttgaggcagtgattggtcaaggtgcagagcttacgcattcttatattcaaactcantctttccgtgctgctcacatcaaatggacctccattcgccaggaagcttctagtacatatgagcttacagaggtaagcacgggaggaaaactggggaggcacaatcttcatatccagcaattgggcccagacaccgtcactgagttatcaactttgcacttgtctgttgctgatcaaacgcaggatctccacagtactcttgtgttggatcatccacgcggctattctcggcaactccataaatgcattgttacacattcacagggacaagcagtttttgatggaaacattaaggttaacagg

SEQ ID NO: 35155 - DNA, 152 bp, Glycine max
  Clone ID: LIB3138-082-P1-N1-B7
ccgtgaatttttccatggagatagagaacgggggcgccaggtccaaaaagatggaagagtattaagtcatagagcaaattggaagaagagcttttggctctggctttctcggtctttacaaggtccagaaaaagaagtgtttgctctaaaaa

SEQ ID NO: 35156 - DNA, 367 bp, Glycine max
  Clone ID: LIB3138-082-P1-N1-B8
cagtatttttctttgaaattgatgacccccacggggagattctagctagctccatattccaaagtaagaagtgacagaagaaaaggaggagaaattagaagaaaaaaaatccagaattcggttatggttaatcaataggggctgtggatgaggtatattcaagttcatgtgcatgattgaagaggatggccaacatggagcgagtgatttcagatttcatgtcttggtttcctctttgggcaattttggtgcttgacttgctgctcaaggtttctggcaacacagaaggtgatgctctgactgcattgaagaacagtgtgagtgatcctaacaatgttcttcaaagttgggattctacacttgtcga

SEQ ID NO: 35157 - DNA, 326 bp, Glycine max
  unsure at all n locations
  Clone ID: LIB3138-082-P1-N1-B9
tgaaatangattctagcaagcagagcttttggcagttttttattgaccttctgggtggaggaatcttagtggacaaaactggagattggatcacacttatacaaaattctccaattagtaacttgttgagagttgctgcttggaagaaaggctgtttaatggtcaagattgtgatgtctgggaatgcagcagtcaaaaggagtgattgggcctcattggtacacgtgtttttaacaaacagcaacagtacagagcattttgatgcatgtaagtggacaaaatcagaaccacattcctgggaattgatcttcccaatataggtatga

SEQ ID NO: 35158 - DNA, 362 bp, Glycine max
  Clone ID: LIB3138-082-P1-N1-C10
ttgacattaagttacactccaactccattgttggaatctggtttgcaaaaagacagagggttaattgtggagtattttggaaggatgtcttacgttgctcataacgttaatcagccccaagagaaagatttgttggagggaaatttttcctttgatattaaatctcgctctagattggaaaaagtttcctctacaaaagcacaatttgttagtggaaaaaccttcaaatatgatataattggtgctggttcacattcttcagaagattttcctgaaaaggaagatcaagaaaaacccaaaaagattgatgccagattgagacaaagaatagatcctcaatacaatgaggttcaggctcagat

SEQ ID NO: 35159 - DNA, 364 bp, Glycine max
  unsure at all n locations
  Clone ID: LIB3138-082-P1-N1-C11
tggtnatattcgtatacatcctttgcaggtttgttgccattgttgtcaagtggaacactaccattggtcaaggtagaggaaatatcccagattattgactcgctgaattttaccgtccaaaactctgttcagttcgctggtcctttggccaccacctcaattagtactaatgccaaatttgatgttcgaagtccaaaacgtgtgcagataaagtttgaggaaggcataattggcactccacagcttacggactcattagagataccggaaaatgtggaatttctgggtcaaaagattgaccttacacttttcaaaggcatccttaccttttgccaagacacagccacatcggtagtgaaaacaa

SEQ ID NO: 35160 - DNA, 363 bp, Glycine max
  Clone ID: LIB3138-082-P1-N1-C12
acttctctctcgtcggactcgaccgcggacaaagctcgaccgtcgattactgcaacgttcgcgacagcgcgcacatcgtaaccttacaacacacaccgaccgccaaacatggcagaggctcaggcgactcccactttcaagctcgtgcttgtcggtgacggaggtactggaaagaccacattcgtcaagcgccatttgaccggagagttcgaaaagaagtacattgcaacacttggtgtcgaggtccacccacttggctttaccacaaacctcggccagatccagttcgatgtgtgggacaccgccggtcaagagaagtttggtggtctccgtgatggatactacatcaacggtcaatgcggt

SEQ ID NO: 35161 - DNA, 367 bp, Glycine max
  Clone ID: LIB3138-082-P1-N1-C2
atggattcttaacaagaaaaagataaacactccccagagttcaaagagcaagcactatttcctctgttgtgtcttttttcaatttgttttccctctctgtagcagcagcagcagtgatggaacgtgctcgcaggctagcaaaccgcgccattctgaggcgtctggtttcagaggcaaagcagcatcagaagaatgaatccgtgctgcactcttccaccacccccatgctgctctattcttcctccaggtgcatgtcctctgttctgcgaagcaggggatccaaaacagagacccttctgggaaggaacatcaacatgtcacgcggcgttgttgttgctgctgctggtggttttctcggcgttggctc

SEQ ID NO: 35162 - DNA, 360 bp, Glycine max
  Clone ID: LIB3138-082-P1-N1-C3
gtcatatcttcaccattactgatggtattgacaaagctagtgcaactttgcaatttagaaagttagcagattgtgattttctcaagagaaactttaagcagatgtctaatgttttgtgggtggctcctgaggacaaggcgagtttatggtcacaacttcattatgtttcgtgtaataatctggaaatgcaagaagcttatcttgtcaatctcgtaaatgtgttacgagaattgtatttgcacagtccagaggaagctcgccaattgagaaggaaagctctctctcgtattgaatggctgcaaaaagctgatgtgcctaccatagcacagattgaagagttccattcgatgcagaggatga

SEQ ID NO: 35163 - DNA, 366 bp, Glycine max
  Clone ID: LIB3138-082-P1-N1-C4
cacttatttttgttacgatggaatcaccgttcaagcgagagattctgaaggggaaggtggctctaatcactggtggagcctccggaatcggattcgaaatttccacccaattcggtaaacatggagcctctgttgcgctcatgggtcgccgcaaacaagtccttcagtccgctgtctccgttctccaatccctcgtcattcccgctgttgggtttgagggggatgtacggaagcaagaggatgccgcaagggtggtggaatccacgttcaagcattttggaaggattgatatactcgtcaatgctgcagctgggaactttctcgtttctgcagaggatttgtccttaaatggctttcgaacagttc

SEQ ID NO: 35164 - DNA, 208 bp, Glycine max
  Clone ID: LIB3138-082-P1-N1-C5
gatttgttttgtttacaaggagcaggtaaagctttgccggacaaaattgtttttgatgataagcttgtgttggctaacacacaagaattctttgatggaaattttccagtggattcttggttaccaatttttgtgaattgtctttatcctgtaagtcaattaccttcagaagctgtcgttgtaaatgttacatgtggtagtggacgtg

SEQ ID NO: 35165 - DNA, 371 bp, Glycine max
  Clone ID: LIB3138-082-P1-N1-C6
gaaacttctatatgaatggcaactggatctaccttgtgagaaaattcctagtgtcttgactacaactgatgagagattggtaggcacagaacatgagggatatgatccttttcttggtggaattcaaaaatatgccactcccatgatgcccctagatgaagaaattctttctaaggttgcacaagatatggttgaggaatggttcgattgtgttgatgaggaggattcctttgaggaagtttctttaagtgcagcacttaatggtgttgagggtttggactatatggaaagaattcctcttgccacatctgagggatttcctcatgtgctttcacgcaaaaatggtgaaaaaggcaaaaggagatttgtct

SEQ ID NO: 35166 - DNA, 322 bp, Glycine max
  Clone ID: LIB3138-082-P1-N1-C7
gctttttcaaacaaaattgtttttgatgatgaggtggtgttggctaacacacaagaattctttgatggaaattttccagtggatttttggttaccaatatgtgagaattgtctttatcctgtaagacaattaccgttagaaagcttgccttgtaaatgttacatggtggagtggacgtagttggaatgtcaggctttttttgtataggatttggaaatttgggtggttattccattaaatttgagggtttttcccaaaagctggtgcaggttggagagattcaagaaaaagttggtttgaaatttttacaagaaggattttt

SEQ ID NO: 35167 - DNA, 363 bp, Glycine max
  Clone ID: LIB3138-082-P1-N1-C8
aattgatgttgaagtcttgcccttctctcttcggcgggcaaacacaagacatcatcatccatggctgcctccgtctccactgtcggagctgtcaacagagctcttttgaacctgaatgggtctggacctggggtttcagctcccagttcatccttctttgggagcagcttgaagaaggttattggctcaagggtccccaacacaaagatttcctctggaagcttcaagattgttgctgtagaagagaagaaagagattgaagagacccagcagaccgacaaggacagatggaagggtcttgcctatgatatctcagacgaccaacaggacatcacaggaggaaagggtttggttgactccctt

SEQ ID NO: 35168 - DNA, 257 bp, Glycine max
  Clone ID: LIB3138-082-P1-N1-C9
tgtatttacgcacctgctgttggcttgttgttgaaggatggcaatttgtaagaaagatgtttggagagttgaatgtggaatcccttctggatttccgctcacagttatttgcaatagcatttttaatgggattcctattagatatagcttttaaaaattactgcgccaggcttaaagctccaatatggttttaccattcttcaaaaaatttggttctttggggggggatggggatgataacctaattaggggtcatt

SEQ ID NO: 35169 - DNA, 365 bp, Glycine max
  Clone ID: LIB3138-082-P1-N1-D1
ccgaaatccattgtgcagattgaaccagacatgaagtcaaggtttcagcttttgagtaccactaccaatggtgattttgttcaagggaaagatctcgcaatggttaaagttaatgtagcatgtgctgctgttggcttgacatcaagttacactccaactccattgttggaatctggtttgcaaaaagacagagggttaattgtggagtattttggaaggatgtcttacgttgctcataacgttaatcagccccaagagaaagatttgttggagggaaatttttcctttgatattaaatctcgctctagattggaaaaagtttcctctacaaaagcacaatttgttagtggaaaaaccttcaaata

SEQ ID NO: 35170 - DNA, 354 bp, Glycine max
  Clone ID: LIB3138-082-P1-N1-D10
cggctctaggcagaaagcaagctcatcctagagttgtaaaaatggcagcagcctcctccatggctctctcttccccatccttggctggcaaggccgtgaagctgggcccatcagcccccgaagtcgggagggtcagcatgaggaagaccgtcaccaagcaggcctcctccggaagcccatggtacggcccagaccgcgtcaagtacttgggcccattctctggcgagcccccgtcctacctcactggcgagttcccaggtgactacggctgggacactgctgggctttcggccgacccagaaaccttcgccagaaaccgtgagctcgaagtgatccactccaggtgggccatgc

SEQ ID NO: 35171 - DNA, 369 bp, Glycine max
  Clone ID: LIB3138-082-P1-N1-D11
cactattcttcttcgcagcaatggcgcgagtggatctggacgggaaccccatgaaggcacttacgatctgcatgatcggcgctggcggcttcataggctcgcatctctgcgagaagctcatgtccgaaacccctcacaccgtcctcgccctcgacgtctacaacgacaagatcaaacaccttctcgaaccctccgattccccctgggccggccgcatcaccttccaccgcctcaacatcaaacacgactctcgcctcgaaggcctcatcaagatggcagatctcactattaatctggctgccatttgcactcccgcggattacaacacctcgcctctcgacaccatttacagcaatttcatcgacgcgc

SEQ ID NO: 35172 - DNA, 365 bp, Glycine max
  unsure at all n locations
  Clone ID: LIB3138-082-P1-N1-D12
aaaagccttagccttccctacaactccaaacacagggacatcatcatccatggctgcctccgtctccactgtcggagctgtcaacagagctcttttgaacctgaatggttctggagctggagcttcagctcccagttcagccttctttgggaccagcttgaagaaggttattgcctcaagggtccccaacagcaaggtttccggtggaagcttcaagattgttgctgtagaagagaagaaagagattgaagagacccagcagaccgacaaggacagatggaagggtcttgcctatgatatctcagacgaccaacaagacatcacangaggaaagggtttggttgactcccttttccaagctccac

SEQ ID NO: 35173 - DNA, 361 bp, Glycine max
  Clone ID: LIB3138-082-P1-N1-D3
atttcttacatcttggtcaactcaggtgcgtcctgcgggaactctgttggctgatgggtgtccatatttgtatgcaatggtgcatgatagttcagtgtctacaataccaggtgattttgtcattggtgtcaagttgacaaccataaacaatatgtgtgcatatgggctcaatcctggtatttcaggttctcgtcttttgggcaccattcctcagtccatttcacagcaaactgtttggaatcaaatggcaacagtgagaacaccattgaattttgattctagcaagcagagcttttgtcagttttctattgaccttctcggtggaggaatcttagtggacaaaactggagattggatcaca

SEQ ID NO: 35174 - DNA, 349 bp, Glycine max
  Clone ID: LIB3138-082-P1-N1-D5
gtttagttatctactcttttctgcatgtttgttctgtcaacgactcctccgcgaaagagtattattcaatattttggttgggttgaatcccggggttgaagcgttgcagacatcacggctattctaagagtgtctcgctccctcattcatgtccgatctgtacgacggaggacgggtagttgcgtaactgccgttaacccttcgccgcacggtgggcgtggtgctttgccttctgaaggtggtagcccttcagacttgctcttcctcgctggtggtggtttcttctagtttcttcactcttttcattacttttagcctgcatagttttaaataagaaaaaaaaaacagc

SEQ ID NO: 35175 - DNA, 371 bp, Glycine max
  Clone ID: LIB3138-082-P1-N1-D6
aagagacagttgagcagagatctagcgtattctctggggctttctttcactgtcacagagccacatccatgggcttcccagccaacggcgcctctgcggcccagcccctaaacttcctcatctacggccgcacgggctggattggcggcctcctcggctccctctgccgggcccagggcatctccttccattacggctcgggccgcctcgagaaccgggcctccctcgaaaccgacatagccctcctcaagccctcccacgtcttcaacgccgccggcgtcacgggccgccccaacgtcgactggtgcgagtcccacaaagtcgagaccatccgaaccaacgtcgtcggaaccctcactctcgccgacgtc

SEQ ID NO: 35176 - DNA, 280 bp, Glycine max
  Clone ID: LIB3138-082-P1-N1-D7
ctgttttatgagttttctcgcgggaaggttagctgggaaagaagctgcgtactgtttccaggaatccaaacaagccgtgggaaaattagcccaaaaaaaccctcttcccaagaccaacaacaacaaccttaactttcacgaaggatatgatcatgcggatgtacttcccgaggttctaaggcactctcttccttccaaagtgtttagaaatgatgaagccacctccttttccttctctgccttcaaatgggtccttcattccgaccccaaaacccaatct

SEQ ID NO: 35177 - DNA, 272 bp, Glycine max
  Clone ID: LIB3138-082-P1-N1-D8
gttttatatactagagttgatccttttccagggggggtactggctgttctttttggcgttaagaatgaaattctgagttctaacgccactaatcctatgctgacgcgacttcttgagaactgtaagagtctcaaatatctggttgatgagtgtccttttgcatttgtgaactagtatgtagtattttattcacttaaataaagcgcattactatgtgcaatgagtgtgtttaaatataaaaaaaaaaaaaaaaaaaaaaaagagggagggat

SEQ ID NO: 35178 - DNA, 365 bp, Glycine max
  Clone ID: LIB3138-082-P1-N1-D9
gaatgcttaaagaagggtacaacagttggtcagggggcattcagggaagttgcagcttatattttggatcatccaatgagtggccgccgatcattatttggtgatgagaagggatttgctggggttcccccgactgttatggttaagtgcttgcataaaggatttaaccatcctggagacttgactgctaagattggctccttgcaaatgttcatggagaataatggaagctgcgaggatatcggacctggggctttcccagtgaaggaagtgcataaaatttcagtactggacatgcgactcgcaaacgcagatagacatgctgggaatattttgattggcaaagagaaggaaatgaccaggct

SEQ ID NO: 35179 - DNA, 276 bp, Glycine max
  Clone ID: LIB3138-082-P1-N1-E10
gctacatggctcagatgcacgcaaatggggtgaacaatgatgggtatgggatgaatggggtgacgagtggggagaatgggggtgagagtttcaagcgtgatatgagggatttggaagagcttttgtcaaagttgaaccccatggctgaggaatttgtacctccatcactagccaatactcatggctttttagctggacctaatgctgggtttggttacactaacaatattattctttcttcttctgttgttagttttgccatggggggtgtcatat

SEQ ID NO: 35180 - DNA, 365 bp, Glycine max
  Clone ID: LIB3138-082-P1-N1-E11
gcagtgtgcagagccttctctcctctattttggctgccaacctttttgctccattcattctcaacaacaaaccaatctctatattttgcttagacaatgagggggagcttgtggcaacttgggcaatcgatcactcgccgtcttgcccatggagataagaaggctgttgctcgccgatgttttgcctcagaagctgagctgaaaaagacagtgtttcatgacttccatgttgctcatggtgggaagatggttccatttgctggatggagcatgccaatccaatacaaggactcaatcatggactctaccatcaactgtaggcagaatggtagcctttttgatgtttcccatatgtgtgggctgag

SEQ ID NO: 35181 - DNA, 354 bp, Glycine max
  Clone ID: LIB3138-082-P1-N1-E12
gtttggtgagattcaggaaaaagttgtattgaggtgttcacaagaggaatttcttacagcttggtcaactcaggtgcgtcctgcaacaactctgttggctgatgggtgtccatatttgtatgcaatggtgcatgatagttcagtgtctacaataccaggtgattttgtcattggtgtcaagttgacaaccataaacaatatgtgtgcatatgggctcaatcctggtatttcaggttctcgtcttttgggcaccattcctcagtccatttcacagcaaactgtttggaatcaaatggcaacagtgagaacaccattgaattttgatctagcaagcagagcttttgtcagttttct

SEQ ID NO: 35182 - DNA, 299 bp, Glycine max
  Clone ID: LIB3138-082-P1-N1-E4
aaaaaaaaaaaaaataaaattatttttaaataattattttataattatttatttatttatatatttttttttattttataaatttcttttaatttatatttttatttttttaataatattttttctttctttttttctcaatttaatttttttcttataatttttttttttttttcttttttattttttcttttctcttttttttttattttttatttttttttatattttttttttcttttcttatttttattttcttttaattaataattttttttttttattttattttttttatt

SEQ ID NO: 35183 - DNA, 328 bp, Glycine max
  Clone ID: LIB3138-082-P1-N1-E5
caccgatcatctcccatgggtaccgttccttcgctgcggcactcatctggggcctgttgtttctctcaatttcaagcctttcaattctattgttcttcgctggatgctcatggaaacaggcatgggaatgccgtggtctatgtgaaggcctatgcttctggggttgagttggtcgcgaagattgatgcttggaatgcccatttggctgactcaggacagactgggatggactctcacgtgctttagggatatagaaggaaacgaagagagcacagctttgtcctcaagagggacaccttgaacactacaattagtgcctacagcctgt

SEQ ID NO: 35184 - DNA, 343 bp, Glycine max
  Clone ID: LIB3138-082-P1-N1-E7
gagatatacgacaagaatccagctttgtatggtggagttgccaaaggccagagccccaagttcatggtgtttgcttgctcagactcaagggtgtgcccatctcatgtgctagatttccaaccaggagaggcctttgtggtcagaaatgttgccaacattgtcccaccatatgaccagtcaaaatacgctggaactggggctgcagttgagtatgctgttttgcatcttaaggtgtcggagattgtggtcattggacacagtgcttgtggtggtattaaagggcttctgtctttcccatattgaggaacctactctactgattttattgaggagtgggtcaaaa

SEQ ID NO: 35185 - DNA, 359 bp, Glycine max
  Clone ID: LIB3138-082-P1-N1-E8
cttttattcccgcacaaaaatggcgtctttgcggggccccacagcttccctccaatgcaaacacgtcctaatcccccgaaacactcttacccagaaacccatcctcaacctctcctccctcccgggcaccaccttcacccccctcaagctcaaattcttcagggggggggccggccggcggtccaccggcgccttggggggcaggatggcaggcaccggagcctccagctacgcggctggcctggccgacgtggctggcgggaacaacacgctcgacgcgacaaccgcggacatcgagaaaatcgacgagatattctcggaggcgcaggtgtcggactacttcgccaaccccaccttgg

SEQ ID NO: 35186 - DNA, 366 bp, Glycine max
  unsure at all n locations
  Clone ID: LIB3138-082-P1-N1-E9
caggtttctcccttctcacgttgatgccgaacgtgggcaatgctcaagcttggtggtacaagccggactatattatcaacgagcttaacataaactccgtgataaccacgccttgccacgaggagatcttgcccatcaactcatggactactcagatgccttatttcatcagaggctatgcgtattccggtggtgggagaaaggtgacacgtgttgaggtaaccctggacggaggtgaaacgtggcaagtgtgcacactggactgtccggagaaacccaacaaatatggaaagtactggtgttggtgtttttggtctgtggaggttgaggtnttggacctgctcggagccagggagattgcggtgc

SEQ ID NO: 35187 - DNA, 357 bp, Glycine max
  Clone ID: LIB3138-082-P1-N1-F10
ggggattatggtattgatagaacttttgaagtagcccaaaaggtctgggcagaggttttcttctaccttgctgagaacaatgtcctttttgagggtattctccttaagcctagcatggttacacctggagccgagtccaaggacaaggccagtcctcagacagttgctgattacaccctcaagctccttcacaggagaattccccctgctgtccctggaattatgtttttgtctggtggacagtctgaggttgaagctaccctcaatttgaatgccatgaaccaatctccaaacccgtggcacgtgtcattctcgtatgccagagcccttcaaaacactgccttgaagacatgggga

SEQ ID NO: 35188 - DNA, 362 bp, Glycine max
  Clone ID: LIB3138-082-P1-N1-F11
gcaagatcaaagaactaaagcacctgggatttgtgaggattgctgctattcaaacttttgtgattgtgtcaaatctgtatgagtacgcaaagcagaattctgggcctttgagatccgctgttggaacggttgagaacactgtaaccaccgttcttggtcctgtctgcaacaaattcaaggacttccctgatgatgtcctggtttatgttgacaaaaaggtggatgaagcttcccacaagttcgatgagcatgctccttcctttgccaagcaccttgcggatcaagccaagggtgtgattcagaaagtgacttgtgaggcagggaaagttgcaagtgaagctcaatctggggggtcaagagct

SEQ ID NO: 35189 - DNA, 373 bp, Glycine max
  Clone ID: LIB3138-082-P1-N1-F12
tgaaattttaaaaatgactgggataaacttaaggagtcaattattgaaattgaataagtaaacaatttaattggattggtcgaatggtatcaaaaaatggagtactaactcccatttcttatttattattgaattaaccgatcaacttgctttgttatcgaacatttctttttgatttcaaaaattttccggaaaaaatttgaatctatttttatatgcgaatcaatcctactacttctggtcctgaggtttctgcgcttgaaaaaaaaaatctgggacgtatcgcccaaataattggtccggtactagatgtagcttttcccccaggtaagatgcctaatatttacaacgctctgatagttaaaggtcgagg

SEQ ID NO: 35190 - DNA, 362 bp, Glycine max
  Clone ID: LIB3138-082-P1-N1-F3
attgaagtttaagtcttgcccttctctcttcaactcgaaacacaagacatcatcatccatggctgcctccgtctccactgtcggagctgtcaacagagctcttttgaacctgaatgggtctggacctggggtttcagctcccagttcatccttctttgggagcagcttgaagaaggttattggctcaagggtccccaacacaaagatttcctctggaagcttcaagattgttgctgtagaagagaagaaagagattgaagagacccagcagaccgacaaggacagatggaagggtcttgcctatgatatctcagacgaccaacaggacatcacaagaggaaagggtttggttgactcccttt

SEQ ID NO: 35191 - DNA, 373 bp, Glycine max
  Clone ID: LIB3138-082-P1-N1-F6
gtttgaatgtctagggttttaacaatttaaatatggagggtccaaggcaaaaaacagatacatgagttcatatttcttgtgaaaaaatgccatcagtactcagttacctatgattaaagatgcagagaaaaaagctttaaaagcatacactaggtcatccaaatactagtgaacttcaactttctggaattgagattgagccacctgtataattctgtattgttgtgcatctaaatactacactcctcttttcctccccataatcattaacctcaatttacatatcaaataggcagctgatccttctaatattagtatcatcttgaccccctcatttagacctagttttgcaggcgggtaagttggctgatct

SEQ ID NO: 35192 - DNA, 320 bp, Glycine max
  Clone ID: LIB3138-082-P1-N1-F7
attcttcttctaggtatgcgtctggggggaaattttaatcactaccagatgcagataatgaataataataatgaatgtgtatcgaaaaaccgatgggattgctgggtgctgcttctgaacatgatgtatgggccactactgtgatatggcacccacatttcgtatactattataataatactatcgacctcctcctatcgggtctgacatcttgtctaatcttcgtggttacaaaggagacctaactcctgctcaagcccttgatttgatatctacacagaaactacgttttgattgatattaggtcagagaaagataag

SEQ ID NO: 35193 - DNA, 352 bp, Glycine max
  Clone ID: LIB3138-082-P1-N1-F8
atttcttccgagtattctgttctcctttattaagcagctaaaaattttaaggaaagggaaaatgaagaatctttgtcagaattttgatgttagagccacgattccggttaaaataggaaaaaaatcgacttgggatgttttgtttcctcgtaggttgtggttgccgacgtggacgtgtgatcagaggaaggaggggaagttgaacttaaaggtgcagtgcggtactaggaaagaagggtgggttgaatctgcgggaaaaagcgcgtttgggtttggcgtttcggccgcggttttgttctctgcgttctgctactcgcccgcggcgcttgcagagtccctcaccgttgctttt

SEQ ID NO: 35194 - DNA, 367 bp, Glycine max
  Clone ID: LIB3138-082-P1-N1-F9
agcattttcactaggagcagcaacaactagtctgagctgaaatggcctcttcagtgatggcatctgtggccctcaaacctgcccctttcactgttgagaagtcctcagtgagaggccttccctctctctcaaggaactcttcttcattcagagttgtggccagtggcaagaagatcaagactgacaaaccttatggaattaatggtggcatggctttgagggatggaactgatgcatctggcaggaaaggaaagggaaagggtgtttaccagtttgtagacaaatacggtgctaatgtcgatggttacagtcctatctacgacaccaaggactggtctccaaccggtgatgtctacgctggcggtac

SEQ ID NO: 35195 - DNA, 363 bp, Glycine max
  Clone ID: LIB3138-082-P1-N1-G11
aaacattatgcaacaacaacaacaatagctacagccgtgtataacaacaaccaagtttcttcttcttctttttcttcagatgaaaccaacaataccaaagacgacaagcactatagaggggttagaagaaggccatgggggaagtatgctgcagaaatccgtgaccctaatagaaaaggctcaagggtgtggcttggaacctttgacacagccatagaagctgctaaggcttatgacaaagctgctttcaagatgagagggagcaaagccatattgaacttccctttggagattggatcagatcagtctaaagaagagtcatcatcatcatcatcatcagtttcaagcagcagcatcgtcatc

SEQ ID NO: 35196 - DNA, 249 bp, Glycine max
  Clone ID: LIB3138-082-P1-N1-G12
ttctaatgccactaatcctatgctgacgcgacgtggtgagaactgtaagagtctcaaatatctggttgatgagtgtccttttgcatttgtgaactagtatgtagtattttattcacttaaataaagcgcattactatgtgcaatgagtgtgtttaaatttaaaaaaaaaaaaaaaaaaaaaaaaaaaaaaaaaaaaaaaaaaaaaaatataaaaaaaataaataaaaaaaaataaaaaaaattataatt

SEQ ID NO: 35197 - DNA, 369 bp, Glycine max
  Clone ID: LIB3138-082-P1-N1-G3
atttgctcattccagaggaagctcgccaattgagagggagaagctctctctcgtattgaatggctgcaaaaagctgatgtgcctaccatagcacagattgaagagttccattcgatgcagaggatgatgaatgctcctgattcaaatgataatattgatttactgttgagcattgatttgttgggtttacaaggagcaggtaaagcttttccaaacaaaattgtttttgatgataagcttgtgttggctaacacacaagaattctttgatggaaattttccagtggattcttggttaccaatttttgtgaattgtctttatcctgtaagtcaattaccttcagaagctgtcgttgtaaatgttacatgt

SEQ ID NO: 35198 - DNA, 394 bp, Glycine max
  unsure at all n locations
  Clone ID: LIB3138-082-P1-N1-G5
aaaaaaaaaaaanantaaaaattataattttatttttttcttaatattttattattacttttttatatattatttttttttatatattttttttttttttttttatatttttttttttttttattattatttttttttttttatattatcatttaattttatttttttataatttattatattttttttatttattattctttttatttttttttaattattattttttttattatattatttttttttaatttttttttttatttattatttttttattatttttattatttatttatattattattttaatttttttattataatttaatttaaattttttatattttattatttttatatattattttttttatattttattttttatttt

SEQ ID NO: 35199 - DNA, 192 bp, Glycine max
  Clone ID: LIB3138-082-P1-N1-G6
ccagatatttttcatgctcttaaacccaatcccatgagccacattcaagagaattggaggatccttgactacttatctcactttccagaaagccttcacatgttcacctttttatttgatgatttgggcgttccacaagattacaggcatatggatggttttggagttaacacatatactctgctcaacaag

SEQ ID NO: 35200 - DNA, 365 bp, Glycine max
  Clone ID: LIB3138-082-P1-N1-G8
gaagaatggtgtcaaattcggcgaggccgtgtggttcaaggccggtgcacagatcttctcagagggaggccttgactacttgggcaacccaaacctgatccatgctcagagcatccttgctatctgggctgttcaggttgtgctcatggggtttgttgaaggttacagagttggtggaggaccacttggtgaaggacttgacccaatctaccctggtggtgcttttgaccctcttggtctggctgatgaccctgatgcattcgctgagttgaaggtcaaggaactcaagaacggtcgcttggctatgttctccatgtttggtttctttgttcaggctattgtcactggcaagggccctattcaga

SEQ ID NO: 35201 - DNA, 372 bp, Glycine max
  Clone ID: LIB3138-082-P1-N1-H11
atcaattcgtactgcactaggtcctgttgtcgatgggataaatagccatgcaaacccccaacttgagtttcatggagttaaaattgagcttggatggttccaagcaacagcttctggttactatcagcttggtatcgtggtagcagttggggattatacccttcttgatttgcaccagtctgatacttgggttggcacagatgaattaatgaggaaaaatgtggcacatggaagaaagaatgttaagcagctgcagcatagttggccatacataagcaattcattatctcttaaaaggataactggaggaattaatggtggcctaataaatgatgctaccttaaaatcattggactttcgaagggacttttt

SEQ ID NO: 35202 - DNA, 376 bp, Glycine max
  Clone ID: LIB3138-082-P1-N1-H12
aacacatagcacaaagcaaagctcatccttgagttaaaaaatggcagcagcttcttccatggctctctcatccccatccttggctggcaaggccgtgaagctgggcccatcagccccagaagtgggaagggtgagcatgaggaagaccgtcaccaagcaggtctcctcaggaagcccatggtacggcccagaccgagtcaagtacttgggcccattctctggcgagcccccgtcctacctaaccggtgagttcccaggcgactacggctgggacactgctgggctttccgcagacccagaaaccttcgccaagaaccgtgaactcgaagtgatccactccaggtgggccatgctcggagccttgggctgcgtcttc

SEQ ID NO: 35203 - DNA, 358 bp, Glycine max
  Clone ID: LIB3138-082-P1-N1-H2
cgccagcgttcatggggaaagtgggctgctgagattcgcgacccaagaaagggggttcgtgtttggcttggaactttcagcactgctgaagaagctgcaagagcttacgatgctgaagcaaggaggatccgtggcaagaaagccaaggtgaatttccctgatgagccttcaagcgctgcttcctcaaaacgtctcaaggcgaatccagaggctcagccaatgaagaaaaatctgaactctgtgaagcccgaaataaaccagatgttcaattttggtgacaatcttgagggctactacagccctatagatcaggtggaacagaaaccactggttaaccagtatgttaaccgtgccccgt

SEQ ID NO: 35204 - DNA, 366 bp, Glycine max
  Clone ID: LIB3138-082-P1-N1-H3
atgataacttaattagtgttcatgaatatgtcaagccttactttagtggttctaaattgaaaagctttctagctagtcataacatcaccattactgatggtattgacaaaactagtgcaactttgcaatttagaaagttagcagattgtgattttctcaagagaaactttaagcagatgtctaatgttttgtgggtggctcctgaggacaaggcgagtttatggtcacaacttcattatgtttcgtgtaataatctggaaatgcaagaagcttatcttgtcaatctcgtaaatgtgttacgagaattgtatttgcacagtccagaggaagctcgccaattgagaaggaaagctctctctcgtattg

SEQ ID NO: 35205 - DNA, 285 bp, Glycine max
  Clone ID: LIB3138-082-P1-N1-H4
cctcaatttatttcacagcaaactgtttggaatcaagtggcatcagtgagaacaccatttaatattgattctagcatgccaagcttttggcagttgtatattgaccttctcgcagggggaatcttatgggacaaaactggagattggatcacacttatacaaaactcttcaattagtaacttgctgagagttgctgcttggaagaaaggctgcacaatggtcaagattgtgatgtctgggcatgccactttgaaaaggagtgcacgggccagattgcaccaagtg

SEQ ID NO: 35206 - DNA, 367 bp, Glycine max
  Clone ID: LIB3138-082-P1-N1-H7
caaaactagtgcaactttgcaatttagaaagttaggagattgtgattttctcaagagaaactttaagcagatgtctaatgttttgtgggtggctcctgaggacaaggcgagtttatggtcacaacttcattatgtttcgtgtaataatctggaaatgcaagaagcttatcttgtcaatctcgtaaatgtgttacgagaattgtatttgcacagtccagaggaagctcgccaattgagaaggaaagctctctctcgtattgaatggctgcaaaaagctgatgtgcctaccatagcacagattgaagagttccattcgatgcagaggatgatgaatgctcctgattcaaatgataatattgatttactg

SEQ ID NO: 35207 - DNA, 319 bp, Glycine max
  Clone ID: LIB3138-082-P1-N1-H8
caacatttttgttcaaacaccccacgagcttctccagcattttcaatcctcttctcttttatcctcatcgctctgcaccaaaacctccccactcctcaattatttatttatctctcccactttttctcacacacattttctcaaacacatggtgtcctcactccttcacttcactctagcttaaataacccaacaaagttcgcttcaaacctcaaccatggccctcgaaacgctcctcgtgaaggtcaaaaccgccatatcaaacagcatcgactcggtcccgccgaagctcctgaagaagaagccttctttcaaagcg

SEQ ID NO: 35208 - DNA, 365 bp, Glycine max
  Clone ID: LIB3138-082-P1-N1-H9
accggttctgtatggatctgaaccagatctacacgccgatggtggttttggcctggtctttcatagatctgatgcatggaggctcagatctactgtacagaggtgtgcgattcatgttcgtctctcttttggaatctgtttcgtagaaagtcgtttggtcttccatgtcgcatggctcttgaggtatttttttttgcagatactgtagataatcgatgagaagaacgcagatccagccgcttccgcttgttcgatcgctacagacgcttgtatcggattattcatgattgattcataagcagcatgtcttcctccggctatagttgttgcagatctcggatgttgtaaaattagtgtatgatgtg

SEQ ID NO: 35209 - DNA, 349 bp, Glycine max
  Clone ID: LIB3138-083-P1-N1-A1
gaaaatttactgcgccaggctaaagctccaagtatgtttggacaatccttcaaaaattttgtttctttgtgtgtgtatggtgatgataacttaattagtgttcatgaatatgtcaagccttactttagtggttctaaattgaaaagctttctagctagtcataacatcaccattactgatggtattgacaaaactagtgcaactttgcaatttagaaagttagcagattgtgattttctcaagagaaactttaagcagatgtctaatgttttgtgggtggctcctgaggacaaggcgagtttatggtcacaacttcattatgtttcgtgtaataatctggaaatgcaag

SEQ ID NO: 35210 - DNA, 237 bp, Glycine max
  unsure at all n locations
  Clone ID: LIB3138-083-P1-N1-A11
agttatttgaaaaaacccaaaatgnnattcgcccagcctgtttttgtaggttcgcacacccaaactctnnggacgaaattttaaaatggggaaagggttacaaatagttgaagagggatgagaacacatgggcaaacaacacgcaaaggcgagtcggggtagaagtcacatgcggaagtggacgaggaacctgacacaaccccgaagggacaaactatctgctgaccgtgtctacct

SEQ ID NO: 35211 - DNA, 349 bp, Glycine max
  Clone ID: LIB3138-083-P1-N1-A3
cttggttgctttaatttgtatggtctgaaagagccgaagggctaccgcgaagataggactcggagttggtcccgtcccaacaaccactcaccgagtcaccgccgtcgccgcttcttcctccgccgcattctccccgccgacgcaccgactattctttctcaactcgagccggccgcccctacgacctcgccccctacccctccgtgtagccgccgcgtcctcctccccctccgtcgccgcgccaggaaaacgagttgagaatgtggtaattataggttcaggccctgcacgatacacagcggcaatatatgcagcacgtgccaatttgaaacctgtggcgtttgagggg

SEQ ID NO: 35212 - DNA, 345 bp, Glycine max
  Clone ID: LIB3138-083-P1-N1-A4
gtccataggtagctcgccaattgagaaggaaagctgtcggtcgtattgaatggctgcaaaaagctgatgtgcctaccatagcacagattgaagagttccattcgatgcagaggatgatgaatgctcctgattcaaatgataatattgatttactgttgagcattgatttgttgggtttacaaggagcaggtaaagcttttccaaacaaaattgtttttgatgataagcttgtgttggctaacacacaagaattctttgatggaaattttccagtggattcttggttaccaatttttgtgaattgtctttatcctgtaagtcaattaccttcagaagctgtcgttg

SEQ ID NO: 35213 - DNA, 346 bp, Glycine max
  Clone ID: LIB3138-083-P1-N1-A5
aaaaattgattcgtgaaaggacgcacctgctgttggctggttgttcaaggatggcaatttgtaagaaagatgtttggagagttgaatgtggaatcccttctggatttccgctcacagttatttgcaatagcatttttaatgagatgctcattagatatagctatgaaaaattactgcgccaggctaaagctccaagtatgtttttacaatccttcaaaaattttgtttctttgtgtgtgtatggtgatgataacttaattagtgttcatgaatatgtcaagccttactttagtggttctaaattgaaaagctttctagctagtcataacatcaccattactgatgg

SEQ ID NO: 35214 - DNA, 84 bp, Glycine max
  Clone ID: LIB3138-083-P1-N1-A6
agcaggttattcttttccaaacaaaattgtttttggtgagaagcttgtgttggctaacacacaaaaattctttgatggaaattt

SEQ ID NO: 35215 - DNA, 343 bp, Glycine max
  Clone ID: LIB3138-083-P1-N1-A8
aacaaatactcccgttttctctctctgttttggcagggccatctgatcaaacttttcttgattctctctctcagtttttgctattctgagtgatgggtatgccctgccgctgttcccacacctcccacatcactgaaatcatcatcaccagcttcttccgccacaagtcttaaattacaacaatttccctcaattattcatcaaccaaccaccttaatagccttttccaatggttccttaaagatccaacttggtcggagtaaacatggcggctagtggaagttccttttccaacatcactagcttccttcgcaaccaacaaccctctttccaacctctcgat

SEQ ID NO: 35216 - DNA, 346 bp, Glycine max
  Clone ID: LIB3138-083-P1-N1-A9
cgcagttaagaacagagagagatccatccatgagtgccaatggccgatcagctcaccgaccaacagatctccgagttcaaggaagccttcagcctcttcgacaaggacggggatggttgtattaccaccaaggaacttgggaccgtgatgcggtcacttggccagaacccaactgaggcagagctgcaggacatgataaatgaggttgatgctgatgggaatggtaccattgatttcccagaattcctgaatctcatggctcgcaagatgaaagacactgattcagaggaggagctgaaggaggctttccgcgtgtttgacaaggatcagaatggcttcatctctg

SEQ ID NO: 35217 - DNA, 343 bp, Glycine max
  Clone ID: LIB3138-083-P1-N1-B10
cgttatttgatttcgaaatccgattattatatgccgaacccgaagtgctccttggtgtattcataaaaagtaataatttttcttcgaatcttagcaattgatatcctttcgaaacaccatttttttcttcatttgaattgacagtgaattctttcgatttcttattcgatttatgtattcttttttctaaattaaacaaggcaaggactaactcccgaactgcaagtaaaaaaaaaatgatagaatagaatatagatttatctataagctctatgacttgtaatagaacttatgcttgatagaaaggttattatcatatagagttgacgaatgagatgaagtt

SEQ ID NO: 35218 - DNA, 344 bp, Glycine max
  Clone ID: LIB3138-083-P1-N1-B11
ctttgctgttctcctcatcttcctcaggggccgtgggggtgacttgttgaagacttggttactggccacggcaactgtagttttggtcatggttggatctgcctacactgggcctgccatgaatcctgctaatgcttttggctgggcatacttaaacaactggcacaacacatgggaccaattctatgtatactggatttgtcccttcaccggagcaatattggctgcttggctgtttcgtgctgtctttcctccaccaccaccaccagaagtaaaacagaagaaagcatgaagagggatagtggatttggttcttcatgtcaattgttaaacaccatgctaca

SEQ ID NO: 35219 - DNA, 346 bp, Glycine max
  Clone ID: LIB3138-083-P1-N1-B2
gtgatgataacttaattagtgttcatgaatatgtcgggcgttactttagtggttctaaattgaaaagctttctagctagtcataacatcaccattactgatggtattgacaaaactagtgtaactttgcaatttagaaagttagcagattgtgattttctcaagagaaactttaagcagatgtctaatgttttgtgggtggctcctgaggacaaggcgagtttatggtcacaacttcattatgtttcgtgtaataatctggaaatgcaagaagcttatcttgtcaatctcgtaaatgtgttacgagaattgtatttgcacagtccagaggaagctcgccaattgag

SEQ ID NO: 35220 - DNA, 346 bp, Glycine max
  Clone ID: LIB3138-083-P1-N1-B3
ctaatctctctttcttcctcttcctcagtagtgcgagttgggattctcttctctgcaactatgcctaaccctaaggtcttcttcgacatgaccatcggcggtcaacctgccggccgcatcgtgatggagctctacgccgacgtgactccgagcaccgccgagaacttccgcgcgctctgcaccggcgagaagggcgccgggcggagcggcaagcccctccactacaaaggctcgtccttccaccgcgtgatcccgaacttcatgtgccagggcggcgacttcaccgccggaaacggcaccggaggcgagtcgatctacggcgccaagttcgccgacgagaacttcg

SEQ ID NO: 35221 - DNA, 348 bp, Glycine max
  Clone ID: LIB3138-083-P1-N1-B5
atgccattgaagatgttatctaccatattgaaacagatgatgtgactacaattagagcaagcacacctatgtttctcatgtctcggaagattaaatcacttggtgtcaaatgggttatctcaggagaaggatctgatgagatctttggagggtatttgtacttccacaaggcacccaacaaggaggagttccacagagaaacatgccgcaagatcaaagcacttcaccaatatgattgcttgcgagccaataaatcaacatttgcttggggtctagaagcccgtgtaccatttttggacaaggcgtttatcaatgctgcaatgagtattgaccctgagtggaagatga

SEQ ID NO: 35222 - DNA, 346 bp, Glycine max
  Clone ID: LIB3138-083-P1-N1-B6
gtgactgtggtggagagtggaagcagggctctgcggtggctggggttggatggagaaaaaagttccattggtcttgatgtgagcaaaatgcaaacttggcttttgaattgttaaaggcacttctttttagtgttttaaacaataggtcttacttggaagtgatgcttatgttgttattttgatgactgtttcggcagagtgtgaaggttaatttgataatgacggattattccatgcccgggatgacaggatatgaattgctcaagaagataaaggagtcatctgtttttagagaggttccagtggtggttatgtcgtctgagaatatcttgaccagaattgatag

SEQ ID NO: 35223 - DNA, 347 bp, Glycine max
  Clone ID: LIB3138-083-P1-N1-B7
gaaaggcatcaggtgaagatgaagcttgggggaaggaagtcccaagcttgaaaggtggtactatagaggattacaaggacaacaacgtggatgaagatcttaatgatgaggaagaatttgatgaatcagacaagtcacatcataatgaagctccagaatatagacacctaattgccattcatgctgggaagcctaaaggtggattagtggaatgcctcaaagtggatcctgaaaaagtgagacgtctaagtttaagtgagcaacagcttgaaaaggctgctataaattatggacaacaaattgtcaggtttactcagcggaatatactgagggtgtatccaaaaggt

SEQ ID NO: 35224 - DNA, 342 bp, Glycine max
  Clone ID: LIB3138-083-P1-N1-B8
gccaaataaggcgccgagttcgagagttttgaagagcgggttttatgtggggtttgaatctctataagaggccgaaactcagtggtgctatgcttggagcgattttgccgctggctgcagtgcatactttggggaaccttttcactaatatgagtcttgggaaggtggccgtgtctttcactcacactatcaaagccatggagcctttcttttcagtcatcctttctgccatgttccttggagagtttcctacaccgtgggtggttggttcccttgtgcctattgttggtggagttgcactggcgtctgttaccgaggcctctttcaattgggctggatttt

SEQ ID NO: 35225 - DNA, 344 bp, Glycine max
  Clone ID: LIB3138-083-P1-N1-B9
aatttgtatatcaagaaaaacccaaaaagatgggcggcagattgaaacaaagaatagatcctcaatacaatgaggttcaagctcagatggaaacaaatttgtttaaattgtctcttgatgatgttgaaactcctaaaggttccatgttggatctgaaaatttctcaatctaaaattgcacttcccaagaacacagttggaggaaccattctgcgtagtgatctattggcaaattttttgacagagggcaattttagagcaagtgttgatttgcagcgcactcatcgtattagaggaatgattaaaatggtggccacagttggtattcctgagaatacaggtata

SEQ ID NO: 35226 - DNA, 344 bp, Glycine max
  Clone ID: LIB3138-083-P1-N1-C1
tcttgatgatttaatggcgggtgaattagtggaatgtggagagggtactataggcattgctttgaatttggaatccaaaaatgttggtgttgtattaatgggtgatggtttgatgatacaagagggaagttcagtaaaagcaacaggaagaattgctcagatacctgtaagtgaggcttatttgggtcgtgttataaatgccctggctaaaccaattgatggtcgaggagaaatttcagcttcggaatctcgattaatcgaatctcctgctcccggtattatttcgagacgttccgtatatgagcctctccaaacaggacttattgctattgattcgatgatcc

SEQ ID NO: 35227 - DNA, 348 bp, Glycine max
  Clone ID: LIB3138-083-P1-N1-C10
gaaaggttagagtatagtatgagaagaagtggggcgtcggaactgaagtgaagtgatgcgcggcaacatttgggaaacaaaatggttgacagtgagcataaccctaacactcaccgccgtttccatctctgcgtacgtattaaagagaaaatggaatcatctgaactccaaaattgaggagcttgaggcatctctcaagtctttctcagacaattgcgcctccgaaagacaaggccgaattagagctcaacaggccttgagaaaagaagtaacacagtcgcaacctaattctcaaaagcttaacctcacttcttatcccatgatgccaattggtgtcgtccactcgtg

SEQ ID NO: 35228 - DNA, 234 bp, Glycine max
  Clone ID: LIB3138-083-P1-N1-C11
aaattataaaaaaaaaaaaaaaaaaaaaaaaaggcgcaaaatataaaaaaaaaaaaaaaaaaaaaaaaaaaaaaaaaaaaaaaaaaaaaaaaaaaaaaaaaaaaaaaaaaaaaaaaaagggcccccccccacctattaaccttttcaacccggaaataaattccgacccgttccctcaaggcttcccacttttccttataagaagcctttttaaacctttcctaaaaaatggca

SEQ ID NO: 35229 - DNA, 226 bp, Glycine max
  Clone ID: LIB3138-083-P1-N1-C2
taatactcttatgccagctttttctgttccacaggctacggccagatcttctgaaaatgcggaatcctctgcatgatctggaatttgtgttttctttcgcttgttcgtttgtttaattcaataaaggaaattaggcatgaccctcttgttgagtatgctctgcctatttgaaaatttccacacctcttttaattgtcgtaatgatgtgtgaagtgtgtgttatttt

SEQ ID NO: 35230 - DNA, 345 bp, Glycine max
  Clone ID: LIB3138-083-P1-N1-C3
tgcatgtaagtggacaaaatcagaaccacattcctggggattgatcttcccaatagaggtatgtggtcctaataatggttttgaaatgtggagttctgagtgggcaaatcaaacttcatggcatttgagtttccttattgacaatcccaaacagtctacagtttttgatattctcttgggaatctctcaagattttgaaattgctggtaatactcttatgccagctttttctgttccacaggctactgccagatcttctgaaaatgcggaatcctctgcatgatctggaatttgtgttttctttcgcttgttcgtttgtttaattcaataaaggaaattaggcat

SEQ ID NO: 35231 - DNA, 349 bp, Glycine max
  Clone ID: LIB3138-083-P1-N1-C4
tgcccgtccaccatggccaccaaccattcaaagtcgggctttgattttactgtcaaggatgctaaaggcgatgatgtggatcttgctacttacaagggaaaagtcttgctgattgttaatgttgcttccaaatgtggcatgaccaactcaaattatgtggagttgaatcaactattcgagaaatacaaagacaaagggctggagattctggcatttccatgtaatcaatttggtgaggaggaacccggaagcaatgatcaaattcaggagtttgtctgcactcgctttaaatctgaatttcccatctttgataagattgaagtgaatggagacagtgcttgtcctttgt

SEQ ID NO: 35232 - DNA, 327 bp, Glycine max
  unsure at all n locations
  Clone ID: LIB3138-083-P1-N1-C5
tccttcctctgggcccgcctccttttcctttttgccgccatgtccaacgccgccgacgacatcctgatccgtcaggtggtgccggatgccgtcggcgaagcggcggagaaggaggaggaccacctgctgaacgcggagcaccacttcgcgagcttcaaggcgaagttcgggaagaagtacgcgaccaaggaggagcacgaccgtcgcttcggcgtcttcaagtccaacctccgcanagcgaggctgcacgccaagctcgacccctccgccgtccacggcgtcaccaaattctccgatctcactccggccgagttccgccgccaattc

SEQ ID NO: 35233 - DNA, 348 bp, Glycine max
  Clone ID: LIB3138-083-P1-N1-C6
gttatcatttatggtaagtacaagagtgtggagcagcgcgtgatagcacaaacagatgggaccagaatgtccattgcctcattctataaccctggcagtgatgctgtcatctaccctgctccagaattgttggagaaagaggcagaagagaaaaaccagctctacccaaaatttgtgtttgaagactacatgaagctatatgctaagttgaagttccaggccaaggagccaagatttgaagcctttaaagcatcaaattttggtccaattgcaactgtttaaatatttttactatagtctaccacatgcttgacttgggaagagtgtaacaaagtacctgatgcatgt

SEQ ID NO: 35234 - DNA, 344 bp, Glycine max
  Clone ID: LIB3138-083-P1-N1-C7
gctaaattctcaaacacaagccccacgacatgctggagttctgcgcaaacttctttaatcgccgtctcgagtcgcagcgaaccgaatatctgctgtcgcaacagcactccagtccccagggccgtgccgagaacacctttcccggcaacaaccccttcagcacctcccccagcagcggcagcggcttcaccaaatccacaatgcagcgtctcgaagaagaggaggagaacgacaccatgacctcccccactgcctcgacctttgcagccgtcgactttagcaggtcccgcggcagcaacaacgactcgggtgcgagcgcatttggcgactttggcggctttggc

SEQ ID NO: 35235 - DNA, 343 bp, Glycine max
  Clone ID: LIB3138-083-P1-N1-C8
cattactaaaccctaaaggacaacgtcgacatgctgaaactcatccaattgggcctcaccttctccgacgagcacggcaaccttcccatgtgcggcggcgacgacgaagaatccgacacgtgctgctgcatctggcaattcaacttccgcgaattcaacgtcaacgaggacgtctttgccaacgactccatcgagctcttgcgccaaagcggcatcgatttcaagaggaacaacgaaaacggcatcgacgcccaccgttttggggagcttctcatgtcctccgggatcgtcttaaacgacaacattcattgggttactttccacagtggttacgatttcgggt

SEQ ID NO: 35236 - DNA, 345 bp, Glycine max
  Clone ID: LIB3138-083-P1-N1-C9
cagtgtttaagcaaaagcgcatttccgctgtgggcggtgtgtgtttgcgatgccaggtggggcaaccgtctgctccggtcaccggtttctctgcgttgttctgcattcgactcgtccccgactcagctacccgactcggtcgcgacccgttccggttcaacttggatccgtgtttgtgtcgaatggtaatggcgatagtaagcggttcagctccaagttgagcctcattcccagagccgttgattcttccaccgcacaatcttccgtcgtttccgacgatggcttctccgtttctaagctttcatttggtgtgattggtctaggtgttggactctcactcttgtc

SEQ ID NO: 35237 - DNA, 344 bp, Glycine max
  Clone ID: LIB3138-083-P1-N1-D11
gtcagttaaccaagcgctctgagtttgtacaggggggaaccaggagaccattctctgtgactgaggtagaagcacttgttcatgcagttgaggaactcggaactgggaggtggcgtgatgttaagttgcgagcttttgagaatgcagaccataggacttatgtagacttaaaggataaatggaaaacattagtgcacaccgcaacaatctcccctcaacaaaggaggggagagccagtacctcaggagctcttggacagggttttggctgctcatgctttctggtctcagcaccaagccaagcaacatggcaagcatcaagctggaccaggaaccttgaagatt

SEQ ID NO: 35238 - DNA, 346 bp, Glycine max
  unsure at all n locations
  Clone ID: LIB3138-083-P1-N1-D12
gaatnttatatcatagctctcagccatggccgcgccgacctaatagcatgccatgtcacctcatggtggggttctttgcatatgcgaaatcccttgaaataaatgtggacaaagaagagttggaagatgctcagtggcacagtagagaatatgtaagaaaggctctgacatttgctgaatacaagaaagcccaacaaactgcggtagcgaaggtagaacaaatgtgtaagggagtagaaaaggctcacagcttgtctaccgattgcaatgtggaaagtggtgaacttgctccaatgtttgttcctggaccctttgcaatagctcatcaccttatttcctcctgggc

SEQ ID NO: 35239 - DNA, 347 bp, Glycine max
  Clone ID: LIB3138-083-P1-N1-D3
tatctttatatttctatgaattatcttttgattaggaggatttattaggacaagatggtatttcagtccaaggccgacaaagttttcgactcaaacaatactttcagaagtatctatattttcttaagacgagtgcgattaatttgaaattgcaaactgtcctttttttataaactataaaatttaaacatatgttatgtaaatgttaattgaggatatagatacgtggcagttaattacagcctaataattattttttttgcaaatatttttattaatactgttcataatcttttctataccagactttttttttcaggtacataaaatttcgatcattgatatta

SEQ ID NO: 35240 - DNA, 343 bp, Glycine max
  Clone ID: LIB3138-083-P1-N1-D4
ggaaacttaatgcatgggtcaagtaacaccaagcgggatgaactggaagggtttatacaggagatctgcagacggacagtttgttcaagaaagaaaaaattttagagtctagctttccgtcgggcccattaagatgaaagcattgttagcataacgtccaaaatgttgccatacccatctcatcagtaacatcattatcaaattgcactactttggattgtaagctaatttaaatcaaggactacatttagattgacgtggtgttctggtcaagactcatgtggttgcacaccaactactggtaagacaaaggaggcagttacgggggctctaatagccgaac

SEQ ID NO: 35241 - DNA, 349 bp, Glycine max
  Clone ID: LIB3138-083-P1-N1-D5
atgaaaatgtagaagagatatggaaaaaacattgggtctggtggtgagttaactgaaaaggaaattatcagagctgagaggaactctgggtttatcagtaacagagtgagagaaattcaaatgctaaatgctttgaggaaaagggaacaaaaagagcgcagggaaaaggatttgagggaaggattacaactatataagaatggcaaatatgatgaagcactagagaaatttgagtctattttaggatcaaagccagaacctgaggaagcagcagttgcaagttacaatgttgcttgttgttactctaagctaaaccagattcaagctgcactttcttcactagaagaag

SEQ ID NO: 35242 - DNA, 347 bp, Glycine max
  Clone ID: LIB3138-083-P1-N1-D6
agcagattgtgattttctcaagagaaactttaagcagatgtctaatgttttgtgggtggctcctgaggacaaggcgagtttatggtcacaacttcattatgtttcgtgtaataatctggaaatgcaagaagcttatcttgtcaatctcgtaaatgtgttacgagaattgtatttgcacagtccagaggaagctcgccaattgagaaggaaagctctctctcgtattgaatggctgcaaaaagctgatgtgcctaccatagcacagattgaagagttccattcgatgcagaggatgatgaatgctcctgattcaaatgataatattgatttactgttgagcattgatt

SEQ ID NO: 35243 - DNA, 347 bp, Glycine max
  Clone ID: LIB3138-083-P1-N1-D7
gcatccttatcatttcaaggccaacacaaagcagaggaagcaaaaaagaaaaaaaagcaaagagagagagagagataataaagagaaaaaactgaaggaagaagaaagggtttgtttgtgtgaaagaaagagaaagagaggatgcagagtgagaaccagaacaaccagttggtggtgcagaattcggggagcctgagcttcagcagccatttgtcgaaggaagacgaagagatgtcaaggtctgctctctccaccttcagagccaaggaggaagagattgaaaggaagaagatggaggtcagagaaaaggttcagcttcagttaggtcgagtcgaagaagaaactaa

SEQ ID NO: 35244 - DNA, 345 bp, Glycine max
  Clone ID: LIB3138-083-P1-N1-D8
caaatgggaggtttgttgttgtgtgtggagatggtgagtacattatatacactgcattggcatggagaaataggtcatttggttcagcactggaatttgtttggtcttctgagggagaatatgctgtcagagaaagtacatcaaagattaaaattttcagcaaaaatttccaggaaaagaggagtgtccgaccaacattttcagctgaaagaatatttggtggcactctactggcgatgtgctccaacgatttcatctgcttttatgactgggctgaatgcaggttgatctatcgcattgatgtcaatgtgaaaaacctctactgggctgacagtggtgatctag

SEQ ID NO: 35245 - DNA, 335 bp, Glycine max
  Clone ID: LIB3138-083-P1-N1-E1
aattctccaattagtaacttgttgggggttgttgcttggaagaaaggctgtttaatggtcaagattgtgatgtctgggaatgcagcagtcaaaaggagtgattgggcctcattggtacaagtgtttttaacaaacagcaacagtacagagcattttgatgcatgtaagtggacaaaatcagaaccacattcctgggaattgatcttcccaatagaggtatgtggtcctaataatggttttgaaatgtggagttctgagtgggcaaatcaaacttcatggcatttgagtttccttattgacaatcccaaacagtctacagtttttgatattctctt

SEQ ID NO: 35246 - DNA, 347 bp, Glycine max
  Clone ID: LIB3138-083-P1-N1-E10
ctggaatacagcacacgtatgttgaaactgaggaggggcgctatgtttaccagccaatagaagcactgtacctgcttcttgtaacaaacaaaaacagcaacatactggaagatttggaaactctgagacttctctctaaacttgtacctgaatattcttactcccttgatgaagagggtatttgcaaacatgcctttgagttgatttttgcatttgatgaagtcatctctcttgggcacaaggaaaatgtgactgttgcacaagttaagcaatactgcgagatggagagtcatgaagagaagctgcacaagttggttttgcagagcaagattaatgaaactaaggat

SEQ ID NO: 35247 - DNA, 346 bp, Glycine max
  Clone ID: LIB3138-083-P1-N1-E11
agctgtctttgtaaatgttacatgtggtagtggacgtggtggtttacccaccactgcttgaattaattctgcagttaacaatcgctcctcagatatcaacaaaaggattcgcacagcacttgggaaaggtaagaaaattgtttttcttactagagttgatccttttccagtagctttactggctgttctttttggcgttaagaatgaaattctgagttctaacgccactaatcctatgctgacgcgacttcttgagaactgtaagagtctcaaatatctggttgatgagtgtccttttgcatttgtgaactagtatgtagtattttattcacttaaataaagcgca

SEQ ID NO: 35248 - DNA, 344 bp, Glycine max
  Clone ID: LIB3138-083-P1-N1-E12
cccatttcctattgtgttttaaatccacaaaatccggttgtgttaaataggtggatgggaaaattgactttcccccagggcacttcccgaagtgttaagagaatgcctctttctatagggggaggagctggtgcaaagaatgctattctcatgaatatgccaaatgctgttctttcaatgtggagatattttgttggagatctcgtctttgaagtttctaagatgacttctccctacattaaatgtacagtctctttcttcatagcatttggaaatttggctgatgataccatcaattttgaggcttttccccacaagctggtgcagtttggagagattcagga

SEQ ID NO: 35249 - DNA, 283 bp, Glycine max
  Clone ID: LIB3138-083-P1-N1-E2
tcatatgaaacctgccccggagggggcatattatggggacctttactttacaacatatttctaccatcaggtttcaaaagggagcgttttacacaaatcttttcttccctgggttcacgtgtgttctcaaattttagggctctgaattgcctagaaaaaatctttgtgagaaatcttcacacactatttttgcattacctacgctggctaaaccggttctttagaattgtgggagaccttaaacattgatttataccggaacccgacttttttttggggcaca

SEQ ID NO: 35250 - DNA, 345 bp, Glycine max
  Clone ID: LIB3138-083-P1-N1-E5
ggacggtcttcatcctgggcatcaattacgccgatgccaattctcagaggaaggggacagatgaaacgctcgagtttgtcgaatttcgagatggcctttcctaggtgctcggctccagaacctcaatttcaagagatcgtactcttttggcgtatttgcccaggaacgatggtccgctttcgccagggctgtgcacgcttgcaagccagagcttactcttggtcctacttggcagaggctggccagatcctggcgaggaagatgctcggccacggcgaggagcacgtctaggatcaagcgttctcccatagtgctgggattgttttgctgaaagcgaaggcaaga

SEQ ID NO: 35251 - DNA, 349 bp, Glycine max
  Clone ID: LIB3138-083-P1-N1-E6
caagaatttttccatcaagttcctagctctaataagtcggtgaatgaaaaatgtgccatagaaatgcatagtcaactttgtgatggggctgatcctgaaattgaagatttaagaacaactctagatccaccaactgagcaagatgattctaatacaatctctctggcaattgatgatctttttgttgaagacaccatactgtacatgcttcaagatgttatatcaaagttagatgtcaacataagactctgcattagagatagcttgttccggttggctcaaagtgctatgcaaaggaattatgctagtgatacaagcagtacaaacaacagtagcagagaagaactta

SEQ ID NO: 35252 - DNA, 342 bp, Glycine max
  Clone ID: LIB3138-083-P1-N1-E7
aaattattaaaaaaaaaaaaaaaaaaaaaaaaagcgcaaatttaaaaaaaaaaaaaaaaaaaaaaaaaaaaaaaaaaaaaaaaaaaaaaaaaaaaaaaaaaaaaaaaaaaaaaaaaaaaaaaaaaaaaaaaagggcccccccccccattaaaaacctcttcaccccgaaaataaattccaacccgttccctaaaacctaacaaattttcctttaataaactctttttaaaccttcccaaaataaaggaaaaacctttttcctttgaaaaattgtattcccttaaaaattccaaaaaaaatacaacccgaaaacaaaaaattaaaaacctggggccccaaaaa

SEQ ID NO: 35253 - DNA, 329 bp, Glycine max
  Clone ID: LIB3138-083-P1-N1-E8
aaattataaaaaaaaaaaaaaaaaaaaaaaaaagccccattttaaaaaaaaaaaaaaaaaaaaaaaaaaaaaaaaaaaaaaaaaaaaaaaaaaaaaaaaaaaaaaaaaaaaaaaaaaaaaaaaaaaaaaaaaaaagggcccccccccattttaaaaccctttcaccccccaaataaataccgacccgttccctacaccctacccatttttccttaaaaaaagtcttttaaaaccttccctaaaaaaaagaaaaacctttttcctttgaaaaatgggtatccctcaaaaattccacaaaaaaaacaaccctaaacattaaatttaaaacc

SEQ ID NO: 35254 - DNA, 125 bp, Glycine max
  Clone ID: LIB3138-083-P1-N1-E9
aaatacttaaaaatatagttggatttcccacctggcgtctacccctgttgaaagtaacaaagtaaagctgctctgcaacaggggtagaagcaaggtgggaaatactgaaaaatatagttggattt

SEQ ID NO: 35255 - DNA, 215 bp, Glycine max
  Clone ID: LIB3138-083-P1-N1-F1
cgaatttcgcttcaagattgaccatttggaaaaccacctataacgtgttatgagggggtttttaattaggcaggctacctagtataccaaaagcaccactgtgcttgtactaaataaattcctgcttatatatactggccattatgttatatataaaaatcatatgcatgccgtttatataaataaagctatgttgaataatatatctattttgt

SEQ ID NO: 35256 - DNA, 349 bp, Glycine max
  Clone ID: LIB3138-083-P1-N1-F10
ccttcttaaagaatttgtgaaaagggggaaaggaagagagttcctgctatgaacaaaaacttatgatcttggagaaaagaagaaaaaaaaaaaaaacagatgtgtaacaaacttataaaacaaaaactgggccaccatcgcagcaaaacgcgtgttcgcagcaacaaagaatcacatcgcaacgaatcagaggcccctttcaacgaatcacatggcagaaccgtcgtccaccgccgccaccatcgctaccgctgatcctccggttccagcgaccaaaagctgggccgacgaagcggacgaagaaaccaacgcctccaccgccgaggcagaaaccttctccgttaacctg

SEQ ID NO: 35257 - DNA, 343 bp, Glycine max
  Clone ID: LIB3138-083-P1-N1-F11
gttttgttcttcttcacttccacgttccatgggaggaatatgctcttcttatagtactaggatggatctgcagtttgtgttgttcaagatctgtgtggtttatttcattgttgtttgcttaagatatatttatttactttactaaagtaaaatttctctttgtgcgtaggattaataattagcacatagttttttggaagagttgtgaaaatgggacttgtggagctttttggagtggcatctatgcccgtgatcaaagtactaataatcactgcagttggcttgcttcttgcactggataacgtaaatttgttgggaaaagatgcaaggatacaagtgaatc

SEQ ID NO: 35258 - DNA, 346 bp, Glycine max
  Clone ID: LIB3138-083-P1-N1-F12
gggtttttacctcaagaagagaccaactgagggccgagttgacaaggtccttcaaccctttgatgaaaacaaattcaactttaccaaagttgggcaagaagaggtcctcttccaatttgaagctagcgaggatggacaagtccagttctttccaaatgctccagttgatgttgacaattctcccagctttgttgccatcaatgtcagtcctattgagtatgggcatgttttgctgattccgcgcattttcgagtgtttgcctcaaaggattgaccgtgagagcttcctccttgcacttcacatggcagtggaagctgataatccatattttcgattgggttacaac

SEQ ID NO: 35259 - DNA, 360 bp, Glycine max
  Clone ID: LIB3138-083-P1-N1-F3
aatttcggttcaggagcaatttttttttaatttaatccaaacccgtgtgccgatgcatggagtttggaatttctgaaccgtcctggatttcattgcgatatcatttgtgtcactggatggactgccaccccaatgcaggatgttcaggttacaattgattggtttatttcctctcaggaatgtgttcccaggacctattgtgttttaaatccacaaaatccttttgtgttaaataggtggatgggaaaattgactttcccccagggcacttcccgaagtgttaagagaatgcctctttctatagggggaggagctggtgcaaagaatgctattctcatgaatatgccaaatgctgttctt

SEQ ID NO: 35260 - DNA, 416 bp, Glycine max
  Clone ID: LIB3138-083-P1-N1-F4
gaagagctatgaccgtccattccccccgtccgtaagccttcggaatttcggcttcgagggtccacaatattttaaataatggatgggtgccgggttctggggggcggctaacacacctttaactgccgtatatggttctacaaagtgtggccttaagcaacttcaaagatcactattaaaggagtgcaagcgatccaaagtaggtgtccatactgcatctcctggcatggttcttacagatctgcttttaagtggctcaacggtccaaaacaggcagatgtttaacatcatctgtgagcttcccgaaactgttgctagaacactagttccacggatgcgggttgttaagggaacaggcaaagctatcaattacttgacccctcccagaatcttacttgctttgatcactgcttggt

SEQ ID NO: 35261 - DNA, 347 bp, Glycine max
  Clone ID: LIB3138-083-P1-N1-F6
tgtgtgtgtatggtgatgataacttaattagtgttgatgaatatgtcaagccttactttagtggttctaaattgaaaagctttctagctagtcataacatcaccattactgatggtattgacaaaactagtgcaactttgcaatttagaaagttagcagattgtgattttctcaagagaaactttaagcagatgtctaatgttttgtgggtggctcctgaggacaaggcgagtttatggtcacaacttcattatgtttcgtgtaataatctggaaatgcaagaagcttatcttgtcaacctcgtaaatgtgttacgagaattgtatttgcacagtccagaggaagct

SEQ ID NO: 35262 - DNA, 316 bp, Glycine max
  Clone ID: LIB3138-083-P1-N1-F7
atggcttttgagtttccttattgacaatcccaagcggtctacagtttttgatattctcttgggaatctctcaagattttgaaattgctggtaatactcttatgccagctttttctgttccacaggctactgccagatcttctgaaaatgcggaatcctctgcatgatctggaatttgtgttttctttcgcttgttcgtttgtttaattcaataaaggaaattaggcatgaccctcttgttgagtatgctctgcctatttgaaaatttccacacctcttttaattgtcgtaatgatgtgtgaagtgtgtgttatttt

SEQ ID NO: 35263 - DNA, 348 bp, Glycine max
  Clone ID: LIB3138-083-P1-N1-F8
gcgcgttatacaagcctcaggtaagccaaagccatgggtaagcataacaatgttatccccaacggacacttccgtaagcactggcagaactatgtgaagacctggttcaatcagccagcacggaagacaagaagacggttggctcgtcagaagaaagctgtgaagattttccccagacctacagctggacctcttagacccattgtacatggtcaaactttgaaatacaacatgaaagtgagagctggaaggggattttcccttgaagaactcaaggcagcaaggattcccaaaaagcttgcaccaacaattggtattgctgttgatcatcgccgcaagaaccgttct

SEQ ID NO: 35264 - DNA, 341 bp, Glycine max
  Clone ID: LIB3138-083-P1-N1-F9
cgactaccaagccaaaaaaggtaggaagtcggggggtgaaactgagaatagcaatgtgtaaaccctcttctgcaaacccttgttaataactaatttcatgtttccttccattaagggttctttttcttggtttatctgttttatcaggacctgggcattttatgtttgaagcctttgttttcttggcttttcttgcactagtatgttgtgctggcttgtgcatgtgcacacttgtttaccgtccagttgcagattgcttagcgctgggaaatctacaagacttggaagcctggaggcttaatgatgatcataatgatactgtgtctctcattgctaatcag

SEQ ID NO: 35265 - DNA, 345 bp, Glycine max
  Clone ID: LIB3138-083-P1-N1-G10
taggtttgtacagtacttcttggctgtgcctgcagtgtacgacatcttttgggtatttgtctcaaagaagtttttcaaggaaagcgtcatgattgtggtggcccgaggcgatcgaagtggagaagatggaattcccatgttactgaagttccctcggatttttgatccatggggtggttacagcatcataggttttggagacatccttttaccaggaatgctggtggcattctcactcaggtacgattggctggcaaataagagccttagaagtggatatttcttgtgggcaatgtttgcatatggctttggtcttttagttacgtacgtggcactaaacttgat

SEQ ID NO: 35266 - DNA, 344 bp, Glycine max
  Clone ID: LIB3138-083-P1-N1-G11
caaatttcaacagtgagaacaccattgaatttggggtctagcaagcagagcttttgtcagttttctattgaccttctcggtggaggaatcttagtggacaaaactggagattggatcacacttatacaaaattctccaattagtaacttattgagagttgctgcttggaagaaaggctgtttaatggtcaagattgtgatgtctgggaatgcagcagtcaaaaggagtgattgggcctcattggtacaagtgtttttaacaaacagcaacagtacagagcattttgatgcatgtaagtggacaaaatcagaaccacattcctgggaattgatcttcccaataga

SEQ ID NO: 35267 - DNA, 176 bp, Glycine max
  unsure at all n locations
  Clone ID: LIB3138-083-P1-N1-G12
ataaatanaaaaaaaacaaaaaacaaaaaaaccccgcctttaaaaaaaaaatacgcaccacaaaaaaaaaaaaaaaaaaaaaaaaaaaaaaaaaaaaaaaaaaaaaaaaaaaaaaaaaaaaaaaaaaaaataaaaaaaaaaaaggttccgcacaccaaaataaacaaccccaaccc

SEQ ID NO: 35268 - DNA, 222 bp, Glycine max
  Clone ID: LIB3138-083-P1-N1-G3
ttgatttactggtgagcattgggtgggtgggtttacaaggggcaggttaagctttttcaaacaaaattggttttgatgataagcttgggttggcttacacacaaaaattctttgatggaaattttccagtggattcttggttaccaatttttgggaattggctttatcctgtaaggcaattaccttcagaagctgtcgttgtaaatgttacatgtggtagtg

SEQ ID NO: 35269 - DNA, 345 bp, Glycine max
  Clone ID: LIB3138-083-P1-N1-G4
ggtctctctagcttggaaggtatgataagtttgacatggtttgatgtatcatacaaccagtttgagggtccacttcctaacattctagccttccaaaatactacaattgatacattgagaaataataaaggcttgtgtggcaatgtcagtggcttgacgccttgcacattattaagtgggaagaaatctcacaatcatgtgactaagaaagtcttgatatcagttttaccccttagtttggccattctgatgcttgcattatttgttttcggagtctggtatcatttacgccaaaattcaaagaaaaaacaagaccaggctacagatttactatctcccaggagt

SEQ ID NO: 35270 - DNA, 347 bp, Glycine max
  Clone ID: LIB3138-083-P1-N1-G5
ttgtgttttaaatccacaaaatccttttgtgttaggtaggtggatgggaaaattgactttcccccagggcacttcccgaagtgttaagagaatgcctctttctatagggggaggagctggtgcaaagaatgctattctcatgaatatgccaaatgctgttctttcaatgtggagatattttgttggagatctcgtctttgaagtttctaagatgacttctccctacattaaatgtacagtctctttcttcatagcatttggaaatttggctgatgataccatcaattttgaggcttttccccacaagctggtgcagtttggagagattcaggaaaaagttgtattga

SEQ ID NO: 35271 - DNA, 322 bp, Glycine max
  Clone ID: LIB3138-083-P1-N1-G7
cgccaatgccatgggcttcatgtctcaggaggggggttctggctgtgctgaggtcctcaggcaatacgaggagttcgacaatgagaattaattacgtaattaatttcagtaatactgttattattaatctactttcgatttgggttttctaatgtctatttaattcaatcttgatgtggagtcttatctcgacattttcatattatcatgttatatatgttgatggaccgaccctgcttaattatattattacatcaagatctatcctggactatgaggatgatgtagtctattttgtgtcgttataataaactattctttt

SEQ ID NO: 35272 - DNA, 342 bp, Glycine max
  Clone ID: LIB3138-083-P1-N1-G8
ctcgagtcgaatcggctcgagcatgaattcaaggtgtcagcttttgagtaccactaccaatggtgattttgttcaagggaaagatctcgcaatggttaaagttaatgtagcatgtgctgctgttggcttgacatcaagttacactccaactccattgttggaatctggtttgcaaaaagacagagggttaattgtggagtattttggaaggatgtcttacgttgctcataacgttaatcagccccaagagaaagatttgttggagggaaatttttcctttgatattaaatctcgctctagattggaaaaagtttcctctacaaaagcacaatttgttagtgg

SEQ ID NO: 35273 - DNA, 342 bp, Glycine max
  unsure at all n locations
  Clone ID: LIB3138-083-P1-N1-G9
cctgagtccaacagatgatttgggtgagaaccaacgctttgttggtcagaaaaatctgcancttgtgcttttgcttctggctgttatctctgtgccctggatgctattgccaaaaccttttattttgaagaagcaacatgaagctaggcacggggttgaatcctatgcaccacttcaaagtacagatgagagcttgcaagtggagtcaaaccatgattcacatggtcatgaggaatttgagttcagcgaagtctttgtacatcaactcatacataccatagaatttgtacttggagcagtctctaatacagcttcttacctccgnctatgggcccttagtct

SEQ ID NO: 35274 - DNA, 344 bp, Glycine max
  Clone ID: LIB3138-083-P1-N1-H10
gtcttgtaattgaagttgaagtcttgcccttgtctgttcaactccaaacacaagacatcatcatccatggctgcctccgtctccactgtcggagctgtcaacagagctcttttgaacctgaatgggtctggacctggggtttcagctcccagttcatccttctttgggagcagcttgaagaaagttattggctcaagggtccccaacacaaagatttcctctggaagcttcaagattgttgctgtagaagagaagaaagagattgaagagacccagcagaccgacaaggacagatggaagggtcttgcctatgatatctcagacgaccaacaggacatcacaag

SEQ ID NO: 35275 - DNA, 342 bp, Glycine max
  Clone ID: LIB3138-083-P1-N1-H8
ggagggtcggttacagctggaatggctatattggggacaatgaggcatatccgacctgatgtgtctactgtttgtgttggattagcagctagtatgggagcttttctgctgagcgcagggacaaaaggaaagagatacagcttgccaaattcaaggataatgattcatcaaccgcttggtggtgctcaaggagggcaaactgacatagatattcaggctaatgaaatgctgcatcataaggcaaatctgaatggatatctcgcctatcacactggccaaagtttagacaagatcaaccaggatacagaccgtgactttttcatgagtgcaaaagaagccaag

SEQ ID NO: 35276 - DNA, 336 bp, Glycine max
  Clone ID: LIB3138-083-P1-N1-H9
cgcaattaacacgagatgactctggctccgcagctgcagtaacaccaagccttgagttctttcagcatagctcggcgccattagctcgcgggtctgccaaatcgcaatggtactggtctgcgaactgaatatacaccaaggctaggcttctgagttccatcagacctggggatgcatacaatcgctgccctgatttgaacccttgatcatacttgacaacaggctgtgatttatgttatacaacaaaagggctcaacaagccagacccctcaatctcgcgtctattccgctcacaccaacccagcactctactctaagtcgtctagggaacaacat

SEQ ID NO: 35277 - DNA, 287 bp, Glycine max
  Clone ID: LIB3138-084-P1-N1-A1
accagggccaggtagatttccatcttactggccatctggaggtccattggttagaatggatagccatgtttatcctgattatgtggttcctccaagctatgactcccttcttggaaagctgattgtatgggctccaacaagagaaaaagcaattgaacgcatgaaaagggcacttgatgacactattatcacaggagttcctactacaattgattatcataaacttatccttgacatagaggatttcagaaatggaaaggttgatactgcttttattccaaaacacg

SEQ ID NO: 35278 - DNA, 366 bp, Glycine max
  Clone ID: LIB3138-084-P1-N1-A10
attcgagagaaagattgaatctgggcagttttggcctgggtaggtatacttgcatataaaaataaagataaactcgaagacaagcttgtcactgttgaagacatagttcgccagcattgggctacttatgggcgccattattatactcgatatgactatgaagtatgatacaatcgcattttctcctactttgttataattggttttgaaaatcagttagtgacctcaattttttttccttaaagaatgtggatgcaggtgcagcaaaagaactgatggcatatttggtcaagctgcaatactcactttcagaagtcaatcaagatgctaattttagtatactaacattattttaaatatgagttt

SEQ ID NO: 35279 - DNA, 403 bp, Glycine max
  Clone ID: LIB3138-084-P1-N1-A12
gccttcatttcaaatttaccactctaacaaacccaccttgagcgcttgcttgtattcagaggaaaagaaaagggagagaaagaagaagaaaaagaagaaagtgaaatttgcagatagtgtgaaagatggaagagaaaggaatgagcaaagaagcaactgcagaagacaaagtggtggaatgccattgccagcaaacagaatggctttgtataacgggattctgagggaccgagtgcatagaatggagtgctcttactaattaaggataaaacgtagaacatagaaccctgttctgttctagtctgttacgtacgtacttgaatgtacatttgtgttaggactgagctgatcaaactctctcattctctctctctctctctctctctctgaattttcaaatata

SEQ ID NO: 35280 - DNA, 338 bp, Glycine max
  unsure at all n locations
  Clone ID: LIB3138-084-P1-N1-A2
catccccttgctcatagcctgagacactgcctggtgaacacacggcgcgcggcaccatctctcttcgccagacaccaaaactatataacacgcgaagcccgtccttgccctccttggggcgtaccgtgacgatggccgntccaccaccaccaccacctnggcgcaccgncacgccctncgtacccaccgagcccgagaaaccaacgtggaaatcaaagatgaaagctaagggagcggtctgggggaagacagcgatggacaagggcatcattttgtcagacaacatcggcggcaaggtcaacaacatcgcagagaagcggttcgggaccgaacacttt

SEQ ID NO: 35281 - DNA, 263 bp, Glycine max
  Clone ID: LIB3138-084-P1-N1-A3
acccttagctcagctttcagctcgagcggaacaccaaatccttatttttatggtagtgaccacactcggggaaagtctctgtctgtgtgttgacgtaacatagaaaagcaaaattggggctcacttcaatatcaataaaaagatcgtgatgttcattcctcttagatggtaccaccactaactaccctaccaccagtattatagcattttatttccattcctacaacctatccgctgtttatgagttccacagagcacacctt

SEQ ID NO: 35282 - DNA, 409 bp, Glycine max
  Clone ID: LIB3138-084-P1-N1-A4
cttttgagtaccactaccattggtgattttgttcaagggaaagagctggcattggttaaagttaatgtagcatgtgctgctgttggcttgacatcaagttacactccaactccattgttggaatctggtttgcaaaaagacagagggttaattgtggagtattttggaaggatgtcttacgttgctcataacgttaatcagccccaagagaaagatttgttggagggaaatttttcctttgatattaaatctcgctctagattggaaaaagtttcctctacaaaagcacaatttgttagtggaaaaaccttcaaatatgatataattggtgctggttcacattcttcagaagattttcctgaaaaggaagatcaagaaaaacccaaaaagattgatgccagattgagac

SEQ ID NO: 35283 - DNA, 414 bp, Glycine max
  unsure at all n locations
  Clone ID: LIB3138-084-P1-N1-A5
gtttagttatctactcttttctgcatgtttgttctctcaacgacgcctgcgcgaaagagtattattcaatattttggttgggttgaatcccggggttgaagcgttgcagacatcacggctattctaagagtgtctcgctccctcattcatgtccgatctgtacgacggaagacgggtagttgcgtaactgccgttaacccttcgccgcacggtgggcgtggtgctttgccttctgaaggtggtagcccttcagacttgctctttctcgctggtgagggtttcttctagtttcttcactcttttcattacttttagcctgcatagttttaaataagaaaaaaaaaacagcgactttgtgactagttaagatcaccgnttcttcttcttcttcttcttcttcttcttctactacta

SEQ ID NO: 35284 - DNA, 324 bp, Glycine max
  unsure at all n locations
  Clone ID: LIB3138-084-P1-N1-A7
caaagccactcctttatctttaaatactagagatgccttgctatatctgaattcattaccttttcctcttttgatatcataatggcttctatttcttgtatgagtgctattttaagctttcttctcatctctatctttctttctgtttacaatattgaagtgtgtgaggcacaagccaggcctcctacagcgaaagggctatcatacaccttctacgacaaaagctgtcctaagcttaaatctatcgttagatcagagctcaaaaaggtcttcaataaagacattgctcaagctgctggcttgcttcgccttcacttncatgac

SEQ ID NO: 35285 - DNA, 412 bp, Glycine max
  Clone ID: LIB3138-084-P1-N1-A8
caaatggcaactgtgttatacaccattgaattttgattcgagcaggcagagcttttgtcagttttctattgaccttctcggtggaagaatcttagtggacaaaactggagattggatcacacttatacaaaattctccaattagtaacttgttgagagttgctgcttggaagaaaggctgtttaatggtcaagattgtgatgtctgggaatgcagcagtcaaaaggagtgattgggcctcattggtacaagtgtttttaacaaacagcaacagtacagagcattttgatgcatgtaagtggacaaaatcagaaccacattcctgggaattgatcttcccaatagaggtatgtggtcctaataatggttttgaaatgtggagttctgagtgggcaaatcaaacttcatggcat

SEQ ID NO: 35286 - DNA, 324 bp, Glycine max
  unsure at all n locations
  Clone ID: LIB3138-084-P1-N1-A9
acaagctggtgctgtttggagagattcaggaaaaagttggataggaattttcacaagaggaatttcttacagcttggtcaactcaagtgcgtnctgcaacaactctgttggctgatgggtgtccatatttgtatgcaatggcgcatgatagttcagcgtctacaataccaggtgattttgtcattggcgtcaagttgacaaccataaacaatatgtgtgcatatgggctcaatcctggtatttcaggttctcgtcttttgggcaccattcctcagtccatttcacagcaaactgcttggaatcaaatggcaacagtgagaacac

SEQ ID NO: 35287 - DNA, 156 bp, Glycine max
  unsure at all n locations
  Clone ID: LIB3138-084-P1-N1-B1
cactctagaagagctctcncattccccccgtccttaagctcggattccgcctcaagctcaaacgtattaaattcttttggctttccttctgggccccttgcccgagttaattattcctccctttctcaaaaccaaaaaaatgttcctcgggaagtt

SEQ ID NO: 35288 - DNA, 392 bp, Glycine max
  Clone ID: LIB3138-084-P1-N1-B10
ataccatagactatattgtgtttctccacaattcccatggagccgaagacacaaccccaagcgaatagtcctccaccaaaaccttgggaacaagcaggttcctcttcgggtccagcgcctttcaaacccccgtcagctggcaacacaagtgatgtagttgaggcttcagggactgcaaaacctgaggaaattgtttctagttctgataggagtgcagctgtcaacaggaatactcttgggaggcctgttcccacaaggccatgggagcagaattatggaaacagcacctatggaggatatgggtctacaatgaattataattctgggtatggatctggaatgtatggatcttcttatggtggactaggaggaggaatgtatggatcatctta

SEQ ID NO: 35289 - DNA, 388 bp, Glycine max
  Clone ID: LIB3138-084-P1-N1-B11
gattcagatctttattttctagctcgttcgcgcggacacggaagtcaagctctcaagctggataagtgctctggattctccaccgatggcctctactatatcagtcgttattgcaagaacttaagagtcttgtttttagaggaaagctcacttgttgagaatgatggtgactggctccatgagcttgcttagaataatacagttcttgagacactgaatttttacttgactgatattgccaacgtcagaatccaggaccttgaacttatagccagaaattgccccaacttaaactctgtgaaaattactgattgtgaagtattagatctggtgaacttctttcgatatgcatctgctctagaaaaattttgtggaggttcctacaacg

SEQ ID NO: 35290 - DNA, 251 bp, Glycine max
  unsure at all n locations
  Clone ID: LIB3138-084-P1-N1-B12
agacaacacccgacggagctaagctctcgtctcgacccgagcttccangctctcttttctcaccccccacaccccccccgggcagtcatcctcaacccctagcgcagccccccccaccctacactccacccaatcatgatccttgccaaccccaccacccgcaaaacccaaccgacctgccaccacacggactctaagtgaaccaacctgaaccacggatcacactgaaacaaaatcctccaattattgac

SEQ ID NO: 35291 - DNA, 398 bp, Glycine max
  Clone ID: LIB3138-084-P1-N1-B2
ctcgagcctaatcaactcgtttcctgcaacagtagggtccataagcatgcccatcttgacaaagagaagatgacatgagaaaaccaccttcagggttccctgatagttccataaagctgcatgcacatgaagttcaactccttgctgcagcagagaaactagagtttagcaatggtgttcttttctatgaccgtatctcaactgatgcagatttgtctgatgctataggattcaaaggttgtagagaaattgaagggccttatgtagactatctatagacacaatttggtaagcccgttcagttacatagtcctttgtgcccgagccatcaaattcaaacttggacgcaaaatggggcgaatggcttggtagatccaaagcttgtccattgatttaca

SEQ ID NO: 35292 - DNA, 389 bp, Glycine max
  unsure at all n locations
  Clone ID: LIB3138-084-P1-N1-B3
ctcgacccgggacaaatctgtttattggatcacccttatacaggattggccaattagtaacttgttgagagttgctgctaggaagaaaggctgtttaatggtcaagattgtgatgtctgggaatgcagcagtcaaaaggagtgattgggcctcattggtacaagtgtttttaacaaacagcaacagtacagagcattttgatgcatgtaagtggacaaaatcagaaccacattcctgggaattgatcttcccaatagaggtatgtggtcctaataatggttttgaaatgtggagttctgagtgggcaaatcaaacttcatggcatttgagtttccttattgacaatcccaaacagtctacangttttgatattctcttgggaatctctc

SEQ ID NO: 35293 - DNA, 382 bp, Glycine max
  Clone ID: LIB3138-084-P1-N1-B4
gtcacaacttcattatgttttttgtaataatctggaaatgcaagaagcttatcttgtcaatctcgtaaatgtgttacgagaattgtatttgcacagtccagaggaagctcgccaattgagaaggaaagctctctctcgtattgaatggctgcaaaaagctgatgtgcctaccatagcacagattgaagagttccattcgatgcagaggatgatgaatgctcctgattcaaatgataatattgatttactgttgagcattgatttgttgggtttacaaggagcaggtaaagcttttccaaacaaaattgtttttgatgataagcttgtgttggctaacacacaagaattctttgatggaaattttccagtggattcttggtta

SEQ ID NO: 35294 - DNA, 222 bp, Glycine max
  Clone ID: LIB3138-084-P1-N1-B5
gaaggacagccgaaagttcccgcacaataaaatactgttgcaaagccggtgaagttctataagctggtagctggataaacgaaggggtcaagtctgcaattggaaggattggtcttcgcaccgcagtggatgttatatgaccgggttgataagtgacggattcaaatgatgacccgtcttgctgatataggcataattctgacactagattaaacaatttcg

SEQ ID NO: 35295 - DNA, 404 bp, Glycine max
  Clone ID: LIB3138-084-P1-N1-B7
agaatccacactttcttctggtcgggcacacagagagagagaagaagtgtttgagagagagagtgggccgctcgcctatcgcagagcacggaggcgctggtgtcaaccctaatctcccactcgagcgccaagaatatgcgacacaacttctcacgcgctgtctcaatcttagaatctctgctctaaattctaatcttcccgccatagatgtcgtccaacttgtagtgagggaattggaaacagatccgctgttcaattcaggccgtggatcttccctgacagaaaaaggaacggcggatatggacgctatcatcatggatggtccaaaacgacgatgccgcgccgtttccggtcttaccaccttttagaacccgatctcgcttgctcgtttgttatggacaaat

SEQ ID NO: 35296 - DNA, 351 bp, Glycine max
  Clone ID: LIB3138-084-P1-N1-B8
caaaattgtttttgattataagcttgtgttggctaacacacaagaattctttgatggaaattttccagtggattcttggttaccaatttttgtgaattgtctttatcctgtaagtcaattaccttcagaagctgtcgttgtaaatgttacatgtggtagtggacgtgtggtttacccaccactgcttggattagttctgcagttaacaatcgctcctcagatatcaacaaaaagattcgcacagcacttgggaaaggtaagaaaattgtttttcttactagagttgatccttttccagtagctttactggctgttctttttggcgttaagaatgaaattctgagttctaac

SEQ ID NO: 35297 - DNA, 412 bp, Glycine max
  Clone ID: LIB3138-084-P1-N1-B9
aatagaagttaaaagccttagccttccctacaactccaaggacggagacatcatcatccatggctgcctccgtctccactgtcggagctgtcaacagagctcttttgaacctgaatggttctggagctggagcttcagctcccagttcagccttctttgggaccagcttgaagaaggttattgcctcaagggtccccaacagcaaggtttccggtggaagcttcaagattgttgctgtagaagagaagaaagagattgaagagacccagcagaccgacaaggacagatggaagggtcttgcctatgatatctcagacgaccaacaagacatcacaagaggaaaaggtttggttgactcccttttccaagctccacaggatgctggaactcactatgcagtcatgagctccta

SEQ ID NO: 35298 - DNA, 389 bp, Glycine max
  Clone ID: LIB3138-084-P1-N1-C10
cgcccacccgtactatctcgcacgcacatcccacagtcgcccaagatggcctcccagagcgtgcaatgcttcggcaagaagaagaccgcgactgctgtcgcccactgcaaggccggaaagggtctcgtcaaggttaacggaaagcctctttcccaggtccagcccgagatcctgcgattcaaggtttacgagcccatcctgatcctcggtgttgacaagttcgctgatgtcgacatccgcgtccgcgtctccggtggtggtcacacctcgcaagtctacgccatccgccaagccattgccaaatccatcatcgcctactaccagaagtacgtcgacgagcactcaaagaaccagctcaagcaggctctgatccagtacgaccgcacact

SEQ ID NO: 35299 - DNA, 409 bp, Glycine max
  unsure at all n locations
  Clone ID: LIB3138-084-P1-N1-C12
aatagtccagattagttctcacaaaaatggagaaatagaatgaagaaatattttatagctcaaaataaagatttaaccaaaagcaattcatatgaaaaaagccaattaattctttacaaagaacaacaagtaaacgcattaaaaaaaaaaattagaaaacaatatagatacgatcttttatcctataattttatcaattatgcagataagaaagactcatatatttatagatatagatccctatttcaagtaaaaaaaaaccaagtgatttcttctaattacaacacgtataaaaaagaattatntgatatcatagataatctctttatcaaaaattatatatcggaagatgcgattctagatatggaaaaaaatatttatagaaagttttttgattgatgggaatcaa

SEQ ID NO: 35300 - DNA, 332 bp, Glycine max
  Clone ID: LIB3138-084-P1-N1-C5
gtcattaaggaattagtgttttccttacaccatatgtatggagggaagagagttcttggaatcaatggaggatatagggccttctatcctcacaatacaattactttaacccctaaaagtgtgaatgatatacataagccgtggggaactgtccttggaacatcacgaggtggacatgacaccaaaaagatagttgacagtattcaagatcggggaatcaatcaagtttatataattggaagagatggaactcagaaaggtgcatctgcaattcttgaggaagtcaaaaggcgtggtctcaaagtttcagttgtacgtatccccaaaaccat

SEQ ID NO: 35301 - DNA, 442 bp, Glycine max
  unsure at all n locations
  Clone ID: LIB3138-084-P1-N1-C6
cccttccttaacctcggattccgcctcaagtttccatccaaaattctctttttccgttttggaaccaaaaccggaagtgcttctatttggcccgtccaaaccaacctgctcgtaagcaaactggaggaaaagctcccaggaagcagcttgcaaccaaggctgcacgtaagtctgcaccaacaactggtggtgtgaagaagcctcatcgttttcgccctggaactgttgctcttcgtgagattaggaaataccagaagagcactgagctcctaatcaggaagcttcctttccagaggttggttcgtgatattgcccatgatttcaagactgatctgcgtttccagagccatgctgtgcttgcattgcaagaggctgctgaggcataccttgttgggctctttgaggacactaactngtgtgccattcacgccaagcgtgtgac

SEQ ID NO: 35302 - DNA, 400 bp, Glycine max
  Clone ID: LIB3138-084-P1-N1-C7
atacaggtatatcattggcctgtgctatgaatagttcttttagggggcgcgccagttctgatatttacaccatctgctctcaagactgtgaattgtggaatcctgcttgcacaaaagcaatgactatgtcatttaatccaaacccgtgttctgatgcatggagtttggaatttctgaagcgtactggatttcattgcgatatcatttgtgtcactggatggactgccaccccaatgcaggatgttcaagttacaattgattggtttatttcctctcaggaatgtgttcccaggacctattgtgttttaaatccacaaaatccttttgtgttaaataggtggatgggaaaattgactttcccccagggcacttcccgaagtgttaagagaatgcctctttc

SEQ ID NO: 35303 - DNA, 391 bp, Glycine max
  Clone ID: LIB3138-084-P1-N1-C8
ggaaatttggctgattataccatcaattttgaggcttttgccgagaagctggtgcagtttggagagattcaagaaaaagttgtattgaaattttcacaagaggaatttcttacagcttggtcaactcaggtgcgtcctgcaacaactctgttggctgatgggtgtccatatttgtatgcaatggtgcatgatagttcagtgtctacaataccaggtgattttgtcattggtgtcaagttgacaaccataaacaatatgtgtgcatatgggctcaatcctggtatttcaggttctcgtcttttgagcaccattcctcagtccatttcacagcaaactgtttggaatcaaatggcaacagtgagaacaccattgaattttgattctagcaagc

SEQ ID NO: 35304 - DNA, 403 bp, Glycine max
  Clone ID: LIB3138-084-P1-N1-C9
ctcgagccgcatatcctctctttgcgattgtgttttgatctgcgtcctactgcgatagtttctctactgttacatggccatggcggtttccgcaattggttttgaaggtttcgagaaaaggttggaaatatcctttttccagccgggactttttgctgaccctgaaggaaggggtctaagggctcttacaaaatcccagttgggtgagattctaacaccagctgcttgcaccattgtttcttcgctcaaaaacgataatgtcgactcctatgttctatctgagtccagcctctttgtttatgcctacaagatcatcatcaaaacctgtggtactactaagctattgcttgcaatcccacccatattgaagttcgctgaaatgctttcccttaatgttaagtct

SEQ ID NO: 35305 - DNA, 374 bp, Glycine max
  Clone ID: LIB3138-084-P1-N1-D11
atcatctttagttcttcagtaatttattgagggattctagtctgagattttgagaatgtctagctgagggtgtggaaacagctgcaactgtggcagcaactgcggttgcaacaagtactcttttgacttgagttacgttgagaagacaaccacagagactctagttttgggtgttgggcctgtgaaggcccaattggagggtgctgaaatgggtgttgcatctgagaacggtggctgcaactgtggatcaagctgcacctgtgacccatgcaactgcaagtcaagtcaagatgtataaccttgaaacagagatagctgtaatatatgtatcaacaaataataagaagtagaagctgcgtttggagctttagaat

SEQ ID NO: 35306 - DNA, 379 bp, Glycine max
  Clone ID: LIB3138-084-P1-N1-D2
tctacttcccttagttctcaaaccttatcccttatcctcccaagaccagaccatgtctacctccgcagcttctctcgcactcccaaccctcactctccgaactcgacaacctctctgttctccccaatgcttctcctcgtccctctccctcacccctaactccaaacccatttccatttccgccgttttcctcaaaacaacgctgtcgtcgtcgtcgccgttgtcgctgtcgtctcgcttcgttccccatgtctctgtgttggagcaagaggaggacaccttcggcgacggagacggccccagcttctcccgcgaccttaagctctttgtcgggaatctccccttcagtgtcgacagtgcgcggctcgcggagctcttc

SEQ ID NO: 35307 - DNA, 406 bp, Glycine max
  Clone ID: LIB3138-084-P1-N1-D3
aacctcgaattccgcttcaagtggaatttagcttgttatttcatcaaatttgaagcctttcccgagaaggctgttccatttggaaaagattcagaaaaaactggcttggaattttcaacaaaaggattttcttccagcttgtccaactcaggtccgtcctgcaacaactctgttggctgatgggtgtccatatttgtatgcaatggtgcatgatagttcagcgtctacaataccaggtgattttgtcattggtgtcaagttgacaaccataaacaatatgtgtgcatatgagctcaatcctggtatttcaagttctcgtcttttgggcaccattcctcattccatttcacagcaaactgtttggtatcaaatggcaacagtgagaacaccattgaattttgattct

SEQ ID NO: 35308 - DNA, 395 bp, Glycine max
  Clone ID: LIB3138-084-P1-N1-D4
caagaacatgtcatattcctttttcctggtgagggtgagagagcgtgagagttccacaaacggagaggtggcaaccctttcaacaaatctgatgaatttgagtgttcatccatatttattgagcctctacggtggatgaaagctggtaagaaaacattcaactacaatattataatgtctctaattttccaacgaactgtgaatttatgcttcactttttgtgcagaatgttcctataattttgtacaagagatcaagaatggtcttctataatattctgaaatttgaagtgtgttaccacttttttattgcctcttttggaacatttactgaattgttttttcttgactgctccctacatttcactttgtctgatgtttaaagtaatgtacaca

SEQ ID NO: 35309 - DNA, 394 bp, Glycine max
  unsure at all n locations
  Clone ID: LIB3138-084-P1-N1-D5
gcaaaaagctgatgtttctatcttagcacagattgaagagttggattggatgcataggatgatgaatgctcctgattcaaatgataatattgatttactgttgagcattgatttgttgggtttacaaggagcaggtaaagcttttccaaacaaaattgtttttgatgataagcttgtgttggctaacacacaagaattctttgatgagaaattttccagtggattcttggttaccaatttttgtgaattgtctttatcctgtaagtcaattaccttcagaagctgtcgttgtaaatgttacatgtggtaantggacttagggatctcccaccacttgttggtttttgactgctccctacatttgtttctgtattatgaacaaaataattttcac

SEQ ID NO: 35310 - DNA, 404 bp, Glycine max
  Clone ID: LIB3138-084-P1-N1-D7
ctggtgcaaagaatgctattctcatgaatatgccaaacgctggggtttcaatgtggagatattttgctggaaacctcccctttgaagtttctaagatgacttctccctacattaaatgtacagtctctctcttcatagcatttggaaatttggctgatgataccatcaattttgaggctcttccccacaagctggtgcagtttggacagattcaagaaaaagttgtattgaaattttcacaagaggaatttcttacagcttgaccaactcatgtgcatactgcaacaactgctgcgactgatagagcgccatatctgtatgcgatggtgcatgatacctcagagtctacaataccaggtgatttcgtcattgtgccaagtcgcaaccataaacaatatgtgtgc

SEQ ID NO: 35311 - DNA, 310 bp, Glycine max
  Clone ID: LIB3138-084-P1-N1-D8
agtggtcctaattcttttagctcactaacatgccataacaggagcattacttgtggtgttgacaaaacgcaaacaaccttgcaatttataaagttagcacatggagatacgttcaacataaactataagcatatatataatgtagagaaagaggctcctgaggacaaggcgagcttatagtcacaacctcactatggatagtgtaatgatctctaaacacaagaagcttatgttagcaatatcaccaatgtgttacatgtattggatcttcactgcccacaggaagatcaccaatctgaaatgaaagctc

SEQ ID NO: 35312 - DNA, 398 bp, Glycine max
  Clone ID: LIB3138-084-P1-N1-D9
caagaactctccaagttttcctccttcccacgaaattcatggggggggaaaatccaagaagagggtggaattcaagccagggaagatggattatttcaatgcaccaggaagaaaccatctctttgttccggggccggttaacatcccggaccagatcattcgggccatgaacagaaacaatgaggactaccgttctccagcaattccagctatgaccaaaacactgcttgaggatgtcaagaagattttcaagaccataactggaatcccatttctcatccctacaactggtactggtgcttgggagagtgctctcacaaacacactgtctcctggggatcgaattgtatctttcctgattggccaattcagcttgctttggattgatcagcaacaac

SEQ ID NO: 35313 - DNA, 227 bp, Glycine max
  Clone ID: LIB3138-084-P1-N1-E1
tttgattaccaagcattttttgaccaagatggcagaaatgatagacaggcttggtggtggggatgaaaaatggatccgtgaaaggcccccccggctggtggctggtggttcaaggatggcaattgtaagaaagagttggagagttgatggggaatcctctggatttcgctcacagtattgcatacatttaatgagagctataaatacttgaaaaacgccagtaactc

SEQ ID NO: 35314 - DNA, 322 bp, Glycine max
  Clone ID: LIB3138-084-P1-N1-E10
tgaagaccaatctctttttggacagcaaaaacggcgagaaaggaaacaacttatccgggtatgtgaaccctcgttttgctggggagaatttccccacatcggtttttccctgtgtggtgggaaggccaatgctccgttacgaagaatcactcaccgagcaggcgcttaaggatattgttgttggagaaaggtgtgcagacttgcggcatcaacttgatatatcttatcctgtgaacaacagcattgagcaaaactgggatgatatgtgccatgtttgggatcatgcgttggtcaatgaatcgaagattaacccttaggactg

SEQ ID NO: 35315 - DNA, 390 bp, Glycine max
  Clone ID: LIB3138-084-P1-N1-E12
cacacttctttttgttctcaagaattaactccaattcttgctggatttcactccaacatgctccaagaagaaacttttccgttttcgccatgtccggcgatgatgcaaagcggagtgttccattgaaggattaccgcaacatcggcatcatggctcacatagatgctggaaagactactacaacggaacgcattttgtactatactggaaggaactacaaaattggagaagtgcatgagggaacagcaactatggactggatggaacaagaacaagagagggggattaccattacttctgctgcaaccactacattctggaacaagcaccggatcaacattattgatacttctggtcacgttgacttcaccttagaagtggagcgtgctc

SEQ ID NO: 35316 - DNA, 352 bp, Glycine max
  unsure at all n locations
  Clone ID: LIB3138-084-P1-N1-E2
ggaaatagaaagcctcacatttgaagctacgcanttgaagagtgatgctggtggtgaggtggcaaatcagccagtgcatatgccgttgattttgcctaaagttcctggtcggttctactattattttggaaaaccattggaaatggaagggaggaaacaagaactgagagacaggaagaaagctcatgagatttatttacaagtgaaatctgaggtagagagatgtattgcttatttaaaggtgaaaagagaaagcgacccctacagatgtatagggcctcgactattataccaggctacacatgagtttgagtcagaagttccaacatttgaaatttgatggtttgcacaa

SEQ ID NO: 35317 - DNA, 396 bp, Glycine max
  Clone ID: LIB3138-084-P1-N1-E3
atctcttcttctttctctcttgtctctctgtctctattacatgtgtcgctctatctatctgctcatttattaactctgatgggtgggtggtgggaaattctgatcaatttggataaagttcggtactttttttggagggtctatgtttgtttttcctagtgttggacttgagaaaactttaacctttgtagatgtactgtttatttttgttggcttggtttggtttgctgaattttaatataccccttttaaaaagtttgcctttttttttaattctttttaaatgtatataggtttattttttttgtatatgaagggatagattgcatactgaagagtttgtgaatccatggtgcagacctaacatgaagttgtgatcgtgttcggtgtgaaaaa

SEQ ID NO: 35318 - DNA, 403 bp, Glycine max
  Clone ID: LIB3138-084-P1-N1-E7
atctgctctcaagactgtgaattgtggaatcctgcttgcacagaagcaatgactatgtcatttaatccaaacccgtgttctgatgcatggagtttggaatttctgaagcgtactggatttcattgcgatatcatttgtgtcactggatggactgccaccccaatgcaggatgttcaggttacaattgattggtttatttcctctcaggaatgtgttcccaggacctattgtgttttaaatccacaaaatccttttgtgttaaataggtggatgggaaaattgactttcccccagggcacttcccgaagtgttaagagaatgcctctttctatagggggaggagctggtgcaaagaatgctattctcatgaatatgccaaatgctgttctttcaatgtggagat

SEQ ID NO: 35319 - DNA, 379 bp, Glycine max
  Clone ID: LIB3138-084-P1-N1-E8
cgccaattgagaagagttagctctctctcgtattgaatgggtgcggaaagctgatgtgcctaccatagcacagattgaagagttccattcgatgcagagagatgatgaatgctcctgattcaaatgataatattgatttactgttgagcattgatttgttgggtttacaaggagcaggtaaagcttttccaaacaaaattgtttttgatgataagcttgtgttggctaacacacaagaattctttgatagaaattttccggtagactcttggttaccaatttttgagaattgtctttatcctgtaagtcaattaccttcagaagctgtcgttgtaaatgttacatgtggtaatggaccttgtggtttacccaccactgc

SEQ ID NO: 35320 - DNA, 404 bp, Glycine max
  unsure at all n locations
  Clone ID: LIB3138-084-P1-N1-F1
atcctcaaaaatttgtttttttgtgtgtgtatggtgagatggcagaatagtgttcatgaatatgtcaagccttactttagtggttctaaattgaaaagctttctagctagtcataacatcaccattactgatggtattgacaaaactagtgcaactttgcaatttagaaagttagcagattgtgattttctcaagagaaaacttaagcagatgtctaatgtttagtgggtggctcctgatgacaaggcgagtttatggtcacaacttcattatgtttcgtgtaataatctggaaatgcaagaagcttatcttgtcaatctcgtaaatgtgttacgagaattgtatntgcacagtccagaggaagctcgccaattgagaaagatagctctctctcgtatagaatg

SEQ ID NO: 35321 - DNA, 407 bp, Glycine max
  Clone ID: LIB3138-084-P1-N1-F10
atgagatagaatattcaaaatggaatatttctattattgtatggttcatccaatgactatacattcattatatttttgtgtaaatagaggaaaaactcgatggaaaaatggtggtttaattctatgttgtttaataggaagttagaatacaggtgtgaatgaagtaaatcaatggatagtctgggtcctattgaaaataccagtctaagggaagaccctaaaattttaaccgatatggaaaaaaaaattcacagggatttggattatttagaaatggaaggttttttttctagcgatctgaatactgtttctaagaatgatgatgatcattacatgtatgagactcaatttagttttaacaataatattactagtttcattgatagttgcattgagagtttcaattt

SEQ ID NO: 35322 - DNA, 404 bp, Glycine max
  Clone ID: LIB3138-084-P1-N1-F2
tggaaatgcaagaagcttttcttgtcaatctcgtaaatgtgtgacgagaattgtttttccacagtccagaggaagctcgccaattgagaaggaaagctctctctcgtattgaatggctgcataaagctgatgtgcctaccatagcacagattgaagagttccattcgatgcagaggatgatgaatgctcctgattcaaatgataatattgatttactgttgagcattgatttgttgggtttacaaggagcaggtaaagcttttccaaacaaaattgtttttgatgataagcttgtgttggctaacacacaagaattctttgatggaaattttccagtggattcttggttaccaatttttgagaattgtctttatcctgtaagtcaattaccttcagaagctgtc

SEQ ID NO: 35323 - DNA, 434 bp, Glycine max
  Clone ID: LIB3138-084-P1-N1-F3
gcttgacgtccatgccccgtcgtagctcgattcgctcgagatcaatgcccggtttttagaagaaatttccgaaagtaggtgcatctaaagaacaggacggttgctttgtctggggctttctttcttggaaagattgtcttgcttttatttggtttatgaattcatttgcattatggcattgatcagatgaaaccaacttcccccctcccatgttttctctagaaactggtgggcataatatatattagtgtctctgataatattgactatgtcccctgaaatttaaaattaagccatctgttacgtcttgtaaacatctgagatctgaaatcttatattcaataagcaggatgtctggcaaggtactcagcttctcgccattgatgttgctgctgccatgggtttacttagaagggcattgataggggatgaat

SEQ ID NO: 35324 - DNA, 273 bp, Glycine max
  unsure at all n locations
  Clone ID: LIB3138-084-P1-N1-F4
cagctacaacttgaactgttcataacccacaccaaaagttccaggccgcatcccgtaaaatcacacaacacncnctntggaattgtgatccatcgccatatctctgattaaggtagataagattccctatgagcacttccattctcgacgccctgaacgtccgcgtggaaagttccagcgataaagtccttttcctggcccacggcttcggcacagaccaatccgcgtggcagcgcgtgctcccttacttcacccgcaactacagcgtcattc

SEQ ID NO: 35325 - DNA, 416 bp, Glycine max
  Clone ID: LIB3138-084-P1-N1-F5
gtcattggtgtcaagttgtcttccataaacaatatgtgtgcatatggggtcaatcctggtatttcaagttctcgtcttttgggcaccattcctcagtccatttcacagcaaactgtttggaatcaaatggccacagtgagaacaccatcgaattttgattctagcaagcagagcttttgtcagttctctattgaccttctcggtggaggaatcttagtggacaaaactggagattggatcacacttatacaaaattctccaattagtaacttgttcaaagttgctgcttggaagaaaggctacttaatggtcaagattgcgatgtctgggaatgcagcagtcaaaacgagtgattgggcctcattggtacaagtgtttttaacatacagcaacagtacagagcattttgatgcatg

SEQ ID NO: 35326 - DNA, 388 bp, Glycine max
  Clone ID: LIB3138-084-P1-N1-F6
tctcaaccaaaaccaaccacttatggtaacaatggctatgcccgggggggcttttctgggctctgcatggtagttttccagtccccacctttcttcacttttctttcttccaccgcttcatctccaccattccttgcttcgaggaggttccaatcatgcccttcaacaagaaaatctctcaagttgaattgcagttcaagtggcaataatggtgaccaagattaccttctggatgctccagtttctagtggagatggattctctttcagtggagggaagtattcaaatggccctagtccaagtgatgaatggtttaagcaagggaaaaaggttaaagcctattcaatacctggcactggtgaaaaggcaaaagatccgatttttggac

SEQ ID NO: 35327 - DNA, 412 bp, Glycine max
  Clone ID: LIB3138-084-P1-N1-F7
cgagaattgtatttgctcagtccagaggaagctcgccaattgagaagagaaagctctctctcgtattgaatggctgcaaaaagctgatgtgcctaccatagcacagattgaagagttccattcgatgcagaggatgatgaatgctcctgattcaaatgataatattgatttactgttgagcattgatttgttgggtttacaaggagcaggtaaagcttttccaaacaaaattgtttttgatgataagcttgagttggctaacacacaagaattctttgatggaaattttccagtggattcttggttaccaatttttgagaattgtctttatcctgtaagtcaattaccttcagaagctgtcgttgtaaatgttacatgtgggagagggacgccggaggttacccaccactgc

SEQ ID NO: 35328 - DNA, 364 bp, Glycine max
  Clone ID: LIB3138-084-P1-N1-F8
gttgacaaccattatctctatgtgtgcatatgggctcaagggggatgtttcaagttctcgtcttttgaacaccattcctcagtccatttcacatcaaactgtttggaatcaaatggcaacagtgagaacaccattgaatttcgattctagcaagcagagcttttgtcagttttctattgaccttctcggtggaggaatcttagtggacaaaactggagattggatcacacttatacaaaattctccaattagtaacttgctgagagttgctgcttggaagaaaggctgcataatggtcaagattgcgatgtctgggaatgcagcagtcaaaaggagtgattgggcctcattggtacaagtgttt

SEQ ID NO: 35329 - DNA, 255 bp, Glycine max
  Clone ID: LIB3138-084-P1-N1-F9
tgataatattgatttactgttgagcattgatttgttgggtttagaaggagcaggtaaagcttttccaaacaaaattgtttttgatgataagcttgtgttggctaacacacaagaattctttgatggaaattttccagtggattcttggttaccaatttttgtgaattgtctttatcctgtaagtcaattaccttcagaagctgtcgttgtaaatgttacatgtggtagggggacgtagtggtttcccaccactgc

SEQ ID NO: 35330 - DNA, 381 bp, Glycine max
  Clone ID: LIB3138-084-P1-N1-G1
ctggctcaacgttgatcactgttccatgctgttaaagcctccggtctggctcaacttcagattttccccacaaacgagctttttccgggcacgaaactcgaggaattcgcgcatggcgcctccaatcctctcgctcgctcttccctcgaacaccggtcgagttctcagcattcaatctcacaccgttcaagggtatgttggtaatatatccgctgtcttccctctgcaactactgagatatgatgtcgatccaattaattccgtgcagttttcgaatcatacatgatatccgacgtttaagggtcaggttttgaatggacagcaactctgggatctaatcgaaggccttgaaggaaatgatttattgttctatactcactt

SEQ ID NO: 35331 - DNA, 408 bp, Glycine max
  Clone ID: LIB3138-084-P1-N1-G12
ctcgagccgaatcggctgagcggctcgagcggctcgagcggctggagctccaatctacaaggagaatggatgaagcgatgaagaggcaatgcaaagttaacctgtacggaactgcttttcccatgaaggaggagcttgacaggcaaatcctgtccaggttccagcggcctcctggaccaattccttcttcaatgctgggtttggagactgttacaggaagtgttgatcactttggttttgaggattgtctaaatgacccccgtgagtcagagactttccggccattagacatgcatcatgggatggaagttcgccttggtctatctaaaggaccagtgtacccaagtattatataattaaatttgactagtattctagtaccaaaaaacaagattttgtgatcgaaag

SEQ ID NO: 35332 - DNA, 398 bp, Glycine max
  unsure at all n locations
  Clone ID: LIB3138-084-P1-N1-G5
tgtcaatctcgtaaatgtgtttcgagaattgtatttgcacagagcagaggaagctcgccaattgagaaggaaagctctctctcgtattgaatggctgcaaaaagctgatgtgcctaccatagcacagattgaagagttccattcgatgcagaggatgatgaatgctcctgattcaaatgataatattgatttactgttgagcattgatttgttgggtttacaaggagcaggtaaagcctttccaaacaaaattgtttttgatgataagcttgtgttggctaacacacaagaattctttgatggaaattttccagtggattcttggttaccaatttttgtgaattgtctttatcctgtaagtcaattaccttcaaaagctgtcngtggaaatgttacat

SEQ ID NO: 35333 - DNA, 412 bp, Glycine max
  Clone ID: LIB3138-084-P1-N1-H1
cttctacaacaatggcttcttttcgtttccactacttcttcctctgcaggagctgctgcagcttctagctccttcttctctcgtctcggatcttcctccgacgcataagctcctcaaatcggttcagttcggtctccagagaggtcgcttgtctcgtctgttgttgtcaatgtaactcaacgacgctccttggtgaggccactcaacgccgaaccgcaacggaacgattctatagttcctcttgcagcaactatcgttgctcctgaggttgagaaggaagaggaagattgtgagcaaatagcgaaagaccttgaaaatgcatctcctcttggaattatggatagggccctcgagaaaattgcgaacgacatcgctattgcatttagtggcgctgaagatgtcgctttgattg

SEQ ID NO: 35334 - DNA, 409 bp, Glycine max
  Clone ID: LIB3138-084-P1-N1-H3
ggcaaatcaaacttcattgttttagagtttccttattgacaatggcaagcagtctacagtttttgatattctcttgggaatctctcaagattttgaaattgctggtaatactcttatgccagctttttctgttccacaggctactgccagatcttctgaaaatgcggaatcctctgcatgatctggaatttgagttttctttcgcttgttcgtttgtttaattcaataaaggaaattaggcatgaccctcttgttgagtatgctctgcctatttgaaaatttccacacctcttttaattgtcgtaatgatgtgtgaagtgtgtgtttttttaaaaaaaatatttaaattataattaattaattataattttttatttatttattttttaatttattattttttattttt

SEQ ID NO: 35335 - DNA, 309 bp, Glycine max
  Clone ID: LIB3138-084-P1-N1-H4
gctctgcaaggtcctttagtttctcccgttcttcaacacctaagaaaagaggatttgagcaagctattctttggggagttccccgtgttggacatcaatggctcacagtgctttcttacccggacagggtatactggagaagatggatttgagatctcagttccttcagagcatggactagatcttgccaaggcaatactggaaaaatctgaagggaaggtaagattgacaggattgggagctagagatagtctgcgacttgaagctgggttgtgcttttttggaaatgacatggaacatctcatttca

SEQ ID NO: 35336 - DNA, 332 bp, Glycine max
  Clone ID: LIB3138-084-P1-N1-H5
tgagaatatgcttcgtcaattttatgatttcattgagaaagaagacacgctttcaacaaataatattgctctcgtaagggcagatgtttctagacttcccttctcatcaagttcggttgatgctgttcatgctggtgcagctttgcattgctggccatctccctccaatgctgttgctgaaatcacccggacactaaaaaatggtggagtatttgttgggagcacttttctgcgttatagttcaaaaactccctggtttttacgccctttcatggagaggactccacaaggctatggctatctaacagaggaagagatcaaagacctttgca

SEQ ID NO: 35337 - DNA, 150 bp, Glycine max
  Clone ID: LIB3138-084-P1-N1-H6
atctgaaaaatttctcaatctaaaatgcacttcccaaaacacagttggaggaaccattctgcgtagtgatctattggcaaattttttgacagagggcaattttagagcaagtgttgatttgcagcgcactcatcgtattagaggaatgat

SEQ ID NO: 35338 - DNA, 309 bp, Glycine max
  Clone ID: LIB3138-084-P1-N1-H7
agcttgggtcccttcttcggcggcggctccgtcctcggcgtcggcacaaataaggtcaaggtacccgctctccactgcgattctagggttcagaccatctccgctgacgtcaccacgctcccccaccagcgtctaaaagctctttctcccaaggagaaagggttctccgagattctctcggatatgtgtcccctggtttctggaatcaccaccaaagacgctgctttgtcgtttgagcttgggatgcgtgccttggatttggctcttggcagcagaattcacctggagccaagtgattgtgtaggagtc

SEQ ID NO: 35339 - DNA, 278 bp, Glycine max
  Clone ID: LIB3138-085-P1-N1-A11
agacgggggcggtaatgcattggttgccaggctagctccatctttcgcatcttgagtgtcagccttgcgcgtctgtgatgcaagcgctagctgttcgctacgccaaccatggccaggtgatcttgcaagcgcggccggcagccgtttgggctcggacaaatgccttacctagatcgtcccgagcgccctctcttgtttccagcgccttcgtacgttgtggtacttgtttccgtgcgactcgaacttgggtggcttgcccttgaacgcatactttttgt

SEQ ID NO: 35340 - DNA, 448 bp, Glycine max
  Clone ID: LIB3138-085-P1-N1-A12
ccgaatcaaaataaggcccgcgagctcactatactacgcgcgccctttattttttttttttttttttttattttaaaaataacacacacttgggacattattacgacgggtaaaagatgtgtctaaatttttaatgactcaaaacatactcatcaagagggtcatgcctaatttcctttattgaattaaacaatcgaacatgcgaaagaaaacacaaattccagatcatgcataggattccgcattttcagaagatctggcagtagcctgtggaacagaaaaagctggcttaagagtattaccagcatttttaaattacagtgagatggccatgtgatattgcagtcacctgtacactgtttgggattgttaataaggaaactcaaatttccatggaaatttgttatgcccactcagaacttcacatttttaaaacctttttttagga

SEQ ID NO: 35341 - DNA, 124 bp, Glycine max
  Clone ID: LIB3138-085-P1-N1-A3
cgggttggttaaaattatacatatttaatattttatttattaaattaaattactttttttaattttaaaattattatatatttttaaaaatatattatttttcataccccctaatatttaaata

SEQ ID NO: 35342 - DNA, 366 bp, Glycine max
  Clone ID: LIB3138-085-P1-N1-A5
aaaataacacacacttcacacatcattacgacaattaaaagaggtgtggaaattttcaaataggcagagcatactcaacaagagggtcatgcctaatttcctttattgaattaaacaaacgaacaagcgaaagaaaacacaaattccagatcatgcagaggattccgcattttcagaagatctggcagtagcctgtggaacagaaaaagctggcataagagtattaccagcaatttcaaaatcttgagagattcccaagagaatatcaaaaactgtagactgtttgggattgtcaataaggaaactcaaatgccatgaaagttgatttgcccactcagaactccacatttcaaaaccattattagg

SEQ ID NO: 35343 - DNA, 274 bp, Glycine max
  Clone ID: LIB3138-085-P1-N1-A8
aaaataacacacacttcacacatcattacgacaattaaaagaggtgtggaaattttcaaataggcagagcatactcaacaagagggtcatgcctaatttcctttattgaattaaacaaacgaacaagcgaaagaaaacacaaattccagatcatgcagaggattccgcattttcagaagatctggcagtagcctgtggaacagaaaaagctggcataagagttttaccagcaattttaaaaatttggggagatttccaagggaatattaaaaac

SEQ ID NO: 35344 - DNA, 84 bp, Glycine max
  Clone ID: LIB3138-085-P1-N1-B1
gcaaattctcgcttcattcggatgattggttaaacttaaaaaatgatcaggctccattggtgtttatttccaaaaaagggcttc

SEQ ID NO: 35345 - DNA, 51 bp, Glycine max
  unsure at all n locations
  Clone ID: LIB3138-085-P1-N1-B10
gcccgcgagcacactataccacancccccccctcctttttaattttttttt

SEQ ID NO: 35346 - DNA, 305 bp, Glycine max
  Clone ID: LIB3138-085-P1-N1-B12
gcaaacacactttttttatatataaacgcactcattgaacctagtgaaaagcctaaagttaaaagaaaaaaatactacattctagtttacaaatgcaaaaggacactcatcaaccagatatttgtgactttttcagttcttaagaagtcgcgtcagcataggattagtggcgttagaactcaaaatttcattttttaacgccaaaaagaactaccagttaagcgtattggataaggatctactctaataagaaaaacaatttttttaccttttcctagtgctgggcgtaattctttgttgatatt

SEQ ID NO: 35347 - DNA, 353 bp, Glycine max
  Clone ID: LIB3138-085-P1-N1-B4
ggcatgaatttcctctatggaaactaacctgatgaaaataatcaagatacagttaaagccatatttcaatatgttgtttgaatcactctaattcccctaccatttgaactaatttgctaactgaagatggtacatgaaatcttgatcaagctagtggcctccaatcacagattctttggctttacagcatccttggcaagcaagaaacgaacccccctaactaattcttccttcatcatgaacaaaacagcagcagccagcacactttgtacgatttttgtgcccatgcctttgtaaaacccattaaacccctcatagcggatcattttaataatagcatcccatgtaccttt

SEQ ID NO: 35348 - DNA, 386 bp, Glycine max
  Clone ID: LIB3138-085-P1-N1-B6
gcaaacacactttttttcctcatataaactgagctgaatccgaaggaaaagcataaggtaaaaaaaagaagaaaaaaatatacacacgatctaaaccatgacaagttctgggataatttacagcattccgtggtgtaagggaacaaattcactattaacaaaatcggaaataataatatatcaaagaatctctaccttacagtttgtgccgatcacactagcttgcttctctcagtttatgctggaagcatgtgtagcccattgtatgttacatatgtggtcggtccaataacaatgatatgaatccttggtccatgatttatggctctggattatgatttcggatgccatgatcaggcagaagaagagatgatgcaccactaatt

SEQ ID NO: 35349 - DNA, 274 bp, Glycine max
  Clone ID: LIB3138-085-P1-N1-B8
gtagtaaaacaccttctattatgtgaagccacaaagttcagcagaaccacaatgaacaccaggaaatattaattgattatctcaagtgttttttttagtagtgagacaatgtaactcaaaattataaaggataacaatccaatatgaacaagataaattatttgattatatcaagtcatagcttcttttcaagtggagaatgcttaggttctcagggtgtgtttagcaggtttcattcatactttttgcattttggtccaagtttgaggcattt

SEQ ID NO: 35350 - DNA, 324 bp, Glycine max
  Clone ID: LIB3138-085-P1-N1-C1
aaaataacacacacttcacgacatcattacgacaattaaaagaggtgtggaaattttcaaataggcagagcatactcaacaagagggtcatgcctaatttcctttattgaattaaacaaacgaacaagcgaaagaaaacacaaattccagatcatgcagaggattccgcattttcagaagatctggcagtagcctggggaacagaaaaagctggcataagagtattaccagcaatttcaaaatcttgggagattcccaagagaatattaaaaactgtagactgtttgggattggcaataaggaaacctaaatgccatgaaattt

SEQ ID NO: 35351 - DNA, 305 bp, Glycine max
  Clone ID: LIB3138-085-P1-N1-C12
aaattggaacacaatgatattccttaatgataaggcacaagataaaattcagtttcatatcatcctaaatacgagtacaacaagtagtcacatatgaagtagctttgcgacatatgaatcaaactcgttattcatctctgtgattcccagctgcaaaagacaatgcaaggctgaactcacacggttgtacgttcactatgatttatggaacatgctatataatgatgttcccccatgcatgtgtgtattacactactagcccatagtataggaagggctgggtaagttgatcacagccgttttga

SEQ ID NO: 35352 - DNA, 164 bp, Glycine max
  Clone ID: LIB3138-085-P1-N1-C3
aaaataacacacactggacacgtgattacgacgatgaaaagaggcgtggaaattttcaaataggctcagctttctcaacaggcgggttacgcctaatctcctttatggaattaatcaaactgccattctatagaaaacactaattccttatcatgcgtaggatt

SEQ ID NO: 35353 - DNA, 198 bp, Glycine max
  Clone ID: LIB3138-085-P1-N1-C4
gcaaacacacttttttccttcatataaactgagctgaattcgaaggaaaatctttttgtaaaaaaaagtataaaaatttaaactcttgatctaattcatgatatgatcttggataattaactgcatttctctgtgtattggaacaatataactattaacaaaatttgaaatattaatttattaataatattctacatt

SEQ ID NO: 35354 - DNA, 292 bp, Glycine max
  Clone ID: LIB3138-085-P1-N1-D1
aaaaagcaaatgccttttcagtctcgggttccaatcaccgcctttcccccgaaccacattagaccaccttaccccctttgtccccaactcacccctagggggggctgaggccctttatccagctttaaacatataaaatggggggaattaggggtcatttaacccccaaaaaccataaattttttttttttaaatagctttagtggggaaaaactgggccttaatttggtgattaagggggccccccgggtaagggaagcaaaaatttttttgctaaccacaaacccccttt

SEQ ID NO: 35355 - DNA, 232 bp, Glycine max
  Clone ID: LIB3138-085-P1-N1-D11
gaaactgacaattcaaaatggatgattactaccttactagtgtcaaataaatatttcatgtgtttttatccaagtaattagcaagttgttcagaaaacgttaaactccaaaaaacataacatttaaaaaaaagttatttgagttgctagaatccaataaattataacccataaaggttgtaactcatttctttttgctaggggaggtgcccagaatcaggcttgttataaac

SEQ ID NO: 35356 - DNA, 154 bp, Glycine max
  Clone ID: LIB3138-085-P1-N1-D3
gtaaaaagcaagtaacattaagttggattgggatacacaagataattcacattttctgaagtacattgcaataacatattcttcaccaaacacaaatctaaaaactttcaaaagtccacaagtctaccttttttttcatgctcacttgccgggg

SEQ ID NO: 35357 - DNA, 285 bp, Glycine max
  unsure at all n locations
  Clone ID: LIB3138-085-P1-N1-D5
aaacacactcattgcacatgggaatgcgctttatttaagtgaataaaatatttcatactatttttctaatgcataaggacacanancaacctaattttaatgactcttacagttttcaagaaggcgctgtagcataggattagtggcggtagaactcaaaatttcaatcttaacgccaaaaagaacagcctgtttagctactggaaaaggatcaactcttgtaaagaaaaacaattttcttacctttcccaagggctgggcgaaaatttttttcgagccgaattt

SEQ ID NO: 35358 - DNA, 361 bp, Glycine max
  Clone ID: LIB3138-085-P1-N1-D6
gacagaaacggtgaagctttaattaactatggaaattaaaagttgttgcaatgtaacatgaattcactaaaataacacctgaaatgaaaggcaaacacaactttaattctaaccaaataaactcaacaaaagcattacataaattagtcaaacagactgaaacccatgtcatcatcagattctttagttggttcttccttctttttctcttccttggctgtagcaggagcaccatactcagtagcaggagcaagcaacagcatctacagcaaatttacttggatccttaagattctccttgacctttgtttgcttaaggaaagattattttttttaaccgtaacattaagaactttttgta

SEQ ID NO: 35359 - DNA, 306 bp, Glycine max
  Clone ID: LIB3138-085-P1-N1-F7
aaaataacacacacttcacacatcattacgacaattaaaagaggtgtggaaattttcaaataggcagagcatactcaacaagagggtcatgcctaatttcctttattgaattaaacaaacgaacaagcgaaagaaaacacaaattccagatcatgcagaggattccgcattttcagaagatctggcagtagcctgtggaacagaaaaagctggcataagagtattaccagcaattttaaaatcttgagagattcccaagagaatatcaaaaactgtagactgtttgggatttgtaattaaggaaac

SEQ ID NO: 35360 - DNA, 149 bp, Glycine max
  Clone ID: LIB3138-085-P1-N1-F8
atattaaattattatatattataaaaattaaagggaaacccaaaaggggacaattaaaaatttttctttaaaaaaaaaaaaaacttggaataaaatttaaaaatcccctgttaaaaaaaaaaaagaaatttaaaaaaaaaccttttaaa

SEQ ID NO: 35361 - DNA, 366 bp, Glycine max
  Clone ID: LIB3138-085-P1-N1-F9
aaaataacacacacttcacacattattacgacaattaaaagaggtgtggaaattttcaaataggcagagcatactcaacaagagggtcatgcctaatttcctttattgaattaaacaaacgaacaagcgaaagaaaacacaaattccagatcatgcagaggattccgcattttcagaagatctggcagtagcctgtggaacagaaaaagctggcataagagtattaccagcaatttcaaaatcttgagagattcccaagagaatatcaaaaactgttagacttgttgggattggcaaataaggaaacttaaatgcctttgagttttgttttgcccacctaaaacttcacttttaaaaacctttttt

SEQ ID NO: 35362 - DNA, 200 bp, Glycine max
  Clone ID: LIB3138-085-P1-N1-G1
ccacacatggttttaattgggtttttcattgattgccgagcttaaaccattttgttatatattgagacataatcaagtacacaactcatagcaaaaggtttattaagctgtaaaggtgcatttaaccataaacaaaattagtctccaagactataaaaacattacattttatacaaattattcttttacttcatcttcct

SEQ ID NO: 35363 - DNA, 322 bp, Glycine max
  Clone ID: LIB3138-085-P1-N1-G2
gttggggttgttttttatgtgtaaattaaaacacaccctttggtcatagtaaggcgcgttatttaagtgaataaaattcttgatactagttcacaaatgctaaagggcacccattaacctgtattttgagacttttacagtttttaagaagttgggattgtataggtattggggtgttggaactctatatattttttttaaactcttaaaaagaacagcttatttagtttctggaaaaggttcaatttttgtaagaaaaaaaattttgtttatctttttcaagagggtgtgggaattctctttttttatattttttgggggt

SEQ ID NO: 35364 - DNA, 359 bp, Glycine max
  Clone ID: LIB3138-085-P1-N1-G4
aaaataacacacacttcacacatcattacgacaattaaaagaggtgtggaaattttcaaataggcagagcatactcaacaagagggtcatgcctaatttcctttattgaattaaacaaacgaacaagcgaaagaaaacacaaattccagatcatgcagaggattccgcattttcagaagatctggcagtagcctgtggaacagaaaaagctggcataagagtattaccagcaatttcaaaatcttgagagattcccaagagaatatcaaaaactgtagactgtttgggattgtcaataaggaaactcaaatgccatgaagtttgatttgcccactcagaactccacatttcaaaaccat

SEQ ID NO: 35365 - DNA, 349 bp, Glycine max
  Clone ID: LIB3138-085-P1-N1-G5
aaaataacacacacttcacacatcattacgacaattaaaagaggtgtggaaattttcaaataggcagagcatactcaacaagagggtcatgcctaatttcctttattgaattaaacaaacgaacaagcgaaagaaaacacaaattccagatcatgcagaggattccgcattttcagaagatctggcagtagcctgtggaacagaaaaagctggcataagagtattaccagcaatttcaaaatcttgagagattcccaagagaatatcaaaaactgtagactgtttgggattgtcaataaggaaactcaaatgccatgaagtttgatttgcccactcagaactccacatt

SEQ ID NO: 35366 - DNA, 330 bp, Glycine max
  Clone ID: LIB3138-085-P1-N1-G6
aaatcacaagttcctcatttctttaattttgggtataacataaagtcctctcatttacaacaaaattaaatgtcatatctatatatcacatgaatatacaaaaaaatgctataagaaggatatgattcaacaatgaaatttggtagctacttgtgttctaggtcctttagttggttttttaaaagtaaatgttcataccgcatcctttcaagcctactctcaaccatgtacatttcatctttgaggtgatgaattcttttctccaaccacgctatgtctgaaggacttctagtgacctcattgttcattctattcgtgatgtctacagga

SEQ ID NO: 35367 - DNA, 331 bp, Glycine max
  Clone ID: LIB3138-085-P1-N1-H10
aagcttaaacgagattagatggcaactgaatgttgtccaatacaattccaaagtgactacattccgtgggttaaaactaaaaacagaaacattttgacacacatgtccaaaaatcaattacaagccaattttctaaaaggaagaaaacacagtcacggacacttggcagtatttgcctgtatcacaattaatgggtaataataccgtaaaacacctacactccctaacaaccctattcattgaaaaaaaaaaaaggaatttgaacaacaaaaacaccacccgcagcaacccattttaatcttaattttcacaaccaccaacttaagcacgt

SEQ ID NO: 35368 - DNA, 159 bp, Glycine max
  Clone ID: LIB3138-085-P1-N1-H12
aaaaaaaacacacacttcacacatcattacgacaattaaaagaggtgtggaaattttcaaataggcagagcatactcaacaagagggtcatgcctaatttcctttattgaattaaacaaacgaacaagcgaaagaaaacacaaattccagatcatgcag

SEQ ID NO: 35369 - DNA, 255 bp, Glycine max
  Clone ID: LIB3138-085-P1-N1-H4
aaacacactcattgcacatagtaatgcgctttatttaagtgaataaaatacttcatactagtttacaaatgcaaaagggcactcattaaccagatttttgggacttttacaggtcttaagaagttgcgtaagtattggattagtggcgtttgaacttaaaatttatttctttaacgccaaaaagatcatccagttaatgctttggaaaaggatcaacttttgttagaataaacattttttttatctttttcaaat

SEQ ID NO: 35370 - DNA, 352 bp, Glycine max
  Clone ID: LIB3138-085-P1-N1-H6
agtgaaaaataaataatttcaatatttatttttaactgttggagtttgtgtcttcaaagctgagaatagacaaaattcaatgaaacctaacatcagtacatgctaatgagcaattagagaaattgaaagatcacactttttaaaaaccgttgacagctcaactagaaaaagctgcttccttataatcttctgtcacattagtttcaccttcatttaagcttggagcttttgggaggagtccaagaactttaaacatgagttgatcagcatcaaaatcattattaggagtagtgagaagcttttcaccagtgaatatagaatttgcaccggccagaaagcacaatgcctgctc

SEQ ID NO: 35371 - DNA, 358 bp, Glycine max
  Clone ID: LIB3138-085-P1-N1-H8
aattcttataactgataattaaagcggggcgcatcaatacaatacaatacaatatgtaactatgaactatcaatatatgatcgttatttatgtctgtgatacacacaattcaggccatgatattcttacgtgatttacagcaacttctaacttatttaatacatcataccaacccaactaggagcaattttcattatacaatgacacttatctttaaactctgaagcatgacaaggtggtagtcaccagggaccatattcttatgcaatttatgccacaactggataagacgcacaagttgcaacaccacacatgttcttccccaattccattttgaagtagccattctcaccccaac

SEQ ID NO: 35372 - DNA, 225 bp, Glycine max
  Clone ID: LIB3138-086-P1-N1-A1
aataccaatacgggctgatgagttaaaatttttatttctctaggataatatacaatcaaacataacccaagttgcggggtttcaaaccaaccaaaccacagactaatatcactcgtattagcaaccagatacacccacaatttctcacttttgtttttctcactcataaatagatcacaagattgggaaaaaggaaaaatagatagatagagatagagagagaga

SEQ ID NO: 35373 - DNA, 179 bp, Glycine max
  Clone ID: LIB3138-086-P1-N1-A10
aattaattcccagatcaacaagctcactagtccacaaccacccttttttttttttttttttttttttttttttttttttaagattaaaatttttttttttattatttaaatttttttttttatatttatattattattttttttttttatttattatataaaataatataaattaataa

SEQ ID NO: 35374 - DNA, 356 bp, Glycine max
  unsure at all n locations
  Clone ID: LIB3138-086-P1-N1-A11
gaacgcctaatttcaggagaggggttcttttaatttatatctcatcaanaattcaaacttttagaaaaatgactgaacctataataacatttatttatttatctccacatatcctccctcgacaactataactaatttacttcacatgtttccattctatggcttcgtttaaaaacatcacttgatcattttcaagggtctcatcacagcattgtcttcatggccccatacacggctatgctcttcccaaccaggctctgtggttgcattaaacacatatgaaacattggtgtgaatgtaagaaaacctcacggcaatcttcgtcacatgcccaggtattatcttgaacacattct

SEQ ID NO: 35375 - DNA, 350 bp, Glycine max
  Clone ID: LIB3138-086-P1-N1-A12
aactatgaactgtcaatttatgatcgttatttatgtctgtgatacacacaattcaggccatgatattcttacgtgatttacagcaacttctaacttatttaatacatcataccaacccaactaggagcaattttcattatacaatgacacttatctttaaactctgaagcatgacaaggtggtagtcaccagggaccatattcttatgcaatttatgccacaactggataagacgcacaagttgcaacaccacacatgttcttccccaattccattttgaagtagccattctcaccccaactttttccccatgaattttttatgagccaatatgggacgccattttcaac

SEQ ID NO: 35376 - DNA, 352 bp, Glycine max
  Clone ID: LIB3138-086-P1-N1-A3
cccttttcttttttttttttttttttttatacttttctctcttttaaagattagatttttttttttttttttcttcccttctccttttttttttttttattttttttttttctatttttctttattttattatctttctttcattttaattttatcactttttttataaacacaaaccaaaaattccctcaaaccacccccctcaaccattaaaataccttaatctttccccccacaaaacaaaatatttccccattattaaaaaaaccccacacaatataaaacccctaaaaccaccaattattttcctcttcaaaaaaccccctctttcacattttattaaaaataaaaa

SEQ ID NO: 35377 - DNA, 274 bp, Glycine max
  Clone ID: LIB3138-086-P1-N1-A7
ctctcactcctttaaaattaagaatattttttttttatattttctactttcctttctttatttataaaacaataattataaattccctataatcataaaacaaacaaacaatccaaataaacacaaatctaaaatcaacaaaaacccaccattccctccccacaaccacaaaacttccaccacaacccttaaaaactcataaaaaatatttttctaactaaaccccaaaacaattaataaaaactctccaaaacaatattatacatacccccta

SEQ ID NO: 35378 - DNA, 247 bp, Glycine max
  Clone ID: LIB3138-086-P1-N1-B10
gtgaaaggaacacacacttcacacattatttcgataattaaaagaggtgtggaaattttcaaataggcagagcatactcaacaagagggtcatgcctaatttcctttattgaattaaacaaacgaacatgcgaaagaaaacacaaattccagatcatgcataggattccgcattttcagaagatctggcagttgcctgtggaacataaaaagctggcttttgagttttaccagcaatttcaaaattt

SEQ ID NO: 35379 - DNA, 316 bp, Glycine max
  Clone ID: LIB3138-086-P1-N1-B12
aggaaacacacacttcacacatcattacgacaattaaaagaggtgtggaaattttcaaataggcagagcatactcaacaagagggtcatgcctaatttcctttattgaattaaacaaacgaacaagcgaaagaaaacacaaattccagatcatgcagaggattccgcattttcagaagatctggcagtagcctgtggaacaaaaaaagctggcataagagttttaccagcaatttcaaaatcttgagagattcccaagagaatatcaaaaactgtagactgtttgggattgtcaataaggaaactcaaatgccatg

SEQ ID NO: 35380 - DNA, 318 bp, Glycine max
  Clone ID: LIB3138-086-P1-N1-B3
catcaatcatgctcgcatccattgactaggtatgtatgtcataaaggcgcattgcgagcgatcaagctgcacacacaaagacaagagaatgggaaagaaacaggttgcgtcaaccctgcgcaacccacatattctgccaaaatcatgtcgcgaaaaggttttgggcaatgcaccatgaacaccgattaccacgagtcgtgaatattgtcaaagtcatgactacgttccagtctcagtctctacaccaggctggattccgtcaagaccaccagtaaccttgtttttaagtttggcgttcccaattgaagcctgattctt

SEQ ID NO: 35381 - DNA, 259 bp, Glycine max
  unsure at all n locations
  Clone ID: LIB3138-086-P1-N1-B7
ttcctttttttttcaaaaattttaatcttccccactcttattcattaagaaatttttttccattcatttaaccctcccccnccgcctttggatgaaccatatttttcaacaatacatctcaccaccctctaccctaataaatttaatatttgtcaatccaaaatttaaatagtacgtctttctactctttctaataacatctaatcaatgctcaacaaaactgtcttgtttctcttgtccagattctacatattacatt

SEQ ID NO: 35382 - DNA, 308 bp, Glycine max
  Clone ID: LIB3138-086-P1-N1-B8
aaaataacacacactgcacacgtcattacgacaattaaaagaggtgtggaaattttcaaataggcagagcatactcaacaagagggtcatgcctaatttcctttattgaattaaacaaacgaacaagcgaaagaaaacacaaattccaaatcatgcagaggttcccgattttcaagagatcttgcagtagcctgtggacagaaaagctggctagagtttacagcaattcaaatctgagagatccagagatataaaactgaactgttggatgcataagaactaatgcatgaagtgttgccactagactc

SEQ ID NO: 35383 - DNA, 344 bp, Glycine max
  Clone ID: LIB3138-086-P1-N1-C1
aaaataacacacacttgacacatgattacgtcaattaaaagaggtgtggaaattttcaaataggcagagcttactcaacaagagggtcatgcctaatttcctttattgaattaaacaaacgaacaagcgaatgaaaacacaaattccatatcatgcattggattccgcattttcagaagatctggcagtagcctgtggaacaaataaagctggcataagagtattaccagcaattttaaaatcttgagagattcccaagagaatattaaaaacgtgtgactgtttgggattgtcataatggtaactcatattccttgaattttaattttgcccactttataact

SEQ ID NO: 35384 - DNA, 110 bp, Glycine max
  Clone ID: LIB3138-086-P1-N1-C12
attcactgcctgtgggacttgactggaaaacctcttcccactatgctctcacatcctttccagtgcgtatacaaaggccgaccacgccttcacgtgcccctgatgcaatg

SEQ ID NO: 35385 - DNA, 376 bp, Glycine max
  Clone ID: LIB3138-086-P1-N1-C2
gttgttggtggttaggattttcaattttgagtaaatgaacaattttgaagggacttaattaatttcatgcacttaataataatctcaagcagtgacagatgtctccacagctagctttccagggtatgcaacttctgattttatatcagcctcccatagttcaggcacagcctccctaaggttgtgaatgctttccaaggcataatctgctcctttacatctttgtgatgtaccaaccagcacagtgtgaagccccacacgttttccagcttgtatgttgcgggtactgtcctcaaagaacaaagttctttgtgggttaaggttggctatcttgatggccaattcaatggcattttctgatggcttgcaaacaatt

SEQ ID NO: 35386 - DNA, 369 bp, Glycine max
  Clone ID: LIB3138-086-P1-N1-C6
atcttctacgctgtcaaactcgtttccgggctccctatctgcattgctagcttccctctccagttcctcccatgtttttcccttctcttcttctgaatcctcctaggaatcctcatcgccatcatcatcctcagactcaacaagtgattcactatcacaagcttcatcctccgaatcagattcaggttccacatcagatggttcgtaacctttatctgactcctctgagttctcagattctgaatcagtagcttccaaattcagaaactcccaaccaccaccttcaataaagctctgagggtcatccgtgattgtcttcaggatctgacgccagttcagattcagcctgctctcataatatttgatgtc

SEQ ID NO: 35387 - DNA, 294 bp, Glycine max
  Clone ID: LIB3138-086-P1-N1-C7
aagaaaaaaaatcccaaaaatttgatttttaattgaggccaaccacattatgtgattcatacattttataaccggccttaataaaaacttttgcaacttctttttttattcaaagacttatttccattcacttaaatgccaaaaaaaaaaaaaaaataaatacccgaatatggttatttttggcctcgagtaactagcttccttttaaaagagtacaataaaatttttgaaccgggaatacttttcacccaaaaacatttttccttcagaacttttacaaattacaattccctt

SEQ ID NO: 35388 - DNA, 308 bp, Glycine max
  Clone ID: LIB3138-086-P1-N1-D1
ggggttgggttttttttttttttttttttttttttttttgtggggaggggcccccccccaatttttgtaaacataaattaaataaaccttgggccgggggttttcaattttttccaatccccccttttttaccaatttattttaaaacccaattaaatgaagcattttttttgaagctaaaatagtttggccaaaattacaggtttggggagcccctaaaaaaccctaaatcctttttttttttggcccataacactggctgggggttaaatgccacaaaagcatcccccttgaaggttccaacccaa

SEQ ID NO: 35389 - DNA, 369 bp, Glycine max
  Clone ID: LIB3138-086-P1-N1-D10
gaaatatctagcagcacatcactaacgctgccgtctagacgagtaataccgattataatgtttgcaattacaagaatttataaaggaacaagaaaaacaatatccaatatacaggaattgaatgacaattttttgcacttgtagtaaaacattggtatacaacaactctgcacttgtagtattggattattatggtaagaaaaagaagaagaaaaaaaccctacagtgtatggaaccaaccttgtataatttacttccatggatcaccattaagagatgccaagataacaatgtaactcatttagatgctttattgccctgagttttggtttggctagctgctgctgcagacattatgcgcatacgact

SEQ ID NO: 35390 - DNA, 285 bp, Glycine max
  Clone ID: LIB3138-086-P1-N1-D2
atatctaaacacactgattggacatagtaatgcgctttatttaagtgaataaaatactacatactagttcacaaatgcaaaaggacactcatcaaccagatatttgagactcttacagttctcaagaagtctcgttagcataggattagtggctgtagaactcagaatttcattcttaacgccaaaaagaacagccagttaagcctctggaaaaggatcaactctagtaagaaaaacaattttcttacctttcccaaatgctgggggattgcttttgttaatttc

SEQ ID NO: 35391 - DNA, 359 bp, Glycine max
  unsure at all n locations
  Clone ID: LIB3138-086-P1-N1-D4
aaaanaacacacacttcacacatcagttcgacaattaaaagaggtgtggaaattttcaaataggcagagcatactcaacaagagggtcatgcctaatttcctttattgaattaaacaaacgaacatgcgaaagaatacacaaattccatatcatgcataggattccgcattttcagaagatctggcagttgcctgtggaacataaaaagctggcttaagagtattaccagcaattttaaaatcttgagagtttcccatgagaatattaaaatctgtttactgtttgggatttgttaatttttatactcttatgccttgaagtttgattttcccactttatttctccatatttttaatac

SEQ ID NO: 35392 - DNA, 180 bp, Glycine max
  Clone ID: LIB3138-086-P1-N1-D5
aaaataacacacacttcggacagggttacgacaattaaaagaggggctgaaattttcaaataggccaagcattcttaacaggacgggcatgcctaattccctttattgaattaaacaaacgaacatgcgaaagaaaacacaaacatcggtttacaccaacgtttcccttttttcattaga

SEQ ID NO: 35393 - DNA, 196 bp, Glycine max
  Clone ID: LIB3138-086-P1-N1-D7
attaattgtcccgacccacgcgcccaccaacccgcgggcgtcctttgtttttttttgtttttccccccggcaaccaaagagggggggagcgtcctttataattggtgaagaactcctcgctgctagctcaatgtcgatcaaatatctgcgcgtgctctcactcgacaacacagttgcctattgcatctggattcca

SEQ ID NO: 35394 - DNA, 297 bp, Glycine max
  Clone ID: LIB3138-086-P1-N1-D8
ggggagagggggcccattttccattaatcataatagcaaaccaaattgcagccgaaaatagtgatcaaattagcatatgctgaacttggtggatctttagagagaacctatacatcatgacattgattacattacatactaaaaaggttgcaagaaacacagttggaacaacatgatgatgaaatttaatcagccaaaaaatgcatggtcattgccattgcttgtgggggccaaaatgtaagaagcaacaacatggccgatggtgccccaagccaagacatcaacaatgttggattc

SEQ ID NO: 35395 - DNA, 318 bp, Glycine max
  Clone ID: LIB3138-086-P1-N1-D9
atatggaaacggacttatttttcaaaggaaagccccatacccaaatccaaaaattactacacactctttcacaaacacaaattttcacttatgaaccccaaatttaaaactcttaccggtcttattaaaccgcgtgaccataaaaacacccgcgttacaacaacataattcccttctgaacacacaaaccattagccaggaaagcttattaaaaagaagccccccccgtacgaacatcccaacaattacccatcccaaatactgaaatgaacccccccttgatctttccattaaaatcggtaactgtagaacttatcc

SEQ ID NO: 35396 - DNA, 265 bp, Glycine max
  Clone ID: LIB3138-086-P1-N1-E2
attcccgggccgacccacgcgtccggaaattggcaattgctgtgtgtgagatataatattagagtaatagcaccatcaataaataagattattttgcatctctatattctatacaacaaatgagaataaccttacaacctgtgttcaaagtctttctccaaatctcagcttgctttctaatgattttaattccccttttcacctcccattaaaaaaaaaaaataaaattattccctttaaaacctaactaaaaatcttcttttta

SEQ ID NO: 35397 - DNA, 367 bp, Glycine max
  Clone ID: LIB3138-086-P1-N1-F10
agttcatagaaaatagaaatcaaggggggggataacagagagaatatgatacaaattcttttttgtttttgacataaaaaaaccttaggctagtaactgcgatagcatgaccagaatcaaaattacaaataaattagactcattccacttccacaatctcatccaaagcatagttgtttgttgatacattggcatagttgactttgttgaatcgaaccacaacagggtagcgagtgttggggtcctgatcaacagcaaccactgaaccagtgcctttgtaccagtaagattccttcctaagaatcttcaccttagcacctctcttggggccaataggtggtggctttggtttagcttcagcttcagc

SEQ ID NO: 35398 - DNA, 366 bp, Glycine max
  Clone ID: LIB3138-086-P1-N1-F12
ataaaatacaaacttgataaaatgaaagagttggacctgcccactgtctagtgtcttcattgctacaatatgcaaacattgcaagaggcaacagcaaaatctaaaaggagaaactaaaaaacactctccatgcatgcggcgtcacattcaaacttggacactaaccacagctacgcccattatataggccgaaagcaaaacgctatgataagaacccaaactatggtatatacccaataaaaccacactatctcaacagataagagcattttaaagataactgaggaaaggtatagcagctaaagaagcagacgtcactctttcatttcaagtttagaacaattcgtatttctttttcagcatgtc

SEQ ID NO: 35399 - DNA, 368 bp, Glycine max
  Clone ID: LIB3138-086-P1-N1-F4
ctcatcaaacaaatcccagtgcctcagtctatactcaatccagtcgattctatcaacatcccatcccatccaaagaaagaaaaaaacacccttcttcgagaccagctctcagagaagcgcccattgatccatatccaacttgcctaaaaccttccttctcaccagccttcgcacggaacgacgcatttatggagagaaatccaaagcacccgggttaggcaccttaatattctgtgcgccctgaatcgcacccttaatcggagtcgtctttcccagatcaagaactttatctcccaagccgccgatgacggtcttcgcggctttgatggcacctccgaaacgtccttgtggcaatgcgtctcgggcgt

SEQ ID NO: 35400 - DNA, 230 bp, Glycine max
  Clone ID: LIB3138-086-P1-N1-F7
atatattagatatttttaaaataaagaaaggttaactatcaatcataatttttttactcaatttctcagaagacaaaaggaaaagcccccaaaattaattaaaagcaccccccccccccaaaatttttaagaaaaacccccccaaaaaaaaaaaaaatataagtcatctaaaacataacatttcctccctgtccctaaaaaactataaaaccccaaaaattcccccccaa

SEQ ID NO: 35401 - DNA, 282 bp, Glycine max
  Clone ID: LIB3138-086-P1-N1-F8
tccggattcccgggtcgacccacgcgtccagtaagcggccgccgtagtttttaacatttttttttttggttctagttctgatcatcaagagggtgttaattatgcattattatgagacaagaacagtacagaagagggcctgctgtctattggattaggacatgcaaaactaaaagctggccgatctgtattcaaaccttacattaagtgatcagaggaagccaaagaaaacatattgttttacactggctgtcaaagtgaatagaaacgtcctaagagggt

SEQ ID NO: 35402 - DNA, 341 bp, Glycine max
  Clone ID: LIB3138-086-P1-N1-F9
aaaggaacacacacttcacacatcattacgacaattaaaagaggtgtggaaattttcaaataggcagagcatactcaacaagagggtcatgcctaatttcctttattgaattaaacaaacgaacaagcgaaagaaaacacaaattccagatcatgcagaggattccgcattttcagaagatctggcagtagcctgtggaacagaaaaagctggcttaagagtattaccagcaatttcaaaatcttgagagattcccaagagaatatcaaaaactgtagactgtttgggattgtcaataaggaaactcatatgccatgaagtttgatttgcccactcagaac

SEQ ID NO: 35403 - DNA, 350 bp, Glycine max
  Clone ID: LIB3138-086-P1-N1-G11
aaaataacacacacttgacgaggtcattacgacaattaaaagaggtgtggaaattttcaaataggcagagcatactcaacaagagggtcatgcctaatttcctttattgaattaaacaaacgaacaagcgaaagaaaacacaaattccagatcatgcagaggattccgcattttcagaagatctggcagtagcctgtggaacagaaaaagctggcataagagtattaccagcaatttcaaaatcttgagagattcccaagagaatatcaaaaactgtagactggttgggattgtcaataaggaaactcaaatgccatgaagtttgatttgccactcataactccacattt

SEQ ID NO: 35404 - DNA, 191 bp, Glycine max
  Clone ID: LIB3138-086-P1-N1-G2
aaaaacgcttttttctaaaggggacaggtttttttaaaaaatctctaattcctacatctttctactcaataacacaatttatttctatttctttattcttcttttttcataaaactaaaaaaaaaaatatttcaatataactagtgttctccccctcacaccccccccttaaaaaaaatcattattaaata

SEQ ID NO: 35405 - DNA, 351 bp, Glycine max
  Clone ID: LIB3138-086-P1-N1-G5
aaaataacacacacttgggacaggattacgacaattaaaagaggtgtggaaattttcaaataggcagagcatactcaacaagagggtcatgcctaatttcctttattgaattaaacaaacgaacaagcgaaagaaaacacaaattccagatcatgcagaggattccgcattttcagaagatctggcagtagcctgtggaacagaaaaagctggcataagaagtttaccagcaatttcaaaatcttgagagattcccaagagaatttcaaaaaactgttgactgtttgggattgtcaatatagaaactcaattgccatgaaattttggttgcccactcattaactcacattt

SEQ ID NO: 35406 - DNA, 217 bp, Glycine max
  unsure at all n locations
  Clone ID: LIB3138-086-P1-N1-G6
attaattcccggtcgacaatctcacagtccgccctcgcgctttttnttttttttttttttnnaaaacaacacacacgtcaaagattacttccactattaaaagaggtgtgttaatcctcaaataggcagagctttctcacacagtgtcatgcttcatttttccttttgttaataaaacactctcactcaactttatttttcatattttccttatttt

SEQ ID NO: 35407 - DNA, 241 bp, Glycine max
  Clone ID: LIB3138-086-P1-N1-G7
aaaaaaacacacacttcacacatcttttccacaattaaaagaggtggggaaattttcaaataggcagagcttactcaacaagggggtcatgcctaatttcctttattgaattaaacaaacgaacatgcgaaagataacacaatttccagatcatgcataggtttccgctttttcaaaagatctggcagttgcctgtggaacaaaaaaagctggcataagtatttttccaacaattttaaat

SEQ ID NO: 35408 - DNA, 192 bp, Glycine max
  unsure at all n locations
  Clone ID: LIB3138-086-P1-N1-G8
ccggtccggaattaatggctcgacccacgcgttcactaacgcgcgggcgcccatccacaaactgagtttttgaaaacgattcatatgttagctgaggcggtntttagagggttgcttaagtattcaccttttactaattgtttgaaggtagttctcttcctcggtgaacttgtcgaattccttgaagcatca

SEQ ID NO: 35409 - DNA, 345 bp, Glycine max
  Clone ID: LIB3138-086-P1-N1-G9
aattgaacgtatcccgttttctctaaatcaaatataatatccctataaaatacaattattaatagaattcaacaattaaaaatactaaagctgccgaatgcttttacacaccgagcattccaccaaaatccaatctttaactattgtaaataaaaataaaaaggaaaaaaacaaattacgaaacagcagcaagggaaaagctatataaaaatttaagagatatttactcatgctacatcaagcgagaaagattttaccagtactccagttcctcaattgagtgatacatcaggcggcaaataacatgttttcaatgcaatgtttaattactaaaaatccaagcat

SEQ ID NO: 35410 - DNA, 189 bp, Glycine max
  Clone ID: LIB3138-087-P1-N1-A1
gctcataacgttaatcagccccaagagaaagatttgctggagggaaaggggtcctttgatattaaatctcgctctagattggaaaaagttttctttacaaaagcacaatttgtgagtgggaaaaccttcatatttgttttaaatggtgctggttcacactttttataagattttccttcaaaggaagat

SEQ ID NO: 35411 - DNA, 419 bp, Glycine max
  unsure at all n locations
  Clone ID: LIB3138-087-P1-N1-A10
atcagttaagtctaacttcacttgtgtgctttattggcactcgtcaagctattgctgttacttttgttgttgaacacaatccttctgtatggagaattggctgggatgtgagcttacttgctgctgcatatgctgggattgtgacatcaagcatatcatactatgtacaaggactggtaattaagatgaaaggacctgtctttgcaactgcctttagccctttaatgatgatcattgtggccatcatgggatccttcatccttgcggaacaaanttatcttggaggtgtaattggtgccatcttaatcgttatagggttatacttaagttctgtggggaaagcacaaagaacatatagagagcaaagtggcagatgaaattcccttgcctgtaaaagatgctcaaattgctgtaattgc

SEQ ID NO: 35412 - DNA, 369 bp, Glycine max
  Clone ID: LIB3138-087-P1-N1-A11
ccagattgagacaaagaatagatcctcaatacaatgaggttcaggctcagatggaaacaaatttgtttaaattgtctcttgatgatgttgaaactcctaaaggttccatgttggatctgaaaatttctcaatctaaaattgcacttcccaagaacacagttggaggaaccattctgcgtagtgatctattggcaaattttttgacagagggcaattttagagcaagtgttgatttgcagcgcactcatcgtattagaggaatgattaaaatggtggccacagttggtattcctgagaatacaggtatatcattggcctgtgctatgaatagttcttttagggggcgcgccagttctgatatttacacca

SEQ ID NO: 35413 - DNA, 330 bp, Glycine max
  Clone ID: LIB3138-087-P1-N1-A12
cactttcttacttcataagatcaccttttcttcatcttctacttctccttcactaaaatgatgctcaaaatcaagagggttcccactgtcgtttccaacttccaaaaagacgacgctgcagactctcctcgtcccgtcggaggttgtggtcggaattgcctcaaagcttgttgcattccagatgcaaagctgcctttgtatggtttcaagaaggctaatattgggaaggatttggccctgcatgcatgcgccggggagcctcccctcgcattcctcgactctcttcttcttggagagtgggaagatcgcatgcagagaggactttttcgc

SEQ ID NO: 35414 - DNA, 338 bp, Glycine max
  unsure at all n locations
  Clone ID: LIB3138-087-P1-N1-A2
ctggaactggaaccctctccttcttcctcctcgtttttcttcactcagacatgnctttncatcaacaactactcgcctcgtagctcacaattcagtctcagaaaccgttcccattcataaggaaaaggaacaaacnctaccttctgtcaaacctacttactcccccactccttccaatcgaggccttcgaacccctcacagcgggtacccatttgatgggactactcgcanattcttcgagggttggtacttcaaagtctccattcccgaacggaagcagagcttttgctttatgtataccgtcgagagttcccctggtttcgtaaaacccattgacg

SEQ ID NO: 35415 - DNA, 421 bp, Glycine max
  Clone ID: LIB3138-087-P1-N1-A3
ggcccgccggctggtggaaatcggcgtcaccgacgtgttctccgttcccggggacttcaacctgacgctgctggaccacctcatcgcggagccggcgctgcacctggtcgggtgctgcaacgagctcaacgccgggtacgccgccgacggctacgcgcgcgccaggggagtcggcgcgtgcgtggtgacgttcaccgtcggcggtctcagcgtgctcaacgccatcgccggagcgtacagcgagaacttgccgctaatatgcattgtcggtgggcccaacttcaacgactacggcaccagtcggatcctccattacaccatcgggttacccgatttcagccaggagctaaggtgctttcagaccattaccttgcttccaggcttgggtgaataacttggaagatgctcatgagttgattga

SEQ ID NO: 35416 - DNA, 241 bp, Glycine max
  Clone ID: LIB3138-087-P1-N1-A4
ctgccttaagcctttgatttccaaatcctcccttcctctcccgtgtgggcagtgatcgttgcgaggcatgactacaccacctgtcttctcctcagcttcgcaatctcagttcgcctattcaaacccttactgctccttctcctactttcccgttccctttcaccttcagcaacccgcaaccactcactacgctgcgccctacgttttcgccccctccgtgcatattcccgctcttcaatcg

SEQ ID NO: 35417 - DNA, 308 bp, Glycine max
  Clone ID: LIB3138-087-P1-N1-A5
cggctcgagattgattcccaaaaccctaattgaagttctctccgccgggctatatattgcttgtggtgagtgagtctatcccttaaaggctctctcttgcagtcgcagaggaaaaccctagctagtagtctcagtttcgttgagagagaaaaaatggcagagggtctcgttctccgcggaaccatgcgcgcccacaccgacgtcgtgacggcgattgccactcccatcgacaactcccacatgatcgcgactgcgtcgcgcgacaaatccatcattctctggcacctcaccaaggaggacaagaccta

SEQ ID NO: 35418 - DNA, 346 bp, Glycine max
  Clone ID: LIB3138-087-P1-N1-A6
gtttttacaatccttcaaaaattttgtttctttgtgtgtgtatggtgatgataacttaattagtgttcatgaatatgtcaagccttactttagtggttctaaattgaaaagctttctagctagtcataacatcaccattactgatggtattgacaaaactagtgcaactttgcaatttagaaagttagcagattgtgattttctcaagagaaactttaagcagatgtctaatgttttgtgggtggctcctgaggacaaggcgagtttatggtcacaacttcattatgtttcgtgtaataatctggaaatgcaagaagcttatcttgtcaatctcgtaaatgtgtta

SEQ ID NO: 35419 - DNA, 422 bp, Glycine max
  Clone ID: LIB3138-087-P1-N1-A7
agatgagaaacatatgccttttgtccggttctcagagaagcacaggaagctactaaatgctttcataaggcaaaaccctggtttgcttgaaaaatctttctcactcatgctaaaggttccaagatttattgattttgataacaagcgtgcccacttccgatcaaaaattaagcatcagcatgaccatcaccatagtcccttgagaatatcagtaagaagggcatatgttctagaagattcttacaaccagcttcgcatgagatcaactcaagatttgaagggaaggttgactgtccacttccaaggggaggagggtattgatgcaagtgggcttacaagggaatggtatcaattattgtccagagttatttttgataaaggagcactgctttttactacagtgggcaatgaatcaacatttc

SEQ ID NO: 35420 - DNA, 365 bp, Glycine max
  Clone ID: LIB3138-087-P1-N1-A8
gtgaaggccgggcctcttaggaacaccgagatcgccgggcaagcgggctctctggccggcggtgggcttgtcgtgatcctcagcctttgcctcacaatctatgggatttcatccttcaacgaaggagccccatccactgctccgtcgctgaccttgacgggccgcaagaaggagcccgatcagctccaaactgctgatgggtggaccaagttcaccggaggcttctattctggaggcatttctgcgtgaaattgggcactacctcctcctctacagattggacctttcagtcttcatccaatgatgcatgtgcttactagcctttctttacttttttctaattcattcatcctgactcgaccttt

SEQ ID NO: 35421 - DNA, 430 bp, Glycine max
  Clone ID: LIB3138-087-P1-N1-B1
ggctagccgaaatcaaacaagccgcagggatccccgagagttgcaacgacgacgtcgttcaggtaaccaaacgaagcacaggtgaaggcgtatggaaagaactcttcctctatccaacgcccccaattcgtcacatcgtaatcgctgcccttgggattcacttcttccaacaagcgtcgggcgtagacgccgtcgttttgtacagccccaggatcttcgagaaggctgggatcaaagacgacacgcataaactttttgcaaccgtggccgttggattcgtcaaaaccgttttcatcttggcggctacttttacgttggaccgcgtgggtcgtcgtccgttgttgttgtctagtgtcgggggcatggtgctctctctcctcacgctcgctatcaggctcacgatcattggtcacttcgagaggaaactaat

SEQ ID NO: 35422 - DNA, 403 bp, Glycine max
  Clone ID: LIB3138-087-P1-N1-B10
ggcagatagaaaaaaagagcgacttttgagttcaaaagatgactaacttcccattgatcaacttggagaagctcagtggtgaggaaagaaacgataccatggaaaaaattaaagatgcttgtgaaaactggggattctttgagctggtgaatcatggcattcctcatgacatattggacactgtggagaggttgaccaaagagcactacaggaaatgcatggaagagaggttcaaggaattagtggcaagcaaaggtctagatgctgtccaaactgaggtcaaggatatggactgggagagcacctttcacttgcgtcacctccctgaatcaaacatctcagagatccctgatctcattgatgagtacaggaaggtgatgaaggattttgctttgaggttaga

SEQ ID NO: 35423 - DNA, 318 bp, Glycine max
  Clone ID: LIB3138-087-P1-N1-B11
gcgggcccggtgggcctggcgggctgggagggcccatggactgtggggcggaacaagtccaagttccaggaagtccccgagaccggcgtgagcttcgctgacgtggcaggcgcggaccaagcgaagcttgaattacaagaggttgttgatttcttgaagaatcccgataagtacaccgcgctgggcgcgaagattccgaaagggtgtcttttggtgggcccaccgggaaccggaaagacccttctggcgagggctgtggcggtggaagctggggtgccgtttttcttgtgcgcggctttggaagtcgttgaacttttt

SEQ ID NO: 35424 - DNA, 63 bp, Glycine max
  Clone ID: LIB3138-087-P1-N1-B12
gcagctgctgtcagactttttcaacggcaaggagcccaacaagtcgatcaaccctgatgaggc

SEQ ID NO: 35425 - DNA, 427 bp, Glycine max
  unsure at all n locations
  Clone ID: LIB3138-087-P1-N1-B2
catcaattgcgcctcctagactcctcaagcataaacaagactcgcccgaaacataaggcgcacatctgattcgcatcgatcggctntgcgtcacttctccgagctcgcgccctagatacggccggaaatgttcgcttcgtcctcctcgtccctcacccgggccgctacatcgacgatgtatgcgcaagctcaacgtaacttctcatcgtcatcctctgtcctggcttcgcggagaagacagctgatcgagctgctggttgaccacgaacgcttgggcacaaaaggtgtgttcgcgtgtcctacgctgtgctgaatttgaaaaccccgtgctgtgttcaccccacaggtgaccgagttctcgtcgctcctggatacgcacgacatcgtctggtcccacggcgtatcgctcgacatgtgccattctgga

SEQ ID NO: 35426 - DNA, 329 bp, Glycine max
  Clone ID: LIB3138-087-P1-N1-B5
attcacccagttttttttttctgtcctcttttcctctcagaggagcctctgagtctgctcaggtgttccttgtgaagagatccttttgtttttgaggtgtgaagggaaagagaaaaaaaaaaagatgaatcagtgtggttatcagcagaagaatgctttgacaagctgtgaggagatgaggatggaatcagtggtgtgccctaaaccacgaagattgggcctgttgaaccactcaacctttgatgaccacatcagacccttgaggccaccctttatcaacttccaattagaaattgaagattcaggagttggggctgagcttctggaca

SEQ ID NO: 35427 - DNA, 266 bp, Glycine max
  Clone ID: LIB3138-087-P1-N1-B6
gttgacaaccataattcatttgtgtgcatatgggctcaatcctggggggtcaggttctcgtcttttgggcaccattcctcattccatttcacagcatactgtttggaatcaaatggcaacagtgagaacaccattgaattttgattctagcaagcatagcttttgtcagttttctatagaccttctcggtggaggaattctagtggataaaactggagatcggatcacacttatacaaaattcttcaattagtaacttattgagag

SEQ ID NO: 35428 - DNA, 285 bp, Glycine max
  Clone ID: LIB3138-087-P1-N1-B8
ctgctgcagcgtcatttgcttcaatcatgtttgctccgtgaaggagaactatcctttaatgaaacattatccagatgtcgagcaaacaatgtgccaatctgcctcatgtatggaaaagaagatccctgggtggggccaatttggggtctccaggttaaaaggcaggtgcctgaagcttcatattatcaaatcagccctgctgggcactgccctcatgatgaagttcctgagatcataaatttcttacttcgcgggtggatctgaatccttagagtctcaaggttt

SEQ ID NO: 35429 - DNA, 367 bp, Glycine max
  Clone ID: LIB3138-087-P1-N1-B9
ctcgtgtcctttttcttctttgctctccaaaaatctcacacacacaggtatctagcaaatgggttctcaccaacaagaaccatggctattggagaatgggaaaccaagggttttgaccaaggagaccaggcatggccgttctgcacacagaatgtcctccacctctttgcgcaagaaatctagccgaactcttgtctcaaaggttccatgtgccactctcagaaactttctttcaaatttgcaagaagttattcttggcaccaagctttccattctcatccctgctattccagctgccatcgttgctgagtgctttggctttggaagaccttggatttttatattaagcttacttggacttacacca

SEQ ID NO: 35430 - DNA, 431 bp, Glycine max
  Clone ID: LIB3138-087-P1-N1-C1
cttccttgtgtttttcccggtaccatagctgcttctctaagatgaagaacagggtaatgactttgcaattacagtgaaccagattgatcaagaggatagcctgaattgatatcttaaatcctaatttgcaggttgcaaaaatacagaaaaatagttcacaagatgaacatcctccgctctttttggaacagtcccactggtctaaaaacaactcatttttggggtcctgccttcaattggagccttccttttgcggcagcaatggacacaaagaaaccaccggaaacaatatctgtcaatatgaccggaggttaattaattaattcctatttagtgttaacttttgtttgagaagaattaattcgtaattgaatccattggttttatttcctatttatataaagctcctagttaatttaaatttggaaatc

SEQ ID NO: 35431 - DNA, 162 bp, Glycine max
  Clone ID: LIB3138-087-P1-N1-C11
caaagctattttttgtaacaggtaaagctattcgcagaggcgggaccaagctattctgcacaactcttccaattcattgcttccatgactccctctcactacctcgcttgggacgtatggcacttgggagctggcccaagcttgtcaatatcttttagtctg

SEQ ID NO: 35432 - DNA, 410 bp, Glycine max
  Clone ID: LIB3138-087-P1-N1-C2
gaactcatcacttactggaagccttgttgtgagtaagagaaagggcttcctgcaccgagcacaccaacttgatacctctgattctttctttgcttagaattccacagaatatggagactgttcttttcaatcactccccacctttggaattcaagggtttgagcaaggaggaggaagactcattgctagggcaagtggaaatatggaggtacatgacatgcttcacggactccgtggccttgaaagctgtcatagagcttcgtatagcggacatactagaccgttatggtaaaccactatccttgtcgcaaattgtggagaacatagaagacgcacccttcccagatgcctcttttttccagagagttctgagagtgatggtgcgcaaaaagatcttagtgcacaggatt

SEQ ID NO: 35433 - DNA, 416 bp, Glycine max
  Clone ID: LIB3138-087-P1-N1-C3
gttaattgtggagtattttggaaggatgtcttacgttgctcataacgttaatcagccccaagagaaagatttgttggagggaaatttttcctttgatattaaatctcgctctagattgggaaaagtttcctctacaaaagcacaatttgttagtggaaaaaccttcaaatatgatataattggtgctggttcacattcttcagaagattttcctgaaaaggaagatcaagaaaaacccaaaaagattgatgccagattgagacaaagaatagatccttaatacaatgaggttcaggctcagatggaaacaaatttgtttaaattgtctcttgatgatgttgaaacttctaaaggttccatgttggatctgaaaatttttcaatctaaaattgcactttccagaacacagttggagg

SEQ ID NO: 35434 - DNA, 316 bp, Glycine max
  Clone ID: LIB3138-087-P1-N1-C5
atttgtaatagcatttttaatgagatgctcattagatatagctatgaaaaattactgcgccaggctaaagctccaagtatgtttttacaatccttcaaaaattttgtttctttgtgtgtgtatggtgatgataacttaattagtgttcatgaatatgtcaagccttactttagtggttctaaattgaaaagctttctagctggtcataatatcaccattactgatggtattgacaaaactagtgcaactttgcaatttaaaaaggtagcagattgtgattttcttaaaagaaacttttagcagatgtcttatgttt

SEQ ID NO: 35435 - DNA, 410 bp, Glycine max
  Clone ID: LIB3138-087-P1-N1-C6
gttcagtgtctacaataccaggtgattttgtcattggtgtcaagttgacaaccataaacaatatgtgtgcatatgggctcaatcctggtatttcaggttctcgtcttttgggcaccattcctcagtccatttcacagcaaactgtttggaatcaaatggcaacagtgagaacaccattgaattttgattctagcaagcagagcttttgtcagttttctattgaccttctcggtggaggaatcttagtggacaaaactggagattggatcacacttatacaaaattctccaattagtaacttgttgagagttgctgcttgaaagaaagggctgtttaatggtcaagaatgtgatgtctgggaatgcagcaagcaaaaggagtgattgggccttattggttcaagggtttta

SEQ ID NO: 35436 - DNA, 340 bp, Glycine max
  Clone ID: LIB3138-087-P1-N1-C9
aacacccatctaccaaattcctcccatcatcttttgattcaccttatcaatttcaaattttacaacattttcactttaatcatcttctcttgtgagttctagattcccgttttgctcagatagttaaacaaaaaccaaattgtcccaacaaagtagttcttccttccattcacacatttttgtcttagtagctgcacaaaaatgtcaggtggtgttggtccaacgggcagtgacattagcctaccacaagaacaagaagttggccacaaagaaccgcaagaacaacattcactcaagaatcttcacataaccatcaccaccacaccacacaaaccaactt

SEQ ID NO: 35437 - DNA, 418 bp, Glycine max
  unsure at all n locations
  Clone ID: LIB3138-087-P1-N1-D1
gtggcaaccgtaagggcgacaagggttacttcatcgagcccacaatcttctccaacgtaaccgaggatatgaagattcagcaagaagagatcttcggccccgtctgcacaatctccaagttcaagacaaaggccgatgtcatcaagattggtaacaacaccacatacggtcttgctgccgctgtacacacatccaacctcaccactgccattgaggttgccaacgcgctccgtgcaggaactgtctgggtcaactcctacaacactcttcactggcaacttcccttcggggggtacaaggagtctggtattgggcgcgagttgggagaggcggcgctggacaactacatncagaccaagaccgtgtctattcgtcttggcgatgttctgttcgggtaagcgctatgctggtttttagc

SEQ ID NO: 35438 - DNA, 285 bp, Glycine max
  Clone ID: LIB3138-087-P1-N1-D10
aaaaaaaaaaaaaaaaaaaaaaaaaaaaaaaaaaaaagaagagaaaaaaaaaaaaaaaaaaaaaaaaaaaaaaaaaaaaaaaaaaaaaaaaaaaaaaaacaaaaaaaaaaaaaaaaaaaaaaaaaaaaaaaaaaaaaaaaaaaaaaaaaaaaaaaaaaaaaaaaaaaaaaaaaaaaaaaaaaaaaaaaaaaaaaaaaaaaaaagaaaaaaaaaaaaaaaaaaaaaaaaaaaaaaaaaaaaaaaaaaaaaaaaaaaaaaaaaaaaaaaaaaaaaaaaaaaaaaaaa

SEQ ID NO: 35439 - DNA, 413 bp, Glycine max
  Clone ID: LIB3138-087-P1-N1-D11
gaaagatgtttggagagttgaatgtggaatcccttctggatttccgctcacagttatttgcaatagcatttttaatgagatgctcattagatatagctatgaaaaattactgcgccaggctaaagctccaagtatgtttttacaatccttcaaaaattttgtttctttgggggtgtatggtgatgataacttaattagtgttcatgaatatgtcaagccttactttagtggttctaaattgaaaagctttctagctagtcataacatcaccattactgatggtattgacaaaactagtgcaactttgcaatttagaaagttagcagattgtgattttctcaagagaaactttaagcagatgtctaatgttttgtggtggctcctgaggacaaggcgagtttatggtcacaact

SEQ ID NO: 35440 - DNA, 349 bp, Glycine max
  Clone ID: LIB3138-087-P1-N1-D12
gttggatctatttcaagcataggagctgtggcttcatcaaatggtctatatgcaattcaggaagtccgctatccaacagttgtcactgcacaccggattatgaggtccccaatactcaaaactgcattcatatatgcatgctatcttggaatatctgcaaatctccgctatcagataattggtgggatagtggggcatcggatttctgaacagttggcttgtcaaacattctttcgaaatatgcttgctattgtagcacggacagtcaattcatattggcgaacccagcaatggattgacctagcgcgctatactgggctacaagttagaaagacagagccatcagcat

SEQ ID NO: 35441 - DNA, 267 bp, Glycine max
  Clone ID: LIB3138-087-P1-N1-D2
aggattcgcacagcacttgggaaaggtaagaaaattgtttttgttactagagttgatccttttccagtagctttactggctgttctttttggcgttaagaatgaaattctgagttctaacgccactaatcctatgctgacgcgacttcttgagaactgtaagagtctcaaatatctggttgatgagtgtccttttgcatttgtgaactagtatgtagtattttattcacttaaataaagcgcattactatgtgcaatgagtgtgttt

SEQ ID NO: 35442 - DNA, 426 bp, Glycine max
  Clone ID: LIB3138-087-P1-N1-D3
cacaagctggtgcagtttggagagattcaggaaaaagttgtattgaaattttcacaagaggaatttcttacagcttggtcaactcaggtgcgtcctgcaacaactctgttggctgatgggtgtccatatttgtatgcaatggtgcatgatagttcagtgtctacaataccaggtgattttgtcattggtgtcaagttgacaaccataaacaatatgtgtgcatatgggctcaatcctggtatttcaggttctcgtcttttgggcaccattcctcagtccattttacagcatactgtttggaatcaaatggcaacagtgagaacaccattgaattttgattctagcaagcagagcttttgtcaggtttctattgaccttttcggtggaggaatcttattggacaaaactggtgattggatcacactt

SEQ ID NO: 35443 - DNA, 232 bp, Glycine max
  Clone ID: LIB3138-087-P1-N1-D4
ctttttctgttcttattcttcacaccatgtcctaatctttctgcaccatcgttctccatttttggctttacaaaaccactgtgtctgattaagggttctttaatattttcaatatttcttgtagtgaaaaagttgttagctaaaagaagaccaatgttttggtgttgtagaacgaagagaagaattaacacggaaattcagtgtgacgttgtgtgagagagctccagcaaca

SEQ ID NO: 35444 - DNA, 393 bp, Glycine max
  Clone ID: LIB3138-087-P1-N1-D5
gaatcttagtggacaaaactggagattggatcacacttatacaaaattctccaattagtaacttgttgagagttgctgcttggaagaaaggctgtttaatggtcaagattgtgatgtctgggaatgcagcagtcaaaaggagtgattgggcctcattggtacaagtgtttttaacaaacagcaacagtacagagcattttgatgcatgtaagtggacaaaatcagaaccacattcctgggaattgatcttcccaatagaggtatgtggtcctaataatggttttgaaatgtggagttctgagtgggcaaataaaacttcatggcatttgagtttccttatttgacaatcccaaacagtctacagtttttgatattctcttgggaatctctcaa

SEQ ID NO: 35445 - DNA, 277 bp, Glycine max
  Clone ID: LIB3138-087-P1-N1-D7
attctcatgaatttgccaaatgctgtactttcaatgtggggatttttcgttggagatctcgtctttaaagtttctaatatgacttctccctacattaaatgtacagtctctttcttcatagcatttgcaaattcggctggatgatccatcacttttgatgcttttccccacaagctgtcgcagttcggagagattcacgaacattgtgttttgaaattctcacaatacgaatattttacagcttggttcattcaggtgccttctttatcaacttttg

SEQ ID NO: 35446 - DNA, 349 bp, Glycine max
  Clone ID: LIB3138-087-P1-N1-D8
tggaaatgcatgaagcttatcttgtcaatctcgtaaatgtgctacgagaattgtatttgcacagtccataggaagctcgccaattgagaaggaaagctctctctcgtattgaatggctgcaaaaagctgatgttgcctaccatagcacagatcgaagagtttcattcgatgcagaggatgatgaatgctcctgattcaaatgacaatattgatttactgttgagcattgatttgatgggtttacaaggagcatgtaaagcttttccaaacaaaattgtttttgaagataagtttgtgtggctaacacatcagaaattctttgtggaaatttttcagtggtttcttggtt

SEQ ID NO: 35447 - DNA, 411 bp, Glycine max
  Clone ID: LIB3138-087-P1-N1-E11
gagcattttgatgcatgtaagtggacaaaatcagaaccacattcctgggaattgatcttcccaatagaggtatgtggtcctaataatggttttgaaatgtggagttctgagtgggcaaatcaaacttcatggcatttgagtttccttattgacaatcccaaacagtctacagtttttgatattctcttgggaatctctcaagattttgaaattgctggtaatactcttatgccagctttttctgttccacaggctactgccagatcttctgaaaatgcggaatcctctgcatgatctggaatttgtgttttctttcgcttgttccgttgtttaatttcaataaaggaaattaggcatgacccttttgttgagtatgctctgcctatttgaaaatttcacaccttttttatt

SEQ ID NO: 35448 - DNA, 426 bp, Glycine max
  unsure at all n locations
  Clone ID: LIB3138-087-P1-N1-E12
ggagaaatacgacaagaatccagctttgtatggtgaacttgccaaaggccagagccccaagttcatggtgtttgcttgctcagactcaagggtgtgcccatctcatgtgctagatttccaaccaggagaggcctttgtggtcagaaatgttgccaacattgtcccaccatatgaccagtcaaaatacgctggaactggggctgcagttgagtatgctgttttgcatcttaaggtgtcggagattgtggtcattggacacagtgcttgtggtggtattaaggggcttctgtctttcccatatgatggaacctactctactgattttattgaggagtgggtcaaaattggctttgcctgcaaaggcaaaggtgaagacacagcatggngatgccccttttgctgagttgtgctcacactgtgagaagg

SEQ ID NO: 35449 - DNA, 317 bp, Glycine max
  Clone ID: LIB3138-087-P1-N1-E2
attggtgtcaagttgacaaccataaacaatatgtgtgcatatgggctcaatcctggtatttcaggttctcgtcttttgggcaccattcctcagtccatttcacagcaaactgtttggaatcaaatggcaacagtgagaacaccattgaattttgattctagcaagcagagcttttgtcagttttctattgaccttctcggtggaggaatcttagtggacaaaactggggattggatcacacttatacaaaattctccaattagtaactttgttgagagttgctgcttggaagaaaggctgtttaatggtcaagattg

SEQ ID NO: 35450 - DNA, 420 bp, Glycine max
  Clone ID: LIB3138-087-P1-N1-E3
gcacaaccaacataaggcatggccttatcctctccctccctcttttcagctgtaaacgccacatattcagtaccccatttccatgcactgccactttcactttcttcttcttactttccaattaatgttagaccctccacccatcatgtccttgtctctgatcataatcacaaatggagaacaaaagtttcatttttcacttccttcttgaagcagaaaggtaaagatgccaagatcatcaaggaagaactccttgaggccattgcaccacttgatcgaggggctgatgccactccccaagaccagcaaacagttgatcagattgcgcgcgaacttgaggcagttactccaataaaggagcccctcaaatctaacctactcgatggaaaatgggagcttatatacactacctcgcagtca

SEQ ID NO: 35451 - DNA, 409 bp, Glycine max
  Clone ID: LIB3138-087-P1-N1-E4
cgcccgatacgtaaatcctggaaacttcgcaatcggtcttgctataggcacggaaagacctacgcaaacaccaaaacaacagttacccacacgatgaatcggtcactctcagtccgctcgaagaagggcagtggtagcggcagtggggaaaagtccgcgcccaagcaccgtttcacgatggcttccctaagaggtacgcagtagccggagctttcgaagaaactgttcatgatcatcaaatttggaaaccatgcgattggcgcctacgaggctgcggctcgagaacgggttggcattgcttatcagctttcggaacggggtgaggtctcataggacgagacgatctctgtgatcttcagataagcttggagttgctgctcgttgagattgccgagcaagatgatattta

SEQ ID NO: 35452 - DNA, 136 bp, Glycine max
  Clone ID: LIB3138-087-P1-N1-E7
gggacaatctcatttacaaacttggcagcaacatatgcggcgtggaatagactggcacggccaatggataactgagaaaagataatcaaaattcattgacgcgatgatgctaaccgtgcaaaactgagtacaaatc

SEQ ID NO: 35453 - DNA, 283 bp, Glycine max
  Clone ID: LIB3138-087-P1-N1-E9
tttggaaggatgtcttacgttgctcataacgttaatcagccccaagagaaagatttgttggagggaaatttttcctttgatattaaatcttgctctagattggaaaaagtttcctctacaaaagcacaatttgttagtggaaaaaccttcaaatatgatataattggtgctggttcacattctttagaagattatcctgaaaaggaagatcaagataaacccataatgattgatgccagattgagacaaagaatatatctctaatacaatgaggttcaggctc

SEQ ID NO: 35454 - DNA, 379 bp, Glycine max
  Clone ID: LIB3138-087-P1-N1-F10
ctttaacactctgtgagaccttgcaagcagcgcctctggaggaagttgttgaagcacgaacagttcctactgccactactcacataccaccatggatgctgcatccatttacaagataaattaatcggcatgacaccgttatgtttgtgacatgtgattaatgttaaaagcataagctatatatatctatatgtcaaaaacataatgttatagctaattgttaagtttgataataactgctcgtccttgtaagtacaggatgtgccctccaaatttgatcgtttgccaaaaaaacattcatagacgaatgctactacatggtgcaagagtgcaagtgatttgtataataaaacagttaaatggcttctattatttttaa

SEQ ID NO: 35455 - DNA, 417 bp, Glycine max
  Clone ID: LIB3138-087-P1-N1-F11
gaggattcctttgaggaagtttctttaagtgcagcacttaatggtgttgagggtttggactatatggaaagaattcctcttgccacatctgagggatttcctcatgtgctttcacgcaaaaatggtgaaaaaggcaaaaggagatttgtctctggggatggtgaagagattacactgattccgggaaccagtgttgaagaggcttacaacaagcttatagttgaacttgagaaaagtgttcctacattgtttggcattgaatgtcccaaggatgagaaactttctcgtcgcaaaatttttgacaaacctaagacgcgctgcttcactattcttcctatggagtttatcttgtggttcgttaaaagtttttaaattttgtgaggttcatttttaagaaaagggacaaacttaattttc

SEQ ID NO: 35456 - DNA, 402 bp, Glycine max
  Clone ID: LIB3138-087-P1-N1-F12
atgataacttaattagtgttcatgaatatgtcaagccttactttagtggttctaaattgaaaagctttctagctagtcataacatcaccattactgatggtattgacaaaactagtgcaactttgcaatttagaaagttagcagattgtgattttctcaagagaaactttaagcagatgtctaatgttttgtgggtggctcctgaggacaaggcgagtttatggtcacaacttcattatgtttcgtgtaataatctggaaatgcaagaagcttatcttgtcaatctcgtaaatgtgttacgagaattgtatttgcacagtccagaggaagctcgccaattgagaaggaaagctctctctcgtattgaatggctgcaaaaagctgatgtgcctaccatagcac

SEQ ID NO: 35457 - DNA, 245 bp, Glycine max
  unsure at all n locations
  Clone ID: LIB3138-087-P1-N1-F3
cggagatggatggcttttctggcaattctggtgttattgttgtggctgccactaacagaccggatgttcttgattcggccgtgntgaggcctggcccgttcgacaggcaagttactgtggatagacctgatggtggcggcagagttaaaattctttaagggcattctagaagaaaagcacttgcaaaggatgttgacttttaaaaaattgcaaggagaacccctggatttactggggctgatctg

SEQ ID NO: 35458 - DNA, 419 bp, Glycine max
  Clone ID: LIB3138-087-P1-N1-F6
cttattttctgatcattcttctgctctacgaaaattcagttcctctttcacctgcgttaattattaataattttattttagcaaattatagctatatctgtagtttcctaattcctttgaagtttacttaatccttgttgaaatatgaattgatgagtaacaattgttatacacgaccctttgaattttgtgaatagattgccaacttgagctgtgcaaggaaagacctgggatggtattggaagaatgtgatgaaggagcaacctatgccacaagcaattaaagaccttgttgaggattcacaagcatcagctgcagggaagaaggatcgttttatcagggacttcgatgtaaagcctaatgtcatattatatcacacccatgttgtgcccatgaagcagaagcataagcataagcag

SEQ ID NO: 35459 - DNA, 408 bp, Glycine max
  Clone ID: LIB3138-087-P1-N1-G1
agcagattgtgattttctcaagagaaactttaagcagatgtctaatgttttgtgggtggctcctgaggacaaggcgagtttatggtcacaacttcattatgtttcgtgtaataatctggaaatgcaagaagcttatcttgtcaatctcgtaaatgtgttacgagaattgtatttgcacagtccagaggaagctcgccaattgagaaggaaagctctctctcgtattgaatggctgcaaaaagctgatgtgcctaccatagcacagattgaagagttccattcgatgcagaggatgatgaatgctcctgattcaaatgataatattgatttactggtgagcattgatttgttgggtttacaaggagcaggtaaagcttttcaaacaaaattgtttttgatgataagctt

SEQ ID NO: 35460 - DNA, 356 bp, Glycine max
  Clone ID: LIB3138-087-P1-N1-G10
atcaaatagaaactgataacttgagttttgaagatctgtatattgctgttttacttgtgtacaatgatatcaacaagtatatacctggtccccattttgaccctccatcaaaagacaaagtcagagaagtcaaacagagctgtgatatcaacctcgatggtgatattgaccgtgatgaattttatgatttcatcctgataatgacagctgatacattcactattgttagccaaaaacttattctcacattggttgtagcaccaacagttgcagtggcaacaaagaaagctactgaaggtgttccaggtgttgggagactggtgcaaaagataccgaattcaagttatgctttcctc

SEQ ID NO: 35461 - DNA, 424 bp, Glycine max
  Clone ID: LIB3138-087-P1-N1-G11
ccaaagcacgccaaattacccacacgcaaacgacaacaaccgcgcgcgtttcacacctccataactcggagtagcatacgcagcgtcgttgactcgcaactcgtaacttggcctcgcgcgccgatggcgtcggtccccagcaccgtcgctccccgcaccttcctgccgtcgattcccaagccgagagctcctcttcacgccgcgaaatccgtcgccagcgccgcgcgcaactttccgagactttcgcacaacctcattctctccggaaacaaacgcgcggtggcggtgaactcggcgtcggaggagttcgacgtgatatcggtgcagagcgaggacattaccgaccagcaggagggcgtcgtggtgagccgcgtcgagatggaaggtggagacggcgaattggcgacgcaggtgagccgattcg

SEQ ID NO: 35462 - DNA, 300 bp, Glycine max
  unsure at all n locations
  Clone ID: LIB3138-087-P1-N1-G2
gccagtttctataaatgaaatcgagtggactaagatccaaaggagggttgtgagcacgattcggttagcccttgctcctgatataaaacatgcattgaaagagacaacactgaaggccttgtgggagaagctcaagaatatcgatacgtcaaagtcgctaaccaattgcctttgtttgaagatggagttgtatcaactcaaaatggagatggaaggagatctgcatgaccacatcaacaaaagatgacgctgactctcaatcgcgtncaccaacgagatatgaaataacattcaatgtta

SEQ ID NO: 35463 - DNA, 352 bp, Glycine max
  Clone ID: LIB3138-087-P1-N1-G3
tatgtttcgtgtaataatctggaaatgcaagaagcttatcttggcaatctcgtaaatgtgttacgagaattgtatttgcacagtccagaggaagctcgccaattgagaaggaaagctctctctcgtattgaatggctgcaaaaagctgatgtgcctaccatagcacagattgaagagttccattcgatgcagaggatgatgaatgctcctgattcaaatgataatattgatttactgttgagcattgatttgttgggtttacaaggagcaggtaaagcttttccaaacaaaattgtttatgatgaatatgtttgtgttggctaacacacaagaattcttttgatgggaaatt

SEQ ID NO: 35464 - DNA, 421 bp, Glycine max
  Clone ID: LIB3138-087-P1-N1-G4
caggctcgtcgccatccaagcccatccccatcagcatctcacgggagacatggcctcgcccactggctccctctacagcaactgctccatggagtccaactctcgccgcggctcttcgtgtgcctatccttcctggcccactggtccttcactggaataccgcaacccatcatcgtatatcagcgacgaggacctcttcggcgaagatttcgaggacgagtactgccccattctcaagaaggcaccagcgccaccacgagttcctcccatggcgcaggccttaccagagctgcctcctctctacgctcaaaagaagccaaagacccagcgcaggcgcaagcaacggaagcagcgccgcacttttgcagcccatgactcccatcaatgagtcgcctgagcagcaagagtaagcaacatcagc

SEQ ID NO: 35465 - DNA, 251 bp, Glycine max
  Clone ID: LIB3138-087-P1-N1-G5
accaaatgtgcatgatgagaaattgattagatatgctatgacagacatctgaagccgtatcttctgatttacacatttctatgttcaacctgaggtagctatttggttaagtaacttaaatgattcattatgagcttcggctgacatatgctgtgtacaaaattgaaagcaagcaagtatgggcttgcaaacgtacaaggctactaacatataaggtagtgattaatcgatctctggcaacttttgttgca

SEQ ID NO: 35466 - DNA, 257 bp, Glycine max
  unsure at all n locations
  Clone ID: LIB3138-087-P1-N1-G7
taccaagcaagttatgagcaagatggcagaaatgatgggcagtctttgaggtggtgatgaaaaattgatgcctgaaaagacgcacctgctgttggcttgttgttcaaggatggcaatntgtaagaaagatgtttggagagttgaatgtggaatcccttctggatttccgctcacagttatttgcaatagcattttttaattgagatgctcattagaatatagcttataaaaaaattacttgcgcccagggctaaaag

SEQ ID NO: 35467 - DNA, 201 bp, Glycine max
  Clone ID: LIB3138-087-P1-N1-G9
tttgagtcctggctgtattctgcccaataccggacaaggctgggcaaggatgagactgggggcgctagaaaagtatgcttctttgcccacaaacctgaagagctacgccctgtctatgcttccactggctcggtattgccaacaccaaaatcatattacagtagtggacttgacaatgactgccatgagtccattggctct

SEQ ID NO: 35468 - DNA, 386 bp, Glycine max
  Clone ID: LIB3138-087-P1-N1-H10
gttcccaggacctattgtgttttaaatccacaaaatccttttgtgttaaataggtggatgggaaaattgactttcccccagggcacttcccgaagtgttaagagaatgcctctttctatagggggaggagctggtgcaaagaatgctattctcatgaatatgccaaatgctgttctttcaatgtggagatattttgttggagatcttgtctttgaagtttctaagatgacttctccctacattaaatgtacagtctctttctttatagcattttgaaatttggctgatgataccatctaatttgaggcttttccccacaagctggtgcagctttgagagattcaggaaaaaagttgttttgaaattttcacaagaggaattttctt

SEQ ID NO: 35469 - DNA, 208 bp, Glycine max
  unsure at all n locations
  Clone ID: LIB3138-087-P1-N1-H11
ccaagggttacggaggcgtgccaatgataactactctgtggcgcatagagccaatcgtcggggaagagtcacccatgctttgagtgatgatgctttagctcaagctctaatggacaatagttctccgacttgaaggcttgacaattttgannagtggacaattgattttgggaaacttgtattgggtgagccttttgctcaaggagct

SEQ ID NO: 35470 - DNA, 289 bp, Glycine max
  Clone ID: LIB3138-087-P1-N1-H3
gcctaccatagcacagattgaagagttccattcaatgcagaggatgatgaatgctcctgattcaaatgataatattgatttactgttgagcattgatttgttgggtttacaaggagcaggtaaagcttttccaaacaaaattgtttttgatgataagcttgtgttggctaacacacaagaattctttgatggaaattttccagtggattcttggttaccaatttttgtgaattgtctttatcctgtaagtcaattaccttcagaagctgtcgttgtaaatgttacatgt

SEQ ID NO: 35471 - DNA, 408 bp, Glycine max
  Clone ID: LIB3138-087-P1-N1-H4
atggaaacaggcatgggaatgccgtggtctctgtgaaggcctgtgcttctggggttgtgttggtggagaagtctgaggcagagaaggccaataggctcaaaacagcttacactgagaaaattattcccttgctcatggaagagttctcttacaccaacaaacaccaggtgcctaaaattgagaagattgtggtgaactgtggtattggagatgctgcgcaaaatgcaaagggtttggacgcggcaataagtgatctagcactgatcacagggcagagacctattaagactcgggccagggcttctcttgccacttttaagatcagggaaggtcaaccgcttgggattgctgtgacactaagaggaaatatgatgtattcattcctagaccgagttatcaacctgggac

SEQ ID NO: 35472 - DNA, 429 bp, Glycine max
  Clone ID: LIB3138-087-P1-N1-H5
gttgcagccatggccacccacgcggctctagcttctacaaggatccccactaacaccaagttcccatccaaggcttcacactctttcccaacccaatgcgcctcaaagagacttgaggtgacagaattctctgggctaagatccacttcatgtgtgacatatgctaacgatgctagagaatcttccttttttgatcttgtagcttcccaactcactcccaagaccaatggatcatcaactcctgtgaggggagagacagtggccaagttgaaggtggcaatcaatggtttcggacgcattggtagaaacttccttcgctgctggcacggcccgaaagactcaccccttgaggtcgttgttgtcaacgacagtggtggtgtcaagaatgcttcgcacctgcttaaatatgattccatgctgggaaccttt

SEQ ID NO: 35473 - DNA, 292 bp, Glycine max
  Clone ID: LIB3138-087-P1-N1-H7
tgaagttaaaagccttagccttccctacaactccaaacacaaagacatcatcatccatggctgcctccgtctccactgtcggagctgtcaacagagctcttttgaacctgaatggttctggagctggagcttcagctcccagttcagccttctttgggaccagcttgaagaaggttattgcctcaagggtccccaacagcaaggtttccggtggaagcttcaagattgttgctgtagaaaagaagaaagagattggagagacccagcagaacgacaaggacaagatggaagg

SEQ ID NO: 35474 - DNA, 323 bp, Glycine max
  Clone ID: LIB3138-087-P1-N1-H8
gccgtttctcattctgtcagaggtctgatcgatggcgcggggtggaactgggccgaacccaattccggggagttattcagctcaaaatttgtcgacaaaacttattgtacctgctcccctgcgttttaccagacaattctctaatttagtcaggagaaagcgcaagggagtgtgctgctcttcattaaggaatgctgcatctgcatcttctaaggagtcactggaagatgctccaactaccttgtcagtttgcttggaggaggaaacagatcatgttatacagttcaaaatgtcagactttaaaatattagatactgttagtg

SEQ ID NO: 35475 - DNA, 391 bp, Glycine max
  Clone ID: LIB3138-087-P1-N1-H9
cagagacagagcagcactcacattcacaacgaaggtttgctattcatcagacatggtgaaggcaatcagagttcacgaactcggtggccctcaagttctgaagtgggaggatgtggaaattggagatccaaaagaaggcgaggtccgtgtgaggaacaaagccattggggttaatttcattgatgtctactttcgcaaaggagtttacaaagccccttcttttcccttcactccaggtatggaagctgttggggttgtgacagctgtgggtgctggactcactggtaggcaggttggagatcttgtagcttatgcaggtcaaccaatgggttcatttgctgaagagcagatacttcctgcaaataaagaagtccctgtttctttctcaatt

SEQ ID NO: 35476 - DNA, 391 bp, Glycine max
  Clone ID: LIB3138-088-P1-N1-A1
gcagtcaaaaggagtgattgggcctcattggtacaagtgtttttaacaaacagcaacagtacagagcattttgatgcatgtaagtggacaaaatcagaaccacattcctgggaattgatcttcccaatagaggtatgtggtcctaataatggttttgaaatgtggagttctgagtgggcaaatcaaacttcatggcatttgagtttccttattgacaatcccaaacagtctacagtttttgatattctcttgggaatctctcaagattttgaaattgctggtaatactcttatgccagctttttctgttccacaggctactgccagatcttctgaaaatgcggaatcctctgcatgatctggaatttgtgttttctttcgcttgttcgttt

SEQ ID NO: 35477 - DNA, 330 bp, Glycine max
  Clone ID: LIB3138-088-P1-N1-A10
tgcaatagttcctcttttcccaactccgcgttgaatataggagacaaagggaaaagcaagatggtttgacgtaagattcaaatgggtcaccctcacactgcatgcagctaaaggcaaaactttttcgccgtcagtattgacttgaactctcaattatttctgttcttaattagtttcaacgtgtaaggccacaatcaagagactcagcaaggatgaaggccgctatatgtaatttcttaatttctaattatgttgtcaatttgttaataaacttgaggaacttataacacagatttattattcgagtatatatataatgctactgttggc

SEQ ID NO: 35478 - DNA, 385 bp, Glycine max
  Clone ID: LIB3138-088-P1-N1-A11
ctccaattagtaacttgttgagagttgctgcttggaagaaaggctgtttaatggtcaagattgtgatgtctgggaatgcagcagtcaaaaggagtgattgggcctcattggtacaagtgtttttaacaaacagcaacagtacagagcattttgatgcatgtaagtggacaaaatcagaaccacattcctgggaattgatcttcccaatagaggtatgtggtcctaataatggttttgaaatgtggagttctgagtgggcaaatcaaacttcatggcatttgagtttccttattgacaatcccaaacagtctacagtttttgatattctcttgggaatctctcaagattttgaaattgctggtaatactcttatgccagctttttc

SEQ ID NO: 35479 - DNA, 391 bp, Glycine max
  Clone ID: LIB3138-088-P1-N1-A2
agggggaggagctggtgcaaagaatgctattctcatgaatatgccaaatgctgttctttcaatgtggagatattttgttggagatctcgtctttgaagtttctaagatgacttctccctacattaaatgtacagtctctttcttcatagcatttggaaatttggctgatgataccatcaattttgaggcttttccccacaagctggtgcagtttggagagattcaggaaaaagttgtattgaaattttcacaagaggaatttcttacagcttggtcaactcaggtgcgtcctgcaacaactctgttggctgatgggtgtccatatttgtatgcaatggtgcatgatagttcagtgtctacaataccaggtgattttgtcattggtgtcaag

SEQ ID NO: 35480 - DNA, 74 bp, Glycine max
  Clone ID: LIB3138-088-P1-N1-A5
gttaatgcaagcaacacaagttttgtcgaagtcttatatggaatagagatttcgcatttcttgttttgaagttt

SEQ ID NO: 35481 - DNA, 387 bp, Glycine max
  Clone ID: LIB3138-088-P1-N1-A8
gggcacttcccgaagtgttaagagaatgcctctttctatagggggaggagctggtgcaaagaatgctattctcatgaatatgccaaatgctgttctttcaatgtggagatattttgttggagatctcgtctttgaagtttctaagatgacttctccctacattaaatgtacagtctctttcttcatagcatttggaaatttggctgatgataccatcaattttgaggcttttccccacaagctggtgcagtttggagagattcaggaaaaagttgtattgaaattttcacaagaggaatttcttacagcttggtcaactcaggtgcgtcctgcaacaactctgttggctgatgggtgtccatatttgtatgcaatggtgcatgatag

SEQ ID NO: 35482 - DNA, 385 bp, Glycine max
  Clone ID: LIB3138-088-P1-N1-A9
ctaaagaggaattactaggttagcgaggagattggtcgcgggcgtttcggcaccatcttccgctgcttccacccactctccaaccaaccctacgcctgcaaactcatcgacaaatccctcctccttgactccaccgaccgccactgcctccagaacgaacccaaattcatgtcccttctctctactaaccccaacatcctccaaatcttccatgtcttcgaggacgaccactatctctccatcgtaatggacctctgccagccccacacgcttttcgaccgcatgctccatgctcccttctcggagtcccaggccgcctccctcatcaagaaccttctcgaagccgtcgcccactggcaccgtctcggcgtcgcccaccgcgaca

SEQ ID NO: 35483 - DNA, 388 bp, Glycine max
  Clone ID: LIB3138-088-P1-N1-B1
tgcattggtccattatctatcgttaatggaagtggaagtagcacttccattttccattttgcatttcccagtagagtaggcaaagccaaatccaaagggaacacgttcattcaattgcaattatttatattaattaataataattcacaaattgtgtgtggccagcactccaatcccctccctcaactacccgacaaattttccattcccggcatcttctcccagcctcgtaccccagataccttaaattcgcttcataacacaatttcgtttctttctttgccgaccaactcggttcttttttttttctttcaccttcacctatggccatggcttctttgattcagtgttctgcaacttccctctccgctgtccccatcactacccg

SEQ ID NO: 35484 - DNA, 387 bp, Glycine max
  Clone ID: LIB3138-088-P1-N1-B3
gttcaaccaaggaagcatttttagagaaatttaaatttgcagtttctgagggctttgatccagacagagatctgattaaagctggcatcgcaaatcagacaacgatgctcaagggagagacagaagagattgggaaactactggagaggactatgatgcgcaaatatggtgtggagaacatcaatgagcactttatgagcttcaatacaatttgtgatgctactcacgagagacaagatgctttgtacaaattggtggaggaagatctggatctaatgttagtagttggtggatggaactctagcaattcattacacctgcaagagattgcggaggaacgtggaattccttcttattggattgacagtgagcaaagaattggtccag

SEQ ID NO: 35485 - DNA, 343 bp, Glycine max
  Clone ID: LIB3138-088-P1-N1-B5
ggaatcttagtggacataactggagattggatcacacttatgcagaattcttcaattaggaacttattgagagttgctgcttggaagaaaggctgtttaatggtcaagattgtgatgtctgggaatgcagcagtcaaaaggagtgattgggcctcattggtacaagtgtttttaacaaacagtaacagtacagagcattttgatgcatgtaagtggacaaaatcagaaccacattcctgggaattgatcttcccaatagaggtatgtggtcctaataatggttttgaaatgtggagttctgattgggcaaatcaaactttatggcatttgagttttcttattg

SEQ ID NO: 35486 - DNA, 372 bp, Glycine max
  Clone ID: LIB3138-088-P1-N1-B6
atgggttttttcttgaaatgggtcaacttgtttgtcttttttgatttccttgctgcaacacccatcttctcagattcctcctccagctcaaatgcaatcgccaccaccaagttccttgatttagccaaggatcctcgggtttttgattggatggttggtatcaggaggaagattcatgagaatccagaactgggttatgaggaatttgagaccagtaagctgattagagctgaattggataaactgggcatctcatataaacacccagttgcagtcacgggtgttgttggcttcatagggactggacttccttcttttggtgcattaagagctgacatggatgctctttctatgcaggaaatgggggggggg

SEQ ID NO: 35487 - DNA, 392 bp, Glycine max
  Clone ID: LIB3138-088-P1-N1-C1
aacagagctcttttgaacctgaatgggtctggacctggggtttcagctcccagttcatccttctttgggagcagcttgaagaaggttattggctcaagggtccccaacacaaagatttcctctggaagcttcaagattgttgctgtagaagagaagaaagagattgaagagacccagcagaccgacaaggacagatggaagggtcttgcctatgatatctcagacgaccaacaggacatcacaagaggaaagggtttggttgactcccttttccaagctccacaggatgctggaactcactatgctgtcatgagctcctacgagtaccttagcactggacttcgccagtacttggacaacaacatggatggattttacattgctccagcttt

SEQ ID NO: 35488 - DNA, 387 bp, Glycine max
  Clone ID: LIB3138-088-P1-N1-C10
ctccacttgattcatatgttgattttgatgtagagacagagaaaaaacaacaccggtttaacatgtggaagcattcatacttgaagacttgtgctgccattgatcgcgaactagagcagaatcgcaagatagattcattttacagtggaacaactgccttgtcaattgttagacagggtgaactcattatcattgcaaacgttggtgactctcgtgctgtgttagctacaacatcagatgatggaagtttggtaccagttcagctgacagtagatttcaagcccaatttacctcaggaagcagagagaatacttgagtccaatggacgagttttctgcttagacgacgagcccggggtgcacagggtgtggttgcctgatgaggagt

SEQ ID NO: 35489 - DNA, 357 bp, Glycine max
  Clone ID: LIB3138-088-P1-N1-C11
atcatggccacctctgctattcagcaatcagcattcgcaggggaaactgctctgaagcagctcaatgagttggtccgcaagaccggtggcgccggcaaaggtcgcaccaacatgcgccgtaccgtcaagagtgctcctcagagcatttggtatggccctgatcgtcccaagtacctgggtccattctcagagcagattccgtcatacctgaccggagaattccccggtgactacggatgggacactgctggactatcagctgacccggaaaccttcgtcaggaaccgggagctggaggtgatttacagtatatgggccatgcttggtgcacttggctgcacctttccagagatcctt

SEQ ID NO: 35490 - DNA, 280 bp, Glycine max
  Clone ID: LIB3138-088-P1-N1-C12
cgagaagaacttttttcctaatgcaagctttgtcaaagttagcatggatggagcaccttaccttcgcatagtggacttgaagatgtacaagagttaccgagtgctctctgaatctttaggcaaaatgttctagcttcttcatctttggcaattgtgaattccaaggtatgaaggattttatgtatgagagcatgctgaatgatctcttgaacagctctgattatgtcccaacctatgaggacatggatggttacttggtgcatgtctgatgatgtcctca

SEQ ID NO: 35491 - DNA, 390 bp, Glycine max
  Clone ID: LIB3138-088-P1-N1-C2
caaactcttatgcctttcttgacggctttgatgcaaagttcaacgacttgcagagtgcctctggcgcaacttcggttagcgacgaggccctcgcagcgggacaactttagcactatcgctgtcgcgaaatccaccaagggggcgaagaagcaagctgagttggtggatggtggctgtggttcacgactgatgaggtcttctaggcctaagcaattgggtaggcgtaaggtgcgatcattgaggttaacgggggcactgggttgggaaaacatggggtgtggcatcactaccgggcgtgggacggcgttctgagcgtgtacactcttgtagcaacagtttcgtttagacttggtaacctttctggatattgtttccttgatcggacatatg

SEQ ID NO: 35492 - DNA, 384 bp, Glycine max
  Clone ID: LIB3138-088-P1-N1-C3
gtttttaacaaacagctacagtacagagcatttcgatgcatgtgggtggacaaaatcagaaccacattcctgggaattgatcttcctaatagaggtatgtggtcctaataatggttttgaaatgtggagttctgagtgggcaaattaaactttatggcatttgagttttcttattgacaatcccaaacagtctacagtttttgatattctcttgggaatctctcaagattttgaaattgctggtaatactcttatgccagctttttctgttccacaggctactgtcagatcttctgaaaatgcggaatcctctgcatgatctggaatttgtgtttccattcgcttggtccttttgttctaatttaaatataggcaaatttggca

SEQ ID NO: 35493 - DNA, 236 bp, Glycine max
  Clone ID: LIB3138-088-P1-N1-C4
tggagcgtcaccctctcacatggcggcagcaaccacaatttgcgtacggtccctcctcttatattcttcttggctcaaatttacttagacagggacacttgaaaaacacttcatttgctcatcgtttttctccttcaagatcattcctttgtaacggattttgtcccaggaaacctgttttgggaagaaacttgttctgggtatcaaaaaccatggatgaattcttcagaactttt

SEQ ID NO: 35494 - DNA, 208 bp, Glycine max
  Clone ID: LIB3138-088-P1-N1-C6
ggatcttccagctgacctgagagctcggccacaagtccgacggggagaccgtccggtggcttctggagcacgccgagccggccatcattgaggccaccggcaccggtacagttccggccatcgcggtctccgttggctggacgctcaaaatcccaaccaccttatcgtacgagaaagaagccgttttctacgcctcaaacaagaagcg

SEQ ID NO: 35495 - DNA, 57 bp, Glycine max
  Clone ID: LIB3138-088-P1-N1-C7
gtacttcagctcgtaattccgctcacgacgtactgccatccctttacacgatgtcta

SEQ ID NO: 35496 - DNA, 352 bp, Glycine max
  Clone ID: LIB3138-088-P1-N1-C8
atggcaagttcaccgagaggacccgtatttgcttccgagatgctctgtaccggcttgctagaaacactgaagaacaacctgtaatgctggaccagaatgaatatcttaacatacagaaggcaataccacatacagatcacaatgaaacaatgaggtctcaggacaagaaaccaatggaatcagaaaccaacaatattgacagaataattgcaaatcttatgttcaagagcatggagttcaacatacatcattcttcaattacatcatcaacaaactcccgtcaacaagttattggaagtaataatggtccacgtggaaacaacttaaaagccctgaatttggaagacaaatc

SEQ ID NO: 35497 - DNA, 385 bp, Glycine max
  Clone ID: LIB3138-088-P1-N1-C9
cacacacacatagcaaaaagacaccaaaaaaaaggataagcttcttcagtccttgagaaatcatattcagtttttatttttagaatgttatagttttctgcttccttaaaatcttcactagcaatgaagattgagtttgtccagtttttcactttacattaccaaaagaaagaactaggaagaatgggagttcagcaaaagctcatttctttcctctttcatacttgtcttgttttcattatgttttcccttgtaagctcatcacaagagcaccaccaaattacaagcagcccttcaaaaaccaaagatagcaaccacattaaggtaacctgttcattatacttcccttgccttttccaatcttacaagtttaatcctttgttta

SEQ ID NO: 35498 - DNA, 388 bp, Glycine max
  Clone ID: LIB3138-088-P1-N1-D1
gtggagtgaagtgaagtgagtgagagaagcgcaaacaagtagaagagaaaatcatggcagtttctgtaaccattttagttctcatcatcgctctgcatctcatagccttcgtctttgccattggggccgaacgacgtcgtagcgaggccaaagtggtccccgacgagtacgacgaccgaaccttctgcgtttacaccaccgacgcttcctccgtctacggcctcgccgccgtcgccctcctgctcctcagccacaccgtccttaacggcgtcacccgatgcctttgctgcggtaaaggcctcgtctccggttgctccgccacttgcgccgtcttctccttcatcctctcatggattagttttttggcggcagaggcgtgtctgttagc

SEQ ID NO: 35499 - DNA, 243 bp, Glycine max
  Clone ID: LIB3138-088-P1-N1-D10
gagtaagttctttttctgacttatgttaataattactttagacttgtgtagtagtaaatgctcctaatgtcaaagactacgtcagatttgtgtagtagtaatgccactcatgtcaaatagtcaagtcttcacccaactggtttggatgaagcttaaagttggagttagatttctgcattatgtaactcgttttagttgccccacatcattagctaaacttgttgactgtcaaatttaataaaa

SEQ ID NO: 35500 - DNA, 308 bp, Glycine max
  Clone ID: LIB3138-088-P1-N1-D11
caaaaatgttgtattttccggtacatcattatggattggattagtgtttctcgtgggtattcttaattctctcatttcttgaagctctatttattctagatcaaaaacgaaatgacccctcccccagaattctttcggattgtcgggcacattaaaaaaggaatggttaagttcctaaaaataaagaaaactataacacattatatggaggggtcaaatattaattaagataaaagatatagaatatctatctgtctatatatatatatagatataatttattaataattagaactttcttttttctt

SEQ ID NO: 35501 - DNA, 383 bp, Glycine max
  Clone ID: LIB3138-088-P1-N1-D12
ttcaaattcccacacattcttattagcctaacatactctctcttccaaagttgtttcactttaccaaaaaagctttccctttgagaaataaaacccaaaaccagtcttttgataattttgagcagttgcattccttgttttcttcctttttgggtcccctcaaaagtagtttcaaagagttcctcttcctccacagatatcatggcagatcaaaccccgggttcaggaaccgtttctgttgaagcttcttcacaagaaagaaggaaacttccaaactttcttttgtctgtgagacttaagtatgtgaagcttggttaccactacttgatcctcaatgctatgtaccttttgctcataccccttcttggtgtagcttctgctta

SEQ ID NO: 35502 - DNA, 288 bp, Glycine max
  Clone ID: LIB3138-088-P1-N1-D2
cgctcctcagatatcaacaaaaggattcgcacagcacttgggaaaggtaagaaaattgtttttcttactagagttgatccttttccagtagctttactggctgttctttttggcgttaagaatgaaattctgagttctaacgccactaatcctatgctgacgcgacttcttgagaactgtaagagtctcaaatatctggttgatgagtgtccttttgcatttgtgaactagtatgtagtattttattcacttaaataaagcgcattactatgtgcaatgagtgtgttt

SEQ ID NO: 35503 - DNA, 384 bp, Glycine max
  Clone ID: LIB3138-088-P1-N1-D3
gctggtgcaaagaatgctattctcatgaatatgccaaatgctgttctttcaatgtggagatattttgttggagatctcgtctttgaagtttctaagatgacttctccctacattaaatgtacagtctctttcttcatagcatttggaaatttggctgatgataccatcaattttgaggcttttccccacaagctggtgcagtttggagagattcaggaaaaagttgtattgaaattttcacaagaggaatttcttacagcttggtcaactcaggtgcgtcctgcaacaactctgttggctgatgggtgtccatatttgtatgcaatggtgcatgatagttcagtgtctacaataccaggtgattttgtcattggtgtcaagttg

SEQ ID NO: 35504 - DNA, 265 bp, Glycine max
  Clone ID: LIB3138-088-P1-N1-D5
gctactaaactggaatttggctcgagtacagtttgttcaccttatgtcgctctgtacaacttgtgggtgatgttgccatatttgtatgcaatggtgcacgatagttcagtgtttcaataccaggtgattctgtcattggtgtcaagtcgacaactataaacaagatgtgtgcatatgggctcaattctggtatttcaggttcttagcattttgggcaccattcctcagtccattttacagccaatctgtctggaaccaaatggca

SEQ ID NO: 35505 - DNA, 323 bp, Glycine max
  Clone ID: LIB3138-088-P1-N1-D6
ggggagagcacatccagagagatcagggtttgatggtccttggacggaggaccctctgaagtttgataactcatactttgtggaacttttgaaagaagattctgctgggctgcttaaacttccaacagacaaggctttattggaggatgctgaatttcgctgttatgttgagctatatgcaaaggatgaggatgcattttttcgagattatgctgaatcacataagaaacttttagagctaggctttgtgccatgttcaaagccgatttctattaaggaagggaccatactggcacaaggtgctgtaggagttgaagttgcta

SEQ ID NO: 35506 - DNA, 84 bp, Glycine max
  Clone ID: LIB3138-088-P1-N1-D7
agcagtagctgcttttcaaggttccgtcggcaacggtgggggatcttttcaatgtccgagcactgcaaagacttctgttgacaa

SEQ ID NO: 35507 - DNA, 309 bp, Glycine max
  Clone ID: LIB3138-088-P1-N1-D8
ctcgagccgattttgctcgagcacacttccttaaccacgaggcagtttgtattgcagcttggtccaactttcattaaactcggtcagttatcatcaacaaggtcagatctatttccacgtgaatttgtggatgagcttccacaattacaggacatgggtcctgccttctctcctaagaaagcatgtaaattcatcgagagtgaattgggagctcccattaacatattatttgacgagtttgaagatcggccaatagctgctgattttttcggtcaggttgatcgtgctattcttgcatataggggaaaa

SEQ ID NO: 35508 - DNA, 324 bp, Glycine max
  Clone ID: LIB3138-088-P1-N1-E1
gttcccaggacctattgtgttttaaatccacaaaatccttttgtgttaaataggtggatgggaaaattgactttcccccacggcacttcccgaagagttaagagaatgcctctttctatagggggaggagctggtgcaaagaatgctattctcatgaatatgccaaatgctgttctttcaatgtggagaaattttgttggagatctcgtctttgaagtctctaagatgacttttccctacattaaatgtacagcctctttttttcatagcatttggaaatttggctgatgataccatcaatttttgggctttttccccacaagc

SEQ ID NO: 35509 - DNA, 230 bp, Glycine max
  Clone ID: LIB3138-088-P1-N1-E10
attaaatcccttgggcatgctctttatgctttcataaatgggaagcttgcagggagtggaaccggtaaccatgataaagctaatgtctgaagcagacatccccatcacactagtttctgggaagaacacaattgatcttctgagttaaactgagggacttcagaactatggagctttctttgacacatggggtgcggggaatcactggccctgttatattgaaatgtttg

SEQ ID NO: 35510 - DNA, 377 bp, Glycine max
  Clone ID: LIB3138-088-P1-N1-E11
cacaaaagcaatgactatgtcatttaatccaaacccgtgttctgatgcatggagtttggaatttctgaagcgtaccggatttcattgtgatatcatttgtgtcactggatggactgccactccaatgcaggatgttcaggttacaattgattggtttatttcctctcaggaatgtgttcccaggacttattgtgttttaaatccacaaaatccttttgtgttgaataggtggatggggaaactgactttcccccagggcactttccgaagtgttaagagaatgcctttttctatagggggaggagctggtgcaaagaatgctattctcatgaatatgccaaatgctgttttttcaatgtggagaatttttgttggag

SEQ ID NO: 35511 - DNA, 369 bp, Glycine max
  Clone ID: LIB3138-088-P1-N1-E12
gaattttgattctatcaagcacagcttttgtcagttttctattgaccttttcggtggaggaatcttagttgacaaaactggagattggatcacacttatacaaaactcttcaattagtatcttgtagagagttgctgtttggaagaatggttgctaaatggtcatgattgtcatgtctgggaatgctgtattcataatggtgttattgttccttattggtacaagttttcttaacaaacatctacatttcagatcttcttgatgaatgtaagtgtacaaaattttatccacatttctgtgaattgactttttctaattgtggttatgtgcgtcctaattattcgtttcgaaatgcggagtttttattgg

SEQ ID NO: 35512 - DNA, 359 bp, Glycine max
  Clone ID: LIB3138-088-P1-N1-E2
ctcgagccgttgaaattttcacaagaggaatttcttacagcgtggtcaactcaggtgcgggctgcatcaactatgatggctgatgggtgtccatatttgtatgctatggtgcatgatagttcagtgtctacaataccaggtgattttgccattggtgttaagtagacaaccatgaacaatatgtgtgcattatgggttcaatcctggtatttcaggatctcgtctttatggcaccattccttagtctatttcacagtttacttgtttggaattaaatgggcaccagtcgagaacaccattcgtattttgattttttgcaaagtaaagctttttgttaaatttttctgattgaccctttc

SEQ ID NO: 35513 - DNA, 54 bp, Glycine max
  Clone ID: LIB3138-088-P1-N1-E3
aattgttatgaaaatttaatatttgaagcagagattagagaatcaatagagaag

SEQ ID NO: 35514 - DNA, 350 bp, Glycine max
  Clone ID: LIB3138-088-P1-N1-E5
gcggctctcataaaagctctgttctttgtaatcgttcaatgcttgacctttttcgcatatgctgcaaggtttgaaatcacaaaccgatgcacatacactgtctgggctgcgtctgtgcctgttggcggtggcgtgcaattaaacccgggccagtcatggtccgtggacgtgcctgcaggaacgaaaggggcccgcgtttgggcccgaaccggctgcaacttctacggttcgggccgcggtggatgccagaccggtgactgcgggggtgctctctactgcatagcttacggtgcgccttccaacaccctgtttgaattcggcttttactggttcaacaatttggactcttt

SEQ ID NO: 35515 - DNA, 328 bp, Glycine max
  Clone ID: LIB3138-088-P1-N1-E6
caaaatccttttgtgttaaataggtggatgggaaaattgactttcccccagggcactttccgaagtgttaagagaatgcctctttctatagggggaggagctggtgcaaagaatgctattctcatgaatatgccaaatgctgttctttcaatgtggagatattttgttggagatctcgtctttgaagtttctaagatgacttctccctacattaaatgtacagtctctttcctcatagcattaggcgatttgtctgatgataccatcaattatgaggcttttccccacaagttggtgcagggtggggagatgtacgaaaaaattgtat

SEQ ID NO: 35516 - DNA, 326 bp, Glycine max
  Clone ID: LIB3138-088-P1-N1-E7
gcggtgaccatggttaacatgattatggttttcacaaaacctttggtttctgtctgcaccagttcccgttcccccacaccaaaacttcccattctccaaatttcactccccaaagccctaaccttgtaactgaaactcccaatttcaaagccccagatgctgttcctcctgggtgggattgcatcactggttttggcctgactcttcctagctttagaatttgagaaagcactacttctttgactttaatccttaccctgcccataataatggtggagtttctgttgtttatggttgccttgtacaagatatggttcaccccactt

SEQ ID NO: 35517 - DNA, 345 bp, Glycine max
  Clone ID: LIB3138-088-P1-N1-E8
atcaagggttgtgattgcagagaagtgagatacactaaggtgttcttataaatacactttaattaggtggtaagataagtgactaaccttagtaacattgccacatattgagttcattttggaattgtgccactaaaattctattcaattcatctatggctgcctcttcttatgctatgcaaacaatttctggcaaaccctttgatccgtattatcagcgggtctagggtgaaccaacttggcgttcctgctttgcacatgagaaggattgttggcctgagagttaggtccatggctaatgaagaacaactcaatgtgtctgcaacctcagttacaccgtcacca

SEQ ID NO: 35518 - DNA, 285 bp, Glycine max
  Clone ID: LIB3138-088-P1-N1-F10
attgaagttaaatgccttagccttccctacaactccaaacacaaagacattatcatccatggctgcctccgtcttcactgtcggagctgtcaacagagctcttttgaacctgaatggttctggagctggagcttaagcttccagctaatccttattttgggaccagcttgaataaggttattgcctctagggtccctaatagcaaggtttccgttggaagctttaacattgttgctgtagaagagaagaaagagattgaatatacccttcataccgactatggac

SEQ ID NO: 35519 - DNA, 307 bp, Glycine max
  Clone ID: LIB3138-088-P1-N1-F12
gttggaatcaacctatactccatggaatggactggtttggccaatagattactgagtaagggcaatgatattctgtgttgcgattatgctagttttgatggtttgattaccaagcaagttatgagcaagatggcataaatgataaacagtctttgtggtggtgatgaaaaattgatgcgtgaaaggacgcacctgttgatggtttgttgatcaaggatggtattttgttagaaagatgtttggagagttgtatgtgtaatccattttggattttccgtttcagtttattttgctatagctaggttta

SEQ ID NO: 35520 - DNA, 383 bp, Glycine max
  Clone ID: LIB3138-088-P1-N1-F2
gcattttgatgcatgtaagtggacaaaatcagaaccacattgctgggaattgatcttcccaatagaggtatgtggtcctaataatggttttgaaatgtggagttctgagtgggcaaatcaaacttcatggcatttgagtttccttattgacaatcccaaacagtctacagtttttgatattctcttgggaatctctcaagattttgaaattgctggtaatactcttatgccagctttttctgttccacaggctactgccagatcttctgaaaatgcggaatcctctgcatgatctggaatttgtgttttctttcgcttgttcgtttgtttaattcaataaaggaaattaggcatgaccctcttgttgagtatgctctgcctat

SEQ ID NO: 35521 - DNA, 190 bp, Glycine max
  Clone ID: LIB3138-088-P1-N1-F3
caaggatcatgttaagtttttccaatcaaaattgtttttgaggatgagcttgtgttggctaacacacatataattcttctatggaaatttttcagaggattcttggttaccaattatggtgaattgtctttatcctgttagataattaccttcagaagctgtccgtgttaatgttacatgtggtagtgga

SEQ ID NO: 35522 - DNA, 120 bp, Glycine max
  Clone ID: LIB3138-088-P1-N1-F6
atggagggaatcttttattattcatgctcacttgccggtcactggggtctaagaaagctgagtgggcgatatcatgacattcaccactccattgatggtgacactgacatggctttctct

SEQ ID NO: 35523 - DNA, 389 bp, Glycine max
  Clone ID: LIB3138-088-P1-N1-G1
gggacagggtggttcagaagtttcattgcagactatggagtgcctttcatggtggtcgtgtggacagctctatcattcatagtaccaagtaaagtgccttctggagttccaagaaggctcacttctcctcttgcttgggaatctacatctttacatcattggacagtaatcaaagatatgggggaggtttctctggcatatatttttgctgcttttattcccgccttaatgatagcggggctttacttctttgaccatagtgttgcttcccagatggcacagcagaaggaattcaatctcaggaaaccttctgcataccactatgacatattgttgctaggattaacgacattgctttgtggattaattggcttacccccttcaaatgg

SEQ ID NO: 35524 - DNA, 383 bp, Glycine max
  Clone ID: LIB3138-088-P1-N1-G10
ggcttgcaattgaagttgaagtcttgcccttctctcttcaactgcaaacacaagacatcatcatccatggctgcctccgtctccactgtcggagctgtcaacagagctcttttgaacctgaatgggtctggacctggggtttcagctcccagttcatccttctttgggagcagtttgaagaaggttattggttcaagggtccccaacataaagatttcctctggaagcttcaagaatgttgcttgttgaagagtacaaagatattgaagagaccctatttaccgacaaggacagatggaaaggtcttgcctatgattttttagacgaccaacatgacattacatgaggatagggcttggttgactcccttttcaagctctcac

SEQ ID NO: 35525 - DNA, 142 bp, Glycine max
  Clone ID: LIB3138-088-P1-N1-G12
acttccaagcatatgtcaccggagaaggtcctgttgagaacctagcaaaacatctcagtgacccttttggcaacaacttgtttactggtattgtcgggtttgctgttagagctccaactgtgtaaattatttgtggtttata

SEQ ID NO: 35526 - DNA, 284 bp, Glycine max
  Clone ID: LIB3138-088-P1-N1-G3
gaagagtttacttcataatattagttggatcttctgcataatcatattcaatatgattttctcaagaggcaacaccgccacgtctgccatattgctgctccttggaatattatcttccactggagtagaatttacgggggcacaatctgttggtgtgcgttatggaggaaattgaaacaatctaccaacaaagcaagcagcggccggatcttctcaaatcctacacaattggctaatatcggtcaacctatccacactaaggattccttttatgcccctcaaag

SEQ ID NO: 35527 - DNA, 382 bp, Glycine max
  Clone ID: LIB3138-088-P1-N1-G5
gtcttgcaattgaagttgaagtcttgcccttctctcttcaactccaaacacaagacatcatcatccatggctgcctccgtctccactgtcggagctgtcaacagagctcttttgaacctgaatgggtctggacctggggtttcagctcccagttcatccttctttgggagcagcttgaagaaggttattggctcaagggtccccaacacaaagatttcctctggaagcttcaagattgttgctgtagaagagaagaaagagattgaagagacccagcagaccgacaaggacagatggaagggtcttgcctatgatatctcagacgaccaacaggacatcacaagaggaaagggtttggttgactcccttttccaagctccac

SEQ ID NO: 35528 - DNA, 307 bp, Glycine max
  Clone ID: LIB3138-088-P1-N1-G7
gagcacaccctccttctcattttcattatctagctagcggtaccactttcaatttcaaattcactctcataaattagaatggctagccaatcaaacactaaatcagttcacgatttcacagttaaagatgccaggggaaataatgttaatctcgccgattacaaaggaaaggtccttctcattgtcaatgttgcctcacaatgcggcttgactaattcaaactacacagagcttaaccaattgtttgagatatacaaatggaaaaggacttgaaattctggcattcccatgcaatcagtttggggct

SEQ ID NO: 35529 - DNA, 165 bp, Glycine max
  Clone ID: LIB3138-088-P1-N1-G9
tgttaacagattctgcataagaagaataatattgaatatgggggtgttttgaattcctgggctgaagcgtttcaaacatcacggctattactaagaatgtctttctctcttatttatgttctaactgtacaatcgcggacaggttgactaactgccaccaaccct

SEQ ID NO: 35530 - DNA, 331 bp, Glycine max
  Clone ID: LIB3138-088-P1-N1-H2
gctccgaattattctcgagcaatcttttaaacctctttctagaattgcttttgcacaaaacagagcgaattttgtcatttactaatgaaagctttatatcgtttagaatagcttcaaaaagctgatttacctaccatatcacaaattgaagagtgccattcaaagcatatgatgataaatgctccagattcaaatgataatattgattaactcaacatcaatgaaacaattggttaacaaggtacatattaaattttttatcaaacacaaattgtttttattgatcggtattaaataggcattacacactttatttctttgatgcaaattt

SEQ ID NO: 35531 - DNA, 309 bp, Glycine max
  Clone ID: LIB3138-088-P1-N1-H6
cacaatacgtaacgagctccaaccaatctattcaatactgtatcaccagtccaccactgatagaacagcacaacacatcaaacgagcctctcagcttcaatgtgaagagagccaacatggctacaatcgctgcctggaatctcggacccaactcaaggccagcggacgcgctccgccgcttgcggaggccggcgaactccttcgccttcgcggtggtggcggagccgaagaccacggcggtgaacgactacgccgaataccgccgatccctgtacggacagaacacgcacaaggcgctcctcggccact

SEQ ID NO: 35532 - DNA, 369 bp, Glycine max
  Clone ID: LIB3138-088-P1-N1-H7
aaagaactaaaaaaaaaaacgaaacaatttcaatttttcacttttcgagttctaaaagttttaagtgaaaaattgaaattgtttctaactatcttaatagaaaaagcaaaaaggattagcaaaagtattatcgaaagtattcttaaaagtattctcaaaagtattctaagcctaacgaaaataaaacaatttttcaaattgctatttattaaatttaaattcaaaaagatagatgaattgagcgaaaataaaaaagattcaacaatttataagaataatccaatgatttctgaaacaaccatttcaattcaatcgataaattcagtaaattgttcattgaaaaaaaaaaaaataaaggatcttaatgct

SEQ ID NO: 35533 - DNA, 252 bp, Glycine max
  Clone ID: LIB3138-088-P1-N1-H8
ctgttcacaccctttttttacaggtctaagaacaaaaacgtagcagctttaaagaaggaaagcttcgaattctatatcaacaaagaaaatgatcaggtgaagatggtgccattgtaatagaataagctgatgggattgttgtcattctaagcgagagaatgcttaaaaggactgccaaacaacttgtgctccgaacaaaattgaatcatggtggttagtcgcgtggtctttaatatgaagccaaaatgattg

SEQ ID NO: 35534 - DNA, 324 bp, Glycine max
  Clone ID: LIB3138-090-P1-N1-A1
gttgatctctatgctgatctctctaattcctttaccaagtccagagaagcttcttctgaaggtgactcctctgggactctgaagtctgatggaaaagtcaaccagaagagaattagatccagctgatttattgaatttgagctttcgggcacgcaatcaagaagtttattctgaatctggaaggaatttgtttggtgagactgtgtaactttctccaaagttatttttgtgccaagtcttacatattggtgtttatgtttagagggccagagatttagttaatcatctgatctataaaagtggctgcaatttgaggactataca

SEQ ID NO: 35535 - DNA, 284 bp, Glycine max
  Clone ID: LIB3138-090-P1-N1-A10
cggctcgagctcgagccgcgacgtcaccggcgtcgacggcgggcctcttcagccccgcgcagccgccggcaacaacaaccgcgccgccggctctggcttcggtttcggcgccaggcgcaatggcggaggcggcgccgcgtgctaccagtgtggcgagtttggacacctcgccagggattgcaacaggagcagtaattctggtggcggcggaagcggcagcggcggtggttgtttcaattgcggggggttcgggcaccttgcgagagattgcgtgcgcggaggcg

SEQ ID NO: 35536 - DNA, 409 bp, Glycine max
  unsure at all n locations
  Clone ID: LIB3138-090-P1-N1-A11
gcaattgaagttgaagtcttgcccttctctcttcaactccgggcacaagacatcatcatccatggctgcctccgtctccactgtcggagctgtcaacagagctcttttgaacctgaatgggtctggacctggggtttcagctcccagttcatccttctttgggagcagcttgaagaaggttattggctcaagggtccccaacacaaagatttcctctggaagcttcaagattgttgctgtagaagagaagaaagagattgaagagacccagcagaccgacaaggacagatggaagggtcttgcctatgatatctcagacgaccaacaggacatcacangaggaaaggggtttggttgactcccttttncaagctccacaggatgctggaactcactatgctgtcatgag

SEQ ID NO: 35537 - DNA, 406 bp, Glycine max
  Clone ID: LIB3138-090-P1-N1-A12
gagatattttgttggagatctcgtctttgaagtttctaagatgacttctccctacattaaatgtacagtctctttcttcatagcatttggaaatttggctgatgataccatcaattttgaggcttttccccacaagctggtgcagtttggagagattcaggaaaaagttgtattgaaattttcacaagaggaatttcttacagcttggtcaactcaggtgcgtcctgcaacaactctgttggctgatgggtgtccatatttgtatgcaatggtgcatgatagttcagtgtctacaataccaggtgattttgtcattggtgtcaagttgacaaccataaacaatatgtgtgcatatgggctcaatcctggtatttcaagttctcgtcttttgggcaccattcctcag

SEQ ID NO: 35538 - DNA, 148 bp, Glycine max
  Clone ID: LIB3138-090-P1-N1-A2
gtgcaaagttactttctacagtattgcttggaatagaaatgtccgtccgacatatactatgatatccacggtcggccgatgtatatttagaccgaattttaatgaggtctttttaatattcacttaaattatttgtagttgatttttt

SEQ ID NO: 35539 - DNA, 402 bp, Glycine max
  Clone ID: LIB3138-090-P1-N1-A3
attggtgtttaccgtgaggaggcgtgaaccagagctgataggtggggcgaaacccacccctcgcgaagtgaagctactatccgacatagatgaccaagatgggttacggttccaaattccggtgatacagatctatcgccacgacccatccatggcagggaaagaccctgttgaggttatcagaaaggctttggccagaacgcttgtgttctactatccttttgctggtaggctcagggaaggacgtgatcggaaactgatggtggattgtactggggaattaggtgttttgttcattgaggctgatgcagatgtcactcttaagcattgtggtgatgctcttcaacctcctttcccatgctgggaggaacttctttatgatgctcctggttcccaaggagt

SEQ ID NO: 35540 - DNA, 273 bp, Glycine max
  unsure at all n locations
  Clone ID: LIB3138-090-P1-N1-A4
aaaaagacgcacgcgngcgaaagacaggaatacggctcgagggaaaggcacactgttttcaaacttattggctcaccttctgggtgtgttttttacactgaaggaggtcaattgaccaatacaattctgcgttaatcttacactgatgtactgcttgatgagattgagaaagcccatcctgatgtgtttaacatgattgcttagattctgtaagatggaagactaacagacagtatggtcagaacattctatttcaagaacacacttcttata

SEQ ID NO: 35541 - DNA, 304 bp, Glycine max
  Clone ID: LIB3138-090-P1-N1-A5
gcggacgaagcacgaattcggctcggggcaagacacgttttttacctactaaacatacataatccctgccactatatcccattgcgagcgcgcacaacctaaaacaacaccttcacatactaaatcaaccatgtcgactgaacacaagtacgaaggctgtggcgcgtttgacaagaactcgatcaaggtcgagctcaagtggttcgagtacgaacccaagccattcgttgatgatgatgtcaagctcgaaatccaatactcgtggatctgctgctcgcacctgcacaccatttcctatggctgt

SEQ ID NO: 35542 - DNA, 411 bp, Glycine max
  Clone ID: LIB3138-090-P1-N1-A6
caagaacatgctctagctgttgaacacctggcaccaagcttaggtgctcttagaatggagctgtgccccggatacatgagtgatggtaacttttggaagatatactttgttctcgtgcaccctagacttagcaaaactgatgctgctattttatccactccacaaataatggaagctagagcaatgttaactctggctttagacaaaagaagtaaggaaaagaaagaatctgacttatctgcaggagggaatgttccctcaaaagaggaggaacagcatctctttgtgccaagcactgttcaacttgaatcagcacctctccagacatctgctgctgaagctgccccatctgtggttgtttctaatgttgagatggagaaacatgccactcaaagtattgttccagaggtt

SEQ ID NO: 35543 - DNA, 309 bp, Glycine max
  Clone ID: LIB3138-090-P1-N1-A7
ctgccatcagcattctcaacacctcctccctcactcactcatgaatggcatcaacaatatcagcaatggccatgatcaacgccaaatgcgtcaacccaaagttccccaaccccaccaagctcgtaccatcaaaaccttcccttcaggtcaaccttccaaagggcctaatagcctcacccgaaaacaccaaactttccactgcgacagcaatcgcaggagcaatattcacaaccctcggaacctgcgacgccgctttcgccgttcaacaaatagccgacatagcagaaggcgacaaccgcggtctggcac

SEQ ID NO: 35544 - DNA, 313 bp, Glycine max
  Clone ID: LIB3138-090-P1-N1-A8
ctcagatatcaacaaaaggattcgcacagcacttggggggcgtaagaaaattgtttttcttactagagttgatccttttccagtagctttactggctgttctttttggcgttaagaatgaaattctgagttctaacgccactaatcctatgctgacgcgacttcttgagaactgtaagagtctcaaatatctggttgatgagtgtccttttgcatttgtgaactagtatgtagtattttattcacttaaataaagcgcattactatgtgcaatgagtgtgtttaaatataaaaaaaaataaaaataataattt

SEQ ID NO: 35545 - DNA, 402 bp, Glycine max
  Clone ID: LIB3138-090-P1-N1-A9
agaagcttgtgaactcaaaagatggacctccaacctttgaggagcccaagatgactctggagaagctcttgacgtatggtaacatgcttgtccaagaacaagagaatgtcaagagagtccaattggctgacaagtacttgaacgaggctgcacttggaaatgctaacgaggatgctattaacaggggaactttcttccaatcttgaattggaggcaaagcaaacttggcaagtaaatatttctgttcctgaaggttgtgctgatccaagtgctagaagttgtgatgggacttgcgtgtaacattcttagaattctcaatgtcttaagtgcaaagagaagatgccaagtttgagatgattttactatatttttcatattggactgtcttcctctataattttg

SEQ ID NO: 35546 - DNA, 392 bp, Glycine max
  Clone ID: LIB3138-090-P1-N1-B1
ggatgaaaaactttctctttgcaaaatttttgacaaacctagggcgcgctgtttcactattctgcctatggactataatcttgaggtccgtcaaaagtttttaaattttgtgaggttcattatgaagaaaagggacaaacttagttgtcaagttggaatcaacccatactccatggaatggactggtttggccaatagattactgagtaagggcaatgatattctgtgttgcgattatgctagttttgatggtttgattaccaagcaagttatgagcaagatggcagaaatgataaacagtctttgtggtggtgatgaaaaattgatgcgtgaaacgacgcacctgctgttggcttgttgttcaaggatggcaatttgtaagaaagatgttt

SEQ ID NO: 35547 - DNA, 403 bp, Glycine max
  Clone ID: LIB3138-090-P1-N1-B11
accaatttgataaagtggtctcttttttttcaaagctttctgtggtctttttgctctgatttgtgggaatggttatatagttggcatcaatcaaatctatgacattagcattgacaaggtaaacaaaccttatttacctatagctgctggagatctttctgtccaatctgcatggttcttggttatattttttgcagctgctggcctgtcaattgtggggttgaactttgggcccttcattttttctctttacacacttggccttttcttgggtaccatctattctgttcctccatttagaatgaaacgctttcctgttgcagcatttcttataattgccacggttcggggttttctccttaactttggtgtgtactatgccactagagctgcccttgggctt

SEQ ID NO: 35548 - DNA, 403 bp, Glycine max
  Clone ID: LIB3138-090-P1-N1-B12
tgcacattcttcatcacttcattcaacatttctctctccctgggctagtttttaccaatggctgctgcggttagtgctgcagtctcttttccatccaccaagtctacctctctcccaagcaggacctccatcattaccccagagagagttgtattcaagaaggcttcattgcaatacagagatgtttgtagcagtggaagggtagtttccatcagagctcaagtcaccactgaggctccagccaaggttgaaaaagagtccaagaaacaggatgaaggtgtggttgtgaacaagttcaaacccaagaccccttacgttggtagatgcctgctcaacacaaagatcactggggatgatgctccaggagaaacttgccacatggtcttcagcaccgagggagaga

SEQ ID NO: 35549 - DNA, 402 bp, Glycine max
  Clone ID: LIB3138-090-P1-N1-B2
tgataacttaattagtgttcatgaatatgtcaagccttactgtagtggttctaaattgaaaagctttctagctagtcataacatcaccattactgatggtattgacaaaactagtgcaactttgcaatttagaaagttagcagattgtgattttctcaagagaaactttaagcagatgtctaatgttttgtgggtggctcctgaggacaaggcgagtttatggtcacaacttcattatgtttcgtgtaataatctggaaatgcaagaagcttatcttgtcaatctcgtaaatgtgttacgagaattgtatttgcacagtccagaggaagctcgccaattgagaaagaaagctctctctcgtattgaatggctgcaaaaagctgatgtgcctaccatagcaca

SEQ ID NO: 35550 - DNA, 403 bp, Glycine max
  Clone ID: LIB3138-090-P1-N1-B3
ccctatgccgctgttgttgttgctgcaccaccgaacaactggcgggggaatcgcgtttcgtttgtgcaaggctttaaaagatggctgatgctgaggacattcaacctcttgttgttgataatggaactggaatggtcaaggctggttttgcaggtgatgatgctcctagggccgtgttccccagcattattgggagaccacgccatactggtgtaatggttgggatgggtcagaaggatgcttacgtgggtgatgaagcccaatcaaaaaggggtatactcaccttgaagtatcctatagagcatggcatagtcagcaactgggacgatatggagaagatttggcatcacaacattttcaatgagctacgtgttgcccctgaagaacacctcgtaccttttac

SEQ ID NO: 35551 - DNA, 406 bp, Glycine max
  Clone ID: LIB3138-090-P1-N1-B5
gcaatacagccccaacgtgagatggatgcttcttggttatgtgggagagactgatgcagggcttttggaattctctaagggttgccccagtcttcagaaacttgagatgaggggatgttcctttttcagagagtatgcactatctattgctgcaactcaactgaattctctcaggtacctatgggtgcaagggtatggagcatctccatctggacgcgatcttctggcaatggctcgcccctattggaacattgagttgattccttctagacgcgttgttgttagcaatcagcaagaagagcccgtagttgttgagcacccggctcatattcttgcatattactctcttgctggcccaagaacagattttccagatactgttatacctttggatcctgcaacatat

SEQ ID NO: 35552 - DNA, 406 bp, Glycine max
  Clone ID: LIB3138-090-P1-N1-B6
atacaatctgtacatctgctgatggtgatgtgtatgcatttggtgggaatcagttagggcagttgggaactggtgctgatcaagccgagactctaccaagactagtggattcaccgagtttgaaaaattcgcatgctaagaatatatcttgcggtgctcgccacactgctttagtaacagagggcggaaaagttttctgctgaggatggaacaaatatggacagatgggccttggggacgtgattgaccgtaacattccttctgaagtcaccattgaaggttgtgtccctaaaaatgttgcttgtggatggtggcatactcttcttctggccgagtcccacacttgatgccatggtgctcctgacccaattatgttagttagacggtcttttggaaggcaatgtat

SEQ ID NO: 35553 - DNA, 402 bp, Glycine max
  Clone ID: LIB3138-090-P1-N1-B7
ccggagataggatccacttattgcgctgggctgagcttgggccggtccacggagaacaaagagtgcgaagtggaaacaaagaggattgtggagggtaatttcgagaagtcgcagggttctaacgtgaaagcgttagccaagtcgtcgaggaggacgcggagtaggagttggagaatggaccaagacgcggaagggaacgcggcgatattcgacgtcgttttgcatgataacactactggccaggaagtgggctcgtggaggcccaatggtgatgacccggctcatgggctgagagggcgctatgtgagggcaaatagagcgtttaataaaagcggatcggtggatattgctggggatgaatattgggggagaagaacgggtgtgcctaccatagcacagatt

SEQ ID NO: 35554 - DNA, 303 bp, Glycine max
  Clone ID: LIB3138-090-P1-N1-B8
agctgatgtgcctaccatagcacagattgaagagttccattcgatgcagaggatgatgaatgctcctgattcaaatgataatattgatttactgttgagcattgatttgttgggtttacaaggagcaggtaaagcttttccaaacaaaattgtttttgatgataagcttgtgttggctaacacacaagaattctttgatggaaattttccagtggattcttggttaccaatttttgtgaattgtctttatcctgtaagtcaattaccttcagaagctgtcgttgtaaatgttacatgtggtag

SEQ ID NO: 35555 - DNA, 268 bp, Glycine max
  Clone ID: LIB3138-090-P1-N1-B9
ggaaattaggcatgaccctcttgttgagtatgctctgcctatttgaaaatttccacacctcttttaattgtcgtaatgatgtgtgaagtgtgtgttattttaaaaaaaaaaaaaaaaaaaaaaaaaaaaaaaaaaaaaaaaaaaaaaaaaaaaaaaaaaaaaaaaaaaaaaaaaaaaaaaaaaaaaaataaaaaaaaaaaaaaaaaaaaaaaaaaaaggggcggcccccaattagggagttttttaccccggaaattaattccggacc

SEQ ID NO: 35556 - DNA, 405 bp, Glycine max
  Clone ID: LIB3138-090-P1-N1-C1
gcgtgcgtgagagacattacatcatggtacggaatcggagaagggggcctttctggcggtgcacggcgtctatgggcagcagcaacgggagcgagagcgatgcgtcagacttggtgatgcggtgcctctcgtgcgaggaggaatacgacatggacgactcgggaacctgcagggagtgctaccaggaggccaacgaggctgaggaggagctccgccgcgagatcgaagagctcaaatccaaagtctccttcctcactctcccctatcccaatctaaacgcttacaccggcgatatcatccttgttcccgccgacgactccgacgccgttcccatgcccggtcacaagcaccttatggatagtcgctgtcctgggtttaaagcattgcttgggaacgatttggctg

SEQ ID NO: 35557 - DNA, 403 bp, Glycine max
  Clone ID: LIB3138-090-P1-N1-C10
gtgcatgatagttcagtgtctacaataccaggtgattttgtcattggtgtcaagttgacaaccataaacaatatgtgtgcatatgggctcaatcctggtatttcaggttctcgtcttttgggcaccattcctcagtccatttcacagcaaactgtttggaatcaaatggcaacagtgagaacaccattgtattttgattctagcaagcagagcttttgtcagttttctattgaccttctcggtggaggaatcttagtggacaaaactggagattggatcacacttatacaaaattctccaattagtaacttgttgagagttgctgcttggaagaaaggctgtttaatggtcaagattgtgatgtctgggaatgcagcagtcaaaaagagtgattgggcctcat

SEQ ID NO: 35558 - DNA, 271 bp, Glycine max
  Clone ID: LIB3138-090-P1-N1-C2
gccttactttagtggttctaaattgaaaagctttctagctaggcataacatcaccattactgatggtatcgacaaaactagtgcaactttgcaatttacaaacatagcagattgtgattttctcaagcagaaactttaagcaaatgtgtaatgttttgtgggtggctcctgaggacaaggcgagtttatggtcacaacttcattatgtttcgtgtaataatctggaaatgcaagaagcttatcttgtcaacctcgtaaatgtgttactaga

SEQ ID NO: 35559 - DNA, 323 bp, Glycine max
  Clone ID: LIB3138-090-P1-N1-C3
caaccataaacaatatgtgtgcatatgggctcaatcctggtttggaggttctcgtcttttgggcaccattcctcagtccatttcacagcaaactgtttggaatcaaatggcaacagtgagaacaccattgaattttgattctagcaagcagagcttttgtcagatttctattgaccttctcggaggaggaatcttactggacaaaactggagattggctcacacttatacaaaattctccaattagtaacttattgagagttgctgcttctaagaaaggctgtttaatggtcaacattgtgatgtcctggaatgcactactca

SEQ ID NO: 35560 - DNA, 400 bp, Glycine max
  Clone ID: LIB3138-090-P1-N1-C4
cagaagatgagtcaaccaataagaaagataagcttctcatgggaggggaagcctggtgtctccaaagtaacaactactactcatggtgaaaatctgatcccaaaagaggaagagtttttggccaagttgccaccaccaccttgcacaccagaagaatcaagtgctactcatcatcacaaaaaccaccaccctcttcttgattttcaaattccacttcctccttgtgcttttcagcctcccttttatagaacttcctccaagaggggcctttgggttcaagacaaagaccctttcttagcagctttcaaagagtgcaccaagaatcatcagaaaactagtgctaaggtgaacaaaaagttgatcaaagatggaattgaggcaagggtaaggaagagcatgt

SEQ ID NO: 35561 - DNA, 407 bp, Glycine max
  Clone ID: LIB3138-090-P1-N1-C6
ttgaccttctcggtggaggaatcttagtggacaaaactggagattggatcacacttatacaaaattctccaattagtaacttattgagagttgctgcttggaagaaaggctgtttaatggtcaagattgtgatgtctgggaatgcagcagtcaaaaggagtgattgggcctcattggtacaagtgtttttaacaaacagcaacagtacagagcattttgatgcatgtaagtggacaaaatcagaaccacattcctgggaattgatcttcccaatagaggtatgtggtcctaataatggttttgaaatgtggagttctgagtgggcaaatcaaacttcatggcatttgagttttccttattgacaatcccaaacagtctacagtttttgatattctcttgggaatctc

SEQ ID NO: 35562 - DNA, 375 bp, Glycine max
  Clone ID: LIB3138-090-P1-N1-C7
cttttctctctctagaattctcagatttgcggggcgagatgatgcagcagccaggacccggcatggcacctcccaccatgggccagcagccgcagcaacagtaccagcagcagcctccgccgcagcagcaacaaccctacgtcatgatgccgccgcagcatcaggcgccgcagcctatgtgggccccatccgcccagcctccgctgccgcagcagcctgctagcgccgacgaggtccgaaccctctggatcggggatctgcagtactggatggacgagaactatctctacacctgctttgctcataccggcgaggtttcgtcagttaaagtgattcggaacaagcaaactagtcaatctgaaaggtatgggttta

SEQ ID NO: 35563 - DNA, 393 bp, Glycine max
  Clone ID: LIB3138-090-P1-N1-C8
agcgttgccattctcatcctcttctttctctctctaccattgccatggatccctacaagcaccggccatccagcgccttcaattctcccttctggactacaaattctggtgctcctatttggaacaacaactcctctttaaccgttggagctagaggtccaattctgctggaggattatcatcttgtggagaagcttgcaaattttgatagggaacgtatcccagaacgtgttgtccatgccaggggcgctagtgcaaagggtttctttgaggtcacccatgacatttctcacctgacatgtgcagatttccttcgagcccctggagttcagacgcctgtaattgttcgtttctcaactgtcattcatgagcgtggtagccctgaaaccttga

SEQ ID NO: 35564 - DNA, 400 bp, Glycine max
  Clone ID: LIB3138-090-P1-N1-C9
ctgccttaaaaccatggtgaggacttttgagacacattgtggatccttgtctcagtatggcatgaaacatatgaggtcctttgcaaacatctgcaatgtagggataaagaatgagcaaatggctgaggcctctgcacaagcttgtgtctctattccttccaatccttggagttctctgcaaaggggtttcagtgcataataattcctgtaatgtgcaccagtaaagaccaaagtatgattattgttacattatgctatatgattgtacttgtatatacatattttgtcccgcctttgtaaatacaattgggacactactaggattgggaagaagggtctttacatttttagtttggcaaatagatattgcaactacctttgtataaatctatttctgaag

SEQ ID NO: 35565 - DNA, 310 bp, Glycine max
  Clone ID: LIB3138-090-P1-N1-D1
tttggcatccccgtggtttcaagaagagaatctcaatggaggcgcaggagctgaagcgcgtggtccagatgttcgaccgcaacggcgacgggagaataacgaagaatgagttgaacgactcgctggagaaccggagcatcttcatctgtgacaaggaccggagccaaatgatccaaaggatcgacgtatacggttacagacgcgtgcacatggacgagtttggggagctgtgtcataccatattggacgagcgcgacaatgatgaggacatgaaggaagtctttaacgtggtttaccaaaactccggcgg

SEQ ID NO: 35566 - DNA, 406 bp, Glycine max
  Clone ID: LIB3138-090-P1-N1-D10
gaagaaattctttctaaggttgcacaagatatggttgaggggtggttcgattgtgttgatgaggaggattcctttgaggaagtttctttaagtgcagcacttaatggtgttgagggtttggactatatggaaagaattcctcttgccacatctgagggatttcctcatgtgctttcacgcaaaaatggtgaaaaaggcaaaaggagatttgtctctggggatggtgaagagatgacactgattccgggaaccagtgttgaagaggcttacaacaagctaatagttgaacttgagaaaagtgttcctacattggttggcattgaatgtcccaaggatgagaaacttcctcgtcgcaaaatttttgacaaacctaagacgcgctgcttcactattctccctatggagt

SEQ ID NO: 35567 - DNA, 405 bp, Glycine max
  Clone ID: LIB3138-090-P1-N1-D11
tatcttcttacatggaaaatgtggcatcaagtgggaaaatggtaaaagcagtaataataggtcttggagctggtttactttccatgtttcttcacgggtgtatcccctttttggaaattgagactgtggagttagaccccatgattgttgatattgcaagggactacttcagttttgttgaggataaacgcctaaaggtgcatgtagctgatgggatccaatttgtccgagagattgacagttctggagcacctcagattcatggaaaaagtaaatgatcctagtaatactgagtctgctctaaatgcaagttcaactgtgtctcatgctggtgtaaaagtgacaaaagttgatataattattgttgatgttgactcttcagacccaagctcgggattgacatgc

SEQ ID NO: 35568 - DNA, 364 bp, Glycine max
  Clone ID: LIB3138-090-P1-N1-D3
gttgggtttacaaggagcaggtaaagcttttccaaacaaaattctgtttgatgataagcttgtgttggctaacacacaagaattctttgatggaaattttccagtggattcttggttaccaatttttgtgaattgtctctatcctgtaagtcaattaccttcagaagctgtcgttgtaaatgttacatgtggtagtggacgtggtggtttacccaccactgcttggattaattatgcagtttacatttcgattcttatatttcaacataaacattcactacagcctttgggaaaggtaataaattttgtttctcttactagactttactccttttccatattctttcactgtcttgttattttt

SEQ ID NO: 35569 - DNA, 385 bp, Glycine max
  Clone ID: LIB3138-090-P1-N1-D4
ctcgagccgaatcttttcccgattactcaccacatgacactgcgggctgtttgatatcggatggcgacacggataacaccattgtattgtggttctagcaagcagggctgttgtcaggtttatattgacctcttcagtggcggcttttatgtggacacaactcaatataggatcacacttatacagaagtgtccaattgggaacttattgggagttgctgctgggcagaaaggactgctaatggacaagattgtgatgtctgggaatgcaatagtcaaaaggagagattgggcctcattggtacaagagtttttaacagacaggaacaggacagagcattttgatgcatgtgagtggacacaatcagaaccacattgctgggaat

SEQ ID NO: 35570 - DNA, 407 bp, Glycine max
  Clone ID: LIB3138-090-P1-N1-D6
gttcgtagttgagtctaatttcgatgcactataatataaaagttgttacttgttaaattgatggatgatttttaagattattatcataaaaattaataaatttatcatataatatcatctaatactaaaattaaaactcataactacatatatacttttcacacttcttaatattagaccaaccttaatgattcaaatcatacttatttattagtatatatattttttagaattttataatcttaaaaggtgagtttaaagttaacttaatcttaaaagttagtttaagggatgagaattttttagttcacgtgaaacttgagttttttttaatacattttcgcacgtctaacctttcttaggcttggtgtgtgatcttttggatgaatcttaaatataatctgata

SEQ ID NO: 35571 - DNA, 398 bp, Glycine max
  Clone ID: LIB3138-090-P1-N1-D7
cgctgctctgctttgccttctctccctcctcgcgtctccaacaccaaaaccactttgttctcaccttccctcaacaacttttcagtgtcccgaaaatcttctctgcttcagaccagagcttcttcagaggaatcatcctcagtagatgccaatgaggtgttcacagatttgaaggaaaagtgggatgctcttgaaaacaagtccacagtacttctttatggtggaggggctatagttgctatttggctatcgtcaattcttgtgagcgccatcaactcagttcccttgcttccaaagattatggagttggtagggcttggatacactggatggtttgtctaccgataccttctgtttaagtctagcaggaaggagctagctacagacattgaatcact

SEQ ID NO: 35572 - DNA, 404 bp, Glycine max
  Clone ID: LIB3138-090-P1-N1-D8
gagtggtactattcccgaatagcagcaagcaaggcaaggcgtgtgtccgagcagagcaggagtgaaggagaaaaggacccttgtccgtccagtccttattctcttttctcctccctccctcacgcaaccgccaattcctgaaccctaagctagcgccatggctgtcgtttcgcgaagtgcgacgacctatacgcgccactacttaatacgacacgagtttgataggaaaacgaaaacctgcgttgccaataatagtttgtgttactctgctaagaaggctcctccaccgcagaggattgttggtggccgtagagtgattgttgctgcaagccctcccaccgaagacgctgtagttgccactgaccctctcacgaagcaggatctcgtcgattatcttgcctccg

SEQ ID NO: 35573 - DNA, 399 bp, Glycine max
  Clone ID: LIB3138-090-P1-N1-D9
ctacaatggcctcagccgcatcccccaccactttctctctggtccactccgccaccccttcctcctcctccaccgccacctccgcctccccctccccctcgcgcgtgcagctcacctcctccctccgcgcccgcccgctgcgccgcctgggcttcgccgcggcggacccgctgctcgcggcgagtgtagcggcgcgcgtggcggcggtgagaggaggaggaaagggcgcgaggggggtggtgtcgatggcgaagaagagcgtgggggacctgagcgcggcggacctgaaggggaagaaggtcttcgtcagggccgacctcaacgtcccgctcgacgacaaccagaacatcaccgacgacaccagaatccgcgccgccattcccaccatcaaacatctca

SEQ ID NO: 35574 - DNA, 401 bp, Glycine max
  Clone ID: LIB3138-090-P1-N1-E1
tacaactacaaaggttgttgtaggagataagatattgaagtggtggctaagttcctaacacgtgcagtgaacaatggcctctgcatcagcatctcttctcaagtcttcacttgttcttgacaagtctgagtgggtgaagggacaaacacttcgccaaccttctgctgcatcagttgtgagatgcaaccccaccaccccatcaggcctcaccatcagagctggttcctatgctgatgagctcgttaagaccgcgaaaacagtggcttcaccagggaggggtgtgtgtgccatggatgaaatcaaaactacctgtgagaagcaacgggctccaattgttctagatagcactgaataatagccgcctggcataccgtaccctccttgtgacagtttcaggactt

SEQ ID NO: 35575 - DNA, 321 bp, Glycine max
  Clone ID: LIB3138-090-P1-N1-E10
gccagccgtgctgatattgctcacattgatattgcttcaggtgagattggtaagaacgagctgccgtatgtgtactgctgggctgattagaatgtggcattctaggggattaatcgcatgatccagagcagaggggttgcaaggaatcttgattttagaggttggagggaagaactgaatgagcagaaacgatagttaccttttagttataatacttttgagaaagagatttctgctcagtatgctatacatgttcttgacgagttaaccaatggtgaagctattgtgagtaccggaattggacagcaccagatgacggct

SEQ ID NO: 35576 - DNA, 289 bp, Glycine max
  Clone ID: LIB3138-090-P1-N1-E11
ctggaaggaggatatgcccaggcattacatttgccatacccaacattgagttgccacttgctcagttgctttaccactttgattggaagcttcccaacaaaatgaacattgaagaacttgacatgaaggagtcaaatggaattactttaagaagggaaaatgacctctgcttaattcccattgctcgtcaaccttaaaatgtatgaacaattaatgtcataaaaaaaaaaaaaaaaaaaataaaaaaaaaaaaaaaaaaaaaaaaataaaaataattgaatgtgagtgt

SEQ ID NO: 35577 - DNA, 405 bp, Glycine max
  Clone ID: LIB3138-090-P1-N1-E12
gttagggtagaatcaattgagaatggggatccgattcgtactgatggtgaacaagcaaggccaaactcgtcttgctcaatattacgaatacctcactctcgaagagcgacgtgccctcgaaggcgaaatcgttcgcaaatgcctcgcccgcaacgaacagcagtgttcctttgttgagcatcgcaactacaaaattgtttatcggcgctacgcctctttgtttttcctcgttggagtcgacgatgatgagaatgagctggcaattttggaatttatacatctcttggttgaaactatggatcgtcatttcggcaatgtgtgcgagctagatattatgttccatttagaaaaggcgcattttatgttggaggagatggtcatgaatggttgtattgtggagacaag

SEQ ID NO: 35578 - DNA, 390 bp, Glycine max
  Clone ID: LIB3138-090-P1-N1-E3
agagaaccatactgtttttgatctattggcaaattttttgggggagggtaatattagagcgagtgttgatttgcagtgcactcatcttattaaatgaatgattaaaatggtggccacagttggtattcctgagaatacatgtatatcattggcctgtgctatgaatagttcttttacggggcgcgccatttatgatatttacaccatctgctctcaagactgtgaattgtggaatcctacttgcacaaaagcaatgactatgtcatttaatccaaacccgtgttctgatgcatggagttaggaatttctgaagcgtactggatttcattgcgatatcatttgtgtcactggatggactgtcaccccaatgcacgattgttcggttacact

SEQ ID NO: 35579 - DNA, 265 bp, Glycine max
  Clone ID: LIB3138-090-P1-N1-E4
aaaaaaaaccccccgcaaaaacaaaaattcgctcgcgcccaataacatatttttcccaatctcttcttcaacctcctcgcctattataccttttctccccccaaaacaaaccctaattccctcattcccatttcctcacaacacccacttcaccttaaaccctatctctaaccttcatcttctatccttcctcaattataactactatcccaaaccttaatccaatcctattaaaaccaactaacccaaacctaaaatattttcc

SEQ ID NO: 35580 - DNA, 407 bp, Glycine max
  Clone ID: LIB3138-090-P1-N1-E5
tttccgaataccattgttcagattgaaccagacatgaattcacgggttcagcttttgagtaccactaccaatggtgattttgttcaagggaaagatctcgcaatggttaaagttaatgtagcatgtgctgctgttggcttgacatcaagttacactccaactccattgttggaatctggtttgcaaaaagacagagggttaattgtggagtattttggaaggatgtcttacgttgctcataacgttaatcagccccaagagaaagatttgttggagggaaatttttcctttgatattaaatctcgctctagattggaaaaaagtttcctctacaaaagcacaatttgttagtgtgaaaaccttcaaatatgatataattggtgctggttcacattcttcagaagatt

SEQ ID NO: 35581 - DNA, 402 bp, Glycine max
  Clone ID: LIB3138-090-P1-N1-E6
cgttgccattctcatcctcttctttctctctctaccattgccatggatccctacaagcaccggccatccagcgccttcaattctcccttctggactacaaattctggtgctcctatttggaacaacaactcctctttaaccgttggagctagaggtccaattctgctggaggattatcatcttgtggagaagcttgcaaattttgatagggaacgtatcccagaacgtgttgtccatgccaggggcgctagtgcaaagggtttctttgaggtcacccatgacatttctcacctgacatgtgcagatttccttcgagcccctggagttcaaacgcctgtaattgttcgtttctcaactgtcattcatgagcgtggaagccctgaaaccttgagggaccctcga

SEQ ID NO: 35582 - DNA, 362 bp, Glycine max
  Clone ID: LIB3138-090-P1-N1-E7
gatcgaatccaaaccctaatctaatcccacaagcctattaggctcattcaatcgaagaagcgagcgagactgtgtctctctcccaggccatgcgaccaccctgttcctccgccatcgccctctccagagaggattcttttttcgttttcgtcgctttctccgtcgattccaccagccatgactgctgacacccacgccgctcctaatatcaatcccaagggcctcctctgcaatgccgccgccggtgcttccgctggggttattgctgctacatttgtgtgtcctcttgatgtcatcaaaactaggtttcaggttcacggtgtcccgcagctcgcgcatggaagtgttaaaggaagcataat

SEQ ID NO: 35583 - DNA, 396 bp, Glycine max
  Clone ID: LIB3138-090-P1-N1-E9
ccaccaatgtgcagcttccaggtatgtacaacaaggaagagaacccccgtgttcccatcattgtcaccggtaacgatttctcaacactctatgcacctctcatccgtgatgggcgtatggagaagttctactgggcaccaacaagggaagaccgcattggtgtttgcaccggaattttccgcactgatggtattcctgaacaggacattgtcaagcttgttgacaccttccctggccaatccattgatttctttggtgcactgagggccagagtatatgatgatgaagtgaggaagtggatttctggtgttggtgttgacagtgttgggaagaagcttgtgaactcaaaagatggacctccaacctttgagcagcccaagatgactctggagaagc

SEQ ID NO: 35584 - DNA, 401 bp, Glycine max
  Clone ID: LIB3138-090-P1-N1-F1
caaaacactcataacacaaagcacaaagcaaagctcatccttgagggaaaaaatggcagcagcttcttccatggctctctcatccccatccttggctggcaaggccgtgaagctgggcccatcagccccagaagtgggaagggtgagcatgaggaagaccgtcaccaagcaggtctcctcaggaagcccatggtacggcccagaccgagtcaagtacttgggcccattctctggcgagcccccgtcctacctaaccggtgagttcccaggcgactacggctgggacactgctgggctttccgcagacccagaaaccttcgccaagaaccgtgaactcgaagtgatccactccaggtgggccatgctcggagccttgggctgcggcttcccggagttgctgt

SEQ ID NO: 35585 - DNA, 207 bp, Glycine max
  Clone ID: LIB3138-090-P1-N1-F10
aaagccttagccttccctacaactccaaacacaaagacatcgtgatccatggctgcctgcgtctccactgtcggagctgtcaacagagctcttttgaacctgaatggttctggagctggagcttcatctcccagttcagcctactttgggaccagtttgaagattgttattgtcttaagggtctctatcagtaaggttttcagtttg

SEQ ID NO: 35586 - DNA, 380 bp, Glycine max
  Clone ID: LIB3138-090-P1-N1-F11
gcttgagagaaaaaatattccatttccagaattagtagcgctggtgctctcttttgtttcgaaaaaaatggttcaacaggaagtgcgtaaaggtccttggacagaacaggaagacttcaaattggtgtcctttgttggattgtttggagaccgtagatgggactttatagctaaggtttgaatagaacaggtaagagttgcagattaaggtgggttaattacctacatcctggcctcaagcgtggaaagatgaccccccaggaagaacgccttgtcttggaacttcactcaaaatggggaaataggtggtcaagaattgctcgcaagttaccagggcgcactgacaatgagatcaagaattactggaggactcttatgag

SEQ ID NO: 35587 - DNA, 210 bp, Glycine max
  Clone ID: LIB3138-090-P1-N1-F12
gctcaatcctgttatttcatgttctcgtattttgggcgcggggtcttattccatttcacggcagactgtttggaattaaatggctacagtgagaacactattgaattttgattctagcaagcagagtttttgtcagttttttattgatcttttcaggtgaggtttcttagttgacaaaactggagaatggaccacacttttacaaaattc

SEQ ID NO: 35588 - DNA, 351 bp, Glycine max
  Clone ID: LIB3138-090-P1-N1-F2
gttttgtgggtggctcttgaggacaaggcgagtttatggtcacggcttcattatgtttcgcgtagtaatctgcaaatgcaagaagcttatcttgtcaatctcgtaaatgcgttacgagaattgtatttgcacagcccagacgaagctcgccaattgcgaaggaaagctctctctcgcatagaatgggcgcacaaagctgatgtgcctaccatagcacagattgaagagttccattcgatgcagacgatgatgaatgctcctgattcaaatgataatatttgtcttactgttgagcattgatctgttcgcgttacacggagcacgcaaagcttttccaaacaaaattgtttt

SEQ ID NO: 35589 - DNA, 408 bp, Glycine max
  Clone ID: LIB3138-090-P1-N1-F4
aaagacttccttttttgcaattgtcatttgtcaccaaacaattggggttagctctcacaagcaagcttcagcaacgacaatgaagaaagtagtcttacagttggacttacatggtgatagaatcaagcaaaaagctatgaaaacagcatctggcctttcaggggttgaatcagtttctgttgatatgaaagacatgaaaatgatcgtgttgggggacattgatccagtgagtgcagtgtcgaagctacgaaagtgttgtcacactgaaatagtttcagttggaccagcaaaagaggagaagaaggagaatgtggagccagcaaaagtaccagttcctctaaagctccatgaagcctatcccctttattatcagatgacaccacattatggtcaaagtcactatgtcac

SEQ ID NO: 35590 - DNA, 404 bp, Glycine max
  Clone ID: LIB3138-090-P1-N1-F5
ctcgagccggaaaagggacaaacttagttgtcaagttggaatcaggccatactccatggaatggactggtttggccaatagattactgagtaagggcaatgatattctgtgttgcgattatgctagttttgatggtttgattaccaagcaagttatgagcaagatggcagaaatgataaacagtctttgtggtggtgatgaaaaattgatgcgtgaaaggacgcacctgctgttggcttgttgttcaaggatggcaatttgtaagaaagatgtttggagagttgaatgtggaatcccttctggatttccgctcacagttatttgcaatagcatttttaatgagatgctcattagatatagctatgaaaaattactgcgccaggctaaagctccaagtattgttt

SEQ ID NO: 35591 - DNA, 407 bp, Glycine max
  Clone ID: LIB3138-090-P1-N1-F6
gataaacttaattcattttactatcttctttttcgagtgtttattgaaaaatttattcttacatgacctaaattttgtgtttatggagcctaaattgatatatatcttgacctttcaattttcaggaactactatagatgcactcacaaatttgaccaaggttgccaagcaacaaaacaggtgcaaagagttcaagaggaaccaatcctatacaagaccacctactatggcctccacacttgcaagaacttggcaaaccctgagatcatacttgaccctatgtccccttcatcctcatccaagttccttagctttgacaactccttcccaaccccatcaaagcaagagtgcccctttctctcatcttctaatttgccatcatcagtgaaaggtgagtgcaaggagga

SEQ ID NO: 35592 - DNA, 385 bp, Glycine max
  Clone ID: LIB3138-090-P1-N1-F7
attccacaagaactctccaaggatcctccttcccacgagattctttggtgggaaaaatccaagaggtttgaaatttgaaggcagggaagatggattatttcaatgcaccaggaagaaaccatctctttgttccagggccggttaacattccggaccagatcatccgggccatgaacagaaacaatgaggactaccgttctccagcaattccagctatgacaaaaactttgcttgaggatgtcaagaagattttcaagaccactactggaaccccatttctcatccctacaactggtactggtgcttgggagagcgctctcacaaacaacactgtcttcttgggatcgaattgtatcgttcctgattgggcaattcagcttggttt

SEQ ID NO: 35593 - DNA, 391 bp, Glycine max
  Clone ID: LIB3138-090-P1-N1-F8
aagattttatccaattgaaattttaaaaatgactgggataaacttaagaattcaattattgaaattgaataagtaaacaatttaattggattggtcgaatggtatcaaaaaaatggagtactaactcccatttcttatttattattgaattaaccgatcaacttgctttgttatcgaacatttctttttgatttcaaaaattttccggaaaaaatttgaatctatttttatatgcgaatcaatcctactacttctggtcctgaggtttctgcgcttgaaaaaaaaaatctgggacgtatcgcccaaataattggtccggtactagatgtagcttttcccccaagtaagatgcctaatatttacaacgctctgatagttaagggtcgagata

SEQ ID NO: 35594 - DNA, 404 bp, Glycine max
  Clone ID: LIB3138-090-P1-N1-F9
gagaaactttaagcagatgtctaatgttttgtgggtggctcctgaggacaaggcgagtttatggtcacaacttcattatgtttcgtgtaataatctggaaatgcaagaagcttatcttgtcaacctcgtaaatgtgttacgagaattgtatttgcacagtccagaggaagctcgccaattgagaaggaaagctctctctcgtattgaatggctgcaaaaagctgatgtgcctaccatagcacagattgaagagttccattcgatgcagaggatgatgaatgctcctgattcaaatgataatattgatttactgttgagcattgatttgttgggtttacaaggagcaagtaaagcttttccaaacaaaattgtttttgatgataagcttgtgttggctaacacac

SEQ ID NO: 35595 - DNA, 382 bp, Glycine max
  Clone ID: LIB3138-090-P1-N1-G10
ctggatttcattgcgatatcatttgtgtcactggatggactgccaccctaatgcaggatgttcaggttacaattgattggtttatttcctctcaggaatgtgttcccaggacctattgtgttttaaatccacaaaatccttttgtgttaaataggtggatgggaaaattgactttcccccagggcacttcccgaagtgttaagagaatgcctctttctatagggggaggagctggtgcaaagaatgctattctcatgaatatgccaaatgctgttctttcaatgtggagatattttgttggagatctcgtctttgaagtttctaagatgactttcttcctacattaaatgtacagtctttttcttcatagcatttggaaatt

SEQ ID NO: 35596 - DNA, 407 bp, Glycine max
  Clone ID: LIB3138-090-P1-N1-G12
tgaatatgtcaagccttactttagtggttctaaattgaaaagctttctagctagtcataacatcaccattactgatggtattgacaaaactagtgcaactttgcaatttagaaagttagcagattgtgattttctcaagagaaactttaagcagatgtctaatgttttgtgggtggctcctgaggacaaggcgagtttatggtcacaactttattatgtttcgtgtaataatctggaaatgcaagaagcttatcttgtcaacctcttaaatgtgttactgagaattgattttgcacattccaaatgaagctcgtctattgagaaggaaaggctctctttcgtattgaatggctgcaaaaagctgatgttgcctccatagcacagattgaagaattccattcgatgca

SEQ ID NO: 35597 - DNA, 387 bp, Glycine max
  Clone ID: LIB3138-090-P1-N1-G2
cacaacttcattatgtttcgtgtaataatctggaaatgcacgaggcttatcttgtcaatctcgaaaatgtgttacgagaattgtatttgcacagtccagaggacgtttgcctattgagaaggaaagctttctcttgcattgaatggctgcaaaaagctgatgtgcctaccatagcacagattgaagagttccattcgatgcagaggatgatgaatgctccctgatccaaatgataatattgatttactgttgagcattgatttgttgggtttacaaggagcaggtaaaggtttttcaaacataattggtttcgatgataacgcttgtgttggcttaaacacaagaaatctttgattggaaaattgtcagtggattcttggttaccaa

SEQ ID NO: 35598 - DNA, 404 bp, Glycine max
  Clone ID: LIB3138-090-P1-N1-G7
tggatgagtcaaaggttgtcttgaaaggccgtttaggtccaggcatgatgataacggttgatttacttggcggtcaggtctatgagaatacagaagttaaaaaacgagtagccttatcaagcccatatgggaactggatcaaggaaaatttgcggactttgaagctcgggaacttcctttcagcctctgtgttggacaatgaggcagtattaagacaccaacaggcatttgggtactctagtgaagatgtccagatggtgatcgagagtatggctgctcaaggaaaggagcccacgttttgcatgggagatgatattccattggcagcattgtctcagaaacctcacatgctttttgattatttcaagcaacggtttgcacaggttacaaatcctgcaattgat

SEQ ID NO: 35599 - DNA, 404 bp, Glycine max
  Clone ID: LIB3138-090-P1-N1-G8
cgccagttctgatatttacaccatctgctctcaagactgtgaattgtggaatcctgcttgcacaaaagcaatgactatgtcatttaatccaaacccgtgttctgatgcatggagtttggaatttctgaagcgtactggatttcattgcgatatcatttgtgtcactggatggactgccaccccaatgcaggatgttcaggttacaattgattggtttatttcctctcaggaatgtgttcccaggacctattgtgttttaaatccacaaaatccttttgtgttaaataggtggatgggaaaattgactttcccccagggcactttccgaagtgttaagaaaatgcctctttttatagggggaggagcttgtgcaaagaatgctattctcatgaatatgccaaatg

SEQ ID NO: 35600 - DNA, 380 bp, Glycine max
  Clone ID: LIB3138-090-P1-N1-G9
gttcaggaacacaactgtgaacagtgatttacatttcatttcttgggacaatcctcccaagcagcatcctcactaccttacagttgatgacatgaaagggatggttggcagcaatgctccgtttgcaaggaaattccacagagaagatccagttttggataaaatcgatgctgaactattatccagaggtcctggaatgactgttcccggaggttggtgcatagggaaaagggagaatggcaccgatccctgctctgaagtccgtgatactaacgttctgaggcctggcccatgttccaagagacttgaaacattaatcaactcattgttgacgaatgaaaagttccggtcaagacagtgcatgtgaggtgaaaaacaag

SEQ ID NO: 35601 - DNA, 407 bp, Glycine max
  Clone ID: LIB3138-090-P1-N1-H1
caaatacatggtcatccagggcgagcctggtgccgtcattcgaggcaagaagggtcctggtggtgttactgtgaagaagaccggtgcggccttgatcattggcatttatgacgaaccaatggctccgggtcagtgcaacatggtagtggaaaggcttggtgattatctcattgaacagggtctctaatcctctatttatgtcttgctatcgtgcatatttcattggcttctgtacgagtttttgcatcgacctcgactgtaatgctttgattgcagtgtaataatattgttgggtgggtttcaaaagtaacggcatgtgcgtgttgccaagaaaaagtgtttcggtgcttgagaaattatgactataactctctatcgttgtactttttttcgcggggtccctgtat

SEQ ID NO: 35602 - DNA, 233 bp, Glycine max
  Clone ID: LIB3138-090-P1-N1-H11
ctctcctgctttccagctaccaagctgccagcacagcggatgtgcacgtttgcagagactcttgatctcctcatgcagccggggagcaagcacgtcgacctaaatatcgacgtcaagctcgacattgatcctgaattgctctatccgttcatgaggtgggagattgtgtctttcccaggctggtatacgtatcttgttccgagacatatttcttggcctctggcacgcctagc

SEQ ID NO: 35603 - DNA, 388 bp, Glycine max
  Clone ID: LIB3138-090-P1-N1-H12
cgccaatggtgaaggaaagctatgtatcccattgaatggctgctgaatgctgaacagtctaccatagcacagattgaaaagctccataacgggcagaagatgataaatgctgaagcttcaaacaatgatatggcactactgctgagcatgaatacagtgagtatacacatgactacgaaagcttaaccaaaccaaattgtttttaatgataagcttgtggtggataacacacaaaaattctgtgatggaaatttaacagtggattcttggtcaccaattattgtgaatagtcaatatccagtacgaaaaataccttcaaaagatgaaatattgaatgttacatgcagcagaggaccagtgtattatcagcactctacaaacattattt

SEQ ID NO: 35604 - DNA, 386 bp, Glycine max
  Clone ID: LIB3138-090-P1-N1-H5
ggcctcattggtacaagtgtttttaacaaacagcaacagtacagagcgttttgatgcatgtaagtggacaaaatcagaaccacattcctgggaattgatcttcccaatagaggtatgtggtcctaataatggttttgaaatgtggagttctgagtgggcaaatcaaacttcatggcatttgacttttcttattgacaatcccaaacagtctacagtttttgatattctcttgggaatctcttaagattttgaaattgctggtaatactcttatgccagctttttctgtttcacaggctactgccagatctttatgaaaatgcggaatcctctgcatgatctggaatttgtggtatctttcgcttgttcttttgcttaattcaataa

SEQ ID NO: 35605 - DNA, 397 bp, Glycine max
  Clone ID: LIB3138-090-P1-N1-H7
gcgttagcaactataaaaggacgtgtgcatgccacttttctcttcacaattcattcatcaatccattgttcactttcacatcaactcaagagattcaaccaagtcatagaagctagctagggtgtattgttacatttgttagcaaaaaacttgaaaaaatggagagcagcttgggagacatgttgattaaggttgtggtgttcattctagttcaagccttggtgtaccttatcctctccaattcatcaaacatcttcaacaagaacatgaagaaatccaacagcttcaggccagcgaggtcggtgagcattcgccggatgctggctttgatctctgatttttcttccgaaggggaaccctttactttaccaaagggtcctaaaaactcatcacttca

SEQ ID NO: 35606 - DNA, 393 bp, Glycine max
  Clone ID: LIB3138-090-P1-N1-H8
attccttgtttttcttgtttcttgccatcgaccactgaagaaaacaacaacaacaacgactacccagatgaagatgggagctttcgtttgttcacttacaaccaattgaaattagccacgtgcaattttcattcctcggagaaggttggagaaggaggctttggatctgtctttaaggggaagcttgtagatggatcttttgtggcggtgaaagtgctattggttgatgtggaatccatgcgaggagagagggaattcgtggcggaattggttactcttgcaaacattaagcaccaaaattttgcaagcctaaaagggtgttgtgtggaaggtgttcaatagatatttggtctatgattatatggagaacaattgcctctaaacgcctttttt

SEQ ID NO: 35607 - DNA, 294 bp, Glycine max
  Clone ID: LIB3138-090-P1-N1-H9
tgcaattgaagttgaagtcttgcccttctctcttcaactccaaacacaagacatcatcatccatggctgcctccgtctccactgtcggagctgtcaacagagctctttagaacctgaatgggtctggacctggggtttcagctcccagttcatccttctttgggagcagcttgaagaaggttattggctcaagggttcccaacacaaagatttcctctggaagcttcaagattgttgctgtcgaagagaagaacgagattgaagagacctaacagaccgtcatggaccgttgga

SEQ ID NO: 35608 - DNA, 404 bp, Glycine max
  unsure at all n locations
  Clone ID: LIB3138-091-Q1-N1-A1
gcagctgcgggtcatgctggacattcaacacaactggcgctctagaagcagcctatgcacaagcattcgggaagagtatctctctttctgagcagnagctagtggattgcgctggccgtttcaacaactctggctgcaatggtgggttgccatcacaagcctttgagtacatcaaatacaatggaggacttgagacagaggaagcatacccctacactggaaaagatggcgtatgcaaattctcagctgaaaatgttgccgctcaaatcattgactcgagcaatatcaccatgggtgctgagaatgaattaaaacatgcagttgcattagttctgccggatagagtggcctttcacgtggtgaatgggttccatttctacgagaatggagtctacactagtgac

SEQ ID NO: 35609 - DNA, 316 bp, Glycine max
  unsure at all n locations
  Clone ID: LIB3138-091-Q1-N1-A10
cacagattgaagagttccattcgatgcagaggatgatgaatgctcctgattcaaatgataatattgatttactgttgagcattgatttgttgngtttacaaggagcaggtaaagcttttccaaacaaaattgtttttgatgataagcttgtgttggctaacacacaagaattctttgatggaaattttccagtggattcttggttaccaatttttgtgaattgtctttatcctgtaagtcaattaccttcagaagctgtcgttgtaaatgttacatgttgtaatgggacctgtggtttacccaccactgcttggat

SEQ ID NO: 35610 - DNA, 312 bp, Glycine max
  unsure at all n locations
  Clone ID: LIB3138-091-Q1-N1-A11
gatataacatggttgaatcnagtacacaactcacagcaaaaaggtttataagctgtaaaggtacatgtaaccataaacctttttgctgtgagntgtgtacttgatataacatggttgaatctcggcaatcaatgaaaaaacccattaaaaatgtgtggaaattgaaaaaacccgttaaatgatctgtgggaggaatatagcggcatgatccattgcactatttgctggttgaatttggtattgctgagaagctcttccaagacaattgtatgtcgtcgttatttatttgttatgacaatcactggtacatat

SEQ ID NO: 35611 - DNA, 404 bp, Glycine max
  unsure at all n locations
  Clone ID: LIB3138-091-Q1-N1-A12
gtgcatgatagttcagtgtntacaataccaggtgattttgtcattggtgtcaagttgacaaccataaacaatatgtgtgcatatgggctcantcctggtatttcaggttctcgtcttttgggcaccattcctcagtccatttcacagcaaactgtttggaatcaaatggcaacagtgagaacaccattgaattttgattctagcaagcagagcttttgtcagttttctattgaccttctcggtggaggaatcttagtggacaaaactggagattggatcacacttatacaaaattctccaattagtaacttgttgagagttgctgcttggaagaaaggctgtttaatggtcaagattgtgatgtctgggaatgcagcagtcaaaaggagtgattgggcctcatt

SEQ ID NO: 35612 - DNA, 404 bp, Glycine max
  unsure at all n locations
  Clone ID: LIB3138-091-Q1-N1-A2
ggcccacttcatgacccagtctttcccgctccggttcgaacccggtccggtccagagcgactccgactcctcctccgtcgtcgtcgattgtcagcccaaaagagagctcaatctcgatcttaacttggctccgcctaatgaatattaacccttttttttatctctttattttttcataaaaaaagatagcagaaagaaaggactaaggagattttttttctctctttttttttttggaagattaatcttccattaagaagttaattagtacatccttngatgtaaataggttgattttctcttcttttttgttttttaggtccttgatagtattatcagaggacatgatctgaaattgtctagatctgatataatttttcatgtaacatctgaatatctgatgt

SEQ ID NO: 35613 - DNA, 81 bp, Glycine max
  Clone ID: LIB3138-091-Q1-N1-A3
atttcatataccttgtgtttgtatagcatatattcctagttgatattatctatagatggagccaattgaacaggaagccaa

SEQ ID NO: 35614 - DNA, 259 bp, Glycine max
  unsure at all n locations
  Clone ID: LIB3138-091-Q1-N1-A4
cgaacccacgggccgtgcaagccaagcgccatttcgtcaaaggcgcgcagctcctcgcccaagccagaagatccaaaagcgcttcctccgcaactnccctcgccaaacaagccctagccgaggccgagaaggccatcgcgctcgaccccaaggacgccgnctcgcaccttctcaagtccatggcgctcgacctccaaggcttccgnaccaacgcgctcgatgcgctcgacgccgcgttggcttccactcgcagcgggtt

SEQ ID NO: 35615 - DNA, 404 bp, Glycine max
  unsure at all n locations
  Clone ID: LIB3138-091-Q1-N1-A5
caagaacattatcttcgatgtacatggcgttacatcgctcgacggtgctggagctcaagtcctggctgagattgtcgagtcatacagaagcaggnaagtcagagtcttcttctgtagagttccaaaagagtctagtccagtctatcagctgttcgataagagcggtattgttgagatgtgcggcggtccaagacactttgtacagagcgttgaggaggcacttcgcatgacggaactagagcgattgacagaggaatttgccagctccgcagaagggtcgagagctgcatccagccgagcttaagtcttccgatgcatttatcctttatcctatgagcgatgggaatgagcgtgttagcactgcatctgatggtatgggcatattgcattagcgatttgctacg

SEQ ID NO: 35616 - DNA, 406 bp, Glycine max
  unsure at all n locations
  Clone ID: LIB3138-091-Q1-N1-A6
ctcgagccgattcggctctaggttgagagttgctgcttggaagaaaggctgtttaatggtcaagattgtgatgtctgggaatgcagcagtcaanaggagtgattgggcctcattggtacaagtgtttttaacaaacagcaacagtacagagcattttgatgcatgtaagtggacaaaatcagaaccacattcctgggaattgatctncccaatagaggtatgtggtcctaataatggttttgaaaatgtggagttctgagtgggcaaatcaaacttcatggcatttgagtttccttattgacaatcccaaacagtctacagtttttgatattctcttgggaatctctcaagattttgaaattgctggtaatactcttatgccagctttttctgttccacaggctac

SEQ ID NO: 35617 - DNA, 394 bp, Glycine max
  unsure at all n locations
  Clone ID: LIB3138-091-Q1-N1-A7
ctcgagccgcttgagacttatcttatcccgagtgagtctccaagaataaatttttcactgaaaagaaatcatttttatcattaatattaatnaaaatatgataaaaaaaaaaaaagagagactagagtgccagaaactaaataaaggttatgtgaagttaagaactaaagtgattgatcattacagcagttttgcacctgaaagtcagtttcaagggaggaagtaaagcagtttatatgtcgtctcattatgtggactacatgggacatactttatcaatatatacttcaagttccttgtaagttaagttcttgttaaaatgaaattgatgttgtgcaggcaaaaaagaagaaattggtgtcattcgttaccatatggtacatgtggatgatgt

SEQ ID NO: 35618 - DNA, 397 bp, Glycine max
  unsure at all n locations
  Clone ID: LIB3138-091-Q1-N1-A8
cgaaaagaaagagcaggctaagcgcgttgcggctgaaaacggcgttgtcaacccttcaggtgcgatgatcgctgcttttgcaccaatgtacntcgctgccatacctgttacttcatacctcacaaaaccaaacagcgtgatgcagtccttggtgcacgctctcatcaagttaattcctggagttactacaacagcaataacatccggtcgcgctattcccgcactctcagccatttacctattctggactttcggcgcctcgggtgctctctctgcggcagggcaagccatgggacgagaagagggcctggacattgagcactcgagaaaacatattcacaagctggatgggttgccgttgaggttgagaagtgcgcattatgcactcatggaaaac

SEQ ID NO: 35619 - DNA, 267 bp, Glycine max
  unsure at all n locations
  Clone ID: LIB3138-091-Q1-N1-B1
ctgaaaagggagatcaagaaaaacccaaaaagattgatgccagattgagacaaagaatagatcctcaatacaatgaggttcaggctcagatgganacaaatttgtttaaattgtctcttgatgatgttgaaactcctaaaggttccatgttggatctgaaaatttctcaatctaaaattgcacttcccaagaacacagttggaggaaccattctgcgtagtgatctattggcaaattttttgacagagggcaattttagagcaagtg

SEQ ID NO: 35620 - DNA, 403 bp, Glycine max
  unsure at all n locations
  Clone ID: LIB3138-091-Q1-N1-B11
agctggtgcagtttggagagattcaggaaaaagttgtattgaaattttcacaagaggaatttcttacagcttggtcaacctaggtgcgtccntcaacaactctgttggctgatgggtgtccatatttgtatgcaatggtgcatgatagttcagtgtctacaataccaggtgattttgtcattggtgtcaagttgacaaccataaacaatatgtgtgcatatgggctcaatcctggtatttcaggttctcgtcttttgggcaccattcctcagtccatttcacagcaaactgtttggaatcaaatggcaacagtgagaacaccattgaattttgattctagcaagcagagcttttgtcagttttctattgaccttctcggtggaggaatcttagtggacaaaac

SEQ ID NO: 35621 - DNA, 357 bp, Glycine max
  unsure at all n locations
  Clone ID: LIB3138-091-Q1-N1-B12
ggaaaatcgactttcccgcacggcacttcccgaagtgttaagagaatgcctctttctatagggggaggagctggtgcaaataatgctattnncatgaatatgccaaatgctgctctttcaatgtggagatattgtgttggatacctcgtctttgaagtttctaacatgacttctccctacattaaatgtacagcctataccttcataacatttgtaaattcggctgatgataccatcaatttctaggctttttcccacaagctggtgcaggttgtgaaagattcaggaaaaagatgtctcgaaatttttacaagaggaattttttacagtttggtcaactcaggtgcgtcctgcaac

SEQ ID NO: 35622 - DNA, 270 bp, Glycine max
  unsure at all n locations
  Clone ID: LIB3138-091-Q1-N1-B2
tgaatttgaatcatttgggtctctagacacaaacactaccccctctttccccctcctcaacattgttatgatcccttgttggtaaccattccatntgcacttgtctttgcaaccaaaaaacaagctctatgaccaacgaaatgaaagaagcaagtgccttaggagctagaacagcacgagcatgcgagagctgcctaaaagtaagagcacggtgggttttgtgcagctgatgatgcattcctttgccatggctgtgacaacatggttcac

SEQ ID NO: 35623 - DNA, 274 bp, Glycine max
  unsure at all n locations
  Clone ID: LIB3138-091-Q1-N1-B3
cgggattcattttgttcttattttncccccttttttcttctgctctggcgaatcagaaaccctaatcattgtttgggatttcagaggaaagaaanttaaacagagcacgaagatgaagggtctcttcaagtccaagcctcgcactcctgcagatgtagtgcgccagaccagagatcttctgctctttgttgancnnantcntnaancctgttaaagcaaacgtgaagagaagatgtccgagctatttaaaaatatcagggagctaaagtcaatc

SEQ ID NO: 35624 - DNA, 406 bp, Glycine max
  unsure at all n locations
  Clone ID: LIB3138-091-Q1-N1-B4
ggagatctcgtctttgaagtttctaagatgacttctccctacattaaatgtacagtctctttcttcatagcatttggaaatttggctgatgatancatcaattttgaggcttttccccacaagctggtgcagtttggagagattcaggaaaaagttgtattgaaattttcacaagaggaatttcttacagcttggttaactcaggtgcgtcctgcaacaactctgttggctgatgggtgtccatatttgtatgcaatggtgcatgatagttcagtgtctacaataccaggtgattttgtcattggtgtcaagttgacaaccataaacaatatgtgtgcatatgggctcaatcctggtatttcaggttctcgtcttttgggcaccattcctcagtccatttcacagc

SEQ ID NO: 35625 - DNA, 403 bp, Glycine max
  unsure at all n locations
  Clone ID: LIB3138-091-Q1-N1-B6
gcaacagtacagagcattttgatgcatgtaagtggacaaaatcagaaccacattcctgggaattgatcttcccaatagaggtatgtggtcctantaatggttttgaaatgtggagttctgagtgggcaaatcaaacttcatggcatttgagtttccttattgacaatcccaaacagtctacagtttttgatattctcttgggaatctctcaagattttgaaattgctggtaatactcttatgccagctttttctgttccacaggctactgccagatcttctgaaaatgcggaatcctctgcatgatctggaatttgtgttttctttcgcttgttcgtttgtttaattcaataaaggaaattaggcatgaccctcttgttgagtatgctctgcctatttgaaaa

SEQ ID NO: 35626 - DNA, 319 bp, Glycine max
  unsure at all n locations
  Clone ID: LIB3138-091-Q1-N1-B7
ggaaggatgtcttacgttgctcataacgttaatcagccccaagagaaagatttgttggagggaaatttttcctttgatattaaatctcgctntagattggaaaaagtttcctctacaaaagcacaatttgttagtggaaaaaccttcaaatatgatataattggtgctggttcacattcttcagaagattttcctgaaaaggaagatcaagaaaaacccaaaaagattgatgccagattgagacaaagaatagatcctcaatacaatgaagttcaggctcagatggaaacaaatttgtttaaattgtctcttgatgatg

SEQ ID NO: 35627 - DNA, 402 bp, Glycine max
  unsure at all n locations
  Clone ID: LIB3138-091-Q1-N1-B9
ctttctaactagtcataacntcaccattactgatggtattgacaaaactagtgcaactttgcaatttagaaagttagcagattgtgattttttcaagagaaactttaagcagatgtctaatgttttgtgggtggctcctgaggacaaggcgagtttatggtcacaacttcattatgtttcgtgtaataatcgggaaatgcaagaagctaatcttgtcaatttcgtaaatgtgttacaagaattgtatttgcacagtccagaggaagctcgccaattgagaaggaaagctctctctcgtattgaatggctgcaaaaagctgatgtgcctaccatagcacagattgaagagttccattcgatgcagaggatgatgaatgctcctgattcaaatgataatattga

SEQ ID NO: 35628 - DNA, 380 bp, Glycine max
  unsure at all n locations
  Clone ID: LIB3138-091-Q1-N1-C1
ctcgagccgattcggctcgagatggttttgaaatgtggagttctgagtgggcaaatcaaacttcatggcatttgagtttccttattgacaatccnaaacagtctacagtttttgatattctcttgggaatctctcaagattttgaaattgctggtaatactcttatgccagctttttctgttccacaggctactgccagatcttntgaaaatgcggaatcctctgcatgatctggaatttgtgttttctttcgcttgttcgtttgtttaattcaataaaggaaattaggcatgaccctcttgttgagtatgctctgcctatttgaaaatttccacacctcttttaattgtcgtaatgatgtgtgaagtgtgtgttatttt

SEQ ID NO: 35629 - DNA, 401 bp, Glycine max
  unsure at all n locations
  Clone ID: LIB3138-091-Q1-N1-C10
cccgagccttctgatttcaagacatgggatgggcaaaaacctatttctgtcttaggatctacgggttcaattggaactcagacactgagtntagtggctgagttcccagaaagatttaaagttgtgagccttgctgctggctctaatattactcttcttgctgaccagattaaaacatttaagcctgaagttgttggtcttagaaatgagtctttaattgatgaactcaaagaggctttggctgatgtggatcacaaacccgaaatcatccctggagagcaaggagtcattgaggccgctcgtcaccctgatgccaccactgtagttacaggcatagttggttgtgcaggattaaagccaacagttgcagcaattgaagcagggaaagacatagcattggc

SEQ ID NO: 35630 - DNA, 401 bp, Glycine max
  unsure at all n locations
  Clone ID: LIB3138-091-Q1-N1-C11
tgataacttaattagtgttcatgaatatgtcaagccttactttagtggttctaaattgaaaagctttctagctagtcataacatcaccatnactgatggtattgacaaaactagtgcaactttgcaatttagaaagttagcagattgtgattttctcaagagaaactttaagcagatgtctaatgttttgtgggtggctcctgaggacaaggcgagtttatggtcacaacttcattatgtttcgtgtaataatctggaaatgcaagaagcttatcttgtcaatctcgtaaatgtgttacgagaattgtatttgcacagtccagaggaagctcgccaattgagaaggaaagctctctctcgtattgaatggctgcaaaaagctgatgtgcctaccatagcac

SEQ ID NO: 35631 - DNA, 404 bp, Glycine max
  unsure at all n locations
  Clone ID: LIB3138-091-Q1-N1-C12
ctcgagccgctcgagccgtnaagttaaaagccttagccttccgtacaactccaaacacaaagacatcatcatccatggctgcctccgtctnnactgtcggagctgtcaacagagctcttttgaacctgaatggttctggagctggagcttcagctcccagttcagccttctttgggaccagcttgaagaaggttattgcctnaagggtccccaacagcaaggtttccggtggaagcttcaagattgttgctgtagaagagaagaaagagaattgaagagacccagcagaccgacaaggacagatggaagggtcttgcctatgatatctcagacgaccaacaagacatcacaagaggaaagggtttggttgactcccttttccaagctccacaggatgctggaac

SEQ ID NO: 35632 - DNA, 320 bp, Glycine max
  unsure at all n locations
  Clone ID: LIB3138-091-Q1-N1-C2
gcacagtccaaaggaagctttccatttgagaaggaaagctctctctcgtattgaatggctgcaaaaagctgatgtgcctaccatagcacagattganaagttccattcgatgcagaggatgatgaatgctcctgattcaaatgataatattgatttactgttgagcattgatttgttgggtttacaaggagcaggnaaagctnttncnaacaaaattgtttttgatgataagcttgtgttggctaacacacaagaattctttgatggaaatttttcaatggattcttggttaccaatttttgtgaattggctttatcctg

SEQ ID NO: 35633 - DNA, 404 bp, Glycine max
  unsure at all n locations
  Clone ID: LIB3138-091-Q1-N1-C4
agctcggggaaggttgacaatgggaagtttttgagggtgtatttgaaggaggatctgcctagtcggcttcattatgccgcgagtgatcggattncgccgataattgggttgattgaggaaggtttcaaggttgagcagaagagaaccaagcgccaagagtgtggcggttcgcacggttatgacaatgcggttttctccatgaggactatttttattggacatggtcctcgatttgctagagggaggaagataccgtcgtttgagaatgttgagatttataatttgattacttctattctcaagataaagggagcacctaataatggctctgcctcatttgcagagtccgttctactatctgctgcataagtgacaagaccgtgagcttttattggtggacagca

SEQ ID NO: 35634 - DNA, 173 bp, Glycine max
  unsure at all n locations
  Clone ID: LIB3138-091-Q1-N1-C7
gttgaagtatgtcaagcttggttatcattacctcatcacccatggaatgtacctttgcctttccccccttgtcgtattgattgcagcccaagnttccaccttcttccttcaagacttggatgaactttgggagcatctacaatacaacctgatatctggtatatctttgctca

SEQ ID NO: 35635 - DNA, 372 bp, Glycine max
  unsure at all n locations
  Clone ID: LIB3138-091-Q1-N1-C8
aaattttgtttctttgtgtgtgtatggtgatgataacttaattagtgttcatgaatatgtcaagccttactttagtggttctaaattgaanagctttctagctagtcataacatcaccattactgatggtattgacaaaactagtgcaactttgcaatttagaaagttagcagattgtgattttctcaagagaaactttaagcagatgtctaatgttttgtgggtggctcctgaggacaaggcgagtttatggtcacaacttcattatgtttcgtgtaataatctggaaatgcaagaagcttatcttgtcaacctcgtaaatgtgttacgagaattgtatttgcacagtccagaggaagctcgccaattgag

SEQ ID NO: 35636 - DNA, 266 bp, Glycine max
  unsure at all n locations
  Clone ID: LIB3138-091-Q1-N1-C9
aaaaaaaaaattatttataataaaaaaaaaaaaaaaaaagggggaaaaaaataaaaaaataaaaaaaaaaaaaaaaaaaaaatattattaaaaatntttaaaaataaaaaaaaaaaaataaaaatataaaaaaaaaaaactaataaaaaaactattttaaatataatatgggggggctccccttttttggccttctctnnnnggggaaaaatnngttccccttccctttagggtttcccctttttctttttttggggttctttaac

SEQ ID NO: 35637 - DNA, 401 bp, Glycine max
  unsure at all n locations
  Clone ID: LIB3138-091-Q1-N1-D1
ggataaacaagaatgtggaaataatggtgttagtgttgggaattttgtgcacatgagtagttcgcggtggccgaaggatgaagtggaggctttgntaaggttaaggactgagtttgatgtgcaggcacaagggaataataataatagtaataatgggtctaaagggcctctttgggaggagatatctttggctatgaagagcattggttatgatcgaagtgcaaagaggtgtaaagagaaatgggagaacataaacaagtacttcaagaggataaaggagaagaacaagaggaaacctcaggattccaagacgtgtccttattatcaccaccttgaggctttgtacagtaagaagcctaagaaggtggtggatcatgggaacgagttgaagcctgaggagc

SEQ ID NO: 35638 - DNA, 398 bp, Glycine max
  unsure at all n locations
  Clone ID: LIB3138-091-Q1-N1-D10
ggaggaaccattctgcgtngtgatctattggcaaattttttgacagagggcaattttagagcaagtgttgatttgcagcgcactcatcgnnttagaggaatgattaaaatggtggccacagttggtattcctgagaatacaggtatatcattggcctgtgctatgaatagttcttttagggggcgcgccagttctgatatttacaccatctgctctcaagactgtgaattgtggaatcctgcttgcacaaaagcaatgactatgtcatttaatccaaacccgtgttctgatgcatggagtttggaatttctgaagcgtactggatttcattgcgatatcatttgtgtcactggatggactgccaccccaatgcaggatgttcaggttacaattgattg

SEQ ID NO: 35639 - DNA, 399 bp, Glycine max
  unsure at all n locations
  Clone ID: LIB3138-091-Q1-N1-D12
ctcgagccgctcgagccgngcgaagctgcacgtgtccgaggccgacggcacacctgaggtttggcagctggtgattggctgaaaagtgcnncggatctcatgcgcggtgtgtcccgctgggaccagtagctcgtttgcctgcagccaggaacacccttttggacgacatgattgacgcgaggcgccttgatatgtcgccatatccgggacagggtccggtgatgcactccgatcagcccgaggtgcatgtccaacgtcttgaatcataggaattacgcgacagtaattctgtggcttcatggcgttgttatcagggtgttggaccccaagcctgcctgtgcgatgtggtacgggtctgggaactgcggaggaggaggggctcctctgccgcgtccagcg

SEQ ID NO: 35640 - DNA, 408 bp, Glycine max
  unsure at all n locations
  Clone ID: LIB3138-091-Q1-N1-D2
gcggggctttacttctttgaccatagtgttgcttcccagatggcacagcagaaggaattcaatctcaggaaaccttctgcataccactatgacanattgttgctaggattaacgacattgctttgtggattaattggcttacccccttcaaatggagttctgcctcaatcccccatgcacaccaagagcctggctgttttcaagaaacagttgatccgaagaaagatggttaaaagtgccaaggaaagcataaggcagaaagctagcaagtctgaaatatatgggaagatgcaagcagtgtttatagaaatggatagctgtccagataatcatttagtggtcaaagagttagaggatttgaaagaggttgtcctaaacggtgaagacaaagggctcaacaataagagt

SEQ ID NO: 35641 - DNA, 403 bp, Glycine max
  unsure at all n locations
  Clone ID: LIB3138-091-Q1-N1-D5
ctctctatatatatagagatgactatattctttgtaactagcctttcattttctgatcaatgagaaattagagtttcccaaactctattagttngtatccagagaattgtagatttgtgctgcaatctttgaacttcttttatatttctatcagtaaagagagaagagccctttgatagatagatatcaggagaaatgttctttacttattttatctctctctctccctttctttattacatgtatgttcttacttcttttaagatttcatattcttgactaatttactcctgcagtttcttttcctaataaaatttcttattttaaattaaaaaggagttttgatagatgtacttctcattacccccagtttcttattctacttgtatgctntttctctatg

SEQ ID NO: 35642 - DNA, 401 bp, Glycine max
  unsure at all n locations
  Clone ID: LIB3138-091-Q1-N1-D6
ctcgagccgctcgagcctttaaattttaaaaatgactgggataaaggtaagaattcaattattgaaattgaataagtaaacaatttaattggnttggtcgaatggtatcaaaaaaatggagtactaactcccatttcttatttattattgaattaaccgatcaacttgctttgttatcgaacatttctttnnnannncaaaannnttccggaaaaaatttgaatctatttttatatgcgaatcaatcctactacttctggtcctgaggtttctgtgcttgaaaaaaaaaatctgggacgtatcgcccaaataattggtccggtactagatgtagcttttcccccaagtaagatgcctaatatttacaacgctctgatagttaagggtcgagatactgttgg

SEQ ID NO: 35643 - DNA, 403 bp, Glycine max
  unsure at all n locations
  Clone ID: LIB3138-091-Q1-N1-D8
agcaaactgtttggaatcanatggcaacagtgagaacaccattgaattttgattctagcaagcagagcttttgtcagttttctattgaccnnctcggtggaggaatcttagtggacaaaactggagattggatcacacttatacaaaattctccaattagtaacttgttgagagttgctgcttggaagaaaggctgtttaatggtcaagattgtgatgtctgggaatgcagcagtcaaaaggagtgattgggcctcattggtacaagtgtttttaacaaacagcaacagtacagagcattttgatgcatgtaagtggacaaaatcagaaccacattcctgggaattgatcttcccaatagaggtatgtggtcctaataatggttttgaaatgtggagttctga

SEQ ID NO: 35644 - DNA, 401 bp, Glycine max
  Clone ID: LIB3138-091-Q1-N1-D9
gaagaaacctgtggctaaaagtggaaaaacatctcaaaagcctaagaaggctaatgatgatttagaaaaaactgaggaacctcccaaaaaggtctctcattcaacccgacgaagaaaaagatgcgtggacaaggctctgctggaaattcctgaggatgaacttgatcgtctaaatatacctattaaggatattattttacttgaagaacatagggagcggctggcgaaaaaagaggcgatgacttcaaatacttcttccaccaaccaaagtggtggagattctcttcatgaggctggttcttataatgaaggggcttatgatgatggagcttatgatgatggggcttataatgatgaggagttcttaggttcagaagatggtagagacccatatgataatc

SEQ ID NO: 35645 - DNA, 406 bp, Glycine max
  unsure at all n locations
  Clone ID: LIB3138-091-Q1-N1-E1
ctcgagccgctcgagccgttcggcccgctcgagccgaaaaaattatgatcttaatgatgatgagccgggaatgatcatcctcaatggtgatccanaatctagataccctagtcctcttgcatttgagtgcttaaaaacatgatattatttggatgagaatgtggattggaattattgtgcataatttactgatagacacangnnngacaaattttcgacattcaaattacttcaatcaaacaaagatttgaattatatctatattcgtattttgagaaaatcaagagaatcaaatagaataggaaattgattaatgacttttttttttcctttgtgactattctcattcaattgattattttcacatttattgtgtatttgtgtgcttaccatgtacagatagtta

SEQ ID NO: 35646 - DNA, 397 bp, Glycine max
  unsure at all n locations
  Clone ID: LIB3138-091-Q1-N1-E10
ctcaacacgtaaaagttacacttatccgaggtatcgggcgcacaactcatagttgttagcaaatgggtacctcgaaaagttgcaaaagtnaagaactttgcacagaactactcgaatcccaaactggggacacttccactgggtctgtgattcaaactttgcgtcttcaagtatttggggtgctacatngggttgtttcactaggcctcattctggccattgactttctcttgaagaaagccttcgtagcagcttcgattgagttcccaagcgctctgtttgggatgttctgtattttctctgttttgattattcttgattgtgctataccttctgctgctgtggctttgatgaagttttttgaaccagggattatgttcattcagagatggctccc

SEQ ID NO: 35647 - DNA, 398 bp, Glycine max
  unsure at all n locations
  Clone ID: LIB3138-091-Q1-N1-E11
cttacatatgcaaatattctaacccttggagcctattctgtacctggtattggcggtatgatagctcagactttggaagagcagctgtnncgctggcttcgagcagctgagttgacttgtgatcgtgcagctcttcttgttgctcaagaccctaaggttgtcatctctgtcctcatgaaattagctgggggatgtccatctatggctgatcaactaaatgtggatgcattcctggagcaagctcgctcttatgaaaaagctgcttccagcccaattgggtggtatataaggaatgcacaaacaaggcaactgtcacatcctctgcctgttctacgtgctagcgaaattgatgaatggtcaagaactccagcttataaatctcttttgaaacgaggaat

SEQ ID NO: 35648 - DNA, 397 bp, Glycine max
  unsure at all n locations
  Clone ID: LIB3138-091-Q1-N1-E12
ctttcttcatagcatttggaaatttggctgatgataccatcaattttgaggcttttccccacaagctggtgcagtttggagagattcannaaaaagttgtattgaaattttcacaagaggaatttcttacagcttggtcaactcaggtgcgtcctgcaacaactctgttggctgatgggtgtccatatttgtatgcaatggtgcatgatagttcagtgtctacaataccaggtgattttgtcattggtgtcaagttgacaaccataaacaatatgtgtgcatatgggctcaatcctggtatttcaggttctcgtcttttgggcaccattcctcagtccatttcacagcaaactgtttggaatcaaatggcaacagtgagaacaccattgaattttga

SEQ ID NO: 35649 - DNA, 400 bp, Glycine max
  unsure at all n locations
  Clone ID: LIB3138-091-Q1-N1-E2
ttggaaatttggctgatgataccntcaattttgaggcttttccccacaagctggtgcagtttggagagattcangaaaaagttgtattgaaattntcacaagaggaatttcttacagcttggtcaactcaggtgcgtcctgcaacaactctgttggctgatgggtgtccatatttgtatgcaatggtgcatgatantttanngnnacaataccaggtgattttgtcattggtgtcaagttgacaaccataaacaatatgtgtgcatatgggctcaatcctggtatttcaggttctcgtcttttgggcaccattcctcagtccatttcacagcaaactgtttggaatcaaatggcaacagtgagaacaccattgaattttgattctagcaagcagagcttt

SEQ ID NO: 35650 - DNA, 402 bp, Glycine max
  unsure at all n locations
  Clone ID: LIB3138-091-Q1-N1-E4
aaaaaaatgatggatgtgttagtggtggaccccatcattaattaagcaagcttgaaatgtcatcatttgaatggaacggagcatgcataatctcacattgtgcttagaacatgccataatttctatcttctcataatggagtatgtttgttacttgttatttttaaccccagttgtaatgctgttgagctgnnngctcttaaatgcagtgctgagaaagtggaaaatgaacctgatcaaaaaaaggaagtggaagatgaacacgttggggaaaattgaagatctgtcaatttacttttggtccctgcagattgatcgataagagagttggaaatgaacattgaacctcgaaaacttaatttttgtttcccattgaagttttgtccgtctttatctttttcat

SEQ ID NO: 35651 - DNA, 400 bp, Glycine max
  unsure at all n locations
  Clone ID: LIB3138-091-Q1-N1-E5
gaatgctattctcatgaatatgccaaatgctgttctttcaatgtggagatattttgttggagatctcgtctttgaagtttctaagatgacttntccctacattaaatgtacagtctctttcttcatagcatttggaaatttggctgatgataccatcaattttgaggcttttccccacaagctggtgcagtttggagagattcaggaaaaagttgtattgaaattttcacaagaggaatttcttacagcttggtcaactcaggtgcgtcctgcaacaactctgttggctgatgggtgtccatatttgtatgcaatggtgcatgatagttcagtgtctacaataccaagtgattttgtcattggtgtcaagttgacaaccataaacaatatgtgtgcatat

SEQ ID NO: 35652 - DNA, 405 bp, Glycine max
  unsure at all n locations
  Clone ID: LIB3138-091-Q1-N1-E7
caaaattgcaggattcgcctttgccacctcagctctcgttgtttctggagcgagtgcagaaggtgttccaaagaggctaaccttcgacgaantccagagcaagacatacttggaagtgaagggaactggaactgctaatcagtgcccaaccattgaaggtggagtggactcatttgccttcaaggcagggaaatacaaggcccanaagttgtgcctggaaccaacttccttcacggtgaaggcagagggtgtggccaagaatgccccgctcgaatttcagaacaccaagctcatgactcgtctgacctacaccctggacgagatcgagggtcccttcgaggtttcatccgatggaacggtgaaattcgaggagaaagacggaattgactatgctgctgtcactgt

SEQ ID NO: 35653 - DNA, 401 bp, Glycine max
  unsure at all n locations
  Clone ID: LIB3138-091-Q1-N1-E8
gtgttggctaacacacaagaattctttgatggaaattttccagtggattcttggttaccaatttttgtgaattgtctttatcctgtaagtnnattaccttcagaagctgtcgttgtaaatgttacatgtggtagtggacgtggtggtttacccaccactgcttggattagttctgcagttaacaatcgctcctcagatatcaacaaaaggattcgcacagcacttgggaaaggtaagaaaattgtttttcttactagagttgatccttttccagtagctttactggctgttctttttggcgttaagaatgaaattctgagttctaacgccactaatcctatgctgacgcgacttcttgagaactgtaagagtctcaaatatctggttgatgagtgtccttt

SEQ ID NO: 35654 - DNA, 181 bp, Glycine max
  unsure at all n locations
  Clone ID: LIB3138-091-Q1-N1-F1
atcagcccaacacaacatttttataagctaaaatcacttcatcatgggtgcctcgtgtgcttcctctgccattgcagctgttgccatcttcacacnaaggcaagtttattttttttcacgtgcccattacttgtaagttgtataatagtgaaccattaacgtacgtgaaattagtctatgc

SEQ ID NO: 35655 - DNA, 390 bp, Glycine max
  unsure at all n locations
  Clone ID: LIB3138-091-Q1-N1-F10
gcctgcgatctggttgatatgaatagcaaaaaagaggagcaggagcatttagcatgtcaggttgtgatgaaggatcaagaaaatttgatncctaatgatcattgcttaactttgttacccttggtggactcttccaataaagactacacagaatgtgaaggtgggatgatcaatgcttctgatgtagctgagaaggaggacttacaagatggagttttgatgaacaatgacccagtttctgctgctttggatcaaactattacaaattgtgttgtttctgctcctttgatgaacaatgaaaatgttgcttcttctggttgttctcatgttacttctgatcaagaggacctctcatgtaaaccgttgtctaacatggatggatcttggggt

SEQ ID NO: 35656 - DNA, 184 bp, Glycine max
  unsure at all n locations
  Clone ID: LIB3138-091-Q1-N1-F11
ctcttgttgagtattctttgcctatttgaaaatttccacacctcttttaattgtcgtaatgatgtgtgaagtgtgtgttattttaaaanaggaaattaggcatgaccctcttgttgagtatgctctgcctatttgaaaatttccacacctcttttaattgtcgtaatgatgtgtgaagtgtgtg

SEQ ID NO: 35657 - DNA, 392 bp, Glycine max
  Clone ID: LIB3138-091-Q1-N1-F12
ggacaaaatcagaaccacattcctgggaattgatcttcccaatagaggtatgtggtcctaataatggttttgaaatgtggagttctgagagggcaaatcaaacttcatggcatttgagtttccttattgacaatcccaaacagtctacagtttttgatattctcttgggaatctctcaagattttgaaattgctggtaatactcttatgccagctttttctgttccacaggctactgccagatcttctgaaaatgcggaatcctctgcatgatctggaatttgtgttttctttcgcttgttcgtttgtttaattcaataaaggaaattaggcatgaccctcttgttgagtatgctctgcctatttgaaaatttccacacctcttttaattgt

SEQ ID NO: 35658 - DNA, 404 bp, Glycine max
  unsure at all n locations
  Clone ID: LIB3138-091-Q1-N1-F3
ggaagaaccaccactaccttatccatttccactcctcaccaagccacaccatggcctcaaccaacgccctctcttcagcttccattctacgctctnccaaccgccagtctctgaccagaagagcgaaccacaacggaagagtaaattaccgtcaaccgaatagccgtttctccgtcaaagcctccgccaaagagattgcctttgaccagcattcccgctctgctatgcaggccggcattgacaagctcgccgacgccgtcgggctcactcttgggcccagggggaggaatgttgtgttggatgagtttggaagtcctaaagtggttaacgatggtgtcaccattgctcgcgccatcgagcttccagatcctatggaaaatgccggtgcagctcttattagagag

SEQ ID NO: 35659 - DNA, 378 bp, Glycine max
  unsure at all n locations
  Clone ID: LIB3138-091-Q1-N1-F4
aatggctgtgaaaactcatacncactactttcttctcttgcttctcgtcttaatctccatcaacgccaaacttgatctctacccttgagactncaaggcactcctaactctgcataacgaccgcagtgtctacggtcaagtctactcaactctggcttgcgaaacagagggcgtgttctgcgagcggaggaagctntncggnaaggaaacctacgccctccgaatcaccagactcgtcttcaaatccaacaacctcaacggtgttctgtccccttccattggacgcctcacggagctcaaagaactctctctctccgacaacaacctctttggccgactccctccccaaatctttgactgcagaaagctacaaatcct

SEQ ID NO: 35660 - DNA, 398 bp, Glycine max
  unsure at all n locations
  Clone ID: LIB3138-091-Q1-N1-F5
ctcccatcccatttttcagtancaaagtttgaaacttttctcaattgggttgtagagagtttgactcatcaatttttatttttttatttttantttctctaaccaagtagaagtgcaataattaaatgtccaacatcttcttgttgctgatgtttgagattcatgtatccgattctcagtgaaatcttntcttccnggngnnncatcaattacactgttaggcgcaagacccatttagttcaatccttctcagatgcctttctttataggtgngactacgttgcatgatttataacccttaattagcttaataatcatctatctaaaatatcataatatcttctactagcttgttttatttttattatcacaataaaatctatctgcaatatattgtt

SEQ ID NO: 35661 - DNA, 338 bp, Glycine max
  unsure at all n locations
  Clone ID: LIB3138-091-Q1-N1-F6
gacgtggtggtttacccaccactgcttggattagttctgcagttaacaatcgctcctcagatatcaacaaaaggattcgcacagcacttgggnaaggtaagaaaattgtttttcttactagagttgatccttttccagtagctttactggctgttctttttggcgttaagaatgaaattctgagttctaacgccactaatcctatgctgacgcgacttcttgagaactgtaagagtctcaaatatctggttgatgagtgtccttttgcatttgtgaactagtatgtagtattttattcacttaaataaagcgcattactatgtgcaatgagtgtgttt

SEQ ID NO: 35662 - DNA, 405 bp, Glycine max
  unsure at all n locations
  Clone ID: LIB3138-091-Q1-N1-F7
gtttcttttcttcatcttcngaagcaatccctggaatttggagaacttgaatggctagcagatgcaggccttttcagtgaacagtttcctnntgaagctttagtcgcagctgaagttcctcagcttccagtgccacacactagcagtgttgcctcacataaagcccccaaatccttggtgtcttacaaaaagcctaggattgaagtcctggatgaagatgatgatgaacactgcactgtcccggatctcggataaagtacattctcatgtaaacaattgcctgaatcagtaggttgatgagttgtatatgcatactaggtgcagatgttaatgaactcttcagtgtgcctgatctagctgaagctcaggaccatgaggactattgcatgaacctgtagattgatg

SEQ ID NO: 35663 - DNA, 401 bp, Glycine max
  unsure at all n locations
  Clone ID: LIB3138-091-Q1-N1-F8
gtttaaattgagatgataagatgtttttctctgttgtggtggttatatgcggtttaaattttgaatttctttgttggtgtatttttttttntttctttctttcatttttagtagaacctaaataatttatggtttatattgttttaattgtttaactcggaacttaacagtgtgcttggttatagaagagggaggaatttttatttttattttttttaatttaccttgtttgatttataaatctagtgggaggagaggggaaacgagaggttaattatctacctctaatagttgaagaatttggaatttatgatttttgaaatgtaaacacaacattgttccacaattttattttatttttcatcacttttcttactgtatggatgtatgatagttcgtac

SEQ ID NO: 35664 - DNA, 404 bp, Glycine max
  unsure at all n locations
  Clone ID: LIB3138-091-Q1-N1-F9
aagaagcttatcttgtcaaactcgtaaatgtgttacgagaattgtatttgcacagtccagaggaagctcgccaattgagaaggaaagctctntctcgtattgaatggctgcaaaaagctgatgtgcctaccatagcacagattgaagagttccattcgatgcagaggatgatgaatgctcctgattcaaatgataatattgatttactgttgagcattgatttgttgggtttacaaggagcaggtaaagcttttccaaacaaaattgtttttgatgataagcttgtgttggctaacacacaagaattctttgatggaaattttccagtggattcttggttaccaatttttgtgaattgtctttatcctgtaagtcaattaccttcagaagctgtcgttgtaaat

SEQ ID NO: 35665 - DNA, 409 bp, Glycine max
  unsure at all n locations
  Clone ID: LIB3138-091-Q1-N1-G1
ctgatcttcaagggaaagcagagaataagcaagccttgagaaggaacctaggtctttcatctacagatgttaggaggccattggttggctgtattacaagactggttccacaaaaaggtgttcatcttattagacatgcaatatatctaacattggagttgggaggacaatttgttctacttggttcaagtccagtgccacacatncagaatgaatttgagggcattgccaaccactttcagaatcatgatcacataaggttgatattgaagtatgatgaatctctctcccatgtcatttatgctgcgtctgacatgttcatcattccatcaatctttgaaccttgtggcctaacacagatgatatcaatgagatatggtgccatacctattgtccgaaaaactggtgg

SEQ ID NO: 35666 - DNA, 396 bp, Glycine max
  unsure at all n locations
  Clone ID: LIB3138-091-Q1-N1-G10
gggaaggctgaacctttngccgtcagcttgcgtgggtgacatggttatggccaccgtcaagaagggaaagcctgatctccgtaaaaaggagctccccgccgtcatcgtccgtcagcgcaagccgtggcgccgaaaggacggtgtttacatgtacttcgaagataatgctggggtcatagtgaatcccaagggtgaaangaaaggttctgctatcactggtcctattgggaaggagtgtgctgatctgtggcccaagattgcaagtgctgcaaatgctattgtttaagctgggtttttagtttatgtaatgtttctgcttcttgaagntgtttcagatattgttttaggttgaattgcagacaatattggcatttggcacatatagtttgtttttgc

SEQ ID NO: 35667 - DNA, 396 bp, Glycine max
  unsure at all n locations
  Clone ID: LIB3138-091-Q1-N1-G11
aaatgggccacagtgtgcttcccaagagcacaaatgatgcaaggctcaaggaaaactttgatctctttgattggtccatacctgcagatntgcttgccaacttctctgacattaagcaggagagaatagttactggagatggtttttttagcaagacatctcccgggtacaaaacaattgaagaactctgggatgagtaatggacagtttccatattggccacatccccccctcttgcttaatgcaaaaatgagcctatctttatgattattgtaataatctacgatgtgtttataattttggacttgagatgtgtcaagggagatttcgagtttacattaataacgtgtcattttggaattcagttgtttgagtcttgaccttattgtgtgtttg

SEQ ID NO: 35668 - DNA, 405 bp, Glycine max
  unsure at all n locations
  Clone ID: LIB3138-091-Q1-N1-G3
tgggaacggcattaatgattatctggttcccagagatcaggatttattggacaggcatccttcaccagactattggtcaaactggggaataagtncaactgaaggttttaattcacctaaaaatctttttatcatggatttctttgaagaaagattcaataatcaaattgagcttgaaccatctctgcatgataaagatcattctancagttcaagtgtatgtgggggattgcctgagcaatcttttcaacagacagcattttcatgcgatcagcctaattaccagcttcaagatctaccgagattcgaaccgatgaatgacactttcttggattctgtacctgaaggtcttccatttgttgacgttgaaaacctagacaaatccatcaacatttctcctgaaaa

SEQ ID NO: 35669 - DNA, 399 bp, Glycine max
  unsure at all n locations
  Clone ID: LIB3138-091-Q1-N1-G4
gtggcggaaagctaggtactgcctgcgactggagtgagtggttcttgagacatatctataacgctgtttctgtgagagcatcaatggcgacanaagctttgtccttcgctctgtctctcaatgacctcaccaataaccacttctcttccaatacgccacacaccgccgccaaagtttccgtctttaccgncaaatgctntnnnncgggtggtggagagaggccttggaagaattcagatgctagacttgtgcttgaagatggttcaatttggaaagcaaaatcgtttggtgcttcggggactcaagttggcgaagttgttttcaatacatcattgacagggtatcaagaaattttgacagatcctagttatgctggccagtttgtgctcatgacaaatc

SEQ ID NO: 35670 - DNA, 401 bp, Glycine max
  unsure at all n locations
  Clone ID: LIB3138-091-Q1-N1-G5
cacaaatgctaatatgagatcactttaagcattactacagactttccttgcacaaatccaaattaaaagagatattggtgtttcaaaagtcagnattagtcaccattgatgtaataaaattgatagacattgaaggatgtagacaaggattatcctatagtgtttgagtatctagcatgcatgattgataccagtacagcatttattaaatgtctaaacttccttaatcaacatttgaacataggtaatgccattaagaagtaatcttgaaacaatggagagtggatagttttaatttagaataagaaagaaatattgaaataaaagtaaatggaataattttaaacatttagttggagtgaatttaaatattgacttccagtttcaaattgttatcagtt

SEQ ID NO: 35671 - DNA, 399 bp, Glycine max
  unsure at all n locations
  Clone ID: LIB3138-091-Q1-N1-G6
ctcgagccgattcggctcgagctcgagccgctcgagccgccggagatggcaggacatcaagaaccctggctctgtcaaccaagaccccatctncaagcaatacagcttgccccaacatgagtgtggataccctggtagtgtgtttaaccccttgaactttgcacctactttggaggccaaggagaaggaacttgccaatgggagattggctatgttggcattcttgggattcatagttcaacacaacgtgacaggcaaaggaccatttgagaacctattgcagcacctctctgacccgtggcacaacaccatcatcaatacaattcgtggctactaagtttgtatccaatgacatggataagcctgtgtccttctcgtgtaatcctgaatggatgaatt

SEQ ID NO: 35672 - DNA, 391 bp, Glycine max
  unsure at all n locations
  Clone ID: LIB3138-091-Q1-N1-G7
ctttttcgctatgatgttaccgcctgtgaaaccaaggtgattcctggtgaatatggtttcgttgcccagcttaacgagggtcgtcacctcnngaagaggccaactgagttccgagttgataaggtccttcaaccctttgatgaaaacaaattcaactttaccaaagtcgggcaagaagaggtcctcttccaatttgaagctagcgaggatggacaagtccagttctttccaaatgctccagttgatgttgacaattctcccagctttgttgccatcaatgtcagtcctattgagtatgggcatgttttgctgattccgcgcatatttgagtgtttgcctcaaaggattgaccgtgagagcttcctccttgcacttcagatggcagtggaag

SEQ ID NO: 35673 - DNA, 405 bp, Glycine max
  unsure at all n locations
  Clone ID: LIB3138-091-Q1-N1-G8
ggagcacatatatagaggaatcttgttcatctttgatcgccatcatcttgaacatgcaggctttatatgtgctaaggcccaatcatgtgtnnttgtgggaggttcacgctccagtggtgacagaaatggggatgcctactcaagatttgccagtcttagaagtccaagtcgtattccaccgtccccgaggaggttttctcgaggagggccaatggattctggagggagacataggggtggaaggggccatgatagtttggctgggacaaccgttaaagtacgccaaggtccctataaaggttaccgtgggcgtgttatagatgttaaaggcacaacagttcgtgttgagttggaatcccaaatgaaggttgtgacagttgaccggaaccatatatctgacaatgt

SEQ ID NO: 35674 - DNA, 405 bp, Glycine max
  unsure at all n locations
  Clone ID: LIB3138-091-Q1-N1-G9
attattcagaaggaaagtgtgttttgttcggtggtcaattcccatccacacgcctcaccggaaacatgtcagcggtggttgctggttcctcntcttcattctctgccaccttcactaccagaaggagcccctccttaaaaaactctcaactctctcattccaagacactaacttctcctcaatgccagaagacatctttacaaggcctctcacttcatgaagccaaaaggggtgtttcagaatccttcctagttgagaacaagaatggttcctccattgctggaaggagacttgagatcaaagcaagaactgctggggcctcaaagacaattgaggtggaggttgacaagccacttggcctcaccttaggccaaaagtctggtggtggtgttgtcatcactgtca

SEQ ID NO: 35675 - DNA, 397 bp, Glycine max
  unsure at all n locations
  Clone ID: LIB3138-091-Q1-N1-H10
gaagttaaaagccttagccttccctacaactccaaacacaaagacatcatcatccatggctgcctccgtctccactgtcggagctgtcancagagctcttttgaacctgaatggttctggagctggagcttcagctcccagttcagccttctttgggaccagcttgaagaaggttattgcctcaagggtccccaacagcaaggtttccggtggaagcttcaagattgttgctgtagaagagaagaaagagattgaagagacccagcagaccgacaaggacagatggaagggtcttgcctatgatatctcagacgaccaacaagacatcacaagaggaaagggtttggttgactcccttttccaagctccacaggatgctggaactcactatgcagtc

SEQ ID NO: 35676 - DNA, 452 bp, Glycine max
  unsure at all n locations
  Clone ID: LIB3138-091-Q1-N1-H11
acaccatagaagagatatgacatgcactcctcccttacctaagctattcagttcgggttgaggcaaacaaaaggctgtttaatggtcaagattgtgatgtctgggaatgcagcagtcaaaaggagtgattgggcctcattggtacaagtgtntttaacaaacagcaacagtacagagcattttgatgcatgtaagtggacaaaatcagaaccacattcctgggaattgatcttcccaatagaggtatgtggncctaataatggctttgaaatgtggagttctgagtgggcaaatcaaacttcatggcatttgagttttcttattgacaatcccaaacagtctacagtttttgatattctcttgggaatctctcaagattttgaaattgctggtaatactcttatgccagctttttctgttccacaggctactgccagatcttctgaaaatgc

SEQ ID NO: 35677 - DNA, 382 bp, Glycine max
  unsure at all n locations
  Clone ID: LIB3138-091-Q1-N1-H12
gggaagaacatgtgtggtgttgcaacttgtgcatcttatccaattgtggcataaattgcataacaatatggtccctggtgactaccacnttgtcatgcttcagagtttagagcgtattgctgatgccagtattgatgaatgatgattaaagataagtgtaattgtatgatgaaaattgctcctagttgggttggcatgatgtataaaataagctagaagttgttgtaaatcacataagtatattatggccttaattgtgtgtatcacagacataataacgatcatatattgatagttcatagttacatattgtattggattgatgctcccgcttcaaatatcagttataagatagcattgtctttgctactttgcactatgc

SEQ ID NO: 35678 - DNA, 351 bp, Glycine max
  unsure at all n locations
  Clone ID: LIB3138-091-Q1-N1-H2
ggcaattttagagcaagtgttgatttgcagcgcactcatcgtattagaggaatgattaaaatggtggccacagttggtattcctgagaatacagntatatcattggcctgtgctatgaatagttcttttagggggcgcgccagttctgatatttacaccatctgctctaaagactgtgaattgtgggatcctgcttgcacaaaaaccatgactatgtcatttaatccaaacccgtgttctgatgcatggagtttggaatttctgaagcgtactggatttcattgcgatatcatttgtgtcactggatggactgccaccccaatgcaagatgttcaggttacaattgattgg

SEQ ID NO: 35679 - DNA, 305 bp, Glycine max
  unsure at all n locations
  Clone ID: LIB3138-091-Q1-N1-H3
ctttaagcagatgtctaatgtttngtgggtggctcctgaggacaaggcgagtttatggtcacaacttcattatgtttcgtgtaataatctggaantgcaagaagcttatcttgtcaatctcgtaaatgtgttacgagaattgtatttgcacagtccagaggaagctcgccaattgagaaggaaagctctctctcgnatngaanggnttcaaaaagctgatgtgcctaccatagcacagattgaagagttccattcgatgcanaagatgatgaaagctcctgattcaaatgataatattgatttac

SEQ ID NO: 35680 - DNA, 399 bp, Glycine max
  unsure at all n locations
  Clone ID: LIB3138-091-Q1-N1-H4
gcagaagaacaagtagttgagatctaagaaggagaagcaaatggcttcctcaatgatctcttgcccagctgttaccactgtcaaccgcgccggngccggcatggttgctccattcactggcctcaagtccatggctggcttccccaccagaaagaccaacaatgacattacctccattgctagcaacggnggaagagtgcaatgcatgcaggtgtggccaccagttggcaagaagaagtttgagactctttcctacctgccagaccttgatgatgcacaattggcaaaggaagtagaataccttcttaggaagggatggattccttgcttggaattcgagttggagcacggtttcgtgtaccgtgagcacaacatgtcaccaggatactacgatggacg

SEQ ID NO: 35681 - DNA, 504 bp, Glycine max
  unsure at all n locations
  Clone ID: LIB3138-091-Q1-N1-H5
taagnnctcggaannttcggcttcgagcctnntccataaacagggttggttgcctnctcttttccatctnnccccagcccaaaaccgtctcttcagagaagggccacnnattatcgccctnntccgtcttcgcaacccctatnacacctcctnntcttctccttcccctcttcaatcttccctnntcccctctctttcattcaagaacaggnncctgttttttgctggcccctgtcccccatcnnatcaccccaacctgtnngagagagganntatggcaaagggaattacgaggannaagctatttgaagaaccttcagacatattgtgtgagtgggagaagaagtgaacctcaacagcgaccagctnngctgaaaaagtggagccagataaccatgcttctcttagggacccatcatcatctgatggcattcccatcatcnnagaagcctcagacaaggatcaaaagctggtttcattcacttcaagaaggagaaatacgac

SEQ ID NO: 35682 - DNA, 406 bp, Glycine max
  unsure at all n locations
  Clone ID: LIB3138-091-Q1-N1-H7
cacacacacgacaccatcaacccaaaacaaagaaacaatggctctgagattcgcagcagctgcttctgcttctgtctcacgaatatcaagggcacaaaacccaccattcttttcacttcaacaccgcaacaacggtactctcaaattccatagcccaccttttcatcatccacttcccacaccctcaaaacgctgcaacgttcnacccataagcgaggtagctgtggaacctgaaatttcaaagaaagaacaaaatgagtcacctaaagattggaagattaaaatgctctatgacggagattgccccctctgcatgcgcgaggtgaatatgctaagagagaggaataagagttacggcacaatcaagtttgttgatataagttctgatgaatactctcccgaggag

SEQ ID NO: 35683 - DNA, 135 bp, Glycine max
  unsure at all n locations
  Clone ID: LIB3138-091-Q1-N1-H8
gtcaaaaggagtgattgggcctcattggtacaagtgtttttaacaaacagcaacagtacagagcattttgatgcatgtaagtggacaaaatnagaaccacattcctgggaattgatcttcccaatagaggtatgt

SEQ ID NO: 35684 - DNA, 175 bp, Glycine max
  Clone ID: LIB3138-092-Q1-N1-A1
cccccttccttaacttcgaatttcggttcgggcctgtttcaaaggatattatggattaactgtggaccattgattggtggggtttacaaggagcaggtaaagcttttccaaccaaaattgtttttgatgataagttggggtgggttaacacacaaaatttcttggttggaaattt

SEQ ID NO: 35685 - DNA, 375 bp, Glycine max
  Clone ID: LIB3138-092-Q1-N1-A10
atcttagtggacaaaactggagattggatcacacttatacaaaattctccaattagtaacttgttgagagttgctgcttggaagaaaggctgtttaatggtcaagattgtgatgtctgggaatgcagcagtcaaaaggagtgattgggcctcattggtacaagtgtttttaacaaacagcaacagtacagagcattttgatgcatgtaagtggacaaaatcagaaccacattcttgggaattgatcttcccaatagaggtatgtggtcctaataatggttttgaaatgtggagttctgagtgggcaaatcaaacttcatggcatttgagtttccttattgacaatcccaaacagtctacagtttttgatattctc

SEQ ID NO: 35686 - DNA, 373 bp, Glycine max
  Clone ID: LIB3138-092-Q1-N1-A11
gcagatgtctaatgttttgtgggtggctcctgaggacaaggcgagtttatggtcacaacttcattatgtttcgtgtaataatctggaaatgcaagaagcttatcttgtcaatctcgtaaatgtgttacgagaattgtatttgcacagtccagaggaagctcgccaattgagaaggaaagctctctctcgtattgaatggctgcaaaaagctgatgtgcctaccatagcacagattgaagagttccattcgatgcagaggatgatgaatgctcctgattcaaatgataatattgatttactgttgagcattgatttgttgggtttacaaggagcaggtaaagcttttccaaacaaaaatgtttttgatgataag

SEQ ID NO: 35687 - DNA, 363 bp, Glycine max
  Clone ID: LIB3138-092-Q1-N1-A12
gcccggattaccacttcttcgacggaaccagcgagaggcagaactgcacagaaaagaaccatatccaatggacctacaacgctggaatccacatgtctggcgttgcagcgttgtggaacatgtcagaaacgaacggtgatgcggaagcagcgggcaggtggcgagagcgcctgggtggcatcattaatggaacagacatcttcttcaacgccgaaggcgccccaggtgtcatgatcgagatggcttgcgagcgcaacggactatgcgaccacgaccaacgctcattcaaagcctacctcagccgatggatgggctacacgatgctgagcgctcccttgacccgcgacaggatcatgccaaaac

SEQ ID NO: 35688 - DNA, 165 bp, Glycine max
  Clone ID: LIB3138-092-Q1-N1-A3
acacaaaagctaagctgtgacttcccctcgacccgaacctcagatttcggttcgagctttttttaagtgtagtagaggagaggaaccgcgccaaccctctcttcttctttttcttcaatcctttaataacattattagtggcattcttaatcgttgggaaaaatg

SEQ ID NO: 35689 - DNA, 386 bp, Glycine max
  Clone ID: LIB3138-092-Q1-N1-A4
caaagttccaaattttttggtttggggatagatagagtgatacgcgtcacattttcataataataaaaaaatggcagcggcggcggcagtgacggtgctactcccacctaggattccgaccaccaccaacgttacccgctgctctgctttgccttctctccctcctcgcgtctccaacaccaaaaccactttgttctcaccttccctcaacaacttttcagtgtcccgaaaatcttctctgcttcagaccagagcttcttcagaggaatcatcctcagtagatgccaatgaggtttcacagatttgaaggaaaagtgggatgctcttgaaaacaagtccacagtacttctttatggtggaggggctatagttgctatttggctatc

SEQ ID NO: 35690 - DNA, 129 bp, Glycine max
  Clone ID: LIB3138-092-Q1-N1-A5
catgacgcgacacatgcaccacctaataatcataattttacatctttacatacaaaatacaaagactttaaattttgtatgtaaagatgtaaaattatgattattaggtggtgcatgtgtcgcgtcatg

SEQ ID NO: 35691 - DNA, 388 bp, Glycine max
  Clone ID: LIB3138-092-Q1-N1-A6
aaaaccttcaaatatgatataattggtgctggttcacattcttcagaagattttcctgaaaaggaagatcaagaaaaacccaaaaagattgatgccagattgagacaaagaatagatcctcaatacaatgaggttcaggctcagatggaaacaaatttgtttaaattgtctcttgatgatgttgaaactcctaaaggttccatgttggatctgaaaatttctcaatctaaaattgcacttcccaagaacacagttggaggaaccattctgcgtagtgatctattggcaaattttttgacagagggcaattttagagcaagtgttgatttgcagcgcactcatcgtattagaggaatgattaaaatggtggccacagttggtattcctg

SEQ ID NO: 35692 - DNA, 382 bp, Glycine max
  unsure at all n locations
  Clone ID: LIB3138-092-Q1-N1-A8
caattggaaagaaaagaagctgagcaagctggggctaacaaggaaacacgaattgtcacacccctgatggaatttgttcgtcagagacgtgctgttgacagtggtatgcaggcttcatcagcggtggcaaaagttagcagaagatccagagctgctttgcctggcaagcctggctcangcaatactaaacgaggatctgaaaagaaaaagtatgttcagaaggacaatgccaagggtgttgctcgcaaagagtcaaaagacaagtcagcctttgttgtggtcccccggcgagacaatcaatcagctgaatcaatgcatggtattgaaggtcccttttctggaatttcactgacttctgactcangaaagaaaaaaatccttc

SEQ ID NO: 35693 - DNA, 314 bp, Glycine max
  Clone ID: LIB3138-092-Q1-N1-A9
cttacctggccaatccattgatttctttggtgcactgagggccagagtatatgatgacgaagtgaggaagtggatttctggtgttggtgttgacggcattgggaagaagcttgtgaactcaaaagatggacctccaacctttgagcagcccaagatgactctggagaagctcttgacgtatggtaacatgcttgtccaagaacaagagaatgtcaagagagtccaattggctgacaagtacttgaacgaggctgcacttggaaatgctaacgaggatgctattaacaggggaactttcttccaatcttgaattg

SEQ ID NO: 35694 - DNA, 388 bp, Glycine max
  Clone ID: LIB3138-092-Q1-N1-B1
cagaaaaacaagtagttgagaactaagaagaaggaaatggcttcctcaatgatctcctccccagctgttaccaccgtcaaccgtgccggtgccggcatggttgctccattcaccggcctcaaatccatggctggcttccccacgaggaagaccaacaatgacattacctccattgctagcaacggtggaagagtacaatgcatgcaggtgtggccaccaattggcaagaagaagttcgagactctttcctacttgccagacctcgatgatgcccaattggcaaaggaagtcgaataccttctaaggaaaggatggattccttgcttggaattcgagttggagcacggtttcgtgtaccgtgagcacaacaggtcacctggatactatg

SEQ ID NO: 35695 - DNA, 387 bp, Glycine max
  Clone ID: LIB3138-092-Q1-N1-B10
ggaggttgctacagcagcttctagcttcgcactcaacaagcccatgctggcattgccctcttcatctcgaactgtaaccccaatcagatgcatgaacacctccacctcccccgtcaggacctctctctctaccagcttcgtcgctccttacgccggaatctgcagcgcgtctagccctttctccggccacaagctccgtccctcctccctcaatccggcgtcgtttcttggctccaacgctaaacgaggcgtcgttaccatggttattccttttcaacgaggaagtgcatgggagcaacctccaccggacttagcttcttacttatacaaaaatcgaattgtttatttgggcatgtctcttgttccatctgttactgagttgatact

SEQ ID NO: 35696 - DNA, 368 bp, Glycine max
  Clone ID: LIB3138-092-Q1-N1-B11
gcctttcctaatggagtgctgtgagcgcacggagaacgacaagaagggcgggcacttggctgagcgcatagccgacggccgcctcatccttcgtgagtctgcccagtgcgctgatgaagatgagaaggagttccagaacattactaagcatcgatacttcaacacaaacaatctatggatccgtctggacaagctccaggaagagctcaagcagcagggaggtgtcattcgtctgccgatgatcaagaactcgaagaccgtggaccccaaggactcaagctcgaccccggtgttccagctggagaccgctatgggtgctgccattgagtgcttcgacggggctggtgctgtttgtgtaccacgcaccc

SEQ ID NO: 35697 - DNA, 379 bp, Glycine max
  Clone ID: LIB3138-092-Q1-N1-B12
caaaattctccaattagtaacttattgagagttgctgcttggaagaaaggctgtttaatggtcaagattgtgatgtctgggaatgcagcagtcaaaaggagtgattgggcctcattggtacaagtgtttttaacaaacagcaacagtacagagcattttgatgcatgtaagtggacaaaatcagaaccacattcctgggaattgatcttcccaatagaggtatgtggtcctaataatggttttgaaatgtggagttctgagtgggcaaatcaaacttcatggcatttgagtttccttattgacaatcccaaacagtctacagtttttgatattctcttgggaatctctcaagattttgaaattgctggtaatactctta

SEQ ID NO: 35698 - DNA, 390 bp, Glycine max
  Clone ID: LIB3138-092-Q1-N1-B2
gtcttggagcatcccttgccgccaaggagacgggcgaagagcgaagaactgttctgttcgtcggagatggatctttgcagcttacgctgcaagaaatcggcacgatgcttcgacgcggcgtgcacccgtacctcttcgtcttgaacaacgacggatacgagattgagcgacaaattcacggagagaaggcggagtacaacgacatccagatgtacgaccaccaggccctccttccgttcctggcgggcaagaagtcgaaggtgccgtacgagtcgatcgaggtgcacacgcccgaggagctgtcgaagctgctgaaggacgaggcattcaacaagccggacaaattgaggctcatcgaggtgtacatgccgcgaggcgacgcgccggcgg

SEQ ID NO: 35699 - DNA, 384 bp, Glycine max
  unsure at all n locations
  Clone ID: LIB3138-092-Q1-N1-B3
gaaaagaagacacagaaacaaaacaatggcgactctgaatctgttctctcagccatggcaacctacaatttcacctttttgttgttctaatactaacaacaacaacaacgttgtttatgcttatcataatcataataattctaaattacatttcttttccaattctcgtcaattctctgttctttctcaattgtccaccaactcctcaaaatcagttagtggaagttcagggctgcagaacagttcctttgtttctggcattgagtacaggaagcgtcctctatattctgtatttcccacaaagcctgctcaagtttcctctgtggaagacctctatgaatntatttgctcgggacctttacttgacaaaataggcatcacaca

SEQ ID NO: 35700 - DNA, 387 bp, Glycine max
  Clone ID: LIB3138-092-Q1-N1-B4
gaaatgatgtctatggtgtataactggccagctgagcaggttgatatgattgtagttactgatgggagcagaatcttgggacttggagatcttggagttcaaggaattggcattgccattgggaagcttgatctatatgttgctgctgctgggataaatcctcaaagggtacttccggtgatgattgatgttggtactaataatgagaagttactcgaagatcccttatatttgggattgcagcagcatcgtcttgatggggatgattatcttgctgtagttgatgaatttatggaggctgtctttactcgctggccaaatgtgattgtgcagtttgaagatttccaaagcaaatgggcatttaagttattacagcggtatagaaat

SEQ ID NO: 35701 - DNA, 243 bp, Glycine max
  Clone ID: LIB3138-092-Q1-N1-B5
tcacattacattagattggtggtaatggcagcgtcactacaagcagcggctactttcatgcaggccaccaagttgagcaggagcaacactttgcagcaaaagtctactcagtccatttccaaggcttttggtttggaacctgttggagctaaaaaggtcacatgctcccttcatgctgatcttaatgacttggctcacaagtgtgttgatgctaccaaaattgcaggattttgccttgccacc

SEQ ID NO: 35702 - DNA, 386 bp, Glycine max
  Clone ID: LIB3138-092-Q1-N1-B6
gcaaaaagctgatgtgcctaccatagcacagattgaagagttccattcgatgcagaggatgatgaatgctcctgattcaaatgataatattgatttactgttgagcattgatttgttgggtttacaaggagcaggtaaagcttttccaaacaaaattgtttttgatgataagcttgtgttggctaacacacaagaattctttgatggaaattttccagtggattcttggttaccaatttttgtgaattgtctttatcctgtaagtcaattaccttcagaagctgtcgttgtaaatgttacatgtggtagtggacgtggtggtttacccaccactgcttggattagttctgcagttaacaatcgctcctcagatatcaacaaaagga

SEQ ID NO: 35703 - DNA, 386 bp, Glycine max
  Clone ID: LIB3138-092-Q1-N1-B7
ctagttttgatggtttgattaccaagcaagttatgagcaagatggcagaaatgataaacagtctttgtggtggtgatgaaaaattgatgcgtgaaaggacgcacctgctgttggcttgttgttcaaggatggcaatttgtaagaaagatgtttggagagttgaatgtggaatcccttctggatttccgctcacagttatttgcaatagcatttttaatgagatgctcattagatatagctatgaaaaattactgcgccaggctaaagctccaagtatgtttttacaatccttcaaaaattttgtttctttgtgtgtgtatggtgatgataacttaattagtgttcatgaatatgtcaagccttactttagtggttctaaattgaaa

SEQ ID NO: 35704 - DNA, 376 bp, Glycine max
  Clone ID: LIB3138-092-Q1-N1-B8
gaagtatcccaatgcaactcttttcagttccattgtttaacttttcagatacgcacctccagtgtggccctggctttgagcagtcttgcgcttctaaatctgaaaatccagcttcagcccacaaatcaaaattggcaaaaattgtacgttatgcaagttgtggtgcatttgcacttctgtgtcttggggctatctttacgtatcgacaccatcgaaagcactggcgaaaaagtgatgatgtctttgttgatgtttcaggtgaagacgagagtaaaattttttttcgggcaattgagaagattttcttggcgtgaactccaacttgccactaaaaatttcagtgaaggcaatgtaattggtcagggtggctttggaa

SEQ ID NO: 35705 - DNA, 341 bp, Glycine max
  Clone ID: LIB3138-092-Q1-N1-B9
ttcattccttaccccaactctgtttgttcctccctcgccgccgcagaatagctcagtgaatcgcgtcgtattttggagttggttgaagggttggattggagatttgggaagaaggtacagaacgagaacgtgggtctgcaaatgcagttgttggaggtttattggttgtgtctaacaactcatatttaatttaggggtgtgtgtctttctctcctagagcctagtgaagtagaagagatgagcgtgaaaaatgatgttcctgggaaagaagtaaacgtgctgaaaggtcacgagggtggtgtgttagccgcgaggttcaacaccgacggcaattatgttct

SEQ ID NO: 35706 - DNA, 357 bp, Glycine max
  Clone ID: LIB3138-092-Q1-N1-C1
cggagagagagtgatttttttgccataggctccgaccaatacatgtggttggctgacacttggctggtgcaataccacaactaaccccttgtctgtgacaatggaactggaatggtgaaagcaggatttgctggtgatgatgctcctagggctgtgtttcccacaattgatggccgacctcttcatactgctgttatggttgggatgggtcaaaaggatgcctctgtaggtgatgaagcccagtcaaaaagaggtattcttactttgaagtacccaattgagcatggtatagttagtaactgggatgacatggaaaagatctggcatgacacattttacaatgaattgcgtgttgct

SEQ ID NO: 35707 - DNA, 389 bp, Glycine max
  Clone ID: LIB3138-092-Q1-N1-C10
aagggtaattaatcaatgaagataccccatgaaggaattggaaggttccatcatcatcatcatcatgtcactgatcagcaatcactggctcctaggtttcatggaaatggtgtttctctcactcttggacttccacacagcactgagaataataataacctttccctctcaggaactactcatcaacatggattcctctcacagaacatgcacttgggaatgagatcaacaaccaataatgcgaataatgagttttgtggtgccatcaacactactccaccttctaattctcactcacgcaccagttatgagagcattgacattattcaaaacagaaagagatttgctgcgcagttgttgcgggatttcgtggcctaaaagaattgata

SEQ ID NO: 35708 - DNA, 382 bp, Glycine max
  Clone ID: LIB3138-092-Q1-N1-C11
ctttagagagatagagagaggaagaaagaatggcagcttgcactgtctactcaacacaatctctgagcacaaattgctccatctcaaccccatcaaagacgcaactcagttttttccaccaaaagcaggtagttttctggaggaacagcaagaagggcagctgcagcagcagaagaagctatgtgataacatgtgcagcaggtgactcacagacagtggtgattggcctggctgcagactcagggtgtgggaagagcaccttcatgaggaggctgaccagtgtgtttggaggagcagcagagccaccaaagggtggcaaccctgactccaacactctcatcagtgacaccaccactgtcatatgcttggatgattaccactc

SEQ ID NO: 35709 - DNA, 366 bp, Glycine max
  Clone ID: LIB3138-092-Q1-N1-C2
ttgatgatgggatgccatcagatgatgatgttcccagagaagctggtatctgatggcataacgtcgtcagcaaacaaccaagtgcagcaagggaagcttccgctcggcaagccaggaaaaatatgacaggaatccatctttggatgatgaacttgccaaaagccaaatccccaacaatatggagtcagctcgctcatactcaagggtgtgcccatctcatgtgctacatttacaaccaagagaggcctttgatgtcacaaatgtacctaacattgtcccaccatatgaacagtcagaatacgctgggaactggcgcacgcatttaactatgcacgatattgctggtcatgacgcgcggggccttca

SEQ ID NO: 35710 - DNA, 389 bp, Glycine max
  Clone ID: LIB3138-092-Q1-N1-C3
ccctgcttctgcttctgctcattcttctccttccacagggatggcttatgttccacatggaaatgcaaattgcaactctttattccaaaaatttgcaaattcccatgtgggtatttctgctttgcccttcctgcaaccgggactaaaatcttgtacagttttcaacagaggaacactcattcccctgtgcttaaatggaaagaggagctttgctttatcagaaaagggatttaattgcaagttttcaaagagagagagattctctatccctagaagtagtagttcttctaactctagtggaagtacggatgaaacctctaaggagacaaatgtaaagacaccatttggatatacaaggaaagatgtcctattaattggacttggagtta

SEQ ID NO: 35711 - DNA, 390 bp, Glycine max
  Clone ID: LIB3138-092-Q1-N1-C4
aatggatattatccgatggggtctgggttctactgcaatgcgtattagggagaagtacatctatcgtcagcctcagcaaagcaggcttgcccacttcattgacttaatggagatgttgaatccccatccacagccaaggaactggttggagctgcttccaggcaaatggcgtctattatactccactgggaagcatgtaggcctgacccttcgccaacctcctctccgtgtactcgtcagcgacgtgcatttaaccgtgacaagagaatcaaaattgaaagataatctttcatttggctctgacattggattctctgtaatgattggtcaggactggcctcatgacaaagctggtaagagtggaagattgcaggtgaattctttatttac

SEQ ID NO: 35712 - DNA, 392 bp, Glycine max
  Clone ID: LIB3138-092-Q1-N1-C5
aaaacactcataacacaaagcacaaagcaaagctcatccttgagttaaaaaatggcagcagcttcttccatggctctctcatccccatccttggctggcaaggccgtgaagctgggcccatcagccccagaagtgggaagggtgagcatgaggaagaccgtcaccaagcaggtctcctcaggaagcccatggtacggcccagaccgagtcaagtacttgggcccattctctggcgagcccccgtcctacctaaccggtgagttcccaggcgactacggctgggacactgctgggctttccgcagacccagaaaccttcgccaagaaccgtgaactcgaagtgatccactccaggtgggccatgctcggagccttgggctgcgtcttcccgga

SEQ ID NO: 35713 - DNA, 376 bp, Glycine max
  Clone ID: LIB3138-092-Q1-N1-C7
ctgagttacttctcctgatccatgttcggacgactgaatcagggtgccagacacttggctcgtccaatacccaactttgcgcatcgttccgccgtttcgttccgcccatcgataacgtcatcagtcatggcttcgacacagcaaaagagcctgatccacacggcaggttgtttggttatcggtgacgaagtccttggaggcaagacagtcgatacgaactcggcgtactttgccaaattctgcttctcattgggcatcaacttgcgccgcatcgaagtcattgcagatgatgaaggcgagattgtagaagccgtgcaacgcatgtccaagaactacgacatggtggtgacgagtggcggaattggtcctactcacg

SEQ ID NO: 35714 - DNA, 381 bp, Glycine max
  Clone ID: LIB3138-092-Q1-N1-C8
aatttttcatcgccttcacagccgctcgcacctacgcgtccgcgcccaagaagaaaaagatgcctcccaagaagcaagtccaggaggtgaagcttccgctcggcaggccaggaaacaacttgaagaccggtatcgttggcctagcaaacgtcggcaagtcgactctgttccaagccatcaccaagtgctctcttggtaaccccgccaacttcccatatgccaccatcgacccagaagagtcgcgcgtcattgtcccagatgaccgcttcgactggctggtagagcactacaagcccaagtcggtcgttcctgcccacttgaccatctacgatattgctggtctgacgcgcggtgcctccactggtgccggtctcggtaacg

SEQ ID NO: 35715 - DNA, 379 bp, Glycine max
  Clone ID: LIB3138-092-Q1-N1-C9
tcaagattcaggtactgcgtttcggaagcagacacagatggctcgtacgaagcaaaccgctcgtaagtccacaggaggaaaggctcctaggaagcagcttgcaaccaaggctgcacgtaagtctgcaccaactactggtggtgtgaagaagccccaccgttatcgtcctggtaccgttgctcttcgtgagattaggaaataccagaagagtaccgagcttttgatccggaagctccccttccagaggctggttcgtgaaattgctcaagacttcaagactgatctgcgtttccagagccacgccgtgcttgcattgcaagaagctgctgaggcataccttgttgggctctttgaagacactaacctgtgtgccattcac

SEQ ID NO: 35716 - DNA, 384 bp, Glycine max
  unsure at all n locations
  Clone ID: LIB3138-092-Q1-N1-D1
cagcaaggtaactgtttccggctatgtggaaccctcaaaggtggtttctcgcatcgctcaccggactggtaagagagcggagctatggccatacttgccgtacgacgtcgttgcgcacccttacgcgccaggtgtctacgacaggaaagcgccatctggctacgtgcgaaacgctgatgtagaccctcggctcaccaacctcgcacgtgccagctccactgaggtcaagtacaccaccgctttcagcgacgacaaccccgccgcatgtgtcgntatgtgattattcattttctctcttgtatcatagtagcaaagaaaaacatcaaatgttcacgtggggaacgcttttggcacaatggacatgtatcctttaaagtgatgttc

SEQ ID NO: 35717 - DNA, 384 bp, Glycine max
  Clone ID: LIB3138-092-Q1-N1-D10
cgaattttatcactggattaataattagcacatagttttttggaagagttgtgaaaatgggacttgtggagctttttggagtggcatctatgcccgtgatcaaagtactaataatcactgcagttggcttgcttcttgcactggataacgtaaatttgttgggaaaagatgcaaggatacaagtgaatcatcttgtgcattatgtgttcaatcctgcactggtgggtggcaatttggcggacacgattacttttgagaatgttgttttattgtggttcatgcccgtcaatatcctccttacgtttataataggttctgccttaggatggatccttatcaaattaacaagggctcccaaacacttggaaaggctaatattgggtg

SEQ ID NO: 35718 - DNA, 386 bp, Glycine max
  Clone ID: LIB3138-092-Q1-N1-D11
gtagtttcaatagcaatgacgatggagattcgggaaggtcgtggtgtaggacccctgaaagatcacatctatctccacttgaatcacttgcccccagatgtgctcaaagagagacttcctggcatctctgaaactgctgctatttttgctggtgtggatgttacaaaggaacccattcctgttttgccaactgtacattataacatgggcggtattcccacaaaccattatggagaggtggttaccattaaaggtgacaatccagatgcagtggtttctggattgatggctgctggggaaacggcctgtgcatcagtccatggtgccaataggcttggtgcaaattcacttctcgatattgttgtttttggtagagcttgtgcaaa

SEQ ID NO: 35719 - DNA, 368 bp, Glycine max
  Clone ID: LIB3138-092-Q1-N1-D12
gaagcagagaagttaacaaccaatggccaccatcattgcttcgtcctcatccactgtgctcttctctgcatcctcttcctacctcctcccattttcacacccttctacttcgcgcctttctttctcttcttccctttcctcctcctcctcttctctatcaatttctccttcttttttatcatacacttcttcaaattctacacactttgccactcatgctgccttcagcatcagtgccagcgccgccgagaagaagaaggtgctcatcgtcaataccaacagcggcggtcatgccatcattggcttttactttgcaaaagagcttcttggtgctggccactctgtcaccatactcactgttggcgatg

SEQ ID NO: 35720 - DNA, 371 bp, Glycine max
  Clone ID: LIB3138-092-Q1-N1-D2
gaaagatctcgcaatggttaaagttaatgtagcatgtgctgctgttggcttgacatcaagttacactccaactccattgttggaatctggtttgcaaaaagacagagggttaattgtggagtattttggaaggatgtcttacgttgctcataacgttaatcagccccaagagaaagatttgttggagggaaatttttcctttgatattaaatctcgctctagattggaaaaagtttcctctacaaaagcacaatttgttagtggaaaaaccttcaaatatgatataattggtgctggttcacattcttcagaagattttcctgaaaaggaagatcaagaaaaacccaaaaagattgatgccagattgagac

SEQ ID NO: 35721 - DNA, 387 bp, Glycine max
  Clone ID: LIB3138-092-Q1-N1-D4
ttgcaatttaaaaagttagcagattgtgattttctcaagagaaactttaagcagatgtctaatgttttgtgggtggctcctgaggacaaggcgagtttatggtcacaacttcattatgtttcgtgtaataatctggaaatgcaagaagcttatcttgtcaatctcgtaaatgtgttacgagaattgtatttgcacagtccagaggaagctcgccaattgagaaggaaagctctctctcgtattgaatggctgcaaaaagctgatgtgcctaccatagcacagattgaagagttccattcgatgcagaggatgatgaatgctcctgattcaaatgataatattgatttactgttgagcattgatttgttgggtttacaaggagcaggt

SEQ ID NO: 35722 - DNA, 379 bp, Glycine max
  Clone ID: LIB3138-092-Q1-N1-D5
gggttgtgaatattatatatctagccggtgggtttttggtatcttactaattatattatctagttcaagtttgaggtgtgtttgaggctggatttgaagaactttccagttagttatctcttatcttgaagaatcattttattatataattatattgaatattccagctcaagtggtttgtggatattgttctttgattttatatatgcttttttgcaaccttattattattcttcagtcgcttttctttgctcgattggaaaattttcctcttttcttttatgtgattttaactggcggtctttaaattggtgactgagacatgtggggatgggttctctctgagtaggattttagattgatacctcacacaaagcaa

SEQ ID NO: 35723 - DNA, 381 bp, Glycine max
  Clone ID: LIB3138-092-Q1-N1-D6
aagctggtgcagtttgtagagattcaggaaaaagttgtattgaaattttcacaagaggaatttcttacagcttggtcaactcaggtgcgtcctgcaacaactctgttggctgatgggtgtccatatttgtatgcaatggtgcatgatagttcagtgtctacaataccaggtgattttgtcattggtgtcaagttgacaaccataaacaatatgtgtgcatatgggctcaatcctggtatttcaggttctcgtcttttgggcaccattcctcagtccatttcacagcaaactgtttggaatcaaatggcaacagtgagaacaccattgaattttgattctagcaagcagagcttttgtcagttttctattgaccttctcggt

SEQ ID NO: 35724 - DNA, 387 bp, Glycine max
  Clone ID: LIB3138-092-Q1-N1-D7
gttatgaaatgtggtcacacaatgcaccatgaatgttacgtagagatgataaaaaatgacaaatattgttgtcccatatgctccaagtcagtgattgacatgtctaagacgtggaagagaattgatgaagagattgaagcaactgtcatgcctgaagattatcgaaacaggaaggtttggatactatgtaatgactgcaatgacacaacagaagtttacttccacattcttggccaaaaatgtggtcactgcagatcatataatactcgtgcagttgcgcctccagttcttccccaatgaccagattcttgggttcaagaagggaaaactgtcagcagaaaattaaagttagcaccctgttattattatagagggctattgaattaa

SEQ ID NO: 35725 - DNA, 273 bp, Glycine max
  Clone ID: LIB3138-092-Q1-N1-D8
gggcagcacggcaaccagggcacgtcgttcgaggaagagggcgacggctcgtcccgcctcgtgaccgagggcacgggcgaagaaggcacgtacaagccgtccgagcacggtggcaagcgcgaggacgggcagcccgacaagcgcgtcagctcggagcacggctttggcggcaacaaggatctcgcttccgaggcgggcaagaagggtggttcagcgagctacgacaatgggggcttgacgcagtaacaatgtacatgctattcgtctacagtg

SEQ ID NO: 35726 - DNA, 381 bp, Glycine max
  Clone ID: LIB3138-092-Q1-N1-D9
gcactccaacttaaccaactatctttctctcccttagcgtcctctttttttgacttcagtggaacccgacttcaaactcaacttcagttcaagagaaaactatgccatccaaaagggtctttctacgtctcggcatcgagcaccaagaaaatcctaataatgggaggcaccaggtttattggtgtgtttttatctaggctccttgttaaagagggtcaccaggtgactttattcacaagaggtaaagcgcctgtcactcaacagttgccaggtgaatcagacaatgattatgctgatttttcttccaagatcttgcatttgaaaggagacaggaaggactttgactttgtaaaatccagtctctcggcagagggatttgat

SEQ ID NO: 35727 - DNA, 359 bp, Glycine max
  Clone ID: LIB3138-092-Q1-N1-E10
catccatctttgccttctgcatgttggttctctgtaaacagatactgcaaaagaagaataatattgaatatttggttgggttgaatccctgggttgaagcgttgcagacatcacggctattctaagagtgtctcgctctctcattcatgtcccaactgtacgacggaggacaggttgcgtaactgccaccaacccttcgccgcacggtgggcgtggtgctttgccttctgaaggtggtagcccttcagacttgctcttcttagctggtggtggttctgctgtcttctagcttcttcttaactcttttttctttttactaactttaagctaccttgttttaaaaataccaaaacaaacac

SEQ ID NO: 35728 - DNA, 352 bp, Glycine max
  Clone ID: LIB3138-092-Q1-N1-E11
attcaattggtgccaggacaaaaatgtggtgactgtatttagtgcaccaaattactgttaccgatgtgggaatatggctgctatactagaaataggagagaatatggatcagaatttccttcagtttgatccagcgcccaggcaaattgagcctgacaccacacgcaagactccagattattttttataatttcatttatctgcctgtttgtagttactgctctctgccattactgtagatgtgtctttaaggaaaggagttttgctgtttaagtggagggtggtcatcaacataattctttcttttggagtttacctactgctgctgccgctgccgctgccttatttgtac

SEQ ID NO: 35729 - DNA, 372 bp, Glycine max
  Clone ID: LIB3138-092-Q1-N1-E12
atcgacaacgtttattcaaagatccaagacaaggaggggatccctttttatacagcaacgccttatctccgccggaaagcaactcgaggacggccgcaccctgtccgactacaacattcagaaggagtccacactgcaccttgtcctccgcctgcgcggtggtatgcaaatcttcgtcaagaccctgactggcaagaccatcacgctcgaggtggaatcaagcgacactattgacaacgtcaagtcgaagattcaggacaaggagggtattcctccggaccagcagcgtctcatcttcgccggaaagcaattggaagacggccgtactctctccgactacaacatccagaaagaatcgaccctgcatctcgt

SEQ ID NO: 35730 - DNA, 357 bp, Glycine max
  Clone ID: LIB3138-092-Q1-N1-E5
ctgtttcctgtgacttggagaatctttatcaggctgtgaatgatctttgcctttacaaaatggggggaaatctttatcaacgaattacaaaggagtgtgaagagcatatatctgtggcactgcagtctttagttggccaaagcccagatttgattgtttttctatccctagttgagaggtgttggcaggatctttgtgaccaactgttgatgattcgtggtatagccttgtttctggataggacctatgtgaaacaaacaacaaatgtacggtcattatgggacatgggtttgcaacttttcagcaaacatctttctctatcttcagaagtagaacataaaactgttactggtcttc

SEQ ID NO: 35731 - DNA, 326 bp, Glycine max
  Clone ID: LIB3138-092-Q1-N1-E6
caatatagcccaagttctatacaaccaaaccctaacacacacggcatgtgtttcatataacatggctagcctcaaggttgcatttttggctgcagagctctgcatggatgtggtgagtgcacccatggcacatgcagctatcacgtgcgggcaggtgacgaatagcctgatcaattgcatcggttacctccagaacggaggaacgccgccgtcgggatgctgcaacggagtgaagagcctcaatgccgccgccaagaccaccgccgaccgccagacagcgtgcaactgcctcaagtcagtcgccagccaaatattcggctttaaag

SEQ ID NO: 35732 - DNA, 296 bp, Glycine max
  Clone ID: LIB3138-092-Q1-N1-E7
gacattgtcagtattgcaatgcagtacttgatttctttggctgtggtgataaaaactaggggcggagtctactgcaaatacatgttggagcttatactagcactgcacctctattcaagctgactttaagcattttggaactgttcttccagtacaatagataaactgaaatagtatagtcttaagctctgtaatgagttctactcccccaccccccgaaatctgtaattaaatttatctcctctaaaaaagttaggttattaaaataaaaaattaaccatcaatatgaatatttt

SEQ ID NO: 35733 - DNA, 282 bp, Glycine max
  Clone ID: LIB3138-092-Q1-N1-E8
ggttattgattgcttgtgagaagctgaaaaagaatcccaagggggactggaaagatattaatttttttgaccaactaaaaattattagaaatgcaagaaaatttggacattaactttggattaaaaaattggttgaagttaacaattcttcaagtattggattaaattacaaacttttgggcattggtttagttcttggaccaccgttgggggtgaaggattgctttatttattgaatggggagcattttcaagttctggcacttcattgtacaagatacct

SEQ ID NO: 35734 - DNA, 376 bp, Glycine max
  Clone ID: LIB3138-092-Q1-N1-E9
ggctgatgatatcatcaattttgaggcttttccccacaggctggtgcattttggagagattcaggaccaccgttgtattgaaattttcacaagaggaatttcttacagcttggtcaactcaggtgcgtcctgcaacaactctgttggctgatgggtgtccatatttgtatgcaatggtgcatgatagttcagtgtctacaataccaggtgattttgtcattggtgtcaagttgacaaccataaacaatatgtgtgcatatgggctcaatcctggtatttcaggttctcgtcttttgggcaccattcctcagtccatttcacagcaaactgtttggaatcaaatggcaacagtgagaacaccattgaattttgattc

SEQ ID NO: 35735 - DNA, 373 bp, Glycine max
  Clone ID: LIB3138-092-Q1-N1-F1
gtttggaatcaaatggcaacagtgagaacaccattgaattttgattctagcaagcagagcttttgtcagttttctattgaccttctcggtggaggaatcttagtggacaaaactggagattggatcacacttatacaaaattctccaattagtaacttgttgagagttgctgcttggaagaaaggctgtttaatggtcaagattgtgatgtctgggaatgcagcagtcaaaaggagtgattgggcctcattggtacaagtgtttttaacaaacagcaacagtacagagcattttgatgcatgtaagtggacaaaatcagaaccacattcctgggaattgatcttcccaataaaggtatgtggtcctaaataat

SEQ ID NO: 35736 - DNA, 293 bp, Glycine max
  unsure at all n locations
  Clone ID: LIB3138-092-Q1-N1-F10
caactaactttttttaacttctttctctggggaacttctgcagttttataaaaattaaaggcaccaccacccttctcccttcaaagnttcaatggctgtttcaaccagcttctcgggtgtaaagttggaggctttgttgctgaaatgtggttcctccaatgctgccaccaccaccactcatatatcatgttttggcaaaaacagaaagacacttgttcagagtcagagaggggctattcggtgtgaggctacttatgcttctgatgttgaggctgatgccaccaagaaagctg

SEQ ID NO: 35737 - DNA, 297 bp, Glycine max
  unsure at all n locations
  Clone ID: LIB3138-092-Q1-N1-F11
gtggagcagctttgttcataaaaagggacctgaaaggttggcgtgtcatatagagatggggcgcgcaaccatcaacctntactatntgataggctcatgcctcgccggcagaacctccgactggataggtcggcgttacacgattgttttcgccggcgccatcttctttgtcggagcacttctcatgggtttctcccccaactattcctttctcatgttcggccgtttcgttgccggcatcggcatcggctacgccctcatgatagcccccgtctacaccggcgaggtctccccggc

SEQ ID NO: 35738 - DNA, 384 bp, Glycine max
  Clone ID: LIB3138-092-Q1-N1-F12
attcttcagtttattttcctgaaaaggaagatcaagaggggcggtttttataaagatgccagagggacccacccaatagatcctaaatacaatgaggttcaggctcagatggaaacaaatttgtttaaattgtctcttgatgatgttgaaactcctaaaggttccatgttggatctgaaaatttctcaatctaaaattgcacttcccaagaacacagttggaggaaccattctgcgtagtgatctattggcaaattttttgacagagggcaattttagagcaagtgttgatttgcagcgcactcatcgtattagaggaatgattaaaatgggggccacagttgggattcctgagaatacaagtatatcattggccctggctatg

SEQ ID NO: 35739 - DNA, 381 bp, Glycine max
  Clone ID: LIB3138-092-Q1-N1-F5
tcagaatcgcgttagggagaagaagagaaaatcgcaggtgaaaatgagcgtaacggtgaagaaagtaaccgatgtagcattcaaggtgggaaggaacatcgattgggatggaatggcgaagcttctcgtctccgatgaggctcgcagggagttctccaatctccgtcgcgctttcgacgaggttaactcccaactcgaaaccaagttcagccaggaacctgaacccatagactgggattactatagaaaaggaattggcactcgcttggtggatatgtacaaggagcattatgagagcattgaggtccccaagtttgttgacacagtaactcctcaatacaagactaaatttgatgccctattgattgagcttaaagaagc

SEQ ID NO: 35740 - DNA, 302 bp, Glycine max
  unsure at all n locations
  Clone ID: LIB3138-092-Q1-N1-F9
aacatgacgatttcttgaagaaaaaaaaaanaaaaagcccgcnattttttaaaaaaggggaaccgccccccccccaccgnaaagacngaaaagagnnacancgagactggagacaaggangacacagcagcngaacaagaaaggaagcgcaagaggggaacgaacggaacaagaacgaacngaacacagagacaagaaggaacaaagaagaaaacacaacaaacaaacaggaaggcaacaccaaaaaaaaaaacaaaagaaaaaaaaaaaaaagaaaaaaaaaaaaaaaaaaaagaagaggc

SEQ ID NO: 35741 - DNA, 311 bp, Glycine max
  Clone ID: LIB3138-092-Q1-N1-G1
tctacctctgccactttctgagtacaatacaacactgccatggctgcctcagtctccactattggagctgtcaacagagctccactgagcttgaacagctctgaagctggagattcggttcccagttcagccttctttggcacaagcttgaagaaagttactgcctcaagggtccctaacgtcaagatttcttctggaagtttcaaaatcgttgcggcggagaaagagattgatgagcaacaacagacaaacaaggacagatggaaaggtcttgcctatgatatttcagatgaccagcaagacatcacaag

SEQ ID NO: 35742 - DNA, 299 bp, Glycine max
  Clone ID: LIB3138-092-Q1-N1-G12
cttaggatatgttattcattaattaatgggtgtggctgactggctggtgatctgtagccgagggacttcctaaacccgctactatagactgcaacctactgaactaactcattccagtggctgtgtgccatgcattaagccacgtgaccagcaatgtcttattagctgcacatgctgtagcttacactcataccattaaagctcttgagccattcttcaatgctggctgcttcacagttcatacttggccaatcaattcctcatcactttgtttctgatactaggctaattgttgttat

SEQ ID NO: 35743 - DNA, 388 bp, Glycine max
  Clone ID: LIB3138-092-Q1-N1-G2
gtctttgtggtggtgatgaaaaattgatgcgtgaaaggacgcacctgctgttggcttgttgttcaaggatggcaatttgtaagaaagatgtttggagagttgaatgtggaatcccttctggatttccgctcacagttatttgcaatagcatttttaatgagatgctcattagatatagctatgaaaaattactgcgccaggctaaagctccaagtatgtttttacaatccttcaaaaattttgtttctttgtgtgtgtatggtgatgataacttaattagtgttcatgaatatgtcaagccttactttagtggttctaaattgaaaagctttctagctagtcataacatcaccattactgatggtattgacaaaactagtgcaacttt

SEQ ID NO: 35744 - DNA, 381 bp, Glycine max
  Clone ID: LIB3138-092-Q1-N1-G3
ccgattagaagtataaatttttctttgcgacaggaaaatagaagtatagatgtgactctttcccgttgtttatctttggacaggccagagcgtctcggcgaaaaatcaccgtaaagggatccgggtcgggtgggtaataactaatgtgttttgttttgggtatatagttcgagaaccatcgctgaaaggtgtcggaaataataatacgataagattgggtcactcactgtaaagaaatctttgcaatctaattaaatcatcaatagataaataaattaaaaaaataaaaaattctgcaacccgacgaacaccataaaagagctactcttgcacttctaaattcctttctttcatttcggtttccccattcaacgattctcg

SEQ ID NO: 35745 - DNA, 391 bp, Glycine max
  Clone ID: LIB3138-092-Q1-N1-G4
tggcaggaagattgtcgacgtgctcctcgagcaaaacattgttcccggtattaaagtcgacaagggtttggtaccccttgctggttccaacgacgagtcatggtgccaaggtcttgatggtcttgcctctcgctcggctgcatactaccagcaaggtgcccgtttcgccaaatggcgtactgttgtgagcatccccaacggtccctctgctctggcagttaaggaagctgcctggggtctggctcgctatgcagcaattgctcaagacaatggattggtcccaattgtggaaccagagatcttgcttgatggggagcatggtattgacagaacttttgaagtagcaaaaaaagtctgggcagaagttttcttctaccttgctgaaaacaat

SEQ ID NO: 35746 - DNA, 392 bp, Glycine max
  unsure at all n locations
  Clone ID: LIB3138-092-Q1-N1-G5
gccggcgcgcgctgaagtttgctaggttcatgagcaggttcgggaagagttaccgaagcgaggaagagatgagggagaggtacgagatattctcgcaaaacctcaggttcatccgctcccacaacaagaaccgcttgccctacactctctctgttaatcattttgctgattggacttgggaggagttcaaaagacacagactaggcgctgcccaaaattgctctgccactcttaacggcaaccacaagctcactgatgctgttcttcctcccacgaaagactggaggaaagaaagaatagtgagtgatgttaaagatcaaagcagctgcggatcatgctggacattcagcacaactggggctttagaagcagnctatgcacaagcatttggg

SEQ ID NO: 35747 - DNA, 82 bp, Glycine max
  Clone ID: LIB3138-092-Q1-N1-G6
ctcgagccgctcgagccgttttagcggctcgagaaaaaaaaaaaaggggggaatttaaaaaaagggggggaaaaccccacac

SEQ ID NO: 35748 - DNA, 64 bp, Glycine max
  Clone ID: LIB3138-092-Q1-N1-G9
aaaaaaaaactaacaaattaattttttatataaaaaaaaaaaaaaaccggcggtaatataaaaa

SEQ ID NO: 35749 - DNA, 386 bp, Glycine max
  unsure at all n locations
  Clone ID: LIB3138-092-Q1-N1-H1
gaagcttgttgctgctaggacatttcgagctggctctcttagtcttcgacagttaaaattcgcatctgtagatctggaacttcatacaaaatatgttccagggggacctgagtcgatctatgatgttgaccacagagtttctgagaaaacccaagtgattcctccattaccagaggataggttcctttgcagctttagccatatatttgcaggtggatatgcggctggatactatagttacaagtgggctgaggtgctgtctgctgatgctntctctgcatttgaggatgctggattggataatgacaagggctgtaaagaaacggngcgcaagttccgggagaccattcttgctctttgaggtggcaagccaccactagatgttt

SEQ ID NO: 35750 - DNA, 252 bp, Glycine max
  Clone ID: LIB3138-092-Q1-N1-H10
aaaaaaaaatttatttttaaaaaaaaaaaaaaaaaaaaggagggggaaaaaaaaaaaaagggaggggaaaaaaaaaaaaaaaaaaaaaaaaaaaaaaaaaaaaaaaaaaaaataaaaaaaaaataaaaaaaaaaaaaaaaaacaaaacatcaatcaatgtttaatctacaaaggggggcgaccctgttttaaaccgatcctttccggtcttaaaaaccacacgcgtatcttgaggatgttattttttttttt

SEQ ID NO: 35751 - DNA, 383 bp, Glycine max
  unsure at all n locations
  Clone ID: LIB3138-092-Q1-N1-H2
cttcccttgttctcacaaagtcacaatggaccccctctctctcttctgcaccggagccctcctcgccggcggcctctactggttcgtgtgcgttctgggccccgccgagcagaagggcaaacgcgccaccgatctttccggcggctccatctccgccgagaaagtccaagacaactacaaacagtactggtccttcttccgccgcccaaaagagatcgagaccgccgacaaagtccccgacttcgtcgacaccttctacaatctagtcacagacatctacgagtgggggtggggccagtccttacacttctccccctccatccccggcaagtnccaccgcgacgccacgcgccttcacgaggagatggccgtcgatctcatcg

SEQ ID NO: 35752 - DNA, 190 bp, Glycine max
  Clone ID: LIB3138-092-Q1-N1-H4
ataaggcacaatttgttgcttgaataacccctaaacctaagttatgggagctgacaaaatctgttacacacatatttctgaactgatatacatcgaactgccaagaaggtgacgcctgactgatacatagaatatagctttaatccagcgaggttcacgctcatatggagacaaatctgcatgaaccgat

SEQ ID NO: 35753 - DNA, 332 bp, Glycine max
  Clone ID: LIB3138-092-Q1-N1-H5
gctggttcacattcttcatatgattgtcctcaagaggacgatcaatgaaaactcaataagattgatgtctgattgagacaaatattagatgctcaatacaatgaggtgcaagctcagatggaaaaaaatttgtttaaattgtctctagatgatgtggaaactcctaaaggttccatgttggatctgaaaattactcaatctaaaattgcactttccaagaacacagttggaggaaccattctgtgtactgatctattgactaatattgtgacaaatggcaattgtaaaacaagtgttgatttgcaccgcactcatcgtattataggaatgat

SEQ ID NO: 35754 - DNA, 366 bp, Glycine max
  unsure at all n locations
  Clone ID: LIB3138-092-Q1-N1-H6
ttgtggaatccaaaaatgtgagggagctgcaactgcaaagtctccatggaatgcacctggtacttctgatcttttagtctcttttctttggctgacgtgttaggatattattttagaaaagtagtacctgcaacaagggttgacaagactgtctntcttgaattaattcacttttttttttttattattgcagagctctttgatctgtctgttcttgaaagtgagactattagggagtggctcttctttgataagcctcgaagagcatttgagagtggaaacagaaagcaaaagtcattgccagattatagtggacgtggttggcatgaatccagaaagcaagtgatgaatgaatttggagggctg

SEQ ID NO: 35755 - DNA, 385 bp, Glycine max
  Clone ID: LIB3138-092-Q1-N1-H7
gctgacgaggttgttgattgctctcatggcaagcagttgggggagctatgtcaacagaaatatgaacctttgtggctcaaaggaggaaatcactgtaatttagaactctatcccgaataccttcgacatctcagaaaattcatatcctcggtagaaaagccgccatcacaaagagtgagtttcaggagaagcatagacagagttgaacaatctagaggaagtactgattgctttgaaacaccgaggaagagtactgatcagagggacaaaccaaggaaaagtactgataggacagataaactaaaatttcatgaattcaaatttaacaatacggaaaagttagagaagataagagtccaatttgatcagatggagaagtcacgaa

SEQ ID NO: 35756 - DNA, 390 bp, Glycine max
  Clone ID: LIB3138-092-Q1-N1-H8
cacaaaactcagtttccaattcaccaaactcacaatggttgatctagattggcaaacaaagatggttcactccaacatcatgcctccaatgtcccccaaactctctctcccggatcataacattccaatcccaactttgcaactcccccttcgccaaaacgacatcaccgcagcgtcgtctcctatctgcgctgcatacgacaactaccttcgtctccctgagctcagagccctctgggcctccaaggacttccccaattgggccaacgagcccatcttaaagcccgccttacacgccctcgaaatcaccttccgcttactcgcaaccgttttctccgacccgagaccgtacatcaacaaacgcgagtggacccgacgcgtcgagtctct

SEQ ID NO: 35757 - DNA, 366 bp, Glycine max
  Clone ID: LIB3138-093-Q1-N1-A1
tgaattgtggaatcctgcttgcacaaaagcaatgactatgtcatttaatccaaacccgtgttctgatgcatggagtttggaatttctgaagcgtactggatttcattgcgatatcatttgtgtcactggatggactgccaccccaatgcaggatgttcaggttacaattgattggtttatttcctctcaggaatgtgttcccaggacctattgtgttttaaatccacaaaatccttttgtgttaaataggtggatgggaaaattgactttcccccagggcacttcccgaagtgttaagagaatgcctctttctatagggggaggagctggtgcaaagaatgctattctcatgaatatgccaaatgc

SEQ ID NO: 35758 - DNA, 368 bp, Glycine max
  Clone ID: LIB3138-093-Q1-N1-A10
cgaccagagacggccacgccgcagaagccgacgtacgagggcctggaggtggacaagggctctctgcccgccggcactaacccgctgccggttactacattgccacgtctgtggagccaaacgtgaaggacggagcggctaatgccaacgagactctgaccctgctcgcgcccaatgacaacgactatgccgcattcgagccgatcatctcgcagctggcctcgacgatcgactcgctcacgtcatcgctggcgaccccaagctcgggtgactctgcaaagatcttgaccaaagcgcaagacgacctcgcggcgttgagcgaccggctcatcgaagtgaagaaaactgagaaagagaggctggagaag

SEQ ID NO: 35759 - DNA, 373 bp, Glycine max
  Clone ID: LIB3138-093-Q1-N1-A11
gctggccactatcaaggtagagaagctcccggttaagatattgttgttgaataatcaacacttgggtatggttgttcagtgggaggatcggttctataagtctaacagggctcacacgtatctgggagacccctctaatgagaatgccatatttcctgatatgttgaagtttgctgatgcttgcgggataccggcagctcgtgtgaccaagaaagaagaccttagagcggcaattcagaaaatgttggacacccctggcccctatcttcttgatgtcattgtaccccatcaagagcatgtcttgcccatgattcctagcaatggaaccttccaggacgtgataactgagggtgatggcaggacaagttactga

SEQ ID NO: 35760 - DNA, 412 bp, Glycine max
  Clone ID: LIB3138-093-Q1-N1-A12
cgccaattgagaaggaaagctctctctcgtattgaatggctgcaaaaagctgatgtgcctaccatagcacagattgaagagttccattcaatgcagaggatgatgaatgctcctgattcaaatgataatattgatttactgttgagcattgatttgttgggtttacaaggagcaggtaaagcttttccaaacaaaattgtttttgatgataagcttgtgttggctaacacacaagaattctttgatggaaattttccagtggattcttggttaccaatttttgtgaattgtctttatcctgtaagtcaattaccttcagaagctgtcgttgtaaatgttacatgtggtagtggacggtgtggtttacccaccactgcttggattagttctgcagttaacaatcgctcctcag

SEQ ID NO: 35761 - DNA, 399 bp, Glycine max
  Clone ID: LIB3138-093-Q1-N1-A2
gcaggatgtgccccagtatgtccatggccaagttatgcaaactcttgtgcagagcacttgtacatcccctatttttgaagccaagagtacatatgtgggaaaatatgcaggatgttgcccccgctgaaaagttctaaaactgaacaaaaaatgatatgggtgaagcattgaaaagtttgccccaatttgaaaggggaatcagctgagcataatgatgaaacagaagataaatcagttacaattgtatcagatgctgcaaggtgcgacaaaacttctgaattaacagagttaaggccagaacaagactgtggtgttgctgaacctgaaactgaaaacgaggatgaaatcttaaaatctgagttagacggagacaattctcatgttagtatgatgcaagga

SEQ ID NO: 35762 - DNA, 400 bp, Glycine max
  Clone ID: LIB3138-093-Q1-N1-A3
tttctattgaccttctcggtggaggaatcttagtggacaaaactggagattggatcacacttatacaaaattctccaattagtaacttattgagagttgctgcttggaagaaaggctgtttaatggtcaagattgtgatgtctgggaatgcagcagtcaaaaggagtgattgtgcctcattggtacaagtgtttttaacaaacagcaacagtacagagcattttgatgcatgtaagtggacaaaatcagaaccacattcctgggaattgatcttcccaatagaggtatgtggtcctaataatggttttgaaatgtggagttctgagtgggcaaatcaaacttcatggcatttgagtttccttattgacaatcccaaacagtctacagtttttgatattct

SEQ ID NO: 35763 - DNA, 388 bp, Glycine max
  Clone ID: LIB3138-093-Q1-N1-A4
gattttctcaaattgctttcggttttcgttctgattctgcaaaatgatggagatggagcgcatcgttgaattccctcacacctacatggatcgacccccaagaaagagagcgcgtttgggctgggacatcgctgaggcccccaaggctcaggtaggattgttttgtggacaagaggttgagaatatttcaagctatgctccttcagaacatccccctagttctctgtttaagggagttgcccgaaatggttctcccccatggcgagatgatgacaaagatggccattacatgtttgagcttggagataatttaacttctcgctataagatccatagtaaaatgggcgaaggaacttttgggcaggtcttggagttgctggacagagaa

SEQ ID NO: 35764 - DNA, 410 bp, Glycine max
  Clone ID: LIB3138-093-Q1-N1-A5
ctcacttctaaatctcccagaccaatttaagagctcctttgactttattgatgggcatgttaaaccagtggttggaaggaaaatcaattggttgaaagctggacttatagaatcatggtttgtgataaccgttagtccaaactatgctaaagaactggtgtcaggtccagacaaaggagtggaattggacaacatcattcgcaaaattgatgatgatggtcgtttggttggaattgtgaatggcatggatgttcaggagtggaatccaaccactgacaaatatatagctgtcaaatatgatgtttcaacagtattggaagcaaaggctcttctgaaagaagccctccaagcagaagttggattgccagtcgacagaaatattcctctcattggtttcattggtaggcttg

SEQ ID NO: 35765 - DNA, 414 bp, Glycine max
  Clone ID: LIB3138-093-Q1-N1-A7
agcttatcttgtcaacctcgtaaatgtgttacgagaagtgtatttgcacagtccagaggaagctcgccaattgagaaggaaagctctctctcgtattgaatggctgcaaaaagctgatgtgcctaccatagcacagattgaagagttccattcgatgcagaggatgatgaatgctcctgattcaaatgataatattgatttactgttgagcattgatttgttgggtttacaaggagcaggtaaagcttttccaaacaaaattgtttttgatgataagcttgtgttggctaacacacaagaattctttgatggaaattttccagtggattcttggttaccaatttttgtgaattgtctttatcctgtaagtcaattaccttcagaagctgtcgttgtaaatgttacatgtggtag

SEQ ID NO: 35766 - DNA, 342 bp, Glycine max
  Clone ID: LIB3138-093-Q1-N1-A8
ctcaggcttccattgcaggatgtctacaaaattggtggtattggtaccgtgccagtgggacgtgttgagactggtgtcgtgaagcccggtatggtggtgacttttggtcccactgggctgacaactgaggttaagtctgttgagatgcaccatgaggctctcacagaggctcttccaggtgacaatgttggctttaatgtgaagaatgttgcagtcaaggatctcaagcgtggttttgttgcatccaactccaaggatgaccctgccaaggaagctgccaacttcacatctcaagtcattatcatgaaccaccctggccagattggaaatggatacgcaccg

SEQ ID NO: 35767 - DNA, 406 bp, Glycine max
  unsure at all n locations
  Clone ID: LIB3138-093-Q1-N1-A9
atacggcctggttgtattgttttgaccatttatctgcgtcaggctgaggcgttgtgggaggaactttgctatgatctgacttccagtttgaataggctgttggatgtctcagatgatactttttggagaaatggatgggttcacatcagggtgcagcatcagatggccttcatttttaatggtcaagttgtcatagatacctccttacctttcagaagtaacaattatagcaagattttgactgttagtccaattgctgtaccagcatcaaagagagctncaatttctgttaagggtgtcaacctgatacgccctgccactaggntaatgtgtgctntagaagggaaatatctggtctgtgaagatgatcatatgtcaatggatcaaatgctcaaagaacctgatg

SEQ ID NO: 35768 - DNA, 327 bp, Glycine max
  unsure at all n locations
  Clone ID: LIB3138-093-Q1-N1-B1
aatccaacctgtggtttgggaattggcctagatgatcccattctttaccatatacttgaatgctatgattgtgcttagtacttgttaatgataaaacttttatatttctgctcatctatttttaccaccatggcctagttttaattttttttacttgtttggtttgaaacacgtgccatcttttgtgattgctccatgactgtcactgaacattagagaacaaaaagttgtgaacaatgactaatggcaaacaatcatggagaacaaggcattgcatggagaatctgttttcctcgcctgattgaataacaaactttatntgntnaa

SEQ ID NO: 35769 - DNA, 403 bp, Glycine max
  Clone ID: LIB3138-093-Q1-N1-B10
agcacaaccaacacctccacagcctctcctacctcccggagccatggccgccgccgactcctccgccgctccatcgcaccagttgtcgcagagggagacggacatccagatgatgctcgccgccgacgttcacctcggcaccaaaaactgcgactttcagatggaacgctacgtcttcaagcgcagaaccgatggtatttacataattaaccttggcaagacatgggagaagctccagctcgctgctaggattattgttgccattgagaacccacaggatatcattgttcagtctgccaggccttatggtcagagggcagttcttaagtttgctcaatacactggtgctcatgcaattgccggaaggcacactcctggaacattcactaatcagatgcagcaa

SEQ ID NO: 35770 - DNA, 364 bp, Glycine max
  Clone ID: LIB3138-093-Q1-N1-B11
agaggtacttgctcacagatatattttttttttttgtctccatcattttctcgagagctttcagtttctgtggttcatctttcttcttcttaatctttccccccctctctgtaacatcccgcttctctgaatccctttctgctaatcatctgtctttcaagctaagattttctggtttgtcttttaattcaccaaaaagcaaacttagaaggatttttcgaaagccaggtgttttcagaaacgagatccaggttttattgtcgaatttcgctagtcatattaatatttcatcatttttttttcctttgaaaccagccaagagggttatttttgatccctcaaagctaatttctcattttctttt

SEQ ID NO: 35771 - DNA, 408 bp, Glycine max
  Clone ID: LIB3138-093-Q1-N1-B12
ggcctcttcagtgatggcatctgtggccctcaaacctgcccctttcactgttgagaagtcctcagttagaggccttccctccctctcaaggaactcctcttcattcagagttgtggccagtggtggcaagaagatcaagactgacaagccttatggaattaatggtggcatggctttgagggaaggagttgatgcatctggcaggaaaggaaagggaaagggcgtttaccagtttgtagacaaatacggtgctaatgtcgatggttacagtcctatctacgacaccaaggactggtctccaaccggtgatgtctacgctggcggtacgactggcttggctatctgggctgtgactctacttggtcttcttgctggtggtgcacttcttgtctacaacacaagtgcttt

SEQ ID NO: 35772 - DNA, 397 bp, Glycine max
  Clone ID: LIB3138-093-Q1-N1-B3
ttttcttcaaaaatttgccatcgttgaaagaagcgtgagagccttagtcgttcaagatgagagctaagtggaagaagaagcgcatgaggaggttgaagaggaagcgccgaaagatgagacaaagatctaagtaggtgcttgagcaggagttgagatgagctttccatctgctaccagcctcatgacattttaggctgttatggctcttatgatcttgaggtctagtcgctaggggagcttcactcttgacttagtttgctttactggtcctggtcctggtccaagactattgagtgtgggttaagttgtgatgtttagtgttttgtggtatctaattatgtactggtttttatactttttggttgaatagctatatattagtatcgagacttccatg

SEQ ID NO: 35773 - DNA, 406 bp, Glycine max
  Clone ID: LIB3138-093-Q1-N1-B4
aaatttggctgatgataccatcaattttgaggcttttccccacaagctggtgcagtttggagagattcaggaaaaagttgtattgaaattttcacaagaggaatttcttacagcttggtcaactcaggtgcgtcctgcaacaactctgttggctgatgggtgtccatatttgtatgcaatggtgcatgatagttcagtgtctacaataccaggtgattttgtcattggtgtcaagttgacaaccataaacaatatgtgtgcatatgggctcaatcctggtatttcaggttctcgtcttttgggcaccattcctcagtccatttcacagcaaactgtttggaatcaaatggcaacagtgagaacaccattgaattttgattctagcaagcagagctttttgtcagtt

SEQ ID NO: 35774 - DNA, 397 bp, Glycine max
  Clone ID: LIB3138-093-Q1-N1-B5
gattttgctcaaaaatgtgtcgacgccaccaaaattgcaggattcgcccttgccacctcagctctcgttgtttctggagcgagtgcagaaggtgttccaaagaggctaaccttcgacgaaatccagagcaagacatacttggaagtgaagggaactggaactgctaatcagtgcccaaccattgaaggtggagtggactcatttgccttcaaggcagggaaatacaaggcccagaagttgtgcctggaaccaacttccttcacggtgaaggcagagggtgtggccaagaatgccccgctcgaatttcagaacaccaagctcatgactcgtctgacctacaccctggacgagatcgagggtcccttcgaggtttcatccgatggaacggtgaaattcg

SEQ ID NO: 35775 - DNA, 408 bp, Glycine max
  Clone ID: LIB3138-093-Q1-N1-B6
ctagttttgatggtttgattaccaagcaagttatgagcaagatggcagaaatgataaacagtctttgtggtggtgatgaaaaattgatgcgtgaaaggacgcacctgctgttggcttgttgttcaaggatggcaatttgtaagaaagatgtttggagagttgaatgtggaatcccttctggatttccgctcacagttatttgcaatagcatttttaatgagatgctcattagatatagctatgaaaaattactgcgccaggctaaagctccaagtatgtttttacaatccttcaaaaattttgtttctttgtgtgtgtatggtgatgataacttaattagtgttcatgaatatgtcaagccttaacttagtggttctaaattgaaaagctttctagctagtcataaca

SEQ ID NO: 35776 - DNA, 277 bp, Glycine max
  unsure at all n locations
  Clone ID: LIB3138-093-Q1-N1-B8
gtttcaacctcatcgtcatcgaactacccacgttctgctccttcgcagatcatttcgcgtttagcttccacgaaagatggcagacaatgaggatggaggggataagacatctcgtgggaatgaatgggaggttgtatctctcacagcatcaacatatgcagctgctcctggtcctgatgaagttgagaatgaggatgatgggaaaagaagatgtataatgggcaggatgaaaggagaaaacgtcacaatgcctnttattcaatgtctaggacacttt

SEQ ID NO: 35777 - DNA, 422 bp, Glycine max
  Clone ID: LIB3138-093-Q1-N1-B9
ccacatccatctttgccttctgcatgttggttctctgtaaacagatactgcaaaagaagaataatattgaatatttggttgggttgaatccctgggttgaagcgttgcagacatcacggctattctaagagtgtctcgctctctcattcatgtcccaactgtacgacggaggacaggttgcgtaactgccaccaacccttcgccgcacggtgggcgtggtgctttgccttctgaaggtggtagcccttcagacttgctcttcttagctggtggtggttctgctgtcttctagcttcttcttaactcttttttctttttactacttttaagctaccttgttttcaaaataacaaaaacaaacactttcttacttcataagatcaccttttcttcatcttctacttctccttcactaaaatgat

SEQ ID NO: 35778 - DNA, 385 bp, Glycine max
  Clone ID: LIB3138-093-Q1-N1-C1
aatcaattccatttgaattcaaaattaaaagggaaaaaggaaaaggtaaggacctttcaccacatggttgtttcaatcccatttacaggtttcaactcctcaagggtgcttcccattcctagagaaccacaccacccattttcccatttgctctcaaacatgtcaaagtttgcatctttgagaaccccttcttcttcttctgcttcttcttcttcttcttctgggtcttgctctctaaccaaagacccttactctgttgtcccattggaggaacatagcaaaatggataatgggtcggttctgcttcagagccccgattcgtttgggaggtttggcaagttttgagggaagtatgtccctgagactctgatgcatgctctcactg

SEQ ID NO: 35779 - DNA, 279 bp, Glycine max
  Clone ID: LIB3138-093-Q1-N1-C10
attttaacaagagtagcggtgtggtgagtgtgagtactgatagcgaagagcttagtagtagctacaaagagagtgataagttgatgtctgggactgttttctctgagattgtggatccaaagccacgttgagagaatcaaattgatctcaagaatgaagacctaatactactagggctagcttgaggctcgcaagttatgtgtttagtttcataatatatagttgtaatattacaatgtctgtgtacagaaatcaagttgcttctatctcttgggaatc

SEQ ID NO: 35780 - DNA, 377 bp, Glycine max
  Clone ID: LIB3138-093-Q1-N1-C11
cagcagtcaaaaggagtgattgggcctcattggtacaagtgtgtttaacaaacagcaacagtacagagcattttgatgcatgtaagtggacaaaatcagaaccacattcctgggaattgatcttcccaatagaggtatgtggtcctaataatggttttgaaatgtggagttctgagtgggcaaatcaaacttcatggcatttgagtttccttattgacaatcccaaacagtctacagtttttgatattctcttgggaatctctcaagattttgaaattgctggtaatactcttatgccagctttttctgttccacaggctactgccagatcttctgaaaatgcggaatcctctgcatgatctggaatttgtgttttc

SEQ ID NO: 35781 - DNA, 410 bp, Glycine max
  Clone ID: LIB3138-093-Q1-N1-C12
aaacatcccttctttcatctttcaactctctctctcccccccgctttctctcacacacaaatgtctaaaataacaataacctctccaaaacactgtgctgacaaagaaggactaaaaatcaagaactacaagaagatctacttcactttctcagcatttttcatcacaatcctactactaatacttgttatatggctcatcctccaccctgcaaagcctcaattctccctcaaagaagtcgacatcttccaacttaacctttcaggcccaaacctcaactcctccatccaactcaccctcctctccaaaaacccaaaccagaaagttggcatttactacgacgagattcaactctatgcaacctacaagggccaacaaattactggtgatacccctgtgccaccctttta

SEQ ID NO: 35782 - DNA, 420 bp, Glycine max
  Clone ID: LIB3138-093-Q1-N1-C2
gttccattcgatgcagaggatgatgaatgctcctgattcaaaggataatattgatttactgttgagcattgatttgttgggtttacaaggagcaggtaaagcttttccaaacaaaattgtttttgatgataagcttgtgttggctaacacacaagaattctttgatggaaattttccagtggattcttggttaccaatttttgtgaattgtctttatcctgtaagtcaattaccttcagaagctgtcgttgtaaatgttacatgtggtagttggacggtgggtttacccaccactgcttggattagttctgcagttaacaatcgctcctcagatatcaacaaaaggattcgcacagcacttgggaaaagtaagaaaattgtttttcttactagagttgatccttttccagtagctttact

SEQ ID NO: 35783 - DNA, 424 bp, Glycine max
  Clone ID: LIB3138-093-Q1-N1-C3
tgggaatgcagcagtcaaaaggagtgattgggcctcattggtacaggtgtttttaacaaacagcaacagtacagagcattttgatgcatgtaagtggacaaaatcagaaccacattcctgggaattgatcttcccaatagaggtatgtggtcctaataatggttttgaaatgtggagttctgagtgggcaaatcaaacttcatggcatttgagtttccttattgacaatcccaaacagtctacagtttttgatattctcttgggaatctctcaagattttgaaattgctggtaatactcttatgccagctttttctgttccacaggctactgccagatcttctgaaaatgcggaatcctctgcatgatctggaatttgtgttttctttcgcttgttcgtttgtttaattcaataaaggaaatta

SEQ ID NO: 35784 - DNA, 415 bp, Glycine max
  Clone ID: LIB3138-093-Q1-N1-C4
ccataatggaggaggtcatttatgaagatctcccatcaaacttgtctgcaataagagactatattgagaacatgaatgcatcaaaatcttctgaagtttgtgagcagaatacgaattcagggcaacaaattgtttcatcaggctctcaaaaagatgacaactctggttcaactgaggaagttcctcattgcgacgttcgatgttcatctcagcaaagatctaaagtgccaggcttacagaggaatattaaagtactagaatctgaactactgaaattcattgcagaacatggacaggaaggatttatgccaatgaggaagcaactccgtttgcatggaagagtggatattgagaaggctataactcgcatgggtggattcagaaagattgcaaccatattgaacctttctttggc

SEQ ID NO: 35785 - DNA, 415 bp, Glycine max
  Clone ID: LIB3138-093-Q1-N1-C6
aagcaactgtgttacagcaatgccaaaggagaggcctaccatgtttgaagtataccagtttctaaaagccattgggattaattacaatttcacaattgaggatgagatcatgctccctatagacactggtgatgctgataacttagaagaacttattgtagctcgagagggacataattgaaaaggtatgcgagatataattagggcatgtaatcaattttaatatgtaagtatctcttgccttgtggtcctaaaataaatgttagtgctatatataggttttatggtccagatccatttgtgtgctatcaatattgaaacatcaatttaatatcatcaaccatgaatgcccattatatataggtgacttggttataatccctattttgctctaatttccttgttctctcccttg

SEQ ID NO: 35786 - DNA, 272 bp, Glycine max
  Clone ID: LIB3138-093-Q1-N1-C7
gcaatgagtgtgtttaaatataaaaaaaaaaaaaaaaaagagagaaaaaaaaaaaaaaaaaaaaaaaaaaaaaaaaaaaaaaaaaaaaaaaaaaaaaaaaaaaaaaaaaagaaaaaaaaaaaaaaaaaaaaaccagaaagtaaaaaaaaaaaagcgaaaaaaaaacagaaaaaaaacaacggcaaaaaaaaaaggaaaaaacaaaaacatttatcacataaaatacgaaacccaatgcccaaacaagaaacgccaccggaataacaaaaaga

SEQ ID NO: 35787 - DNA, 414 bp, Glycine max
  Clone ID: LIB3138-093-Q1-N1-C8
accacaccatggtctaaaccaacgctatctctaaaggcgtcattctacgctctaccaaccgccagtctatgacccgaagagcgaaccataatggtagagtcaattaccggataccgaatcaccgtttgtccgtgaaagccttcgccaaagagattggcttcgaccagcattgccgctctgctatgcaggccggcatagacaagctcgacgacgctgttgggctgactcttgggcccagacggaggaatgttgttttggatgaattatgaagtcctaaaatggccaacgatggagtcaccattgctcgcgcaatcgagcttaccgatcctatggagaatgctggcgcagctattatcagataggttgatagcaagactaacgactcttcgaatgatgggactaccacgggttccg

SEQ ID NO: 35788 - DNA, 421 bp, Glycine max
  Clone ID: LIB3138-093-Q1-N1-C9
agcattttgatgcatgtaagtggacaaaatcagaaccacatggctgggaattgatcttcccaatagaggtatgtggtcctaataatggttttgaaatgtggagttctgagtgggcaaatcaaacttcatggcatttgagtttccttattgacaatcccaaacagtctacagtttttgatattctcttgggaatctctcaagattttgaaattgctggtaatactcttatgccagctttttctgttccacaggctactgccagatcttctgaaaatgcggaatcctctgcatgatctggaatttgtgttttctttcgcttgttcgtttgtttaattcaataaaggaaattaggcatgaccctcttgttgagtatgctctgcctatttgaaaattttcacacctcttttaattgtcgtaatga

SEQ ID NO: 35789 - DNA, 406 bp, Glycine max
  Clone ID: LIB3138-093-Q1-N1-D10
cagcatatcagaggaggaattaaaacaaaaatttggaacttcaaaggagattatgaaatcagttgcttgtactttggaagggagaacttattcgtataatgatattaatatttcgaacgttgttgacgtagcaagccaagttgctggttgtgcatatgaatatggcactggatggggcaaacagatggcttggatatatggatcagtcacagaggatgtgctcaccgggctgacaatacataaaaaaggttggagatcagaattctgtatgccaagcccaattggcttcacaggttttgctccaggaggtggcccaaattcaatggcccaacaaaagagatgggccacaggattgcttgagatgttcttttgcaagcattgccctattattagcacactttttcat

SEQ ID NO: 35790 - DNA, 380 bp, Glycine max
  Clone ID: LIB3138-093-Q1-N1-D11
ctcgagccgaacaagaaagattgaccatagagttctggcgggaagctgacatactttccaagcttcaccatccaaatgtggtggcattttatggtgtagttcaggatggaccaggagcaacattagcgactgttaccgagttcatggtggatggttctcttaggaatgttttgcttcgtaaggataggtatcttgatcgccgcaagaggctgataattgccatggatgctgctttcggaatggaatatttacactcaaaaaatattgtgcattttgacttgaaatgtgacaatttgctcgtgaacttgaaggatcctatacggccaatatgcaaggttggcgattttggcctatcaaagattaagcgaaataccttggtg

SEQ ID NO: 35791 - DNA, 421 bp, Glycine max
  unsure at all n locations
  Clone ID: LIB3138-093-Q1-N1-D2
tgggtgtccatatttgtttgcaatggtgcatgatagttcagggtgtacaataccaggtgattttgtcattggtgtcaagttgacaaccataaacaatatgtgtgcatatgggctcaatcctggtatttcaggttctcgtcttttgggcaccattcctcagtccatttcacagcaaactgtttggaatcaaatggcaacagtgagaacaccattgaattttgattctagcaagcagagcttttgtcagttttctattgaccttctcggtggaggaatcttagtggacaaaactggagattggatcacacttatacaaaattctccaattagtaacttattgagagtngctgcttggaagaaaggctgtttaatggtcaagattgtgatgtctgggaatgcagcagtcaaaaggagtgattgg

SEQ ID NO: 35792 - DNA, 396 bp, Glycine max
  unsure at all n locations
  Clone ID: LIB3138-093-Q1-N1-D3
tgaaaacaccaagtgaatctacacttattagagacttgtcattgacgatcaaggaaaaggatagtttactggtaatgggaccaagtggaagtggcaagacttctttgttaagagctatggctggtctatggaaaactggaactggaaagatcacatactatgtaaaaggtggagaatatcctgagcaatccatttgttcagatgtgaatactccagtaaataatgctaatgacacatatgaagcacgtggaaaatgcttaagcagaaaatctggaatttttttccttccgcaaagaccgtatatggttntgggtacccttcgtgaacaattaatgtatccaacttggacagatgacgtagttcctatgtcagacagtactaaaagaaaaaatgcac

SEQ ID NO: 35793 - DNA, 399 bp, Glycine max
  Clone ID: LIB3138-093-Q1-N1-D4
tgggaattgatcttcccaatagaggtatgtggtcctaataatggggttgaaatgtggagttctgagtgggcaaatcaaacttcatggcatttgagtttccttattgacaatcccaaacagtctacagtttttgatattctcttgggaatctctcaagattttgaaattgctggtaatactcttatgccagctttttctgttccacaggctactgccagatcttctgaaaatgcggaatcctctgcatgatctggaatttgtgttttctttcgcttgttcgtttgtttaattcaataaaggaaattaggcatgaccctcttgttgagtatgctctgcctatttgaaaatttccacacctcttttaattgtcgtaatgatgtgtgaagtgtgtgttatttt

SEQ ID NO: 35794 - DNA, 412 bp, Glycine max
  Clone ID: LIB3138-093-Q1-N1-D5
gttggatctgaaaatttctcaatctaaaattgcacttcccaagaacacagttggaggaaccattctgcgtagtgatctattggcaaattttttgacagagggcaattttagagcaagtgttgatttgcagcgcactcatcgtattagaggaatgattaaaatggtggccacagttggtattcctgagaatacaggtatatcattggcctgtgctatgaatagttcttttagggggcgcgccagttctgatatttacaccatctgctctcaagactgtgaattgtggaatcctgcttgcacaaaagcaatgactatgtcatttaatccaaacccgtgttctgatgcatggagtttggaatttctgaagcgtactggatttcattgcgatatcatttgtgtcactggatggact

SEQ ID NO: 35795 - DNA, 408 bp, Glycine max
  Clone ID: LIB3138-093-Q1-N1-D6
atctgtttcccgccatatatccaataagctttaaccatgtctgccgttgttggaaagtacgcagatgagcttatcaagaatgccaagtacatagccacacctgggaagggcatcttggcagcagatgagagcactggcaccattgggaagcgcctatcgagcattaacgttgagaacattgaggccaaccgccaagctcttcgcgagcttctcttcaccgctccagatgccctccaatacctctctggtgtcatcctctttgaggaaactctttaccagaaaacctccgatgggaagccttttgttgaggtccttcaagagaacaatgtcatcccaggcatcaaagtggacaagggtgttgttgagttggctggcacaaatggtgaaaccaccactcagggattcgac

SEQ ID NO: 35796 - DNA, 415 bp, Glycine max
  Clone ID: LIB3138-093-Q1-N1-D8
tcaaggcagcaccgttttaacccaagcagcaacacaagatccgtctgtcaatcaagttccctacaccacagcacggttatccccttctcagttcaattactccttccccgtttctgcgggccccaaattcgttcgcctcttcttctacccggctgattacccttcctttccccgcactgatgcctctttctccgttcaatctaacggattcaccttcttaaaaggtttcaacgcctctctaaacgctgacgcggaagccaccaaaaccatcttcagggaatatgtggtcaacgtcaacgacggtgagactctcatcctcagcttcactccctcgcaaccaaactcctacgctttcatcaatggaatcgaggtgctttccatgccaagtgatttgtattacacgtcagcaactgac

SEQ ID NO: 35797 - DNA, 417 bp, Glycine max
  Clone ID: LIB3138-093-Q1-N1-D9
gcatgatagttcagtgtctacaataccaggtgattttgtcattggtgtcaagttgacaaccataaacaatatgtgtgcatatgggctcaatcctggtatttcaggttctcgtcttttgggcaccattcctcagtccatttcacagcaaactgtttggaatcaaatggcaacagtgagaacaccattgaattttgattctagcaagcagagcttttgtcagttttctattgaccttctcggtggaggaatcttggtggacaaaactggagattggatcacacttatacaaaattctccaattagtaacttgttgagagttgctgcttggaagaaaggctgtttaatggtcaagattgtgatgtctgggaatgcagcagtcaaaaggagtgattgggcctcattggtacaagtgttttt

SEQ ID NO: 35798 - DNA, 407 bp, Glycine max
  Clone ID: LIB3138-093-Q1-N1-E10
ccctgacctgccattgaagatgaatctaatgaagctaagggtaaatcatcttctgagttgagttgattgggtacagaaacgcagcgtttagagcaccagcgaaactcttttgcacgaacaatgaagcttcagattttcacccaactaaaccaatctcaaaaatccgcattggcggtggttttcgtcattctcttgccgcctttctttcccaatcttttccaacctctcggtcgttcttcgccttctgtgttctctgagtggaatgctccgaggcctatgcacgtggctttgctagagggtgctttgcaacgccaaacttcagttgaacttcaaactagtctctggtctcccttggctttccaaggatggaaaccttgcactgagcgtccaaaaccacactcactacc

SEQ ID NO: 35799 - DNA, 360 bp, Glycine max
  Clone ID: LIB3138-093-Q1-N1-E11
cggctcgagcaatcaatgaaaaaacccattaaaaaatgtgttgaaattgaaaaaacccattaaatgatctttgggaggaatatagcagcatgatccattggagtatttgctggttgaatttggtattgctgagaagctcttctaagacaattttatgttgtcgatatttatttattatgacaatcactagtacatatacttttactacccaactcatacccaattaggacaatagtacaagacttgtgttggccttgtgtctgttgcattagtgaacccatatcaggtgaactgaaactgatcaacgaagcactgcaggttcagcatattataaagtcaaggtgtcactattttttcttc

SEQ ID NO: 35800 - DNA, 168 bp, Glycine max; identical to SEQ ID NO: 29971
  Clone ID: LIB3138-093-Q1-N1-E12

SEQ ID NO: 35801 - DNA, 386 bp, Glycine max
  unsure at all n locations
  Clone ID: LIB3138-093-Q1-N1-E2
ctttgggggggtgatgaaaaattgatccttgaaaggccccaccggctgttggcttgttgttcaaggatggcaatttgtaagaaagatgtttggagagttgaatgtggaatcccttctggatttccgctcacagttatttgcaataccatttttaatgaaatgctcattaaatatagctatgaaaaattactgccccaggctaaagctccaagtatgtttttacaantccttcaaaaatnttgtttctttgtgtgtgtatggtgatgataaacttaattagtgttcatgaatatgtcaagccttactttagtggttctaaattgaaaagctttctagctagtcataacatcaccattactgatggtattgacaaaactagtgcaact

SEQ ID NO: 35802 - DNA, 421 bp, Glycine max
  Clone ID: LIB3138-093-Q1-N1-E3
gaaaagagttacttcatcatcatcatcaacatgagtcgcttcaacagtcagcaagaatcccctggtgagttttgattatatcattcagcataatgttagcaaaatggtttcatgtgtgaagtttcttttgatccaaatagattgacaccatatttgcatgctcaatgttcattcaataatatgtactttcttttacataaagcttaagctaaaattaatttgttacttttcatgagaaatgtgagtgtatttctaaatgggattaatgacatgatattatgatgcagcagtatcatatcctccagcactgtatgttagtgccccaccacctatgggttatccttccaaaggtgatcctacagctgtagggtacccccaacaaagagttccagaagaaaccacaagcaggggtgatggattt

SEQ ID NO: 35803 - DNA, 414 bp, Glycine max
  Clone ID: LIB3138-093-Q1-N1-E4
gtgcaagggcagcagcactcaacattgtccccacttcaacaggagcagcaaaggcagtggcccttgtcctcccaaccctcaaaggcaaactcaatggcattgcactccgtgtgccaacaccgaacgtctcagtggtggacctcgtcgttcaggtctcaaagaagacctttgcagaagaagtgaatgcagcattcatagagagtgcagacaatgagctcaagggaatcctctctgtgtgtgatgagccacttgtgtccgttgacttcaggtgcactgatgtgtcctcaaccgttgactcctcgttgaccatggtcatgggagatgacatggtgaaggtcattgcttggtatgacaatgaatggggctactcccaaagggttgtggatttggctgacattgttgccaacaaatgga

SEQ ID NO: 35804 - DNA, 412 bp, Glycine max
  Clone ID: LIB3138-093-Q1-N1-E5
ctcaattacaacatcgtattctgcaaattcaaaccgggtcttggttgtctgaaagatgggaggtggcaaggacaagcatcatgatgaatctgacaaaggaattttttcacaccttgctcatggggtagctggtgcagcacatggtggacatgggtacccacctggggcttacccaccaccacctggggcataccctccacaacaaggatatcctccagctgggtatcctccacaacaagggtatcctccagctgggtaccctccacatcaaggctatcctcctgctggttaccccccagctggttatcctggttcatcacatgcaccaggttctcatgggcacggcggtatgggagcaatgctcgctgggggtgctgctgcggctgctgctgcttatggtgctcaccatgtc

SEQ ID NO: 35805 - DNA, 410 bp, Glycine max
  Clone ID: LIB3138-093-Q1-N1-E6
gcaacacaacacacataacacgtaacaaagagaatgagagcgctaaattcgcacgtgctcctcgtagatcttcactcccaccatcacgtgcccacctcaaccctctcctacctcagaaactcccgcttcatatcatccctccgtcgacgctccccaagaaccggaatccgatgtacggcgtcgccggagattcgccgcccctccgatcgcttctacggctcctcgccgtcgacgtcgcgcccggaggacctcaacctcttcctggaactgctccctctgaagatgcgaagggaactctatcgccaccgcgaaatcggaggcctcatagagattgtcatggatttgggaagaaaacctctcgccaggttcccttccggtgaatgggtcatctctgaacaacccatagcgca

SEQ ID NO: 35806 - DNA, 414 bp, Glycine max
  Clone ID: LIB3138-093-Q1-N1-E7
ctcgagccgcaatatgtgtgcatatgggctcaatcctggtgtgtcaggttctcgtcttttgggcaccattcctcagtccatttcacagcaaactgtttggaatcaaatggcaacagtgagaacaccattgaattttgattctagcaagcagagcttttgtcagttttctattgaccttctcggtggaggaatcttagtggacaaaactggagattggatcacacttatacaaaattctccaattagtaacttgttgagagttgctgcttggaagaaaggctgtttaatggtcaagattgtgatgtctgggaatgcatcagtcaaaaggagtgattgggcctcattggtacaagtgttcttaacaaacagcaacagtacatagcattttgatgcatgtaagtggacaaaatcaga

SEQ ID NO: 35807 - DNA, 412 bp, Glycine max
  Clone ID: LIB3138-093-Q1-N1-E8
gtgcaggagttctacttctccctatgcattgtttgtgttcttgttctgctttctacaagtccaggcgattctggaccctgccgatttcctcgctctgcaaaacattcgtaaggctctggaagacatgccaggttccgatttcttttccacttgggatttcaccgcagacccatgcaacttcgccggcgtttactgcgactccgacaagatcattgcgctcaacctcggcgaccccccggcgggctctcccggcctcaccggccgcctcgaccccgccgtcggcaagctctccgcgctcgccgagttcaccgtcgtccctggccgaatatacggtcctctccccgaaacgctctccgatttgaagaacctcaggttcctcggcgtcaaccgcaacttcatctccggccaaatt

SEQ ID NO: 35808 - DNA, 411 bp, Glycine max
  Clone ID: LIB3138-093-Q1-N1-E9
gcaagatggcagaaatgataaacagtctttgtggtggtgatgaaaaattgatgcgtgaaaggacgcacctgctgttggcttgttgttcaaggatggcaatttgtaagaaagatgtttggagagttgaatgtggaatcccttctggatttccgctcacagttatttgcaatagcatttttaatgagatgctcattagatatagctatgaaaaattactgcgccaggctaaagctccaagtatgtttttacaatccttcaaaaattttgtttctttgtgtgtgtatggtgatgataacttaattagtgttcatgaatatgtcaagccttactttagtggttctaaattgaaaagctttctagctagtcataacatcaccattactgatggtattgacaaaactagtgcaactt

SEQ ID NO: 35809 - DNA, 316 bp, Glycine max
  Clone ID: LIB3138-093-Q1-N1-F10
cggctcgaggttccttccggtcgctgtaatcggtttggctgagaggggaatcgaaaatcaattgaggaagaaggatgtcggtgacagcgggtgttagtgatactgtgatagcagttagggataagctcagaggtaaaattggccaaactaaagttaagcgttttttggccttgtaaagtttctgaatgggcttttgacttttaacctattatgcttttcttcttaatttttatttcgacccttctactatatgtatatctcttcgcttaattgttctttttatatattatttttcttttcttgttatcttctgatt

SEQ ID NO: 35810 - DNA, 400 bp, Glycine max
  unsure at all n locations
  Clone ID: LIB3138-093-Q1-N1-F11
tgtcgatatttccaattaaatcttcttgttcctgtgaaggtcctataaaaaaaagggctatgccctttctttactcagaagggccttattccaagttccaccaaacaagtttttattcatttgaaacatctttttttccgaatacaagaaaaaattcatttcaatttcaattatttctataagataaaatcgatatagatagattttatcttatagaaataattgaaaaatacattcaattatgtcttcgcgtatcaaatattttcttttcatatcgatgcgtacgatatttttccagcaattaatgtatgtgagacagaaactttcacttacagttttttctttntaatattgtatttcattttttttaataattaataaaataataataataatgaat

SEQ ID NO: 35811 - DNA, 318 bp, Glycine max
  Clone ID: LIB3138-093-Q1-N1-F12
catcagaggagttgtaaattaagagcatggctgcacaagctcgggtatcatcatcttctcttaccttctcagcggaggctgcaagacaaagtcttggaccaagatcactccaatctccatttggcttctccagaaaagcctcctttcttgttaaggcagctgctaccccccctgtcaagcaaggatcagacagacctttgtggtttgcatcaaagcaaagtctttcttacttggatggcagccttccgggtgactatggatttgaccctctgggactttcagaccctgaaggaacaggagggttcattgagccgaaat

SEQ ID NO: 35812 - DNA, 421 bp, Glycine max
  Clone ID: LIB3138-093-Q1-N1-F3
cgacgtagccaaacctattcattaccgtcagcatggccccaaagagagtccaatgctgcatctcagtagacatagacgcggtagccggctggctcggctcctacggcggcgaagacagcacctcagacatctcccgcggcctcttcgccggcaccataggagtccgtcgcctgctaaaactcttctccaaatacaacatcaaaaccacttggtttatacccggccactctctcgaaaccttcccagaggaatgccggatgatcgtcgatgctggccacgagataggactccacgggtactcacatgagaatcctatagccatgacgttcgagcagcagactgctataatggataagtgttataagttgatcaaggagtttaccggcaagccgccgagaggaatcgtggcgccgtggtggga

SEQ ID NO: 35813 - DNA, 408 bp, Glycine max
  Clone ID: LIB3138-093-Q1-N1-F4
aagaatagatcctcaatacaatgaggttcaggctcagatggaaacagatttgtttaaattgtctcttgatgatgttgaaactcctaaaggttccatgttggatctgaaaatttctcaatctaaaattgcacttcccaagaacacagttggaggaaccattctgcgtagtgatctattggcaaattttttgacagagggcaattttagagcaagtgttgatttgcagcgcactcatcgtattagaggaatgattaaaatggtggccacagttggtattcctgagaatacaggtatatcattggcctgtgctatgaatagttcttttagggggcgcgccagttctgatatttacaccatctgctctcaagactgtgaattgtggaatcctgcttgcacaaaagcaatgac

SEQ ID NO: 35814 - DNA, 375 bp, Glycine max
  Clone ID: LIB3138-093-Q1-N1-F5
ggagaaacgcaatcttcgtcgccttgctgaaaaaaaaaaaaaggaggaaattataaaaaaaaaaaaaaaaaaaaaaaaaaaaaaaaaaaaaaaaaaaaaaaaaaaaaaaaaaaaaaaaaaaaaaaaaaaaaaaaaaaaaaaaaaaaaaaaaaaaaaaaaaaaaaaaaaaaaaaaaaaaaaaagggggcgcccccccttatttgacctttcccccccgaaatttattttcgccccgtccccttaaggccccccatttttctttttatgaagtcttttaaaatttgggctaaatatttgaataagtttttcccttttaaaattttttttcctttaaaatttccccacaattttctaccctaaattttaaattttaaa

SEQ ID NO: 35815 - DNA, 412 bp, Glycine max
  Clone ID: LIB3138-093-Q1-N1-F6
gacaacggcagcatcgtggaggaagcggtagaagacgaatttgccgccggttcactgggaagtaacagatcttggggtgcgaggagcagtcgaagaggatcgggaggggagatgggaagccatagagctaggtttggagagatcgagtctagaggtgctgccttgacaagaaagggccacgagctctacctctccctgctcgctcaagtcccttctatcccgaacgagaccaatgagtcccatcagtccgctctcaaagccgtattccaccaattcccagacgactggccgacaatccgagaacaaggcctcgcatactttcgctactttgtcaagattgatatggaagcttctgtcaccacaatcaagcctggtcaagctaccatgactacggctgatgtaagcgaattga

SEQ ID NO: 35816 - DNA, 358 bp, Glycine max
  Clone ID: LIB3138-093-Q1-N1-F7
caaactcttattcccactcagtggtgaatttgccaaaccgggataaccgtatccctattcaggaatacaatgttctcgttaagactccctattcctctcgttaaaacaccaccttctccctcttgttattattctcactattatcactatcgttatcgttatcgttgttatcatcctttccatcaccgttcccaaacacagagtcttatcgtctcgaagcgcggttccgccattgcgagtgtcacgctgatagcgtgacacttcgtgatgacggagtctcgctcgcccaagagtcgttggagccacttccggcggaactcgcggcggagatgatgccgaagcatgtggcggtgataat

SEQ ID NO: 35817 - DNA, 401 bp, Glycine max
  Clone ID: LIB3138-093-Q1-N1-F8
caaacccttcattcgccgccttccggagttcaagttctggtgtgtctttcaccaaggctctctgcatagcgtttgtgatgacctttttttccctgtttgatgttcctgtcttttggcctatattactctgttactggtttgttctctttgtccttacaatgaggcgccaagttgctcacatgatcaaatacaaatatatccccttcaacttggggaagcagaagtatagcggtaataaatcttctgcaaggagcagtagctctcgtgcagactgaaacttgtctctcatgattggaagatctacttagttaggttttctgaacattcaggctagtcaatgccccccttttctatgaaaagaattgtattcatggtattatggatgtcagtatgcattatgc

SEQ ID NO: 35818 - DNA, 325 bp, Glycine max
  Clone ID: LIB3138-093-Q1-N1-F9
gccatggaacgctgtgcgacgaggcaaactggacgtggggcgagacctccgttgcccgactgcgctctgctgcccctgattctgaagaggtcgaggccaatctcgcctacgtccgccacgtcaccaccttggaagccgaggagacgtcgggcgcatccttcttcgactgctttaggggcaccaaccttcgccgaaccgagatcaactgcgtggtatgggctgcccaaattctgtgcggcaatgccattctcgggtactctgtcgtgttcttgcaagccgctggtttttgcgagacccagacgctggaccttaacattgctctatc

SEQ ID NO: 35819 - DNA, 321 bp, Glycine max
  Clone ID: LIB3138-093-Q1-N1-G1
aaatgaaaggctttctactggcatacatcaccattctgatggtttgcaaactagtgcactttgcaatttaaaagttagcagattgtgattttctaaaaaaaactttagcagatgtctaatgttttgtgggtggctcctgaggacaaggcgagtttatggtcacaacttcattatgtttcgtgtaataatctggaaatgcaagaagcttatcttgtcaatctcgtaaatgtgttacgagaattgtatttgcacagtccagaggaagctcgcaattgagaggaaagctctctctcgatgaatggctgaaaaagctgatgtgct

SEQ ID NO: 35820 - DNA, 408 bp, Glycine max
  Clone ID: LIB3138-093-Q1-N1-G10
ctaattgaagtgattagattctctaccaagtcaattgagagggagattaactcagtcaatgacaaccctttgattgatgtgtcaaggaacaaggcacttcatggtggtaacttccaaggaactcctattggagtctccatggataatacacgtttggctcttgcttcaattggtaaactcatgtttgctcaattctctgagcttgtcaatgattattacaacaatggtttgccttcaaatctcactgccagcagaaaccccagcttggattatggattcaagggagctgaaattgccatggcatcttattgttctgaacttcaatatttggcgaatccggtgacaagccacgtgcaaagcgcggagcaacacaaccaagatgtgaactctctggggctgatttcatca

SEQ ID NO: 35821 - DNA, 348 bp, Glycine max
  Clone ID: LIB3138-093-Q1-N1-G11
gcacaattacagtgactccgcttggttcctcttcttcgatcttcggtttgattctgcgtttgttcacatcatggccaccgcttcagtggcatttaagtccagggaggaccaccgcaagcagattgagttggaggaggcgcgtaaagcggggcttgcgccagctgaactcgatgaagatggaaaggaaatcaatcctcacattccccagtatatgtcctctgctccttggtatcttaatgctgagagacctagtttgaaacatcaaaggaaatggaaatctgaccccaattacaccaaatcatggtacgatagaggtgctaaaatctttcaggcagacaagtatcggaa

SEQ ID NO: 35822 - DNA, 352 bp, Glycine max
  Clone ID: LIB3138-093-Q1-N1-G12
aaaaaaaaaaaaaattaaaaaaaaaaaaaaaaaaaaaaaggaggggaaaaaaaaaaaaaaaaaaaaaaaaaaaaaaaaaaaaaaaaaaaaaaaaaaaaaaaaaaaaaaaaaaaaaaaaaaaaaaaaaaaaaaaaaggggcggccccccctttttaacctttcccccccggaaataaattccggcccggtccctgagggcttcccaattttccttttagggggtcgttttaaacctgggcgaaaaaatggcaaaagcttttccctgggaaaaatttttttcccctaaaaattccaaaaaaaaaacaacccgaaatcttaaagttaaaaccctggggtccctaatggggggcct

SEQ ID NO: 35823 - DNA, 402 bp, Glycine max
  Clone ID: LIB3138-093-Q1-N1-G2
gaatttcacattttatcttttgcattgagcaactaactcactcgcgccatggctgctaccatcatcaccacatgcaagctctcactgcttttgagtcttctctcagtttcacttttgctgggtgtgaggtctgatacccttcagaatgtaggcgcaattccccccacatgcaagcgcatagagtgtcccagctatgatgtcattcacgtaggcaacggctacgaaatccgtcgctataattcacccgtttggatttcaaacagccccattcaggacatttctctcgttgaagccacaagaaccggcttcaggaggttatttgactatattcaaggtaagaataactacaagcagaagattgagatgacagcacctgtgatcagtgaagtattacccagtgat

SEQ ID NO: 35824 - DNA, 418 bp, Glycine max
  Clone ID: LIB3138-093-Q1-N1-G3
aaaattttgtttctttgtgtgtgtatggtgatgataacttaatgagtgttcatgaatatgtcaagccttactttagtggttctaaattgaaaagctttctagctagtcataacatcaccattactgatggtattgacaaaactagtgcaactttgcaatttagaaagttagcagattgtgattttctcaagagaaactttaagcagatgtctaatgttttgtgggtggctcctgaggacaaggcgagtttatggtcacaacttcattatgtttcgtgtaataatctggaaatgcaagaagcttatcttgtcaatctcgtaaatgtgttacgagaattgtatttgcacagtccagaggaagctcgccaattgagaaggaaagctctctctcgtattgaatggctgcaaaaaagctgatg

SEQ ID NO: 35825 - DNA, 371 bp, Glycine max
  Clone ID: LIB3138-093-Q1-N1-G4
gtaatgatgtgtgaagtgtgtgttattttaaaaaaaaaaaaagaaagaaaaaaaaaaaaaaaaaaaaaaaaaaaaaaaaaaaaaaaaaaaaaaaaaaaaaaaaaaaaaaaaaaaaaaaaaaaaacaaaaaaaaaaaaaaaaagggccccccccccactatggaccccacccccccctaaataaaatccggcccgttcccggaagcccacccaactttccttatagaaaactttttaaaacctggccgaatccatgaacataacttctccctgaaaaaaattgtaatccgctcacattcccacacaaaatacgtcccgcaaacttaaatggtaaacccttggctccctaatgagccacctacctcccattat

SEQ ID NO: 35826 - DNA, 407 bp, Glycine max
  Clone ID: LIB3138-093-Q1-N1-G6
gtcatttaatccaaacccgtgttctgatgcatggagtttggagttgctgaagcgtactggatttcattgcgatatcatttgtgtcactggatggactgccaccccaatgcaggatgttcaggttacaattgattggtttatttcctctcaggaatgtgttcccaggacctattgtgttttaaatccacaaaatccttttgtgttaaataggtggatgggaaaattgactttcccccagggcacttcccgaagtgttaagagaatgcctctttctatagggggaggagctggtgcaaagaatgctattctcatgaatatgccaaatgctgttctttcaatgtggagatattttgttggagatctcgtctttgaagtttctaagatgacttctccctacattaaatgta

SEQ ID NO: 35827 - DNA, 396 bp, Glycine max
  Clone ID: LIB3138-093-Q1-N1-G7
ttttgttggagatctcgtctttgaagtttctaagatgacttcgccctacattaaatgtacagtctctttcttcatagcatttggaaatttggctgatgataccatcaattttgaggcttttccccacaagctggtgcagtttggagagattcaggaaaaagttgtattgaaattttcacaagaggaatttcttacagcttggtcaactcaggtgcgtcctgcaacaactctgttggctgatgggtgtccatatttgtatgcaatggtgcatgatagttcagtgtctacaataccaggtgattttgtcattggtgtcaagttgacaaccataaacaatatgtgtgcatatgggctcaatcctggtatttcaggttctcgtcttttgggcaccattcc

SEQ ID NO: 35828 - DNA, 382 bp, Glycine max
  Clone ID: LIB3138-093-Q1-N1-G8
caccaggcgcacgttagcacaaactatcatggccacggcaacagcagctgccacctcgtcctttatggggacgcgtctcctggaggctcactccggagcggggcgagtgcacgcccgattcggcttcggcaagaaaaaggctcccgccccaaagaaagcctccaggggatcgggccgagacaccgacagacccctttggtatccgggcgccaaagcgcccgaatacctcgatgggagtcttgtcggagactacgggttcgatccgtttgggctagggaagcccgcggagtacctgcagttcgagctggactcgctggaccagaaccttgcgaaaaacgtggctggggacatcattggaaccaggaccgagctcgcggacgtg

SEQ ID NO: 35829 - DNA, 417 bp, Glycine max
  Clone ID: LIB3138-093-Q1-N1-G9
ctcgagccgctcgagccgcttcattatgtttcgtgtaataatggggaaatgcaagaagcttatcttgtcaatctcgtaaatgtgttacgagaattgtatttgcacagtccagaggaagctcgccaattgagaaggaaagctctctctcgtattgaatggctgcaaaaagctgatgtgcctaccatagcacagattgaagagttccattcgatgcagaggatgatgaatgctcctgattcaaatgataatattgatttactgttgagcattgatttgttgggtttacaaggagcaggtaaagcttttccaaacaaaattgtttttgatgataagcttgtgttggctaacacacaagaattctttgatggaaattttccagtggattcttggttaccaatttttgtgaattgtctttat

SEQ ID NO: 35830 - DNA, 420 bp, Glycine max
  Clone ID: LIB3138-093-Q1-N1-H1
cccgaggttctaaggcactctcttccttccaaagtgtttagaaatgatgaagccacctccttttccttctctgcctccaaatgggtccttcattccgaccccaaaacccaatcttccgtatcccctgatgctctcaatcctctgcgtgcttacctttccctgccccaagtcacctttggccccaaaaggtggcaactgcctgaagcagcaaacacggtttcagcctcaacagctaatgaatcgcgtctagacagatatgccacccatgttaacccggagaagttgaaagctgcaggtgaagggcttgcacatgttggaaaggcgtttgctgttgccactgcatttgtatttggtggtgctgcattggtatttggtatggtggcctccaagttagagctgcagaatatgagtgacatcaaa

SEQ ID NO: 35831 - DNA, 360 bp, Glycine max
  Clone ID: LIB3138-093-Q1-N1-H10
aaaaaaaaaaaaaattaaaaaaaaaaaaaaaaaaaaaaaagaaggaaaaaaaaaaaaaaaaaaaaaaaaaaaaaaaaaaaaaaaaaaaaaaaaaaaaaaaaaaaaaaaaaaaaaaaaaaaaaaaaaaagggggcggcccccccttagggacctcgtccccccggaaataaattccggcccggtccctgggggcgtcccagttttccttatagggggtcgttttaaacctgggcgaaataagggccatagctgttccctggggaaaattgttttccgttaaaaattccacacaaaatacaacccggaagcttaaagtgtaaaccctggggtccctaatgagggacctaccccacattaatt

SEQ ID NO: 35832 - DNA, 404 bp, Glycine max
  Clone ID: LIB3138-093-Q1-N1-H11
cgcatctcaaagccaaagttgatgctggttttaagctgaggggactcatcaacacacatcaccaccatgaccacgccggaggaaacaaagagatttctaaagcattcggacttccagtagttggcggtcgtgattgtgctctcgtctcggagacacccagccatcaatccaatttcaaaattggctccatcaacgtgactgcattgcacacgccctgccacactcaggatagtatctgctttttcttcgaagatggtcaggatcgtgcagtgttcaccggcgacaccatgttcatcggaggatgcggacgctttttcgagggcacgccaaaagagatgcacaaagccttgaatgagactctcgcatccttgcccgacgacactaaggtctacccaagccacgaa

SEQ ID NO: 35833 - DNA, 324 bp, Glycine max
  Clone ID: LIB3138-093-Q1-N1-H12
caaacttcatggcatttgagtttccttattgacaatcccaaagagtctacagtttttgatattctcttgggaatctctcaagattttgaaattgctggtaatactcttatgccagctttttctgttccacaggctactgccagatcttctgaaaatgcggaatcctctgcatgatctggaatttgtgttttctttcgcttgttcgtttgtttaattcaataaaggaaattaggcatgaccctcttgttgagtatgctctgcctatttgaaaatttccacacctcttttaattgtcgtaatgatgtgtgaagtgtgtgttatttt

SEQ ID NO: 35834 - DNA, 405 bp, Glycine max
  Clone ID: LIB3138-093-Q1-N1-H2
gttcttcgagcttggctttttgagcactttctccatccgtacgcaggcgatgttgataaacatatcctagcccgccaagccggtctctccagacgtcaggtttcgaattggtttattaacgcgagggtgaggctatggaagccgatggtggaggaaatgtatctggaagaagagaaggagcaagaaaacgacgtagcatcatcggatattaatgttcccgaagaggatgagaagccaacgcaggaggctccactccttcgaattgactcagagtgcatgtcgtctatcgtcaacgacgtcacaaagagcggcaaaaccatccaaaacgacaaccaaatggacgcattcgggtcggtggagcttgacttttcgtcctacacgcatgcgcaccattctttcggcgtg

SEQ ID NO: 35835 - DNA, 404 bp, Glycine max
  unsure at all n locations
  Clone ID: LIB3138-093-Q1-N1-H3
caagcagtaaccattccagaggcttatgagcgtctgattcttgactgaattagaggtgatcaacaacattttgttcgcagagatgagttgaaggcatcatgggagatcttcaccccacttttgcaccgcattgataagggggagttcaagtcaaccccttaccaacctggaacaagaggtcctgtagaagcagataaattactgctggaaaaagctggttatgttcaaacacatggttatagatggatccctccaacattgtagaaagaacaatgttacactagcttgcactaccttaaaatttgttgatgcgtgcacttaataagcttgggaaaatccccttggagcaagactcttccctaatgggtgattntatcaagcatatgaataaaatgtgggtgaca

SEQ ID NO: 35836 - DNA, 411 bp, Glycine max
  Clone ID: LIB3138-093-Q1-N1-H4
gtgagaacaccattgaattttgattctagcaagcagagcttttgtgagttttctattgaccttctcggtggaggaatcttagtggacaaaactggagattggatcacacttatacaaaattctccaattagtaacttattgagagttgctgcttggaagaaaggctgtttaatggtcaagattgtgatgtctgggaatgcagcagtcaaaaggagtgattgggcctcattggtacaagtgtttttaacaaacagcaacagtacagagcattttgatgcatgtaagtggacaaaatcagaaccacattcctgggaattgatcttcccaatagaggtatgtggtcctaataatggttttgaaatgtggagttctgagtgggcaaatcaaacttcatggcatttgagtttcctt

SEQ ID NO: 35837 - DNA, 411 bp, Glycine max
  Clone ID: LIB3138-093-Q1-N1-H5
caacaacaaagattccaaacaccgaaccaattgcccttaaataactgaattgctcaaacttcagatattccgtctagtattttgactgcagagaagttgctttcttctggattatcccaagatccccaaatgttgaatatgttgcagcagcaacacttgctgcagttgcattctcaggcagcagcggctccttcacaaccaatgcctttgatagataaacttctattgctgaagcagcaacagcagcaggaggagcaacagctgttattacgccaacaacaacagcaggaggagcaacagctgttattgcgccaacaacagcagctgctttctcaagtgcttcaggagcatcagtctcaccagcgctttggcaatttatctcatcaacagctgcagggaggtggaataccc

SEQ ID NO: 35838 - DNA, 388 bp, Glycine max
  Clone ID: LIB3138-093-Q1-N1-H8
tgataacttaattagtgttcatgaatatgtcaagccttacttgagtggttctaaattgaaaagctttctagctagtcataacatcaccattactgatggtattgacaaaactagtgcaactttgcaatttagaaagttagcagattgtgattttctcaagagaaactttaagcagatgtctaatgttttgtgggtggctcctgaggacaaggcgagtttatggtcacaacttcattatgtttcgtgtaataatctggaaatgcaagaagcttatcttgtcaatctcgtaaatgtgttacgagaattgtatttgcacagtccagaggaagctcgccaattgagaaagaaagctctctctcgtattgaatggcttcaaaaaagctgatgt

SEQ ID NO: 35839 - DNA, 421 bp, Glycine max
  Clone ID: LIB3138-093-Q1-N1-H9
gcattgtgtgcttaggaaatagtaagtttgtataattactgtggataaaatcagtatgggtgaggaagaatcagtgaatgaagtttcaaagactgattcaaatggaaagagctttcaggagaaaactttggatgaaattactgagaaaaaggacttggaaactgatggaggaaaagtcttggagaacaatggtatcaaaaagaatattgtaaaagaaattgaagataagaaagctgttggtgttgaaaaggtagaagaggacaagaaaaatggtgttgtggaagatgcaaaagaggataagaaagaagatggggtgaaagaagctaaggaggataagaaagaagtggtggaagaagtaaaagaggataataaagaagatggagtggaagaagcaaaagagaataagaaagaagatggggtg

SEQ ID NO: 35840 - DNA, 398 bp, Glycine max
  Clone ID: LIB3138-094-Q1-N1-A1
caacggaggagcgcctccaccggaacaaaactctccggcgatagttccgccaaacctctttcgttctccggcgcgatcgtggattcaatcgcccgtttccagtttctcattctagttgatcgagttcgtagggttttatggtgcttccttggacacacggtggcgatttgcattactcagtgggtggtggcacggtgaattattgagtctgatcatactcgtttttaaaaatcagagagaaatgtcttatcagcataaaagcttttggatgccacgggatgctggctgcatggctgaagaaaatgcgggatatgaaaattcttccagaattgaacccaagcgcagtcatcagtggtttatggatacaggtgaacctgaaatattcagcaacaagaaac

SEQ ID NO: 35841 - DNA, 396 bp, Glycine max
  Clone ID: LIB3138-094-Q1-N1-A10
ggagtggtgaagggagaactgaagaattccgtcctcgctgcctccgtcgccgccgccgcttccgccaccgcggcgtccctctcctcttcttcccatcaggatgagaggagaagccgtgagaacacttcgtcgcagaattcatcttccacggagaaattcgctcccagatttgatggattgcgcttcattgaaaccctcgtaactgcacatagatgatgattattcgaggttccccacttctcactcaattggggcctcattcttgcttccctcatcccttgcctttatcttttttctttttctgttatgccctttagaagaagaaaaattcatgtatggggaaattcttaagtcttttacttctgtttttcccccctcttaggagaattagagaga

SEQ ID NO: 35842 - DNA, 392 bp, Glycine max
  Clone ID: LIB3138-094-Q1-N1-A11
ctcgagccggtcacatatggttagcactctcttctaaagccaactactactattagtatttagtgccctttcactcgtaacaagtgttcactgatataaatgtctttgtctgtggaagacaactactatggcatgagcagcagtgtgagtgagatagaggaagagaattcttcacacttgcacttgaataatgatggtcctaatcctatggtcaccattggtgaagaagagaacgaggatgatgatgacactgtttatgtggctgttggtaagagccagagtagcacggaggccttggcatggaccctcaacaacttggccactccttctaccatgctctttatcatacacgttttccctgagatcaagctccttccgaatccattgggggt

SEQ ID NO: 35843 - DNA, 380 bp, Glycine max
  Clone ID: LIB3138-094-Q1-N1-A12
aagaactgtttttcttagatgacatgttaaaggaatgtccggaaacacatctacaaaacctgcgtactggaatctataaagaaacaatccaattaatcaaaacgcacaacgaagatcgtatgaatacgattttgcacttctcgacaaatataatttgtttctttattctaagcggttattctattcttggtaatcaagaacttgttcttattaactctttggttcgagaatttatatataatttaagtgacacaataaaagctttttctattcttctattaactgatttatgtataggattccattcaacccatggttgggaactagtgattggtttcgtctataaagattttggatttgctcaaaatgatcaaattata

SEQ ID NO: 35844 - DNA, 397 bp, Glycine max
  Clone ID: LIB3138-094-Q1-N1-A2
accagactctcactaatttactagcagaccaccatagacactacgttttgagtcacactcacacgggactcgaaacggtacctgtcgcttccctagtgggtcaaacaattggactctacttctcagcggaatggcgcgtcctatgcgccaagttcactcccaagctgattttcgtttacgagaagataaagcacgagctagccgaaaagggagaggaggacttcgaagttgtgctaatatccatcgaccgcgaccaagcatactttgactcctactacagcaccatgccttggttggccttgcctttcggtgacccagagatcaagaacctcgttagacactacaacgtgcaaggaattccttggttggtgattataggtcctgattgtaaaacaat

SEQ ID NO: 35845 - DNA, 400 bp, Glycine max
  Clone ID: LIB3138-094-Q1-N1-A3
agtcagtggaatgggccactccatggtcaagaacatctgagaactttgccaatgccactggtgagcaaggctacccaggaggcaaattctttgaccctttgagcttggccggcactatcaaggatggagtttacattccggataccgagaagctcgaaagattgaaattggctgagataaagcatgccaggattgctatgttggccatgctgattttctactttgaggctggtcaagggaagaccccccttggtgctctcggcttgtaaactaaacatttcatgtagataattgaattgagaggctagacagttgcaaatcaacctttgtcccgtttgtgttacttcatgacaaattcaaattctatgctctattattggatgcattcactttatgtctg

SEQ ID NO: 35846 - DNA, 392 bp, Glycine max
  Clone ID: LIB3138-094-Q1-N1-A4
gctcaatcctggtatttcaggttctcgtcttttgggcaccattcctcagtccatttcacagcaaactgtttggaatcaaatggcaacagtgagaacaccattgaattttgattctagcaagcagagcttttgtcagttttctattgaccttctcggtggaggaatcttagtggacaaaactggagattggatcacacttatacaaaattctccaattagtaacttattgagagttgctgcttggaagaaaggctgtttaatggtcaagattgtgatgtctgggaatgcagcagtcaaaaggagtgattgggcctcattggtacaagtgtttttaacaaacagcaacagtacagagcattttgatgcatgtaagtggacaaaatcagaaccac

SEQ ID NO: 35847 - DNA, 401 bp, Glycine max
  Clone ID: LIB3138-094-Q1-N1-A5
gttaattgtggagtattttggaaggatgtcttacgttgctcataacgttaatcagccccaagagaaagatttgttggagggaaatttttcctttgatattaaatctcgctctagattggaaaaagtttcctctacaaaagcacaatttgttagtggaaaaaccttcaaatatgatataattggtgctggttcacattcttcagaagattttcctgaaaaggaagatcaagaaaaacccaaaaagattgatgccagattgagacaaagaatagatcctcaatacaatgaggttcaggctcagatggaaacaaatttgtttaaattgtctcttgatgatgttgaaactcctaaaggttccatgttggatctgaaaatttctcaatctaaaattgcactttcca

SEQ ID NO: 35848 - DNA, 399 bp, Glycine max
  Clone ID: LIB3138-094-Q1-N1-A6
gagcccttctcgtcctctcaattctctcagtccaaggggctgcaaattttctggttcttttcgacagattttgagtcattgtttgaaatggcatcggtatctagtcagccacagttccgttacactcagccgccgtcaaaggtgcttcatttgaggaacttgccgtgggagtgcacagaggaggaactgattgagcttgggaagccgtttggcaaagttgttaacacaaaatgcaatgttggggcaaatagaaatcaagcttttattgaatttgcagatttgaatcaagccattgcaatgatatcatactatgcctcatcatcagagcctgctcaagtacgagggaaaactgtatacctacaatattcaaataggcaagaaatagtgaataacaaaact

SEQ ID NO: 35849 - DNA, 332 bp, Glycine max
  Clone ID: LIB3138-094-Q1-N1-A7
ctcatattttcatttccaaaactcaaacaatgcctagttaaattaaaaacaaggcaaatattagggtgcgtaattaggcaccgtgcgaaagttattacaatgcgatcacaaccgttggattttgttgattttaaatcaatggttcaaatttttctttcttttttttttatttttttatttttttcttacttttcctaatttacccccaccatctaccctcccccgcggtggaagcccaaggcaacaccgtccgcgcccttaaggccgtcaaaagccgccaacccgaaatcgacgccccaatcgaagccctaaacgcgctgaagcttggaaaa

SEQ ID NO: 35850 - DNA, 388 bp, Glycine max
  Clone ID: LIB3138-094-Q1-N1-A8
gttcagtgtctacaataccaggtgattttgtcattggtgtcaagttgacaaccataaacaatatgtgtgcatatgggctcaatcctggtatttcaggttctcgtcttttgggcaccattcctcagtccatttcacagcaaactgtttggaatcaaatggcaacagtgagaacaccattgaattttgattctagcaagcagagcttttgtcagttttctattgaccttctcggtggaggaatcttagtggacaaaactggagattggatcacacttatacaaaattctccaattagtaacttgttgagagttgctgcttggaagaaaagcttgttaatggtcaagattgtgatgtctgggaatgcagcagtcaaaaagagtgattgggc

SEQ ID NO: 35851 - DNA, 397 bp, Glycine max
  Clone ID: LIB3138-094-Q1-N1-A9
gtttgttctctcaacgactcctccgcgaaagagtattattcaatattttggttgggttgaatcccggggttgaagcgttgcagacatcacggctattctaagagtgtctcgctccctcattcatgtccgatctgtacgacggaggacgggtagttgcgtaactgccgttaacccttcgccgcacggtgggcgtggtgctttgccttctgaaggtggtagcccttcagacttgctcttcctcgctggtggtggtttcttctagtttcttcactcttttcattacttttagcctgcatagttttaaataagaaaaaaaaaacagcgactttgtgactagttaagatcaccggttcttcttcttcctcttcttcttcttcttcttctacctactactact

SEQ ID NO: 35852 - DNA, 399 bp, Glycine max
  Clone ID: LIB3138-094-Q1-N1-B1
agctcagtcagtggatgaagaatctggagttcccacattgcaagtccatgagtgtgttactgtgaaacatgaatctgaaaagcatgtctccttgcattgggcctctgatcccatgagtgacatggtatctgattcaattgttgctctggttttaaatatcaaccgcgatgtcccaaaaatagtgaatgaatctgatgccattaagattgaggaagagaatgagaaaaaggcagagaaggttatgcaagccctcctcgtttcactctttggagatgtgaaggtaggtgaaaacggaaaattgataattaacattgatgggaatgtagcagagctaaacaaagaaagtggggaagttgagagtgaaaatgaaggtctcaaggaaagagtaagaacagcatt

SEQ ID NO: 35853 - DNA, 202 bp, Glycine max
  Clone ID: LIB3138-094-Q1-N1-B10
caacaactctgtttgtctgatgggagtgcatatttgtatgccggggtgcaatgatagtcagcgtctacaataccacgtgattttgtcattggtgtcaagtagtcaaccataaacaatattgtgtgcatatgggctcaatcctggtattttaagttcttgtcttttgggcaccattcctcattctaatttttcagtaaaaatg

SEQ ID NO: 35854 - DNA, 382 bp, Glycine max
  Clone ID: LIB3138-094-Q1-N1-B11
attagatagaaaagaaggggaataaggaaacccttcgcctcggtgcgcatccaatccaatctaatcaacaaaagaagagttgagcgagagtggaatataacaaagaagatgagcggcgccagcagcactataaggctatcgccgatggtgagcgtgtccccgaattgcaattgctcatcgatgatggtgatgaagaagacgacgacggcggtggctcctttgtggatgaaaagcaagagcgctaggggtggtattaggtgcgaggtggctattaatgcggtggatgagtcgacgacgtcaccggagtcgaagattggagcgcgtgtgaaggtgaatgctggtgtaaaggtgtaccatgtccccaaagtagccgagcttgacc

SEQ ID NO: 35855 - DNA, 304 bp, Glycine max
  Clone ID: LIB3138-094-Q1-N1-B12
atcaattcgtctcgtcatgtttgctagacagatcttccggccggccaggacgttgcaccagcaagatctccgttacgcatccgagccgcccaagagcggaggcaacaatggtgtcctctacacatgtattggcgctgctggtcttgctggttcctacctatacatgatgggcggtgaagctctttttgggcttaaaggaaatgcgccgtccttagaagagtccaagaaaatccccgcttctaccgacggctcggtcaagaatgctttcactgtatgcgaccagggctttggatcatttgtgctt

SEQ ID NO: 35856 - DNA, 398 bp, Glycine max
  Clone ID: LIB3138-094-Q1-N1-B2
ctcgagccgaatcggctcgagattaattttaagatatgagaaaggctccattgtcgaattcagacctaaccattaatcgagaagtgatgggaacgacgaaacctgcaaatacttaagattttattaaaaacaaatcttaatgattcattaggtgggatggcggaagaaaccaaaaagcaatcctttttttaggagttgtgccctacattacatctgaatttgattgataataaaagagtaaatattcgcccgcgataattttgattttattgaattttttttttatttttgccaattctatttattctttctaataataaaaaatattctaataactaataataaaaaggaaaataaagattcattagaatattataaaataacaaataattgaacaa

SEQ ID NO: 35857 - DNA, 376 bp, Glycine max
  Clone ID: LIB3138-094-Q1-N1-B4
cggaaaccaaaccccgaccaacctctctctcccaccttcgcgatccgatccagctgagagtggttgggctttggaaaaattagctgcatgagctggtttgggaagctgcgtttattctccaatttcaattcctttcacttcattacttctttgttaatttttaccctccatttttcaccccaatcgcgctctaattccctccaacccttattgatcaacgacgggtaaactaatctcaatcttaatttccggttttcgtcacaatatggagtcccgattcaagagtaatccccaattacgcagaggcctttgctgtgcaaatgatgacaagcagcaggagaggtccccatctgttattgtcattggaggtggcatg

SEQ ID NO: 35858 - DNA, 401 bp, Glycine max
  Clone ID: LIB3138-094-Q1-N1-B5
tacaactacaaaggttgctgtaggagataagatattgaagtagtgctaagtgcctaacacctgcagtgaacaatggcctctgcatcagcatctcttctcaagtcttcacttgttcttgacaagtctgagtgggtgaagggacaaacacttcgccaaccttctgctgcatcagttgtgagatgcaaccccaccaccccatcaggcctcaccatcagagctggttcctatgctgatgagctcgttaagaccgcgaaaacagtggcttcaccagggaggggtattttggccatggatgagtccaatgctacctgtgggaagcgtttggcttcaattgggctagagaacactgaagctaaccgccaggcataccgtacccttcttgtgacagttccaggacttgg

SEQ ID NO: 35859 - DNA, 331 bp, Glycine max
  Clone ID: LIB3138-094-Q1-N1-B6
tttgatgatgcacttaattatactgtcagtgaacttaacttcaagacactagtggatggcctgggaaacgttttgtatcaatttccatttaatgtcccagcctactatgctttaatattgaggtctctcactgttttagaaggtttagcactctatgctgatcccaattttaaggttcttgcggcatcatacccatattttgctaagcggctcttgacagatccaaacccatatctaagagatgctcttatagagttgcttttccaggatgggaagttcaggtggggtagacttgaaaacctgctagcccaagggagaatggacagggatt

SEQ ID NO: 35860 - DNA, 350 bp, Glycine max
  Clone ID: LIB3138-094-Q1-N1-B7
cgcctgaaatctattgttgttgcatggcaaacacaaaggtccgggttgacccgttgtatatccgatccaaattaaaaagatgaattttttcaggttagccggtgacatgacccatttggcctgcgttctcgtctttctccttaagatttacactattaaatcctgcgtctgtttcttattgtaaacttaagaactctatgcactcgtttttgcttgtcgttacttagatatctttacttattacgttttcttatattatatctttttttagttgattattttgggaagctaattttctattttgtggttcttgatgttccacaagtgttttttgtagattctttttacat

SEQ ID NO: 35861 - DNA, 377 bp, Glycine max
  Clone ID: LIB3138-094-Q1-N1-B8
tgagaatacaggtatatcattggcctgtgctatgaatagttcttttagggggcgcgccagttctgatatttacaccatctgctctcaagactgtgaattgtggaatcctgcttgcacaaaagcaatgactatgtcatttaatccaaacccgtgttctgatgcatggagtttggaatttctgaagcgtactggatttcattgcgatatcatttgtgtcactggatggactgccaccccaatgcaggatgttcaggttacaattgattggtttatttcctctcaggaatgtgttcccaggacctattgtgttttaaatccacaaaatccttttgtgttaaataagtggatgggaaaattgactttcccccaaggcactt

SEQ ID NO: 35862 - DNA, 394 bp, Glycine max
  Clone ID: LIB3138-094-Q1-N1-B9
ctcgagccgctcgagccgtgctgcttggaagaaaggctgtttaatggtcaagattgtgatgtctgggaatgcagcagtcaaaaggagtgattgggcctcattggtacaagtgtttttaacaaacagcaacagtacagagcattttgatgcatgtaagtggacaaaatcagaaccacattcctgggaattgatcttcccaatagaggtatgtggtcctaataatggttttgaaatgtggagttctgagtgggcaaatcaaacttcatggcatttgagtttccttattgacaatcccaaacagtctacagtttttgatattctcttgggaatctctcaagattttgaaattgctggtaatactcttatgccagctttttctgttccacaggctact

SEQ ID NO: 35863 - DNA, 347 bp, Glycine max
  Clone ID: LIB3138-094-Q1-N1-C1
atcaattatgaggcttctccccacacgctgttgcacttaggcgagattcaagaaaaagtcgtgttgaaattttcacaagacgaatttcttacagctctgccaactcatgcgcgtgctgcaacaactctgtaggctgatgggtgttcatattagtatgcactggcgcatgatagttcagtgtctacaataccaggagatttcgctatttgtgtcacgttggcaaccatcaacactatgtgtgcctctggcctcaaccatcatattccaagttctcatctttagggcaccatttcctaatgcatttcacaacacactgtttcgaatcaaacggccacacatagaacacc

SEQ ID NO: 35864 - DNA, 396 bp, Glycine max
  Clone ID: LIB3138-094-Q1-N1-C10
gtgattttgtcattggtgtcaagttgacaaccataaacaatatgtgtgcatatgggctcaatcctggtatttcaggttctcgtcttttgggcaccattcctcagtccatttcacagcaaactgtttggaatcaaatggcaacagtgagaacaccattgaattttgattctagcaagcagagcttttgtcagttttctattgaccttctcggtggaggaatcttagtggacaaaactggagattggatcacacttatacaaaattctccaattagtaacttattgagagttgctgcttggaagaaaagctgtttaatggtcaagattgtgatgtctgggaatgcagcagtcaaaaggagtgattgggcctcattggtacaagttgttttaacaaaca

SEQ ID NO: 35865 - DNA, 397 bp, Glycine max
  Clone ID: LIB3138-094-Q1-N1-C12
cggtttttacattgctcctgcttttatggacaagcttgttgttcacatcaccaagaacttcatgaccctgcctaacatcaaggttcctctcattcttggtatttggggaggcaaaggtcaaggaaaatccttccaatgcgagctcgtctttgccaagatgggaatcaaccccatcatgatgagtgctggagagttggaaagtggaaatgcaggagagccagcaaagttgataaggcaaaggtaccgtgaagctgctgatataatcagcaaggggaagatgtgctgtctcttcataaacgatcttgatgcaggagctggtcgtcttggtggaaccactcaatacactgtgaacaaccagatggtgaatgccaccctcatgaacattgctgataacccc

SEQ ID NO: 35866 - DNA, 398 bp, Glycine max
  Clone ID: LIB3138-094-Q1-N1-C2
taatcaatcatcttttgtttgttcttcagtactttagtgtgtgatttaattccaagattttgagaatgtctagctgtgggtgtggaagtagctgcaactgtggcagcaactgcggttgcaacaagtactcttttgacttgagctatgttgagaagacaaccacagagactcttgttttgggtgttgggtctgtgaaggcccaattggagggtgctgaaatgggtgttgcagctgagaacggtggctgcaactgtggatcaagctgcacctgcgacccatgcaactgcaagtgaggtcaagatttataaccttgaagcagagataactgtaatatatgtatcaacaaataataagaattacgtgttgtgtttaataaagtgatcatggctcgaatttgc

SEQ ID NO: 35867 - DNA, 390 bp, Glycine max
  Clone ID: LIB3138-094-Q1-N1-C4
tggagatctcgtctttgaagtttctaagatgacttctccctacattaaatgtacagtctctttcttcatagcatttggaaatttggctgatgataccatcaattttgaggcttttccccacaagctggtgcagtttggagagattcaggaaaaagttgtattgaaattttcacaagaggaatttcttacagcttggtcaactcaggtgcgtcctgcaacaactctgttggctgatgggtgtccatatttgtatgcaatggtgcatgatagttcagtgtctacaataccaggtgattttgtcattggtgtcaagttgacaaccataaacaatatgtgtgcatatgggctcaatccttgtatttcaggttctcgtcttttgggcaccattcc

SEQ ID NO: 35868 - DNA, 381 bp, Glycine max
  Clone ID: LIB3138-094-Q1-N1-C7
aaagaataaaaaaatgatatgattcaacctcaaactcaggtgaatgtagctgataatagcggagcacgcgaactgatgtgtattcgaatcctaggagcttgtaatcgacgatatgcttatattggtgacattgttgttgctgtaatcaaacaagcagtaccaaatacgaacttagaaagatcagaagtgatcagagctgtaatttgtcgtacttgttaagaactcaaacgtaacaacggtataataatttagtatgatgataatgctgcagatgtcattgatcaagaaggaaatccaaaatgaactcgaatcttttgtgaatcgcccggtaattgagacagttaaatttcactaaaatagtttcattagcacccgatgtat

SEQ ID NO: 35869 - DNA, 378 bp, Glycine max
  Clone ID: LIB3138-094-Q1-N1-C8
ggagattggatcacacttatacaaaattctccaattagtaacttgttgagagttgctgcttggaagaaaggctgtttaatggtcaagattgtgatgtctgggaatgcagcagtcaaaaggagtgattgggcctcattggtacaagtgtttttaacaaacagcatcagtacagagcattttgatgcatgtaagtggacaaaattagaaccacattcctgggaattgatcttcccaatagaggtatgtggtccttaaaatggtttcgaaatgttgagtttttgagtgggcaaatcaaacttcatggcatttgagttttcttattgacaattccaaaacagctacaattctatgatatttcttgggaattttttactattt

SEQ ID NO: 35870 - DNA, 398 bp, Glycine max
  Clone ID: LIB3138-094-Q1-N1-D1
tctcaaccctcttcctcttaattaatctattcctctttatcctcctctgaacctcaaacaccaaaacaaagcattacaattctcaatttcacataaacaccagaattgataaaaacacataacaaaaaaaaaaagtgaaaaatggcgagcgcagtggagaaggagggtggcgcgagcgaggaaactttgtctttggagcttcctgctccacctggttggaagaagcagttcattccaaagaaagctggtaccccaaagaaaaacgagattgtgttcactgcaccaacaggagaggagatcaataacaggaagcagctggaaaaatatttgaaagcacaccctggaggcccagctgtatcagaatttgactggggcactggtgagaccccaagaagatc

SEQ ID NO: 35871 - DNA, 396 bp, Glycine max
  Clone ID: LIB3138-094-Q1-N1-D10
ggatcttgcattgctgcaaagttatcgggtatttactggtggtacaagactgcaagtcatgctgccgaattaaccgctgggtattataacccatgcaatcgtgatggttatgctgcaattatgacaatgttaaagacaaatgggatcaacttaaacattccttgtgttgacttgcacacattgaaccaacatgagggctttccagagacctttgcagatcccgagggactagtctggcaagtgttgaatgccgggtgggaagttgacctaccagttaccagtcagaatggatttccttgcctaaacagagttggctataacaaggttttggataatgccaagcccatgaatgatccagatggaaggcacttttcatcttttacttacctgaagctt

SEQ ID NO: 35872 - DNA, 206 bp, Glycine max
  Clone ID: LIB3138-094-Q1-N1-D11
ctcgagccgaatcggctcgaggcaggtaaagcttttccaaacaaaattgtttttgatgataagcttgtgttggctaacacacaagaattctttgatggaaattttccagtggattcttggttaccaatttttgtgaattgtctttatcctgtaagtcaattaccttcaaaagctgtcgttgtaatgttacatgtgggagtggacgt

SEQ ID NO: 35873 - DNA, 399 bp, Glycine max
  Clone ID: LIB3138-094-Q1-N1-D12
caaagaatgctattctcatgaatatgccaaatgctgttctttcaatgtggagatattttgttggagatctcgtctttgaagtttctaagatgacttctccctacattaaatgtacagtctctttcttcatagcatttggaaatttggctgatgataccatcaattttgaggcttttccccacaagctggtgcagtttggagagattcaggaaaaagttgtattgaaattttcacaagaggaatttcttacagcttggtcaactcaggtgcgtcctgcaacaactctgttggctgatgggtgtccatatttgtatgcaatggtgcatgatagttcagtgtctacaataccaggtgattttgtcattggtgtcaagttgacaaccataaacaatatgtgtg

SEQ ID NO: 35874 - DNA, 386 bp, Glycine max
  Clone ID: LIB3138-094-Q1-N1-D2
agaaaagtgttcctacattggttggcattgaatgtcccaaggatgagaaacttcctcgtcgcaaaatttttgacaaacctaagacgcgctgcttcactattctccctatggagtttaatcttgtggtccgtcaaaagtttttaaattttgtgaggttcattatgaagaaaagggacaaacttagttgtcaagttggaatcaacccatactccatggaatggactggtttggccaatagattactgagtaagggcaatgatattctgtgttgcgattatgctagttttgatggtttgattaccaagcaagttatgagcaagatggcagaaatgataaacagtctttgtggtggtgatgaaaaattgatgcgtgaaaggacgcacctg

SEQ ID NO: 35875 - DNA, 393 bp, Glycine max
  Clone ID: LIB3138-094-Q1-N1-D3
aaacacttcaactcaattgggttgcaccatcacagtcacagatgctgctcaaatgctgttcccgagagaccccagagacccagttccataagggcttgcactggagttggagcttctggatctgatcgtccattagctgaaagacttttagatctgaaagatgcttgttggagatttttaaggccacatactatacgtggtacagcactaggttcatttgctttggtggcaagagcattgattgagaacaccaatttgataaagtggtctctttttttcaaagctttctgtggtctttttgctctgatttgtgggaatggttatatagttggcatcaatcaaatctatgacattagcattgacaaggtaaacaaaccttatttacctatagct

SEQ ID NO: 35876 - DNA, 401 bp, Glycine max
  Clone ID: LIB3138-094-Q1-N1-D4
gagcagagtatcggcatagcgtagccatggccatgggattgacctcacaactcctcctttctttgttcatcagtacccttcttcttcttcttccctcttccctttcacaatctaaccagttttgtgacgctggaacttcatccaagctgttgatcaagggcggcaccgttgtgaatgctcaccaccaacaggttgccgatgtctatgtcgaagatggtatcattgttgccatcaatcccactattacggttggagatgaggtgacggtcatagatgccactggcaagtttgtcatgccagggggcattgaccctcacacccacctagagtttgagtttatggatacggaaactgtagatgacttcttcagtggtcaggctgcagcattagctggtgggaca

SEQ ID NO: 35877 - DNA, 400 bp, Glycine max
  Clone ID: LIB3138-094-Q1-N1-D5
caaaatatagccgcgggcacatatcacttcatcctaatgacatggttcttttaattacttttgagatacatgcattttaactgaataaaccaagttgatagctactctaatgaatatataaatgatttgttcattacgtatgtatgtgtaggcttattgggattggtcatgggatgaattagctaggtatgatcttcctgcttttgttcagtatgtgtacaatcaaaccggccagcgaatgcactatgcaggtcattccttggtatgttcctaatttctttcttttgttttcaggttttgtaaagtcaggttaaacaatttaggagcctatatttttactgaattttgtcttgattccatatgctttaaaggttcgattaccagtacccctagactttca

SEQ ID NO: 35878 - DNA, 401 bp, Glycine max
  Clone ID: LIB3138-094-Q1-N1-D6
gatgaaaaattgatgcgtgaaaggacgcacctgctgttggcttgttgttcaaggatggcaatttgtaagaaagatgtttggagagttgaatgtggaatcccttctggatttccgctcacagttatttgcaatagcatttttaatgagatgctcattagatatagctatgaaaaattactgcgccaggctaaagctccaagtatgtttttacaatccttcaaaaattttgtttctttgtgtgtgtatggtgatgataacttaattagtgttcatgaatatgtcaagccttactttagtggttctaaattgaaaagctttctagctagtcataacatcaccattactgatggtattgacaaaactagtgcaactttgcaatttagaaagttagcagattgtga

SEQ ID NO: 35879 - DNA, 382 bp, Glycine max
  Clone ID: LIB3138-094-Q1-N1-D7
gtggaactgcttgtcccagagggctttatggtatcttttgtgaggaatgccctgttggtacttataaagatgtcagtgggtctgatagagctctttgtcatgattgtccccctgatgagcttccacatcgtgccatatatatttctgttcgaggtggtgtggcagagactccttgtccatacaagtgcatttctgatagatatcacatgccaaactgctatacagcttttgaagagttggtctacacttttggtgggccatggctcttcggtcttctactcttgggtcttcttatcttgcttgctctagttctcagttgtgcacgaatgaaatatgtagctggcgatgatttaccagctgttacgccctgctcaaatgacac

SEQ ID NO: 35880 - DNA, 394 bp, Glycine max
  Clone ID: LIB3138-094-Q1-N1-D8
gcaatttagaaagttagcagattgtgattttctcaagagaaactttaagcagatgtctaatgttttgtgggtggctcctgaggacaaggcgagtttatggtcacaacttcattatgtttcgtgtaataatctggaaatgcaagaagcttatcttgtcaatctcgtaaatgtgttacgagaattgtatttgcacagtccagaggaagctcgccaattgagaaggaaagctctctctcgtattgaatggctgcaaaaagctgatgtgcctaccatagcacagattgaagagttccattcgatgcagaggatgatgaatgctcctgattcaaatgataatattgatttactgttgagcattgatttgttgggtttacaaggagcaggtaaagctttt

SEQ ID NO: 35881 - DNA, 143 bp, Glycine max
  Clone ID: LIB3138-094-Q1-N1-D9
gggacatggtgagttatcatgaaactattaatgctattgcggcgacaaaattgaaggtgcatcatgttactcatgaaaatgaagcttattgctgataagctagttatcattttaaactctcttagttaattctgttgctgatc

SEQ ID NO: 35882 - DNA, 387 bp, Glycine max
  Clone ID: LIB3138-094-Q1-N1-E1
gtgtttttaacaaacagcatcagtacagagcattttgatgcatgtaagtggacaaaatcagaaccacattcctgggaattgatcttcccaatagaggtatgtggtcctaataatggttttgaaatgtggagttctgagtgggcaaatcaaacttcatggcatttgagtttccttattgacaatcccaaacagtctacagtttttgatattctcttgggaatctctcaagattttgaaattgctggtaatactcttatgccagctttttctgttccacaggctactgccagatcttctgaaaatgcggaatcctctgcatgatctggaatttgtgttttctttcgcttgttcgtttgtttaattcaataaaggatattaggcatgacc

SEQ ID NO: 35883 - DNA, 399 bp, Glycine max
  Clone ID: LIB3138-094-Q1-N1-E10
cgccgatcacggcttctggttcggtctcgagcaagaatacacgctgctcgacgagtttggctggccctacggctggcccaagaacggcttccctgctccccaaggtccttactactgcggtgtgggcactggcaaggtcttctgccgcgacattgtcgaggcacactacaaggcctgcatgtacgccgagattgccatctcaggcaccaacgccgaagtcatgcccgcacagtgggagtaccaagtcggtccctgccccggcatctctctcggcgaccagctctggatgtctcgtttcctgctgcaccgtgtggccgaggaattcggtgccaaggttacttttgccccgaagcccattcccggtgactggaacggcgccggtctgcacaccaacgtgtc

SEQ ID NO: 35884 - DNA, 271 bp, Glycine max
  Clone ID: LIB3138-094-Q1-N1-E11
aaattagtaaaatgacagattttctgtaattttttcttgaagattttaatgttatgtgaccgtttattttgttttaaaaaaaaaaaaaaaaaaaaaaaaaaaaaaaaaaaaaaaaaaaaaaaaaaaaaaaaaaaaaaaaaaaaaaaaaaaaaataaaataaaaaaataaaaaaaaaaaaaaaaaaaaaaaaaaatgggggggccgccataaattgatctttttaacctggaaataaatttggtacaggaatcctgaaggcgtaccattttt

SEQ ID NO: 35885 - DNA, 402 bp, Glycine max
  Clone ID: LIB3138-094-Q1-N1-E12
ctacttctccctctctccctctctaatagtaacagtaatagtaatatacataacataaccaatggaagcacgtgcaggagccaatcaacgtattgcaagaatctctgctcatcttcagccttcaaatttccaggaagggagtgatgttcttcttaagagaggtgagtgcagagcaaaaggtggggcacctggattcaaagttgcaattttgggggctgctggaggaattggtcaatccctttctttgctgatgaagatgaacccattggtttcagttcttcatctttatgatgttgtcaacacccctggtgtcacagctgatgttagccacatggacactggtgctgtggttcgtggctttctggggcagcaacaacttgagagtgcactcactggcatggg

SEQ ID NO: 35886 - DNA, 251 bp, Glycine max
  Clone ID: LIB3138-094-Q1-N1-E2
gaaaaaagtagggtagaatttccgagtcgtctagcctagtaaaaagcaatagcccctgcctcaactccacaatcacaatcatttgtaaagtaaaaaagggtggtttgctggcttgctcgtgcaatctacgataaattcgttcattcacatgttttattttatctgtttgactcagaaggaggagaagacgaagccgaatatacagatagaatcgtttccagcgcaccgatgggagacggggcccccgcaag

SEQ ID NO: 35887 - DNA, 395 bp, Glycine max
  Clone ID: LIB3138-094-Q1-N1-E3
agcaagttatgagcaagatggcagaaatgataaacagtctttgtggtggtgatgaaaaattgatgcgtgaaaggacgcacctgctgttggcttgttgttcaaggatggcaatttgtaagaaagatgtttggagagttgaatgtggaatcccttctggatttccgctcacagttatttgcaatagcatttttaatgagatgctcattagatatagctatgaaaaattactgcgccaggctaaagctccaagtatgtttttacaatccttcaaaaattttgtttctttgtgtgtgtatggtgatgataacttaattagtgttcatgaatatgtcaagccttactttagtggttctaaattgaaaagctttctagctagtcataacatcaccattact

SEQ ID NO: 35888 - DNA, 401 bp, Glycine max
  Clone ID: LIB3138-094-Q1-N1-E4
caactacaaaggttgctgtaggagataagatattgaagtagtgctaagtgcctaacacctgcagtgaacaatggcctctgcatcagcatctcttctcaagtcttcacttgttcttgacaagtctgagtgggtgaagggacaaacacttcgccaaccttctgctgcatcagttgtgagatgcaaccccaccaccccatcaggcctcaccatcagagctggttcctatgctgatgagctcgttaagaccgcgaaaacagtggcttcaccagggaggggtattttggccatggatgagtccaatgctacctgtgggaagcgtttggcttcaattgggctagagaacactgaagctaaccgccaggcataccgtaccctccttgtgacagttccaggacttggtc

SEQ ID NO: 35889 - DNA, 405 bp, Glycine max
  Clone ID: LIB3138-094-Q1-N1-E5
ttctgctctagaaaattcagtgctgaaacatggcttcggctactctctctgtagccaaaccagcccttcaggcaaatgggaaaggcttctctgaattctctggcctccgaagctcatcaggcttccttcccttttctagaaaatcttcagaggatttccattctgtcattgccttccagacctatgcagttggaagcagtggaggatacaagaagggtgtgacagaagcaaaactgaaggttgccataaacgggtttggaaggattggaaggaacttcttgaggtgctggcacggtcgcaaagactcccctcttgatgtcattgccatcaacgacaccggcggcgtgaaacatgcctctcaccttctcaaatacgattccatcctcggaaccttcgatgctgatg

SEQ ID NO: 35890 - DNA, 354 bp, Glycine max
  Clone ID: LIB3138-094-Q1-N1-E6
cttcaaagtggtgaatctgaacgaaatggttaagagggtattggcgtgttttttcccaactgagttctctgttgcagttcatgtggatggtgcaagcaagttgtttgatcagacgtgttttctggatgttaagggatactgtcgcgaagagaggagccacgaagggcttggaatgggtggttctcttgtctaccaaaaatttgccaagacttgtgactgtggttcacctatatcaactctgaagtgctggaaagaggaagatgaagaagagtagttttctaagtgtctttattatgtccttgcgaaaataagatcggttttacagatagtcaattgtattactttgggtgtttt

SEQ ID NO: 35891 - DNA, 392 bp, Glycine max
  Clone ID: LIB3138-094-Q1-N1-E7
tggaaatgcaagaagcttatcttgtcaatctcgtaaatgtgttacgagaattgtatttgcacagtccagaggaagctcgccaattgagaaggaaagctctctctcgtattgaatggctgcaaaaagctgatgtgcctaccatagcacagattgaagagttccattcgatgcagaggatgatgaatgctcctgattcaaatgataatattgatttactgttgagcattgatttgttgggtttacaaggagcaggtaaagcttttccaaacaaaattgtttttgatgataagcttgtgttggctaacacacaagaattctttgatggaaattttccagtggattcttggttaccaatttttgtgaattgtctttatcctgtaagtcaattacct

SEQ ID NO: 35892 - DNA, 392 bp, Glycine max
  Clone ID: LIB3138-094-Q1-N1-E8
cttgttcacccttccccttctccttacttctcactctctttccaaaacactccctttctctttccccttacccttcttctgtgtgtgatgatgtagatagagaataaaaagagaccagtgtgcagtgagaaagaggttggtcacttcttgtgtggctttgttttgttctttgtgttggaatttgttgatgggtgaagagggagaagaggtgtcaagagataaggaacagcaacacatgggagtttatggaaatgagtggttgtttagtagtttctgtgcaaattggcgccgtttaagacaccagaattcctgttctatgcctccttttgagtgaaaaaaaaaaaacatcaaaacaaaaacttgttctctctcagcttttcaattttcgatct

SEQ ID NO: 35893 - DNA, 392 bp, Glycine max
  Clone ID: LIB3138-094-Q1-N1-E9
ctgtaagtcaattaccttcagaagctgtcgttgtaaatgttacatgtggtagtggacgtggtggtttacccaccactgcttggattagttctgcagttaacaatcgctcctcagatatcaacaaaaagattcgcacagcacttgggaaaggtaagaaaattgtttttcttactagagttgatccttttccagtagctttactggctgttctttttggcgttaagaatgaaattctgagttctaacgccactaatcctatgctgacgcgacttcttgagaactgtaagagtctcaaatatctggttgatgagtgtccttttgcatttgtgaactagtatgtagtattttattcacttaaataaagcgcattactatgtgcaatgagtgtgttt

SEQ ID NO: 35894 - DNA, 382 bp, Glycine max
  Clone ID: LIB3138-094-Q1-N1-F1
actcgagaaaagcagcatagtgagatactacgtatactacgtagtactacacatttcatttgcctcttgtagtagccatggttttccaaacaaacattaatcctcacttcgtttgtttcctctcatggctcaaggccacatgatccccatgatggacattgcaagactattggcacggcgtggtgtgattgtttccatattcaccaccccaaaaaatgcatcacgattcaattctgttctttctcgtgatgtttcatcaggcctcccaatccggctagtacaactccattttccatccaaagaagcaggactacctgaagggtgtgagaatttggacatggtagcttcaaacgatttgtacaaaatattccacgccatcaag

SEQ ID NO: 35895 - DNA, 395 bp, Glycine max
  Clone ID: LIB3138-094-Q1-N1-F10
tatgcaggttgtatgttggagatggtaaagaaataaatgttgagaaatgcccaagatccatcctacaacgccagtgcattaaatatcttggaccaaaagaaagggaagagtatgaagtaattgttgaaaaagggaagctggtgtacaaacaagatgggaggcttgtggatactgacggaaagtccaaatggatatttgttcttagcaccacaaggtccttgtatgtggggcgcaagcagaaaggtgcattttaacactctagctttctagctggggctgctacaacagctgcaggaagattagtgtcttatcaatgtttacttgaagctattttgccatatagtggttattattaccctacaaatgagaactttaataaattcataagcttttct

SEQ ID NO: 35896 - DNA, 330 bp, Glycine max
  Clone ID: LIB3138-094-Q1-N1-F11
ggctcgaggtgacttgctagctgctgggtacactggactcacagacatggctggaggttatgctgcatggacacaaaatggactaccaacagagctatgaagtgtttctgttggaactgtagctgtaaatagaataagttttgggaggagttcaatgcatggaaatgcataatcacttcaccaatacagtgacattttgacactgggaaaacaaagatctataaatggaaaattaaatgtatttgtcgatatcaacaataatttaaatgtctatatatatccaactttgcaaagaaactttattacttggttgaaaaataaaaattaaat

SEQ ID NO: 35897 - DNA, 401 bp, Glycine max
  Clone ID: LIB3138-094-Q1-N1-F12
gtgagcacaaaggtgaacacaaaggagaacaccatggtgagcacaaaggtgaacacaaaggagaacaacaccatggggagcacaaggagggacttgtggataagatcaaggacaagatccatggtgatggccatgacaagggtgagaaaaagaagaagaaggacaagaagaagaaggagcatggacatgaccatcatggtcatagcagcagcagtgacagtgattagatcttatatgttaagcaggtgtacggtacgatggtagtgaggagccagaatccctcttcctgctttatgatataatacaaataaaatagcgattccggaaatcatgtctgtagctgctctttttatttatgtgataaatgtaaaacgctttggtttggcttggccgttgtgcat

SEQ ID NO: 35898 - DNA, 278 bp, Glycine max
  Clone ID: LIB3138-094-Q1-N1-F2
ctcttctttctctctcacgttttccgcttcagttttctcgggaaaatcatggtgaaaggtccaggcctctactctgacattggcaagagagctcgcgatcttctgttcaaggattatcagaatgaccacaagttcaccatcaccacttacacttccaccggagtggaaatcacttcaactggagtcaggaaaggtgagatatatttggccgatgttagcactaaggtgaagaacaagaacatcacatctgatgtcaaagtggacactaacataaattt

SEQ ID NO: 35899 - DNA, 257 bp, Glycine max
  Clone ID: LIB3138-094-Q1-N1-F3
cagcaactgggtgtgttggaacttccttctatggaagttggggcacttcaattgttggggaggattacaccatgctggccaagtcagtgccatcacaagttcgtatggggaggggaaagccagtttgattgcttcctatgatgaagaatgtcaatgaagggaaaggtatctttgcacctcttgtggtgatcactcgcaacattgttggcaagaagcgtttcaaccagcttataggcaaagcaattgctttacactct

SEQ ID NO: 35900 - DNA, 402 bp, Glycine max
  unsure at all n locations
  Clone ID: LIB3138-094-Q1-N1-F4
tctcacttctcggatgccctaatttatcatgtcagcgcttaacacctgtggttacgtctctacccttttttgggttcctctcattaccgaaaccgaaacagaaaccatttgtggtgaaccagtggatctcgaaggtcaaagatggccagcatcttctcgaagacgagttttaacttctctaggaatatgtgctcttcttcgattcctcgctgtcactccaaaaccctctcttgcccagtctttgctttgtttattttacccctttttttgtttattaaataggaatctgattatgcattttgttcccatcgccttttcgatccaagcctctgttcttctcacggttntgtccctttttcttgggatttttttggggaaacaaaattcttaatcctctctttg

SEQ ID NO: 35901 - DNA, 403 bp, Glycine max
  Clone ID: LIB3138-094-Q1-N1-F5
ctcagttattgtcaccagtatgcatggaggctctgaaaatccacaatccatcattgaatctttgttcaagaagctcatggcggatgctggtgaagggtgcaagtccttgcacctttctgacacacagtggtagtaagcgaagagggtttggcaaagtaagagttactgctgaagactcagtttctccctctgagaccattgcagatgactattatgaagttcttggactgcttccagatgcgacaccagagcagatcaagaaggcatactacaattgcatgaaatcttgccacccggatttgagtggaaatgatcctgagaccacaaatttctgcatgttcatcaatgaagtctacacggtgctcatcgatcccgtccaacgcatgatttatgatgaaattca

SEQ ID NO: 35902 - DNA, 261 bp, Glycine max
  Clone ID: LIB3138-094-Q1-N1-F6
ggcgtacactactaaaaggaataggagtttccctattgacaatcccgaacagtcgacgagttgggatgaacgcttggcaatctctaaagatgttgacatcgatggtaatactctaaagcctgctttatgtgtaccacaggctacggcgagatcttatgtctacgcgtgatcctctgcatgatctgggatttgggttttttttcgcttgttcgtctgtttaattccaaaaaatgtaaatttgcacgaccctccttgttgagg

SEQ ID NO: 35903 - DNA, 379 bp, Glycine max
  Clone ID: LIB3138-094-Q1-N1-F7
ctctaatgctagctcacaggtgatatatgcgaaaagacatgcatattattcatcggtgttataaattgtctttctggggggcgcgccagtgcatgtatttacaccatcttatgccaagcactgctgatggaggaatcctgcttgcccataggctttctctatgtcattgtgcctaaacccgtggtctgatccatgcagtttggtatctctgaatcgtactggatttcctggcgatatcatttgtgtccctggatgggctgtcaccccaatgcaggatgttcatgtttcaattgattggttaatttcctttcatgaatgtgttcccaggacctattgttgtttaaattcacaaaattctttttgtgttaaataggttgta

SEQ ID NO: 35904 - DNA, 299 bp, Glycine max
  Clone ID: LIB3138-094-Q1-N1-F8
aactagtgcaactttgcaatttagaaagttagcagattgtgattttctcaagagaaactttaagcagatgtctaatgttttgtgggtggctcctgaggacaaggcgagtttatggtcacaacttcattatgtttcgtgtaataatctggaaatgcaagaagcttatcttgtcaatctcgtaaatgtgttacgagaattgtttttttcacagtccatatgaagctctccaattgataaggaaagctctctttcgtattgaatggctgcaaaaagctgatgtgcctaccatagcacatatt

SEQ ID NO: 35905 - DNA, 373 bp, Glycine max
  Clone ID: LIB3138-094-Q1-N1-F9
tgataacttaattagtgttcatgaatatgtcaagccttactttagtggttctaaattgaaaagctttctagctagtcataacatcaccattactgatggtattgacaaaactagtgcaactttgcaatttagaaagttagcagattgtgattttcttaagagaaactttaagcagatgtctaatgttttgtgggtggcatcctgaggacaaggctagtttatggtctcaacttcattatgttttctcgttattattctttaaatgctaatatgctataacttgttaatcttgtaaatgttgtatcgagatttgttttttcacagtccatatgatgcttgccctatttagtaagaaagctttttttttatttaa

SEQ ID NO: 35906 - DNA, 396 bp, Glycine max
  Clone ID: LIB3138-094-Q1-N1-G10
gtggcagttcaggctagaaaggaactccaaaggttggctgctaaaccagatatgcttgcaatgtcacttactgtaaaccctcagcatggtttaagtgatttatcagtaatctcccctagaactcctacttcaccaaactttcaggtgcctccttcctattgggatccacaatctgctggcaatgtcaatcctgactttattggaatgaattacttgtattctattgtagaacttcagaagcagacacatatgcttatctttggagaatcaaataaatgctgtaaaaactgggactggagggattgccaatgattactattgcttagatgcttttgctgtcaattttggtggaaaagcttggagaaggatttttgaaatttcaactaagatatgtca

SEQ ID NO: 35907 - DNA, 400 bp, Glycine max
  Clone ID: LIB3138-094-Q1-N1-G11
agttggtattcctgagaatacaggtatatcattggcctgtgctatgaatagttcttttagggggcgcgccagttctgatatttacaccatctgctctcaagactgtgaattgtggaatcctgcttgcacaaaagcaatgactatgtcatttaatccaaacccgtgttctgatgcatggagtttggaatttctgaagcgtactggatttcattgcgatatcatttgtgtcactggatggactgccaccccaatgcaggatgttcaggttacaattgattggtttatttcctctcaggaatgtgttcccaggacctattgtgttttaaatccacaaaatccttttgtgttaaataggtggatgggaaaattgacttttcctcagggcacttcccgaagtgtt

SEQ ID NO: 35908 - DNA, 382 bp, Glycine max
  Clone ID: LIB3138-094-Q1-N1-G12
caataaacagcgactatgaaagcaatgacagcaacgacaacgtttgatgtctctgccgcttgcttccgtgcccctccttcttgttcaccgaatccatgccacaccagtttttcagttataaactccctgaatcctcacaagggacgacggataagcgttgctgttccacctaagtttccaagcttccggagggaagcagctctgcaggggaatttggaggctgttagagtcccaacttcggtgcctgtgcgtgtagcatacgaacttcttctagctggtcatcgatatttggatgtaaggactccagaagagttcaatgctggacacgctcctggcgcaattaacatactctatatgttcatagttggatcagggatgacaa

SEQ ID NO: 35909 - DNA, 84 bp, Glycine max
  Clone ID: LIB3138-094-Q1-N1-G5
cgagtcgacaagtttttaaaaagtgagattattgtctcaccgtgcatgctatctgcaaacttgtggatattgggagagcaggtg

SEQ ID NO: 35910 - DNA, 105 bp, Glycine max
  Clone ID: LIB3138-094-Q1-N1-G7
gtacaatagctgtgtcagtctcccgttcatctggtggcaggcgatgagactatccttctgcttagtctgttccaaactttattgatttaagaaaattaaattcaa

SEQ ID NO: 35911 - DNA, 266 bp, Glycine max
  Clone ID: LIB3138-094-Q1-N1-H12
caggttcttgtcttttgggcaccattcctcagtccatttcacagcaaactgtttggaatcaaatggctacagtgagaacaccattgaattttgattctagcaagcagagcttttgtcagttttctattgaccttctcggtggaggaatcttattggacaaaactggagattggatcacacttatacaaaattctccaattagtaacttgttgagagttgctgcttgtaagaaaggcttttaaatggtcaaaattgtgattgttttg

SEQ ID NO: 35912 - DNA, 122 bp, Glycine max
  Clone ID: LIB3138-094-Q1-N1-H7
ggacgcacctgttgttggctagttgttcaaggatggcatcgtactgtgttagaagtttgtagagtcgccccctcccattccttatggatttccgcttacagatatttgcattagcattttta

SEQ ID NO: 35913 - DNA, 90 bp, Glycine max
  Clone ID: LIB3138-094-Q1-N1-H8
ctttaagcagatgtctaatgttttgtgggtggctcctggggacattgctatattattgtcacagcttcattatgcttcgtgtaattaatc

SEQ ID NO: 35914 - DNA, 321 bp, Glycine max
  Clone ID: LIB3138-095-Q1-N1-A10
tgggtgtccatatttgtatgcaatggtgcatgatagttcagtgtctacaataccaggtgattttgtcattggtgtcaagttgacaaccataaacaatatgtgtgcatatgggctcaatcctggtatttcaggttctcgtcttttgggcaccattcctcagtccatttcacagcaaactgtttggaatcaaatggcaacagtgagaacaccattgaattttgattctagcaagcagagcttttgtcagttttctattgaccttctcggtggaggaatcttagtggacaaaactggagattggatcacacttatacaaaattc

SEQ ID NO: 35915 - DNA, 292 bp, Glycine max
  Clone ID: LIB3138-095-Q1-N1-A11
gcaagatacgtgggagggaagaatgcactttgatactaaatcgcgctctaaatcggtaaaagtttctctacaaaagcacattttggtagtggaaaaaccactagatctgatataataggtgctggttcacatgcttcaaaaccaaatactgaagaggaagatcacgaaaaacccaattcgattgatgccacattgacacaaacaacagatctaagatcgctgatgttgaggctcatatgtaaacaaatccttctaaattgactctaagagatgttgaaactaccaaaggatc

SEQ ID NO: 35916 - DNA, 382 bp, Glycine max
  Clone ID: LIB3138-095-Q1-N1-A12
caaaccttaataaaaagtcccccaaaatggctccaacaagaaaccaccttcttcacattgccatgttcccatggtttgcaacaggtcacatgactccattcctccacctttcaaacgagttagccaaaaggggtcacaaaatcacgttcttgctacctaaaaaagccaaactacaacttcaacaccttaacaaccattctcaccttatcacattccataccctcacaattcctcatgtaaaaagccttcctcatggcaccgaaacagcctcagagatccccattttcttgaaccatttactagtcatagccatggacaaaaaccgtgaccaagtggagcacacaactagtgcaacaaaccctgattttgtgctctatgataa

SEQ ID NO: 35917 - DNA, 405 bp, Glycine max
  Clone ID: LIB3138-095-Q1-N1-A2
atcacgtgtcactacagggtttccatttaagctttaaaagatcttcaccactagctttctgccgagtagcatagattgagcatttggctgcttgtctagaactcaaatgactgaggtatcttaagcttggtagctgtagcttgactaactatagattgaagagggattcatgatatcagcactaaagcacaacgtactagtctcttcattccgcattttatggaggtgtagtgttcagggtatcttcaacaactttgtacattgttcctaattataagaaaaattcccatgtatcataaaattcatgatatcattgttctttctgtaatgatgaaattttcatcacaattttttcttctttggatagtatttagagggtcttagtattagcttcctcattaattc

SEQ ID NO: 35918 - DNA, 217 bp, Glycine max
  Clone ID: LIB3138-095-Q1-N1-A3
cccccttccttagcctcggaattcgcttcgagggaaatgggttcaccctattccaaattcttccatttattacctattgggaggtgcttcttggaagaaaggctggtttatggtccagaatgggatggctggggatgccaccatccaaaagggggaatgggccctattggttccaggggtttttaccaaccaccaccgttccaaacctttttgttcc

SEQ ID NO: 35919 - DNA, 213 bp, Glycine max
  unsure at all n locations
  Clone ID: LIB3138-095-Q1-N1-A4
ccttccttaacttcgaatttcgcttcgngaaaaaaaaaaacaattttttttaaaattatacaattaaaaacggagggatattaaaaacttggagagaaaaactaaaaaaaaataaaaaattataataaaattaatatacaaaaataaaaaatgaaaaactttgccatcaatttattcaaatttatttacataacaaaagcggggcgccccctt

SEQ ID NO: 35920 - DNA, 376 bp, Glycine max
  Clone ID: LIB3138-095-Q1-N1-A5
gaaaacctcctatataaggcaaagttgcctttggctgtaaccttaatagcacaggtggcaccgttgggtttttaaggactggcttttttaccatttaattcttaaaaccttattctttttggttcattcataagcactgccatcagcccaaacctcccaacagggtcacagggactaaagaggggtaccaccatgtcggacgatgaaggggaggagaaagagttggatctctcttctgcagaagttgtaaccaaatacaaaaccgcggctgagatcgttaacaaggccttgaagctagttatttcagaatgtaaaccaaaggcgaagattgtggatatttgtgaagaaaggggattcatacattcgagagcaaact

SEQ ID NO: 35921 - DNA, 408 bp, Glycine max
  Clone ID: LIB3138-095-Q1-N1-A7
atcacgtgtcactacagggtttccatttaagctttaaaagatctgcaccactagctttctgccgagtagcatagattgagcatttggctgcttgtctagaactcaaatgactgaggtatcttaagcttggtagctgtagcttgactaactatagattgaagagggattcatgatatcagcactaaagcacaacgtactagtctcttcattccgcattttatggaggtgtagtgttcaaggtatcttcaacaactttgtacattgttcctaattataagaaaaattcccatgtatcataaaattcatgatatcattgttctttctgtaatgatgaaattttcatcacaattttttcttctttggatagtatttaaaggtctttagtattagcttcctcattaattctat

SEQ ID NO: 35922 - DNA, 392 bp, Glycine max
  Clone ID: LIB3138-095-Q1-N1-A9
gagcattttgatgcatgtaagtggacaaaatcagaaccacattcctgggaattgatcttcccaatagaggtatgtggtcctaataatggttttgaaatgtggagttctgagtgggcaaatcaaacttcatggcatttgagtttccttattgacaatcccaaacagtctacagtttttgatattctcttgggaatctctcaagattttgaaattgctggtaatactcttatgccagctttttctgttccacaggctactgccagatcttctgaaaatgcggaatcctctgcatgatctggaatttgtgttttctttcgcttgttcgtttgtttaattcaataaaggaaattaggcatgaccctcttgttgagtatgctctgcctatttgaaaa

SEQ ID NO: 35923 - DNA, 400 bp, Glycine max
  Clone ID: LIB3138-095-Q1-N1-B1
tttgtattggagtgctacctggccaaaggaggtcgaacaattggcaaggaagttcctttataacccatacaaagtaattataggctcttctgatttaaaagctaaccatgcaatacggcaatatgttgacattgtttcggaaaagcagaaatatgataaattggtaaagttgctagaggacatcatggatggcagccgaatactgatatttatggataccaaaaaaggatgtgatcaaatcactaggcaactccgcatggatggatggcctgcactctcaattcatggagataaaagtcaagcagaaagagattgggtgctctcagaatttaaatcaggcaaaagtcctattatgacggcaacagatgttgcagcccgtggtctagatgtgaaggatgtg

SEQ ID NO: 35924 - DNA, 394 bp, Glycine max
  Clone ID: LIB3138-095-Q1-N1-B10
cggctcgagctcgagccgttctcttctccttcctcccgaaggaatctctctcatccttttttccttttccctctctacttcatacccttaatttctctacccacccatggctgcaccaccgacgaagtacacccaccacaccaaactactcataccccccggccccgaagaagatccacccaaacacccctatccaaaactcctcagaataaccgtcacagacaccgacgcaaccgactcctccagcgacgaagaacaaaccaacttttccacgcgccaccgacacagaaagctcatcaacgagatttctatcgccagagcttcagacactcggcgcggccagaaattccgcggagtgagacaaaggccctctgggaaaatggtccgcggagat

SEQ ID NO: 35925 - DNA, 393 bp, Glycine max
  Clone ID: LIB3138-095-Q1-N1-B11
gtgctccaactgtggcaaatgctgtcccaaggacaaggccatgaagaggtttctggtgaggaacattgttgaacaggctgcagtcagagatgtgcaggaagcttgtgtctatgaacaatatactcttccgaaactctatgtgaagatgcagtactgtgtttcttgtgctatccactctcatgttgtgagggttcgatcccgcactgacaggaggaaacgtgagcctccacagagattcatcaggcgcagggatgatgcacctaggcctggtcagcccggcggccaaggacctcgtcctgctggcacagcagcacctgtccgaacctaaaagcaaatccttaaaaaaagcctttatgttatgctggactatttttataatataaacttttcttt

SEQ ID NO: 35926 - DNA, 360 bp, Glycine max
  Clone ID: LIB3138-095-Q1-N1-B12
gaattctttgatggaaattttccagtggattcttggttaccaatttttgtgaattgtctttatcctgtaagtcaattaccttcagaagctgtcgttgtaaatgttacatgtggtagtggacgtgtggtttacccaccactgcttggattagttctgcagttaacaatcgctcctcagatatcaacaaaaggattcgcacagcacttgggaaaggtaagaaaattgtttttcttactagagttgatccttttccagtagctttactggctgttctttttggcgttaagaatgaaaattctgagttctaacgccactaatcctatgctgacgcgacttcttgagaactgtaagagtctcaaa

SEQ ID NO: 35927 - DNA, 395 bp, Glycine max
  Clone ID: LIB3138-095-Q1-N1-B2
ctgttctttcaatgtggagatattttgttggagatctcgtctgtgaagtttctaagatgacttctccctacattaaatgtacagtctctttcttcatagcatttggaaatttggctgatgataccatcaattttgaggcttttccccacaagctggtgcagtttggagagattcaggaaaaagttgtattgaaattttcacaagaggaatttcttacagcttggtcaactcaggtgcgtcctgcaacaactctgttggctgatgggtgtccatatttgtatgcaatggtgcatgatagttcagtgtctacaataccaggtgattttgtcattggtgtcaagttgacaaccataaacaatatgtgtgcatatgggctcaatcctgtgatttaaggt

SEQ ID NO: 35928 - DNA, 416 bp, Glycine max
  Clone ID: LIB3138-095-Q1-N1-B5
ggaatttggtttcggggccaccagttggcaaaaaaaagtttgacactctttcttacctgccggaccttgatgatgcacaattggcaaaggaggtaaattccctctttaggaagggttggattcctggctgggaatccgagtggaaggtcaattcttggcaaacactttgggttaaatcataaattttttaattcttagtttgtttaaacttattttcaaaaaataatgggcttctctttgctaagtgtgctaaaaagtacctttttggaaaacaaaaacaaaaaaatggttgtgttccaaaatttaaatttatctaacagatttttctatttgagagttatcaatatgtatcaaatctgttcctatctctgaccaaattttatttcttccaaaacaagcaacttggttttgagttt

SEQ ID NO: 35929 - DNA, 407 bp, Glycine max
  Clone ID: LIB3138-095-Q1-N1-B6
tcggttcgagcctaaacctatctttcttctctctctgggggtgcgcttaaacggcaaccagaagcagccatggccactgcaaggactgtgaaggatgtttaacctaataagttcgttaaggcgtactcctttcacctaaagcgatccggcaagatggagctgccagagtggactgattttgtgaaaactgcaagatttaggagtttgctccctatgatcctgactggtactatgtcagagctgcttccatggcaagaaagatctacttgagaggaggacttggtgttggtgcctttcagaggatttatggtgggagcaagaggaatggtagtcgccctcctcatttttgcaagagcagtggtgccattgctcgtcacattctttaacaagtggcagaacatgaacat

SEQ ID NO: 35930 - DNA, 393 bp, Glycine max
  Clone ID: LIB3138-095-Q1-N1-B8
ctcgagccgcttaaatctagcattgcctgctcaataatgtagcattctaattacgcaatggtaaacatagatatcaattaaaacatgtcctacataagcctccttataaactaaataagaacatggaagtttagtacccaaaaaagtaaaaacatggaagttagaagccaaattcgtacacaacaatacaaagaggaggctttactaaactaaattcacttctttcttttctttgggggctgcaatgcttcctcatcttcctcgtcctcttcattctcctcatcctcagcaccatcttcatcctcttcttcacctgcctcgtcctcttcgtcatcatcatcgtcatcctcatcgtcgtcattctgatcatcaccatcttcatcttcatcctct

SEQ ID NO: 35931 - DNA, 392 bp, Glycine max
  Clone ID: LIB3138-095-Q1-N1-B9
aggttctcgtcttttgggcaccattcctcagtccatttcacagcaaactgtttggaatcaaatggcaacagtgagaacaccattgaattttgattctagcaagcagagcttttgtcagttttctattgaccttctcggtggaggaatcttagtggacaaaactggagattggatcacacttatacaaaattctccaattagtaacttgttgagagttgctgcttggaagaaaggctgtttaatggtcaagattgtgatgtctgggaatgcagcagtcaaaaggagtgattgggcctcattggtacaagtgtttttaacaaacagcaacagtacagagcattttgatgcatgtaagtggacaaaatcagaaccacattcctgggaattgatct

SEQ ID NO: 35932 - DNA, 396 bp, Glycine max
  Clone ID: LIB3138-095-Q1-N1-C10
cacaaggcagaaagcaagctcatcctagagttttaaaaatggcagcagcctcctccatggctctctcttccccatccttggctggcaaggccgtgaagctgggcccatcagcccccgaagtcgggagggtcagcatgaggaagaccgtcaccaagcaggcctcctccggaagcccatggtacggcccagaccgcgtcaagtacttgggcccattctctggcgagcccccgtcctacctcactggcgagttcccaggtgactacggctgggacactgctgggctttcggccgacccagaaaccttcgccagaaaccgtgagctcgaagtgatccactccaggtgggccatgcctcggggccttgggctgcgtcttccccgaactgttgtcccgcaac

SEQ ID NO: 35933 - DNA, 388 bp, Glycine max
  Clone ID: LIB3138-095-Q1-N1-C11
ggtgtgtttacaccctgtgatgacctagcaaaggaagtttttgaagcttctgatgtgagtggggagaaactatggcggctgccattagaggaaagttactgggaaacaatgaaatcaggagttgctgatatgttgaacactggtggtcgacaaggtggtgctattgttgctgctctcttcctgaaacagtttgttgatgaaaaggttcaatggatgcacattgacatggctggtcctgtgtggaatgacaagaagcgctcagcaacaggatttggcattgctactttagtggaatgggttttgaaaaatgcttcaaatgccaactgaaatttcaaatctttgttacatcgtatgtgaaacacaggatgagataagctcatcttgtgat

SEQ ID NO: 35934 - DNA, 309 bp, Glycine max
  Clone ID: LIB3138-095-Q1-N1-C12
cttaattagtgttcatgaatatgtcaagccttactttagtggttctaaattgaaaagctttctagctagtcataacatcaccattactgatggtattgacaaaactagtgcaactttgcaatttagaaagttagcagattgtgattttctcaagagaaactttaagcagatgtctaatgttttgtgggtggctcctgaggacaaggcgagtttatggtcacaacttcattatgtttcgtgtaataatctggaaatgcaagaagcttatcttgtcaatctcgtaaatgtgttaccagaattgtatttgca

SEQ ID NO: 35935 - DNA, 405 bp, Glycine max
  Clone ID: LIB3138-095-Q1-N1-C2
tggaatttggtctcggggtttattttcccttattgggggagggaatagccccttaggcttgggcctcggttgtaatggtggcaaccaaccaccctaactttggcctttcctggtaaatcttccttggttgccactgcaaagtcctcgggggtggaaaccgaaccaggagcttgggttttggcaccccggcccacccttattaggaggaggattgaccccaaccatttttggacttgcaaaagggatgggaaatggaaatggggtaaaacctttttcattaatccctgacagaactcatcatcaaagaagctctaaaggaccagtggcattcttgggcgggatgtttgcggtatttttagactttgattgaatgaggagcccctcaagggaatggttactaggact

SEQ ID NO: 35936 - DNA, 389 bp, Glycine max
  Clone ID: LIB3138-095-Q1-N1-C3
cttagctgatcacagattcttattccttgtgcctggaaaggctgcccctggcatagcagaactcatagcacttgaaacatcaaaacagacaaatgctccactggaggaagtgcgcaagaatatttggctggtggactcaaagggattgattgtcagttctcgcaaagattcgctccaacattttaagaagccctgggctcatgagcatgaacctgttaaaaatcttctagatgctgttaataaaattaagccaacagtgttgattggaacatcgggacaaggaagaacttttactaaagaagtgattgaggcaatggcttctattaacaagagacctattattctttctctttccaaccctacgtcacagtcagaatgcactgctgaag

SEQ ID NO: 35937 - DNA, 400 bp, Glycine max
  Clone ID: LIB3138-095-Q1-N1-C5
gggatttttagatttggtcacatgcccggaaaagttttcacaagggggaccttaagggcaaatttgaagcaaaaaacaacgcattcaacccttaacccccttccaacaaatttccttttcttttcggttttgttttctttcgttttgcttaagttcttaagaaccttaacttcttgatatcaaggattaaggagaaaaaatggaatcctaaaaggttgctggattcggggggaaggccttcgtaacattctgcaacggtctcggctctggcttgtgctatatgtctccaagaaggggcagggtcacccgcctttgctattgcagtggtcttggcatgtattgtgatgtatgatgccaccgggagttagacttcatgcaggtagacaagcagaattgctta

SEQ ID NO: 35938 - DNA, 402 bp, Glycine max
  Clone ID: LIB3138-095-Q1-N1-C6
gacaacaggcactttttttatttcctatcacaccttattacagattcacaagcgcagacacttaaaatggctctggaagctcttcaatcacccagaactgccactccatcgtttagtccctttgaagaaaccaacctcagttacttggagacaccgtggaccaaaggaaagcgttctaagcgtagccgcatggagcagcaactgcaacactcttcatgcaccgaggaagagtacctcgctctctgtctcatcatgctcgctcacggcgggcgccggcggtgtccccgccgccaagcctgctgtctccgacaacaattccgcgccgctacccgccgccaaactgagctacaaatgttcggtctgcaacaaagccttctcctcttaccaaagcactcggtggac

SEQ ID NO: 35939 - DNA, 391 bp, Glycine max
  Clone ID: LIB3138-095-Q1-N1-C7
ctctattcttttaaaccttagtctcccacggaagacttcaacagaagaaaaaggaagaattaatatcactcttccatggttgccgacgaagcttcaccattcgagaccagcgatatgctggcaacgctcctggcgtcgacgccgctgttgtcagagtcatggcggctgtgcaccaccgtggccgccaccgcgccgaggagtttcatgactgagcagcacggtggcggcggtgtggtgtacgtcgctttccccggcgtagaaatggcggcgggatcggactctatctgcagaaacttggtggcgttggaaagcatcggcgacgtgccactgttctcggcgcggcgtcgcaacaaggaaggcgatgaaccttgtgatgggcatgctgggatgc

SEQ ID NO: 35940 - DNA, 391 bp, Glycine max
  Clone ID: LIB3138-095-Q1-N1-C8
atagtccttcgttagcatattctccaagcagtccgagattgtctccatcaagtccatatagtcccacatcaccgaactatagcccaacgtcgccatcatattccccaacatctccatcttattctccatcaagcccaacatacagtcccagcagcccttataattctggtgtgagcccagactatagcccaagttcgccccaatttagtcccagtacgggttactcaccaagtcaacctggttactcaccatcttcaaccagccagtacactccacaaactagtgacaaggatgatggaggcactcgctgaggacaacttgaggctggacagaggacttatgctatgctgggatcagacattgagctgttcgagggctattagtttgcatt

SEQ ID NO: 35941 - DNA, 394 bp, Glycine max
  Clone ID: LIB3138-095-Q1-N1-C9
cttctctctctctctctaaaaccctaattctatacatggaagggaaatctcaaatctaatgactaattaattaatccatcgatcaagcatggagtccgaactcaaagacctcaattcgaagccgccgaacggcaacggcaacagcgttcgcgatgaccgtcctctgctgaagccggagcctccggtctccgccgacagcatcgccgatatggagaagaagttcgccgcttacgtccgccgcgacgtgtacggcaccatgggacgcggcgagttgcctcccaaggagaagctcttgctcggtttcgcgttggtcactcttctccccattcgagtcgttctcgccgtcaccatattgctcttttattacttaatttgtagggtttgcactctcttc

SEQ ID NO: 35942 - DNA, 394 bp, Glycine max
  Clone ID: LIB3138-095-Q1-N1-D11
cagcagtcaaaatgagtgattgggcctcattggtacaagtgtttttaacaaacagcaacagtacagagcattttgatgcatgtaagtggacaaaatcagaaccacattcctgggaattgatcttcccaatagaggtatgtggtcctaataatggttttgaaatgtggagttctgagtgggcaaatcaaacttcatggcatttgagtttccttattgacaatcccaaacagtctacagtttttgatattctcttgggaatctctcaagattttgaaattgctggtaatactcttatgccagctttttctgttccacaggctactgccagatcttctgaaaatgcggaatcctctgcatgatctggaatttgtgttttctttcgcttgttcgtttg

SEQ ID NO: 35943 - DNA, 392 bp, Glycine max
  Clone ID: LIB3138-095-Q1-N1-D12
gattgaaggctctttatggccagaccaagagtaaaaaagggagggtgaaattgttggatgctgaagaaataccagcaccaattgttcatgtcgagaaagatatgtttgtactggtggatgatgttttactgctacttgaaagggctgcaatagaaccactgcctcctaaagatgagaagtgtcctcaaaaccgtacgaaggatggaaattctggagaggatttcaataaagattctgtagagcgtgatgaaaggcgcctaacagaattgggccgtaggactttggaaatatttgtccttgcccatatattcagtaataaaattgagattgcctatcaggaagctgttgctctgaaaagacaagaagaactcatccgtgaagaagaagctgca

SEQ ID NO: 35944 - DNA, 400 bp, Glycine max
  Clone ID: LIB3138-095-Q1-N1-D4
cagttttctattgaccttctcggtggaggaatcttagtggacaaaactggaaattggatcacacttatccaaaattctccaattagtaacttattgagagttgctgcttggaagaaaggctgtttaatggtcaagattgtgatgtctgggaatgcagcagtcaaaaggagtgattgggcctcattggtacaagtgtttttaacaaacagcaacagtacagagcattttgatgcatgtaagtggacaaaatcagaaccacattcctgggaattgatcttcccaatagaggtatgtggtcctaataatggttttgaaatgtggagttctgagtgggcaaatcaaacttcatggcatttgagtttccttaattgacaatcccaaacagtctacagtttttgat

SEQ ID NO: 35945 - DNA, 272 bp, Glycine max
  Clone ID: LIB3138-095-Q1-N1-D5
aaaaagattgcacagcacttgggaaaggaagaaaattgtttttctactagagttgatccttttcagtagctttactggctgttctttttggcgttaagaatgaaattctgagttctaacgccactaatcctatgctgacgcgacttcttgagaactgtaagagtctcaaatatctggttgatgagtgtccttttgcatttgtgaactagtatgtagtattttattcacttaaataaagcgcattactatgtgcaatgagtgtgtttaaatat

SEQ ID NO: 35946 - DNA, 370 bp, Glycine max
  Clone ID: LIB3138-095-Q1-N1-D7
ctcgtattgaatggctgcaaaaagctgatgtgcctaccatagcacagattgaagagttccattcgatgcagaggatgatgaatgctcctgattcaaatgataatattgatttactgttgagcattgatttgttgggtttacaaggagcaggtaaagcttttccaaacaaaattgtttttgatgataagcttgtgttggctaacacacaagaattctttgatggaaattttccagtggattcttggttaccaatttttgtgaattgtctttatcctgtaagtcaattaccttcagaagctgtcgttgtaaatgttacatgtggtagaggacacgtgtgttacccaccactgcttggattagttctgcagtt

SEQ ID NO: 35947 - DNA, 393 bp, Glycine max
  Clone ID: LIB3138-095-Q1-N1-D8
attcctcagtccatttcacagcaaactgtttggaatcaaatggcaacagtgagaacaccattgaattttgattctagcaagcagagcttttgtcagttttctattgaccttctcggtggaggaatcttagtggacaaaactggagattggatcacacttatacaaaattctccaattagtaacttattgagagttgctgcttggaagaaaggctgtttaatggtcaagattgtgatgtctgggaatgcagcagtcaaaaggagtgattgggcctcattggtacaagtgtttttaacaaacagcaacagtacagagcattttgatgcatgtaagtggacaaaatcagaaccacattcctgggaattgatcttcccaatagaggtatgtggtcct

SEQ ID NO: 35948 - DNA, 454 bp, Glycine max
  Clone ID: LIB3138-095-Q1-N1-E1
gacactctcaaagcttgacgtccatgccccccttccttagcttcgaaattcggttcaagcggccgtcctcgattcgactatggtttttgggtcctactgggcgtctgctgtccttgctctgtcaatcgttttcctggcttaaaacataatggggttgttcagccggaaaaattacttggaggtggttggcaagactgtcttgctgactggtgcttccactggtttggcccgtggcgtggccaagaccttagcaaaaaaaggagaaaatatcgtgattgttgcgaggaaccaggctcgtctggctgaagcactcgctgttgtcagtgctgcagcgaaggatcccgccaaacagcgtttcaccaccatcttcgcggacgtgagcagcgctgaggagaatgtccgcatcgtggcagaaacaaccgcttggaacaatggcctggcccccgacatcgtc

SEQ ID NO: 35949 - DNA, 399 bp, Glycine max
  Clone ID: LIB3138-095-Q1-N1-E10
gcaacagcccatgcgagaaaggttagctacagactctagcagtcatactcatacttcagtaaacaagacagtttctaatacaatcaccgctgcacgggttcacaatccttctgagaatggtccaaaacaagaaagagcaaagggaagttcaagtggttctctggatgatgtcaagggtgcagacggtgttttaataaagaaaaaggtaaagagaaagccagatcagggtttggaaggaactcattttcgccccgagaagtcagcagcttctctgcaaggagaagaaaaaccaagatccctaaagcagtctgcaggtgttccccccaaatcaaaccttcagccaacttctctacctgggcttgagcagtcaagcttaacatgatatcaactaggatgttt

SEQ ID NO: 35950 - DNA, 375 bp, Glycine max
  Clone ID: LIB3138-095-Q1-N1-E12
attgaattttgattctagcaagcagagcttttgtcagttttctattgaccttctcggtggaggaatcttagtggacaaaactggagattggatcacacttatacaaaattctccaattagtaacttgttgagagttgctgcttggaagaaaggctgtttaatggtcaagattgtgatgtctgggaatgcagcagtcaaaaggagtgattgggcctcattggtacaagtgtttttaacaaacagcaacagtacagagcattttgatgcatgtaagtggacaaaatcagaaccacattcctgggaaatgtcttcccaatagaagtatgtggcctaataatggtttggaatgtgagttctgagtgggaaatcaaactt

SEQ ID NO: 35951 - DNA, 425 bp, Glycine max
  unsure at all n locations
  Clone ID: LIB3138-095-Q1-N1-E2
ccttccttagcttcgaatttcggttggggaaattgaagccggttttcacattatggcctttgggattagctttggtttccagtggcctggcttaatccaccggttttaaaaaaggccggccggccttccaaggcttctattaatggaaatgagtcttcccaacccggatttaagcccgccggaaagggttaagaaaccaggccggtggctgaaaaagtactgcaagaggtttggagtcccatttgagtacaattcctttgcacaaaaaggggaactataaaacttgaagacctcaaatttgataggagtgaaagtactgtggttaactgtttgtacagattgaagaacctatccgatgaaaccgtgactgccaactgtccaagagatgctttgcttgaggtgatcanggggatcaatccaaacat

SEQ ID NO: 35952 - DNA, 356 bp, Glycine max
  Clone ID: LIB3138-095-Q1-N1-E8
ctctagccgcttaattagggttcatgaatatctcaagccttactttagtggttctaaattgaaaagctgtctagctagtcataacatcaccattactgatggaattgacaaaactagtgcagctttgcaatctacaaagttagcagattgtgattatctcaacagaaactttaagcagatgtataatgtttagtgggtggctcctgaagacaaagccagtttatggtcacaacttcattatgtttcgggtaataatccggaaatgcaagaagcttatcttgacaatctcgtaaatgtgttacgagaatttgatttgcacaagccacaggaagctcgctcattgagaaggaaagctc

SEQ ID NO: 35953 - DNA, 383 bp, Glycine max
  Clone ID: LIB3138-095-Q1-N1-E9
gaaaaacttgcagaggcacttggtttgccattcgagtttcgagcagtggcatcaaggacttccattgtcaccccatcaatgctcgactgtagtcctgatgaagcacttgtggtgaactttgcattccagcttcatcacatgcccgacgagagtgtttcaacagcaaacgaacgggaccaacttcttcgcttggtgaagagcttgaatccaaagcttgtgacagtggtggagcaagatgtgaacacaaacaccacccccttcttacctagatttgttgaggcctacaattattactctgctgtgtttgagtcacttgatgcttcctcttcctagagaaagccaagacaggatgaatgttgaaaggcaatgcttaacaagggaca

SEQ ID NO: 35954 - DNA, 408 bp, Glycine max
  unsure at all n locations
  Clone ID: LIB3138-095-Q1-N1-F1
ctttaaatggccgaaatgatgtgtgaagggtggtggtaattttaaagagaaaaaaaaaaaaaaaaaaaaaaaaaaaaaaaaaaaaaaaaaaaaaaaaaaaaaaaaaaaaaaaaaaaaaaaaaaaggggagaagggaaagaaanatacgatccgccccaagggcacgcccaagtccccctcttcggggcaccaacaaacacaacccccaaaagtgcagccaaaaaaaaaagggggggggccccccccaaaagaagacccccccccccgaaaaaaaaaccccccccgcccccgggggggcaacccatttccccaaaaaggggaaaaaaaaaacccgggcaaaaaaagggaaaaaacggcccccggggaaaaaaggtttccccaccaaaaacccccaaaaaaaaggggggg

SEQ ID NO: 35955 - DNA, 395 bp, Glycine max
  Clone ID: LIB3138-095-Q1-N1-F10
gcaggagcggctttggtcttagattacaaagccaaagcaaaaggttgaagatggtatctttggcacttctggaggatttggttttactaagcagaacgagctctttgtgggtcgtgttgctatgcttggttttgcagcatcactgttgggtgaaggaataactgggaaaggaattctagcacaattgaatctggaaactggaattcccctttatgaagcggagcctcttcttctgtttttcatcctcttcaccctgctaggagccattggaggtttaggtgaccgtggaaaatttgttgatgacgaacctactactggaggtgttattcctccaggcaaaggcttcagggaagctcttggtcttggttcaggtcctttatttggattcacgaaag

SEQ ID NO: 35956 - DNA, 395 bp, Glycine max
  Clone ID: LIB3138-095-Q1-N1-F11
aggtacttgaccaaaaaggtgtgggtcaactcatcaagatatgcacagaaaagggtcgtgctgctaggccaaacttaaaggttggaatatgcggagagcatggcggggagccttcttcggttgcattttttgctgaaattggacttgactatgtttcatgttctccttttagggttccaatagctaggcttgcagcagctcaagttgcagtttaagaggcagttaccaatgaatggcatgtgagaggattattgactctcgacaaccgtaaataactctggttcatcataagcccgtatacatcagaaatggaactcataacatataattgtaaaagtgaaagcaaaggaaaattaatttgcaaatgtttgttaataaaaaagagaaaacatggt

SEQ ID NO: 35957 - DNA, 394 bp, Glycine max
  Clone ID: LIB3138-095-Q1-N1-F12
gttaaaagccttagccttccctacaactccaaacacaaagacatcatcatccatggctgcctccgtctccactgtcggagctgtcaacagagctcttttgaacctgaatggttctggagctggagcttcagctcccagttcagccttctttgggaccagcttgaagaaggttattgcctcaagggtccccaacagcaaggtttccggtggaagcttcaagattgttgctgtagaagagaagaaagagattgaagagacccagcagaccgacaaggacagatggaagggtcttgcctatgatatctcagacgaccaacaagacatcacaagaggaaagggtttggttgactcccttttccaagctccacaggatgctggaactcactatgcagtc

SEQ ID NO: 35958 - DNA, 382 bp, Glycine max
  Clone ID: LIB3138-095-Q1-N1-F2
ggaaatgtgttaaccatccttccatattggaaatattaccatgtgtccattaataataaccaaatcaaatcaattgggttcatgtttcttcaggctgattcttttaaaaaacattaacaattagcatattctcttccttctgtgcaagttgtctgcgtgatggaattaacaatatagaaactaaagcatcattaccatgattagagtgttttccagaagctcctttctatttgaaaataaccaaactagatatttaattgttcgatatgctcaaaatacaaagacattctctatcttctgccagtagtagtcacgaagtatggcactgtaaattcatttcttgtgaattaggatgacttatccataccaatatgagctgtac

SEQ ID NO: 35959 - DNA, 152 bp, Glycine max
  Clone ID: LIB3138-095-Q1-N1-F3
ccttccttagcctcggatttcggttcgggggccattcattgtgaaggccagttccagttgggaggttccaccttggttgttcctggtttccaattttggtggtcagggggggttgtcctcgattaaaagttacccatgttggtccttaggct

SEQ ID NO: 35960 - DNA, 402 bp, Glycine max
  Clone ID: LIB3138-095-Q1-N1-F6
gaaaaaaacaatgtatcatctgttatggctttgggccttaagaggctggatggaactaccagtggggtcgaaagccaaccttcacgtttatgaaaacctattcaacagctacccagaattgcaagatgccttggtttgggtctactttcactcaaacattccagaattcaacaaggtggaatgttggggcccactgaaggaagcgtcagcacccacaggtggtgtccatgatgaggggttggcaattccacagtcatgccaagaagaatgccaatgttgctctccaccgcttactttgagccctattcagtggtctaaacaagttcccaaccgccattacgaaccttgtgatgggattgggacccaacaaaatctataaacagccaaactactacaattcat

SEQ ID NO: 35961 - DNA, 318 bp, Glycine max
  Clone ID: LIB3138-095-Q1-N1-F7
gaaagaaacagttagtgattgccggaaaagggacaaatctactgtagttgccaacaagaatgtttctggtcgtaagttgtctctatatgccagcaagaagaagaattctgcaaaatctgttagagagctggatctatctatctgtgaaaagtgcactcccagttactatcttctaccaaaagaatttcaaatcccatcttctagccggagaacaaaacttgatgcagaagtattgaatgaccattggaaatgtgttgctccaagtattaaggattattcttctaaacacatgagcaaaaatcttaatgaaatgacctt

SEQ ID NO: 35962 - DNA, 387 bp, Glycine max
  Clone ID: LIB3138-095-Q1-N1-F8
gggaggcaagggacaaggaaaatctttccaatgtgagcttgtctttgccaagatgggaatcaaccccatcatgatgagtgctggagagttggaaagtggaaatgcaggagagccagcaaaactgatcaggcagagataccgtgaagctgcagacatgatcaagaagggaaagatgtgcgctctcttcatcaacgatcttgatgcacgagctggtcgtcttggtggaaccacacaatacactgtgaacaaccagatggtgaatgccactctcatgaacattgctgataaccccaccaatgtgcagcttccaggtatgtacaacaaggaagagaacccccgtgttcccatcattgtcaccggtaacgatttctcaacactctatgcacc

SEQ ID NO: 35963 - DNA, 391 bp, Glycine max
  Clone ID: LIB3138-095-Q1-N1-F9
gcagggtatcctctaccctgcaagaagagaggtaccctgcggggaaactgtattggggtgtaaacggagacaaactaaacaagctgaggaaatatactttctttgcattaaaaaacagtgggataactgcatcccccatagcacagcctgaatatagcgctgaaccggatgtctcatgggttcattcattggttaaagatgttccctccgagaggtctgagatatttggtgctgtgaagcaacaatatgatctcagtaaagagatgctttcaacatggatggagcaactgtatatacagcatgagcagatggtaacattaactatggctgtcatggcaattctttcttggttattctgacaaagcttatttatttatttaattaattttat

SEQ ID NO: 35964 - DNA, 396 bp, Glycine max
  Clone ID: LIB3138-095-Q1-N1-G10
gggcaatgatattctgtgttgcgattatgctagttttgatggtttgattaccaagcaagttatgagcaagatggcagaaatgataaacagtctttgtggtggtgatgaaaaattgatgcgtgaaaggacgcacctgctgttggcttgttgttcaaggatggcaatttgtaagaaagatgtttggagagttgaatgtggaatcccttctggatttccgctcacagttatttgcaatagcatttttaatgagatgctcattagatatagctatgaaaaattactgcgccaggctaaagctccaagtatgtttttacaatccttcaaaaattttgtttctttgtgtgtgtatggtgatgataacttaattagtgttcatgaatatgtcaagccttactt

SEQ ID NO: 35965 - DNA, 396 bp, Glycine max
  Clone ID: LIB3138-095-Q1-N1-G11
gaaactttaagcagatgtctaatgttttgcgggtggctcctgaggacaaggcgagtttatggtcacaacttcattatgtttcgtgtaataatctggaaatgcaagaagcttatcttgtcaatctcgtaaatgtgttacgagaattgtatttgcacagtccagaggaagctcgccaattgagaaggaaagctctctctcgtatcgaatggaactcttcaatctgtgcagaggatgatgaatgctcctgattcaaatgataatattgatttactgttgagcattgatttgttgggtttacaaggagcaggtaaagcttttccaaacaaaattgtttttgatgataagcttgtgttggctaacacacaagaattctttgatggaaattttccagtggat

SEQ ID NO: 35966 - DNA, 394 bp, Glycine max
  Clone ID: LIB3138-095-Q1-N1-G12
gtagacatcacaaaccttccctccattcatcccacgcatggctgccatgaactctagcgtattggcctgtagctatgccatatcaggtgcagcgtgttcggagctcaatgggaaggtcacttccgtggcctatgttgcatgctctggctacaagttgccattgatcaaagctgaggccagagttcctaaagccaaagaatctgaaggaggaaggagaggtgcccttgttctcttggcagctacccttttcacctctgcagcttccaattcttctgccaatgctgggatcattgaagattaccttgagaggagcaaggccaacaaggaattgaatgacaagaagaggttagctactactggagcaaactttgcaagagcatacaccgtggaattc

SEQ ID NO: 35967 - DNA, 185 bp, Glycine max
  Clone ID: LIB3138-095-Q1-N1-G4
ttccatgaagggcttctgtggtggtgattaaaaattgatgcgtgaaaggacccccctgctggtggcttgttcttcagcgattgccctcaagaacattaccatctcttggttagtcctcattacgaatcccttctggatttccgctcacagttatttgcaatagcatttttaatgagatgctcatt

SEQ ID NO: 35968 - DNA, 390 bp, Glycine max
  Clone ID: LIB3138-095-Q1-N1-G6
gtggctcctgaggacaaggcgagtttatggtcacaacttcatgatgtttcgtgtaataatctggaaatgcaagaagcttatcttgtcaatctcgtaaatgtgttacgagaattgtatttgcacagtccagaggaagctcgccaattgagaaggaaagctctctctcgtattgaatggctgcaaaaagctgatgtgcctaccatagcacagattgaagagttccattcgatgcagaggatgatgaatgctcctgattcaaatgataatattgatttactgttgagcattgatttgttgggtttacaaggagcaggtaaagcttttccaaacaaaattgtttttgatgataagcttgtgttggctaacacacaagaattctttgatggaaat

SEQ ID NO: 35969 - DNA, 338 bp, Glycine max
  Clone ID: LIB3138-095-Q1-N1-G7
ctccaagtatgtttttacaatccttcaaaaattttgtttctttgtgtgtgtatggtgatgataacttaattagtgttcatgaatatgtcaagccttactttagtggttctaaattgaaaagctttctagctagtcataacatcaccattactgatggtattgacaaaactagtgcaactttgcaatttagaaagttagcagattgtgattttctcaagagaaactttaagcagatgtctaatgttttgtgggtggctcctgaggacaaggcgagtttatggtcacaacttcattatgtttcgtgtaataatctggaaatgcaagaagcttatcttgtc

SEQ ID NO: 35970 - DNA, 326 bp, Glycine max
  Clone ID: LIB3138-095-Q1-N1-G8
gtgtatggtgatgataacttaattagtgttcatgaatatgtcaagccttactttagtggttctaaattgaaaagctttctagctagtcataacatcaccattactgatggtattgacaaaactagtgcaactttgcaatttagaaagttagcagattgtgattttctcaagagaaactttaagcagatgtctaatgttttgtgggtggctcctgaagacaaggcgagtttatggtcacaacttcattatgtttcgtgtaataatctggaaatgcaagaagcttatcttgtcaaatctcgtaatgtgttacgaagattgtatttgca

SEQ ID NO: 35971 - DNA, 348 bp, Glycine max
  Clone ID: LIB3138-095-Q1-N1-G9
cttcattatgtttcgtgtaataatctggaaatgcaagaagcttatcttgtcaatctcgtaaatgtgttacgagaattgtatttgcacagtccagaggaagctcgccaattgagaaggaaagctctctctcgtattgaatggctgcaaaaagctgatgtgcctaccatagcacagattgaagagttccattcgatgcagaggatgatgaatgctcctgattcaaatgataatattgatttactgttgagcattgatttgttgggtttacaaggagcaggtaaagcttttccaaacaaaattgtttttgatgataagcttgtgttggcctacacacaagaattctttgat

SEQ ID NO: 35972 - DNA, 394 bp, Glycine max
  unsure at all n locations
  Clone ID: LIB3138-095-Q1-N1-H1
ggcccatcagcccccgaagtcgggagggtcagcatgaggaagaccgtcaccaagcaggccttctncggaagcccatggtacggcccagaccgcgtcaagtacttgggcccattctctggcgagcccccgtcctacctcactggcgagttcccaggtgactacggctgggacactgctgggctttcggccgacccagaaaccttcgccagaaaccgtgagctcgaagtgatccactccaggtgggccatgctcggggccttgggctgcgtcttccccgaactgttgtcccgcaacggggtcaagtttggagaagctgtgtggttcaaggccgggtcccagatcttcaacgagggtgggctggactacttgggcaacccaagccttgtccacgccc

SEQ ID NO: 35973 - DNA, 395 bp, Glycine max
  Clone ID: LIB3138-095-Q1-N1-H11
tcgttcgttcgttcctctgattattattcatcgatcagaattgatgatggagtcctccttcgatccaacggtcaacggctcaccacacctatcccttttcaacggccacgattgaatcggcgagatccgtcggtcaacggtctcttctaaggcgcggttagagagagaaagagagaagagagagagagaaagggaagggagagagatgacgtcacgatcggggcaggggagcagcggcggagggagcagcaggacccgtgtggggaagtacgagctgggtcggacgctgggcgagggcaatttcgccaaggtgaaattcgcgaggcacgtggaaactagagagaacgtcgccatcaagattctcgacaaggagaaactactcaaacacaaaatga

SEQ ID NO: 35974 - DNA, 360 bp, Glycine max
  Clone ID: LIB3138-095-Q1-N1-H2
taatgggggcgggtcaccatctttaagaaaattttcttgaaagggaggtccaggaaaaccccaaaaggttggtgcccgattgggaccaaaaattgattcttaattccatgggggtcaaggttcaattggaaccaaattggttaaaatggcttctggtgaatgtggaaactctaaagggttcattgtggatctgaaaattctcaatctaaaatgcactcccacgaacacagttggaggaaccattctgcgtagtgatctattggcaaattttttgacagagggcaattttagaagcagtgttgatttgcagcgcactcatcgtattagaggaatgattaaaatggtggccacaagtggtat

SEQ ID NO: 35975 - DNA, 399 bp, Glycine max
  unsure at all n locations
  Clone ID: LIB3138-095-Q1-N1-H4
cctcagtccatttcacagcaaactgtttggaatcaaatggcaacagtgagaacaccattgaattttgattctagcaagcagagcttttgtcagttttctattgaccttctcggtggaggaatcttagtggacaaaactggagattggatcacacttatacaaaattctccaattagtaacttgttgagagttgctgcttggaagaaaggctgtttaatggtcaagattgtgatgtctgggaatgcagcagtcaaaaggagtgattgggcctcattggtacaagtgtttttaacanacagcaacagtacagagcattttgatgcatgtaagtggacaaaatcagaaccacattcctgggaaatgatcttcccaatagaggtatgtggtcctaaataatgg

SEQ ID NO: 35976 - DNA, 398 bp, Glycine max
  Clone ID: LIB3138-095-Q1-N1-H5
gttaaaagccttagccttccctacaactccaaacacaaagacatcatcatccatggctgcctccgtctccactgtcggagctgtcaacagagctcttttgaacctgaatggttctggagctggagcttcagctcccagttcagccttctttgggaccagcttgaaaaaggttattgcctcaagggtccccaacagcaaggtttccggtggaagcttcaagattgttgctgtagaagagaagaaagagattgaagagacccagcagaccgacaaggacagatggaagggtcttgcctatgatatctcagacgaccaacaagacatcacaagaggaaagggtttggttgactcccttttccaagctccacaggatgctggaactcactatgcagtcatga

SEQ ID NO: 35977 - DNA, 295 bp, Glycine max
  Clone ID: LIB3138-095-Q1-N1-H7
aaacaaacaaaatattttttaagaacaaaataaaaaaaacgggggccaaacaaaacttctgcgagaaacccaaaaaactaaccaaaccacgtaaactacttgatcccattctctgcctagccccctatcttcctcactgacacaatttccgggccactacttcttgaacactgctccacttttaaacatcccataaaccttctccagaaacctccatctccaattgatccactccagaacacccatgctcgaacccttctgcttcgtcttcccttgacaaattttcctccaccgg

SEQ ID NO: 35978 - DNA, 312 bp, Glycine max
  Clone ID: LIB3138-095-Q1-N1-H8
atccaacgactgaggtcaatcttaaagtaagcgttgatcgggcgcgcactcatctggttaggggagagagaaacacggaggccacaggtggtttacttgtgaatacacgattgttatgggactgagctatgcatagcagaataagggggcgcgtcccttgtgagcattacacaagccgctgtcaatactgtgaataggggaatgacggttgcacaaaatcaatgactgtgtcatgtgatgcacaccatgattgtgatgcatggaactgggcatacctgaagtgcactgacagctataacgatagcatctgat

SEQ ID NO: 35979 - DNA, 384 bp, Glycine max
  Clone ID: LIB3138-095-Q1-N1-H9
aaggaagagaacccccgtgtgcccatcatcgtcaccggtaacgatttctcaacactgtatgctcctctcatccgtgatgggcgtatggagaagttctactgggcacctacaagggacgatcgtgttggcgtctgcaatggaattttccgcactgacaatgttcctaaggatgacattgtcaagcttgttgacaccttccccggccaatctattgatttctttggtgcactcagggctagagtatatgatgatgaggtgaggaagtggatttctgttgttggtgttgacttcattgggaagaagcttgtgaactccaaggaaggacctccaacctttgaccaaccgaagatgactttgagcaagctcttggagtatggtaacatg

SEQ ID NO: 35980 - DNA, 376 bp, Glycine max
  Clone ID: LIB3138-096-Q1-N1-A1
ctcgagccgaatcggctcgagaactcaagtgcgtcctgcaacaactctgttggctgatgggtgtccatatttgtatgcaatggtgcatgatagttcagtgtctacaataccaggtgattttgtcattggtgtcaagttgacaaccataaacaatatgtgtgcttatgggctcaatcctggtatttcaggttctcgtcttttgggcaccattcctcagtccatttcacagcaaactgtttggaatcaaatggcaacagtgagaacaccattgaattttgattctagcaagcagagcttttgtcagttttctattgaccttctcggtggaggaattttagtggacaaaactggagattggatcacacttatacaaaat

SEQ ID NO: 35981 - DNA, 386 bp, Glycine max
  Clone ID: LIB3138-096-Q1-N1-A10
ctcggtggaggaatcttagtggacaaaactggagattgcatcacacttatacaaaattctccaattagtaacttgttgagagttgctgcttggaagaaaggctgtttaatggtcaagattgtgatgtctgggaatgcagcagtcaaaaggagtgattgggcctcattggtacaagtgtttttaacaaacagcaacagtacagagcattttgatgcatgtaagtggacaaaatcagaaccacattcctgggaattgatcttcccaatagaggtatgtggtcctaataatggttttgaaatgtggagttctgagtgggcaaatcaaacttcatggcatttgagtttccttattgacaatcccaaacagtctacagtttttgatattct

SEQ ID NO: 35982 - DNA, 376 bp, Glycine max
  Clone ID: LIB3138-096-Q1-N1-A11
ctcaagactgtgaattgtggaatcctgcttgcacaaaagcaatgactatgtcatttaatccaaacccgtgttctgatgcatggagtttggaatttctgaagcgtactggatttcattgcgatatcatttgtgtcactggatggactgccaccccaatgcaggatgttcaggttacaattgattggtttatttcctctcaggaatgtgttcccaggacctattgtgttttaaatccacaaaatccttttgtgttaaataggtggatgggaaaattgactttcccccaaggcacttcccgaaatgttaagagaatgcctctttctataaggggaggagctggtgcaaagaatgctattctcatgaatatgccaaatgc

SEQ ID NO: 35983 - DNA, 319 bp, Glycine max
  Clone ID: LIB3138-096-Q1-N1-A12
ggagatgatgcatcatctccttctctgtctgatggtattggaaatcatccagagccttaaggcaaaatgagataactgtacattcgaatttaggtcagtattttctcaacagactaggatgatgtgcaagtgcaaatatagtaagttgcatcacttgacaaagttgaggaagatgggctatctcttgtagtgacttctgctgaagcaattgttttgaagttttttccaggccgatgtaatcgctacatgtagactatctggaagatatttttgtaatgcttaagattttgttgaatactagtgaatttgcttccttatt

SEQ ID NO: 35984 - DNA, 382 bp, Glycine max
  Clone ID: LIB3138-096-Q1-N1-A3
ttgctcatcagcattcaggtgccactggatcaactctctatgcacaggatggaagggttatatgttcttcaataccaaggtatggaaagggaaaggaagcaggaaacgaagtagactacattgtaggaatgagcacatgttatcctcaaccaggttctgtaaagataattgatggtgaaactataactctagagtctaactacagcaagcagccgtggccacactggagtaatggggcttttctacctattggtggcagaacagcttccacaccaacacttcagatattcttctcgttcttcattttttatgaatataaatagtataattcattgatagataagttgtgagatgcaaatataagttgagtgtcatatcgatg

SEQ ID NO: 35985 - DNA, 388 bp, Glycine max
  Clone ID: LIB3138-096-Q1-N1-A4
gaaatggccaccacttctgcttcattcgcgagcttctccgtcatcttgcgaccttcttcgtccaatccccaattcttcctcttcaacgtcgctccccgaaccggaacctctcattcccgaacccgttcgactcggttcaggtgctcggccggtcagaccgggttcttcacgaaactagggcggttgataaaggagaaggcgaagagcgacgtggagaagcttttctcgggattctccaagacccgcagcaacctcgccgtcatcgacgagcttctcctctattggaacctcgccgacaccgatcgggtcctcgacgaactcgaagaggctcttttagtgtctgattttggtccaagaatcactattaaaatagtggagaatttgcgcg

SEQ ID NO: 35986 - DNA, 182 bp, Glycine max
  Clone ID: LIB3138-096-Q1-N1-A5
aacaaatgtttggccagaggaaattctgggtttggataacggaaaggtaatttccgtggcgtggtataatattatagagaagaaagccccttcttttgagggggctactatcagattcaaaattgattaaatttcaaaccttttttttgttaattagaattataatttttgaattattttga

SEQ ID NO: 35987 - DNA, 347 bp, Glycine max
  Clone ID: LIB3138-096-Q1-N1-A7
tggttctgctgtcttctagcttcttcttaactcttttttctttttactacttttaagctaccttgttttcaaaataacaaaaacaaacactttcttacttcataagatcaccttttcttcatcttctacttctccttcactaaaatgatgctcaaaatcaagagggttcccactgtcgtttccaacttccaaaaagacgacgctgcagactctcctcgtcccgtcggaagttgtggtcggaattgcctcaaagcttgttgcattccagatgcaaagctgcctttgtatggtttcaagaaggctaatattgggaaggatttggccctgcatgcatgcgccggggagcc

SEQ ID NO: 35988 - DNA, 374 bp, Glycine max
  Clone ID: LIB3138-096-Q1-N1-A8
aaattcatctaaccccaaacaaaaccctagcacacttttatcgcttagtggcagcagcagtggcggcaagcaactccatccgcaatgggaatcgatttgaaggcaggaggtaagtccaagaagaccaagcgaaccgcccccaaatccgatgatatctacctcaagcttctcgtcaagctgtaccgttttcttgttcggaggactgggagtaacttcaatgctgttgtcctcaagcgccttttcatgagcaaggtcaacaagcccccgctatccctctctagattgatccgttacacgaagggaaaggaggataagatagctgtggttgttggtgccgtgaccgatgacattagggtttatgaagtccctgctct

SEQ ID NO: 35989 - DNA, 336 bp, Glycine max
  Clone ID: LIB3138-096-Q1-N1-A9
gacaagaagttttttggaggagaggaatttgggttggtagatattgctgctgtcttcatagcattttggatcccaatttttcaggaaatagcagggttgcagttattcaccagtgagaaatttcctatactctacaaatggagccaagaattccttaaccacccttttgtgcacgaagtccttcctcctagagacccactttttgcctacttcaaagcccgctatgaaagtctttctgcttcaaaatagacttatttaaggatatttgttgaacaacttgtgtcttgttgagttattgctgtttgaatttcatgtaaaatgatactagctatatgt

SEQ ID NO: 35990 - DNA, 378 bp, Glycine max
  Clone ID: LIB3138-096-Q1-N1-B1
aggcaacagggtgctgccgaggtcaaggtggttcaatgcatatgttctcgaaagagcacaacttgctcggtgggtttgcctttattggtgaaggaattccggtggccaccggggctgcattttcgagcaagtacagaagagaggttttgaagcaggcagattgtgatcatgtgacgttggcattttttggagatgggacttgtaataatgggcagttctatgaatgcctgaacatggcagctctgtggaaattgccaattgtgtttgtggcggagaataatttgggggctattgggatgtcgcatctcagagcaacctcagatcctcagatatggaagaaagggccagcatttggaatgcccagggttcatgtagatg

SEQ ID NO: 35991 - DNA, 377 bp, Glycine max
  unsure at all n locations
  Clone ID: LIB3138-096-Q1-N1-B10
aacagtctttgtggtggtgatgaaaaattgatgcgtgaaaggacgcacctgctgttggcttgttgttcaaggatggcaatttgtaagaaagatgtttggagagttgaatgtggaatcccttctggatttccgctcacagttatttgcaatagcatttttaatgagatgctcattagatatagctatgaaaaattactgcgccaggctaaagctccaagtatgtttttacaatccttcaaaaattntgtttctttgtgtgtgtatggtgatgataacttaattagtgttcatgaatatgtcaaagcttacttttagtgttctaaattgaaaagctttctagctagtcataacatcaccattactgatggtattgacaa

SEQ ID NO: 35992 - DNA, 385 bp, Glycine max
  Clone ID: LIB3138-096-Q1-N1-B11
caatgtgtagctgctgaagcgttggcgggtgtgctacattctgatattgatggtctatcaggaacatgggaaagttggctgatgcctcagttgaagaacatcattttagcccaatctgttgaatcagtttcagagtgggcatcttgcatacgatatgcagttactggtaaaggaaagtatggaacaagagttcctcttttaagacagaaaattctggattctttgatgacacctttacctccaacagtagctactacagtaacagccaaacgatatacttttctggctgctgcacttatagaaatatccccacagaaaatgccagtagctgaaatccagctccacaatacacttctgaaagaagttcttggtaatgtgccactca

SEQ ID NO: 35993 - DNA, 389 bp, Glycine max
  Clone ID: LIB3138-096-Q1-N1-B12
cgcattttccctcttctttctctctcacgttttccgcttcagttttctcgggaaaatcatggtgaaaggtccaggcctctactctgacattggcaagagagctcgcgatcttctgttcaaggattatcagaatgaccacaagttcaccatcaccacttacacttccaccggagtggaaatcacttcaactggagtcaggaaaggtgagatatatttggccgatgtcagcactaaggtgaagaacaagaacatcacaactgatgtcaaagtggacactaactcaaatctgcgtacaatcattactgtggatgaacctgcccctggactcaagacaatttttagctttaattttccagatcagaaatctggcaaggtagaactccagtacc

SEQ ID NO: 35994 - DNA, 384 bp, Glycine max
  Clone ID: LIB3138-096-Q1-N1-B3
gtgagaacaccattgaattttgattctagcaagcagagcttttgtcagttttctattgaccttctcggtggaggaatcttagtggacaaaactggagattggatcacacttatacaaaattctccaattagtaacttgttgagagttgctgcttggaagaaaggctgtttaatggtcaagattgtgatgtctgggaatgcagcagtcaaaaggagtgattgggcctcattggtacaagtgtttttaacaaacagcaacagtacagagcattttgattgcatgtaagtggacaaaatcagaaccacattcctgggaattgatcttcccaatagaggtatgtggtcctaataatggttttgaaatgtggagttctgagtgggcaaa

SEQ ID NO: 35995 - DNA, 389 bp, Glycine max
  Clone ID: LIB3138-096-Q1-N1-B4
cagaaatgataaacagtctttgtggtggtgatgaaaaattgatgcgtgaaaggacgcacctgctgttggcttgttgttcaaggatggcaatttgtaagaaagatgtttggagagttgaatgtggaatcccttctggatttccgctcacagttatttgcaatagcatttttaatgagatgctcattagatatagctatgaaaaattactgcgccaggctaaagctccaagtatgtttttacaatccttcaaaaattttgtttctttgtgtgtgtatggtgatgataacttaattagtgttcatgaatatgtcaagccttactttagtggttctaaattgaaaagctttctagctagtcataacatcaccattactgatggtattgacaaa

SEQ ID NO: 35996 - DNA, 391 bp, Glycine max
  Clone ID: LIB3138-096-Q1-N1-B5
ggcaatgggaattcagaaatatgtcttctactccatccataactgggacaaacatcccgaggttcccctcatggagatcaagttttgcactgagaagttcctccgagactctggcctcaatcacgtcattatccgcttatgcggtttcatgcagggccttatcggccagtatgcagttcccatcctagaagaaaaatctgtttggggtactgatgcccccacccgaattgcttacatggatactcaggatatagctcgcttgacatttatagccatacgaaatgataaattaaatggtaaacttcttacatttgccggtcctcgtgcctggacaacccaagaggtgataaccttgtgcgagaggctagcaggccaagatgctaatgtcact

SEQ ID NO: 35997 - DNA, 380 bp, Glycine max
  unsure at all n locations
  Clone ID: LIB3138-096-Q1-N1-B8
cgtgattgacgtgtgtaacggcctgcttggcgggttcgctgccattacatcgggctgtgccgttgtggaaccgtgggccgcgattgtctgcgggtttgtggcggcgtgggttttgatttggcttaataagcttgccgcgaaggtagagtacgatgatccgttggaggcggcgcagcttcacggcgggtgcggagcttggggggttttcttcacgggattgtttgcgaagaaagtgtacgtggaggagatttacggtgttggaaggccgttcggggctttgatgggtggcggagggaggctgctggcggcgcangtgattcagatattggtggtgtgcggggtgggttacggcgaccatggcgccgttgttctatgggctt

SEQ ID NO: 35998 - DNA, 242 bp, Glycine max
  Clone ID: LIB3138-096-Q1-N1-C1
ttcgggttgagcgagataacttgaaacagggtggtgaaaatgaaaggccttggtttcttcggtggttccattttgggaggatgggaattgccttccgtccaaatttttccttttccaaagaaaaattggttttggggcccgacttccgaggggaaaatgcccaaattggaggtttgtttggaaagacaccaaattttttggttttagaaccattcttgaaaagggcgttgaacaaccaaagg

SEQ ID NO: 35999 - DNA, 384 bp, Glycine max
  Clone ID: LIB3138-096-Q1-N1-C10
gcagaaatgataaacagtctttgtggtggtgatgaaaaattgatgcgtgaaaggacgcacctgctgttggcttgttgttcaaggatggcaatttgtaagaaagatgtttggagagttgaatgtggaatcccttctggatttccgctcacagttatttgcaatagcatttttaatgagatgctcattagatatagctatgaaaaattactgcgccaggctaaagctccaagtatgtttttacaatccttcaaaaattttgtttctttgtgtgtgtatggtgatgataacttaattagtgttcatgaatatgtcaagccttactttagtggttctaaattgaaaagctttctagctagtcataacatcaccattactgatggtatt

SEQ ID NO: 36000 - DNA, 382 bp, Glycine max
  Clone ID: LIB3138-096-Q1-N1-C3
ggacaaggcgagtttatggtcacaacttcattatgtttcgtgtgataatctggaaatgcaagaagcttatcttgtcaatctcgtaaatgtgttacgagaattgtatttgcacagtccagaagaagctcgccaattgagaaggaaagctctctctcgtattgaatggctgcaaaaagctgatgtgcctaccatagcacagattgaagagttccattcgatgcagaggatgatgaatgctcctgattcaaatgataatattgatttactgttgagcattgatttgttgggtttacaaggagcaggtaaagcttttccaaacaaaattgtttttgatgataagcttgtgttggctaacacacaagaattctttgatggaaatttt

SEQ ID NO: 36001 - DNA, 260 bp, Glycine max
  unsure at all n locations
  Clone ID: LIB3138-096-Q1-N1-C4
agctggtgcagtttggagagattcaggaaaaagttgtattgaaatttgcacaagaggaatttcttacagcttggtcaactcangtgcgtcctgcaacaactctgttggctgatgggtgtccatatttgtatgcaatggtgcttgatagttcagtgtctacaataccaggtgattttgtaattggtgtcaagttgacaaccataaacaatatgtgtgcatatggggctcaatcctgggatttcaaggttctcgtcttttgg

SEQ ID NO: 36002 - DNA, 380 bp, Glycine max
  unsure at all n locations
  Clone ID: LIB3138-096-Q1-N1-C6
ggcaattttaaagcaggggttgtttggcagcgcactcttcgttttagaggaatgattaaaagggggggccacaagtgggttttcctgagaatacaggtatataatgggcctgtgctatgaatagttctttaagggggcccgccagttctgatattaacaccatctgctctcaaaactgtgaattgtggaacccttctggcaaaaaagcaatgactatgtcattaaatccaaacccgtgttctgatgcattggagttgaatttctgaagcgtactggatttcattgcgatatcatttgtgtcactggatggactgccaccccaatgcangatgttcaggttacaattgattggtttatttcctctcaggaatgtgttccca

SEQ ID NO: 36003 - DNA, 211 bp, Glycine max
  Clone ID: LIB3138-096-Q1-N1-C7
ggtctgcaaaagagaaggacagctctgtcgacaattgcggggcggcgaaaagctcatgggcttgccctggcactggtggaagagttgccttgcttgcggaggaccattagtgctacggatataaatgatcagattgatttactggggcacattgaattttttgggcaacaaagcgcaagtaaagctcttccgcactaaattgacatagaag

SEQ ID NO: 36004 - DNA, 373 bp, Glycine max
  Clone ID: LIB3138-096-Q1-N1-C8
ctctgttggctgatgggtgtccatatttgtatgcaatggtgcatgatagttcagtgtctacaataccaggtgattttgtcattggtgtcaagttgacaaccataaacaatatgtgtgcatatgggctcaatcctggtatttcaggttctcgtcttttgggcaccattcctcagtccatttcacagcaaactgtttggaatcaaatggcaacagtgagaacaccattgaattttgattctagcaagcagagcttttgtcagttttctattgaccttctcggtggaggaatcttagtggacaaaactggagattggatcacacttatacaaaattctccaattagtaacttattgagagttgctgcttggaaaaa

SEQ ID NO: 36005 - DNA, 379 bp, Glycine max
  Clone ID: LIB3138-096-Q1-N1-C9
attgaattttgattctagcaagcagagcttttgtcagttttctattgaccttctcggtggaggaatcttagtggacaaaactggagattggatcacacttatacaaaattctccaattagtaacttgttgagagttgctgcttggaagaaaggctgtttaatggtcaagattgtgatgtctgggaatgcagcagtcaaaaggagtgattgggcctcattggtacaagtgtttttaacaaacagcaacagtacagagcattttgatgcatgtaagtggacaaaatcagaaccacattcctgggaattgatcttcccaatagaggtatgtggtcctaataatggttttgaaatgtggagttctgagtgggcaaatcaaact

SEQ ID NO: 36006 - DNA, 388 bp, Glycine max
  Clone ID: LIB3138-096-Q1-N1-D10
tggtatttcaggttctcgtcttttgggcaccattcctcagtccatttcacagcaaactgtttggaatcaaatggcaacagtgagaacaccattgaattttgattctagcaagcagagcttttgtcagttttctattgaccttctcggtggaggaatcttagtggacaaaactggagattggatcacacttatacaaaattctccaattagtaacttattgagagttgctgcttggaagaaaggctgtttaatggtcaagattgtgatgtctgggaatgcagcagtcaaaaggagtgattgggcctcattggtacaagtgtttttaacaaacagcaacagtacagagcattttgatgcatgtaagtggacaaaatcagaaccacattcc

SEQ ID NO: 36007 - DNA, 389 bp, Glycine max
  Clone ID: LIB3138-096-Q1-N1-D11
gggtttcgttctctactaccgttctttcatcagatcgctgccgtttctggcgtcattccgataattcggcggcatgaagctaacagtgaagactttgaaagggagccatttcgaaatcagggttcaaccctccgatactgttatggctgtcaagaagaatattgaagatgtacaaggaaaagataattacccatgtggacagcaattgttgattcacaatggcaaggttttgaaagatgaaactacattagtagagaataaagtctctgaagatggctttcttgttgttatgcttagtaagagtaaaacatcaggttctgctgcagcttcatctgttcagcctgccagtaatcctcctacgactgtatcaacgtcaaattccacccctc

SEQ ID NO: 36008 - DNA, 379 bp, Glycine max
  Clone ID: LIB3138-096-Q1-N1-D12
ggaagagatacaatttgagcttaggtcttggactgaacaaagttgctgggaaggttttcagaattggacatcttggcaacttgaatgagttgcaactgttgggatgtctagctggtgtggagatgatactgaaagatgtgggctatcctgtaaagcttggaagtggagttgctgctgccagtgcatacttacaggacactattcctatgatcccttccaggatttgagtcacaagtcattcttgtctttacttccttttttctgctctttcggaaattctgtaaaatatatattaccctcttttacactcctttgaagatgaacatacactctacttcaaaggagtgtaaaagagggtaatatatattttacagaattt

SEQ ID NO: 36009 - DNA, 382 bp, Glycine max
  Clone ID: LIB3138-096-Q1-N1-D3
ggtgattttgtcattggtgtcaagttgacaaccataaacaatatgtgtgcatatgggctcaatcctggtatttcaggttctcgtcttttgggcaccattcctcagtccatttcacagcaaactgtttggaatcaaatggcaacagtgagaacaccattgaattttgattctagcaagcagagcttttgtcagttttctattgaccttctcggtggaggaatcttagtggacaaaactggagattggatcacacttatacaaaattctccaattagtaatttattgagagttgctgcttggaagaaaggctgtttaatggtcaagattgtgatgtctgggaatgcagcagtcaaaaggagtgattgggcctcattggtacaag

SEQ ID NO: 36010 - DNA, 394 bp, Glycine max
  unsure at all n locations
  Clone ID: LIB3138-096-Q1-N1-D4
attcattactcactatactcatacggggtttctaaatcatatgccaaattagtagacaccctatgaattgttgttctgccatggcgtcccttctcaaatcaccttcctttctctctcctttgaaccaaaagttgaattatgtaagcttttctcccatgaccacaaacctgcaatccaaattttgtcgtgctagtgtaagaaatgggagatggcatgttcctagtttgacaataaaatctcaggcagctgttgaaggggatgtacttgagaaagaatcagtctctatcaatgaagaaagtgattacggngtcgtttgtatgcaccatgttggaattttatgtgaaaacctagaaagatcacttgaattttatcaaaacgttctaggcctcaagat

SEQ ID NO: 36011 - DNA, 386 bp, Glycine max
  Clone ID: LIB3138-096-Q1-N1-D5
tcttggagaagtggatgctgagcttcttgacacccaagtgaatcctgctgtgtgggaaattagtgggcacatggttctaaagaggaagaaggattatgatgaggcatctgaaggcaatgcttggaggcttcttgcagaggtgtccctctctcaagagaggtttcaagaagtcaatgatcttatttttgaagccattggctgtggtgaattggaggatgtcaacgttgaaagtgtcaaagaagttgatgcagtcagcacaagcgaacaccctactgtggtggtagctggttcacaagaatgtgtgattctacactaacaaggctctaaaattatgaacaaattcagcaaatccgtagtgctttaagaataattgctgaattgtgtca

SEQ ID NO: 36012 - DNA, 389 bp, Glycine max
  Clone ID: LIB3138-096-Q1-N1-D6
caatttttgagaattgtctttatcctgtaagtcaattaccttcagaagctgtcgttgtaaatgttacatgtggtagtggacgtggtggtttacccaccactgcttggattaattctgcagttaacaattgctcctcaaatatcaacaaaatgattcgcacagcacttgggagaggtaagaaaattgtttttcttactagagttgatccttttccaatagctttactggctgttctttttggcgttaagaatgaaattctgagttctaacgccactaaccctatgctgactccacttcttgagaactgtaagagtctcaaatatctggttgatgagcgtacttttgcatttgggaactagtatgtaatatttgattcacttaaataaagc

SEQ ID NO: 36013 - DNA, 370 bp, Glycine max
  Clone ID: LIB3138-096-Q1-N1-D7
aaaaaaaaaaaaaaaaaaaaaaaaaaaaaaaaaaaaaaaaaaagaaaaagaaaaaaaaaaaaaaaaaaaaaaaaaaaaaaaaaaaaaaaaaaaaaaaaaaaaaacaaaaaaaaaaaaaaaaataaaaataaaaaaagaaaaaaaaaaaaaaaaaaaaggggggggcccctccctgggggccttgcccccccggaatttatttcgggacgggtcccggggggggaacccgttttccttttggggggagctttaggggccgggggaataaagggcaataccttttttggggggaaaatggttgcccgttcaaaatcccccaaacctttcgggccggatgtataaatgaaaaacccggggggccctaagaggg

SEQ ID NO: 36014 - DNA, 380 bp, Glycine max
  Clone ID: LIB3138-096-Q1-N1-D8
gacaaccataaacaatatgtgtgcatatgggctcaatcctggtatttcaggttctcgtcttttgggcaccattcctcagtccatttcacagcaaactgtttggaatcaaatggcaacagtgagaacaccattgaattttgattctagcaagcagagcttttgtcagttttctattgaccttctcggtggaggaatcttagtggacaaaactggagattggatcacacttatacaaaattctccaattagtaacttgttgagagttgctgcttggaagaaaggctgtttaatggtcaagattgtgatgtctgggaatgcagcagtcaaaaggagtgattgggcctcattggtacaagtgtttttaacaaacagcaacagta

SEQ ID NO: 36015 - DNA, 381 bp, Glycine max
  Clone ID: LIB3138-096-Q1-N1-D9
aacaaaatggtcaacctttcccaacaaaagcgacttgccgctgctgtggctggtgtcggccagaggaagatctggctcgacccccaggaggctgccgagatcggacaggccaactctcgatcgggtgtcaggaagctgctcaaggatggtcacatcatcatcaagccgaccaccatccactcgcgagcccgaaccagggagctgcacgccgccaagcgactgggccgacacaccggtaccggtaagcgaaagggtaccgccgaggcccgaatgcccaccaaggtgcaatggctccgacgaatgcgagtcctccgacgactgctgaagaagtaccgagagggcggcaagatcgacaagcacttgtaccacacgctctacctc

SEQ ID NO: 36016 - DNA, 385 bp, Glycine max
  Clone ID: LIB3138-096-Q1-N1-E10
cagattttagacctcaagaagaaacaagaaagccatgtgcaactattaaagcaaaaggggaagagtgaagaaactgcaaaaagactgcagactgggatacaatatatcaagtctcaaaaagttcagttgcagcataaaatggagcaaggagcagaacaatttcgacaatggaaggcttctcgtgagaaagagctactccagttgaaaaagggaggaagaaaaaatgagtatgaaaggcataagcttgaggctctaaaccagcgtcagaaatggttcttaaaggaagacagaggaagcaacaatggctacgaaaaggctaaaagaattgttggaagcccgcaaatcttctcctcgtgacaactctgtttattcaaatgggcatcta

SEQ ID NO: 36017 - DNA, 386 bp, Glycine max
  Clone ID: LIB3138-096-Q1-N1-E11
cgtgagtctatgcttgaagaagttgacttttacaaggaggctgcaaatattgaggcttttaggagatatttagaaacaatgggacttactgggaatgcaacagctccaaaagtgtatcgatactgcagtacaatgaaagttttaactatgcaaagactatatggagttcctcttactgacctagactccataagtttcattagtttctaatccagaaaccagccttataactgctctcaatgtgtggtttggaagtttgcttgcatgtgaatcttttcatgcagatgtacatgcaggaaatctgtggcttctacgtgatggccgtattgggtttcttgacttcggaattgttggtcgtatatcccctaaaacatgggctgctatgg

SEQ ID NO: 36018 - DNA, 388 bp, Glycine max
  Clone ID: LIB3138-096-Q1-N1-E12
ttcactttcacatcaactcaagagattcaaccaagtcatagaagctagctagggtgtattgttacatttgttagcaaaaaacttgaaaaaatggagagcagcttgggagacatgttgattaaggttgtggtgttcattctagttcaagccttggtgtaccttatcctctccaattcatcaaacattttcaacaagaacatgaagaaatccaacagcttcaggccagcgaggtcggtgagcattcgccggatgctggctttgatctctgattttcctccagaaggggaaccctctccttcaccaaagggtcctaaaactccatcacttcatcaaagtgatcaataattgtaaggttttaattaaattgtggttgcaattacaaattgga

SEQ ID NO: 36019 - DNA, 93 bp, Glycine max
  Clone ID: LIB3138-096-Q1-N1-E2
ctcgacccgggccattctcatcctcctctgtctctctctctccaccattgccatggatccttacaagctccggcccatcaacgcctttaattc

SEQ ID NO: 36020 - DNA, 383 bp, Glycine max
  Clone ID: LIB3138-096-Q1-N1-E3
gttcccaggacctattgtgttttaaatccacaaaatccttttgtgttaaataggtggatgggaaaattgactttcccccagggcacttcccgaagtgttaagagaatgcctctttctatagggggaggagctggtgcaaagaatgctattctcatgaatatgccaaatgctgtttctttcaatgtggagatattttgttggagatctcgtctttgaagtttctaagatgacttctccctacattaaatgtacagtctctttcttcatagcatttggaaatttggctgatgataccatcaattttgaggcttttccccacaagctggtgcagtttggagagattcaggaaaaagttgtattgaaattttcacaagaggaatttc

SEQ ID NO: 36021 - DNA, 389 bp, Glycine max
  Clone ID: LIB3138-096-Q1-N1-E4
ggcgaatggaatgctgactgtgttgttggagaaagggtttttgccaaatgatgttacttatgctcatttgatgcagggttatgctcgaaaggaggaggttcaggaagttttaaagttgtattatgaaatggagtacagatgtgtgagtcctggattgtcggttttcgggacgattgttcagtgtttttgtcgttgtgggaaggttgaagatgcagagaagtatttgaggattatgaaagggcgtttggtgaggccagatgtgagtgtgtaccaggcgttgattgatggatacatgaagaagggggagagtgctagggctcttcaccttcgtgacgagatggcttctttggaggtgtaatgtgacattgttgttgtgctaaagagtggtg

SEQ ID NO: 36022 - DNA, 380 bp, Glycine max
  Clone ID: LIB3138-096-Q1-N1-E5
agattctaaaaattgccagttacattcccttcacaagattctcacaaacaactcttgagaaagaaagaatggctgccaacacattgatgagttctgccatctcagccttcccatctctcctttcctcctcaaaatccagatttgccgcagcagttcctctttccagctttgttgtcaccaatgcctcttcttctcgcttttccatgagtgctgactggatgcctggccagcctagacccccctaccttgatggttcagcacctggtgactttggattcgaccctcttcgtcttggtgaagtaccagagaatcttgagaggttcaaagagtcagaactcattcactgcagatgggccatgcttgctgttccagggattttg

SEQ ID NO: 36023 - DNA, 385 bp, Glycine max
  Clone ID: LIB3138-096-Q1-N1-E6
caaggagcaggtaaagcttttccaaacaaaattgtttttgatgataagcttgtgttggctaacacacaagaattctttgatggaaattttccagtggattcttggttaccaatttttgtgaattgtctttatcctgtaagtcaattaccttcagaagctgtcgttgtaaatgttacatgtggtagtgggacgtggtggtttacccaccactgcttggattagttctgcagttaacaatcgctcctcagatatcaacaaaaggattcgcacagcacttgggaaaggtaagaaaattgtttttcttactagagttgatccttttccagtagctttactggctgttctttttggcgttaagaatgaaattctgagttctaacgccact

SEQ ID NO: 36024 - DNA, 381 bp, Glycine max
  unsure at all n locations
  Clone ID: LIB3138-096-Q1-N1-E7
ctgcatgtttgttctctcaacgactcctccgcgaaagagtattattcaatattttggttgggttgaatcccggggttgaagcgttgcagacatcacggctattctaagagtgtctcgctccctcattcatgtccgatctgtacgacggaggacgggtagttgcgtaactgccgttaacccttcgccgcacggtgggcgtggtgctttgccttctgaaggtggtagcccttcagacttgctcttcctcgctggtggtggtttcttctagtttcttcactcttttcattacttttagcctgcatagttttaaataagaaaaaaaaaacagcgactttgtgactagttaagatcanccgttcttcttcttcttcttcttcttct

SEQ ID NO: 36025 - DNA, 385 bp, Glycine max
  Clone ID: LIB3138-096-Q1-N1-E8
cgcccattcaaccataccgtaccagcagaggaaagagagaaaatttcagaacaaaaaagaagcagaggaaaagagagatagagagagaagaaaagctgtgaagagaagagtctgaaatctgaatcataaataattggtttttgagatgaagaactgcgagttgtgcaagcttccggctcggactttctgcgagtcggaccaggctagcttatgctgggactgcgacgccaaggttcatggagccaacttcctcgtggaaagacacacgcgcacgctcctctgccacgcgtgccagtcgcccacgccgtggaaggcctccggcgccgccctcggaaacaccgtctcgctgtgcgagagatgcgccggcggaaccaccgaacaaggt

SEQ ID NO: 36026 - DNA, 382 bp, Glycine max
  Clone ID: LIB3138-096-Q1-N1-E9
caactgcgtaaagctcaaagctttttgacagtttgagcatttcagacaaacatgggggatgatggaaagaagattagtggagagggggggttagtgaaggttgagccaaaacccagcaatggtttcacctcaaaagtggttgatttgttggagaaattggtggtgaagttcttgtatgattcttcactgccccatcactacctcactggtaattttgctcccgtgagtgagacccctccaaccaaggaccttcctgtcaaagggtaccttccggattgcttgaatggggagtttgtcagagttgggcctaatccgaagtttgctcctgtagctggatatcactggtttgatggagatggaatgattcatggcttgcgcatca

SEQ ID NO: 36027 - DNA, 380 bp, Glycine max
  Clone ID: LIB3138-096-Q1-N1-F1
gggaaacggtatgtttgccaaaggtacaaggaggactaggagtcaaggatatcacttcgttcaatatatcattgttggaaaagtggaaatgggacctgtttcagaatcaaggggagacttggacaagagttcttgaatcaaagtatggagggtggcggagtctagatggagcttcgaggactagtatcgaatccttatggtggagggacctgaagacgataaatcatcattcacatcagggacagcaagttgaataggtcaactttgaggaaggtcgggtgtggggacaagttcaaattctgggaggataagtggataggtggagatactcaattgttagagaaatatccaagattatacaccacatcggctcagcaaca

SEQ ID NO: 36028 - DNA, 390 bp, Glycine max
  Clone ID: LIB3138-096-Q1-N1-F10
agaaaaaaaaaaacccttagccaacacaaccatcatggccacctctgctattcagcaatcagcattcactggtcaaactgctctgaagcagctcaatgagttcgtccgcaagaccggtggcgccggcaaaggtcgcactaacatgcgccgcaccgtcaagagtgctcctcagagcatttggtatggccctgaccgtcccaagtacttgggtccattctcggagcagattccatcatacctgaccggagaattccctggtgactacggatgggacactgctggattatcagctgacccggaaaccttcgccaggaaccgggagctggaggtgattcacagcagatgggcaatgcttggtgcccttggctgcaccttcccagagatccttga

SEQ ID NO: 36029 - DNA, 388 bp, Glycine max
  Clone ID: LIB3138-096-Q1-N1-F11
gtgagaacaccattgaattttgattctagcaagcagagcttttgtcagttttctattgaccttctcggtggaggaatcttagtggacaaaactggagattggatcacacttatacaaaattctccaattagtaacttgttgagagttgctgcttggaagaaaggctgtttaatggtcaagattgtgatgtctgggaatgcagcagtcaaaaggagtgattgggcctcattggtacaagtgtttttaacaaacagcaacagtacagagcattttgatgcatgtaagtggacaaaatcagaaccacattcctgggaattgatcttcccaatagaggtatgtggtcctaataatggttttgaaatgtggagttctgagtgggcaaatcaaa

SEQ ID NO: 36030 - DNA, 381 bp, Glycine max
  Clone ID: LIB3138-096-Q1-N1-F3
ggacaaaatcagaaccacattcctgggaattgatcttcccaatagaggtatgtggtcctaataatggttttgaaatgtggagttctgagtgggcaaatcaaacttcatggcatttgagtttccttattgacaatcccaaacagtctacagtttttgatattctcttgggaatctctcaagattttgaaattgctggtaatactcttatgccagctttttctgttccacaggctactgccagatcttctgaaaatgcggaatcctctgcatgatctggaatttgtgttttctttcgcttagtcgtttgtttaattcaataaaaggaaattaggcatgaccctcttagtgagtatgctctgcctatttgaaaatttccacacc

SEQ ID NO: 36031 - DNA, 394 bp, Glycine max
  Clone ID: LIB3138-096-Q1-N1-F4
attctccctatggagtttaatcttgtggtccgtcaaaagtttgtaaattttgtgaggttcattatgaagaaaagggacaaacttagttgtcaagttggaatcaacccatactccatggaatggactggtttggccaatagattactgagtaagggcaatgatattctgtgttgcgattatgctagttttgatggtttgattaccaagcaagttatgagcaagatggcagaaatgataaacagtctttgtggtggtgatgaaaaattgatgcgtgaaaggacgcacctgctgttggcttgttgttcaaggatggcaatttgtaagaaagatgtttggagagttgaatgtggaatcccttctggatttccgctcacagttatttgcaatagcattt

SEQ ID NO: 36032 - DNA, 381 bp, Glycine max
  Clone ID: LIB3138-096-Q1-N1-F5
caacaagctgagcaagctgccagacacaatagggtttgagctcataaacctaaagaagctctcagtgaactccaacaagcttgtgtttcttccaagctccactttacacttaacagctttgaaggttcttgatgcacgattgaattgcctaagggcacttcctgaggaccttgagaacctcatcaacctagagacccttaatgtgagccagaacttccagtatttggagaccatcccttactccataaggcttctctggtcacttgttgaacttgatgttagctacaataacatcaagaccttgcctgagtcaattgggtgcctcaagaatctccagaagctgagtgttgaagggaaccctcttacctgtccccctatgga

SEQ ID NO: 36033 - DNA, 120 bp, Glycine max
  Clone ID: LIB3138-096-Q1-N1-F6
agaaaacttatagttcttttggatctgatgcattgctcattagagtaaaccatgatcttggttagggtaatgggacttttcgaccactgagctgtgggcctgctgtggaccctgatcaac

SEQ ID NO: 36034 - DNA, 370 bp, Glycine max
  Clone ID: LIB3138-096-Q1-N1-F7
attaacgagcagtttttgaaagtcacggctgttattggggagggtaaaccacgacattggtcaggctaatggaacttatcaaccactgagctgtggccctactctgcacactagccaacagtgtaattataccaccacaaagttttgtgaggccaaagtattaccaatctataaactgacaataaaaaaccctatagtattgtccacaatcaagtcatgtttagcattaatactcacatgcctataaagttctaagatcatcagctacccgttcttctcatgccctgataactagcgtatttgcgaagaaactcatcatattgaaatattctaaacatttgaggtcattataactacaccaggattatgt

SEQ ID NO: 36035 - DNA, 383 bp, Glycine max
  Clone ID: LIB3138-096-Q1-N1-F8
ttcgggtaatggccaccagtggaggcgatgaggggcagaacaaccctgccctcgacccggatttggatgctccggatgacccggatcacgagttcgctgagttcgggtcgggttgcttctggggtgctgagttggcctttcagcgagttgtgggtgtggtgaagactgaggttggttacactcagggtcacactccggatccgaattacaaactggtttgcaccggaaccactaaccacgttgaagtggttcgggtccagttcgacccgaaggtttgcccctacaatgatctactcgctctcttttggtctcggcatgaccccacttccatcaaccgtcagggcaatgatgtgggtgcacagtatagatcaggaatatactac

SEQ ID NO: 36036 - DNA, 386 bp, Glycine max
  Clone ID: LIB3138-096-Q1-N1-F9
caagtagttgagaactaagaaggagaagcaaatggcttcctcaatgatctcttccccagctgttaccactgtcaaccgtgccggtgccggcatggttgctccattcactggcctcaagtccatggctggcttccccaccaggaagaccaacaatgacattacctccattgctagcaacggtggaagagtgcaatgcatgcaggtgtggccaccagttggcaagaagaagtttgagactctttcctacctgccagaccttgatgatgcacaattggcaaaggaagtagaataccttcttaggaagggatggattccttgcttggaattcgagttggagcacggtttcgtgtaccgtgagcacaacaggtcaccaggatactacgatg

SEQ ID NO: 36037 - DNA, 377 bp, Glycine max
  Clone ID: LIB3138-096-Q1-N1-G10
ctccaagtatgtttttacaatccttcaaaaattttgtttctttgtgtgtgtatggtgatgataacttaattagtgttcatgaatatgtcaagccttactttagtggttctaaattgaaaagctttctagctagtcataacatcaccattactgatggtattgacaaaactagtgcaactttgcaatttagaaagttagcagattgtgattttctcaagagaaactttaagcagatgtctaatgttttgtgggtggctcctgaggacaaggcgagtttatggtcacaacttcattatgtttcgtgtaataatctggaaatgcaagaagcttatcttgtcaatctcgtaaatgtgttacgagaattgtatttgcacagt

SEQ ID NO: 36038 - DNA, 386 bp, Glycine max
  Clone ID: LIB3138-096-Q1-N1-G12
gtcttgcaattgaagttgaagtcttgcccttctctcttcaactccaaacacaagacatcatcatccatggctgcctccgtctccactgtcggagctgtcaacagagctcttttgaacctgaatgggtctggacctggggtttcagctcccagttcatccttctttgggagcagcttgaagaaggttattggctcaagggtccccaacacaaagatttcctctggaagcttcaagattgttgctgtagaagagaagaaagagattgaagagacccagcagaccgacaaggacagatggaagggtcttgcctatgatatctcagacgaccaacaggacatcacaagaggaaagggtttggttgactcccttttccaagctccacagga

SEQ ID NO: 36039 - DNA, 388 bp, Glycine max
  Clone ID: LIB3138-096-Q1-N1-G3
aagtagttgagaactaaaaaggagaagcaaatggcttcctcaatgatctcttccccagctgttaccactgtcaaccgtgccggtgccggcatggttgctccattcactggcctcaagtccatggctggcttccccaccagaaagaccaacaatgacattacctccattgctagcaacggtggaagagtgcaatgcatgcaggtgtggccaccagttggcaagaagaagtttgagactctttcctacctgccagaccttgatgatgcacaattggcaaaggaagtagaataccttcttaggaagggatggattccttgcttggaattcgagttggagcacggtttcgtgtaccgtgagcacaacaggtcaccaggatactacgatggac

SEQ ID NO: 36040 - DNA, 395 bp, Glycine max
  Clone ID: LIB3138-096-Q1-N1-G4
gaaaaactttaagtgtgactaaactgtggaccacagattaatccaacagttgacccaaagggatgaaacttgtgagaataccttgagatcccactgaagaatgaaaggtcctaattacaatggttacaaaaaaaagtaattttacttgatgttgttaaagtgaatatacaaatcaaaagtacttttactttaaaacatatgttgcttttgatctaaacccaagtttgccataaacaggttacaaaattaattttggggaactgcaaacatgatacaaaactgagtttgggttccaaaagtatgtctgagatctcataacagatccaaacattttatcaatattacccttactgtaatgggtatttgtttcgcagcatttgaccccacacacatac

SEQ ID NO: 36041 - DNA, 384 bp, Glycine max
  Clone ID: LIB3138-096-Q1-N1-G5
gatgaatgctcctgattcaaatgataatattgatttactgttgagcattgatttgttgggtttacaaggagcaggtaaagcttttccaaacaaaattgtttttgatgataagcttgtgttggctaacacacaagaattctttgatggaaattttccagtggattcttggttaccaatttttgtgaattgtctttatcctgtaagtcaattaccttcagaagctgtcgttgtaaatgttacatgtggtagtggacgttgtggtttacccaccactgcttggattagttctgcagttaacaatcgctcctcagatatcaacaaaaagattcgcacagcacttgggaaaggtaagaaaattgtttttcttactagagttgatccttt

SEQ ID NO: 36042 - DNA, 150 bp, Glycine max
  Clone ID: LIB3138-096-Q1-N1-G6
aaaaaacatcttttttcatataaagagtaacccttcactgttgagcggcgaacacaagacatcatcaacaaaaacgtaatagcttaaaaaaggggcggcgccctctaaggaacctctccccccgggaaataaatacggacccgttcctgg

SEQ ID NO: 36043 - DNA, 377 bp, Glycine max
  Clone ID: LIB3138-096-Q1-N1-G7
gcgcagcttcctggtatgtataacaaggaagagaatccccgtgtgcccatcatcgtcaccggtaacgatttctccacactctatgcgcctctcatgcgtgatgggcgtatggagaagttctactgggcaccaacacgggatgaccgcattggtgtctgcactggaatttttcgcaccgattcaattcctgaacaggacgttgtcaagattgttgacacctttcctggccaatccattgatttctttggtgcactgagggccagagtatatgatgacgaagtgaggaagtggatgtctggtgttggtgttgaccgcattgggcagcagcttgtgaactcaatagatggacctgctacctttgagcagcccaagatgac

SEQ ID NO: 36044 - DNA, 380 bp, Glycine max
  Clone ID: LIB3138-096-Q1-N1-G9
cggctcgagggacaaaatcagaaccacattcctgggaattgatcttcccaatagaggtatgtggtcctaataatggttttgaaatgtggagttctgagtgggcaaatcaaacttcatggcatttgagtttccttattgacaatcccaaacagtctacagtttttgatattctcttgggaatctctcaagattttgaaattgctggtaatactcttatgccagctttttctgttccacaggctactgccagatcttctgaaaatgcggaatcctctgcatgatctggaatttgtgttttctttcgcttgttcgtttgtttaattcaataaaagaaattaggcatgaccctcttgttgagtatgctctgcctatttgaaaat

SEQ ID NO: 36045 - DNA, 380 bp, Glycine max
  Clone ID: LIB3138-096-Q1-N1-H1
ggccacagttggtattcctgagaatacaggtatatcattggcctgtgctatgaatagttcttttagggggcgcgccagttctgatatttacaccatctgctctcaagactgtgaattgtggaatcctgcttgcacaaaagcaatgactatgtcatttaatccaaacccgtgttctgatgcatggagtttggaaatttctgaaacgtactggatttcattgcgatatcatttgtgtcactggatggactgccaccccaatgcaggatgttcaggttacaattgattggtttatttcctctcaggaatgtgttcccaggacctattgtgttttaaatccacaaaatccttttgtgttaaataagtggatgggaaaaatgact

SEQ ID NO: 36046 - DNA, 384 bp, Glycine max
  unsure at all n locations
  Clone ID: LIB3138-096-Q1-N1-H10
ccgataaggactttctcccaatataaagaatatgtgcaggagtttcaagataaatatgatagttactgctccttgaacaagattttggagggatacagggatgagtttcagaaactaggcaacgatttagaacacgctaaaggcagggatatggatagatattatgacattgtggagcagctgaaggaatcctatcgacgctgtggaccgaggcacaagagattgaagaaaatatttgttgttcttcatacggaattggagaatctcaagggaaggatcaaagacttttcaaactcgtataataaatgatgaaaatacaagagtcctatatagataaaattgaagcctgtttatcaaggtaagaactntnggtgatacatgatg

SEQ ID NO: 36047 - DNA, 370 bp, Glycine max
  Clone ID: LIB3138-096-Q1-N1-H11
gattcttcagggtatatacacagtggcaatggccaacttctgtcatgttatgtccaatagaggagaatgatcttgggtttcctgtttggcatcctggaaaaaaatccttgtgacagatcccatcatatgtcaatcattacccctgcctatccctatatgaattctagttttaatgattctatgagcacacttcgtgtaatgatgtagcagtttcaatatggcaacaaaatttgtggggaaatataattgagtaaagcttgttggaaggctctgtttgaaaagtacagtgtctttgaaagctataaaaactacttgcaagttgatgctgatgacttgcacaattggaaaggttgggtggaatcatgccttc

SEQ ID NO: 36048 - DNA, 391 bp, Glycine max
  Clone ID: LIB3138-096-Q1-N1-H2
gagcagataactaaaaaaacccttagccaacacaaccatcatggccacctctgctattcagcaatcagcattcactggtcaaactgctctgaagcagctcaatgagttcgtccgcaagaccggtggcgccggcaaaggtcgcactaacatgcgccgcaccgtcaagagtgctcctcagagcaatttggtatggccctgaccgtcccaagtacttgggtccattctcggagcagattccatcatacctgaccggagaattccctggtgactacggatgggacactgctggattatcagctgacccggaaaccttcgccaggaaccgggagctggaggtgattcacagcagatgggcaatgcttggtgcccttggctgcaccttcccagagat

SEQ ID NO: 36049 - DNA, 394 bp, Glycine max
  Clone ID: LIB3138-096-Q1-N1-H3
gaaatggccaccacttctgcttcattcgcgagcttctccgtcatcttgcgaccttcttcgtccaatccccaattcttcctcttcaacgtcgctccccgaaccggaacctctcattcccgaacccgttcgactcggttcaggtgctcggccggtcagaccgggttcttcacgaaactagggcggttgataaaggagaaggcgaagagcgacgtggagaagcttttctcgggattctccaagacccgcagcaacctcgccgtcatcgacgagcttctcctctattggaacctcgccgacaccgatcgggtcctcgacgaactcgaagaggctcttttagtgtctgattttggtccaagaatcactattaaaatagtggagaatttgcgcgaggata

SEQ ID NO: 36050 - DNA, 393 bp, Glycine max
  unsure at all n locations
  Clone ID: LIB3138-096-Q1-N1-H4
agaacaagtagttgagaactaagaaggagaagcaaatggcttcctcaatgatctcttccccagctgttaccactgtcaaccgtgccggtgccggcatggttgctccattcactggcctcaagtccatggctggcttccccaccaggaagaccaacaatgacattacctccattgctagcaacggtggaagagtgcaatgcatgcaggtgtggccaccagttggcaagaagaagtttgagactctttcctacctgccagaccttgatgatgcacaattggcaaaggaagtagaataccttcttaggaagggatggattccttgcttggaattcgagttggagcacggtttcgtgtaccgtgagcacaacangtcaccaggatactacgatggac

SEQ ID NO: 36051 - DNA, 394 bp, Glycine max
  Clone ID: LIB3138-096-Q1-N1-H6
cgagcgccggttctgatatttacaccatctgctctcaagactgtgaattgtggaatcctgcttgcacaaaagcaatgactatgtcatttaatccaaacccgtgttctgatgcatggagtttggaatttctgaagcgtactggatttcattgcgatatcatttgtgtcactggatggactgccaccccaatgcaggatgttcaagttacaattgattgcgttatttcctctcaggaatgtgttcccaggacctattgtgttttaaatccacaaaatccttttgtgttaaataggtggatgggaaaattgactttcccccagggcacttcccgaagtgttaagagaatgcctctttctatagggggaggagctggtgcaaagaatgctattctcat

SEQ ID NO: 36052 - DNA, 364 bp, Glycine max
  unsure at all n locations
  Clone ID: LIB3138-096-Q1-N1-H7
tttaaggtttagccttctgagccagatcgagtgaagtatcatatgcattagatcaaatggctttgctggtcgattaattgtaaaatgcctttgaactctcaagacattcatttgcagtttcaaatactttttcggtgaaacactttgtaatattgtattttatagtaaaaaccaaatgttaattataaactagtttatatttttaaaaaaaaaaaaaannnnnanaannnataataaaataaaaaaaaaattanataataaataaaaataaaaaaaataataaataataaaaaaaaaaaaaaaaaaaaaaaatggggcggcccccctttagggagctcttcaccccggaaattattttcggacc

SEQ ID NO: 36053 - DNA, 392 bp, Glycine max
  Clone ID: LIB3138-096-Q1-N1-H8
gcggcgataacttaatcagtgttcatgcatctcaaccatcatggctcacctgtgctattcagcaatcagcattcactggtcaaactgctctgaagcagctcaatgagttcgtccgcaagaccggtggcgccggcaaaggtcgcactaacatgcgccgcaccgtcaagagtgctcctcagaacaatttggtatggccctgaccggcccaagtacgtcgaggcattctctgagcacattccatcatacctgaccggagaattccctggtgactacggatgggacactgctggattatcagctgacccggaaaccttcgccaggaaccgggagctggaggtgattcacagcagatgggcaatgcttggtgcccttggctgcaccttcccagagat

SEQ ID NO: 36054 - DNA, 388 bp, Glycine max
  Clone ID: LIB3138-096-Q1-N1-H9
aatgttttgtgggtggctcctgaggacaaggcgagtttatggtcacaacttcattatgtttcgtgtaataatctggaaatgcaagaagcttatcttgtcaacctcgtaaatgtgttacgagaattgtatttgcacagtccagaggaagctcgccaattgagaaggaaagctctctctcgtattgaatggctgcaaaaagctgatgtgcctaccatagcacagattgaagagttccattcgatgcagaggatgatgaatgctcctgattcaaatgataatattgatttactgttgagcattgatttgttgggtttacaaggagcaggtaaagcttttccaaacaaaattgtttttgatgataagcttgtgttggctaacacacaagaat

SEQ ID NO: 36055 - DNA, 411 bp, Glycine max
  Clone ID: LIB3138-097-Q1-N1-A1
cggctcgagtgggtttacaaggagcaggtaaagcttttccaaacaaaattgtttttgatgataagcttgtgttggctaacacacaagaattctttgatggaaattttccagtggattcttggttaccaatttttgtgaattgtctttatcctgtaagtcaattaccttcagaagctgtcgttgtaaatgttacatgtggtagtggacgtgtggtttacccaccactgcttggattagttctgcagttaacaatcgctcctcagatatcaacaaaaggattcgcacagcacttgggaaaggtaagaaaattgtttttcttactagagttgatccttttccagtagctttactggctgttctttttggcgttaagaatgaaattctgagttctaacgccactaatcctatgct

SEQ ID NO: 36056 - DNA, 418 bp, Glycine max
  Clone ID: LIB3138-097-Q1-N1-A10
ctgcaacaactctgttggctgatgggtgtccatatttgtatgcaatggtgcatgatagttcagtgtctacaataccaggtgattttgtcattggtgtcaagttgacaaccataaacaatatgtgtgcatatgggctcaatcctggtatttcaggttctcgtcttttgggcaccattcctcagtccatttcacagcaaactgtttggaatcaaatggcaacagtgagaacaccattgaattttgattctagcaagcagagcttttgtcagttttctattgaccttctcggtggaggaatcttagtggacaaaactggagattggatcacacttatacaaaattctccaattagtaacttgttgagagttgctgcttggaagaaaggctgtttaatggtcaagattgtgatgtctgggaa

SEQ ID NO: 36057 - DNA, 407 bp, Glycine max
  unsure at all n locations
  Clone ID: LIB3138-097-Q1-N1-A11
ttctgttcgagtgcacaaagaatatgataaatttattggagaattgaccagttactttccccatgaaaaggagggtattctcaaattctacggtgaatgctggaagatttttgatgccctgaattcgttggaattgaagtcactagaagagccactctacctttttggacagttttttcagaagccacttgaatgcttgacactagcctattatttgcctcaaaatgctggagccatagctcggaagtacattcaagatccacagttgttgtctttcatagatgcagagtgttttatagtgagcacagtcaatgctttgcagacaccaatgatcaatgctgccatggttctatgtgacagacactgtggtgggattaactaccctctngggggtgttggtgggattg

SEQ ID NO: 36058 - DNA, 397 bp, Glycine max
  Clone ID: LIB3138-097-Q1-N1-A12
ggaagatttgcattcgccgacttctcacttctaaatctgccagaccaatttaagagctcctttgactttattgatgggcatgttaaaccagtggttggaaggaaaatcaattggttgaaagctggacttatagaatcatggtttgtgataactgttagcccaaactatgctaaagaactggtgtcaggtccagacaagggagtggaattggacaacatccttcgcaaaattgatgatgatggtcgtttggttggaattgtgaatggcatggatgttcaggagtggaatccaaccactgacaaatatatagctgtcaaatacgatgtttcaacagtattggaagcaaaggctcttttgaaagaagccctccaagcagaagttggattgccggtcgaca

SEQ ID NO: 36059 - DNA, 301 bp, Glycine max
  Clone ID: LIB3138-097-Q1-N1-A2
ccggcctgtccaaaacaaaagaaaaaacaatcctctaaaaaagaaatgcatgagaataaaccaaagagatttccaaggaggagatactcacacaaaccatcaaccagtagaggaatggaaaatcctaaaaaaaaaaaaaaaaagaataaaaactgaaagaaaaataacattaagaagctgaaaataaaaaaagaaaaaagtgaaaataaaaaaagaaggaaaacacaaggatgatagtataaaaaaccaaaaataaaaaaaaaaaaagggggggcccccaatttggaatccctccaccccg

SEQ ID NO: 36060 - DNA, 409 bp, Glycine max
  unsure at all n locations
  Clone ID: LIB3138-097-Q1-N1-A3
caaaaaaaagcttaagtttaggatgacccaatgcaggaacatgcagggggatctaatagattatgtccccggattccctaaagaatccgacatgaacattgttgaatgcaccatattattgaatgtgccacaaggttacagtgatgtcctgataaaaaatctctacttgtcatgtgatccatacatgcgacttctcatggccaaagaccgtgctttcggagatggctacttcacccttgactatccattgaaaggatatggtgtgtctcaagtgctggaatctggacgttcagattacatgaaaggtgacttaatgtgggggattactgaatgggaagagtatagccngtggccgtcatctatcatacatttcataattgagcacactgatgntccactttgctactac

SEQ ID NO: 36061 - DNA, 400 bp, Glycine max
  Clone ID: LIB3138-097-Q1-N1-A4
cagtttcaaagagaggatttgggattgggaaggcgagggattgcgctgcgtctcttcctcttctctttcgattcatccctcattcataatcttccaatccaacaacctcagcctcacactcacacatacacacatctgaacgcgtatcgtccctcccatggcttcaaagcgcatcctcaaggagctcaaggacttgcagaaagacccaccaacttcttgcagcgctggtccagtagctgaggacatgttccattggcaagcaacgattatgggtcctgctgatagtccttatgctggaggtgtattcctagtcactattcactttcctccggattatcctttcaaacctcccaaggtgcctttaggactaaggtgtttcatccgaacatcaacagcaatg

SEQ ID NO: 36062 - DNA, 417 bp, Glycine max
  unsure at all n locations
  Clone ID: LIB3138-097-Q1-N1-A5
atttactgctggaggctgtcaagtacccccagtgctaccttgtagtaatatgtggaattcttgtatatacattagttntgctgtgttcccctcttggagtagtgctgattggagctgcattaatcgattttgttgttgctgatttcaattggtctgcggcagtatagaagaaagcaacgatgcgttggtgtttacctggcttgatagggtgactaaatatgcctttagaagttttaggattatttctaatgtgttcctacatgcaggtccctaagcttacatcctgcttctagatagttggtaatcttatctgagggtagtagctagtaccatgggagaagtggcagtaatgcactctgagcctctgcagtttgagtgcaatgacattagtgtgaatatgactgagaaggaagtgta

SEQ ID NO: 36063 - DNA, 408 bp, Glycine max
  unsure at all n locations
  Clone ID: LIB3138-097-Q1-N1-A6
gaacacacagctcttactttcttccgccatattccacaagaactctccaaggatcctccttcccacgagattctttggtgggaaaaatccaagaggtttgaaatttgaaggcagggaagatggattatttcaatgcaccaggaagaaaccatctctttgttccagggccggttaacattccggaccagatcatccgggccatgaacagaaacaatgaggactaccgttctccagcaattccagctatgacaaaaactttgcttgaggatgtcaagaagattttcaagaccactactggaaccccatttctcatccctacaactggtactggtgcttgngagagtgctctcacaaacacactgtctcctggggatcgaattgtatcgttcctgattggccaattcagct

SEQ ID NO: 36064 - DNA, 408 bp, Glycine max
  Clone ID: LIB3138-097-Q1-N1-A7
ctctgtgactcaacctccgtcgccgaaccattccaaggttcgccgccggccgcgcttccgtggcgggaacccaaaccagaacctataggaaccgtagatctcgtcgttccggccaacgtcggtggcgcgccgttcgccggcggtgggtgggaagacgtcgtcggtttggaggagcagcagcggcgccacctccagaggctccacgcgaagggagtgctctggaagccaccgccggaggaggaggattcgtcgtctccgctgtcgtcctccgccctcagatctgttgtcttccggctctctcacggcggtgaggtctccgccgacggaaactgcctgttcacggcgtcgcggaaggcaatgggcggcgaggacgttgacgcgcgcgagctgcggcggcggacggtggcg

SEQ ID NO: 36065 - DNA, 387 bp, Glycine max
  Clone ID: LIB3138-097-Q1-N1-A8
aaaaagaaaaaaagaaaaccattgctttatggtggtgacaaagtaaggtttgtttcatcaaaaagatggtggcacccattgctgtttcttctccaaagtccacacttttgcagaaccccatctgttttggtgactcaagttcaagttttgttggggggtctttgaagggtctttgcttcaatctgaaacgaaggcaacaaagaagagaattgaccaatttggttgttgcttcatccacctcaagtgttacaaatagcaatgctagtggcaggttttacttcaacatcactggtttttctttcccacttggtccttttctcaacaggcgcactattaggactgaggctgtgaaggattgtatatggctattcgaacaagagcaggcat

SEQ ID NO: 36066 - DNA, 417 bp, Glycine max
  Clone ID: LIB3138-097-Q1-N1-A9
tggaaggtccagaggattcggatttgtgaccttcgcctcagagcagtcaatgaaagatgcgatcgcaggaatgaacggccaggaccttgacggtcgtaacatcactgtcaacgaagctcagacccgcgccagccgtggtggtggtggaggcggtggtttcggaagtggtggtggatacaaccgcggtagcggtggatatggtggtggtggtggcggcggcggatacggtggtcgtcgtgaaggtggatacaaccgtaatggtgggggtggaggtggaggatacggcggtggtagagaccgtggttacggtggtgatggtggttctcgctactctcgcggtggggaaagcggtggatccgatggaaactggagaaattaggcatatgacccttgtaattagggtttatgattaagttc

SEQ ID NO: 36067 - DNA, 404 bp, Glycine max
  Clone ID: LIB3138-097-Q1-N1-B10
tggcaagatgggaaagcttgtgatcaaacatttggtggcgaaaggttgcaaaaagatggtggttgtcaatagaactgaggagagagttgctgcaatacgtgaagaactgaaggatattgagattatctacaaacccctttcagaaatgctcacctgtgctggcgaagcagatttagttttcaccagtactgcatcagaaaacccattattcttgaaagaacatgtcaaggaccttcctcctgcaagtcaagaagttggaggccgtcgctttttcattgatatctctgttccccggaatgtgggttcatgtgtctcagaccttgagtctgtgcgagtttacaatgttgacgaccttaaagaggttgtggctgccaataaagaggatcgcctaagaaaagcaatgg

SEQ ID NO: 36068 - DNA, 413 bp, Glycine max
  Clone ID: LIB3138-097-Q1-N1-B11
ctccttgggagctcagagtctagtttcttaatcaatagaggaaaatttgtaatccgagtccctccagcagcatgccaggtctcgtatcggacgcccaacccctcggaatctccgtcccggacacacccaggcaatcccagagaaccccttctccactccccaaaaaaccacccagcccatctccttctcgctcctccaaaaagaaaactcctgaaacccctccgcttctctctgatgcctctctcgacaacccggatctcggcccattcctccttaagttggcccgcgacaccattgcctcgggcgatgggccctccaaggccctcgacttcgccatctcggcctccaagtccttcgagcgctgcgccgtcgagggcgagcccagcctcgacctcgcatgagcctcacgtcct

SEQ ID NO: 36069 - DNA, 380 bp, Glycine max
  unsure at all n locations
  Clone ID: LIB3138-097-Q1-N1-B12
cacaacaacaatggctccgaagaaaggtgtgaaaggttccgttgtagcagcgaagaagaaggttcaggagaaggtgacgaatcctttgttcgagaagcgtccgaagcagttcgggatcggaggcgcgctgccgccgaagcgggacctgacgcggttcgtgaagtggccgaagaacgtccaaatccaacgcaagaagcgcatcctcaagcagaggctcaaggtccctcctgcactcaaccagttcaccaaaaccctagacaagaatctcgccacgaatctatttaagatgctgctcaagtacaggccggaggacaaggcggagaagaaggagcggttctttgaagagggcttangctgaggccgattgggaagcctgttga

SEQ ID NO: 36070 - DNA, 346 bp, Glycine max
  Clone ID: LIB3138-097-Q1-N1-B2
gccttcctctctgcagagtgcagagctttctctccccgttgctgcagtcattctcaacaacacaccaatctttcttacagcatcaactgtggcttgtggcaacttgggcaatcgatcactcgccgtcttgcccatggagataagaaggctgttgctcgtcgatgttttgcctcagaagctgagctgaaaaagacagtgtttcatgacttccatgttgctcatggtgggaagatggttccatttgctgggtggagcatgccaatccaatacaaggactcaatcatggactctaccatcaactgtagggagaatggtagcctctttgatgtttcccatatgtgtgggc

SEQ ID NO: 36071 - DNA, 294 bp, Glycine max
  Clone ID: LIB3138-097-Q1-N1-B4
cccatgttgacaactcgtttggtaacagctttgagttcaccaagaacaacatatatggtactcatgtcctattagaagcctgcaaggtaactggccagatcaagaggttcatccatgtgagcactgatgaggtctatggagagacagatgaagatgctgttgttggaaaccacgaggcttctcagttactcccaacaaatccatactctgcaacaaaagctggggcagaaatgcttgtgatggcatatggaaggtcatatgggttacctgtgatcacaacacgaggaaacaatg

SEQ ID NO: 36072 - DNA, 419 bp, Glycine max
  Clone ID: LIB3138-097-Q1-N1-B6
attggtgtcaagttgacaaccataaacaatatgtgtgcatatgggctcaatcctggtatttcaggttctcgtcttttgggcaccattcctcagtccatttcacagcaaactgtttggaatcaaatggcaacagtgagaacaccattgaattttgattctagcaagcagagcttttgtcagttttctattgaccttctcggtggaggaatcttagtggacaaaactggagattggatcacacttatacaaaattctccaattagtaacttgttgagagttgctgcttggaagaaaggctgtttaatggtcaagattgtgatgtctgggaatgcagcagtcaaaaggagtgattgggcctcattggtacaagtgtttttaacaaacagcaacagtacagagcattttgatgcatgtaagtg

SEQ ID NO: 36073 - DNA, 417 bp, Glycine max
  Clone ID: LIB3138-097-Q1-N1-B7
gttgaatgtggaatcccttctggatttccgctcacagctattggcaatagcatttttaatgagatgctcattagatatagctctgaaaaattactgcgccaggctaaagctgcaagtatgtttttacaatccttcaaaaattttgtttctttgtgtgtgtatggggatgataactgaattagtgttcatgaatatgtcaagccttactttagtgggtctaaatcgaaaagctgtctagctcgtcatcacatcaccattactgatggcatggacaaaactagtgcaactttgcaatgcagaaagatagcagatagtgattttctcaagagaaactctaagcagatgactaatggtttgtgggtggctcctgaggacaaggcaagtttatcggcacaacttcattatgttgcgtgtaat

SEQ ID NO: 36074 - DNA, 414 bp, Glycine max
  Clone ID: LIB3138-097-Q1-N1-B8
gagattcaggaaaaagttgtattgaaattttcacaagaggaatttcttacagcttggtcaactcaggtgcgtcctgcaacaactctgttggctgatgggtgtccatatttgtatgcaatggtgcatgatagttcagtgtctacaataccaggtgattttgtcattggtgtcaagttgacaaccataaacaatatgtgtgcatatgggctcaatcctggtatttcaggttctcgtcttttgggcaccattcctcagtccatttcacagcaaactgtttggaatcaaatggcaacagtgagaacaccattgaattttgattctagcaagcagagcttttgtcagttttctattgaccttctcggtggaggaatcttagtggacaaaactggaagatggatcacacttatacaaaat

SEQ ID NO: 36075 - DNA, 348 bp, Glycine max
  Clone ID: LIB3138-097-Q1-N1-B9
cgaacttgcatatactgatcaatggggaagaagaaactgggaatatatatcacttggatgcgatactttgccggtgctcaagggacgatccccagttgaaggtcatgctgatttcatgcgtgctttcagagacactttcaagcacctccttggtgataccatagtggaaatccaagttgggatgggaccagcatgtgagttgcgttacccttcgtacccagagcaaaatgggacatggaaattcccaggaattggtgctttccaatgctatgacaagtatatgtagagtagcttaaaagctgctgctgaagcttacggtaagcctgaatggggaagcacaagccctac

SEQ ID NO: 36076 - DNA, 253 bp, Glycine max
  Clone ID: LIB3138-097-Q1-N1-C1
aatctctcaagattttgaaattgctggtaatactcttatgccagctttttctgttccacaggctactgccagatcttctgaaaatgcggaatcctctgcatgatctggaatttgtgttttctttcgcttgttcgtttgtttaattcaataaaggaaattaggcatgaccctcttgttgagtatgctctgcctatttgaaaatttccacacctcttttaattgtcgtaatgatgtgtgaagtgtgtgttatttt

SEQ ID NO: 36077 - DNA, 419 bp, Glycine max
  unsure at all n locations
  Clone ID: LIB3138-097-Q1-N1-C11
ttgtgatgtctgggaatgcagcagtcaaaaggagtgattgggcctcattggtacaagtgtttttaacaaacagcaacagtacagagcattttgatgcatgtaagtggacaaaatcagaaccacattcctgggaattgatcttcccaatagaggtatgtggtcctaataatggttttgaaatgtggagttctgagtgggcaaatcaaacttcatggcatttgagtttccttattgacaatcccaaacagtctacagtttttgatattctcttgggaatctctcaagattttgaaattgctggtaatactcttatgccagctttttctgttccacaggctactgccagatcttctgaaaatgcggaatcctctgtatgatctggaatttgtgttttctttcgcttgttcgtntgttaatta

SEQ ID NO: 36078 - DNA, 423 bp, Glycine max
  Clone ID: LIB3138-097-Q1-N1-C12
gaggttgcataactgaacaaacaaagcaaccctatgtcgaaggtggtttgtgtcaccggagccagtggcgccattggatcatgggtggccctcctcctcctccagcgtggttatacggtccatgccaccgtccaagacatcaaggatgaaaatgagacgaaacatttggaggaaatggaaggagcaaagagtcgtctccatttttttgaaatggatcttcttgacatcgactccattgccgctgccataaagggttgctccggcgtaatccacctcgcatgtcctaacatcatcggtcatgtcgaagatcctgaggttaaaaaattaaaaatcacttaacacactccaatacatccataaatggtctaattactagtgtagttcatatatctacacaatctttatatcttaatcctttcactt

SEQ ID NO: 36079 - DNA, 423 bp, Glycine max
  unsure at all n locations
  Clone ID: LIB3138-097-Q1-N1-C2
tactggctttggagtatcttcacatgcttgggattgtctaccgtgaccttaagccagaaaatgttcttgttagggatgatggacatattatgctctctgactttgacctctccctccgatgtgctgttagtccgaccctcgttaaaacctcgtccacagattctgagcctttaagaaagaatgctgtttactgtgtccaacctgcatgtattgagccaccttcctgcatccaaccatcctgtgttgctcctactacatgcttttcaccccggcttttctctagcaaatcaaagaaagacaggaagccaaaaaatgaaatcggcaaccaagtgagtccgttacctgagctcattgcagagcctaccgatgcccggtccatgtcatttgttggaactcacgaatacttggcaccngagatcatta

SEQ ID NO: 36080 - DNA, 404 bp, Glycine max
  Clone ID: LIB3138-097-Q1-N1-C3
cacaactggagattggatcttcactttacaaaattctccaatcagagacttgttcagagttgctgcttggaagaaaggctgttcaatggtcaagattgtgatgtctgcgaatgcagcagtcaaaaggagtgattgggcctcattggtacaagtgtttttaacaaacagcctcagtacagaacatcttgatgcatgtcagtggacaaaatcataaccacattcctgtgaattcatctttccaaagtaggactctggtcctgatactcttcttgataactggatctctctctgcccaaagtcaacttaaccacttccgactttacttactgacgatccccaacagtctacagtatttgatattctattgggaatctctcaagattttgaaattgctggtaatactc

SEQ ID NO: 36081 - DNA, 416 bp, Glycine max
  unsure at all n locations
  Clone ID: LIB3138-097-Q1-N1-C4
cttgcaattgaagttgaagtcttgcccttctctcttcaactccaaacacaagacatcatcatccatggctgcctccgtctccactgtcggagctgtcaacagagctcttttgaacctgaatgggtctggacctggggtttcagctcccagttcatccttctttgggagcagcttgaagaaggttattggctcaagggtccccaacacaaagatttcctctggaagcttcaagattgttgctgtagaagagaagaaagagattgaagagacccagcagaccgacaaggacagatggaagggtcttgcctatgatatctcagacgaccaacaggacatcacangaggaaaggttttgttgactccctttttcaagctccacaggatgcttgaactcactatgctgtcatgagcctcta

SEQ ID NO: 36082 - DNA, 412 bp, Glycine max
  unsure at all n locations
  Clone ID: LIB3138-097-Q1-N1-C5
ctaggaagagaaaggatgtaaatattaaagctcttgcaattctcatgaactgtggagtcgtgttgggtttctattgttggggttgggagttcttaactgcccttcttctcttctctcatcaaccttattgatcattctcttcttcctcttcttcttcaaaaaccaatttctttttatacaaattaagaagataccaaagaaaaacatagcaaaaaaataaaaataaaaaaatggaaggaacaagcaataggggttgttggaatgtggaaggaagtgcactccaccgncgtttttgttgaagacttatatgctngtggaggatcccgccaccgacgacgtcatttcgtggatgccaaaggacggcgttcgtggtgtggcagccgcccgaatttgctcggatctacttcaacac

SEQ ID NO: 36083 - DNA, 421 bp, Glycine max
  unsure at all n locations
  Clone ID: LIB3138-097-Q1-N1-C6
caacacactatggatgtttggtcatggatatgtgagctccccaactcggtggaggggaccgagtcccactcgccacccatgaagttcgaaatcgcgagtgagaagaacgacgacaagctggacaactcaactcgttccattcacctgaaagctgagcgaacctccggctcagactcggaagctgcggtgatcttcaccgtatgcttgcaaggctttcacccacacaacgctcacaagcctctatgggtctccgaaaagtgccacctctcatcagaaaagccgttccttcctcttctnctncaactcctncaggaaatcatatcccactcccccacggcgcacgatagcacctgcccccgttcccagctccagaaactaaaacccgaccccatcgcatggatcatggactcgcacacacccg

SEQ ID NO: 36084 - DNA, 396 bp, Glycine max
  Clone ID: LIB3138-097-Q1-N1-C7
gaaactcctaaggaatggcaactggatctaccttgtgacaaaattcctagtgtcttgactacaactgatgagagattggtaggcacagaacatgagggatatgatccttttcttggtggaattcaaaaatatgccactcccatgatgcccctagatgaagaaattctttctaaggttgcacaagatatggttgaggaatggttcgattgtgttgatgaggaggattcctttgaggaagtttctttaagtgcagcacttaatggtgttgagggtttggactatatggaaagaattcctcttgccacatctgagggatttcctcatgtgctttcacgcaaaaatggtgaaaaaggcaaaaggagatttgtctcttgggatggtgaagagatgacactg

SEQ ID NO: 36085 - DNA, 411 bp, Glycine max
  Clone ID: LIB3138-097-Q1-N1-C8
ctagtttcttacaagcctctactatactgcttcaccttctgctctagaaaattcagtgctgaaacatggcttcggctactctctctgtagccaaaccagcccttcaggcaaatgggaaaggcttctctgaattctctggcctccgaagctcatcaggcttccttcccttttctagaaaatcttcagaggatttccattctgtcattgccttccagacctatgcagttggaagcagtggaggatacaagaagggtgtgacagaagcaaaactgaaggttgccataaacgggtttggaaggattggaaggaacttcttgaggtgctggcacggtcgcaaagactcccctcttgatgtcattgccatcaacgacaccggcggcgtgaaacaagcctctcaccttctcaaatacg

SEQ ID NO: 36086 - DNA, 413 bp, Glycine max
  Clone ID: LIB3138-097-Q1-N1-C9
caaactcttattcccactcagtggtgaatttgccaaaccgggataaccgtatccctattcaggaatacaatgttctcgttaagactccctattcctctcgttaaaacaccaccttctccctcttgttattattctcactattatcactatcgttatcgttatcgttgttatcatcctttccatcaccgttcccaaacacagagtcttatcgtctcgaagcgcggttccgccattgcgaagtgtcacgctgatagcgtgacacttcgtgatgacggagtctcgctcgcccaagagtcgttggagccacttccggcggaactcgcggcggagatgatgccgaagcatgtggcggtgataatggacgggaacgggaggtgggcgaaggtgaaggggctgccaccatcggcggggca

SEQ ID NO: 36087 - DNA, 380 bp, Glycine max
  Clone ID: LIB3138-097-Q1-N1-D1
gtttttgatgataagcttgtgttggctaacacacaagaattctttgatggaaattttccagtggattcttggttaccaatttttgtgaattgtctttatcctgtaagtcaattaccttcagaagctgtcgttgtaaatgttacatgtggtagtggacgtggtggtttacccaccactgcttggattagttctgcagttaacaatcgctcctcagatatcaacaaaaagattcgcacagcacttgggaaaggtaagaaaattgtttttcttactagagttgatccttttccagtagctttactggctgttctttttggcgttaagaatgaaattctgagttctaacgccactaatcctatgctgacgcgactttttgagaa

SEQ ID NO: 36088 - DNA, 411 bp, Glycine max
  Clone ID: LIB3138-097-Q1-N1-D10
caatttcttatttcactcttctccaccaatgatttccagcacccacttccttaacaactattcctttgtttggttggatatggagaaggcaccagtttttcattttcaattcatactttttcactgataatttaagaatgccactttttttcccttttgtcttttgctttcactactttgcatcactactttatgcacaaaagcaaaatgaaacaaaacattcatggcatcactactaaaaatattaatttgaaaatgaaaaaacaaaccaaacagctccatatcaaaggaatccaacttgtagtttatagggggttttggtttttcactgatgataggaatatgatatgagtatgataatgtgttggtttttgtatagatggatggcgaaataggtgggtgaaatcagac

SEQ ID NO: 36089 - DNA, 400 bp, Glycine max
  Clone ID: LIB3138-097-Q1-N1-D11
caaaaatatgccactcccatgatgcccctagatgaagaaattctttctaaggttgcacaagatatggttgaggaatggttcgattgtgttgatgaggaggattcctttgaggaagtttctttaagtgcagcacttaatggtgttgagggtttggactatatggaaagaattcctcttgccacatctgagggatttcctcatgtgctttcacgcaaaaatggtgaaaaaggcaaaaggagatttgtctctggggatggtgaagagatgacactgattccgggaaccagtgttgaagaggcttacaacaagctaatagttgaacttgagaaaagtgttcctacattggttggcattgaatgtcccaaggatgagaaacttcctcgtcgcaaaatttttgaca

SEQ ID NO: 36090 - DNA, 399 bp, Glycine max
  Clone ID: LIB3138-097-Q1-N1-D2
atcgaaactgtgaaattcctcatgagggtcctttctgtgatcttatgtggagtgatcctgaagatattgaaacatgggcagtcagtccccgaggagcaggttggctttttggatccagggtcacttcggagttcaatcacataaataaccttgatcttgtttgtcgagcacaccaactcgttcaggaaggccttaagtatatgttccaagataaaggccttgtaactgtatggtctgcacctaattactgttaccgatgtggaaatgtagcttctattctgagtttcaatgaaaatatggaaagagaagttaaatttttcaccgaaacagatgagaacaatcagatgagaggacccaggacaggcgttccatattttttataagttggtgcaaattttt

SEQ ID NO: 36091 - DNA, 416 bp, Glycine max
  unsure at all n locations
  Clone ID: LIB3138-097-Q1-N1-D3
gatggttcttcttcctttatgatgtgactggatttgaaatctcatgtctgataaaaattccagagccttttagtttcatcttaactgggtttgccgctataccctaaactttgtggctggctcaatcgatcactagggcaattgttcaagattttctgattttaaagggcccttgtcccaactgtggtactgaaaatacctctttctttgggactatacttgcngtttcaagtggcgattccaccaacatagttcaaatgtgaaaactngtgaaactaaaaatggtgtatgattcaaaaacaagattgattacattaccagaaggaagtaatgcttaaatggatgcactcttgatactattgtttcctggtatgagatgagatcctcatatgtagaaactactgaaatcattgttc

SEQ ID NO: 36092 - DNA, 420 bp, Glycine max
  Clone ID: LIB3138-097-Q1-N1-D4
tgataatattgatttactgttgagcattgatttgttgggtttacaaggagcaggtaaagcttttccaaacaaaattgtttttgatgataagcttgtgttggctaacacacaagaattctttgatggaaattttccagtggactcttggttaccaatttttgtgaattgtctttatcctgtaagtcaattaccttcagaagctgtcgttgtaaatgttacatgtggtagtggacgtggtggtttacccaccactgcttggattagttctgcagttaacaatcgctcctcagatatcaacaaaaggattcgcacagcacttgggaaaggtaagaaaattgtttttcttactagagttgatccttttccagtagctttactggctgttctttttggcgttaagaatgaaattctgagttctaa

SEQ ID NO: 36093 - DNA, 152 bp, Glycine max
  unsure at all n locations
  Clone ID: LIB3138-097-Q1-N1-D5
ggacgcacctgctgttggcttgttgttcaaggatggcaatttgtaagaaagatgtttggagagttgaatgtgggatccccttctggattttccgctcacaagttantggcaatagcattttttaatgagatgcctcattagatatagctatg

SEQ ID NO: 36094 - DNA, 287 bp, Glycine max
  Clone ID: LIB3138-097-Q1-N1-D6
gtgaaatacacaacagaacaaccttgggtttagggcgagatccgggtgcgtaatcagcagctacctttcttcctttcttctgtatctctcctaccataccacggcctaaataccatacgagcacatcttcaatcctcgatggtggagaatcgggcgaatatggctcgaactactaagatcgttgtgcctgtcagctgcatacaattttgacaccgaaggtttatgtcatggatgatggtccttgcgaaataaaggttatgcatgatcacttttgatttacaacatct

SEQ ID NO: 36095 - DNA, 418 bp, Glycine max
  unsure at all n locations
  Clone ID: LIB3138-097-Q1-N1-D7
gagaagagtgcttttcttgacattgcttgttgcttcaaagaatatggacttatattgcttttcttgacattgcttgttgcttcaaaggatatgcattgatagtgctttgcttgacatttgtgcgttgataaatgttgaagatatacttggtgctcattatggtgacaacgtgaaatagtattgacatattggctgaaaaaatctctcataaaggttagagatggtagaggtacattgcacgactttaggacatggttacaaaaattgtcactcaagaatcaccaagagaaccagggaagctataattcaagttntggaagacaacaccttgagtgagactcatgaaaatgattggttcttatcttgatttatcnttttttgactatcatatgttcacatcataattgcttttttcttt

SEQ ID NO: 36096 - DNA, 358 bp, Glycine max
  Clone ID: LIB3138-097-Q1-N1-D8
gagaaaagtgctttttttgacattagcttgatgcttcaaagaaggtggacttatattgctgttgtggacattgcttgttgcttcaaaggatatgcatagatagtgctatgcttgacatttgtgcgttgataaatgttgaagatatacttggtgctcattatggtgacaacgtgaaatagtattgacatattggctgaaaaaatctttcataaaggttagtgatggtagaggtacattgcacgactataggacatggttacaaaaaattgccactcaagaatcaccatgagaaccagggaagctataattcaagttttggaagaaaacaccttgagtgagacttatgaatgatttggtt

SEQ ID NO: 36097 - DNA, 418 bp, Glycine max
  Clone ID: LIB3138-097-Q1-N1-D9
agtggacaaaatcagaaccacattcctgggaattgatcttcccaatagaggtatgtggtcctaataatggttttgaaatgtggagttctgagtgggcaaatcaaacttcatggcatttgagtttccttattgacaatcccaaacagtctacagtttttgatattctcttgggaatctctcaagattttgaaattgctggtaatactcttatgccagctttttctgttccacaggctactgccagatcttctgaaaatgcggaatcctctgcatgatctggaatttgtgttttctttcgcttgttcgtttgtttaattcaataaaggaaattaggcatgaccctcttgttgagtatgctctgcctatttgaaaatttccacacctcttttaattgtcgtaatgatgtgtgaagtgtgtg

SEQ ID NO: 36098 - DNA, 333 bp, Glycine max
  Clone ID: LIB3138-097-Q1-N1-E10
cggccctacactgcactcaagtctttcatccgggcgcagtggggatcttttccatgatcagctggaccttgacctccatctgctgatcccgcatctgtctgaagaagagccacctgcgccctaacgaccacccagcgcttaccaatctgatatatcctgactctgatttgggactcaaatctctcattcgagacacgaccgttgatgctgtcattgccgacaatatcatcacagctgagagagacgatctcgcaactgactacgatagagactttgctatacataaccaatcaggaatcaacaagacataacttagaattacagctcttcaaa

SEQ ID NO: 36099 - DNA, 408 bp, Glycine max
  Clone ID: LIB3138-097-Q1-N1-E12
agaaaggctgtttaatggtcaagattgcgatgtctgggaatgcagcagtcaaaaggagtgattgggcctcattggtacaagtgtttttaacaaacagcaacagtacagagcattttgatgcatgtaagtggacaaaatcagaaccacattcctgggaatcgatcttcccaatagaggtatgtggtcctaataatggttttgaaatgtggagttctgagtgggcaaatcacacttcatggcatttgagtttgcttattgacaatcccaaacagtctacagtttttgatattctcttgcgaatctctcaagattctgaaattgctggtaatactcttatgccagctttttctgtttcacaggctactgccagatcttctgagaatgcggaatcctctgcatgatctggaa

SEQ ID NO: 36100 - DNA, 421 bp, Glycine max
  unsure at all n locations
  Clone ID: LIB3138-097-Q1-N1-E2
gtgagaacaccattgaattttgattctagcaagcagagcttttgtcagttttctattgaccttctcggtggaggaatcttagtggacaaaactggagattggatcacacttatacaaaattctccaattagtaacttattgagagttgctgcttggaagaaaggctgtttaatggtcaagattgtgatgtctgngaatgcagcagtcaaaaggagtgattgggcctcattggtacaagtgtttttaacaaacagcaacagtacagagcattttgatgcatgtaagtggacaaaatcagaaccacattcctgggaattgatcttcccaatagaggtatgtggtcctaataatggttttgaaatgtggagttctgagtgggcaaatcaaacttcatggcatttgagtttccttattgacaatc

SEQ ID NO: 36101 - DNA, 418 bp, Glycine max
  Clone ID: LIB3138-097-Q1-N1-E3
gcaaaatctgcagcagtagaaaactctaggaaaatatttaataccatgctgcatcataatgttatgtcttggactgctctcatctctggatatgtgcaaagcagacaagaacaggaagccatcaaattgttttgtaacatgcttcatggtcatgttacaccaaattgcttcacattctccagcgtcctcaaggcttgtgcaagtcttcctgattttggcatcggcaaacaacttcatggccagacaattaagctaggactttccactattaattgtgtggggaattctcttattaacatgtatgcaaggtctggaactatggaatgtgctcgaaaagctttcaacatcttatttgagaagaatttgatttcgtacaatacagcagctgatgcaaatgcgaaaagcctggattctgatg

SEQ ID NO: 36102 - DNA, 410 bp, Glycine max
  unsure at all n locations
  Clone ID: LIB3138-097-Q1-N1-E7
cgaagttcgtacccgaccggggaagcaggttcagctatcggagtccgagatccgtcaactctgcgtagtttccagagagattttcttgcaacaacctaatttattagagcttgaagcacctattaagatttgtggtgatgtacatgggcaatattctgatcttttaaggctttttgagtacggtggattaccttcagaagccaactacttgtttttgggggattatgtggatcgagggaagcaaagtttagaaacaatttgccttctccttgcttataaaataaaatatcctgagaactttttcctgttaaggggaaaccatgaatgtgcttctataaaccggatatatggatnttatgatgagtgcaagagaaggttcaatgtaaggttatggaagacatttacagact

SEQ ID NO: 36103 - DNA, 408 bp, Glycine max
  Clone ID: LIB3138-097-Q1-N1-E8
cttgccttctgatccttaccaaagagccttggctcgtttctggtccaaattcattgatgataaggtttttggtgctgcatggaaatccgttttcacagctgatgagaaagagcgtgagaagaatgttgaggaagcaattgaggctctgcagtttcttgagaatgagataaaggacaagaagttctttggaggagaggagattgggttggtagatattgctgctgtctacatagcattttgggtccctatggttcaagaaattgcagggttggagttattcacaagtgagaaatttcctaagctccacaattggagccaagaatttttgaaccatccaattgtcaaagaaagtctgccccctagagatcctgttttctcctttttcaagggtctctatgaaaagccttt

SEQ ID NO: 36104 - DNA, 395 bp, Glycine max
  Clone ID: LIB3138-097-Q1-N1-E9
cagaacaacaagtccttaacaactaacatggacaagcaaatggctcactcaaagagctgataccgagctgttacgcactgataaccgtgccggtgcacagcatggtgagctacattcactggactaaagtccatggctggcttgccgatcaggaagaccaacagagtcatatcctgcacagctagcaacgggggaagaatgcaatgcatgcaggtgatgtcaccacttggtacgaagaagtttgagactctatcctacatgacagaccttgatgatgcacaatcagcaaaggaagttgaatacctctttacgaagggatggattaattgcttggaaatccagttggagcacagagtcttgtacctagagcacaacatgtcaccatgatactacga

SEQ ID NO: 36105 - DNA, 419 bp, Glycine max
  unsure at all n locations
  Clone ID: LIB3138-097-Q1-N1-F1
attgcagtagtgctaagtgctaacacctgcagtgaacaatggcctgtgcatcagcatctctgctcaagtcttcacttgttcttgacaagtctgagtgggtgaagggacaaacccttcgccaaccttctgcatcagttgtgagatgcaaccccaccaccccatcaggcctcaccatcagagctggttcctatgctgatgagctcgttaagaccgcgaaaacagtggcttcaccagngaggggtattttggccatggatgagtccaatgctacctgtgggaagcgtttggcttcaattgtgctagagaacactgaagctaaccgccaggcataccgtaccctcctcgtgacagttccaggccttggtcagtacatctctggtgccattctctttgaggaaacactctaccaatccacaact

SEQ ID NO: 36106 - DNA, 344 bp, Glycine max
  Clone ID: LIB3138-097-Q1-N1-F10
cgaaattatggcaatttgctatattctccttcccaccgcacatcatgttgtggctgctgcacgaccttctccgaagcttcaaagcaaactgagaaagatcctaaccctagcctaagcctacctacctcgttcccttaacggtctctgaataattgaggatccgtcgaagggatctagttaagcttgagtgctgcgtcgaatgccaaatataagcataaatgtgttgcgagctacgagattgcattgattagctcgtggtgaaccaaaactactgcgttggtgacgaaaataaaatggcatctaattacttctcaaggctcgcagacaacatctagagatcgaat

SEQ ID NO: 36107 - DNA, 415 bp, Glycine max
  Clone ID: LIB3138-097-Q1-N1-F11
ccaggacctattgtgttttaaatccacaaaatccttttgtgttaaataggtggatgggaaaattgactttcccccagggcacttcccgaagtgttaagagaatgcctctttctatagggggaggagctggtgcaaagaatgctattctcatgaatatgccaaatgctgttctttcaatgtggagatatttcgttggagatctcgtctttgaagtttctaagatgacttctccctacattaaatgtacagtctctttcttcatagcatttggaaatttggctgatgataccatcaattttgaggcttttcctcacaagctggtgcagcttggagagattcaggaaaaagttgtattgaaattttcacaagaggaatttcttacagcttggtcaactcaggtgcgttctgcaacaac

SEQ ID NO: 36108 - DNA, 108 bp, Glycine max
  Clone ID: LIB3138-097-Q1-N1-F2
aaaaaagctaaacttattatcatatctatgcatcatgtaagggttaaggttttaacagtccaagaattctttatgacatggtgtgcaatgtcactgcagatcaagctg

SEQ ID NO: 36109 - DNA, 418 bp, Glycine max
  Clone ID: LIB3138-097-Q1-N1-F3
tgcagtttggagagattcaggaaaaagttgtattgaaattttcacaggaggaatttcttacagcttggtcaactcaggtgcgtcctgcaacaactctgttggctgatgggtgtccatatttgtatgcaatggtgcatgatagttcagtgtctacaataccaggtgattttgtcattggtgtcaagttgacaaccataaacaatatgtgtgcatatgggctcaatcctggtatttcaggttctcgtcttttgggcaccattcctcagtccatttcacagcaaacttgtttggaatcaaatggcaacagtgagaacaccattgaattttgattctagcaagcagagcttttgtcagttttctattgaccttctcggtggaggaatcttagtggacaaaactggagattggatcacactta

SEQ ID NO: 36110 - DNA, 396 bp, Glycine max
  Clone ID: LIB3138-097-Q1-N1-F4
cttgagcatatttgcaaacatggccactgccaacgggaacgggacacgagatgctggaattacagactcggagcatttttcgccgtatagagcagatggaaaattgtatggtttcgtatgcgtagttacaggagcaacccagcccgttggaaaagcaatcgtcgctgagcttgcagcacacggcgcagcatgcatatatgcatgctctagcctcccctcagaaacctacaccgaactcgccgactcaataaatgcgcaatacccaaacacaaaagtcatcggctacccttacaaaatcaactcggaagaagacactctcgccctgattgatgacgtgctgaactcctgtggccgactcgatgtttgacatcttctaccggtttgctaggacccccg

SEQ ID NO: 36111 - DNA, 350 bp, Glycine max
  Clone ID: LIB3138-097-Q1-N1-F6
taaaaatgacctattaatcaacctggatttctttttatttaaccaccccgaccttagaatattccaggtactttttggcattggtgggtgaaattagttgggaaggccggttttgtggcagggggcaaaccaagggtagccctttttacaccttcgtggatttcaaaaactggtagccattggtaatggtttcttcaaggtggcatttcaactggtgattgtggctgtgctggcctctctggtgggctttgatgtgtggaacagcatccattgttctgcacattttttcttctgcgatatcttagtgtgactgattgctatgggatacatatcactatatctgtctatta

SEQ ID NO: 36112 - DNA, 395 bp, Glycine max
  Clone ID: LIB3138-097-Q1-N1-F7
tggtgatgaaaaattgatgcgtgaaaggacgcacctgctgttggcttgttgttcaaggatggcaatttgtaagaaagatgtttggagagttgaatgtggaatcccttctggatttccgctcacagttatttgcaatagcatttttaatgagatgctcattagatatagctatgaaaaattactgcgccaggctaaagctccaagtatgtttttacaatccttcaaaaattttgtttctttgtgtgtgtatggtgatgataacttaattagtgttcatgaatatgtcaagccttactttagtggttctaaattgaaaagctttctagctagtcataacatcaccattactgatggtattgacaaaactagtgcaactttgcaatttagaaagttag

SEQ ID NO: 36113 - DNA, 420 bp, Glycine max
  unsure at all n locations
  Clone ID: LIB3138-097-Q1-N1-F8
atagcccaagccctatacaaccaaaccctaacacacacccatttgattcagtttccatggctagcctcaaggttgcatttttggctgcagtgctctgcatggttgtggtgagtgcacccatggcacatgcagctatcacgtgcgggcaggtgacgaatagcctgatcaattgcatcggttacctccagaacggaggaacgccgccgtcgggatgctgcaacggagtgaagagcctcaatgccgccgccaagaccaccgtcgaccgccagacggcgtgcaactgcctcaagtcggccgccagccaaatctccggcttcaaagccaacaacgccgcctcgctccccggcaaatgcggagtctccatcccctacaagatcagcacctncaccaactgcgctaccatcaaggtttgaagagaat

SEQ ID NO: 36114 - DNA, 401 bp, Glycine max
  Clone ID: LIB3138-097-Q1-N1-F9
gttggctgatgggtgtccatatttgtatgcaatggtgcatgatagttcagtgtctacaataccaggtgattttgtcattggtgtcaagttggcaaccataaacaatatgtgtgcatatgggctcaatcctggtattacaggttctcgtcttttgggcaccattcctcagtccatttcacagcaaactgtgtggaatcaaatggcaacagtgagaacaccatagaattttgattctagcaagcagagcttttgtcagttttctattgaccttctcggtagaggaatcttagtggacaaaactggagattggatcacacttatacaaaactctttcaattagtaacttattgagagttgctgcttggaagaaaggctgtttaatggtcaaaattgtgatgtat

SEQ ID NO: 36115 - DNA, 252 bp, Glycine max
  Clone ID: LIB3138-097-Q1-N1-G1
gggagcttggagaggcgctatgtggggaatttgaatttgtcatttgctaatgttgaaggggagagcttgctcattggttttaaaggaggtggctgtgtccagtggcagtgcctgcactagtgcctgttgggagccttcgtttgtgttgagggcgttggtagttgatgatgacatgggttcacacttttaatttaggtttggaattgggagggttcacttacagagtgccgagaattgattagggccggtttg

SEQ ID NO: 36116 - DNA, 388 bp, Glycine max
  Clone ID: LIB3138-097-Q1-N1-G10
gttggaagtcatggcagcaacattgatggcagcaacaagttctggcactcttaaagcaactcctttcctaggccaaggcaagggtgccaatgccaatgctcttagggatgttgtttccatgggaactgggaagtacaccatgggcaatgatttgtggtatggaccagacagagtgaaatacttgggacccttttcagctcagaccccttcatacttgaaaggagaattcccaggggattatggatgggacactgctggcttatctgctgacccggaagcatttgccaagaacagggctcttgaggttatccatgggagatgggccatgcttggagcactaggatgcatcaccccagaggtgctagagaagtggttgagagtggacttc

SEQ ID NO: 36117 - DNA, 343 bp, Glycine max
  Clone ID: LIB3138-097-Q1-N1-G11
ttggaagaaaggctgtttaatggtcaagattgtgatgtctgggaatgcagcagtcaaaaggagtgattgggcctcattggtacaagtgtttttaacaaacagcaacagtacagagcattttgatgcatgtaagtggacaaaatcagaaccacattcctgggaattgatcttcccaatagaggtatgtggtcctaataatggttttgaaatgtggagttctgagtgggcaaatcaaacttcatggcatttgagtttccttattgacaatcccaaacagtctacagtttttgatattctcttgggaatctctcaagattttgaaattgctggtaatactcttatg

SEQ ID NO: 36118 - DNA, 398 bp, Glycine max
  Clone ID: LIB3138-097-Q1-N1-G12
ccagggtctcatcttctctcggcctcccttcccccaaaccccaccaattctcagtctcaaacctcaccgatttcccttctctcttcacacacacccccactctccccttcgcctccacctccaaatgggcccggcccaccccaaagcccaacccaaagcccctcctcaaaaccctctccgtcctcgaccgcgccctcatcggcgccgccgcgggcggcctcgccggcgccttcacttacgtctgcctcctccccctcgatgccatcaaaaccaagatgcagaccaagggcgcggcacagatttacaaaaacaccctcgacgcaatcgtgaaaaccttccagtccgaaggcatcctcggcttctacagcggcgtgtccgcggtcgtcgtcggctctacc

SEQ ID NO: 36119 - DNA, 392 bp, Glycine max
  unsure at all n locations
  Clone ID: LIB3138-097-Q1-N1-G2
gttcgagctgacatgtatctcccgacacatctacctcaggaagcacgtcggtgttggtgctctcgccaagctctaccgangtgcccaccgacatggaaacaggccctctcaccacaagtgaccacgtaccggtgtccagagggccgtcctccagtctttggagaagattggtgtgctcgagaaggccactgacggtggaaggaagatcagcgttgacggacagcgtgacttggaccgaatcgccacttcgactttggagagccaggtcgaggaggagtctgacgaggaggaggatgaggaagatgactaggaggagaacgactaggactacgagtaaactctttgctcgatcttaccgcctctatcatcattcatccagcgtagcaacagcg

SEQ ID NO: 36120 - DNA, 318 bp, Glycine max
  Clone ID: LIB3138-097-Q1-N1-G3
gtctgaaatcgacctctttatttggagaatctctaaaagtggcatccaaataacccttaagggtttcaaagacaaagaatacttcactcgtgaccagatgtgaaatgggtgacaggctgaaaaaattcctacaaaagcacaccagataagggttgatcaggttgttgtgtccatggagaagcattaagacaatttcttcaagtgaaacggctcttgtgtggacacatgtgttatactttgggacagcactgcaggattgctagctatagctcttttgagctaatacttattctgagttgctgttgagaatctactctg

SEQ ID NO: 36121 - DNA, 423 bp, Glycine max
  unsure at all n locations
  Clone ID: LIB3138-097-Q1-N1-G4
ctcgtttgaagatccggagaaaatattggagcaagctgtgcttgaaatgaacgacgacttgaccaaaatgcgtcaagctactgcacaagtgttggcatctcaaaagcggttggaaaataaatacaaggctgcacaacaagcttctgaagagtggtaccggaaagcacaacttgctcttcagaaaggtgaagaggatcttgctcgtgaagcacttaagaggcgtaaatcttatgcggataatgccagttctttgaaagctcaacttgatcaacaaaagactgttgttgagaatcttgtctctaatacaaggcttttggagagtaagatacaagaggcaaggtcgaaaaaagatactctcaaagcaagagctcaatcngcaaagactgcaaccaangtgagtgagatgcttggaaatgtcaatac

SEQ ID NO: 36122 - DNA, 421 bp, Glycine max
  Clone ID: LIB3138-097-Q1-N1-G5
aacccctctctttctcttccttctcatcattctcatattattggcgccacttcgacctcaatcaccctcgcgccctcgctcttcccttgctggtggcgacaatgtcgactcctgctaggaagaggctgatgagagacttcaagaggctgcaacaagacccgcctgcagggatcagcgtgccccccaggataacaacataatgctgtggaatgctgtcatatttggtcctgatgatactccatgggatggaggcacgttcaagttgactctccagtttactgaggattatccaaataaaccaccaactgtgcgatttgtgtctcgcatgtttcatccaaatatttatgctgatggaagtatttgtttggatatactacaaaatcagcggagtcctatatatgatgtggctgctatactcaca

SEQ ID NO: 36123 - DNA, 376 bp, Glycine max
  Clone ID: LIB3138-097-Q1-N1-G6
cttagtcatctacttctttcatctttctccctaacggtatcgagggaaaaatatggcggaagaacacagatgccaggcaccgcgcttctgcgccaacaattgcgggttctttggcagccctgccacgcagaatatgtgctccaagtgctaccgcgatttccagctcaaggagcagcaatcttccaacgccaagatggttctcaatcagtcgctggttccttcaccgccaccggcggtgatttctcagccgtcgtcttcttcttcggccgcggtagatacgtcatctgcggtggttgatgacgcgccacgcgaggcggaagaggttaacgcgccgcagcagaaccggtgtatgacgtgcaagcggcgcgtgaggctc

SEQ ID NO: 36124 - DNA, 334 bp, Glycine max
  unsure at all n locations
  Clone ID: LIB3138-097-Q1-N1-G7
ggctatgatattgtttccacatctncggcaaccatttccattgagtcactaacatttagtggagtatctcggtacaagttgtctcctgttgaaataggtcttcttactagtggatcattgtatggtgccttaattggctctgtgttggccttcaatgttgctgacttcttaggtagaagaaaggagctgattgtatctgcagttgattatcttgttggagcccttgttacatcttttgctcctaattttcctgttttggttcttgggagacttgtatttggtacatgaattgtactgtcaattcatgcttgtccaatgtacatttcatagacag

SEQ ID NO: 36125 - DNA, 421 bp, Glycine max
  unsure at all n locations
  Clone ID: LIB3138-097-Q1-N1-G8
aagcaaagaagttgatgtggaggttcccgctgatgaagatgattccagtgatgaagaggattcatctgaaagcagctccaaggaggaaagcgaagatgaagatgctgataaaagtgaagatgaagaaaaaaagcctaagacaaagacagtgaaggaaacaacttatgagtgggaacttttaaatgatgtgaaagctatatggctgaggaatccaaaagaggttacagaagaagaatacaccaaattctaccactctcttgccaaggatttcagtgatgagaaacctttagcatggagtcatttcactgctgagggtgatgttgagttcaaggcagtcctgtttgtaccacctaaggcacctcaagatttatatgagagctattataacgcanacaaatcgaacctgaagttgtatgttagt

SEQ ID NO: 36126 - DNA, 399 bp, Glycine max
  Clone ID: LIB3138-097-Q1-N1-G9
cttcgtttcttttcgtgaaacaaaagaaaacaaaagattaggttttgtgatgtcgggcatggagaggcttcagaggatgttcgcgggtgcaggtggagcgctgggccatcccccaccggattcccccaccctcgattcctccgagcaggtctacatctcctccctcgcccttctcaaaatgctcaaacacggaagagctggggtacccatggaagtgatgggtctgatgttgggggagttcgtggatgagtacaccgttcgcgttgtggatgtgtttgcgatgcctcagagtgggaccggtgttagcgttgaagctgttgatcatgtttttcagactaatatgcttgatatgttgaagcaaactggaaggccggagatggttgtggggtggtatcactc

SEQ ID NO: 36127 - DNA, 488 bp, Glycine max
  unsure at all n locations
  Clone ID: LIB3138-097-Q1-N1-H1
ggaggagctggtgcaaagaatgctattctcatgaatatgccaaatgctgttctttcaatgtggagatattttgttggagatctcgtctttgaagtttctaagatgccttctccctacattaaatgtacagtctcttttcttcataggcatttggaaaatttgggcttgatgatacccatcaaatttttgagggcttttttccccccacaaagcctgggttgcaaggtttgggaagaagatttcaggganaaaaagttggtattttggaaaattttttcacaaagaaggnnaatttcttttacaggccttggngtcaaacttcaaggttgcggtnccttgcaacaaaccctctgttggggcttgatgggggtgtcccattatttgtattgccaaatggtgccatgatagtttcagtgtctaccaattaccagggtgattttgtcaattggtgtcaagttgacaaccataaacattatgtgtgcatatgg

SEQ ID NO: 36128 - DNA, 414 bp, Glycine max
  Clone ID: LIB3138-097-Q1-N1-H10
atggtgaatccctggctcaagtgttgtggatgattggtgtggaaccagtggctgatacctttggtagggtaaaccgggtggaacctgtaagtcttgaagagcttggaaggcctaggattgatgtagttgttaattgctcaggagtgtttagagaccttttcatcaatcagatgaatcttctggatagagcagtgaagatggttgctgaattagatgaaccagcagagcaaaactatgtaagaaagcatgcattagaacaagctcaagcccttggagttgaagttcgagaggcagcaacaaggatcttctccaatgcttctggctcctactcctcaaacataaacctggctgtggagaattcttcatggaatgacgagaagcagctccaggacatgtatcttagcagaaagtctt

SEQ ID NO: 36129 - DNA, 379 bp, Glycine max
  Clone ID: LIB3138-097-Q1-N1-H12
gacagttctgcccttcatgatgatcaagggaacttgatgatcagaagcagccatgtcttgtccaagccatgtgatgaaatatatgtggttggagaaggagagacacttcacacaatcagtgacaagtgcggtgacccctttattgtggaaaagaaccctcacatccatgaccctgatgatgtcttcccgggccttgttatcaagattacaccctcataaacaacatagctagaataatatttgaaagttaattcctatacttgtatgtatctttcttcaatatagaacaaggaaaaaaagatttccttatgggcacccctaaagttttagtagttttgttttgcttgctgtatttactacacttgcttaaacaggaaaa

SEQ ID NO: 36130 - DNA, 412 bp, Glycine max
  Clone ID: LIB3138-097-Q1-N1-H2
gtcatttaatccaaacccgtgttctgatgcatggagtttggaatttctgaagcgtactggatttcattgcgatatcatttgtgtcactggatggactgccaccccaatgcaggatgttcaggttacaattgattggtttatttcctctcaggaatgtgttcccaggacctattgtgttttaaatccacaaaatccttttgtgttaaataggtggatgggaaaattgactttcccccagggcacttcccgaagtgttaagagaatgcctctttctatagggggaggagctggtgcaaagaatgctattctcatgaatatgccaaatgctgttctttcaatgtggagatattttgttggagatctcgtttttgaagtttctaagatgacttctccctacattaaatgtacagtc

SEQ ID NO: 36131 - DNA, 418 bp, Glycine max
  unsure at all n locations
  Clone ID: LIB3138-097-Q1-N1-H3
ctgttgagcattgatttgttgggtttacaaggagcaggtaaagcttttccaaacaaaattgtttttgatgataagcttgtgttggctaacacacaagaattctttgatggaaattttccagtggattcttggttaccaatttttgtgaattgtctttatcctgtaagtcaattaccttcagaagctgtcgttgtaaatgttacatgtggtagtggacgtggtggtttacccaccactgcttggattagttctgcagttaacaatcgctcctcagatatcaacaaaaagattcgcacagcacttgngaaaggtaagaaaattgtttttcttactagagttgatccttttccagtagctttactggctgttctttttggcgttaagaatgaaattctgagttctaacgccactaatccta

SEQ ID NO: 36132 - DNA, 403 bp, Glycine max
  Clone ID: LIB3138-097-Q1-N1-H4
aaaatttctcaatctaaaattgcacttcccaaaaacacagttggaggaaccattctgcgtagtgatctattggcaaattttttgacagagggcaattttagagcaagtgttgatttgcagcgcactcatcgtattagaggaatgattaaaatggtggccacagttggtattcctgagaatacaggtatatcattggcctgtgctatgaatagttcttttagggggcgcgccagttctgatatttacaccatctgctctcaagactgtgaattgtggaatcctgcttgcacaaaagcaatgactatgtcatttaatccaaacccgtgttctgatgcatgggagtttgaaatttctgaagcgtactggatttcattgcgatatcatttgtgtcactggatggact

SEQ ID NO: 36133 - DNA, 417 bp, Glycine max
  Clone ID: LIB3138-097-Q1-N1-H7
aacatatagaacactaccctgaacatagtaaagaagccagtgctaggatttgttagtgaagcaatggctcaaaccatgttgctcatgtctagtgtctctagcagttattccgtggatttgaagaaagaccttttcctccaattgcagagtcaaagtttaaggcctaagttctctcagctctcattcaacccacttccatcatcaacttcttccttttcttcaccccgtacattcacaactctggccctcttcaaatctaagaccaaagccgctcctgctaagactaaggttacaaagccaaagcaaaaggttgaagatggtatctttggcacttctggaggatttggttttactaagcagaacgagctctttgtgggtcgtgttgctatgcttggttttgcagcatcactgttgggt

SEQ ID NO: 36134 - DNA, 415 bp, Glycine max
  Clone ID: LIB3138-097-Q1-N1-H8
agttaatgtcttggatcctccagaacaagtgcagcaattatctgtggggtcctctcctgaccatgatacatctggggaaatgcatgtgcaacgattaccttccgcagagctcccttcttctcatctggattcaactaatttacctttgacaaccgaaattgaacatcagccaactgtggttcctaatcaagatgtgcaacctgattcaaatttggaactctattcacattcacatgaagttgttgtgcatcctgcctcaaattcagatcctaatacagttacaccaagtgaagtaagagtgcaatctgcagacacaataaatttgtcgattcctttagagatcaattatcaacatatgcaagctgaaacccattcagcttccagaatgctgcatttaagctatgatccactcaac

SEQ ID NO: 36135 - DNA, 409 bp, Glycine max
  Clone ID: LIB3138-097-Q1-N1-H9
ggcagcgtcactacaagcagcagctactttcatgcaacccaccaagttgagcaggagcaacactttgcagcaaaagtctactcagtccatttccaaggcttttggtttggaacctgttggagctaaaaaggtcacatgctcccttcaggctgatcttaaggacttggctcacaagtgtgttgatgctaccaaaattgcaggattcgcccttgccacctctgccctcgttgtctctggggcaagtgctgaaggtgttccaaagaggctaaccttcgacgaaatccagagcaagacctacttggaagtgaaggggacaggaacagcaaaccagtgcccaacaattgatggtggattggactcatttgccttcaagccggggaaatacaatgccaagaagttgtgccttgag

SEQ ID NO: 36136 - DNA, 282 bp, Glycine max
  unsure at all n locations
  Clone ID: LIB3138-098-P1-N1-A1
ccggnccggaanncccgggtcgacccacgcgtccgcacacattcaattcatcctgataacatagttgccttatatctcacttccaataaaaacaaagcgctgaggtgtcatcacgtactttgagcactccaatctccctacattactcataacatgtgtattttacacccccaactcatgtaagtactcatgagcgttttttatgctctttgtaatttactgcacattgaaacataatttctacattttataatacttttattctacttaactatataatat

SEQ ID NO: 36137 - DNA, 438 bp, Glycine max
  unsure at all n locations
  Clone ID: LIB3138-098-P1-N1-A10
ccggaattcccggtcgacccacgcgtccgcccaaatggagtacaggccctgcaaacattgaccatgacaaattcaagcagtgctcagcagggggcgatcctccagtacgcgcagacctctgacggacagcagatactcgtnccgagcaaccaggtggtggtgcagactgcatcaggagatatgcagacctaccagatccgtaccacaccatctgccacgtcacttccacagaccatggtgatgacttctcctgttacccttacatctcagacaacaaagacagatgacccccaactcaaaagagaaatacggctgatgaaaaacagagaagctgcccgggagtgccggcggaaagaagaaggagtatgtgaagtgcctggagaaccgagttgctgttctggaaaaccaaaataaaaccctaatagaggagctaaagac

SEQ ID NO: 36138 - DNA, 452 bp, Glycine max
  Clone ID: LIB3138-098-P1-N1-A11
cggaattcccgggtcgacccacgcgtccggctctgcctggggacaatgtaggcttcaacgtaaagaacgtgtctgtcaaagacgttagacgtggcgatgttgctggggacagcaaaaatgacccaccaatggaagcagctggcttcactgctcaggtgattatcctgaaccatccaggccagatcagtgctggctatgcccctgttctggactgccacacggcccacatagcatgcaagtttgccgagcttaaagagaagatcgatcgtcgttctggtaagaagctggaagatggccccaaattcttgaagtctggtgatgctgccattgttgacatggtccctggcaagcccatgtgtgttgaaagcttctctgactaccctccacttggtcgttttgctgttcgtgacatgaggcagacagttgctgtgggtgtcatcaaagccgtggac

SEQ ID NO: 36139 - DNA, 420 bp, Glycine max
  Clone ID: LIB3138-098-P1-N1-A12
cgcccgggaaacttcacactgatgatctacccactaagcctccattggtgccaacatacaaggagtggtctggccttatgcggtccctcttccttgcgactcttactaacaatcagtcaacttttgattctggttctcatggcttcattgcaggagccctaaaaaacacaccgcaccaactcggactattggctccgcctaacaagttacagaatgtattagaaaatgattacatgaagtccctggtcgaaagtccaactgaagaaactagtttgatttatgtgtcccagctggcttcacctatatgcggagaccaggacagtcttgtcacgaacccacccatgccagtgtacggttcagagtataaaaagcaaatggcactttccgggagcctcacatcaacttctctgaagagaacac

SEQ ID NO: 36140 - DNA, 392 bp, Glycine max
  Clone ID: LIB3138-098-P1-N1-A3
ggattcccggtcgacccacgcgtccgctagatctagatccccgcctccaaccttttttttactcccccaactcaatcattggaggctgtgatatccctctcaggggcttcaggtgactacacatacacatcctgctctactcactacactttagaccgtggtaaaaaaaaatgcacaccttaaatttgttacaaaataaaaatatactttatttaaataaaattaaatatattatgataaaataaaagttaaaaatatctaaatttttctaaacttttttttctcttccttcatttttattaactcctatattatattaaatttatatctttctccccctctttgaagaaacacaaatttaattccccactccccccatatatattcttttt

SEQ ID NO: 36141 - DNA, 437 bp, Glycine max
  Clone ID: LIB3138-098-P1-N1-C9
cggaattcccgggtcgacccacgcgtccgcccacgcgtccggcaagctccctcctgtgctcaagactccaaccactctttggtccagagccatgggccctcccactcgccagctcctcaatgctgtactggtcctgctcctcctgctggccaccaaccatcagggtacaggggttgttgtggccagtgagctgcgctgtcaatgcctgacgaccctaccaagggttgacttcaagaacatccagagcttgacggtgacccctccaggaccccactgcgcccagacagaagtcatagccactcttaaggatggtcatgaagtttgtctcaaccctgaagccctcttggttcagaagatcctccaaaagatactgaacaaaggcaaggctaactgacctggaaaggaagaacatgggctcctgtacctcaacgggcaga

SEQ ID NO: 36142 - DNA, 471 bp, Glycine max
  Clone ID: LIB3138-098-P1-N1-D10
atacccgggtcgacccacgcgtccgtgcagatgctcagcctcctactacagtaaatcctcgtttttacctttctgagtcttaggtccagtggtgctttgctttttgggggggagagggtcttgctgtttaattccagttgtatttatcattcttttatttctttttttctttttttatttattcagtgctttgaatgtttttattttttatatttattattattttgtgactttataaatataattaatttattttttttttaactatattttttttttattgtttaattttcttttatctttttttgttatttgtttatatggtatatattttttttttttaaatatttttttttgttttttttttttattattatttatttttttactattattatatattatatttattattattttttttgtatattgttatttttttttaatatttttttttattttaatatttat

SEQ ID NO: 36143 - DNA, 358 bp, Glycine max
  Clone ID: LIB3138-098-P1-N1-D2
ccggaccggaattcccgggtcgacccacgcgtccgcagccagccccatccctccacctgccccactcacacatattcacactcgcctagtgttgctgggcccttgggaggcctggctggagctggtccagctgttctgttctgtggtccctgtccctgggttcagattgctgccctccgcctgtctgaaggaggccaaggcctacccagtacaaaaggctgcctttaaaggcccctactggcttggtagctgccgggatggattgtcttgtcctgctgccctttgctgcgtgggcagcactctgaagcatgcaaatgggtcttgggatccctcccagaaacctgctctgaccagaccc

SEQ ID NO: 36144 - DNA, 445 bp, Glycine max
  Clone ID: LIB3138-098-P1-N1-D8
cggaattcccgggtcgacccacgcgtccggaccatcttgtccttctgagagtaggaactctggggagccatcttcagacggggctcttgtgaaactctgcttgggatgggcagattcggcttgtctgtctcctaaaagacaattttttgaatatgtattatatatttcagttgatgcatagtggagtgacacctaggaacctgcaggtggctgcgtgacacaagagtgagagcgagaggcatctctttgttaaagtttgactgtgtgggagctttctaaggagaaacagatctatctgcatacagcctgcagagtcctgccgtaatttacatgtgtctttacatcttccttgctggcatgaatgttttgtatttggaagtttttttttgagatactacataagaaactgttgaatcattattatcaatgaatggtaagatgattg

SEQ ID NO: 36145 - DNA, 263 bp, Glycine max
  Clone ID: LIB3138-098-P1-N1-E7
cccgggccgaccgcacgcgtacgattacacctgtatcagctaaaacatatcccaattttaattttaatacaacaaatccatctagtgggtgtcaaaaaaagctacagatcaattcctaccataatcttttattattattaatcacctatttctttacacatttttccttataatctttaatcaactaattctataattaatttttatattttattaatatttatttatattaaacttaattcatttaaataatattttatttt

SEQ ID NO: 36146 - DNA, 216 bp, Glycine max
  Clone ID: LIB3138-098-P1-N1-F6
ccgtctcgaattcccgggtcgacccacgcgtccgcttttaaacaaataaaatctttgatcactcattttttaaaaaaaaaacaagctaaacagcaggggtacaaagtctacagggtgtggttagatcaatcataatttgtcagcttaccttaagacacatgagtgtccagattgttactcaaggggttttgagctcttgtggttgttcagtcatgt

SEQ ID NO: 36147 - DNA, 286 bp, Glycine max
  Clone ID: LIB3138-098-P1-N1-F7
cggaattcccgggtcgacccacgcgtccgtagaacgccgcgatctccgcgccggccgggtccttatcttgggatcgggtggctggggcggggggaggggggcccaggcagagagcgcggaaagcgataaatactcggaaccttctccgcctcccgcaggccccgttatctgcctaccgctccgacaccccgatgatctgagccagtagggctacgagagccatgggcccggacccagcccgattccttccctgctacgaccgggccctgacgtcatagctaaaccc

SEQ ID NO: 36148 - DNA, 314 bp, Glycine max
  unsure at all n locations
  Clone ID: LIB3138-098-P1-N1-F8
cggaatncccgggtcgaccaacgcgtccgatttaatttaaaaaaaaaaaaaaaaaaaaaataatatatttttaaaaaaaataaaaaaataaagaagggaaaattttaaaaaattaaaaataattaaaaaaaataataaataaaattgggggcggccgttttaaagaatcaaagtttacttacccttgcttgcaaaataataatttttttatagtgtcactaaaattaaattaattggccgtttttttaaaactttttaattgtaaaaaccttggttttaccaaattaaattgctttgaagaaaaattccttttt

SEQ ID NO: 36149 - DNA, 358 bp, Glycine max
  Clone ID: LIB3138-098-P1-N1-G10
aattcccgggtcgacccacgcgtccgaagaaaggctcactggactccagtctgtcttactgctgaagaacttgtactggccccttccagcccgtggctctggagggacagcagtggaagtgaaccatacctcgagccttgctggctgtttataggaagcaggaagcaagcatgagacccagtggggtggggtcagatgggcaggtcccaaagcctctacctgcatgtgctgtgccggacgtgaagtcctcttccctagcagtgtaactgtctggttaccacagttacgtggggtgagggtccctgtagcctttggcgtcctaggttcaacccctgtctcccatttgtgtggaattggc

SEQ ID NO: 36150 - DNA, 147 bp, Glycine max
  unsure at all n locations
  Clone ID: LIB3138-098-P1-N1-G8
cggaatncccgggccgacccacgcgtccgttgactcacagatggtttctttaataaataaacctttttcctaaccatatattataaaatgggggggtttcaatttattgtgtggtgaaaccaaattctttttaaatgttaacaactt

SEQ ID NO: 36151 - DNA, 399 bp, Glycine max
  Clone ID: LIB3138-098-P1-N1-G9
ggaattcccggtcgacccacgcgtccgaaatgaagatgtttatgaactggcattagaagctttttaaacttcgctgcgatgtgctccatctaccccaagggaggacattgcctgtaggcacaggcatcgcctggcctaggacacggtctggagggctgttggtcaggactgtcaggctcacgtcggcctacttggaggtggactttctcttgattcttaagactgaggtattgactctccttgcttcttggcatccacgggctcctgagtataggcttttagctcctgggcagagtccttgggttgtgtttgacactccaccttgagctttcggcattgtgtgtctggcctggtgtaagcaggtctgaccttgctttctttacagcatagtgttattca

SEQ ID NO: 36152 - DNA, 187 bp, Glycine max
  Clone ID: LIB3138-098-P1-N1-H10
gacccaggcgtccggagttaaggactatggcaaagaatctcaagccaaggatttcatcgaggagtacttcaaatgcaacgaatgaataaataaaattttggctcagaaaaaaaaaaaaaaaaaaaaaaaaaaaaaaaaaaaaaaaataaaaaaaaaaaaaaaaattatatttttatataaataaaat

SEQ ID NO: 36153 - DNA, 417 bp, Glycine max
  Clone ID: LIB3138-098-P1-N1-H7
ggaattccgggtcgacccacgcgtccggaaaatctcactagaaggaaaaacacacttattttagattcgagtccgcaagtaccacaagatgggagttatgttaacttcgacagacaatttttacaccttgaatgcccacttataagcaaccgatccgacaactctttgctgaatcttcaccccttgctataaaaaaaaatcatcaaaaccaaacaactggctacaacacgaatagtacttaaatttgctaactgatatctaaaaaccgtgtcgatacactgctacctcgttgttacgtacaccactacaaggaatcatccttaacacaatggatacttggatcctcaaacaaatactgtctccatagtcactggtcacccttatctccattaaaacactaacagctcacccatccat

SEQ ID NO: 36154 - DNA, 372 bp, Glycine max
  Clone ID: LIB3138-098-P1-N1-H8
ggatttcccgggtcgacccacgcgtccgggccgcctgaataaggctgtcattcttcagggctccaaccacctccaactttttgcttagggccacagcagattcacctacactgtccttgtcgatgggtggttcaaaaagacaaattgatggggccaggcaatcatttgattccaaaccgataagccctcttggctggcatttcttgacattggacctcttgacatcgggggtactaaccaaaaatttcgggtggagggtggccccttcttttttaaataagtggactccaccttaatttaaaaaccaaaaccccttgaaaaaaatttttctttggcaattctttcttttaaaaacccaaaaaaaaaacccaa

SEQ ID NO: 36155 - DNA, 184 bp, Glycine max
  unsure at all n locations
  Clone ID: LIB3138-098-P1-N1-H9
gaannnccgggccgacccacgcgtccgaaccaccttattaaggttgtcattctccaagttttcttttactttctaacttactatcttagggcagggagtatatttacctacgctgtcctattctcatagcttttctaaaaagacaaattaatgtgacatgacaattttttaattcataactaat

SEQ ID NO: 36156 - DNA, 429 bp, Glycine max
  Clone ID: LIB3138-099-Q1-N1-A1
aggcttgaagggccgtgaacccacccttccgcacccatggggtcttttttattgtggtaaaatatactgaacataaaatttatgttcaataaaaaacaaaaattgtttttaaccattttaagtacatagttcagtgacattatatgcattcactgttgtgcaaccgtcacccctatgcatttccagaactttttcatcattctatgctgaaactctgtgcattaaacacttaactcgtcagtctccccttccccagccccaggcaaccacagtcctaaccttctgttcctatgatactgtaagtgcctcatgtaagtgaaatcccatagtatttgtctctttatgactgggctatctcacttagcagcatgtcctccaagttcatccatgatgtagcttatgtatctagacttcctgccttttaaaggc

SEQ ID NO: 36157 - DNA, 171 bp, Glycine max
  Clone ID: LIB3138-099-Q1-N1-A11
ggatcaggcctggagggccgtcgacccactcgtccgctctctgatctggatttatcagcactacgacaacacacacatggggtgggtcttctaattaaaaggtacagtcttctaaaacaaacaaaggctgaccaaccacttcgtattatgcctacctgccccatatcctct

SEQ ID NO: 36158 - DNA, 420 bp, Glycine max
  Clone ID: LIB3138-099-Q1-N1-A2
ggccgacccacgcgtccgctcggccgggtgcgccgccccagtgctctgtgggatactggaagtctcgagcgtcggctccgggttcccagccctcctctggcccgcactcatagaaacattcacacaccccctgcctcccctctcttccctctccgcctcccccttccccccctcgcgataagaagacccggcggcaggagaggggatgaagatggcggacgcgaagcagaagcggaacgagcagctgaaacgctggatcggctccgagacggacctcgagcctccggtggtgaagcgccagaagaccaaggtgaagttcgacgatggcgccgtcttcctggctgcttgctccagcggcgacacggacgaggtcctcaagctgctgcaccgcggcgccgacatcaattacgccaatgtgga

SEQ ID NO: 36159 - DNA, 277 bp, Glycine max
  Clone ID: LIB3138-099-Q1-N1-A3
accaacccttccgattaaaagaacatggaatccaatacctttttggacccccgagtctccatggccccttccaagggccggaaacccacttttaaattcaatgcaaggggcaatttgaaagatggctacgatacggcaaggtaatggggaactcggcgaatcacagcgtgaaaagctctcttgctggtgctattgttaaagggctagggggattcgatgaggggacttacatatcaaggttattacaagaatcaagaagaatttgatccaattgtga

SEQ ID NO: 36160 - DNA, 442 bp, Glycine max
  unsure at all n locations
  Clone ID: LIB3138-099-Q1-N1-A6
ccctncgtnagccggatcaggccttgagggccgtccaaccaacccttccgccgaaagtttgtggccctggagggccggcacaccagcgccctggccttccgcctgaataatgcctggcagagctgcccccataacaacgtgaccggcattgcctttgaggacgttccgattacttccagagtgttcttcggagagcctgggccctggttcaaccagctggacatggatggggataagacatctgtgttccatgacgtcgacggctccgtgtccgagtaccctggctcctacctcacgaagaatgacaactggctggtccggcacccagactgcatcaatgttcccgactggagaggggccatttgcagtgggtgctatgcacagatgtacattcaagcctacaagaccagtaacctgcgaatgaagatcatcaagaatgact

SEQ ID NO: 36161 - DNA, 406 bp, Glycine max
  Clone ID: LIB3138-099-Q1-N1-A7
gacaatcaggcctggagggccgtcacccacgcgttcgggagaaatgagatgccataaagtgattaactttggccgtgaatgtgctcaaacctaacaccaaactgaaaacataaatactgaccactcctatgttcggacccaagcaagttagctaaaccaaaccaactcctctgctttgtccctcaggtggaaaagagaggtagtttagaactctctgcatcatggtggcaattaatcaaaaacctcagatgcttgaaattcctaatacctatactttatagcggttatagtcagctcatttgcatgccactatttcccataatgcttctgagagccactaacttgattgataaagatcctgcctctgctgagtgtacctgaacagtatctaagatgaaagagttta

SEQ ID NO: 36162 - DNA, 402 bp, Glycine max
  Clone ID: LIB3138-099-Q1-N1-A9
aggcctggagggccgtcgacccacgcgtccggtgggaggctcagaaggccttggctatacaaccagtgccatgcggcgcagtcagggtcccatggacgacttccatcagctcacccgcctccatccccaagcagagtgtaggcaagggctgtgactgcctcaggtaattgggtgattttgctccagcaagaggagaggaagcatgtgagtgccacactgaacctttcagaaacagccgtggggtcgggggtgcttgggccaggccaggatacttggtgttaagcctgctctctcttcagtgccccgactcggcttgcaagcaggacctgctggcctacctgcaacgcatcgacctttactgccaccagctgaacatctgcagcaaggtcaaggccgaagtgc

SEQ ID NO: 36163 - DNA, 88 bp, Glycine max
  Clone ID: LIB3138-099-Q1-N1-B1
ccacccttccgggggaaagtgtaaagcattccaacaaagggttttaatgtagatttttttttttgcaccccatgctgttgattgctaa

SEQ ID NO: 36164 - DNA, 443 bp, Glycine max
  unsure at all n locations
  Clone ID: LIB3138-099-Q1-N1-B2
atcagggcttgaagggccgtcaacccacgcgtccgcttgttgtaatagagcttagattttagtggggcaattagatactgaaaagggacacacacaggacagctgaagatagncgtacattctacanaacanacaataacacaccgtgtactggttgggatagcgtcctccccagattcaagtccttcccagaacctcaaggtgtgatctgatttaaaaacacggccattgcagatgctgaagtttcatctcatgcttgagtgaggtggactcttaatccaatatgactagtgtccttctaagaagagaaaagatacagagactgtgacccaagggagaagacagccacctgaagacagaggcaaaagattggagtgatgcggctataatccaaagaatgcaaggggttgctggcagccaccggaagctgacagggggtggga

SEQ ID NO: 36165 - DNA, 222 bp, Glycine max
  Clone ID: LIB3138-099-Q1-N1-B7
gggacggccacccacccatcctttgtttaataaagctttttttttttttgccaatacatacattgggggggactcacaagacggctggagattactctacattctacaaaacaaacaataacacacctttttctttatgggatatcgttcttcccacattcatagtcccttcccaaaaccttagggtgtgatctgatttaaaaacacggccattgcagattc

SEQ ID NO: 36166 - DNA, 436 bp, Glycine max
  Clone ID: LIB3138-099-Q1-N1-C1
ggcttgaagggccgtcaaccaacccttccggttgcattagtcagaattttccagagaaacagaaaaaataagattcgcgtgtgtgtgtgcaaacatatatataaataaataaaaatatatttattttaaggaattgactcacatgattttgaaggcaggcaagcccaaagtctgcaaggggtgggccagcagagagctggtgctacagtgcaggtctgaaagttgccagagtcccttttatagagaagcttaaaaaatatttgttgaattaaatgtcttaggtagagacaaattgaattaaagtggttaagtaaatactcttaggtgaaatttgtgcaaattatgagtataaagagggtgagctacagaactctccatgaccactcaagaatgggacccaaaggcaaatgataacttattcattcatcaagggata

SEQ ID NO: 36167 - DNA, 253 bp, Glycine max
  Clone ID: LIB3138-099-Q1-N1-C10
ggccgtcaccaacaccgcgtccggcttagtggaacaacgattattatcaaggccgagcgactcttatcgggaggaactaagaggagcgtggtgtaacatctcgacacacccgaaagtggatcagtcccccctgggcccgaaccgctttggatgccacaccttctacaaactctctaacatccgcgaccaccggaaattcatgagcccgcctactcacgagtaggtaccagacttgaggacgaaataccttatg

SEQ ID NO: 36168 - DNA, 399 bp, Glycine max
  Clone ID: LIB3138-099-Q1-N1-C3
cccttccgcggacccttggggtctcattagtaaaagataccagaatctttcaggaaggacggattgcattagaaatagacagtatatttatagccacaagagcccagcaaggcctcaaagttggggcaggctggctggcccgtcatgttcctcaaaagcacccttgacgtcaagtctccttcccctttccccactccctggctctcagaaggtattccttttgtgtacagtgtgtaaagtgtaaatcctttttctttataaactttagagtagcatgagagaattgtatcatttgaacaactaggcttcagcatatttatagcaatccatgttagcttttactttatgatgccacaaccctgttttatactgtccttaataaatgcacatatatttttc

SEQ ID NO: 36169 - DNA, 404 bp, Glycine max
  Clone ID: LIB3138-099-Q1-N1-C4
cggctcgagcttggatctgatttcgtcctcggggagaagagaccccaagagtgttgagcagcccatcgtgcttaaagaagggttcatgatcaagagggcccaaggacggaagcgctttgggatgaagaattttaagaagagatggtttcgcttgaccaaccatgaatttacctaccacaaaagcaaaggggaccagcctctctacagcattcccatcgagaacatcctggcagtggagaagctggaggaggagtctttcaaaatgaaaaacatgttccaggtcatccagccagagcgtgcgctgtacatccaggccaacaactgcgtggaggccaaggactggatcgacattctcaccaaagtgagccagtgcaaccagaagcgcctcaccgtctaccacccgt

SEQ ID NO: 36170 - DNA, 428 bp, Glycine max
  Clone ID: LIB3138-099-Q1-N1-D1
ggggcccgtaaacacacgcttcgggttttaaaaccctgcgtggctatccctgacccaccgccgtgatgcccagggaagacagggcgacctggaagtccaactacttccttaagatcatccaactattggatgattatccgaaatgtttcattgtgggagcagacaatgtgggctccaagcagatgcagcagatccgcatgtcccttcgcgggaaggctgtggtgctgatgggcaagaacaccatgatgcgcaaggccatccgagggcacctggaaaacaacccagctctggagaaactgctgcctcatatccgggggaatgtgggctttgtgttcaccaaggaggacctcactgagatcagggacatgttgctggccaataaggtgccagctgctgcccgtgctggtgccattgccccatgtgaagtc

SEQ ID NO: 36171 - DNA, 428 bp, Glycine max
  unsure at all n locations
  Clone ID: LIB3138-099-Q1-N1-D2
gggccgtcaacccacgcgtccgcttcgatgacaatggcagaaactttaacaaagatggagacctcgttgactggtggactcaacagtctgcaagtaactttaaggagcaatcccagtgcatggtgtatcagtatggaaacttttcctgggacctggcaggtggacagcaccttaatggaattaatacactgngagaaaacattgctgataatggaggtcttggtcaagcatacagagcctatcagaattatattaaaaagaatggcgaagaaaaattacttcctggacttgacctaaatcacaaacaactatttttcttgaactttgcacaggtgtggtgtggaacctataggccagagtatgcggttaactccattaaaacagatgtgcacagtccaggcaatttcaggattattgggactttgcag

SEQ ID NO: 36172 - DNA, 435 bp, Glycine max
  Clone ID: LIB3138-099-Q1-N1-D3
aggcttgaagggccgtcaaccaacccttccggttgaaatacaattttttttttttgcagggttccacattttcaacatacacaagaaaggaatgtaaagaagtgcctaggcctcctgttttatagtttggtttggttataaatcttcatcttctttggaatctgcctaagagttatggcaactgatgatgagaaactaagactaccaatgttaagagttgtgaacagatgtgtgtacagcacaaccaaggcagccgtgattggcctcacaaaatctgtggctgcagatttcatccagcagggcatcaggtgcaactgtgtgtgcccaggaacagttgatacgccatctctacaagaaagaatacaagccagaggaaatcctgaagaggcacggaatgatttcctgaagagacaaaagacgggaagattcgcaact

SEQ ID NO: 36173 - DNA, 416 bp, Glycine max
  Clone ID: LIB3138-099-Q1-N1-D4
ccacccttccgaaacttttaaggcaacttatttttttacttttaccaataccatgatgtgacaggaatattacctctgtttaagcaaggtaatgtgtaaaatcagtctcggctgtcagaataacttctaaaaggtttttttataaccagttcaagttactgaaaaccttttaaacctttctgaagttcgtttgtataaatggcttctcttggattatcaataaaagccacataggtggcaagttgtagtattatatggctctgtagagtggtgaaccttctagaggaatatatgatttattcacagttcctcaaggcctggggatgatgatcacttatacctatttttgtgcagttacatcatgttgtacattagagatggagagtttaatagctctttaactgctgtcctcatta

SEQ ID NO: 36174 - DNA, 432 bp, Glycine max
  unsure at all n locations
  Clone ID: LIB3138-099-Q1-N1-D6
gggccgtcgacccacgcgtccgctcatcctcctggaaccttgctgtcctgatctgtgatagttcacccgctgagatcccctgagcccaagggtgcccagaacttccctgattgacctgctccgctgctacttggctaacctgacctcttgctgtctctgctcgccctcctttctgtgccctactcattggggttccgcactttccacttcttgctttctctttctctcttccgtcagaaactagaaatgtgaatgaggattattataaaagggggtccgtggaagaatgatcagcatctgtgatgggagcgtcagggttggtgtgctgaggtgttagagagggaccatgtgtcacttgtgctctgctcttgtcccacgtgttttccactttgcatatgaaccgngaactgtgcatagtgctgggatggaggg

SEQ ID NO: 36175 - DNA, 388 bp, Glycine max
  Clone ID: LIB3138-099-Q1-N1-E1
aaaataaggggaactacgggggggctttccactagacgtggccgcgaacaagtttttaatgtttaaatatcaccttgatttcaatatggagatgatttagggacaaattttggaggcagggaaagttaggctgttacaataagccaggtgagagtgaagtctgaactcaaagagtggcagctagaatggaaaggatgagatgttatttcgagcgctggtaatttctgctggtgcaatatcagtagcaaagtggaggcaggaggcagactgcagcaggtggagggatgcctgggaagtcaggcagtgatgatgatcaagactgtggcaacagagggaggaaagaagagtggtagctcagaagaggagtgcaatccaaagacagactttt

SEQ ID NO: 36176 - DNA, 422 bp, Glycine max
  Clone ID: LIB3138-099-Q1-N1-E2
gggccgcgacccacgcgtccggtgagaccatgtctctgagaaaaaaagaaaaaagattatggagacctattcttattgcatggagagacgatcataacatagtgagcaggggttaggaaaacccagattatgtacaacgaatgtgcgttacacttaataattagaagaaaaaagatgtcttttttggggagggggtgacaatgccttgtaaatgtaaggccacttgagaggactgtacagaaatcaaatccttaaagaaaagtaaacatgccaggtcttctgaatctcagcaagggttggccttcttagcattcctacatgggagattctaggattattccagctgtgttacttcaaggattcttgaaactcttcttggacccatttgttgactgactgctttgatggactcgtaatacaca

SEQ ID NO: 36177 - DNA, 237 bp, Glycine max
  Clone ID: LIB3138-099-Q1-N1-E3
gcagcttatggcgctgttttgagggacttaccccctgcggagagtgctaatgtggacataatggccaaacacccactccagtgcacaaaacagacttgcaatcgcttgagcccactgagcagatatggtgggttggctggaggcttctctttctaagaccctgcctgtctgacagcctgcagctattctggtttgacactgacttaactacttgaaactttatttattgcaccatgt

SEQ ID NO: 36178 - DNA, 450 bp, Glycine max
  Clone ID: LIB3138-099-Q1-N1-E4
ctctagccgataggcctcagggccgtcacccacgcgtccggcggcggctgctgccatggtggctggcggccggtaagggtctgagtggatctcctgccaggccagagcgccttcgggggccgcggcgggaggccaggagtttgcagccagggcgccgggtttgtggtctgcagtgtcgtgaggctgaagtgcagcatgtctagactgggagccctgggtggtgcccgtgccgggctgggactgttgctgggtaccgccgccggccttggattcctgtgcctcctttacagccagcgatggaaacggacccagcgtcatggccgcagccagagcctgcccaactccctggactatacgcagacttcagatcccggacgccacgtgatgctcctgcgggctgtcccaggtggggctggagatgcctcagtgctgcccagccttccacgggaa

SEQ ID NO: 36179 - DNA, 330 bp, Glycine max
  Clone ID: LIB3138-099-Q1-N1-F1
cgcttccccccacgcttccgaccagacttaagttttgcctcataccattccacccaaactgacttgggcccatccctgggaaaacctggtgaaacctctcccccagactccaaatcatctccatctgtcttaatacattctttaggtaaatccactactgacaatgatgtcagaattcagcaactgcaggagattttgcaagatctacagatgagattagagagctctgaagcagagagaaaacagctacaggtcgaactccaatcccgaagggcagaactggtatgcttaaacaacactgaggatttcagagaacagcttcttgacctc

SEQ ID NO: 36180 - DNA, 402 bp, Glycine max
  Clone ID: LIB3138-099-Q1-N1-F2
gggccgtcgacccacgcgtccggaggatggacatactggtgtctgagtgctccgcgcggctgctgcagcaggaagaagagattaaatctctgactgctgaaattgaccggttgaaaaactgtggctgtttaggagccttctccaaattggagcagttacaagaagaaaatttaaaattaaagtatcgactgaatattcttcgaaagagtcttcaggcagaaaggaacaaaccaactaaaaatatgattaacattattagccgcctacaagaggtctttggtcatgcaattaaggctgcatatccagatttggaaaatcctcctctgctagtgacaccaagtcagcaagccaagtttggggactatcagtgtaatagtgctatgggtatttctcagatgctca

SEQ ID NO: 36181 - DNA, 432 bp, Glycine max
  unsure at all n locations
  Clone ID: LIB3138-099-Q1-N1-F3
acccttncgtaggcggatcaaggcttgaagggccgtcaaccaacgcgtccgcccacgcgtccgcccacgcttccgctggttgttgctgtagtggcggagaggatcgtggtactgctatggcggaatcatcggaatccttcaccatggcatccagcccggcccagcgtcggcgaggcaatgatcctctcacctccagccctggccgaagctcccggcgtactgatgccctcacctccagccctggccgtgaccttccaccatttgaggatgagtccgaggggctcctaggcacagaggggcccctggaggaagaagaggatggagaggagctcattggagatggcatggaaagggactaccgcgccatcccagagctggacgcctatgaagcccgaggactggctctggatgatgaggacgtagaggagctga

SEQ ID NO: 36182 - DNA, 218 bp, Glycine max
  unsure at all n locations
  Clone ID: LIB3138-099-Q1-N1-F5
ccctncgtagccggataggccttgaggccccaacccaccctccggtatgcaggaaagaccccaacttgccttacacttcattccactaatatgcagatactcactctagcaggagcaccgctacattatcattctagacggctggtttttttaattcctttgtttaactgggcccaaatgatttgaaagtacctgtactgcaattctgaaactggtta

SEQ ID NO: 36183 - DNA, 450 bp, Glycine max
  Clone ID: LIB3138-099-Q1-N1-F6
ccctcgtagccggatcagcctgagggccgtcacccacgcgtccgcgcatcgccgaggatgaggaggttcaacattagatttgggatcccagcgaataatgtgatgatgcagttgtgattgttagcgagggccgccgctcactcttaccatatgactgatctccatagacagtgacagcgtttgactcttaaatacgctgtcactgaactcgggcccagactattctaacgtacctgcacgtgcaatgtgaaactggttaagagagcgaatgtattgcatcagcacggctatcacaaattaatgacgcatctactacggagaaaaaagtgtgctgttacagataccaacgaggtgcaaaagaggctgcatataactctttatacaacccccaccttgtttccatcttaaaatggcccactgttcatctttcactggttttgcacatagctc

SEQ ID NO: 36184 - DNA, 370 bp, Glycine max
  Clone ID: LIB3138-099-Q1-N1-G2
gtcagccttgggcgcatcaccttcagctgcgactgcgagaaaaaaaattactatttcttgcccatcataccttgggcgagcaaaaaattaaatttaaccatgagggaaatcgtgcacatccaggctggtcagtgtggcaaccagatcggtgccaagttctgggaggtgatcagtgatgaacatggcatcgaccccaccggcacctaccacggggacagcgacctgcagctggaccgcatctctgtgtactacaatgaagccacaggtggcaaatatgttcctcgtgccatcctggtggatctagaacctgggaccatggactctgttcgctcaggtccttttggccagatctttagaccagacaactttg

SEQ ID NO: 36185 - DNA, 438 bp, Glycine max
  unsure at all n locations
  Clone ID: LIB3138-099-Q1-N1-G3
acccttcgttagncggatcaagccttgaaggccggcgaaccaagccttccgatttaaggccaccaaaccaggtaccatgaagggagggcccttgtgggggggtgtcctgatgtttcctgggtgccctgcttccttgcaccaggcctggccctgcaaaaccaaaggctaactgcagcgccctcctgacccttcctggcaggggctacgttagcagcccagcacatagctngcctaatgctttcactttctcttttgtttaaatgactcataggtccctgacatttagttgattattttctgctacagacctggtacactctgattttagataaagtaaagcctaggtgttgtcagcaggcaagctggggaagccagtgttgtgggcttcctgcttggactgagaaggctcacgaagggcatccgcaaatgttgtttcac

SEQ ID NO: 36186 - DNA, 413 bp, Glycine max
  Clone ID: LIB3138-099-Q1-N1-G4
cccacccttccggttccgcagcggcaggtgaagtctatcagaggacgcgcccagccaagtggggggaaccaattcttgcaggcggtcgttcccctttttgcccgggattggactgcgtggaaatgagctgactgaaatcaactagtgacagctcaattcacacactatgcctttaacaggtccaatgaattgtctgtgaaagattacgtcgtcagagtccacatagtaacctatgtggagtgccagtacaatacaaacacttaagtgagctgctgaaacgactgctctcatgagagagtactatgtccttattatcgaccctgggatcaggaaaaactatgtcaataagtcatgctttgaaagaactcatggaaatagacgaagtgagtgaaaatgtattacaagttcactta

SEQ ID NO: 36187 - DNA, 401 bp, Glycine max
  Clone ID: LIB3138-099-Q1-N1-G5
gggccgtcgacccacgcgtccggcccactgtgcactccattatcagcaaaatggtcattaatgaggagctgatggcctccctggaccagccaacacatacagtggtgatgcaccgcactgagcccactgcccagcagaacctggctctgcagctggccgagaagctgggcagcctggtggagaacaacgaacgggtgtttgaccacaagcagggcgacctacaggggctactgacgagaccagaaggacggctaccgcaaaaacgagggctacatgcgccgaggtggctaccgccagcagcagtgtcagacggcctactgagctctccactctgtttaccgcctgagccatccaaccttgaagttctaaaccacacctcagtcactaaaggtctgtctaaa

SEQ ID NO: 36188 - DNA, 436 bp, Glycine max
  unsure at all n locations
  Clone ID: LIB3138-099-Q1-N1-G6
gggccgtcgacccacgcgtccggcgcgcgtgagctgagccggtgggtgagcggcggccacggcatcctggtggctgtgggggctacgaggaaagatctaattatcatggacctgcaacagtttcttatgtgcctgtccctgtgcacagcctntgccttgagcaaacccacagaaaagaaggaccgtgtacatcatgagcctcagctcagtgacaaggttcacaatgatgctcagagttttgattatgaccatgatgccttcttgggtgctgaagaagcaaagacctttgatcagctgacaccagaagagagcaaggaaaggcttggaatgattgtagataaaatagacgcggataaagatgggtttgtgacggagggggagctgaaatcctggattaagcacgcccagaagaaatacatatatgacaatgttgaaa

SEQ ID NO: 36189 - DNA, 435 bp, Glycine max
  Clone ID: LIB3138-099-Q1-N1-H10
ggcctggagggccgtcgacccacgcgtccggcgcgggacccggtttgtgtaagctggagctgtcgccgggtccgcggggaagtcttggcggtggagccatggtcggccagctgagcgagggggccattgcggccattatgcagaagggggatacaaacataaagcccatcctccaagtcatcaacatccgtcccattactacggggaatagtccgccgcgttatcgactgctcatgagtgatggattgaacactctatcctctttcatgttggcgacacagttgaaccctctcgtggaggaagaacaattgaccagcaactgtgtatgccagattcacagatttattgtgaacactctgaaagacggaaggagagtagttatcttgatggaattagaagttttgaagtcagctgaagcagttggagtgaagattg

SEQ ID NO: 36190 - DNA, 395 bp, Glycine max
  unsure at all n locations
  Clone ID: LIB3138-099-Q1-N1-H12
gtccggnngggatcatggtagatggaaccctccttttactcctctcggaggccctggcccttacccagacctgggcgggctcccactccttgaagtatttccacacttccgtgtcccggcccggccgcggtgagccccgcttcatctctgtgggctacgtggacgacacccagttcgtgcgcttcgacaacgacgccgcgagtccgaggatggtgccgcgggcgccgtggatggagcaggaggggtcagagtattgggaccgggagacacggagcgccagggacaccgcacagattttccgagtgaacctgcggacgctgcgcggctactacaatcagagcgaggccgggtctcacaccctgcagtggatgcatggctgcgagctggggcccgac

SEQ ID NO: 36191 - DNA, 410 bp, Glycine max
  Clone ID: LIB3138-099-Q1-N1-H3
cttccggcaactttcttaaccgtaggcttgcccagaacctccaggacaagcgccagaagcccctccgggtagctactaccctgaaccccccaatagtggagggcagtatggtagtggcctaccccctggtggtggttatgggggtcctgcccctggagggccttatggaccaccagctggtggagggccctatggacaccccaatcctgggatgttcccctctggaactccaggaggaccatatggcggtgcagctcccgggggcccctatggtcagccacctccaagttcctacggtgcccagcagcctgggctttatggacagggtggcgcccctcccaatgtggatcctgaggcctactcctggttccagtcggtggactcagatcacagtggctatatctccatga

SEQ ID NO: 36192 - DNA, 431 bp, Glycine max
  Clone ID: LIB3138-099-Q1-N1-H4
gggccgtcgacccacgcgtccggcggaccccagcctctgccaggttcggtccgccatcctcgtcccgtcctccgccggcccctgccccgcgcccagggatcctccagctcctttcgcccgcgccctccgttcgctccggacaccatggacaagttttggtggcacgcagcctggggactctgcctcgtgccgctgagcctggcgcagatcgatttgaatataacctgccgctttgcaggtgtattccacgtggagaaaaatggtcgctacagcatctctcggacggaggccgctgacctctgcaaggctttcaatagcaccttgcccacaatggcccagatggagaaagctctgagcatcggatttgagacctgcaggtatgggttcatagaagggcacgtggtgattccccggatccaccccaactccat

SEQ ID NO: 36193 - DNA, 442 bp, Glycine max
  Clone ID: LIB3138-099-Q1-N1-H5
gggccgccaacccacgcgtccgcggacgcgtgggctccggaggcggcctgggcgatggcggcggagtttggtccataacctgtgcaaccgcgcagctggaggatggcctcactcgggcctgccgcagctggagagcaggcgtcgggggctgaggcggagccgggccccgcgtggccgtcgtcgtcgtcctcaccgtgcctgtctggggccccctgctcccccttgcagcggggaaccctctctacaaactgggcagggcgaccaaggacgtccgctgaagagagcgctttcgcccttcctcttcaactcgggagctgctgagcgatgtgcgcttcgtactgagcaagggtcgcggcgccgacgccgctgggggcccgcagcgcatcctcgcccaccgcttcatgctggcggacggcaacgccgtctttgaccccatgttcaa

SEQ ID NO: 36194 - DNA, 358 bp, Glycine max
  Clone ID: LIB3138-099-Q1-N1-H6
cctggacggccgtccacccactcgtgcgcatgttagaatagtagatcttacccgaggatgacattgatgatgggtccaggaaactgttggcccagttggcagaaaaggatccgaaaatctctgcctttgagctgcaaaccatcctgagaagggttctagcaaaccgccaagatttcaagtcagatggcttcagcatcgaaccatgcaaaattatggttgacatgctaaattcggccggaagtggcatgctggggctgaaggagttctacattctctggacgaagattcaaaaataccaaaaaatttaccgagaaatcgacgttgacaggtctggtaccatgaattctatgaaatgcgg

SEQ ID NO: 36195 - DNA, 294 bp, Glycine max
  Clone ID: LIB3138-100-Q1-N1-A1
gctgtttaatggtcaagattgtgatgtctgggaatgcagcagtcaaaaggagtgattgggcctcattggtacaagtgtttttaacaaacagcaacagtacagagcattttgatgcatgtaagtggacaaaatcagaaccacattcctgggaattgatcttcccaatagaggtatgtggtcctaataatggttttgaaatgtggagttctgagtgggcaaatcaaacttcatggcatttgagtttccttattgacaatcccaaacagtctacagtttttgatattctcttgggaa

SEQ ID NO: 36196 - DNA, 271 bp, Glycine max
  Clone ID: LIB3138-100-Q1-N1-A10
gtggctctcttcaaagaggccatggaaaagtcgcccggcaaacatctggacatagttgtcgcgaacgccgggattggagagtctgaccctgagatgttccttcctcaggccgatcttaagcttcgcaagcccaacgttaagaccatcgacatcgacctgaccggtgtcatctataccgcccatcttgcttactgggcgttcgcgcagccggctcctaaaggcgactcgctatcttcgggctctccccgacaccattcccttctcctgatcg

SEQ ID NO: 36197 - DNA, 354 bp, Glycine max
  Clone ID: LIB3138-100-Q1-N1-A11
gatggaaacgttggccacatcttcttctgcaactcttccatcttcttcttctcccttttctatattcccttcaagaagaacttccctttctcctcccaagactctccaatttcgtttaccctcctccaagcgtgatgatgctcgcgattcagactctaaccaaaacaatcttcctattctcagtgatcgctgcctctccctttcccctctttccaaagatgctgcgatggggctggtgctgagtgctgcaacgggcagaagatggaccacgggttcagggatggaaggcccctctgttcctgcagttggtagggatagcgaatctgggacggggaacatctccactttcccatg

SEQ ID NO: 36198 - DNA, 198 bp, Glycine max
  Clone ID: LIB3138-100-Q1-N1-A12
ctcgagccgcgccacccagttccgatggctctcctcgccgtcacttcgcgcgctcccttcctcttctccccaaaccctaaaccactttctccatcctctttctactcccacctctctctctcttctcgctctcccagggtcccttctcttcgctttcgctctggcaccggagacgccagcgacgccggcaagcccgcc

SEQ ID NO: 36199 - DNA, 122 bp, Glycine max
  Clone ID: LIB3138-100-Q1-N1-A5
caagaacttaagtctgtagccatggcaatagtaatcaaagtggcggttctctctggttcccttagaaaagcttcataccactcaggccttatccgagctgcaattgaactgagcaaagggga

SEQ ID NO: 36200 - DNA, 253 bp, Glycine max
  Clone ID: LIB3138-100-Q1-N1-A6
tattgaatggctgcaaaaagctgatgtgcctaccatagcacagattgaagagttccattcgatgcagaggatgatgaatgctcctgattcaaatgataatattgatttactgttgagcattgatttgttgggtttacaaggagcaggtaaagcttttccaaacaaaattgtttttgatgataagcttgtgttggctaacacacaagaattctttgatggaaattttccagtggattcttggttaccaattttt

SEQ ID NO: 36201 - DNA, 191 bp, Glycine max
  Clone ID: LIB3138-100-Q1-N1-A7
ctcgagccgcaactctgttggctgatgggtgtccatatttgtgtgcaatggtgcatgatagttcaatgtctacaataccaggtgattttgtcattggtgtcaagttgacaaccataaacaatatgtgtgcatatgggctcaatcctggtatttcaagttctcgtcttttgggcaccattcctcagtccatt

SEQ ID NO: 36202 - DNA, 296 bp, Glycine max
  Clone ID: LIB3138-100-Q1-N1-A8
cagctctctatgtggcaaaagccggtcttccaccaggtgttttgaatgtagtttctggctatggtccaactgctggtgcaactctagcaagtcatatggatgttgacaagctagcattcaccggatctactgagactggaaaagttgtacttgaattggccgcaagaagcaatttgaagcctgtgatattgaacttggaaggaaatctcctttcattgtgtgtgaagatgctgatgttgaccaagcttgaaaacttgcacactttgctcttgtctttaatcaaggggcaatggtgc

SEQ ID NO: 36203 - DNA, 287 bp, Glycine max
  unsure at all n locations
  Clone ID: LIB3138-100-Q1-N1-A9
ttgatggtgcagtgatcaaaagaatggcgtgtagcaaaataagcaaggctctttttcaaccttagttaaggtgatgatatttggtaaggacttatagggtttggtttctaaggtaaattattatacctaagttttggggtagagatatgtaaatagtggctaagtgacgttggagaagacgacaaatgaaatgatgacaatgtacttctgggaaaataggtggtatgtctatattatatgaaaatagcaaaataaagatatatattatttcaatttangaaannncg

SEQ ID NO: 36204 - DNA, 340 bp, Glycine max
  Clone ID: LIB3138-100-Q1-N1-B1
ccacttattacagaaagttctcttttttttatcttcttctttctgcctgcgaattaccactgtcttgctttgctatcttacaggaagaggatcaaaataccccaccataagacaaatccaaaggaacagcaacatcaattatgggaggtttcaatggagaagaaggtgttgtgagagaaaaagaagaagaaaacaagtggccttcatggctgcagccacttctcaagacacgtttctttgttcaatgcaaagtccacgcagattcccacaagagtgaatgcaatatgtattgcttggactgtgtgaatggaccctttgctctgcatgtctcgcttcccac

SEQ ID NO: 36205 - DNA, 346 bp, Glycine max
  Clone ID: LIB3138-100-Q1-N1-B10
cagaaaaacaagtagttgagaactaagaagaaggaaatggcttcctcaatgatctcctccccagctgttaccaccgtcaaccgtgccggtgccggcatggttgctccattcaccggcctcaaatccatggctggcttccccacgaggaagaccaacaatgacattacctccattgctagcaacggtggaagagtacaatgcatgcaggtgtggccaccaattggcaagaagaagttcgagactctttcctacttgccagacctcgatgatgcccaattggcaaaggaagtcgaatcccttctaaggaaaggatggattccttgctggaattcgagttgaacacggt

SEQ ID NO: 36206 - DNA, 377 bp, Glycine max
  unsure at all n locations
  Clone ID: LIB3138-100-Q1-N1-B11
aaaaaaagattctaaagaaatataactaatattctttagaataatcaaaaagaatattaaattcaaataaattttagatagaaaaaagacttaaaaaggaggatttgaaatgcgagatctaaaaacatatctttccgtggcaccagtagtaagtactctatggttcggggctttggcgggtctcttgatagagatcaatcgtttttttccagatgcattgatattccctnttttttcattctagttattgacacggaaaggggtgaagaagattatagatcccattaagtattaaatatatgtaattaatatgtaattaatctcctcttctttatttcggcctttatttcttcttttttttacaattggaataagat

SEQ ID NO: 36207 - DNA, 344 bp, Glycine max
  Clone ID: LIB3138-100-Q1-N1-B12
gagcaggtaaagcttttccaaacaaaattgtttttgatgataagcttgtgttggctaaccacacaagaattctttgatggaaattttccagtggattcttggttaccaatttttgtgaattgtctttatcctgtaagtcaattaccttcagaagctgtcgttgtaaatgttacatgtggtagtggacgtggtggtttacccaccactgcttggattagttctgcagttaacaatcgctcctcagatatcaacaaaaagattcgcacagcacttgggaaaagtaagaaaatttgttttcttactaaaagtgatccttttccaataactttactggctgttctttt

SEQ ID NO: 36208 - DNA, 279 bp, Glycine max
  Clone ID: LIB3138-100-Q1-N1-B2
tgataaaggatggactggattgaccacaacacatgatacctctagatggggaaatactgcgacaaatgatagagaggatatatcatcaacactgtctgatccaggtcctatatgggatgctgaaccaaaatgggatgccgaacctaataattgggatgtagaaaatccaattgagttgccgggaccatcagatgatacagaaataggatctgcaaaggaggttgtgccccattttggagataaatgggttgtgtcaaaaggacaatttcttggcattct

SEQ ID NO: 36209 - DNA, 260 bp, Glycine max
  Clone ID: LIB3138-100-Q1-N1-B3
gtgcatagcgtttttcattgtgcattattcaatggccaccacagcaggtgtatccggaaccatggtgagcacctccttcatgaggaagcaacctatgacgaccaagagcctaaagacattccccaacgctctttttggtctgaaaggtggacgaggtggtcgtgtaacttgcatggcctcgtacaaggtgaagctcataaccccagaaggagaagtggagtttgaatgcccaaatgatgttttcattgttgacaaggctg

SEQ ID NO: 36210 - DNA, 196 bp, Glycine max
  Clone ID: LIB3138-100-Q1-N1-B5
tgcaacagcaaattgggtggattcaaccggcaacattgagaccaccctggaatttcggttctagcaagcagagcttcaggaaaatgtctattgaccttttcggcggaagaattttattacacatagctgaactaatggatcacacctgatacaacattgtccaatgatgaacttgcatataggtgctcattggaac

SEQ ID NO: 36211 - DNA, 259 bp, Glycine max
  Clone ID: LIB3138-100-Q1-N1-B7
agataaggtgcgatgtataataaggaacatagttagggactgggcagccgagggtaaaaaagaacgtgatcagtgctacaatcctatacttgaagagcttaatatgctattccctaatcgcagtaaagagagtccacctgcatgtttagttcctggtgctggacttggtcggcttgccctggagatttcatgtttaggatttatcagtcagggaaatgaattttcatactacatgatgatatgctcaagctttattctt

SEQ ID NO: 36212 - DNA, 177 bp, Glycine max
  Clone ID: LIB3138-100-Q1-N1-B8
tgaaaaattgatgcgtgaaaggacgcacctgctgttggcttgttgttcaaggatggcaatttgtaagaaagatgtttggagagttgaatgtggaatcccttctggatttccgctcacagttatttgcaatagcatttttaatgagatgctcattagatatagctatgaaaaattact

SEQ ID NO: 36213 - DNA, 331 bp, Glycine max
  Clone ID: LIB3138-100-Q1-N1-B9
ctttactatattacttgaaaaataataaatagaaaaaattactcaaaataagggtaggatgcgttggtaataccttattttttttcataaaacctgttttttgtttaatttgattcctttacccatacaatatcctctttttgttttgatatacaagaccggtaaatacgaagtagataaggggcaaattcatgttagaagtagcaattaaagtagataggaaaggatggtaggatgaagaaaaagtttgtgtgggacctcaaaaaaacaaaaatctcttaattaattggtcttggtggaaatgatgatgggatctaaatcaagtgaaaat

SEQ ID NO: 36214 - DNA, 322 bp, Glycine max
  Clone ID: LIB3138-100-Q1-N1-C1
ggatgaatcaggtgctacatcaactgccgtgttcattggagatgatgagctgctaatttcacatattggtgactcatcagcggttctatgtagatctggaaaagcagaagttctgactagtcctcaccgtccaattgggagcagcaagacttctcttcatgaaattagaagagtcagagaagcaggtggatggattaacaatggtagaatttgtggagacattgctgtatctcgtgcatttggggacgtgcgattcaaaacaaagaagaatgagatgctgcaaaaaggagttcaggaaggaagatggtcagcaaagttcatt

SEQ ID NO: 36215 - DNA, 61 bp, Glycine max
  Clone ID: LIB3138-100-Q1-N1-C11
aagagattgaagagacccccagaccgacaaggacagatggaaaggtcttgcctatgatatc

SEQ ID NO: 36216 - DNA, 160 bp, Glycine max
  Clone ID: LIB3138-100-Q1-N1-C12
atgtggaatcccttctggatttccgctcacagttatttgcaatagcatttttaatgggatgctcattaaatatagctatgaaaaaatactgggccaggctaaaactccaaatatggttttaccatccttcaaaaaatttggttctttggggggggatggg

SEQ ID NO: 36217 - DNA, 328 bp, Glycine max
  Clone ID: LIB3138-100-Q1-N1-C2
cattggttcaaccatagctcaaggtatggcttttggcactggaagtgcagtggcacacagggctgtggatgctgtcatgggtcctcgtaccattcaacatgaagcagtagtcacggaggctgctgctgctgcccctgcacccactgcaaatacttttggtggcgatgcatgcaatgttcatacaaaggcattccaggattgcctgaacagctatggcagtgaccttagcaagtgccagttttacatggatatgcttgcagaatgcaagaagaactctggagcctcgttgagtgtgtaactgctacatttgtctgtttgggagtttgca

SEQ ID NO: 36218 - DNA, 361 bp, Glycine max
  Clone ID: LIB3138-100-Q1-N1-C3
caaaactggagattggatcacacttatacaaaattctccaattagtagcgttgttgagagttgctgcttggaagaaaggctgtttaatggtcaagattgtgatgtctgggaatgcagcagtcaaaaggagtgattgggcctcattggtacaagtgtttttaacaaacagcaacagtacagagcattttgatgcatgtaagtggacaaaatcagaaccacattcctgggaattgatcttcccaatagaggtatgtggtcctaataatggttttgaaatgtggagttctgagtgggcaaatcaaacttcatggcatttgagtttccttattgacaatcccaaacagtctacaagttttgatat

SEQ ID NO: 36219 - DNA, 296 bp, Glycine max
  Clone ID: LIB3138-100-Q1-N1-C5
gtcatttaatccaaacccgtgttctgatgcatggagtttggaatttctgaagcgtactggatttcattgcgatatcattggggtcactggatggactgccaccccaatgcaggatgttcaggttacaattgattggtttatttcctctcaggaatgtgttcccaggacctattgtgttttaaatccacaaaatccttttgtgttaaataggtggatgggaaaattgactttcccccagggcacttcccgaagtgttaagagaatgcctctttctatagggggaggaactggtgcaa

SEQ ID NO: 36220 - DNA, 172 bp, Glycine max
  Clone ID: LIB3138-100-Q1-N1-C6
taaaaattgcacatgatcgcgtatacaccattgccataggctgtgctgtgtgccttctgatgagtctactggtatttccaaactggtcaggagaagatctgcataattccacggtttacaagctcgaaggccttgccaaatctatagaagcttgtgtgaatgagtactttta

SEQ ID NO: 36221 - DNA, 251 bp, Glycine max
  unsure at all n locations
  Clone ID: LIB3138-100-Q1-N1-C7
cttggtatctggggaggcaagggacaaggaaaatctttccaatgtgagcttgtctttgccaagatgggaatcaaccccatcatgatgagtgctggagagttggaaagtggaaatgcaggagagccagcaaaactgatcaggcagagataccgtgaagctgcagacatgatcaagaaaggaaagatgtgcgctctcttcatcaacgatcttgatgcangagctggtcgtcttggtggaaccacacaatacac

SEQ ID NO: 36222 - DNA, 302 bp, Glycine max
  Clone ID: LIB3138-100-Q1-N1-C8
ggaggatcctccgcatttgtatattaaccagtccgcacgcccggctgatccgctacctttgtacaaatattacccctgcacaaaatggctcacgttatggactcggtccgcgacaagctgggcttcgacctgcacgccgtgtacgccccgctgccgtggacgctgctgaacattagcgccgggatggacaccgtcagcggccaccgccgtctcctgccgcgcggcctgcagaactacctgcctcctcagggcgagatctcgatcgtgtcgcactacctgaacggcctcggcattgtcctcgc

SEQ ID NO: 36223 - DNA, 360 bp, Glycine max
  Clone ID: LIB3138-100-Q1-N1-C9
agttgaaggagtagtctaagtcatcaaaatggggagagctccatgctgcgagaaaatggggttgaagagagggccatggactccagaagaagatcaaattctcatcaattatatcaacacttatgaccatgctaattggcgtgcattgcccaaactagctgggctgttaaggtgtggaaagagttgcagactccggtggataaattatctgagaccggacatcaaacggggcaactttaccagagaagaagaggacaccataatcagtttgcatgaaatgttgggaaacagatggtcggctatagcggcaaggttgccagggagaacagacaacgagataaaaaacgtgtggcacaccca

SEQ ID NO: 36224 - DNA, 314 bp, Glycine max
  unsure at all n locations
  Clone ID: LIB3138-100-Q1-N1-D10
cgttaactctttatctgtatgcatatctttgctagaccccaagagacatacttttggcgcttattatacatataaccgccaaatgactaatggatctactgtgactgcaaatcctgagactgttgaaggcatgcttgaaagcctaggtgatttactcaagctcttagatgtttcttctgctgaaaatctcttgctaactacttttggcaagttacaaccacctcttggtaaacatcgtttaaagattgtagagtttatatcagttttagtaactgttggtggtgaagctgctgagaggaaatngattgatcttg

SEQ ID NO: 36225 - DNA, 351 bp, Glycine max
  unsure at all n locations
  Clone ID: LIB3138-100-Q1-N1-D11
cttctccctacattaaatgtacagtctctttcttcatagcatttggaaatttggctgatgataccatcaattttgaggcttttccccacaagctggtgcagtttggagagattcaggaaaaagttgtattgaaattttcacaagaggaatttcttacagcttggtcaactcangtgcgtcctgcaacaactctgttggctgatgggtgtccatatttgtatgcaatggtgcatgatagttcagtgtctacaataccaagtgattttgtcattggtgtcaagttgacaaccataaacaatatgtgtgcatatgggctcaatccttgtatttcaagttctcgtcttttgggca

SEQ ID NO: 36226 - DNA, 287 bp, Glycine max
  Clone ID: LIB3138-100-Q1-N1-D12
agaccatgctcactatgaaacatacacccattcggaaatgaaagcaatgcctatgattgacagcgagggatttatgtgtggggctaacttcaatgttgactctcaaacaaagatccaagtgatgcctcgtgttggaagggaaacttattgggccacatggagcttacaaacttgactgatttaatcataacccaacttttttttaaaacccttttcttaatgggtaaaaatacacaacttaatattatggggctgactcttcttttaagctttaactcttttggggt

SEQ ID NO: 36227 - DNA, 325 bp, Glycine max
  Clone ID: LIB3138-100-Q1-N1-D2
aagcaagctcatcttaaagttttaaaaatggcaccagcctcctccatggttctctctgccccatccttggctggcaaggccgggaagctgggcccatcagcccccgaagtcgggagggtcagcatgaggaagaccgtcaccaagcaggcctcctccggaagcccatggtacggcccaaaccgcgtcaagtacttgggcccattctatgggcgagcccccgtcctacctcactggcgagttcccaggtgactacggctgggacactgctgggctttcggccgacccagaaaccttcgccagaaaccgtgagctcgaagtgatccac

SEQ ID NO: 36228 - DNA, 294 bp, Glycine max
  Clone ID: LIB3138-100-Q1-N1-D7
gagactcttcttcatcttcttgtcctgcttcatacattcatatggtgcagcatctgatcgagaagtgtttgatctttcacatgaccaaggaagaatgcatggaagctctctctaaacatgcaaatattaatcctattataacatccaccgtgtggaaggagctagagaaggaaaacaaggaattctttgaggcttacatgaagtcgaaggctaaagacgacagaatgtctcaggaagagacaaatcagataatacagaagatgatctcagagtcagattcctctaaaagatgac

SEQ ID NO: 36229 - DNA, 317 bp, Glycine max
  Clone ID: LIB3138-100-Q1-N1-D8
tgcttgcacaaaagcaatgactatgtcatttaatccaaacccgtgttctgatgcatggagtttggaatttctgaagcgtactggatttcattgcgatatcatttgtgtcactggatggactgccaccccaatgcaggatgttcaggttacaattgattggtttatttcctctcaggaatgtgttcccaggacctattgtgttttaaatccacaaaatccttttgtgttaaataggtggatgggaaaattgactttcccccagggcacttcccgaagtgttaagagaatgcctctttctataaggggaggagctggtg

SEQ ID NO: 36230 - DNA, 262 bp, Glycine max
  Clone ID: LIB3138-100-Q1-N1-D9
caaccaaccaaccaacctcagaatgtctgcccccaacgccaacaaccccaacgacggcatcgtcggccaggccgtcaactcggtcaagaacgccgccaactacgtctccgagtccatccagggcaactctgctgaggcttccaaggaggccaacaagcagcaggccaagggcaacgttcccggaaacgactccatcaccgaccgtgcctccggtgctctctccgctgccggcgacaagatcgaccagaccaagcacgaaggc

SEQ ID NO: 36231 - DNA, 438 bp, Glycine max
  unsure at all n locations
  Clone ID: LIB3138-100-Q1-N1-E1
gacatgtttgggttaataatgaatgcaaaggcaaccttatctggcagttgctgaagggtttccatgcactgttggccaaaaacctagcaaggcaaagtattatttggaagacacaagtgagattttgagaatgttgcaaggccttgccaatgcttctgagcactctactagaacttctttgcaaccagcttctcattaaggttcttttttaatgtgtagagtgcanacacacacacacacaatttggctacaatgtagtactatttttctatactatactgngatatctatcttgtgttagatttcgtgatctattttattttctggctgacttgccttcattattgatatccccactatgttgcaactatcaataggttgttttgaaagtagatgaaatacatgggggacttgaattaatggttcttttcttgacta

SEQ ID NO: 36232 - DNA, 312 bp, Glycine max
  Clone ID: LIB3138-100-Q1-N1-E10
tgataatattgatttactgttgagcattgatttgttgggtttacaaggagcaggtaaagcttttccaaacaaaattgtttttgatgataagcttgtgttggctaacacacaagaattctttgatggaaattttccagtggattcttggttaccaatttttgtgaattgtctttatcctgtaagtcaattaccttcagaagctgtcgttgtaaatgttacatgtggtagtggacgtggtggtttacccaccactgcttggattagttctgcagttaacaatcgctcctcagatatcaacaaaaggattcgcac

SEQ ID NO: 36233 - DNA, 229 bp, Glycine max
  Clone ID: LIB3138-100-Q1-N1-E12
ccctcttgttgagtatgctctgcctatttgaaaatttccacacctcttttaattgtcgtaatgatgtgtgaagtgtgtgttattttaaaaaaaaaaaaaaaaaaaaaaaaaaaaaaaaaaaaaaaaaaaaaaaaaaaaaaaaaaaaaaaaaaaaaaaaaaaaaaaaaaaaaaaaaaaaaaaaaaaaaaaaaaaaaaaaaaaaaaaaaaaaaaaaaaagggggggccccc

SEQ ID NO: 36234 - DNA, 150 bp, Glycine max
  Clone ID: LIB3138-100-Q1-N1-E3
actctctctcacttggggttgaaaatgaaaatttgtggagcagggatcagcagcagctacaccaccacgtgcaaatcccttttaaggtttgctttctctttcctctccaaacctgcaaaaaccaaaattctgccctcactttctaaaatt

SEQ ID NO: 36235 - DNA, 357 bp, Glycine max
  Clone ID: LIB3138-100-Q1-N1-E4
gagctcatatttgaagaagcattctccaaacatgcaagctaggtacttggagctcatgcttgcaatgaatgagaatgcagtatctggcaatttgcagaatgaaatggtgcacatctatctttctgaagtactcgattggcatgctgatttaagtgctcaacaaaaatgggatgagaaagatcattccccaacaaggaaaaaattattgactgccttagagagtatagcaggatacaatccagaggctttgctaaaacgtcttccaccagatgctttgtatgaagagcatgctatattgttggggaaaatgaaccgacatgaactggcattatctttggatgttcttaagcttaatgc

SEQ ID NO: 36236 - DNA, 198 bp, Glycine max
  Clone ID: LIB3138-100-Q1-N1-E7
aaatggacaactgttgatctttttggtgagccagccaagaaaggctctgacattataaatggatttgccaatgaaactttgagaactctttgtttaactctcaaagatgtgaatggaacccaaggagaaagcggcatccctgaagatagctatactctgatagccattgtgggaatcaaagatcctgtgcgccctggg

SEQ ID NO: 36237 - DNA, 304 bp, Glycine max
  Clone ID: LIB3138-100-Q1-N1-E8
caaagaacagattaagatggcacaaacgctggcaatgcccgtggcaccttcgctagttatcatctccaattctcgcctctccaacacactctccgttcccgttctgaacaaaccaaaggttcaagggtcaagcatcaagtgcgttcgtgttggcggtgtggagattccgaacaacaagcgaatcgagtactcgctgcagtacattcatggagttggaaggaccagagcgaaacagattctctgtgatatccaaatggataataaaatcacgaacgaactcactgaggaggagctaatcacactc

SEQ ID NO: 36238 - DNA, 106 bp, Glycine max
  Clone ID: LIB3138-100-Q1-N1-E9
gtggaatgaaaattgtctctgttgggactgatgccaaggggaacatttatatataagagcttggggaagcttcttaaacacacaaaggtaacttatctggacttat

SEQ ID NO: 36239 - DNA, 266 bp, Glycine max
  Clone ID: LIB3138-100-Q1-N1-F10
tgacaaccattaacaatatgtgtgcatatgggctcaatcctgggatttgaggttctcgtctattgggcaccattcctcacaccatttcacagcaaactgtttggaatcaaatggccacagtgagaacaccattgaattttgattctagcaagcatagcttttgtcaattttgtattgaccttctcaagcgatgaatcttagtggacaaaactggacattggatcacacttatacgaaattcttcaatttgtaacttattgatagtt

SEQ ID NO: 36240 - DNA, 225 bp, Glycine max
  unsure at all n locations
  Clone ID: LIB3138-100-Q1-N1-F11
acanaccaaaaaggtaaactttttgcaacaaccatggttgcaatggcagcagcaacagcatccacccagttgattttctcaaagccttgttccccttcacgtctatgccccttccaactatgtgtctttgacactaaacaagtgctatcaagtggcaagagaaagcatgtggggggttctggaattaagggcattgcttgggggggagcaacaaccactgggacc

SEQ ID NO: 36241 - DNA, 407 bp, Glycine max
  Clone ID: LIB3138-100-Q1-N1-F12
cggctcgagggaagcagctgcaactgtggcagcaactgcagttgcaacaagtactcttttgactacgttgagaagatcacaaatgagactctagttttgggtgttgggccggtgaaggcccaattcgagggtgctgaaatgggtgttgcagctgagaacggtggctgcaactgtggatcaaactgcacttgcgacccatgcagctgcaagtgagatcaacatgcataaccttcaagcagagatagctgtaatacatgtatcaataaataataagtatgtgttgtgtttgaagttttagaataaagtggtcatggcccgcctttgcaaattcaaatgttctacgatttgttacgggtgttttaagcttgggttgctttgtgtttggttggtctcttataaatatgtaa

SEQ ID NO: 36242 - DNA, 277 bp, Glycine max
  unsure at all n locations
  Clone ID: LIB3138-100-Q1-N1-F6
attgcttcttgtttctttcatcattttcatggctacggnttttcttctgtatttttatatatatttaaatgaattgtcacacgttttttgttttttggtggcttctatggtggagaagggagtcatgtggtccaatcgtgaagaagaaaaattgtttgttacagtatagaaattttcctcagtgtcactgttccaagtctccatttttcctattggtttatttcttccatttccagttccgaaaagggtgtgtgatcattcaatgcangtgggttcg

SEQ ID NO: 36243 - DNA, 256 bp, Glycine max
  Clone ID: LIB3138-100-Q1-N1-F7
gggaatctctcaagattttgaaattgctggtaatactcttatgccagctttttctgttccacaggctactgccagatcttctgaaaatgcggaatcctctgcatgatctggaatttgtgttttctttcgcttgttcgtttgtttaattcaataaaggaaattaggcatgaccctcttgttgagtatgctctgcctatttgaaaatttccacacctcttttaattgtcgtaatgatgtgtgaagtgtgtgttatttt

SEQ ID NO: 36244 - DNA, 343 bp, Glycine max
  Clone ID: LIB3138-100-Q1-N1-F8
gttctgagtgggcaaatcaaacttcatggcatttgagtttccttattgacaatcccaaacagtctacagtttttgatattctcttgggaatctctcaagattttgaaattgctggtaatactcttatgccagctttttctgttccacaggctactgccagatcttctgaaaatgcggaatcctctgcatgatctggaatttgtgttttctttcgcttgttcgtttgtttaattcaataaaggaaattaggcatgaccctcttgttgagtatgctctgcctatttgaaaatttccacacctcttttaattgtcgtaatgatgtgtgaagtgtgtgttattttaa

SEQ ID NO: 36245 - DNA, 331 bp, Glycine max
  unsure at all n locations
  Clone ID: LIB3138-100-Q1-N1-F9
gtttgatggctgaagagagacctttaaatttagggatcatggactcatgcctgagtcatggtgctcatctctctcgctctcttattttgggggcttcaaaactgccaattccacctttcacactgctaggccatgttacctttggatatctagtatccctgggttttggcgatggttcccatattaaattttgggaggacatttggccatctaggtgggtaaccttgctctttttaatgcttttccaagactcttctctatttctcccaatgcccctataatccaattntattttcttgcatccttataatccaatttcacccaaaggatc

SEQ ID NO: 36246 - DNA, 212 bp, Glycine max
  Clone ID: LIB3138-100-Q1-N1-G10
caactatttataacgctcatgaggccatccaggagggccaagactttcttcggatcactatctggctctgcattggggactttggccctcaaaattgggggggaagacccatttggtttcacccacttatcacctttcttgaatctttttaaaggggaggtggtacctaaccccccatagatgagggctattcttttttaagggaggaggct

SEQ ID NO: 36247 - DNA, 344 bp, Glycine max
  Clone ID: LIB3138-100-Q1-N1-G11
gacaccaaaaaaaaggaaaggaacttgagccacattctgtccctggtggactcaagaagagtctttcataggacagttaaaattatagcttgcaaaaagggttcactagcaaacattgcaatggcctcaacctcttctgctctcactatatcctcttcttccacccttcttgatggcaaggctccaagacagtcaccagctgcttcccctcaatgtgtgagcctcccccctccccctttgcactctcagaaccgttcatggaagaccactgcttattgtcgcaaggttgctcgaaaagttatggcaatggccacaagagaggcaccagctgaagctaccccaac

SEQ ID NO: 36248 - DNA, 156 bp, Glycine max
  Clone ID: LIB3138-100-Q1-N1-G5
tccaatgctacctgtgggaagcggttgggtttaattgggcttgagaacactggaacttaacggccgggattcccggcccttcttgggacaagttccagaattggtgaagacattttttggggcattctttttgagggaaatctttttccattcaca

SEQ ID NO: 36249 - DNA, 125 bp, Glycine max
  Clone ID: LIB3138-100-Q1-N1-G6
ctcgagccgcttgtgagcagattggaagagaagagaagttggtgtcaacagcagaagcttcttcttcgttccaagaaacagcgcgatgcgttgtgtgccattgcagtttcaacaccttcagaaaa

SEQ ID NO: 36250 - DNA, 295 bp, Glycine max
  Clone ID: LIB3138-100-Q1-N1-G7
gtcttgcaattgaagttgaagtcttgcccttctctcttcaactgcaaacacaagacatcatcatccatggctgcctccgtctccactgtcggagctgtcaacagagctcttttgaacctgaatgggtctggacctggggtttcagctcccagttcatccttctttgggagcagcttgaagaaggttattggctcaagggtccccaacacaaagatttcctctggaagcttcaagattgttgctgtagaagagaagaaagagattgaagagacccagcagaccgaccaggacagat

SEQ ID NO: 36251 - DNA, 324 bp, Glycine max
  Clone ID: LIB3138-100-Q1-N1-G8
ggaaatttggctgatgataccatcaattttgaggcttttccccacaagctggtgcagtttggagagattcaggaaaaagttgtattgaaattttcacaagaggaatttcttacagcttggtcaactcaggtgcgtcctgcaacaactctgttggctgatgggtgtccatatttgtatgcaatggtgcatgatagttcagtgtctacaataccaggtgattttgtcattggtgtcaagttgacaaccataaacaatatgtgtgcatatgggctcaatcctggtatttcaggttctcgtcttttgggcaccattcctcagtccatt

SEQ ID NO: 36252 - DNA, 365 bp, Glycine max
  Clone ID: LIB3138-100-Q1-N1-G9
actggatggactgccaccccaatgcaggatgttcaggttacaattgattggtttatttcctctcaggaatgtgttcccaggacctattgtgttttaaatccacaaaatccttttgtgttaaataggtggatgggaaaattgactttcccccagggcacttcccgaagtgttaagagaatgcctctttctatagggggaggagctggtgcaaagaatgctattctcatgaatatgccaaatgctgttctttcaatgtggagatattttgttggagatctcgtctttgaagtttctaagatgacttctccctacattaaatgtacagtctctttcttcatagcatttggaaatttggctgatgatac

SEQ ID NO: 36253 - DNA, 189 bp, Glycine max
  Clone ID: LIB3138-100-Q1-N1-H1
aaattccaaccccaggacataatattccatggttgcctccgcttccactgtcggagctgtaaacaaagcttttttgaacctgaatgggtctggacctggggtttaagctcccagttaatccttttttggagcaactttgaaaaaggtttttggttaaagggtccccacaccaaaaatttcttttggaac

SEQ ID NO: 36254 - DNA, 257 bp, Glycine max
  Clone ID: LIB3138-100-Q1-N1-H10
ggcagaatgagtgcaagtgcagaccaaatcagcgaatgcttccagatctttgataaagacaatgatggaaaggtctccattgaggatttgggcaatgcactcaagtctcttggaaagaaccctaccaacgccgagctcaagtccattagagatgaattaagaaccaaagactttgatttggctaccttgaaaggagtttaccgcaagcccatcaagaccccaactgagcaactcaaagagatgggtgatgctttcaa

SEQ ID NO: 36255 - DNA, 320 bp, Glycine max
  Clone ID: LIB3138-100-Q1-N1-H11
tttctcaagagaaactttaagcagatgtctaatgttttgtgggtggctcctgaggacaaggcgagtttatggtcacaacttcattatgtttcgtgtaataatctggaaatgcaagaagcttatcttgtcaatctcgtaaatgtgttacgagaattgtatttgcacagtccaaaggaagctcgccaattgagaaggaaagctctctctcgtattgaatggctgcaaaaagctgatgtgcctaccatagcacagattgaaaagttccattcgatgcacaagatgatgaatgctcctgattcaaatgataatattgatttact

SEQ ID NO: 36256 - DNA, 309 bp, Glycine max
  Clone ID: LIB3138-100-Q1-N1-H5
cttggaccggattatagcaagcagagcttttgtcacttttctattgacggtctcaggggaggaatcttactggacaaaacttgaaattggatcacacttatacaaaatgctccaattagtaacttattgagagctgctgcttggaagaaaggctgtttaatggtcaagattgtgatatctgggaatgcaacaatcaaaaagattgattgggcctcattggtacaagtgtttttaacaaacagcgacagtgcaaatcattttgatgcatgtaaatggacaaaatcagaaccacattccttggaattgatc

SEQ ID NO: 36257 - DNA, 361 bp, Glycine max
  Clone ID: LIB3138-100-Q1-N1-H7
cggctcgaggtggattcttggttaccaatttttgtgaattgtctttatcctgtaagtcaattaccttcagaagctgtcgttgtaaatgttacatgtggtagtggacgtggtggtttacccaccactgcttggattagttctgcagttaacaatcgctcctcagatatcaacaaaaagattcgcacagcacttgggaaaggtaagaaaattgtttttcttactagagttgatccttttccagtagctttactggctgttctttttggcgttaagaatgaaattctgagttctaacgccactaatcctatgctgacgcgacttcttgagaactgtaagagtctcaaatatctggttgatgagt

SEQ ID NO: 36258 - DNA, 200 bp, Glycine max
  Clone ID: LIB3138-100-Q1-N1-H8
ataacttaattagtgttcatgaatatgtcaagccttactttagtgggtctaaattgaaaagctttctagctagtcataatatcaccattactgatgggattgacaaaactagtgcaactttgcaatttaaaaaggtagcagattgtgattttcttaaaaaaaacttttaaccaatgtcttatggtttgggggggggttct

SEQ ID NO: 36259 - DNA, 431 bp, Glycine max
  unsure at all n locations
  Clone ID: LIB3138-101-Q1-N1-A11
ctgatgatgctaccaatttctgggattacgcttccgagaacccggagagtgtgcatcagttcatggtcttgttcggcgaccgcggtattccagatggctatcgaaagatgcacggttacattggccatacccacaagctcctgaacaagaacggcgactgggtctacatgcagttacatttcaagtcgaaacagggcactggtttcattactcaagaagactcgttcaactacggaccagattactcgaccaaggacttgtaccaggccatcgacaagggcgatttccctggctgggatgtttgcgtccagaccatgacagccaaggaggccgaagagttgtgggagaagcaaaagatcaacgtgtttgatctgacgcacgtatggncacagggccagttccctcttcgcaaggtcggagagttctttcta

SEQ ID NO: 36260 - DNA, 458 bp, Glycine max
  Clone ID: LIB3138-101-Q1-N1-A12
gatttgtctctggggatggtgaagagatgacactgattccgggaaccagtgttgaagaggcttataacaagctaatagttgaacttgagaaaagtgttcctacattggttggcattgaatgtcccaaggatgagaaacttcctcgtcgcaaaatttttgacaaacctaagacgcgctgcttcactattctccctatggagtttaatcttgtggtccgtcaaaagtttttaaattttgtgaggttcattatgaagaaaagggacaaacttagttgtcaagttggaatcaacccatactccatggaatggactggtttggccaatagattactgagtaagggcaatgatattctgtgttgcgattatgctagttttgatggtttgattaccaaacaagttatgagcaagatggcagaaatgataaacagtctttgtgtggtgatgaaaaattgatgcgtg

SEQ ID NO: 36261 - DNA, 282 bp, Glycine max
  Clone ID: LIB3138-101-Q1-N1-A2
aatgacattacctccattgctagcaacggtggaagagtgcaatgcatgcaggtgtggccaccagttggcaagaagaagtttgagactctttcctacctgccagaccttgatgatgcacaatttggcaaaggaagtagaataccttcttaggaagggatggattccttgcttggaattcgagttggagcacggtttcgtgtaccgtgagcacaacaggtcaccaggatactacgatggacgctactggaaccatgtggaaagctgcctatgtttggttgcact

SEQ ID NO: 36262 - DNA, 56 bp, Glycine max
  Clone ID: LIB3138-101-Q1-N1-A4
gtggaggaccatttttgggtatggtcattggccaaatttttggccgaggccatttt

SEQ ID NO: 36263 - DNA, 332 bp, Glycine max
  Clone ID: LIB3138-101-Q1-N1-A5
atggttgttggtgaacatacaatctaccaaggaattcagctgacacatgcttaaccgggatacatgggccaatgaagccgtttctcagactattagtacaaactgcatattctggcaggtatatgatgatacaactgaaggcagaaaagtctgcacttattacagactggattcaattcctgttgtacttgttattgatcccatcactggccaaaagatgcgctttttggattggaatggttcaacctgaaaagcttattgggaaggtctactagcattccttgatgcaggggcctaaggatcatcatattaccatgtctcacaaagcgtct

SEQ ID NO: 36264 - DNA, 82 bp, Glycine max
  Clone ID: LIB3138-101-Q1-N1-A6
gtgtccttttgcatttgtgaactagtatgtagaatttaattcacttaaataaagcgcattactatgtgcaatgagtgtgttt

SEQ ID NO: 36265 - DNA, 255 bp, Glycine max
  Clone ID: LIB3138-101-Q1-N1-A7
ccagtctaatgccaaatgtcaaatactatggaaagtagaattggtgtgcccgacgacaggaatgaggggactgtccaacgtctaatggacgtgccacaacacagatgtgagggtttgggtacacagcaagccttatcctgcgacaatgatgcaaaatcaaagactagtatgccctgtatgtggaggggaaatcaaagagtcgaccataatcgatgcgggtcgtatttgctgaatgaaaaattaacgaattgttct

SEQ ID NO: 36266 - DNA, 250 bp, Glycine max
  Clone ID: LIB3138-101-Q1-N1-A8
caccggtggatatttttgtacatttttttcattaggcaccaacgaaaccctatacttacccacaaaaaaaaaaaaaaaaaaaaaaaaaaaaaaaaaaaaaaaaaaaaaaaaaaaaaaaaaaaaaaaaaaaaaaaaaaaaaaaaaaaaaaaaaaaaaagaaaaaaaaaaaaaaaaaaaagagaggcaaataaaaaaaaaggcgaaatcaaaagacatagaagtttttctgtgtgaaaatgaaataaagatc

SEQ ID NO: 36267 - DNA, 404 bp, Glycine max
  Clone ID: LIB3138-101-Q1-N1-A9
gaatttcattcacagggatgaggaggttaattacttgccttcaaggtatgatcctgttcgtcatgcagaaacgttccccatacctcctgctatctgcagtggaaggcgtgaaaagtgtggaattgagaaggagaacaactttaagcagcccggagagagataccgatcttgggcacctgacaggcaagatagatttaatcgccgatgggttgatgctttatctgacccacgggtcacccatgaaatccgcagtgtctggatatcttactggtctcaagctgaccgttctctaggccaaaagatagcatctcgtctgagcatgaggccaaatatttaatgttgttgccaaccccagaatgattgttagaagtgcagaccttgcaaagagtacgataaggatgtga

SEQ ID NO: 36268 - DNA, 440 bp, Glycine max
  Clone ID: LIB3138-101-Q1-N1-B10
gttggaatcaacccatactccatggaatggactgggggggccaatagattactgagtaagggcaatgatattctgtgttgcgattatgctagttttgatggtttgattaccaagcaagttatgagcaagatggcagaaatgataaacagtctttgtggtggtgatgaaaaattgatgcgtgaaaggacgcacctgctgttggcttgttgttcaaggatggcaatttgtaagaaagatgtttggagagttgaatgtggaatcccttctggatttccgctcacagttatttgcaatagcatttttaatgagatgctcattagatatagctatgaaaaattactgcgccaggctaaagctccaagtatgtttttacaatccttcaaaaattttgtttctttgtgggtgtatggggatgataactaatttaggtgtcatgaata

SEQ ID NO: 36269 - DNA, 465 bp, Glycine max
  Clone ID: LIB3138-101-Q1-N1-B12
atcgagataactagaaacagtgtgatgaaaatgaagggccttgttttcttcgttgctacaattttggtagcatggcaatgccatgcgtacgatatgttccctctccgaatgaacactggctatggtgcccgtactccggaggtgaaatgcgcaagttggaggcttgctgtggaagcacacaacatctttggctttgagaccattcctgaagagtgcgttgaagcaacaaaggaatacatccatggcgaacaatatagatcagactccaaaacagttaaccaacaagcttacttttatgccagagacctcgaagtccatcccaaggacacatttgtgttcagtatagatggcaccgtactctctaatattccatactacaaaaaacatggatatggggtggagaaatttaactcgaccttgtatgatgaatgggttaacaagggcaatgcaccggcactgcccgag

SEQ ID NO: 36270 - DNA, 361 bp, Glycine max
  Clone ID: LIB3138-101-Q1-N1-B2
atcgcacattgttgtccttgcgttcgtgttgctcatttcatcaaaacttgcagaatgtcacaacatagttcgcttccttcctggcttccagggaccccttccttttctacttgaaactggttacgtggaagtgggtgaaactgaagcagaggagcacgcagaactcttctattattttatcgagtcagagaacgatcctaaagggaaccctctcctactttggctaaccgggggtcccggttgctctgctttctctggccttgtctttgaaataggtccactgacatttaaaaacgaggaatacaatgggagcctacctaatttgaccttgaagccacaatcatggacaaaggtagtagca

SEQ ID NO: 36271 - DNA, 328 bp, Glycine max
  Clone ID: LIB3138-101-Q1-N1-B3
caggctcagatggaaacaaatttgtttaaattgtctcttgatgatgttgaaactcctaaaggttccatgttggatctgaaaatttctcaatctaaaattgcactttccaagaacacagttggaggaaccattctgcgtagtgatctattggcaaattttttgacagagggcaattttagagcaagtgttgatttgcagcgcactcatcgtattagaggaatgattaaaatggtggccacaggtggtattcctgagaatacaggtatatcattggcctgtgctatgaatagttcttttagggggcgcgccagttctgatatttacacca

SEQ ID NO: 36272 - DNA, 353 bp, Glycine max
  Clone ID: LIB3138-101-Q1-N1-B5
gataaaaaggcttcatttacttcttactgtcaaggagtcggctatggatgttccatccaacttggatgctaggaggcgtatttctttcttctctaattcattgtttatggatatgccacctgctcccaaagttcggaatataatgtccttctctgtcttgacaccttactttaaggaacctgttcttttctccctaagtcatctgggagagccaaatgaagatggagtctctatcctcttttacttgcaaaagatatttccagatgaatggaaaaactttgttcaacgttttgataataaaagtgaagaagaaactcagagtagagaatgaagaggaacttcgtttatgggca

SEQ ID NO: 36273 - DNA, 379 bp, Glycine max
  Clone ID: LIB3138-101-Q1-N1-B8
tgctgttctttcaatgtggagatattttgttggagatctcgtctttgaagtttctaagatgacttctccctacattaaatgtacagtctctttcttcatagcatttggaaatttggctgatgataccatcaattttgaggcttttccccacaagctggtgcagtttggagagattcaggaaaaagttgtattgaaattttcacaagaggaatttcttacagcttggtcaactcaggtgcgtcctgcaacaactctgttggctgatgggtgtccatatttgtatgcaatggtgcatgatagttcaatggctacaataccaggtgattttgtcattggtgtcaagttgacaaccataaacaatatgtgtgcatatgggctc

SEQ ID NO: 36274 - DNA, 419 bp, Glycine max
  Clone ID: LIB3138-101-Q1-N1-B9
agataagccttcctctctgcagagtgcagagctttggctccgcgttgcttcattcattctcaacaacaaaccaatctttcttagaaaatgagggggggcttgtggcaacttgggcaatcgatcactcgccgtcttgcccatggagataagaaggctgttgctcgtcgatgttttgcctcagaagctgagctgaaaaagacagtgtttcatgacttccatgttgctcatggtgggaagatggttccatttgctgggtggagcatgccaatccaatacaaggactcaatcatggactctaccatcaactgtagggagaatggtagcctctttgatgtttcccatatgtgtgggctgagcctcaaaagggaaggacgctgccccattccttgaaaagctggtcattgccgatgttgctgggc

SEQ ID NO: 36275 - DNA, 413 bp, Glycine max
  unsure at all n locations
  Clone ID: LIB3138-101-Q1-N1-C1
attggttttgaaggtttcgagaagaggctggaaatatccttgttccagccgggactttttgctgaccctgagggaatgggtttaagagctcttgcaaagtcccagttggatgagatacttacaccggctgcttgcaccattgtttcatctctcagaaatgatcatgtcgactcctatgttctgtctgagtccagtctctttgtttatgcctacaagatcatcatcaaaacctgtggtactacaaagctactgcttgcaatcccacccatattgaaatttgctgaaatgctttccctcaatgttagatctgtgaattacaccaggggaagtttcatctttcccggtgctcagccctatccccatcgcaacttttnttgaggaagttgctattcttgatggctactttggcaagc

SEQ ID NO: 36276 - DNA, 401 bp, Glycine max
  Clone ID: LIB3138-101-Q1-N1-C10
aatgggagtatattctgatggttcctacaatgctccgtctggacttatatattcattccccgacacttgagccaatggggaatgggcaatggttcaaggactttacattgatgagttctcaaggaaaaagttgaacttgactgcacaagagctctctgaggacaaagcattgacttactcatgcctaaattagacaccattgctttttgtctactgtccttgttagaaggttcccatgttttgcctatagaactgtcactgtaatatttaaataatgctccttctaacatacaaacgaactatcactggagaagagtctgcttctcatcggaattactagtattacaacatctaatcctgataagaagaggatatttgagcccataggccgcatatagaat

SEQ ID NO: 36277 - DNA, 475 bp, Glycine max
  unsure at all n locations
  Clone ID: LIB3138-101-Q1-N1-C11
agcatactttgacatcttctacagccgccctcttccgccagggttgcttccatatctgagactggtagctctagggggcactgatgcattcctgttggagtcaatatttagaaactccatctggggtcatcttgaattgcctgtgagccgcgacaatgaggagctaatatgcagagtggttagagagacctgcaaaactgcccttgctggttatcatacaaccattgaagaggatcaaaagttgaaagaagcaaagctagattcaaggcatgcaatagcagttggaattcgagaaggggagaagcagctcctgcagcaaattgatgagaccttcaaggagaaagaattggaattggaccagttagaatattatcaagaaaggaggctcaaggaccttggactntgtggngaaaatggtgatatccttggagaccttggaaaattcttctaggaagcanaagcagaagcagtacac

SEQ ID NO: 36278 - DNA, 471 bp, Glycine max
  Clone ID: LIB3138-101-Q1-N1-C12
caatctctctctctccaatggccaaagacctcgaagcggagattcaaagtgggttgcctcacaaggactaccacgacccaccccccgccccattctacgaccccgccgagctccgaaagtggtccttcttccgagccctcatcgccgagttcgtcgccaccctcctcttcctctacgtcaccatcctcaccgtcatcggctacaaccaccagacagccaccgccgccgagccctgcagcggcgtcggcgtcctcggcatcgcttgggcctttggaggcatgatttttgtcctcgtctattgcaccgccggcatatcagggggacacataaacccggcggtgacgttcgggttgtttttggcgaggaaggtgtcgctgacaagagctgttgggtacatggtggctcaggtgttgggggccataagtggggtggggcttgtgaaggctttgcagaagagctactacaacaggt

SEQ ID NO: 36279 - DNA, 438 bp, Glycine max
  Clone ID: LIB3138-101-Q1-N1-C2
gcatgtaagtggacaaaatcagaaccacattcctgggaattgatcttgccaatagaggtatgtggtcctaataatggttttgaaatgtggagttctgagtgggcaaatcaaacttcatggcatttgagtttccttattgacaatcccaaacagtctacagtttttgatattctcttgggaatctctcaagattttgaaattgctggtaatactcttatgccagctttttctgttccacaggctactgccagatcttctgaaaaatgcggaatcctctgcatgatctggaatttgtgttttctttcgcttgttcgtttgtttaattcaataaaggaaattaggcatgaccctcttgttgagtatgctctgcctatttgaaaatttccacacctcttttaattgtcgtaatgatgtgtgaaatgtgtgttatttttaaaa

SEQ ID NO: 36280 - DNA, 250 bp, Glycine max
  Clone ID: LIB3138-101-Q1-N1-C3
cacaagactacaattagtagctaattgaaagtgacggattggaagaagggcggtcaaatgatgaacattgtgatgcatctgaatgcactgatcaaaacgcatgattgggcctcatggggccaggtgtttttaacaatccactaccatgcaaagcattcagatgcatgtaagtggacacaatcagaaccacatgcgcgggaagtgatcatcccaatataggaatgtcgtcctaataaggcaccagaaatga

SEQ ID NO: 36281 - DNA, 447 bp, Glycine max
  unsure at all n locations
  Clone ID: LIB3138-101-Q1-N1-C5
ttggagagttgaatgtggaatcccttctggatttccgctcagggttatttgcaatagcatttttaatgagatgctcattagatatagctatgaaaaattactgcgccaggctaaagctccaagtatgtttttacaatccttcaaaaattttgtttctttgtgtgtgtatggtgatgataacttaattagtgttcatgaatatgtcaagccttactttagtggttctaaattgaaaagctttctagctagtcataacatcaccattactgatggtattgacaaaactagtgcaactttgcaatttagaaagttagcagattgtgattttctcaagagaanacttaagcagatgtctaatgttttgtgggtggctcctgaggacaaggcgagtttatggtcacaacttcattatgtttcgtgtaataatcttgaaatgccagaagctta

SEQ ID NO: 36282 - DNA, 377 bp, Glycine max
  Clone ID: LIB3138-101-Q1-N1-C7
gcgtggtagccctgaaaccttgagggaccctcgaggttttgccgtgaagttttacaccagagagggtaactttgaccttgttggaaacaaccttcccgtcttctttgtacgtgacggcatgaaatttccagatatggttcatgctcttaaacccaatcccaagaaccacatccaagagaattggaggatccttgacttcttctctcactttccagaaagccttcacatgttcacctttttatttgatgatttgggtgttccacaagattacaggcatatggatggttttggagttaacacatatacgctgatcaacaaggctgggaaagcagtgtatgtgaaatttcactggaagaccactagtggtataaagtgtc

SEQ ID NO: 36283 - DNA, 463 bp, Glycine max
  unsure at all n locations
  Clone ID: LIB3138-101-Q1-N1-C8
gagagaatggagaaaaaggaggaaaaggtggtggtgggcgtgcgcagtgccagtgtattacggtggagaaaatgaataccaaaggggaatcatccctcctaacgccgtgtttggagatccaaagggcatccccatccagcaaaccatttacagggacactcctgctcctttcaactgcccttactgcgctcataccgctctcactaccgtcagatcaaagcccagtctggcagcatttgttggatgcttgatgccaatgatgcttggagtttgctttctttgcccttcaatggattgcctttggcataaatatcactactgtcctaaatgtcaagaaaaggttgctgattntgagaaatcagatccctgtgttgtgatggatccaccacactggactcaggagagctttgcattgtctggataggatgataattctgttacttgccattggttttgcattttc

SEQ ID NO: 36284 - DNA, 390 bp, Glycine max
  Clone ID: LIB3138-101-Q1-N1-C9
cataaataaatccttgtgttgtggtcatagtcctcaattcaacttttcagctatatctcttgaaagaagaagaagaagaagaagaagaaggagaaatgggatccaacggaacatcttgggctgaccagtgggataacgggcctgacccagtgactgtctccaacgaatcgaagaaaaagaataacgccctcggcaagaccaaggcagtggcttccactggcgtcaagaagttgaaggagggtacctccgttggcttccaatggatcaagaccaagtaccacaaaactacccagaaacattaaactaacctatctttggttccttcttgtacatatttataatatctatagtctccccttttgattaatatgtgggtttttcaattcattt

SEQ ID NO: 36285 - DNA, 304 bp, Glycine max
  Clone ID: LIB3138-101-Q1-N1-D1
aaaaaaaaaaaaaaaaaaaattaaaaaaaaaaaaaaaaaaaaaaaaagcgaaaaaataaaaaaaaaaaaaaaaaaaaaaaaaaaaaaaaaaaaaaaaaaaaaaaaaaaaaaaaaaaaaaaaaaaaaaaaaaaaaaaaaaaaaaaaaaaaaaaggggcccccccccccttttaaaccttctcccccccgaaattaatttcggacccgtcccttgagggctcccaattttttttttttgaaagctttttaaaacctggccaaaaaaaaggaaaaacttttttctttttaaaaatttttttcctttc

SEQ ID NO: 36286 - DNA, 422 bp, Glycine max
  Clone ID: LIB3138-101-Q1-N1-D10
ggatgatgaatgcttctgattcaaatgataatattcgtttactgttgagcattgatttgttgggtttacaaggagcaggtaaagcttttccaaacaaaattgtttttgatgataagcttgtgttggctaacacacaagaattctttgatggaaattttccagtggattcttggttaccaatttttgtgaattgtctttatcctgtaagtcaattaccttcagaagctgtcgttgtaaatgttacatgtggtagtggacgtggtggtttacccaccactgcttggattagttctgcaattaacaatcgctcctcaaatatcaacaaaaggattcgcacagcacttgtgaaaggtaagaaaattgtttttcttactagagttgattcttttccagtagctttactggctgttctttttggtgtt

SEQ ID NO: 36287 - DNA, 430 bp, Glycine max
  Clone ID: LIB3138-101-Q1-N1-D11
ctcgagcctattctgctcgagattttcacaagaggagtttgttacagcttggtcaactcaggtgcgtcctgcaacaactctgttggctgatgggtgtccatatttgtatgcaatggtgcatgatagttcagtgtctacaataccaggtgattttgtcattggtgtcaagttgacaaccataaacaatatgtgtgcatatgggctcaatcctggtatttcaggttctcgtcctttgggcaccattcctcagtccatttcacagcaaactgtttggaatcaaatggcaacagtgagaacaccattgaattttgattctagcaagcagagcttttgtcagttttctattgaccttctcggtggaggaatcttagtggacaaaactggagattggatcacacttatacaaaaatcttcaattaataacttgttg

SEQ ID NO: 36288 - DNA, 394 bp, Glycine max
  Clone ID: LIB3138-101-Q1-N1-D12
gaaaaagaaaaaaaagattctaaagaaatataactgggattctttagaataatcaaaaagaatattaaattcaaataaattttagatagaaaaaagacttaaaaaggaggatttgaaatgcgagatctaaaaacatatctttccgtggcaccagtagtaagtactctatggttcggggctttggcgggtctcttgatagagatcaatcgtttttttccagatgcattgatattccctttttttttcattctagttattgacacggaaaggggtgaagaagattatagatccaattaagtattaaatatatgtaattaatatgtaattaatctcctcttctttatttcgtcttttatttcttcttttttttacaattgtaatagaataagttagg

SEQ ID NO: 36289 - DNA, 443 bp, Glycine max
  unsure at all n locations
  Clone ID: LIB3138-101-Q1-N1-D2
gactttatataaagaaattagatgattttgtaggtaaagattgaaaaggttacatatttttgtaggtgacagatgtttttctgaatgggcactcaaacccagagattcagatccttggattgaagatgtctcctttattgcaaaatgtcaaagtgcccgaaccctgtcaaggtcctctgcgttattcaccagtttcagtagatttggtataaattagcattaataatatgaaacatatggcattacttatggtcatttctagttaaagcagacataactttctgctaacatgctgctaactctagaggcaaggaaaccactgtgttgcctggttttaccttctgttttagtgatgccattatgtacagactattttcttttattagagtattcatattcattatgtacagtggatatgtatagaaaatgcaatntcgtaaaaa

SEQ ID NO: 36290 - DNA, 454 bp, Glycine max
  Clone ID: LIB3138-101-Q1-N1-D5
gtcacaacttcattatgtttcgtgtaataatctggaaatgcaggaagcttatcttgtcaatctcgtaaatgtgttacgagaattgtatttgcacagtccagaggaagctcgccaattgagaaggaaagctctctctcgtattgaatggctgcaaaaagctgatgtgcctaccatagcacagattgaagagttccattcgatgcagaggatgatgaatgctcctgattcaaatgataatattgatttactgttgagcattgatttgttgggtttacaaggagcaggtaaagcttttccaaacaaaattgtttttgatgataagcttgtgttggctaacacacaagaattctttgatggaaattttccagtggattcttggttaccaatttttgtgaattggctttatcctgtaagtcaattaccttcagaagctgtcgttgtaaatgttacatgt

SEQ ID NO: 36291 - DNA, 414 bp, Glycine max
  Clone ID: LIB3138-101-Q1-N1-D6
gaaacgcctttcctgagaagtcggaaggaagagagtgagagggagagagatggagtttggatttttgggtttggggataatgggtaaggctatggcaatcaatctgctacgccatggcttcaaggtcactatttggaacagaaccctctccaagtgtgatgaactcgtgcaacatggtgcttcagttggagaaaccccagcaactgtagtcaagaaatgcaagtataccattgcaatgttatctgatccttcggctgctttatcggttgtgtttgataaagatggtgttcttgagcatattaatggaaaatgttatattgacatgtcaacagttgatgctgatacatcttccaaaatatctgagactatcaaagcaaaaggtggttacttcctttgaactccttgtttcggtag

SEQ ID NO: 36292 - DNA, 424 bp, Glycine max
  Clone ID: LIB3138-101-Q1-N1-D7
tgaaactatggtattaggatgagaatgactggccagtgattgatcccttgccatcttatggtagagggagggacacacaaggtggaaggtttagcagcctgatttttggaaccaacctcactgatgtaatcataactggggacaatggcacaatagatggacaaggtgatctgtggtggcaaaaattccacaagggtgagctcaagtacacccgtccttacctggttgaaattatgtactcagataatgttcagatatccaatctcactttggttaattctccatcatggaatgtccatcctatatacagcagcaacgttgttgttcaaggaatcacaattcttgctcctgtgacatccccaaatacagatggaatcaacccggattcttgcacagacacacgaattgaggacttgtacattgt

SEQ ID NO: 36293 - DNA, 462 bp, Glycine max
  Clone ID: LIB3138-101-Q1-N1-D8
aaaccttcaaatatgatataattggtgctggttcacattcttgagaagattttcctgaaaaggaagatcaagaaaaacccaaaaagattgatgccagattgagacaaagaatagatcctcaatacaatgaggttcaggctcagatggaaacaaatttgtttaaattgtctcttgatgatgttgaaactcctaaaggttccatgttggatctgaaaatttctcaatctaaaattgcacttcccaagaacacagttggaggaaccattctgcgtagtgatctattggcaaattttttgacagaaggcaattttagagcaagtgttgatttgcagcgcactcatcgtattagaggaatgattaaaatggtggccacagttggtattcctgagaatacaggtatatcattggcctgtgctatgaatagttcttttagggggcgcgccagttctgatatttacacca

SEQ ID NO: 36294 - DNA, 130 bp, Glycine max
  Clone ID: LIB3138-101-Q1-N1-D9
aaaaaaaaataaaaatataaaaaaaaaaaaaaaaacccgcccgcaaaaaaaaaaaaaaaaaaaaaacacaaaaaaaaaaaaaaaaaaaaaaaacaaaaaaaaaaaaaaaaaaaaaaacaacactaacaac

SEQ ID NO: 36295 - DNA, 480 bp, Glycine max
  unsure at all n locations
  Clone ID: LIB3138-101-Q1-N1-E10
aaaagattctaaagaaatataactaatattctttagagtaatcaaaaagaatattaaattcaaataaattttagatagaaaaaagacttaaaaaggaggatttgaaatgcgagatctaaaaacatatctttccgtggcaccagtagtaagtactctatggttcggggctttggcgggtctcttgatagagatcaatcgtttttttccagatgcattgatattcccttttttttcattctagttattgacacggaaaggggtgaagaagattatagatccaattaagtattaaatatatgtaattaatatgtaattaatctcctcttctttatttcgtcttttatttcttcttttttttacaattgtaatagaataagttaggaaagagaaagaataagggttaatttggcctaattgaaattcggagtgaaactcnggatctcgtccaggcttccatggaaatgaataataattcaattc

SEQ ID NO: 36296 - DNA, 476 bp, Glycine max
  unsure at all n locations
  Clone ID: LIB3138-101-Q1-N1-E11
gttgggtgttggaaaggcagagcaagaggagtaacatgatcgaacatggcggttaggcaaagagccgtgtctgcacttccaactcttctacgcactctccgcaaagaacctttgaagcctcgcaaccacgcacacgtcaatgccttgccctctcttcgacgcgctttctctttgtacgatcagatcaacctcatcgatcaagtccccgaagaccagctccgatttcaagggtataatgatacggggtttactgtaaatggggttgaatacgaaggaagcttgctttgtgttggaaatttgctcatgtcttggaaacctaagaagttttcagagatcactgccgatagcttgtcaatcttccaaatagttcgccctattccagagattttgattattggctgtggaaagaacattcaacatgtagatcctgaactttagacggttattcngtctactggcattaagctagaaagctg

SEQ ID NO: 36297 - DNA, 431 bp, Glycine max
  Clone ID: LIB3138-101-Q1-N1-E12
cttgaaacgtgttctctctctgagaaaatctcagaggccaccgttgtcgtcaccgtcaccgtctccgccatggaaggaggtggaggaacgctctcggagattcaccaatccgcgaagaagctcctgctgaggtctcgcgacggcctcgaacgtctcgaacgcctcgagtactctgccgccgccggtgccgccttctcgggcgccgactccgagctgtctttcggccgtgaagaaggatatcacacagatccaaaccctctgcgtcgagatggaccgactctggcgatccatcgccgcaaaacctcagcgcgatctctggaaaagaaaagtggaacaaatagctgaagaggctgaatcactgagagcaagtttggataaatataacttacgggatcagaaacgaatgagagaagctaatgagagaacagaac

SEQ ID NO: 36298 - DNA, 163 bp, Glycine max
  Clone ID: LIB3138-101-Q1-N1-E2
cttccatgcttgtcatgaaggaaaaacagggatgagttgtgtgaaggatggtgatcatccttcgaattcgatggtattataggttgaagtcggtcattgatagatgttatgtaaaggcaacaatgaaatttgaacaaactgagatcattgtggtgatcaattg

SEQ ID NO: 36299 - DNA, 460 bp, Glycine max
  Clone ID: LIB3138-101-Q1-N1-E3
caaatggcaacagtgagaacaccattgaattttgattctagcgggcagagcttttgtcagttttctattgaccttctcggtggaggaatcttagtggacaaaactggagattggatcacacttatacaaaattctccaattagtaacttgttgagagttgctgcttggaagaaaggctgtttaatggtcaagattgtgatgtctgggaatgcagcagtcaaaaggagtgattgggcctcattggtacaagtgtttttaacaaacagcaacagtacagagcattttgatgcatgtaagtggacaaaatcagaaccacattcctgggaattgatcttcccaatagaggtatgtggtcctaataatggttttgaaatgtggagttctgagtgggcaaatcaaacttcatggcatttgagtttccttattgacaatcccaaacagtctacagtttttgatattc

SEQ ID NO: 36300 - DNA, 346 bp, Glycine max
  Clone ID: LIB3138-101-Q1-N1-E6
ctcgaacagtaccagagcaaagagtcaaaatcacactatcccaatatgcaaaacgacaaaggccaaggcgtctcgcacgccgcagagtctcggttgcctcagaaggtgcaagaaaaggctccctcaagcctcgaacaccagatccccgacgccgctcacgacaccaacagcaacaaagacactggcaaggtgtcgcatgcgactggcgactcaaaggtgccgcagacgctgcaggaggggctacctgcgaaggtagaaaagattgtcccaaacgccattcacgacacccgtggggctgatatttagatgagcgttataagaatgattggagtcgttgcatttgttg

SEQ ID NO: 36301 - DNA, 387 bp, Glycine max
  Clone ID: LIB3138-101-Q1-N1-E7
gaaattcaccacaagctccgctatactgatgaggctcttggagctgctgcacagctgtcctaccagtatatcagtgatcgatttttgccagacaaagctatcgatttgattgatgaagctggttcacgagtccggcttcaacatgcacagttacctgaagaagcaagagaacttgacaaggaggtgaggcagattattaaggagaaagaagaagctgttcgcaaccaaaaactttgaaaaggctggagagctacgtgatagagagatggatcttaaggcacagatctcaacacttgtagagaaaggcaaggagatgagcaaggcagagactgaggcaggggatgaaggtcctattgtgactgaagctgacatacagcatattgtctc

SEQ ID NO: 36302 - DNA, 418 bp, Glycine max
  Clone ID: LIB3138-101-Q1-N1-E8
atcaaatggcaacagtgagaacaccattgaattttgattctagcaagcagagcttttgtcagttttctattgaccttctcggtggaggaatcttagtggacaaaactggagattggatcacacttatacaaaattctccaattagtaacttgttgagagttgctgcttggaagaaaggctgtttaatggtcaagattgtgatgtctgggaatgcagcagtcaaaaggagtgattgggcctcattggtacaagtgtttttaacaaacagcaacagtacagagcattttgatgcatgtaagtggacaaaatcagaaccacattcctgggaattgatcttcccaatagaggtatgtggtcctaataatggttttgaaatgtggagttctgagtgggcaaatcaaacttcatggcaattgag

SEQ ID NO: 36303 - DNA, 381 bp, Glycine max
  Clone ID: LIB3138-101-Q1-N1-F1
gccgggttcatcataataaccttcaatgaaaagaaatggctgaggcaagcattggcagcaaaagcagcagatggtctttacagggaatgacagctctcgtcaccggtggatccaaaggaatcggatatgctatcgtggaggagttggcacagcttggagccactgtgcacacttgcgctcggaaccgaagctgaaactcaattgaatccttaaatgaatggaacacaaaaggatacagagtaactggttccgtctgtgacgtggcgtctcgtgcagaaagacaagacctcatagctagagtctccaatgagtttaatggcaaactcaatatccttgtaaacaacgtgggaacaaacgtaccgaaacatacccttgatgtta

SEQ ID NO: 36304 - DNA, 444 bp, Glycine max
  Clone ID: LIB3138-101-Q1-N1-F11
cagattgaagagttccattcgatgcagaggatgatgaatgctcctgattcaaatgataatattgatttactgttgagcattgatttgttgggtttacaaggagcaggtaaagcttttccaaacaaaattgtttttgatgataagcttgtgttggctaacacacaagaattctttgatggaaattttccagtggattcttggttaccaatttttgtgaattgtctttatcctgtaagtcaattaccttcagaagctgtcgttgtaaatgttacatgtggtagtggacgtggtggtttacccaccactgcttggattagttctgcagttaacaatcgctcctcaaatatcaacaaaagggatccgacaacacttgggaaaggtaagaaaattgttttcttactagagttgatccttttccaagagctttacttggctgtttttttt

SEQ ID NO: 36305 - DNA, 447 bp, Glycine max
  unsure at all n locations
  Clone ID: LIB3138-101-Q1-N1-F12
atcaattttgaggcttttccccacaagctggtgcaggttggagagattcaggaaaaagttgtattgaaattttcacaagaggaatttcttacagcttggtcaactcaggtgcgtcctgcaacaactctgttggctgatgggtgtccatatttgtatgcaatggtgcatgatagttcagtgtctacaataccaggtgattttgtcattggtgtcaagttgacaaccataaacaatatgtgtgcatatgggctcaatcctggtatttcaggttctcgtcttttgggcaccattcctcagtccatttcacagcaaactgtttggaatcaaatggcaacagtgagaacaccattgaattttgattctagcaagcagagcttttgtcagttntctattgaccttctcggtggaagaatcttagtggacaaaactggagattggatcacactt

SEQ ID NO: 36306 - DNA, 277 bp, Glycine max
  Clone ID: LIB3138-101-Q1-N1-F4
ctggagacacaaatggagtagatgaggcactgacgttgatggaagaatttgggatcaaaccagatgtagtaacctttagcaccatcatgaatgcatggagttcagcagggcttatggaaaattgtgaggagatattcaacgacatggtgaaggccggtatagaacctgacatccacgcatatagcatccttgcaaaaggctatgtgcgtgccggacagccacgaaaagccgaggctcttctgacttctatgagcaaatatggcgtacaaccaaacgt

SEQ ID NO: 36307 - DNA, 301 bp, Glycine max
  Clone ID: LIB3138-101-Q1-N1-F5
aaaaaaaaaaaaatataaaataaaaaaaaaaaaaaaaaaaaagagaaaaaaaaaaaaaaaaaaaaaaaaaaaaaaaaaaaaaaaaaaaaaaaaaaaaaaaaaaaaaaaaaaaaaaaaataaaaaaggggcgccccccattttgaacctctttctccccgcaattatatttcgcccccgtcctttcatggtttcaaacttttcttattataagtccgttttaaacatgggcgaaaatccggcaatattttttcttttgtgaaaatatttatcttttaaaaatacataaaaatttacactccg

SEQ ID NO: 36308 - DNA, 454 bp, Glycine max
  unsure at all n locations
  Clone ID: LIB3138-101-Q1-N1-F7
ttcacgttctcgtcttttgggcaccattcctcaggcggtttgacagcaaactgtttggaatcaaatggcaacagtgagaacaccattgaattttgattctagcaagcagagcttttgtcagttttctattgaccttctcggtggaggaatcttagtggacaaaactggagattggatcacacttatacaaaattctccaattagtaacttattgagagttgctgcttggaagaaaggctgtttaatggtcaagattgtgatgtctgggaatgcagcagtcaaaaggagtgattgggcctcattggtacaagtgtttttaacaaacagcaacagtacagagcattttgatgcatgtaagtggacaaaatcagaaccacattcctgggaatggatcttcccaatagaggtatgtggtcctaataatggttntgaaatgtggagttctgagtgggca

SEQ ID NO: 36309 - DNA, 422 bp, Glycine max
  Clone ID: LIB3138-101-Q1-N1-F8
ctacgagttgccattattcatggaatggctagaatgggggcgctcatggcttccacttacaaggcatatctgggtgttggtcttggccctttagaatttttgactaagtttcgtataccacatcctggaagagttggaggaaggttttttgttgacatcatgatgccttctatgttgagctgggtcttaggtggcaatagcgacaaacttgagggcagaccactaaattggcaggctcacagacaaagcaaatgatcagttacgtagatggtttgaagatgatgaagcactcgagcgtgctattaatggagaatggattttattaccgcatggagatggaacaggtctttcaaagcctatatctttaagtcgaaatgagatgaaacccttcataatcgggagtgcaccaatgcaagataatt

SEQ ID NO: 36310 - DNA, 477 bp, Glycine max
  unsure at all n locations
  Clone ID: LIB3138-101-Q1-N1-F9
caaaactctcctcagttatccctccaacagaagataaaacatggttctagttgcaagtcatggcgaggaggaaaagggggcagaaggcattgctgctgttgattttcgaggtcaccctgtggacaagacaaaaactggaggatggctagcagcagggctcatcttaggtactgaactgggcaaaaagaatatgtgtaatgggcataagcatgaacttagtgacctacttggttggagttttgaatctcccttcagctgattctgccaccatagttaccaatgtcatgggaactctcaacctgcttggccttcttggtggcttcatagctgatgccaaacttggcagatacgtaactgttgccatatctgcaatcatagctgctttgggggtgtggttgttaactgtggctacaaccattcctagcatgaggcctnctgtgtgcagcagtgtcagaaaacaacaccatgaatgcattc

SEQ ID NO: 36311 - DNA, 345 bp, Glycine max
  Clone ID: LIB3138-101-Q1-N1-G10
tttttaatgagatgctcattatatatagctatgaagaattactgcgccaggctaaagctccaagtatgtttttacaatccttcaaaaattttgtttctttgtgtgtgtatggtgatgataacttaattagtgttcatgaatatgtcaagccttactttagtggttctaaattgaaaagctttctagctagtcataacatcaccattactgatggtattgacaaaactagtgcaactttgcaatttagaaagctagcagattgtgattttctcaagagaaactttaatcagatgtctaatgatttgtgggtggctcctgaggacactgcgagtttatgggcacaac

SEQ ID NO: 36312 - DNA, 481 bp, Glycine max
  unsure at all n locations
  Clone ID: LIB3138-101-Q1-N1-G11
caccattcctcagtccatttcacagcaaactgtttggaatcaaatggcaacagtgagaacaccattgaattttgattctagcaagcagagcttttgtcagttttctattgaccttctcggtggaggaatcttagtggacaaaactggagattggatcacacttatacaaaattctccaattagtaacttgttgagagttgctgcttggaagaaaggctgtttaatggtcaagattgtgatgtctgggaatgcagcagtcaaaaggagtgattgggcctcattggtacaagtgtttttaacaaacagcaacagtacagagcattttgatgcatgtaagtggacaaaatcagaaccacattcctgggaattgatcttcccaatagaggtatgtggttcctaataatggttttgaaatgtggagttctgagtgggcaaatcaaacttcatggcattngagtttccttattgacaatcccaaaca

SEQ ID NO: 36313 - DNA, 463 bp, Glycine max
  unsure at all n locations
  Clone ID: LIB3138-101-Q1-N1-G12
gcggaagggaaaagtagttcatgttggtattcttgggtctttgagacgggtgaaggagattgttaaagaggtaaatgccggtctcgagtgtggacttgggttagaagactttgatgattgggaagagggtgacattcttgaagtcttcaacacagttcagaagaggaggacccttgaagaggcctcagcatcaatggcagctgctgtggagggagtaggagttgcattgtagaatgaaccatgatgtattccactatgagattggttcctatcttgtgtttgagcacagtgcanatgcattccaggttccagttgaaaaaacaatgtattctctccaattgatgttatgaaagtggaaaggtaacaattccctcatcattatattgatattgagggtaccactgctgaagatctgagttcaaaatgatttgttccttgttggctgtaaaagtgtatataacaa

SEQ ID NO: 36314 - DNA, 365 bp, Glycine max
  Clone ID: LIB3138-101-Q1-N1-G4
accatgctgatttgccaccgttgaagagcttcgtgtccgcgagaaggcaccttttgaagacgcagaagcgtgtgaagcttgaagctctcagccctcggagactgaaggttccccttgagacacagaaggaggactctgatgttgagccgaatgtctttgatgcaaaacctgcttgtgatgaaattggcattgatattttcattgaaatctatgccaatgaaaaggatgcaaaaccaacagcagcagagagtttttctccactcttgtggtttcaaagattcttcgctatcttggattcccatgagtgctatggaaaatcaaaatttggtggcatccccttctgatgcccgtttaaaaaactggta

SEQ ID NO: 36315 - DNA, 405 bp, Glycine max
  Clone ID: LIB3138-101-Q1-N1-G7
ctcctgaggacaaggcgagtttatggtcacaacttcattatgtttcgtgtaataatctggaaatgcaagaagcttatcttgtcaatctcgtaaatgtgttacgagaattgtatttgcacagtccagaggaagctcgccaattgagaaggaaagctctctctcgtattgaatggctgcaaaaagctgatgtgcctaccatagcacagattgaagagttccattcgatgcagaggatgatgaatgctcttgattcaaatgataatattgatttactgttgagcattgatttgttgggtttacaaggagcaggtaaagcttttccaaacaaaattgtttttgatgataagcttgtgttggctaacacacaagaattctttgatggaaaatttcagtggattcttggta

SEQ ID NO: 36316 - DNA, 419 bp, Glycine max
  Clone ID: LIB3138-101-Q1-N1-G8
atttccataaccttagtcatcttctgctttcatcttgctccgtaacggtatcgagggaaaaatatggcggaagaacacagatgccaggcaccgcgcttctgcgccaacaattgcggtttctttggcagccctgccacgcagaatatgtgctccaagtgctaccgcgatttccagctcaaggagcagcaatctttcaacgccaagatggttctcaatcagtcgctggttccttcaccgacaccggcggtgatttctcagacgtcgtcttcttattcggccgcggtagatccgtcatcggccgtggttgatgacgcgccacgcgaggcggaggaggttaaggcgccgcagcagaaccggtgtatgacgtgcaagcggcgcgtggagctcacagggttcaagtgtcggtgcgggatgatgct

SEQ ID NO: 36317 - DNA, 453 bp, Glycine max
  Clone ID: LIB3138-101-Q1-N1-G9
aaatatggcatactctcaacttcaaaaggtggaaactagcctgcagatcaaggcttctgctgaacagttctatgatgttttttgcaacaagccacacactattgccaacatttcaccagaaaatattcagtcagttgaagttcataaaggtgaatggggcaaagagggatcaatcgtctcctggaactatttacatgagggaacagtttgtgtagccaagcaagtgcttgaaggcatagacaaggaaaataacaaaatgacaatgaaggtcatagagggtgacgtgctgggactctacaagagcttcaagtctaatttgcaagttactccaaaaggaaagggcagcgtagtgctttgggcaatggaatacgagaaacaagaggaccacattcctgacgctcataccttgttgcaactgggctgtgtgttagcaaaaaaatgatgcttacttac

SEQ ID NO: 36318 - DNA, 292 bp, Glycine max
  unsure at all n locations
  Clone ID: LIB3138-101-Q1-N1-H12
ttaaaaaagctgcgaatggtcaanattgtgatgtctggnaatgcancantcaaaaggagtgattgggcctcattggtacaagtgtttttaacaaacagcaacagtacagagcattttgatgcatgtaagtggacaaaatcagaaccacattcctgggaattgatcttcccaatagaggtatgtggtcctaataatggttttgaaatgtggagttctgagtgggcaaatcaaacttcatggcatttgagtttccttattgacaatcccaaacagtctacaatttttgatattc

SEQ ID NO: 36319 - DNA, 270 bp, Glycine max
  unsure at all n locations
  Clone ID: LIB3138-101-Q1-N1-H8
caagattttgaaattgctggtaatactcttatgccagctttttctgttccacaggctactgccagatcttctgaaaatgcggaatcctctgcatgatctggaatttgtgttttctttcgcttgttcgtttgtttaattcaataaaggaaattaggcatgaccctcttgttgagtatgctctgcctatttgaaaatttccacacctcttttaattgtcgaaatgatgtgtgaagtgtgtgttntttttaaaaaaaaaatactcaataatat

SEQ ID NO: 36320 - DNA, 370 bp, Glycine max
  unsure at all n locations
  Clone ID: LIB3138-101-Q1-N1-H9
cgttaatcagccccaagagaaagatttgttggagggaaattgttcctttgatattaaatctcgctctagattggaaaaagtttcctctacaaaagcacaatttgttagtggaaaaaccttcaaatatgatataattggtgctggttcacattcttcagaagattttcctgaaaaggaagatcaagaaaaacccaaaaagattgatgccagattgagacaaagaatagatcctcaatacaatgaggttcaggctcagatggaaacaaatttgtttaaattgtctcttgatgatgttgaaactcctaaaggttccatgttggatctgaaaatttctcaatctaaaattgcacttnccaagaacacagttgga

SEQ ID NO: 36321 - DNA, 415 bp, Glycine max
  unsure at all n locations
  Clone ID: LIB3138-102-Q1-N1-A11
caaaaagattcgcacagcacttgggaaaggtaagaaaattgttgttcttactagagttgatccttttccagtagctttactggctgttctttttggcgttaagaatgaaattctgagttctaacgccactaatcctatgctgacgcgacttcttgagaactgtaagagtctcaaatatctggttgatgagtgtccttttgcatttgtgaactagtatgtagcattttattcacttaaataaagcgcattactatgtgcaatgagtgtgtttaaatctaccccactggctccatctatcaacaaccgattggatcgcctggntattatccagcttctctatcatatggagagttacagccaacaacataactcggggattcacctctaatcaatcaagatgggttacaaggacatg

SEQ ID NO: 36322 - DNA, 456 bp, Glycine max
  Clone ID: LIB3138-102-Q1-N1-A4
atcatacatatgttagcttcaccttttactagaacttcatgaggggataattgaatcaattacatactggatccaagctaaaggaatgttatggtaaaacttcgtttgaaacgatgtggtaaaaagcaacgtgcgacttgaaagacatgattagattagctgtggattcttacatccgccattttttctagtatatagaaatgaacatgctcttgactcgacatcgtttgttctgttccactagaacttattgttttggggacgggaaagcagttgatgatgtaagttgatgatgtaaatagtacatgatggagctcgagtttattcatttatcaggggcaagtatctaaagttagtaaaaattaataagttagaaaaacttcgtaagtttatttttgatagaaaaataaaaaggatccaatttgagcaaggttcaaacaaatggttggaattagt

SEQ ID NO: 36323 - DNA, 477 bp, Glycine max
  Clone ID: LIB3138-102-Q1-N1-A5
cttggagaccttgatctccatcaccaacgacgaagatctcgctggcataatcgaagaatacgaccgtgcctcgttgaaattggcgcatccgttgaagatcaaagccgttctatcgccgccgaaatcgtcgaagaagactccgtctgctccgtcgtcggcgtcgtccagcgccagtcactctccgtccagatcgccgcacacctccacagattcgttgccgtacgcggcgtaccaccgcatcggccgccacaaccggccgcctacggcgaaagcttcttgctacacgcagttcgatggaagctctaggtttctgtaccgtggacctcactgcaattattactgccactgaggcgaacgaacgaacgaacgaaccgatttattcacagtaaatacagttgcaagagaatcgctattaccaagtttgattccatacatacgatgatgatgacgacgaaaaatatcaaaggaccaaaatag

SEQ ID NO: 36324 - DNA, 516 bp, Glycine max
  Clone ID: LIB3138-102-Q1-N1-A6
aagcttacgcgatgccgcctcctagcctcggatttcggttcgggcaaaaagctaatcttgtcaatctcgtaaatgtgttacgagaattggatttgcacagtccagaggaagctcgccaattgagaaggaaagctctctctcgtattgaatggctgcaaaaagctgatgtgcctaccatagcacagattgaagagttccattcgatgcagaggatgatgaatgctcctgattcaaatgataatattgatttactgttgagcattgatttgttgggtttacaaggagcaggtaaagcttttccaaacaaaattgtttttgatgataagcttgtgttggctaacacacaagaattctttgatggaaattttccagtggattcttggttaccaatttttgtgaattgtctttatcctgtaagtcaattaccttcagaagctgtcgttgtaaatgttacatgtggtagtgggacacgtgtgttacccaccactgcttggattagttctgcagttaacaatc

SEQ ID NO: 36325 - DNA, 418 bp, Glycine max
  Clone ID: LIB3138-102-Q1-N1-A7
ctcgagccgattcggctcgagctcgtcactccttgctctgtagcccttctcctcttcgccgccgtggccaccgccgcgatggcggtggccgcgtccgacgccgacgacatcctgatccgtcaggtggtgccagatgttggcgaagccgaagaggaggacaacctgctgaacgccgagcaccacttcgcgagcttcaaggccaagttcgccaagacctacgccaccaaggaggagcacgatcatcgcttcggcgtcttcaagtccaacctccgcagagccaggctgcacgccaagctcgacccctccgccgtccacggcgtcaccaaattctccgatctaactccggccgagttccgccgccagttcctcggcctcaagccgctccgctttccggcgcacgcccagaaggcgcccattc

SEQ ID NO: 36326 - DNA, 429 bp, Glycine max
  Clone ID: LIB3138-102-Q1-N1-A8
cttcgccaaccttaccttggccgtggagaagaagcggagggtgatatatgagattgcggaatcttcggggttccagccccacacgagaaacttcctctacatcctcgtggacgcgcagaggatcgacctcatcaacgagatcgcaaaagagttcgaattggtttacaattccttgaccgacacggagctggcggtggtgacgtcggtggtgaagctggagtcgcagcacctggcgcagatcgcgaagcaggttcagaagctcactgggacgaagaacgtgaggattaagacgctacttgaccctagtttggtcgcgggtttcactgtcaggtattccggctccaaattgattgacatgagtgtgagaaagcagcttgaggatattgctgctcagcttgagttgggtgatatctctctcgccgtatgagc

SEQ ID NO: 36327 - DNA, 464 bp, Glycine max
  Clone ID: LIB3138-102-Q1-N1-A9
atttgtaagaaagatgtttggagagttgaatgtggaatccgtgctggatttccgctcacagttatttgcaatagcatttttaatgagatgctcattagatatagctatgaaaaattactgcgccaggctaaagctccaagtatgtttttacaatccttcaaaaattttgtttctttgtgtgtgtatggtgatgataacttaattagtgttcatgaatatgtcaagccttactttagtggttctaaattgaaaagctttctagctagtcataacatcaccattactgatggtattgacaaaactagtgcaactttgcaatttagaaagttagcagattgtgattttctcaagagaaactttaagcagatgtctaatggtttgtgggtggctcctgaggacaaggcgagtttatggtcacaacttcattatgtttcgtgtaataatctggaaatgcaagaagctta

SEQ ID NO: 36328 - DNA, 235 bp, Glycine max
  Clone ID: LIB3138-102-Q1-N1-B1
attcaggaaaaagttgtattgaaattttcacaagaggaatttcttacagcttggtcaactcaggtgcgtcctgcaacaactctgttggctgatgggtgtccatatttgtatgcaatggtgcatgatagttcagtgtctacaataccaggtgattttgtcattggtgtcaagttgacaaccataaacaatatgtgtgcatatgggctcaatcctggtatttcaggttctcgtcttt

SEQ ID NO: 36329 - DNA, 477 bp, Glycine max
  Clone ID: LIB3138-102-Q1-N1-B10
atcaaatggcaacagtgagaacaccattgaattttgattctagcaagcagagcttttgtcagttttctattgaccttctcggtggaggaatcttagtggacaaaactggagattggatcacacttatacaaaattctccaattagtaacttgttgagagttgctgcttggaagaaaggctgtttaatggtcaagattgtgatgtctgggaatgcagcagtcaaaaggagtgattgggcctcattggtacaagtgtttttaacaaacagcaacagtacagagcattttgatgcatgtaagtggacaaaatcagaaccacattcctgggaattgatcttcccaatagaggtatgtggtcctaataatggttttgaaatgtggagttctgagtgggcaaatcaaacttcatggcatttgagtttccttattgacaatcccaaacagtctacagtttttgatattctcttgggaatctctc

SEQ ID NO: 36330 - DNA, 314 bp, Glycine max
  Clone ID: LIB3138-102-Q1-N1-B11
ggtggtttgttccttagccttgggaatctgtcctgccaatatgcatttgcttttgttgggctatcggttactgaagtgatcacggcaagcataactgttgtcataggcacaaccttgaattactttttggatgacaaaatcaacaaagctgagatccttttcccaggagttggttgctttctgattgcagtttttctaggttctgctgttcattcatctaatgctgctgataataaagcaaagctcaacaatttcaccggtgattataaaaatggagacacctctttgaaagatggagatatagttaaatcaaa

SEQ ID NO: 36331 - DNA, 382 bp, Glycine max
  Clone ID: LIB3138-102-Q1-N1-B12
cttttgggcaccattcctcagtccatttcacagcaaactgtttggaatcaaatggcaacagtgagaacaccattgaattttgattctagcaagcagagcttttgtcagttttctattgaccttctcggtggaggaatcttagtggacaaaactggagattggatcacacttatacaaaattctccaattagtaacttgttgagagttgctgcttggaagaaaggctgtttaatggtcaagattgtgatgtctgggaatgcagcagtcaaaaggagtgattgggcctcattggtacaagtgtttttaacaaacagcaacagtacagagcattttgatgcatgtaagtggacaaaatcagaaccacattccttggaattgatct

SEQ ID NO: 36332 - DNA, 446 bp, Glycine max
  Clone ID: LIB3138-102-Q1-N1-B3
tggtaccatcgctgccgcaccatggggctcagcactcatattggcgatctcttacacttacatagccatgatgggttctaaaggactcaccgatgcatcaaagatagccattttgaatgcaaactacatggcaaaacgattggagaattattatcccgttcttttccgtggagtcaatggaacagttgctcatgaattcatcattgacctgagaggctttaagaatactgctggaattgagcctgaagatgttgcaaagcgcctcatggactacggttttcatgcaccaacaatgtcatggcctgtgcctggcacactcatgattgagccaactgagagtgaaagcaaggctgaactagacaggttctgtgatgctcttatttccattagacaagaaattgctgagattgagaaaggaaatgctgacattaacaacaatgtactta

SEQ ID NO: 36333 - DNA, 479 bp, Glycine max
  Clone ID: LIB3138-102-Q1-N1-B4
cgggtgttcagcatttagtgacaatgctctggcttaccttgccagcttctgcagaaaactgaaagttctaaatctttgtggatgtgttagagctgcatccgatactgcattacaggctattggacaatactgcaatcagctacaatctttgaaccttggatggtgtgataatgttggcgatgttggagtgactactttagcatatgggtgtcctgatcttaggatagttgacttgtgtggctgtgtccgtataacagatgacagtgtgattgctttggcgactagatgcccccatctgaggtccctaggactgtactactgcaagaacatcacagatagagcaatgtattccttggcacacagcaaggtgaacaacaggatgtggggaactgtgaaaggaggaggaaatgatgaagatggtttaaggactttgaacattagccaatgcactgcactcaccccatctgctggtcaagctg

SEQ ID NO: 36334 - DNA, 435 bp, Glycine max
  Clone ID: LIB3138-102-Q1-N1-B5
gatgcatgtaagtggacaaaatcagaaccacattcctgggaattgatcttcccaatagaggtatgtggtcctaataatggttttgaaatgtggagttctgagtgggcaaatcaaacttcatggcatttgagtttccttattgacaatcccaaacagtctacagtttttgatattctcttgggaatctctcaagattttgaaattgctggtaatactcttatgccagctttttctgttccacaggctactgccagatcttctgaaaatgcggaatcctctgcatgatctggaatttgtgttttctttcgcttgttcgtttgtttaattcaataaaggaaattaggcatgaccctcttgttgagtatgctctgcctatttgaaaatttccacacctcttttaattgtcgtaatgatgtgtgaagtgtgtgttatttt

SEQ ID NO: 36335 - DNA, 406 bp, Glycine max
  unsure at all n locations
  Clone ID: LIB3138-102-Q1-N1-B6
aaaganctatgacgnctgccgcgcgcctccataagctcagtatgcgtctcgagctgttggccatcattgattatgacaaaccaatcaagacggatggggacagaactgttgcgaagggaacaacgttcacacatgttctggctgcctccttcgccggtttagttgccgtcgacgtcgtctgaagctaccggcgggcaccctacacgggggtgggagagcagaataaggttatttccgagctacgtaagacggaatctgggcgtctctgggagataggaaagttctcccactatgttgctaagcaaatggagtcggaagatgctgatgaggattcagagctatgcatatcggccgcagagtatttgaagaaatccaaaaggcgcgatgaaagcatgtttgaatatat

SEQ ID NO: 36336 - DNA, 70 bp, Glycine max
  Clone ID: LIB3138-102-Q1-N1-B8
cgtatggggattctatacgcactggtaggtcggggttcgggggtgttgccggagttaaggggaacaacaa

SEQ ID NO: 36337 - DNA, 342 bp, Glycine max
  Clone ID: LIB3138-102-Q1-N1-B9
cgaaagtggattctgtgctcacattaacgtatcatttcgggggtgctaatatcaggtcaattgctgctgctacaatacgaccggatcatcgcgctattttgtgtaaaggggaaaaagtaaccatcaaagtcacagaggcctagtctcgaaaagctacatgacatagatgagaaaaactcaaagacgaatgcagaatattttcagagaagagacacttctcgcggaacacttatagattgcattggaatacatgaagaatgagaaactattttctttcaagaactcgattctctcaatgaaggaaaaaatgctgaccgattacgtcgatattgtataaacata

SEQ ID NO: 36338 - DNA, 439 bp, Glycine max
  unsure at all n locations
  Clone ID: LIB3138-102-Q1-N1-C1
gttagtggaaaaaccttcaaatatgatataattggtgctggggacattcttcagaagattttcctgaaaaggaagatcaagaaaaacccaaaaagattgatgccagattgagacaaagaatagatcctcaatacaatgaggttcaggctcagatggaaacaaatttgtttaaattgtctcttgatgatgttgaaactcctaaaggttccatgttggatctgaaaatttctcaatctaaaattgcacttcccaagaacacagttggaggaaccattctgcgtagtgatctattggcaaattttttgacagagggcaattttagaagcagtgttgatttgcagcgcactcatcgtattagaggaatgattaaaatggtggccacaagtggtattcctgagaatacaggtatatcatnggcctgtgctatgaatagttcttt

SEQ ID NO: 36339 - DNA, 475 bp, Glycine max
  Clone ID: LIB3138-102-Q1-N1-C10
gtttcttacaagcctctactatactgcttcaccttctgctctagaaaattcagtgctgaaacatggcttcggctactctctctgtagccaaaccagcccttcaggcaaatgggaaaggcttctctgaattctctggcctccgaagctcatcaggcttccttcccttttctagaaaatcttcagaggatttccattctgtcattgccttccagacctatgcagttggaagcagtggaggatacaagaagggtgtgacagaagcaaaactgaaggttgccataaacgggtttggaaggattggaaggaacttcttgaggtgctggcacggtcgcaaagactcccctcttgatgtcattgccatcaacgacaccggcggcgtgaaacaagccttttaccttcttcaatacgattccatcctcggaaccttcgatgctgatgtcaagcctgttggcagcaatgtcatctccgtggatgg

SEQ ID NO: 36340 - DNA, 427 bp, Glycine max
  Clone ID: LIB3138-102-Q1-N1-C11
gtcatgcttgtgttcaacgaagacagccacaggcgcagcatgttattgatggcttcctcactcaccaaccaccaaaccacaccgtcgcacccattccatcgctgattcctccaatggcttccactaccaccactttctctctttctctccgcaccaaccaacaaactccattccccaaaccctctttcttctccaataacaaccatctgcatttcaactctaataattgggcctggacctctgtttccactgctcgcaagtcaaggatatgcgtcacttcctctcaagttttggattccttagcagcaaaatccgaacccgctcttcccaccaccgtcgaagtcgatttgggtaatcggagctatcccatttacatcggatccgggttactaaaccaacccgactatctccagaggcacgtgcatgg

SEQ ID NO: 36341 - DNA, 400 bp, Glycine max
  Clone ID: LIB3138-102-Q1-N1-C12
gcttggaaaccccatcaacctcagtggtgccacaaggccagctccatctgcctctagccctgcctccttcaagactgtggctcttttctccaaaaagaaggctgcacctccaaaaaaagctgcagctgctgctcctgccaatgatgagcttgccaagtggtatggtcctgacagaaggatcttcttgcctgagggtctcttggaccgatctgagatcccagagtacttgaccggagaagtccccggagactatggttatgacccatttggtcttagcaagaagccagaagatttttccaaatatcaggcatttgaattgattcacgccagatgggcaatgcttggtgctgctggattcatcattcccgaggccttcaacaaatatggagcaaactgcggt

SEQ ID NO: 36342 - DNA, 376 bp, Glycine max
  Clone ID: LIB3138-102-Q1-N1-C2
ctccaggttagaggatgctgatgctttacatatgaaattgggtcaaaatgagaaaacaagtggttttgactggggactaacaagtgatgggatgcaaggcaatcagaatgacactacgcatgttactgtgcacgatgttgatgggaaccttggaacaaatactcaaaatccatcacaagatatgttgattcgagattccatgttgcagccagtatgtggggtgaacgcgcaacgagatgcatttaccaatacagctccatcgaacacatgtgtaagtcaaaataacactgcacgatcttctgatcatcaatcattacttccttatcctcccttcacacaacacaaccaagacgattaccaatcatttcttcacatg

SEQ ID NO: 36343 - DNA, 465 bp, Glycine max
  Clone ID: LIB3138-102-Q1-N1-C3
ggtttacctcaagagtttgactctgtaattcctttgattgaaaggggagtgatgaaattactatcgaagaggttgaaggcctcattgttgctcaggaactgcgattgcagaaatatttcaagaaaacctcatcagactctaccttctctggatctctatcaatttgacacaatctgtttctcagatccctaccacttcttttgatcaaaacagaacatcaattttcctctgatcagaatcaatcttcgccatttacttaatattgtggttctggttggaggctgttttggccatggtaggggccgtggcggttggggttctgttcactgacatgtgcacttcaagtttgggcacactgcttttgttacgtgctggaaactgaaagctgaacttcgagggtcagcacctccagaagaagaagaagaaaactaagggagaaaggaaattttgctattttcattcatg

SEQ ID NO: 36344 - DNA, 320 bp, Glycine max
  Clone ID: LIB3138-102-Q1-N1-C4
atcaagtggtgccttttaccacaccatggaactgtgactctagcaagcgcagctgatgtcagctatgtattgaccttcggggtggaggactcttagaggacagcacgggcgatcggatcacacttatgcagaatactgccattcgtaactggctgagatgctgacgcttggatgaatggctgacctatggtcaagattgtgatgtttggggatgcaactggcaaaaggagtgattgtgtcttataggtgcatgtggcagtaacaaacagcatcagcccagaggcttatgatgcctgtgcgtgtacagaatcagatctaca

SEQ ID NO: 36345 - DNA, 411 bp, Glycine max
  Clone ID: LIB3138-102-Q1-N1-C5
cgacgggtcactctttggagaggttcactctgaggatgcccgaggaagtaatgaagaagattctggaagatagtgaacgcgggaatgtgacgaggatgatgaagcgttccgcgagctacgacgtcgttttgcggagcatggaagaagggggtgaaggtagtagtaatagtggtagtaatagtaaagagaagagtagtactaataataataaccggtgggttttatcgatgacgcctccctttgtttctcgcgccgttcggggattccgagagtgtcaagagagaacggttttccattgtgaagtttgatttgttgttagagtttcattgcttgtacagtgaggaaaaaattgagttgtaaaaagtgtagtaggaaatttgaggatttatgacattactcattattttgttt

SEQ ID NO: 36346 - DNA, 466 bp, Glycine max
  Clone ID: LIB3138-102-Q1-N1-C7
ggggtaggaaccgggggtaccataacgggtgctggcagattgggcaaggagagaaaccccaatgtcaagctgtacggcatagaaccagttgaaagtgcagtcctcagtggaggaccgccaggtgatcacctaatccaagggattggtaatggtctcattccaagtgtactggattttaatctcctagatgaagttattcagatatcaagtgaagaagctatagaaactgctaagcttcttgctttaaaagaaggtttgttgatgggaatttcatcaggagccgcagctgcagctgccataaaattggggaagagaccagaaaatgccggaaaactcatcgttgtggtatttcctagttacggggagcgttatttatcttcaccattgtttgaatccattcggcatgaagctgaacagatgacatttgattaagaacaaaaatactatgtaacagtgctctgcgaat

SEQ ID NO: 36347 - DNA, 210 bp, Glycine max
  unsure at all n locations
  Clone ID: LIB3138-102-Q1-N1-C8
tgttgttgggattgttgtgctactngcttccaatgctgttcagatacagtggggcctcaactggtctcactggaaacccttcactccacttggcaagaacttctaacattgggatggtgattggatatgtagtctacattggctttcaactggggacacccaagccggtatttgaaacccaaaaataaggtgaaggatgggaagaccggg

SEQ ID NO: 36348 - DNA, 342 bp, Glycine max
  Clone ID: LIB3138-102-Q1-N1-C9
cgtctttgaagttgttaagatgactgcttcctacattaaacggacacactgttgcttcatagcatctgaaaatatggctgatgataccatcaataagaaggcttatcctcacaagctggagcgcataggagagatacatgaaaaagtagctgtgaacacacaacaagaggtatgtattacagcatgatgaactcaggggcgagcagcagcaactaataacagctgatgggtgtacatatgagtatgcattggtgcatgatagggcagagtcgacaataccactgggattttgtgattatgtgtcaagatacacaaccatgatacaatatgagtgcatatggg

SEQ ID NO: 36349 - DNA, 451 bp, Glycine max
  Clone ID: LIB3138-102-Q1-N1-D10
ctcgagccgaatcggctcgaggcgcctctcatccgtgatgggcgtatggagaagttctactgggcaccaacaagggatgaccgcattggtgtctgcactggaatttttcgcaccgattcaattcctgaacaggacgttgtcaagattgttgacaccttccctggccaatccattgatttctttggtgcactgagggccagagtatatgatgacgaagtgaggaagtggatttctggtgttggtgttgacggcattgggaagaagcttgtgaactcaaaagatggacctccaacctttgagcagcccaagatgactctggagaagctcttgacgtatggtaacatgcttgtccaagaacaagagaatgtcaagagagtccaattggctgacaagtacttgaaccaagctgcacttggaaaagctaacgaggatgctattaacaggggaactt

SEQ ID NO: 36350 - DNA, 437 bp, Glycine max
  Clone ID: LIB3138-102-Q1-N1-D11
ggctgacaagtacttgaacgaggctgcacttggaaatgctaacgaggatgctattaacaggggaactttcttcacactctatgcgcctctcatccgtgatgggcgtatggagaagttctactgggcaccaacaagggatgaccgcattggtgtctgcactggaatttttcgcaccgattcaattcctgaacaggacgttgtcaagattgttgacaccttccctggccaatccattgatttctttggtgcactgagggccagagtatatgatgacgaagtgaggaagtggatttctggtgttggtgttgacggcattgggaagaagcttgtgaactcaaaagatggacctccaacctttgagcagcccaagatgactctggagaagctcttgacgtatggtaacatgcttgtccaagaacaagagaatgtcaagagag

SEQ ID NO: 36351 - DNA, 454 bp, Glycine max
  Clone ID: LIB3138-102-Q1-N1-D12
atttggatatttattaaaatcaccttttgggggagaagggtggattgttagtgtggacgatttggaagatataattggggggcatgtatggttgggttccatttgtatacttggtggaatctggcatatcttaaccaaaccttttgcatgggctcggcgtgcacttgtatggtctggagaagcttacttatcttatagtttaggtgctttatctgtttttggttttattgcttgttgctttgtctggtttaataataccgcttatcctagtgagttttacgggcccactgggccagaagcttctcaagctcaagcatttacttttctagttagagaccaacgtcttggggctaatgtaggatctgctcaaggacctacagggttaggtaaatatctaatgcgttccccgacaggagaagttatttttgggggagaaactattcgtttttgggat

SEQ ID NO: 36352 - DNA, 442 bp, Glycine max
  Clone ID: LIB3138-102-Q1-N1-D4
ggtaccgaccaatggtcaccattgcttcttcctcatccactgaggtcttttttgcatcctattacaacctcctcccattttcacaccctgctacttcgcgcctatcgttctctactaacattcactcctcatccttcgctctatcaatgtctccttcctttttgtcatactattctgcaagttctacacactttgccactcatgcggccttcagcatcagagccagtgccgccgagaagaagaaggtgctcatcgtgaataccaacagcggcgggcatgccatcattggcgtttactttgccaaagagcttcttggagctggccactcagtcaccatactcactgttggtgaagaaggctccgacaagatgaagaaacctcctatcaacagattctcagaaattgtgagtgccggagggcgcacggtgtggggaaattctgc

SEQ ID NO: 36353 - DNA, 195 bp, Glycine max
  Clone ID: LIB3138-102-Q1-N1-D5
gggcaatgtaacctctctttctctgtgtcggtcctttcattgcggcgttttttgccttccaggcagcaccttctacaaaattagggttttttgaattctggatgactgatctccaaaaaaaattggtgctgtacctctggattaatgaagccgtatccaggctgttggttttcatacccaatcaattcttgaaca

SEQ ID NO: 36354 - DNA, 444 bp, Glycine max
  Clone ID: LIB3138-102-Q1-N1-D6
ctttaagcagatgtctaatgttttgtgggtggctcctgaggacaaggcgagtttatggtcacaacttcattatgtttcgtgtaataatctggaaatgcaagaagcttatcttgtcaatctcgtaaatgtgttacgagaattgtatttgcacagtccagaggaagctcgccaattgagaaggaaagctctctctcgtattgaatggctgcaaaaagctgatgtgcctaccatagcacagattgaagagttccattcgatgcagaggatgatgaatgctcctgattcaaatgataatattgatttactgttgagcattgatttgttgggtttacaaggagcaggtaaagcttttccaaacaaaattgtttttgatgaatagcttgtgttggctaacacaacaaaatctttgatggaaattttcagtggattctggttaccaatttt

SEQ ID NO: 36355 - DNA, 476 bp, Glycine max
  Clone ID: LIB3138-102-Q1-N1-D7
gggaataactccaagagattctcttttgctgaagcccaaccgtgtatcttctcttagttcactccattctctccagcatggtaacaatacgattagagttcctgtgactataagaattcaaccagagaggttttgtcatggtgcgctaaccatcaggaatgaagtgccgcaaaatgctgattttcctcgacagtattccagaaaagagaagaaaccttttccagttcccattgtagaactgcgacgagcagctagggagaggatgaagaagatgaaagatgagccgagaaaaccaatgtcagcacctaagaatgggttgctggtgaagagccttataccgactcatataatgtgtataatgctaggatcactttgatcaacaatctgaagaagctgctcaaagtagtgcctgtacatgcttgtgggtggtgcagtgaaatccatgtaggacctgttggacatccattcaagtcatg

SEQ ID NO: 36356 - DNA, 221 bp, Glycine max
  Clone ID: LIB3138-102-Q1-N1-D8
agttgacaaccatttacaatatgtgtgcatatgggctcaacgctggttttttaggtgctggtctcatgctcaccattcctgagaccattccacagcaaactgtgtggatttaaaaggccacactgagaacaccattgaattttcattctccctagcaaagcatttgtcagatatttattgaccttctcggcagtgtattataaaagaaaacaaatctttaa

SEQ ID NO: 36357 - DNA, 390 bp, Glycine max
  Clone ID: LIB3138-102-Q1-N1-E10
cttcataagctgtctttgttaatgttacatgtggtcgtgggcggggtggtttacccaccggtgcttggattagttctgcagttaacaatcgctcctcagatatcaacaaaaggattcgcacagcacttgcgaaaggtaagaaaactgtttttcttactagagttgatccttttccagtagctatactggctgttctttttggcgttaagaatgaaattctgagttctaacgccacttatcctatgctgacgcgacttcttgagaactgtaagagtctcaaatatccggtggaggagtgtccttttgcatttgtgaactagtatgtagtattttattcacttaaataaagcgcattactatgtgcaatgagtgtgcttaaatttttgtaat

SEQ ID NO: 36358 - DNA, 409 bp, Glycine max
  unsure at all n locations
  Clone ID: LIB3138-102-Q1-N1-E11
tgcaattgaagttaaaagccttagccttccctacaactccaaacacaaagacatcatcatccatggctgcctccgtctccactgtcggagctgtcaacagagctcttttgaacctgaatggttctggagctggagcttcagctcccagttcagccttctttgggaccagcttgaagaaggttattgcctcaagggtccccaacagcaaggtttccggtggaagcttcaagattgttgctgtagaagagaagaaagagattgaagagacccagcagaccgacaaggacagatggaagggtcttgcctatgatatctcagacgaccaacangacatcacangaggaaagggtttggttgactcccttttccaagctccacaggatgctggaactcactatgcagtcatgag

SEQ ID NO: 36359 - DNA, 362 bp, Glycine max
  Clone ID: LIB3138-102-Q1-N1-E12
ttgaagtttatagccttagccttccctacaactccgggcctttacatcatcgggatggcttcctccgtctacactgtcggagctgtcaacacagctctcttgaacctgaatggctctggagctggagcttcagctacgctacagaggagtctcggtccattgctttacaagaaccccggtttgatgagtacttaccatgtgctacacctgagctggagtatagaagaatgaacattggcagtcgaccgtcaaaacgaaaaccaagcggacgaattgaatcagttggtgcaatcccttggatctttgcttggactcagactagggttcatctacctgtatggcttggctttggggcagcattt

SEQ ID NO: 36360 - DNA, 479 bp, Glycine max
  Clone ID: LIB3138-102-Q1-N1-E2
ccatgtctgaagtcagaaggcacaacaacgccgattcggcttggagcatagtccacggtcatgtctatgattgcacccgcttcctcaaagaccatcccggtggcacagacagcatcctcatcaacgccggcaccgactgcaccgaggagttcgaagccatccactccgacaaagccaagcaaatgcttgaagactaccgaatcggcgagctcaccaccacctgctacaactctgattcttcatcgtcaaacccctccgtgcatggcagctccgacaccatccctttgacccccatcaaggaagtgattacaccaatgcgaagcgtggctcttaacccacgcgagaaaatcccatgcaagctcatctccaaaacctccatctctcacgacgttaggcttttccgctttgccctcccctccgacgacctactcatgggtttgccagttgggaagcacatattcctatgtgccaccgttgac

SEQ ID NO: 36361 - DNA, 478 bp, Glycine max
  Clone ID: LIB3138-102-Q1-N1-E3
caattttgaggcttttttccacaagctggtgcagtttggagagatgcaggaaaaagttgtattgaaattttcacaagaggaatttcttacagcttggtcaactcaggtgcgtcctgcaacaactctgttggctgatgggtgtccatatttgtatgcaatggtgcatgatagttcagtgtctacaataccaggtgattttgtcattggtgtcaagttgacaaccataaacaatatgtgtgcatatgggctcaatcctggtatttcaggttctcgtcttttgggcaccattcctcagtccatttcacagcaaactgtttggaatcaaatggcaacagtgagaacaccattgaattttgattctagcaagcagagcttttgtcagttttctattgaccttctcggtggaggaatcttagtggacaaaactggagattggatcacacttatacaaaattctccaattagtaacttattgaga

SEQ ID NO: 36362 - DNA, 294 bp, Glycine max
  Clone ID: LIB3138-102-Q1-N1-E4
ttggggtggcagtccatccagtgacacaaatgatatcgcaatgcaggatgttcaggttacaattgattggtttatcccctctcaggaaagaccttcctggactcacatacatcctgcaacacaacgccggccccgactgcacccatgtgttcttgcccatccactccatccactccaagcaaccactccaagactaccgaatcggcgagctcaccaccacctcctacaacaatatctcttcatcttcgcaccctttcgtgcatgaaagctcctacatcatccctacgaccccct

SEQ ID NO: 36363 - DNA, 445 bp, Glycine max
  Clone ID: LIB3138-102-Q1-N1-E7
ttatgtttcgtgtaataatctggaaatgcaagaagcttatctggtcaacctcgtaaatgtgttacgagaattgtatttgcacagtccagaggaagctcgccaattgagaaggaaagctctctctcgtattgaatggctgcaaaaagctgatgtgcctaccatagcacagattgaagagttccattcgatgcagaggatgatgaatgctcctgattcaaatgataatattgatttactgttgagcattgatttgttgggtttacaaggagcaggtaaagcttttccaaacaaaattgtttttgatgataagcttgtgttggctaacacacaagaattctttgatggaaattttccagtggattcttggttaccaatttttgtgaattgtctttatcctgtaagtcaattaccttcagaagctgtcgttgtaaatgttacatgtggt

SEQ ID NO: 36364 - DNA, 471 bp, Glycine max
  Clone ID: LIB3138-102-Q1-N1-E8
ctcactgtttggaataggaccaagagcaagtgtgaccctctaatcagcctcggagcaaaatataaaccatctcctgaggaagtagcagcatcttgtgatgtcacctttgccatgctcgctgatcctcaaagtgcagtggatgtcgcttgcgggaagcatggggctgcaaatggaatgggtccagggaaaggatatgtggatgtttcaactgttgatggggacacttctaaattgattaatgggcacatgaaatccactggagccttatttttggaggctccagtttccggatcaaaaaagccagcagaagatggacaattgatatttcttacagcaggggacaaaaatctttatgaagcagttggttctctcttggacatcatggggaaatctaaattttatcttggtgatgttggaaatggagctgcaatgaaacctgttgtcaatatgatccatggcagtatgatggca

SEQ ID NO: 36365 - DNA, 440 bp, Glycine max
  unsure at all n locations
  Clone ID: LIB3138-102-Q1-N1-E9
accacatttaggtatcggcttcggcaacttaactgcaactgctgaaaatactcctccaggatttgaatcgaaattgcctgaagtgcccgaaatcttcaaggcagccacaaattgttttgaaaccttgtgcagttactgctgttgcatgtgctgcatccagtgctgtacccggataaacagccaatgtgcaaccgcattggcacaactctgcattggtctaggatgcttcggctgcatctcatgttgttcagatatatgctgttctggaaacgaaggctgaaatatcaattttgttgtatgattgttgtattttactgcatatagaaatcactgcatgtagtgttgtcattttggaaatgtatattgtgtttaatggggtgatttccttagttnaaaaaaaaaaaaaaaaannaaaaaaaaaaaactaaaaaaaaacaaat

SEQ ID NO: 36366 - DNA, 456 bp, Glycine max
  unsure at all n locations
  Clone ID: LIB3138-102-Q1-N1-F1
gctaccacctttatcacctctaaacaaaaaaaccatcaatcacaaggggtaaggagaagggtcacgtcaacgtcntcgtcatcggacacgtcgactccggcaagtccaccaccaccggtcacttgatctacaagtgcggaggtatcgacaagcgtaccatcgagaagtttgagaaggaagccgccgagctcggcaagtcctccttcaagtacgcctgggttctcgacaagctcaaggccgagcgtgagcgtggtatcaccatcgacattgccttgtggaagttcgagacccccaagtacaacgtcaccgtcattgacgcacctgggcaccgtgacttcatcaagaacatgatcaccggtacctcgcaggccgactgtgctatcttgatcatcgccaccggtatcggagagttcgaggctggtatctcgaaagatggccaaacccgcgagcacgctc

SEQ ID NO: 36367 - DNA, 466 bp, Glycine max
  Clone ID: LIB3138-102-Q1-N1-F10
tggtttgacagttatatctctcttacaaatattgtcaatggtggtttgaattgtatccttcatcagtaaaaggtgttattcgttgtcaattgatggacttggactgttattgttctggttggcttgtttttaaattgtgtttttgttgttaattcttataattgattattgggatgtccatcaaattatgcccatgttcacatttcgtggtaaaacattgaatttcaaattttccaaatagaagattattatgtttacccaactcaaacttgcatttcctgcagatgtttgattattgtgtaatattcaaatgtagcagtctaaaggtttaaggttgttgtgcagcagtatgcatttgcatctgaaggtgtgagtttggatgtgcaagtatgtgacaagggcaagtggttcgtctcttgcaaagatgttcccatgtctcttaaaaatgtagtttttcccaacatgt

SEQ ID NO: 36368 - DNA, 374 bp, Glycine max
  Clone ID: LIB3138-102-Q1-N1-F11
cttaaaactatgtgaataaactacagatattcacatagttgggggagagtgaagacacagcctcagtagccaagttctgcttttagtatcttattttttcttattcaatcttgtgttctattctgaaactttgtatcttctctgttctgtaactttgcgtagtttttctgaacattcttagatcatgcaaagatcaatgtgcgcaaagtttattggttgttttcttcagtaatttacagtttgaggaaagtttttttttcccattctgaatgttttgcctcttgaattctgtagaaacttgaaatgttagagaaaaaggagaaagtactcctaaaaaaggctgcagcagaagttgaaaaagccaaagaattcac

SEQ ID NO: 36369 - DNA, 410 bp, Glycine max
  Clone ID: LIB3138-102-Q1-N1-F12
gtcaaaaggagtgattgggcctcattggtacaagtgtttttaacaaacagcaacagtacagagcattttgatgcatgtaagtggacaaaatcagaaccacattcctgggaattgatcttcccaatagaggtatgtggtcctaataatggttttgaaatgtggagttctgagtgggcaaatcaaacttcatggcatttgagtttccttattgacaatcccaaacagtctacagtttttgatattctcttgggaatctctcaagattttgaaattgctggtaatactcttatgccagctttttctgttccacaggctactgccagatcttctgaaaatgcggaatcctctgcatgatctggaatttgtgttttctttcgcttgttcgtttgtttaattcaataaaagaaatt

SEQ ID NO: 36370 - DNA, 462 bp, Glycine max
  unsure at all n locations
  Clone ID: LIB3138-102-Q1-N1-F2
agatcgagtattacaaatttcagctagtggtcatagtgtcactggtgattgtgcttccaaacacacaaaggtggggagaaaatgggcatgccataatttgtaggattgctcaatctcgcctcagcgattcaaccgcaaatgctgtgaaaaacctgctaccagaatatgcacaaaacgacttaagaaatgtgtgctcatgggctgatcgcgtcaagttttatttgcactggtctgctccattgcactttgttgatacacctgacaacctttgcaattatcaatctgacacggattgcaaggatcacgatggagtgaaagcaagatgtgtagtgggagcgattaagaactacactgatcagctgctcgactatggcatatacactgaatatgacctcacacacgctcttatgttcctttctcattntatgggagatgtgcatcaggctatacatgtggacttta

SEQ ID NO: 36371 - DNA, 476 bp, Glycine max
  Clone ID: LIB3138-102-Q1-N1-F4
aagttattgaacagtcatttggagaggagcacttgtgcttcagaacacttcagcgcttcactgctgctacacttgagcatggaatgcaccctcctgtggcaccaaaaccagagtggcgtgccctcatggatgagatggctgtcattgctacagaggagtatcgctccattgttttccaggaaccccgtttcgttgagtacttccgatgtgctacacctgagctggagtatggaagaatgaacattggcagtcgtccgtcaaaacgaaagccaagtggaggaattgaatcacttcgtgcaatcccttggatctttgcttggactcagactaggtttcatctacctgtatggcttggctttggggcagcatttagccatgttattaagaaggatccaaagaatctccaaatgcttcaagatatgtataatcaatggcctttcttcagggtcagccttgacttggttgagatggtgttc

SEQ ID NO: 36372 - DNA, 463 bp, Glycine max
  Clone ID: LIB3138-102-Q1-N1-F5
gtgatatgcaaaacatgtctctaatagcttcactctcctccggagcttcacaactcacttcccttccttccctcccttcttcctcctctccactttctcgcaaatttcccctcactttccgggaaaaaaacagaactccaatcacacctcacaagctccctttttcagcaaggcctaccaccaccagagtggtgttggtgaagtctcaggccacagcacctgcttcttctgaggctgtggcagtgacacctgtgtcttctgagatgaaggcatgggtctatggggaatatgggggtggtgatgttctgaagctggactccaatgttactgtgcctgatgtgaaggaagatcaggttctaatcaaagttgttgctgctgctcttaaccctgttgatgccaagaagaggcagggaaagtttaaggccactgattctccccttccgactgttccgggctacgatgt

SEQ ID NO: 36373 - DNA, 423 bp, Glycine max
  unsure at all n locations
  Clone ID: LIB3138-102-Q1-N1-F7
ccaaatcttaaaaatattcagtgaagatcaacctcaatggcatgtcttggcgtgcgaccagttcttccccctccattaacttccatctccgacccacctcctcttttcgatggcaccaccaggttgtacatcagttattcttgcccctatgcacaacgtgtgtggatcgctaggaactacaaggggctacaagataagatcaatttggtccctattaaccttcaagacaggccagcttggtataaggagaaagtctaccctgaaaataaggtgccatccttggagcacaatggcaaggtgttgggagaaagtcttgatttgatcaaatatgtagatgcaaactttgaaaggacacctttgtttcccagtgatcctgccaagaaaagagtcggtgagcaattgatatnccatgtngatacattc

SEQ ID NO: 36374 - DNA, 293 bp, Glycine max
  Clone ID: LIB3138-102-Q1-N1-F8
cgcacattctaaattatttaatgcaacataactttatccctgagcttggttttaccaacggctgttgccgctacatctactgtcatctttcccatcacaccaagtttacctatgtcccaagcaggacctcaatcattaccccatggagagatgcacacaagaaggcgatagtgcagtacaacaatgtgctgcacaatgaaaggaatgttgccattataaatcatgacaacactgcagcttcagctaaggatgaaaaagagtccaagaaacaggatccatgcttggatcacaac

SEQ ID NO: 36375 - DNA, 375 bp, Glycine max
  Clone ID: LIB3138-102-Q1-N1-F9
ctcgagccgaatcggttcgagggagttgatgcatctggcaggaaaggaaagggaaagggcgtttaccagtttgtagacaaatacggtgctaatgtcgatggttacagtcctatctacgacaccaaggactggtctccaaccggtgatgtctacgctggcggtacgactggcttggctatctgggctgtgactctacttggtcttcttgctggtggtgcacttcttgtctacaacacaagtgctttggcgcaataaactttgcaaatcgatgttttaagctcaaacttagtccatgtaactatctaaaaatgaagaattattcatgaagtactttgtggatacgtgttccttctgttctataaatgtgtggatgtg

SEQ ID NO: 36376 - DNA, 477 bp, Glycine max
  Clone ID: LIB3138-102-Q1-N1-G1
attcagagggacacatccttgactctgctgagttatataattccgagactcaaacgtgggaaacactcccaagaatgaaaaaacccaggaagatgtcctctggggtatttatggatggaaagttttatgttataggggggattggggggagtgactctaagctcctcacatgtggagaggagtacaatttacagactaggacatggactgagattcctaacatgtcccccggacgtagtagtaggggtcctgagatgcctgcaacagctgaggcaccacctctggttgctgttgtaaatgatgaattgtatgctgctgattatgctgacatggaggttaagaagtatgacaaggagagaaatgtgtggtttaccattgggagactgccagaacgagcagtgtcaatgaatggctggggtcttgcattcagggcatgtggagataagcttattgtcattggtggacctaggactcatg

SEQ ID NO: 36377 - DNA, 463 bp, Glycine max
  Clone ID: LIB3138-102-Q1-N1-G10
gcaaactgtttggtatcaaatggcaacagtgagaacaccggggaattttgattctagcaagcagagcttttgtcagttttctattgaccttctcggtggaggaatcttagtggacaaaactggagattggatcacacttatacaaaattctccaattagtaacttgttgagagttgctgcttggaagaaaggctgtttaatggtcaagattgtgatgtctgggaatgcagcagtcaaaaggagtgattgggcctcattggtacaagtgtttttaacaaacagcaacagtacagagcattttgatgcatgtaagtggacaaaatcagaaccacattcctgggaattgatcttcccaatagaggtatgtgggtcctaataatggttttgaaatgtggagttctgagtgggcaaatcaaacttcatggcatttgagtttccttattgacaatcccaaacagtctac

SEQ ID NO: 36378 - DNA, 430 bp, Glycine max
  Clone ID: LIB3138-102-Q1-N1-G11
caatggcattggtttccacgcggcctagaaaggctcttgagtctgctatgggggagattgggattgaggacactttcagtgttattgtagcagcagaggatgttcataggggaaagcctgatccagaaatgtttgtgtatgctgcacagcttttgaacttcatacctgagagggtcattgtgtttggtaactccaatctaacagtggaggctgctcatgaagcccggatgaagtgtgtggctgttgctagcaggcatcctgtatatgagcttggggctgcagacttggttgtcaggcgccttgacgagctttcagtggttgatttgaagaatcttgcagacattgaaatgactgaatttgggtctgtggagcctgagatggagctggaggtggaaaaagatcatgatacatcatcacttgatgacaattc

SEQ ID NO: 36379 - DNA, 378 bp, Glycine max
  Clone ID: LIB3138-102-Q1-N1-G12
ccgagggagagattccttacagagaaggacaatcaattggggtaattcctgatggtgttgacaagaatggcaaacctcataaactgagattgtattctattgctagcagtgccattggtgattttggagattccaagactgtttctctatgcgtgaaacggctagtgtacacaaatgaaaatggagaaattgtcaagggagtctgctcaaatttcttgtgtgacctgaagccaggagctgaagtaacaataactggacctgttgggaaagaaatgcttatgccaaaagatcctaatgccaccatcatcatgttgggaaccggaaccgggattgccccatttcgctcatttttatggaaaatgttctttgagaaacacg

SEQ ID NO: 36380 - DNA, 471 bp, Glycine max
  Clone ID: LIB3138-102-Q1-N1-G2
tgaaaacaccattgaattttgattctagcaagcagagcttttgtgagttttctattgaccttctcggtggaggaatcttagtggacaaaactggagattggatcacacttatacaaaattctccaattagtaacttgttgagagttgctgcttggaagaaaggctgtttaatggtcaagattgtgatgtctgggaatgcagcagtcaaaaggagtgattgggcctcattggtacaagtgtttttaacaaacagcaacagtacagagcattttgatgcatgtaagtggacaaaatcagaaccacattcctgggaattgatcttcccaatagaggtatgtggtcctaataatggttttgaaatgtggagttctgagtgggcaaatcaaacttcatggcatttgagtttccttattgacaatcccaaacagtctacagtttttgatattctcttgggaatctctcaagattttg

SEQ ID NO: 36381 - DNA, 446 bp, Glycine max
  Clone ID: LIB3138-102-Q1-N1-G3
agcaactaactcactattttaaacaattccatcaaacctgccgtggcttttttatgtgcttgctctgccattgcatctgatgccatatacacaccaagttcccacaacaatggatcactcttgggaagcacaaaagcttctttagttagtgggaggaaactgagcgtgaacaggtttacaacaccagttggagcacgagccagcactacagtgtgtgcaggtgctgagcctgatcagcctttgtggataccaggcagcacccctcctccatggctagattgcaatttgccaggagattatcgctatgatcccctagggctcggatctgatcctgagagcctgagatagaatgtccaagcatagcttgtgcactgtagatgggccatgttgggagctgttggcattttcatactagaattcctcacaaagattggtattctgaacac

SEQ ID NO: 36382 - DNA, 461 bp, Glycine max
  Clone ID: LIB3138-102-Q1-N1-G4
gacaaaactagtgcatctttgcaatttagaaagttagcagattgtgattttctcaagagaaactttaagcagatgtctaatgttttgtgggtggctcctgaggacaaggcgagtttatggtcacaacttcattatgtttcgtgtaataatctggaaatgcaagaagcttatcttgtcaatctcgtaaatgtgttacgagaattgtatttgcacagtccagaggaagctcgccaattgagaaggaaagctctctctcgtattgaatggctgcaaaaagctgatgtgcctaccatagcacagattgaagagttccattcgatgcagaggatgatgaatgctcctgattcaaatgataatattgatttactgttgagcattgatttgttgggtttacaaggaacaaggtaaagcttttccaaacaaaattgtttttgatgataaagcttgtgttgctaacacac

SEQ ID NO: 36383 - DNA, 465 bp, Glycine max
  unsure at all n locations
  Clone ID: LIB3138-102-Q1-N1-G5
gaaattctttagttgtaactgacaaagttttctgagaaaataaggattattattgagagaatggctggctcatcggaagagggacaagtcattagctgccacaccgttgaagaatggaacgatcaactccagaagggcaacgaatccaagaaactcattgttgtggattttactgcttcttggtgtggaccatgccgtttcattgcaccattcttggctgagctggctaagaagttcacaagtgtcatattcctaaaggtggatgtggacgaattaaagagtgtttctcaagattgggctattgaggctatgcccacttttgtgtttgtgaaagagggaacgcttctggacaaagtggtgggaacaaagaaggatgagctgcagcagaaaatacagaaacatgtggcttcaactagtgcttaatctagctcaccttcagaaactttatatatgcgctntcttttc

SEQ ID NO: 36384 - DNA, 478 bp, Glycine max
  unsure at all n locations
  Clone ID: LIB3138-102-Q1-N1-G7
gtacttgtgagtgtatacccaacacaaactaagatcaacatgggctactacacccgcgtttcagaagttgagagggaacctatcatggagtattccacaccacgaccaatgatgggcaactaccaccaccctaatgctcaccgtgtcctcaacgagaagattgtttatgaggaggatgtgattggaggatcccgccacaaccacatgcatcaccaccaccctgagactcatgagagagtcaaggtggtggagtatgaacaagttcctgagaggcgcgttgtctatgaagagaaagttgcttatgacaacgatcgttactactctccaaggtattgaaattggacaaatggaagaacacctataacgtgttatcatgtggctttttattaggcaagctacctagtataccaaaagcaccactgtgcttgtactaaataaattcctgcttatatatacttgccattatngtatatataaa

SEQ ID NO: 36385 - DNA, 402 bp, Glycine max
  unsure at all n locations
  Clone ID: LIB3138-102-Q1-N1-G8
tcttctcggaaagcaaactagggtttgtttgtgtggcagaaggaggaatgggaaggtatcgtagccggagcagaagctatagcccccggcggcgaagcagaagcccaccggcaccgcgcggacggaagcgctatgtcgacgatcgctacggtgacagcaggtcttacagagaccgccgctcacctcttccttccggcttgcttgttcgcaatctcccccttgatgccaggcctgaggatcttaggatcccatttgagcgctatggtcctgtgaaggatgtttatctacctaaaaattactacactggtgagcctcgaggctttggatttgtgaaatatcggtatggtgaagatgcagctgaggcaaagcaacatctcaatcatactantcatggtggacgtg

SEQ ID NO: 36386 - DNA, 402 bp, Glycine max
  Clone ID: LIB3138-102-Q1-N1-G9
ctcgagccgaatcggctcgagctggtatttcaggttctcgtgggttgggcaccattcctcagtccatttcacagcaaactgtttggaatcaaatggcaacagtgagaacaccattgaattttgattctagcaagcagagcttttgtcagttttctattgaccttctcggtggaggaatcttagtggacaaaactggagattggatcacacttatacaaaattctccaattagtaacttattgagagttgctgcttggaagaaaggctgtttaatggtcaagattgtgatgtctgggaatgcagcagtcaaaaggagtgattgggcctcattggtacaagtgtttttaacaaacagcaacagtacagagcattttgatgcattgtagtggacaaaatcagaac

SEQ ID NO: 36387 - DNA, 481 bp, Glycine max
  Clone ID: LIB3138-102-Q1-N1-H1
cggctcgaggaagcattgcattctgctatttaattccactacgtgcacgcacattctcctcaaagacaacaatggcaccaacagccaagactctgacttacctggcccaggagaaaaccctagaatcgagcttcgttcgggacgaggaggagcgtcccaaggttgcctacaacgaattcagcgacgagatcccagtgatttctcttgccggaatcgacgaggtggatggacgcagaagagagatttgtgagaagatcgtggaggcttgcgagaattggggtatattccaggttgttgatcacggtgtggatcaacaactcgtggccgagatgacccgtctcgccaaagagttctttgctttgccaccggacgagaagcttcgttttgatatgtccggcgccaaaaagggtggattcattgtctccagccatctccaaggggaatcggtgcaggactggagagaaatagtgacatacttttc

SEQ ID NO: 36388 - DNA, 250 bp, Glycine max
  Clone ID: LIB3138-102-Q1-N1-H12
acagttctcactgtaactttggactctgactttgcaatactgggtgttctccttctctctgtcgctgatcacccattcaaaggcgataattaccatgcaatccgcgggagatctctcagactcattaaacagggctatgtcaccgactggctgggatgatgtatcagattacagtgcacggcgtgcgatctttcaagatgtctaccgtcgcttgcctgcatgcttcatcgaaaaatcaaatctggaaaat

SEQ ID NO: 36389 - DNA, 455 bp, Glycine max
  Clone ID: LIB3138-102-Q1-N1-H3
ggcaaaggaagtcgaataccttctaaggaaaggatggattccttgcttggaattcgagttggagcacggtttcgtgtaccgtgagcacaacaggtcacctggatactatgatggacgctactggaccatgtggaagctgcctatgtttggctgcactgatgcttctcaggtgttgaaggagcttcaagaggctaagactgcataccccaatggcttcatccgtatcattggatttgacaacgttcgccaagtgcagtgcatcagcttcatcgcctacaagcccccaggcttctaagtcattgaaaaatttgcaaagcatctgtagccaccccactttgtttgttgtacttaaactacattcccatttgtttttgctttatgagatttcatcatcctgtatttttgggttctgttttcggacttcaatggaaattaatggatgagaactaatgaat

SEQ ID NO: 36390 - DNA, 322 bp, Glycine max
  Clone ID: LIB3138-102-Q1-N1-H7
cactgcttggattagttctgcagttaacaatcgctcctcagagatcaacaaaaggattcgcacagcacttgggaaaggtaagaaaattgtttttcttactagagttgatccttttccagtagctttactggctgttctttttggcgttaagaatgaaattctgagttctaacgccactaatcctatgctgacgcgacttcttgagaactgtaagagtctcaaatatctggttgatgagtgtccttttgcatttgtgaactagtatgtagtattttattcacttaaataaagcgcattactatgtgcaatgagtgtgtttaaa

SEQ ID NO: 36391 - DNA, 366 bp, Glycine max
  Clone ID: LIB3138-102-Q1-N1-H8
gacaaaactagtgcaactttgcaatttagaaagttagcagagggtgattttctcaagagaaactttaagcagatgtctaatgttttgtgggtggctcctgaggacaaggcgagtttatggtcacaacttcattatgtttcgtgtaataatctggaaatgcaagaagcttatcttgtcaacctcgtaaatgtgttacgagaattgtatttgcacagtccagaggaagctcgccaattgagaaggaaagctctctctcgtattgaatggctgcaaaaagctgatgtgcctaccatagcacagattgaagagttccattcgatgcagaggatgatgaatgctcctgattcaaatgataatattgattta

SEQ ID NO: 36392 - DNA, 471 bp, Glycine max
  Clone ID: LIB3138-102-Q1-N1-H9
caataattgaatttgaatcatttgggtctctagacacaaagggtaccccctctttccccctcctcaacattgttatgatcccttgttggtaaccattccatttgcacttgtctttgcaaccaaaaaacaagctctatgaccaacgaaatgaaagaagcaagtgccttaggagctagaacagcacgagcatgcgagagctgcctaaaagtaagagcacggtggtattgtgcagctgatgatgcattcctttgccatggctgtgacaacatggttcactcagcaaaccaattagcaagtagacacgaaagggttaagcttcaaactgcatcctctaaggtcaactactcagtgacccctaaggtagcatggcacagtggattcacacgcaaggcaagaacgccacgccacaacaacaacagacactcatcattgaaacaacaacaacaaaaaaaaaccattacatgaagaacg

SEQ ID NO: 36393 - DNA, 222 bp, Glycine max
  Clone ID: LIB3138-103-Q1-N1-A1
tgaatatgtcaagccttactttagtggttctaaattgaaaagctttctagctagtcataacatcaccattactgatggtattgacaaaactagtgcaactttgcaatttagaaagttagcagattgtgattttctcaagagaaactttaagcagatgtctaatgttttgtgggtggctcctgaggacaaggcgagtttatggtcacaacttcattatgtttc

SEQ ID NO: 36394 - DNA, 463 bp, Glycine max
  Clone ID: LIB3138-103-Q1-N1-A10
gggaagggtgattagacctccattcaattacaccacgcttctaaattctgagaatgaatatcgtaagatcgaagcaataaccttttttcctctgccgccactggtttcgatcccacacccacaaccctccatccttcgaatgctcttgcgttttccttaaactgcctcattccgaagccatacacacataacggtttttctaggtgctagcaatgtcgactcctgctaggaagaggctcatgagagatttcaagaggctgcaacaagaccctcctgcaggaatcagtggcgcccctcaggataacaacatcatgctgtggaatgctgtcatatttgggcacgtttaagttgattcttcaatttactgaggattatccaaacaagccaccaactgtacgatttgtctctcgaatgtttcacccaaacatttatgcggatgggaagtatttgttggatatattac

SEQ ID NO: 36395 - DNA, 397 bp, Glycine max
  Clone ID: LIB3138-103-Q1-N1-A11
atgggttctttacaagaaagaatcacttctaccaaagaggggtccataacttctattcaagcaggttatgtacccgcagacgatttaaccgatcctgcgcctgctacgacatttgcacatttagatgctactactgtactatcaagaggattagcggccaaaggtatctatccagcagtagatcctttagattcaacctcaactatgctccaacctcgaatcgttggtgaagaacattatgagactgcgcaaagagttaaacaaactttacaacgttacaaagaacttcaagacattatagctattcttggcttggacgaattattcgaagaagatcgcttaaccgtagcaagagcacgaaaaattgagcgtttcttatcacaaccttttttcgtag

SEQ ID NO: 36396 - DNA, 434 bp, Glycine max
  Clone ID: LIB3138-103-Q1-N1-A12
ggaaaattgactttcccccagggcacttcccgaagtgttaagagaatgcctctttctatagggggaggagctggtgcaaagaatgctattctcatgaatatgccaaatgctgttctttcaatgtggagatattttgttggagatctcgtctttgaagtttctaagatgacttctccctacattaaatgtacagtctctttcttcatagcatttggaaatttggctgatgataccatcaattttgaggcttttccccacaagctggtgcagtttggagagattcaagaaaaagttgtattgaaattttcacaagaggaatttcttacagcttggtcaactcaggtgcgtcctgcaacaactctgttggctgatgggtgtccatatttgtatgcaatggtgcatgatagttcagtgtctacaataccaagtgattt

SEQ ID NO: 36397 - DNA, 229 bp, Glycine max
  Clone ID: LIB3138-103-Q1-N1-A2
agagtatctatcaattatagatgaattcatggaagctgttcatgctcgatggcccaaggctattgtgcagtttgaggattttcaaatgaagtgggcttttgaaaccctgaaaagatatcagaaaaagttttgcatgtttaatgatgatatacagggcactgcaggtgttgcacttgctggactattgggaactgtaagagcccaaagccggccattgactgattttgtg

SEQ ID NO: 36398 - DNA, 250 bp, Glycine max
  Clone ID: LIB3138-103-Q1-N1-A3
ggctgcacaagctcttgtatcatcatcttctcttaccttctcagcggaggctgcaagacaaagtcttggaccaagatcactccaatctccatttggcttctccagaaaagcctcctttcttgttaaggcagctgctaccccccctgtcaagcaaggatcagacagacctttgtggtttgcatcaaagcaaagtctttcttacttggatggcagcctttcgggtgactatggatttgaccctctgggactt

SEQ ID NO: 36399 - DNA, 256 bp, Glycine max
  Clone ID: LIB3138-103-Q1-N1-A5
tgtcattggtgtcaagttgacaaccataaacaatatgtgtgcatatgggctcaatcctggtatttcaggttctcgtcttttgggcaccattcctcagtctatttcacagcaaactgtttggaatcaaatggcaacagtgagaacaccattgaattttgattctagcaagcagagcttttgtcagttttctattgaccttctcggtggaggaatcttagtggacaaaactggagattggatcacacttatacaaaat

SEQ ID NO: 36400 - DNA, 346 bp, Glycine max
  unsure at all n locations
  Clone ID: LIB3138-103-Q1-N1-A6
ggttcctgaggccagggcgagttaatggccacaccttcattatgtttcgggtaataatctggaaatgcaagaagcttatcttgtcaatctcgtaaatgtgttacgagaattgtatttgcacagtccagaggaagctcgccaattgagaaggaaagctctctctcgtattgaatggctgcaaaaagctgatgtgcctaccatagcacagattgaagagttccattcgatgcanaggatgatgaatgctcctgattcaaatgataatattgatttactgttgagcatttgattggtgggtttacaaagagcaggtaaagctttttcaaacaaaattgtttttgatgat

SEQ ID NO: 36401 - DNA, 144 bp, Glycine max
  Clone ID: LIB3138-103-Q1-N1-A7
ctcgagccgaatcggctcgagtttggatattccttgtggtcatgctcttaactttcccgttgtttaccctctaaaaaaaaaaaaaaaaaaaaaaaaaaaaaaaaaaaaaaaaaaaaaaaaaaaaaaaaaaaaaaaaaaggggcg

SEQ ID NO: 36402 - DNA, 326 bp, Glycine max
  Clone ID: LIB3138-103-Q1-N1-A9
gcaagtgttgatttgcagcgcactcatcgtattagaggaatgattaaaatggtggccacagttggtattcctgagaatacaggtatatcattggcctgtgctatgaatagttcttttagggggcgcgccagttctgatatttacaccatctgctcttaagactgtgaattgtggaatcctgcttgcacaaaagcaatgactatgtcatttaatccaaacccgtgttctgatgaatggagtttggaatttctgaagcgtcctggatttcattgcgatatcatttgcgtcactggatggactgccaccccaatgcaggatgttcaggt

SEQ ID NO: 36403 - DNA, 206 bp, Glycine max
  Clone ID: LIB3138-103-Q1-N1-B1
ccaagattaatctgaacaagttgcgtgtccctgctgtcactggtctctgagcaaaaccagaagaacacattaattcaaccctgccaaaatcaatccccagataccattcccctttccataacaaagacaacccaatcattgtgtgttcacattcgaattcacaaaatactgtgataattattctgattcacgaaaaacaggaaaac

SEQ ID NO: 36404 - DNA, 305 bp, Glycine max
  Clone ID: LIB3138-103-Q1-N1-B10
ggaagactgggatatgcttcattgataccatatgttgagccagttgtgcaagctcaaagtgctgaagtttactttgacttcttccctgtggaggttgatagtcaagagggagttgctcacattggtgaactgaaatctggtgtctatgttccactgcctacaaaaactaatttggtggaaactcctaaagaatggcaactggatctaccttgtgacaaaattcctagtgtcttgactacaactgatgagagattggtaggcacagaacatgaaggatatgatccttttcttggtggaattcaaaa

SEQ ID NO: 36405 - DNA, 400 bp, Glycine max
  Clone ID: LIB3138-103-Q1-N1-B11
ttgacattcaaaacagaaagaggtttgctgcgcagttgttgcgggatttcgtggcttaaaagaattgataattaactagctagctaggataattaatcaatgaagaacaccccacgaaagaattgaattattttcttctttttctgatgttgcaatatattatatatccacaaaacacaatgcagttcagagtgttacgacacactaacttagcagaagaatagcaacaggaggggaaaaaaaaagaaataaaagaaatggagaagtttatggtaacttgctccatgtataaagatggaaactggttcaagattatgaacttgcagggaattcagatttacatgttctgaattagtttaatttaaggattcaagttgagttggggaaggtatattgtata

SEQ ID NO: 36406 - DNA, 203 bp, Glycine max
  unsure at all n locations
  Clone ID: LIB3138-103-Q1-N1-B2
gttgagtatgctctgcctatttgaaaatatccacacctcttttaattgtcgtaatgatgtgtgaagtgtgtgttatttttaaaaaaaaaaaanaaaaaaaaaaaaaaaaaaaaaaaaaaaaaaaaaaagnaaacattctcccaactttgttgccatcaaaaacaaaaccataaaaaatacgaatgtttcccaaaatgagccct

SEQ ID NO: 36407 - DNA, 312 bp, Glycine max
  Clone ID: LIB3138-103-Q1-N1-B3
gcatttggaaatttggctgatgataccatcaattttgaggcttttccccacaagctggtgcagtttggagagattcaggaaaaagttgtattgaaattttcacaagaggaatttcttacagcttggtcaactcaggtgcgtcctgcaacaactctgttggctgatgggtgtccatatttgtatgcaatggtgcatgatagttcagtgtctacaataccaggtgattttgtcattggtgtcaagttgacaaccataaacaatatgtgtgcatatgggctcaatcctggtatttcaggttctcgtcttttgggc

SEQ ID NO: 36408 - DNA, 339 bp, Glycine max
  unsure at all n locations
  Clone ID: LIB3138-103-Q1-N1-B4
anaaaaaaaaaaaaaattattaaaaaaaaaataaaaaaaaaatattagggaaataaaaaagggggggagggatatagaaaaagttagcaaccagataaaaaattatactccggaacagtcaagattaaccacattaacaaaatatagaaaaaagttaaaacatagggggggggggccccttttttgggttttctccccccggaatttttttttgcccgtacctttgggggttccacctttttcttttaaggggggggtttaaggggtgggaaaaaaatgggtaatatttttttttttgggaaaaattgttttccctgtaaaattaccaaaaaatttaac

SEQ ID NO: 36409 - DNA, 259 bp, Glycine max
  Clone ID: LIB3138-103-Q1-N1-B5
gtggtaccagagcctcagaactcaaaaactgccaaagcttccttacatggctgctctaaaatatatgcactgtctatcctcgttttaactgcaacgtcttctacactccttacttagtacttaccaatccataacaatttcatacccttcaacataatcacctgaaatgggtttagccacaccccaaccacaaaaaagactttccgaatttctcgatgaggagcaagaaccctttcttctatggggttaacttttaaaa

SEQ ID NO: 36410 - DNA, 126 bp, Glycine max
  Clone ID: LIB3138-103-Q1-N1-B6
gccagattgagacaaagaatagatcctcaatacaatgaggttcaggctcagatggaaacaaatttgtttaaattgtctcttgatgatgttgaaactcctaaaggttccatgttggatctgaaaatt

SEQ ID NO: 36411 - DNA, 355 bp, Glycine max
  unsure at all n locations
  Clone ID: LIB3138-103-Q1-N1-B7
tggttttgaaatgtggagttctgagtgggcaaatcaaacttcatggcatttgagtttccttattgataatcccaaacagtctacagtttttgatattctcttgggaatctctcaagattttgaaattgctggtaatactcttatgccagctttttctgttccacaggctactgccagatcttctgaaaatgcggaatcctctgcatgatctggaatttgtgttttctttcgcttgttcgtttgtttaattcaataaaggaaattaggcatgaccctcntgtgagtatgctctgcctatttgaaaatttcacacctcttttattgtcgtaatgatgtgtgaaagtgtgtgtatttt

SEQ ID NO: 36412 - DNA, 298 bp, Glycine max
  unsure at all n locations
  Clone ID: LIB3138-103-Q1-N1-B8
ccttcaaccctttgatgaaaacaaattcaactttaccaaagttgggcaagaagaggtcctcttccaatttgaagctagcgaggatggacaagtccagttctttccaaatgctccagttgatgttgacaattctcccagctntgttgccatcaatgtcagtcctattgagtatgggcatgttttgctgattccgcgcattttcgagtgtttgcctcaaaggattgaccgtgagagctttctccttgcacttcacatggcagtggaagctgataatccatattttcgattgggttacaac

SEQ ID NO: 36413 - DNA, 329 bp, Glycine max
  Clone ID: LIB3138-103-Q1-N1-C1
ttttagagcaagtgttgatttgcagcgcactcatcgtattagaggaatgattaaaatggtggccacagttggtattcctgagaatacaggtatatcattggcctgtgctatgaatagttcttttagggggcgcgccagttctgatatttacaccatctgctctcaagactgtgaattgtggaatcctgcttgcacaaaagcaatgactatgtcatttaatccaaacccgtgttctgatgcatggagtttggaatttctgaagcgtactggatttcattgcgatatcatttgtgtcactggatggactgccaccccaatgcaagatgttc

SEQ ID NO: 36414 - DNA, 416 bp, Glycine max
  Clone ID: LIB3138-103-Q1-N1-C11
gtgttctgatgcatggagtttggaatttctgaagcgtactggatttcattgcgatatcatttgtgtcactggatggactgccaccccaatgcaggatgttcaggttacaattgattggtttatttcctctcaggaatgtgttcccaggacctattgtgttttaaatccacaaaatccttttgtgttaaataggtggatgggaaaattgactttcccccagggcacttcccgaagtgttaagagaatgcctctttctatatggggaggagctggtgcaaagaatgctattctcatgaatatgccaaatgctgttctttcaatgtggagatattttgttggagatctcgtctttgaagtttctaagatgacttctccctacattaaatgtacaggctctttcttcatagcatttggaa

SEQ ID NO: 36415 - DNA, 415 bp, Glycine max
  unsure at all n locations
  Clone ID: LIB3138-103-Q1-N1-C12
cctccactgttgtttctccattccagttcaatcagcagagagcattgcatagtaggaacaagaaagccttggagttcattgcaaaaggctggaatgctttgaaggaggttgatagagtcatcgattattccgatcccaagcattcgggcattgtttctcttctcaggacagctaaggagaatttcgagcttgctttggaagctgataataccaatacccatgctaggtattggttgtccagattgcatatgaaataccctgttccaagagctaataaagctgtaggggcagcattattggtagaagcagcaaaaatgggtgatcctgaggcacagtatgcattgggttgtcatctaagagtngaggtgagggtactctaacccttatattgtgatgacatcatttatgtacatac

SEQ ID NO: 36416 - DNA, 259 bp, Glycine max
  Clone ID: LIB3138-103-Q1-N1-C3
cttgacatcaagttacactccaactccattgttggaatctggtttgcaaaaagacagagggttaattgtggagtattttggaaggatgtcttacgttgctcataacgttaatcagcccccaaagaaagatttgttggagggaaatttttcctttgatattaaatctcgctctagattggaaaaagttttctctacaaaagcacaatttgttagtggaaaaacctctcaatatgatataattggggctgggtcacattct

SEQ ID NO: 36417 - DNA, 150 bp, Glycine max
  Clone ID: LIB3138-103-Q1-N1-C4
ctttgctctccaaaaatctcacacacacaggtatctagcaaatgggttctcaccaacaagaaccatggctattggggaatgggaaaccaaaggttttgaccaaagggaccaagcatggccggtctgcacacaaaatgttctccacctctt

SEQ ID NO: 36418 - DNA, 296 bp, Glycine max
  Clone ID: LIB3138-103-Q1-N1-C5
cccaagaagagtcaggttctcttttagctaacctgattgggaatctggctttccctttgctcttgattggaggattgttccttctctcgagacgatccggagggatgggaggtcctggtggccctggatttcctcttgcttttggtcaatccaaagccaagtttcaaatggaaccaaacaccggagtgacatttgatgatgttgctggggtggatgaagccaagcaggactttatggaggtggtggagtttttaaagaagcctgagaggtttactgctgttggggctcgcattcct

SEQ ID NO: 36419 - DNA, 331 bp, Glycine max
  unsure at all n locations
  Clone ID: LIB3138-103-Q1-N1-C6
attttaaaggcttttttggattttcgtgcttgggacatgagaacaatggaatctctctgccgagcatgtaaatatgcagtgagaacttctggaaggttcatggggctcacaattggtgccatgctggaagagattcagagtctttataggcagcaccaccaaccatgctttctttatctctccagtgaagttataaagatatttggttctgatccatcttgtgctgactacctgaaaaatttgattgaggcgctctttcagcacacaacacgccttntcacaaatattcaggaattcacagcccggcctgatatagcagatgattgttttt

SEQ ID NO: 36420 - DNA, 289 bp, Glycine max
  Clone ID: LIB3138-103-Q1-N1-C7
ggcaagttggcttacgtgtgggtggggaactcggagacgcagtgcccgggccaatgcgcatggcccttccaccagcccatttacggcccacagagcccaccattggtagcgcccaacaacgacgtgggcctggatggaatggtcatcaacgtggccaccctattggccgggaccgttacaaacccttgggggaatggctacttccaaagacccaaaagaggctctctcgaagccgctttcgcttgcacagggctgtacggcaagggcgcttaccctggctacgctgggg

SEQ ID NO: 36421 - DNA, 353 bp, Glycine max
  Clone ID: LIB3138-103-Q1-N1-C8
cgtgttcgaaccggaaacgggtaactggagtgagattccacctccgccagaattttattcggggttacccatgttctgtcagttagtgagtgtcgggtacgatctggttgtgttgggtgggttggacccgaattcgtgggaagcatcgaattcggtgtttgtttataatttcttgtcggcgaagtggcgccgcggggcggacatgccgggtgggcctcgcacattcttcgcgtgcgcgtcggattccgaggagacagtttttgttgccggcggacacgacaacgagaagaacgcgctgcggtcagcgttggcctatgatgttacctcggacctgtgggtcatgctttcggaca

SEQ ID NO: 36422 - DNA, 341 bp, Glycine max
  unsure at all n locations
  Clone ID: LIB3138-103-Q1-N1-C9
gacagagggcaattttagagcaagtgttgatttgcagcgcactcatcgtattagaggaatgattaaaatggtggccacagttggtattcctgagaatacaggtatatcattggcctgtgctatgaatagttcttttagggggcgcgccagttctgatatttacaccatctgctctcaagactgtgaattgtggaatcctgcttgcacaaaagcaatgactatgtcatttaatccaaacccgtgttctgatgcatggagtttggaatttctgaagcgtactggatttcattgcgatatcattngtgtcactggatggactgccaccccaatgcaggatgttc

SEQ ID NO: 36423 - DNA, 309 bp, Glycine max
  Clone ID: LIB3138-103-Q1-N1-D1
cactccctcctcttcacacattttcttagctctctccaacaatccctctcgttcacactttcagattgtgtgaagatgggggctggtggccgaactgctgttcctcctgccaacaggaagtcagaggctgaccctttgaagcgggtaccatttgaaaaacctcagtttagtctcagccagattaagaaggccattccacctcactgtttccagcgctctgttctccgctcattctcctatgttgtttatgacctcaccatagccttctgcctctattatgttgccacccattacttccaccttctttcc

SEQ ID NO: 36424 - DNA, 343 bp, Glycine max
  Clone ID: LIB3138-103-Q1-N1-D10
ctgagactgagtctgcccataccataatttacctcatagtgtcgacatggtttgcgaggaagagttgttgattgaaaaagtgtgctcgatctatgaacaaatctcaagcctcgagagtctcaaaccttgcaagaatgtcgacatgcttttcaccaaactagtcctgacatgcatacccccaagcccaatcgaagtcacaaagctaaacaaaaccgttcaagacattcgatcccaccttataaaactatgtggtgaagccgagggacatttagagagccactactcaaccatcctaggctcataccaaaaccctcttcaccaccttaatattttcccctattat

SEQ ID NO: 36425 - DNA, 437 bp, Glycine max
  Clone ID: LIB3138-103-Q1-N1-D11
gaagcatctaagtgagatacacagtagttaggtagcaagcataagtgtctaaccttagaaacatatctgctacatatcgtgtgcattttggaattgtgccactaaaattctattcatctatggctgcctcatcttatgctatgcaatcaatccttgcaaaccctatgatccgcatttccagcgggtctagggagaaccattttggtgttcctgcttatcacatgagaaggaatgttggcctgagagttaggtccatggctgaggaagagcaaccaagtcagcctgcgaccccagttacaccaccaccagcagaacccaaaccacaggcagtctctactccttcaccaaaggtgagcaccaagttttctgatgtgttggcgttcagtgggccagcacctgataggatcaatggaaggttggccatgattgggtttggg

SEQ ID NO: 36426 - DNA, 452 bp, Glycine max
  Clone ID: LIB3138-103-Q1-N1-D12
ccgtgacactgtcactcctttctctccctccggttccggtccgtacagtgtccgcgtctgcatcaacctcgtcctctgtccctctcactcactcctactcctgctcggccaggcagaggctctcctctcacagaacaagactcagtttccggaatcattcctctgcggttccaaaacttacggtgacatgcggtgcggctgtgacggagatcaacgagacccaattcaaagacacggtgctgaaggctaaccgtccggttcttgttgagttcgtcgctacttggtgcggtccttgccgtctcatctcttccgccatggaatccctcgctaaggaatatgaagacagattaacggttgtaaagattgatcatgatgccaacccgcagctaattgaagagtataaagtttatggactaccgacattaatactctttcagaacgggcaggaagtt

SEQ ID NO: 36427 - DNA, 285 bp, Glycine max
  Clone ID: LIB3138-103-Q1-N1-D4
atgggaagcttgacaggaataccaactgataaaattgctgacaaattttggttagtcttccaagcacttggtgacattgcctttgcctatccatactccattctccttcttgagatccaggacactctagagtctcctccaccagaaaatcaaaccatgaaaaaggcctccatggttgcaatcttcattacaacattcttctacctgtgctgtggatgctttggatatgcagcttttggaaatgatacaccaggaaacctcttgacagggtttggcttttttgag

SEQ ID NO: 36428 - DNA, 171 bp, Glycine max
  unsure at all n locations
  Clone ID: LIB3138-103-Q1-N1-D6
taaatgtaaataggtgttaatataaatgagagactgattantgatgcgttgcgagcatcacatataagcacgtatatatatatatacacgattttnttgcgaaattatgaggagtccacaacacaacaaagctatatctaaaacacattttgaaaagagaatatatttttt

SEQ ID NO: 36429 - DNA, 368 bp, Glycine max
  Clone ID: LIB3138-103-Q1-N1-D7
tcaggatttgaggtgctggagagaagggataaaagtgtatggtatgggggcgtggtgaccgagggctcgaaaggaggaaacttttggctacagaaagtagtttctttagtcgggtttctttcaaaaaatggtgcagagtctctgtttgatggcttctcatggttaccctcctggccttgtcttgcatccacaagtactgggcttgccctgcagtaccatgaagggctaccaaacattctttccttctccagtagcaaaagcagacctgatcagatatcagtctccttgtcttgatccaagtccatgtgaggagtcaacgaaatctcaaaatgaatggtttgattataagaagtttgtcaatgttgact

SEQ ID NO: 36430 - DNA, 401 bp, Glycine max
  Clone ID: LIB3138-103-Q1-N1-D8
caaacccgtgttctgatgcatggagtttggaatttctgaagcgtactggatttcattgcgatatcatttgtgtcactggatggactgccaccccaatgcaggatgttcaggttacaattgattggtttatttcctctcaggaatgtgttcccaggacctattgtgttttaaatccacaaaatccttttgtgttaaataggtggatgggaaaattgactttcccccagggcacttcccgaagtgttaagagaatgcctctttctatagggggaggagctggtgcaaagaatgctattctcatgaatatgccaaatgctgttctttcaatgtggagatattttgttggagatctcgtctttgaaagttctaagatgacttctccctacattaaatgtacagtc

SEQ ID NO: 36431 - DNA, 454 bp, Glycine max
  Clone ID: LIB3138-103-Q1-N1-D9
caaatggcaacagtgagaacaccattgaattttgattctagcaagcagagcttttgtcagttttctattgaccttctcggtggaggaatcttagtggacaaaactggagattggatcacacttatacaaaattctccaattagtaacttgttgagagttgctgcttggaagaaaggctgtttaatggtcaagattgtgatgtctgggaatgcagcagtcaaaaggagtgattgggcctcattggtacaagtgtttttaacaaacagcaacagtacagagcattttgatgcatgtaagtggacaaaatcagaaccacattcctgggaattgatcttcccaatagaggtatgtggtcctaataatggttttgaaatgtggagttctgagtgggcaaatcaaacttcatggcatttgagtttccttattgacaatcccaaacagtctacagtttttg

SEQ ID NO: 36432 - DNA, 340 bp, Glycine max
  Clone ID: LIB3138-103-Q1-N1-E1
ggggaaaatgagttacttgggtttgggtgttagtccaggtactgttccagtgtaccatggaacaaaacttaaagtgttggataggagggtgaggataacagagctggtgttaaggtgtgtgagccttggtcttggagttgttgcaattgttcttgtggtgactgattcccaagtcaaagagtttttctcctttcagaagaaagctaaatttacagacatgaaggctttagtgttcttggtagttgcgaacggactaactgttggctactccttaattcaagggttgcgctgtgttgtgagtattgttaggggaaatgtacttttcagcaagcccttaact

SEQ ID NO: 36433 - DNA, 232 bp, Glycine max
  Clone ID: LIB3138-103-Q1-N1-E10
gacagattatcaaactcaacaaacttccttcagtttttgggaagacatgcttttatcatgcaagaagagctaccatcttcatctgaagatcacattggtgatgaaagatatcattttatgtcacttcttttgaacttggcaaatacatttttgtatattgggaacacttacattattgtacctaccgcagacaactatactttgagccttggagcttcaacaagtgtgtgtg

SEQ ID NO: 36434 - DNA, 362 bp, Glycine max
  unsure at all n locations
  Clone ID: LIB3138-103-Q1-N1-E11
atcccaaacagtctacagtttttgatattctcttgggaatctctcaagattttgaaattgctggtaatactcttatgccagctttttctgttccacaggctactgccagatcttctgaaaatgcggaatcctctgcatgatctggaatttgtgttttctttcgcttgttcgtttgtttaattcaataaaggaaattaggcatgaccctcttgttgagtatgctctgcctatttgaaaatttccacacctcttttaattgtcgtaatgatgtgtgaagtgtgtgttattttaaaaaaaaaaatgcannaacctgtcacaaaacatatattggttaccaaacccatttttaatctcacccgttc

SEQ ID NO: 36435 - DNA, 411 bp, Glycine max
  Clone ID: LIB3138-103-Q1-N1-E12
ctataggcgtagcagtttccggtatgtacacgctcactccaactctctcttcattcaagcaccccacgcgcctcttctcacgcgctgctttcactgcaaagcttccacttcaatttcgagcttcttcaacgtccttcatcgacaccgaaaccaatccaagagaatccaacgtagtagtagttgaaaaggacgtaagcagtagaagcagcaattcgttggcttgtcccgtatgttacgattccttgacatggaacggtgatcctggtttctccgtagatactatcactggatctagttttcaatgcagcacctgtcagaaaacatatattggtaaccaaacgcatctcgatctcaccgctacaagtggagctaagagctatggtgaatcgatgccagcttccacagagcttt

SEQ ID NO: 36436 - DNA, 184 bp, Glycine max
  Clone ID: LIB3138-103-Q1-N1-E2
gggttggtgttttttttggaaggggtaggaattcaaagtctattgggaaataaatgaaactttttggaaaacaatttttttcggaactgacccaatttcggattaaaaagaaagttaccggggacaagatttctcgagccgtttttttaatcttaaaaacatcttttttttatacttttaatgt

SEQ ID NO: 36437 - DNA, 75 bp, Glycine max
  unsure at all n locations
  Clone ID: LIB3138-103-Q1-N1-E4
cagccactttgggaattgtattggacaactttctgttgccatctaatctagttgaagctagcttatcgtgtcnna

SEQ ID NO: 36438 - DNA, 349 bp, Glycine max
  Clone ID: LIB3138-103-Q1-N1-E5
tccatcactcactgcatacatatcacctccacaaggctcactcagcgacgcgccgttctcgacacaggctctaagacgcccgctgcaaacccctggcgccctcgaaacttccaataatcgcttccgccgcctcggcagtcgacccccctccctcttcccgtcgtatcacacaacacccaacatggccttcgccccgccccttccgcgcctcggcgcccctctacgcctgcccaagctcctcgcgagcctgcccaacctcggcgagctgtccgtcgtcaagccgtcaaattgccgcaacccgtctcgtgtcttcctgatcacgcgctcgaaaatccggtacactgcacgc

SEQ ID NO: 36439 - DNA, 323 bp, Glycine max
  Clone ID: LIB3138-103-Q1-N1-E7
attcgctaaacccaaaacactattttattatcttcttcgtctgttctttgcattgaagaaaatttctttgaattgaagaaaacttgaaatcgaattgtgaaacagaaaataaaccaaaggaaatttttactgattgaattgcagagattggaaaaatggcgttgagtatgactcaacagatcgggaccctagctggtgcgacggtgccggattcctcggccggagaatcgaccgcggcggtgagtgccgccgcggtgtggaagtcaccgacggcgagtctgaagtgcaaggtaatgaagacggatggctgcgcggaggggctt

SEQ ID NO: 36440 - DNA, 314 bp, Glycine max
  Clone ID: LIB3138-103-Q1-N1-E8
ggttcttccatttgactcttgttctgaacgacttttcaagagaatcaaaccatggcagtgaaagtatacggtccccactgtgcttccaccaagcgggtgctggtttgtctggttgagaaggaagtcgaatttgaggttgtccctgttgatgtcactaagggggagcagaaggatcctgagtacctcaaactacagccatttggagttgttcctgtcatcaaagatggagattataccttatatgaatctcgtgctataatgaggtattatgcagaaaaatacagatctcaaggggttgagttgctgggaaaaac

SEQ ID NO: 36441 - DNA, 292 bp, Glycine max
  Clone ID: LIB3138-103-Q1-N1-E9
gttctctccatctacataacacctcaaattctgtgattcgggtaatggccaccagtggaggcgatgaggggcagaacaaccctgccctcgacccggatttggatgctccggatgacccggatcacgagttcgctgagttcgggtcgggttgcttctggggtgctgagttggcctttcagcgagttgtgggtgtggtgaagactgaggttggttacactcagggtcacactccggatccgaattacaaactggtttgcaccggaaccactaaccacgttgaagtggttcgggt

SEQ ID NO: 36442 - DNA, 348 bp, Glycine max
  Clone ID: LIB3138-103-Q1-N1-F1
cgcccttgtgttttctttcgcttgttcgtttgtttaattcaataaaggaaattaggcatgaccctcttgttgagtatgctctgcctatttgaaaatttccacacctcttttaattgtcgtaatgatgtgtgaagtgtgtgttattttaaaaaaaaaaaaaaaaaaaaaaaaaaaaaaaaaaaaaaaaaaaaaaaaaaaaaaaaaaaaaaaaaaaaaaaaaaaaaaaaaaaaaaaaaaaaaaaaaaaaaaaaaaaaaaaaaaaaaaaaaaaagggggggccccccattttgggccttttccccccggaatttaattcgggcccggtccttgggggcttcccaattttcc

SEQ ID NO: 36443 - DNA, 210 bp, Glycine max
  Clone ID: LIB3138-103-Q1-N1-F10
ggcgggtcctggggcaaggaaacttcgccaaagtctaccacgcccgaaacctcaacaccaacgagagcgtcgccatcaaagtcatcaagaaagagaagctcaagaaagagcgactcgtgaagcagatcaagcgcgaggggtcggtgatgagactcgtccgccattcccacatcgttgaactcaaggaagtcatggccaccaagggaaaaa

SEQ ID NO: 36444 - DNA, 229 bp, Glycine max
  Clone ID: LIB3138-103-Q1-N1-F11
gtcgccactcgccaacaaaatttctctacatcttcggcttacatcatatttgtgatcactaatttgaaaaatgcctagttttgtggctgaaaagaagatatttgtagagccaaatatgtgttttaccaatttggcccaccatgatagaccaacttttacaaaaaacaatcattatgtgagggctgagggtcttgatgaagatgatgatgggactaggcccattctaact

SEQ ID NO: 36445 - DNA, 313 bp, Glycine max
  Clone ID: LIB3138-103-Q1-N1-F12
ctctttctctagttctgttatttctcagcgcgtaaagcatggcttcgttggcggagaaaaccactagtggtctcaagtacaaggtcaaggacctttaccaggccgacttcggccgactttagatcgagctggcctacgttgagatgcccgggctaatggcctgtctgaccgcattcggtccctaccaacccttacagggggcccgcattagcggcttcctacacatgaacatccagaccgccgttcttattgagacccttaccgaccttggcgccgaggtccgattgtgcttcttgaacatcttgttcaacca

SEQ ID NO: 36446 - DNA, 284 bp, Glycine max
  unsure at all n locations
  Clone ID: LIB3138-103-Q1-N1-F5
gttgttnaaaaaaaaaaaaaaaaaaaaaaaaaaaaaaaaaaaaaaaaaaaaaaaaaaaaaaanaaaanaaaaaaaaaaaaaaaaaaaaaaacaaaaaaaaaaaaaaaaaaaaaaaacaaaagnnaaaccaaaaaaaccaaaattncaaccccaaaaaaccataccaacccccccccaaaaccgccccccccatccacaaaaaaaaattggcccccccccccccaacaaacccccccccccccccaaaaaaaaaacccccgaacccccaccaaccccccaccccc

SEQ ID NO: 36447 - DNA, 318 bp, Glycine max
  Clone ID: LIB3138-103-Q1-N1-F7
tcattcttggtatctggggaggcaagggacaaggaaaatctttccaatgtgagcttgtctttgccaagatgggaatcaaccccatcatgatgagtgctggagagttggaaagtggaaatgcaggagagccagcaaaactgatcaggcagagataccgtgaagccgcagacttgatcaagaagggaaagatgtgtgctctcttcatcaacgatcttgatgcaagagctggtcgtcttggtggaaccacccaatacactgtcaacaaccagatggtgaatgccaccctcatgaacattgctgataaccccaccaatgtgc

SEQ ID NO: 36448 - DNA, 280 bp, Glycine max
  Clone ID: LIB3138-103-Q1-N1-F8
ctcgagccgaatcggctcgagcttacgttgctcataacgttaatcagccccaagagaaagatttgttggagggaaatttttcctttgatattaaatctcgctctagattggaaaaagtttcctctacaaaagcacaatttgttagtggaaaaaccttcaaatatgatataattggtgctggttcacattcttcagaagattttcctgaaaaggaagatcaagaaaaacccaaaaagattgatgccagattgagacaaagaatagatcctcaatacaatga

SEQ ID NO: 36449 - DNA, 323 bp, Glycine max
  Clone ID: LIB3138-103-Q1-N1-F9
tgataatattgatttactgttgagcattgatttgttgggtttacaaggagcaggtaaagcttttccaaacaaaattgtttttgatgataagcttgtgttggctaacacacaagaattctttgatggaaattttccagtggattcttggttaccaatttttgtgaattgtctttatcctgtaagtcaattaccttcagaagctgtcgttgtaaatgttacatgtggtagtgggacgtgtggtttacccaccactgcttggattagttctgcagttaacaatcgctcctcagatatcaacaaaaggattcgcacagcacttggga

SEQ ID NO: 36450 - DNA, 189 bp, Glycine max
  Clone ID: LIB3138-103-Q1-N1-G1
ctttccatcggattccagtgtcgattttctgcttctgcatctgcataacccgttaataattgctgcaaaacccttatttcccaaatcgttgattaaaggttccaagcgtttggccgcgtttggacccaacccgatcgattcccacgaaacggggtttccgaataaaagaattatgggagggttcctttt

SEQ ID NO: 36451 - DNA, 342 bp, Glycine max
  Clone ID: LIB3138-103-Q1-N1-G10
aaaaaaaaaaataaaaaaaaaaaaaaaaaaaaaaaaaaaaaagaaaaaaaaaaaaaaaaaaaaaaaaaaaaaagggaaaaaaaaaaaaaaaaaaaaaaaaaaaccagaaaaaaaaataaggaaccggacaaaaaagaagaacaaaaaaatacatataaaaaaaaaaattaaaacggggggggggcccccttttttgctgttccccccccgaaaattattatgggcctcgatttttggggggcaaactttttttttttaaaggggttaataaacgggggggcataatgagggaactaactttcttttgtggaaatgtttttcctgcccaaattccaacaaaaa

SEQ ID NO: 36452 - DNA, 194 bp, Glycine max
  Clone ID: LIB3138-103-Q1-N1-G2
ttggattttgacttgcctcttttcttcaaagctggccctggtggttatttcatcaaaatccggtgtatgggtttcaacagttctcttggtggctggttctcctccattgcttctttacagggatagatcccaaacaacttctatgatgaaacccttgccagggtattcccccgcccgtgtagttgccctgtctg

SEQ ID NO: 36453 - DNA, 306 bp, Glycine max
  unsure at all n locations
  Clone ID: LIB3138-103-Q1-N1-G5
agcgcactcatcgtattagaggaatgattaaaatggtggccacagttggtattcctgagaatacaggtatatcattggcctgtgctatgaatagttcttttagggggcgcgccagttctgatatttacaccatctgctctcaagactgtgaattgtggaatcctgcttgcacaaaagcaatgactatgtcatttaatccaaacccgtgttctgatgcatggagtttggaatttctgaagcgtactggatttcattgcgatatcanttgtgtcactggatggactgccaccccaatgcaggatgttc

SEQ ID NO: 36454 - DNA, 358 bp, Glycine max
  Clone ID: LIB3138-103-Q1-N1-G6
cggctcgagctcgagccgttgatttactgttgagcattgatttgttgggtttacaaggagcaggtaaagcttttccaaacaaaattgtttttgatgataagcttgtgttggctaacacacaagaattctttgatggaaattttccagtggattcttggttaccaatttttgtgaattgtctttatcctgtaagtcaattaccttcagaagctgtcgttgtaaatgttacatgtggtagtggacggtgggtttacccaccactgcttggatagttctgagttacaatcgctctcagatataacaaaggatccacagacttggaaggtagaaaatgtttctactgagtgatctttcagac

SEQ ID NO: 36455 - DNA, 352 bp, Glycine max
  Clone ID: LIB3138-103-Q1-N1-G7
caaagatacaggacaaagaggggattccaccagaccagcagaggcttatctttgctgggaagcagctggaagatggtcgtactcttgctgattataatatccagaaggagtccactctgcatttggtgttgaggcttcgtggaggtatgcagatatttgtgaagactctgacagggaagaccattaccttggaggtggaaagctctgatactattgacaatgtgaaagctaagattcaggacaaggaaggtatccctccagatcagcagaggctcatttttgctgggaagcaattggaagatggtcgtaccttggcagattacaatattcagaaggaatccactttgcatct

SEQ ID NO: 36456 - DNA, 406 bp, Glycine max
  unsure at all n locations
  Clone ID: LIB3138-103-Q1-N1-G8
gctgagcatacacaatcctagtccttaaaatgcttggagctgtagcagcttccacatcgctatacttttcaccatccacaaactccaccagaattgttgttcttaaaagaatctcaaattcaacacttccattcagcaatgaccactctttctcactcttatcagccacccctatgcatttctcttcacacaagagcagtagaaggcaaccccatttccttgcacaagctgcttcatcttctggaaatgcagttggcactttcttggaaaatgaacaatgcagactggggaataaactttaagggcagtgctgcatttgtgaagattaatatataccctngaatgttagaatgatgtttctgtgtagaaaaagnnntttttctttcttttttcttttttaatttaa

SEQ ID NO: 36457 - DNA, 346 bp, Glycine max
  Clone ID: LIB3138-103-Q1-N1-G9
aaaaaaaaaaaataaaaaaaaataaaaaaaaaaataaaagaaggaaaaaaaaaaaaaaaaaaaaaaaaaaaaaaaaaaaaaaaaaaaaaaaaaaaaaaaaaaaaaaaaaaaaaaaaaaaaaaaaaaaaaaaatggggggggcccccccttatggggtttgtgcccccggaatttaattccggccgggtccttgggggggtacaatttttcctttaagggggttattttaaaactgggggaaataagggacaaaattttttcttggggaaaattgttttcccttaaaaattccaaaaaaaatacaacccggaaatttaaaggttaaaacctgggggccttaatgggg

SEQ ID NO: 36458 - DNA, 123 bp, Glycine max
  Clone ID: LIB3138-103-Q1-N1-H1
gtgtcattatgtgctcagcggatggaaagatcttcagaccaaagatgaaagtgaaagttaatccaaagcttttgcagctatcaagaagtggacttcaaaatgtggagggaaaatggattcatg

SEQ ID NO: 36459 - DNA, 336 bp, Glycine max
  Clone ID: LIB3138-103-Q1-N1-H10
gtctgaagcatggcttcatgcatggcaccttcgtcgcggatgctgggccaacctgaagacctctatagctctcagagaagcacatacgatgtgtatactgtgcgttataagccctccaaatgcctccacatagagcccaaatccaggacttggcgtgccctccgcgtcgctttggctgcacacgggcaagtgcctctgactgtgcacgacacggaggaggacgacggttatgatgggtccaacgacagcttggccgacaccaggaccaacaccaccaccgagcctaagaaaggcacggtcgcgttgcctcttaagagggacaggacgagatctaag

SEQ ID NO: 36460 - DNA, 354 bp, Glycine max
  Clone ID: LIB3138-103-Q1-N1-H11
gtttttaacaaacagcaacagtacagagcattttgatgcatgtaagtggacaaaatcagaaccacattcctgggaattgatcttcccaatagaggtatgtggtcctaataatggttttgaaatgtggagttctgagtgggcaaatcaaacttcatggcatttgagtttccttattgacaatcccaaacagtctacagtttttgatattctcttgggaatctctcaagattttgaaattgctggtaatactcttatgccagctttttctgttccacaggctactgccagatcttctgaaaatgcggaatcctctgcatgatctggaatttgtgttttctttcgcttgggtcgttg

SEQ ID NO: 36461 - DNA, 321 bp, Glycine max
  Clone ID: LIB3138-103-Q1-N1-H12
tgatgatgaggatgaggaagagaagaaggatgaggagggtaaggtggaggatgttgacgaagagaaggagaaattgggtagctaatgaactcagaatgcttcttgatcagatccttcaagcgacgctcctcaaggtactcaagctgatcttccttgaggtagagagtgatcttagtacccctgccaagaacctcaccagtgttatccctggtgacagtgaaagaacctccagctcgatgctcacccagagttggtcattcatattattccagacaagacttacaatacacttgccattgttgacagtggtattggcatgac

SEQ ID NO: 36462 - DNA, 174 bp, Glycine max
  Clone ID: LIB3138-103-Q1-N1-H3
tggagcctaacttaggtggtctcactgttgagcaggctatccaaaacaagaagttgttcatcttagatcaccatgactatctcattccatatttgaggaaaataaatgcaaataccacaaagacttatgctacaagaaccatatttttctttgaaaatgatggaactttgacgc

SEQ ID NO: 36463 - DNA, 408 bp, Glycine max
  Clone ID: LIB3138-103-Q1-N1-H4
gctctctctcgtattgaatggctgcaaaaagctgatgtgcctaccatagcacagattgaagagttccattcgatgcagaggatgatgaatgctcctgattcaaatgataatattgatttactgttgagcattgatttgttgggtttacaaggagcaggtaaagcttttccaaacaaaattgtttttgatgataagcttgtgttggctaacacacaagaattctttgatggaaattttccagtggattcttggttaccaatttttgtgaattgtctttatcctgtaagtcaattaccttcagaagctgtcgttgtaaatgttacatgtggtagtggacgctgtggttacccaccactgcttggattagttctgcagttaacaatcgcttctcagatatcaacaaaaaga

SEQ ID NO: 36464 - DNA, 307 bp, Glycine max
  Clone ID: LIB3138-103-Q1-N1-H5
ctcgagccgctaagctattgcttgcaatcccacccatattgaagttcgctgaaatgctttcccttaatgttaagtctgtgaattacaccaggggaagtttcattttccccagtgctcagccatatccccatcgcaacttttctgaggaagttgctattcttgatggctactttggcaaacttggtgcaagaagcaatgcttatattttgggtggccaagacaaagcacagaactggcatgtctactctgcttctgcagattctgtaactcaatgtgacaatgtttacactcttgagatgtgcatgac

SEQ ID NO: 36465 - DNA, 303 bp, Glycine max
  Clone ID: LIB3138-103-Q1-N1-H7
atgtgctcagcggatggaaagatctttagagcctgggtgttatgcaaaggctctccacagcctttgcgactatcaagaagtggacttcaaaatgtggagggaaaatggattcatgatttctttctgacactggcaacctgcaacaccattgtgcctcttgttgttgacacacctgaccctgatgtcaagctgatagattaccaaggagaatcaccagatgaacaagcactggcttatgctgctgctgcctatggttttatgctcatagaacgaacctcttgccatttagtcattgatattcat

SEQ ID NO: 36466 - DNA, 398 bp, Glycine max
  unsure at all n locations
  Clone ID: LIB3138-103-Q1-N1-H8
tgattggtttatttcctctcaggaatgtgttcccaggacctattgtgttttaaatccacaaaatccttttgtgttaaataggtggatgggaaaattgactttcccccagggcacttcccgaagtgttaagagaatgcctctttctatagggggaggagctggtgcaaagaatgctattctcatgaatatgccaaatgctgttctttcaatgtggagatattttgttggagatctcgtctttgaagtttctaagatgacttctccctacattaaatgtacagtctctttcttcatagcatttggaaatttggctgatgataccatcaattttgaggcttttccccacaagctggtgcagtttggagagattcangaaaaagttgtattgaaattttcac

SEQ ID NO: 36467 - DNA, 450 bp, Glycine max
  Clone ID: LIB3138-103-Q1-N1-H9
ctctcactgattatgagcatctcgctgatttcatcccaaatcttgtatggagtgggagaattccttgtccttacccaggaaggatatggttagaacaaaggggattccaaagggcaatgtattggcatatagaagcccgcgttgtgttggatcttcaagaagtcgtcaattcagcatgggatcgagaacttcacttttccatggttgatggggactttaagaagtttgatggcaaatggtctgtaaaatctggaacaaggtcatcaactgctattttatcttatgaagttaatgtgataccaagattcaatttcccagctatttttttggaaaggattatcagatctgatctttctgtgaaccttcgagctctggcttacagagctgaaaagaactttgtgggatatcagaaaacttcagtgtcagaaaaccacttgcacataacttatg

SEQ ID NO: 36468 - DNA, 325 bp, Glycine max
  Clone ID: LIB3138-104-Q1-N1-A1
attaaataacgtgtagcgagtttttctgttctcttgcaggatgctaaaggcgatgatgtggatcttgctacttacaagggaaaagtcttgctgattgttaatgttgcttccaaatgtggcatgaccaactcaaattatgtggagttgaatcaactattcgagaaatacaaagacaaagggctggagattctggcatttccatgtaatcaatttggtgaggaggaacccggaagcaatgatcaaattcaggagtttgtctgcactcgctttaaatctgaatttcccatctttgataagatatgtgacacgcaccaattacaagttt

SEQ ID NO: 36469 - DNA, 340 bp, Glycine max
  Clone ID: LIB3138-104-Q1-N1-A10
ctcgagccgaatcggctcgagtgcttggattagttctgcagttaacaatcgctcctcagatatcaacaaaaggattcgcacagcacttgggaaaggtaagaaaattgtttttcttactagagttgatccttttccagtagctttactggctgttctttttggcgttaagaatgaaattctgagttctaacgccactaatcctatgctgacgcgacttcttgagaactgtaagagtctcaaatatctggttgatgagtgtccttttgcatttgtgaactagtatgtagtattttattcacttaaataaagcgcattactatgtgcaatgagtgtgtttaaa

SEQ ID NO: 36470 - DNA, 378 bp, Glycine max
  unsure at all n locations
  Clone ID: LIB3138-104-Q1-N1-A11
gttttggtttggtgactagccttaagatttaattaagggaaattgttaatggcgggcgcaaaatgtttaaaactttatatttttactctctctatggggaatgttacttttagtttaagaacacccaccaacttaatcatattagttgcatcttctcttgactcttagcaacatgttttttctaaatactcaaaatagccaatgaatggagaaggtgcaacactctacttcatgcaaattatatatactcttgattcccacccatctctcccacccttcattttttttttcaaacaaagttaattaaagaagtaacaatggatccttcctttccttcaaaatcctttctgcatgttgntcttatcttttgctttcttg

SEQ ID NO: 36471 - DNA, 259 bp, Glycine max
  Clone ID: LIB3138-104-Q1-N1-A12
gcgcgccaccggcgatctacgtcggaaaacgttcggcgttcaagaagcggtgccacgaacaccgggaacactccgacgatgtctgcggcaacagcaagtgccactgcgttgagcgaaggaaaaatagggtgaagagcactgtgagagtgccggcgattagttcaaaagtcgccgatattccaccggacgagtactccttgaggaagtacggtcagaaaccgatcaaaggttgcccatacccaaggggttactacaagtg

SEQ ID NO: 36472 - DNA, 68 bp, Glycine max
  Clone ID: LIB3138-104-Q1-N1-A4
atttgaccattaaattttataaatacacttgaaataaccataagcatttcttacaagcatggtgagaa

SEQ ID NO: 36473 - DNA, 433 bp, Glycine max
  Clone ID: LIB3138-104-Q1-N1-A5
ctcgagccgaatcggctcgagcgcttggattagttctggaggggacaatcgctcctcagatatcaacaaaaggattcgcacagcacttgggaaaggtaagaaaattgattttcttactagagttgatccttttccagtagcttgactggctgactttactgggctttaaactgaacaagaaaaagggtgacattgctgtatggaagaagtctccagatagcaattgttataataagctggctagagatacctatccacccaagtgtgatgacagccttgaaccagattcagcatggtatactccgcttcgctcctgtatagtgcgcccagatcctaagtttaagaaatccggtctgtcgtccatttctaagtggcctgagcgattgcacgttacaccagaaaggatttcaatgcttcatcatggaagtgatag

SEQ ID NO: 36474 - DNA, 207 bp, Glycine max
  Clone ID: LIB3138-104-Q1-N1-A7
ttgcattgagttgcgctgttccttcctcctgttgttcgtatttatttcatttacgccgccgtcgtctccgccgcagagagcgatgtcttccgtcgaaacggagatggagccactcacgtgggggccgcaaccgcataattcgctctaagcctaagctcctattgcacatttcttctcttttgctccgcgcccttccggggcgcttca

SEQ ID NO: 36475 - DNA, 255 bp, Glycine max
  Clone ID: LIB3138-104-Q1-N1-A8
agcaagcagagcttttgtcagttttctattgaccttctcggtggaggaatcttagtggacaaaactggagattggatcacacttatacaaaaattctccaattagtaacttattgagagttgctgcttggaagaaaggctgtttaatggtcaagattgtgatgtctgggaatgcagcagtcaaaaggagtgattgggcctcattggtacaagtgtttttaacaaacagcaacagtacagaacattttgatgcatg

SEQ ID NO: 36476 - DNA, 331 bp, Glycine max
  Clone ID: LIB3138-104-Q1-N1-A9
aaaaaatggaggaagggggttggtaacatggcacatttgtgctttgcattggaagataataagagtattctcttatccctggtatttgtccttcatgtacagtgatgatattgctaaaagaactgataatgtggtcatttgctgtgttaatatgttgtgaaaatctaaaatgagataaaactttcatttcctagtatctatagtcattacggagtggggtcagaaaattttcctttctgtgaatttttactgcccaaattgctaatgcttccaatatttttttctggctttgttgatattacactctttatgctcaatagcagcatttcat

SEQ ID NO: 36477 - DNA, 388 bp, Glycine max
  Clone ID: LIB3138-104-Q1-N1-B1
cgtaaatgtgttacgagaattgtatttgcacagtccagaggaagctcgccaattgagaaggaaagctctctctcgtattgaatggctgcaaaaagctgatgtgcctaccatagcacagattgaagagttccattcgatgcagaggatgatgaatgctcctgattcaaatgataatattgatttactgttgagcattgatttgttgggtttacaaggagcaggtaaagcttttccaaacaaaattgtttttgatgataagcttgtgttggctaacacacaagaattctttgatggaaattttccagtggattcttggttaccaatttttgtgaattgtctttatcctgtaagtcaattaccttcagaagctgtcgttgtaaatgttaca

SEQ ID NO: 36478 - DNA, 357 bp, Glycine max
  Clone ID: LIB3138-104-Q1-N1-B10
caaggccatcatcatggcagctgcttccccaatggcaagccaactcaagtccaccttcactaggactcttgtagctcccaagggcctctctgcctcttcaccacttcacctcgtgccttctagaaggcaatttagcttcactgttaaggccatccaatcagagaagccaacctatcaagtgattcagccaatcaacggtgacccattcattggaagcctggaaaccccagttacatccagccctttgatcgcatggtacttgtccaacctgcccgcatacagaaccgcagtgagcccactactaagagggatcgaggtgggcctggcccacggataccttctggtgggcccattcgt

SEQ ID NO: 36479 - DNA, 359 bp, Glycine max
  Clone ID: LIB3138-104-Q1-N1-B11
caatctcactctttcttccggccatcgctgcctcctcgtcggttccaacggcgccggaaagaccactctcctcaagatattaggagggaaacacttggtggagcctgacatggttcgcgtgctcggaagatcagcttttcacgacaccactctaatatcttctggtgatctctgttaccttggtggcgagtggaggcgagatgttgcttttgcgggttttgaggttccaatacaaatggacatatctgctcaaaaaatgatatttggtgtgcctgggattgatcctcaaagaagagccgagctaatcaaggtattagatatcgatctttcctggagattgcataaagtatctgatggtc

SEQ ID NO: 36480 - DNA, 453 bp, Glycine max
  Clone ID: LIB3138-104-Q1-N1-B12
tcagctttgaacgccgaagaaggttcatccaatccccgaagcccttcaccgcattgcaaccatgtcgaggagaaaggtcagagagccaaaggaagaaaacgtgactctgggcccagctgttagagatggtgaacatgtctttggcgtcgctcgcatctttgcctccttcaatgataccttcattcatgtcactgatttgtctgggagggaaacgcttgtccgcatcactggtggaatgaaggttaaggctgacagagatgaatcgtctccttatgctgctatgcttgcagctcaggatgttgctgccagatgcaaggaacttggcataactgctcttcatatcaagctccgtgccactggtggaaacaagacaaagacacctggccctggtgctcaatcagctcttcgtgcccttgctcgttcaggaatgaaaaatggtcgtatagaggatgt

SEQ ID NO: 36481 - DNA, 139 bp, Glycine max
  Clone ID: LIB3138-104-Q1-N1-B3
aatcagaaccacattcctggggggtagatctttaaaataaaaggaagtaaaactaaaaaatgggattgaaaagtagaaattttgattgggcaaatcaaacttaattgcatttgagtttccttatttgcggggccccccc

SEQ ID NO: 36482 - DNA, 328 bp, Glycine max
  Clone ID: LIB3138-104-Q1-N1-B4
aaacaatatgtgtgcatatgggctcaatcctggtatttcaggttctcgtcttttgggcaccattcctcagtccatttcacagcaaactgtttggaatcaaatggcaacagtgagaacaccattgaattttgattctagcaagcagagcttttgtcagttttctattgaccttctcggtgggaggaatcttagtggataaaactggagattggatcacacttatacaaaattctccaattagtaacttattgagagttgctgcttggaagaaaggctgtttaatggtcaagattgtgatgtctggggatgcagcagtcaaaaggagtga

SEQ ID NO: 36483 - DNA, 369 bp, Glycine max
  unsure at all n locations
  Clone ID: LIB3138-104-Q1-N1-B5
taggatttaaacctacaaactaacgacctaccttacacgtcgacaacatggctggcaccggcgctgagttcccttgcaccctcaccatcaacacacctttccctacccaaccgcctagccgaaacaactctcaaactcgctcgctgttgacgaagagctatcgcctcttgttcgtcgctctttctcccttgtcaatgctgccggngaagatgccggaagcgatggggagaagacggtcttgaggaccgagtacaaagccacgacaaaccgcatgctgcgcgtcgctgtgaacggtttcttcgagtctctcaatgtcgtggtccaagtcatggaagagtntgacgtggatgtgctgcacgagaacggact

SEQ ID NO: 36484 - DNA, 229 bp, Glycine max
  Clone ID: LIB3138-104-Q1-N1-B6
ggttggtgttaggtcttggtgtagtgtagctagggagggatatatatctgagtaagatggcatcagagcttgaattgcccccaggcttcagattccatccaacggacgaggagctggtgttgcactatctctgccgcaaatgcgcgtcgcagccaatcgccgttcccatcatcgccgaaatcgacctctacaaatacgacccctgggacttacccggattggctactta

SEQ ID NO: 36485 - DNA, 259 bp, Glycine max
  Clone ID: LIB3138-104-Q1-N1-B7
aaacatgcaggtgcatttgttcggccggttagtgtggcctttcaggtggtgaatgggttccatttctacgagaatggagtttacactagtgacatttgcggcagcacttcccaggggagttctataaatgattacctggcttttgatagacaaatcaagtgcctaataaaattttgaaaacaaaatggttggctacaagtttatgctttgcgacaatttatctgaaagaggaacactagtgatatactgtttaacacac

SEQ ID NO: 36486 - DNA, 253 bp, Glycine max
  Clone ID: LIB3138-104-Q1-N1-B8
gttgcagccatggccacccacgcggctctagcttctacaaggatccccactaacaccaagttcccatccaaggcttcacactctttcccaacccaatgcgcctcaaagagacttgaggtgacagaattctctgggctaagatccacttcatgtgtgacatatgctaacgatgctagagaatcttccttttttgatcttgtagcttcccaactcactcccaagaccaatggatcatcaactcctgtgaggggag

SEQ ID NO: 36487 - DNA, 339 bp, Glycine max
  Clone ID: LIB3138-104-Q1-N1-B9
gatgcatgtaagtggacaaaatcagaaccacattcctgggaattgatcttcccaatagaggtatgtggtcctaataatggttttgaaatgtggagttctgagtgggcaaatcaaacttcatggcatttgagtttccttattgacaatcccaaacagtctacagtttttgatattctcttgggaatctctcaagattttgaaattgctggtaatactcttatgccaactttttctgttccacaagctactgccagatcttctgaaaatgcggaatcctctgcatgatctggaatttgtgttttctttcgcttgggtcgttgttaaatcaataaaagaaat

SEQ ID NO: 36488 - DNA, 213 bp, Glycine max
  Clone ID: LIB3138-104-Q1-N1-C1
attgtttgttgttgtaactcgttcttcttcttttgttgttctgtgtttgtgtttgtttttttctctcacctgaaaatgtcttgctgcggtggtaactgtggttgcggaagctcctgcaagtgcggcaacggctgcggaggctgcaagatgtacccagacttgagctacactgagtcaaccaccaccgagaccttggtcatgggagtggcacct

SEQ ID NO: 36489 - DNA, 376 bp, Glycine max
  Clone ID: LIB3138-104-Q1-N1-C10
cacaaagagactgaaagaacagcaatggaagctgcattatgcagtgcacttgctctttcacccaatcaagtattcaatgcagcaaatcctggagataaaaatgttcctttgaaatatagcaaagatcggagtgttgtaatgacagtggcagccactggaatattagggaaaggtggtgggttgttggagaggccaaccatagagacaacatcacctggtcgggaatctgaatttgacttaaggaaatcgcggaaaacatccccaccttaccgagttttgctgcacaatgacaacttcaacaagcgagaatatgttgtgcaagtgttgatgaaggtgatacctggaatgacaattgatagtgcggttaacatcatgc

SEQ ID NO: 36490 - DNA, 378 bp, Glycine max
  Clone ID: LIB3138-104-Q1-N1-C11
caataagcccaaaaccgagtacgtccaaacctttggtcgtaagaagaacgccgttgctgtagcaacctgcaagactggtaacggtctcatcagagtcaacggcctcccccttgacgtccttgagccctccactttgagaattaaggtatatgaacccattctccttttgggtgccaagactttcagcggtgtcgatattagaatcagagttagaggaggtggttacactggtcaagtctatgccatcagacaagcagttgccaaggctatagtcgcttaccaccagaaattcgtcgatgagaactcaaagagagaacttaaagaaagattactacaatacgacagaaccctcttggtcgctgatccaagaagatgtga

SEQ ID NO: 36491 - DNA, 354 bp, Glycine max
  Clone ID: LIB3138-104-Q1-N1-C2
gattgaacttgtgtcttcagtggtgatcctacctatcatagcaggggtgtcacttgtgcacctagtactatttaataccaaaaaattgttaactctaaatgctacttctgattatttccaagtgtttgaccattaggcaaaaggaagagtaaaaaaaaacagatggtggggttgacttcccttggtctggggttgtgtttttgggcgtgtatagtgtattttgtatgtccgataatatatcaacttttagtttaattgggaagaggaaggatcttagaccatgttttctggctcaggaagaaagaaacaagagccgaaagacttgtccgcttgatgacaggagatcaaaagaac

SEQ ID NO: 36492 - DNA, 459 bp, Glycine max
  Clone ID: LIB3138-104-Q1-N1-C3
agatatcaacaattttcttacctttcccaagtgctgtgcgaatccttttgttgatatctgaggagcgattgttaactgcagaactaatccaagcagtggtgggtaaaccaccacgtccactaccacatgtaacatttacaacgacagcttctgaaggtaattgacttacaggataaagacaattcacaaaaattggtaaccaagaatccactggaaaaggtaagaaaattgtttttcttactagagttgatccttttccagtagctttactggctgttctttttggcgttaagaatgaaattctgagttctaacgccactaatcctatgctgacgcgacttcttgagaactgtaagagtctcaaatatctggttgatgagtgtccttttgcatttgtgaactagtatgtagtattttattcacttaaataaagcgcattactatgtgcaatgagtgtgt

SEQ ID NO: 36493 - DNA, 178 bp, Glycine max
  Clone ID: LIB3138-104-Q1-N1-C7
tcttcactcaaattcgaagcgaaggagagaaaagaagaagcgaagtgtgtttgggaacaatggcagagcaaaagaaccggtggagctgggacgtcgccggctttgacccgtggaagtcgtctacgccttcgcagtcgccggcggcggcggaacacggcgatcggaaacctaatgcgcc

SEQ ID NO: 36494 - DNA, 414 bp, Glycine max
  Clone ID: LIB3138-104-Q1-N1-C8
aacgagttcaaggacatggtggttgagctcatgaccgttgctggttacttcaacattggtgacttcataccctttttggccaagttggacttgcaaggcatagagcgtggcatgaagaagttgcacaagaagtttgatgcgttgttaacgagcatgattgaggagcatgttgcttctagtcacaagagaaagggcaagcccgatttcttagacatggtaatggctcatcatagtgagaactccgatggggaggaactatcgctcaccaacatcaaggcactactcttgaacctattcaccgcaagcaccgatacatcttcaagtataatagagtggtccttagccgagatgttgaagaagcccagcataatgaagaaggctcatgaagaaatggaccaagtcataaggagggat

SEQ ID NO: 36495 - DNA, 454 bp, Glycine max
  Clone ID: LIB3138-104-Q1-N1-C9
cacatgtcgaaatcagggcattagggttttccttctcccctgcaactgcaattcccccttttggaagatggttccacagtcagtgataacgcaagtctccgattcaagtggcgtgaatgcgatatcaaacgtttcttctggccacggattctacgattggttgttcgaatgtcacgggttctggcacaatgccactctcaacatcccctcgttcctcttcgtcttctacttggcacttcaagccaggcacagcttactcaaactctcccttgcgcgctcctatataatcatttcatataacctttgcctctggctcattactctgctcaatctcgcttggtgctttctccaggcatgggagtgcacgtctgggagaaagttgacatggaacctgttatccttgttcactacttccggaatgcttgttttggaagtgagcttgctggctttttta

SEQ ID NO: 36496 - DNA, 423 bp, Glycine max
  Clone ID: LIB3138-104-Q1-N1-D10
gaagaatcagagaatggcaactatgactggtgtgagcctttcatgccccagggttttcttcaacgcatcagcctcaccgcaaaacgcgcatgctgtaaagttctcacttccacccagccaagcagtgcgaccgggtagtatcaagttgggtcgcgtgatgaggatccgacccgttcgcgctgcgcctgagcgcatatcggagaaggtggaggagagcataaagaacgcgcaggaggcgtgcgccggcgatccgacgagcggcgagtgcgtggcggcgtgggacgaggtggaggagctgagcgcggcggcgagccacgccagggacaagcaaaaggaaaaggactccgacccgctcgagaattactgcaaggacaacccggagaccattgagtgcaaaactttcgaagactgagcatgcatgct

SEQ ID NO: 36497 - DNA, 434 bp, Glycine max
  Clone ID: LIB3138-104-Q1-N1-D12
ggcaaagttttgattacccttctaacacgatgttggcaaggatgaagattggttgggaccttaaaaggaagataaatagaagactcatagcatggaagagtgatgatgatccaaccccaggagacttatcatggattattgtgcttcatccctatcctgaaatttacatgatgagtggaacaaagaagcaccacagacttggaccgtggaacggcttgcgtttcagcggcatgcccgagatgaagcctaatcctgttttcaattacaagtttgtctccaacaaggacgaggttacctacatgtggacattgcagactagcttgatcacaaaagtggttctcaaccaaacctcgcaacagcgtcctcgctacgtgtggtccgaggccactagatcgtggaacttctactcaaccatgccaggagagtactgtgac

SEQ ID NO: 36498 - DNA, 488 bp, Glycine max
  Clone ID: LIB3138-104-Q1-N1-D2
gcgctgcttcactattctccctatggagtttaatcttgtggtccgtcaaaagtttttaaattttgtgaggttcattatgaagaaaagggacaaacttagttgtcaagttggaatcaacccatactccatggaatggactggtttggccaatagattactgagtaagggcaatgatattctgtgttgcgattatgctagttttggatggtttgattaccaagcaagttatgagcaagatggcagaaatgataaacagtctttgtggtggtgatgaaaaattgatgcgtgaaaggacgcacctgctgttggcttgttgttcaaggatggcaatttgtaagaaagatgtttggagagttgaatgtggaatcccttctggatttccgctcacagttatttgcaatagcatttttaatgagatgctcattagatatagctatgaaaaattactgcgccaggctaaagctccaagtatgtttttacaatccttc

SEQ ID NO: 36499 - DNA, 351 bp, Glycine max
  Clone ID: LIB3138-104-Q1-N1-D5
caaataccccacacaacaaacccccaacaaacccccaacaaacagacaaaatgagcgactacgcacccaccaaggacggacacgagggaaagacgaaggatggaaagcccgatggccgtgtcagtgagctcaagggcggcgctaagcctgtgaacgacgatggcaaggctgaattcggcggtggacaagaccccaaggaggtcggagcgaagggcggaaagtcgtcttagacttccctttctcagcaggacattattcgatcaatgatacattgcgctaccacgtttaagctcgtcgctcggaagtagttgtgcaaatatcttgcgatcaatcaatcctattatacccgac

SEQ ID NO: 36500 - DNA, 397 bp, Glycine max
  Clone ID: LIB3138-104-Q1-N1-D7
ccgaagttgatttttactactggtgggaagcagcttaataggaatctgagtatatatcaggcaattcaaagacagcttgtgctagatgaagatgatgatgagagatttgctggcagtgactatgtatctggtgatggaagcagtctgtggggtgatatttacaccatcacttatcaaagggcagaaaaaccagccagataaggcgtctactggaggatcaagttcaaatacttcaaaatctgccaaatctgggtctgccttaaattcaagctcagaagctaaattgcatcagacatctgttctagacagtatattgcagggagaattgccatgtgatctagagaaatctaatcccacctacaatattttggcactcctgcgtgtgctggagggtttc

SEQ ID NO: 36501 - DNA, 416 bp, Glycine max
  Clone ID: LIB3138-104-Q1-N1-D8
ctcgagccgattcggctcgaggagaaagagaagtgtgtagttggtgaagtttttgagaagaatatggaacgaagtggcggaatggtaacggggtcgcatgaaaggaacgaacttgttagagttagacacggttctgacagtggggtcggtgtcttttggctttctttcaacactttttttgcttcatgggacttttgatgaagactatgttttgtgttttttctcaattggctctcagaattttggtctttcactgtgtgtgattgacttcaaagtttgaatttttatgcttgcaatggaaatgggtcatgcaaagtttattttttaaaaatattatgtaggggggggcttgtttttgttttttccttgctttaagggttggggtggggtaatttgtgcattctttttgtgggttg

SEQ ID NO: 36502 - DNA, 399 bp, Glycine max
  Clone ID: LIB3138-104-Q1-N1-D9
acaccattgaattttgattctagcaagcagagcttttgtcagttttctattgaccttctcggtggaggaatcttagtggacaaaactggagattggatcacacttatacaaaattctccaattagtaaacttattgagagttgctgcttggaagaaaggctgtttaatggtcaagattgtgatgtctgggaatgcagcagtcaaaaggagtgattgggcctcattggtacaagtgtttttaacaaacagcaacagtacagagcattttgatgcatgtaagtggacaaaatcagaaccacattcctgggaattgatcttcccaatagaggtatgtggtcctaataatggttttgaaatgtggagttctgagtgggcaaatcaaacttcatggcatttgag

SEQ ID NO: 36503 - DNA, 101 bp, Glycine max
  Clone ID: LIB3138-104-Q1-N1-E1
aaaaaaaaaaaaaaaaaataaaaaaaaaaaaaaaaaaaaaaaaaagggaaaaaaaaaaaaaaaaaaaaaaagaggaaaattaatggaaaaaaaaataaaag

SEQ ID NO: 36504 - DNA, 348 bp, Glycine max
  Clone ID: LIB3138-104-Q1-N1-E11
gtaaatgttacatgtggtagtggacgtggtggtttacccacgactgcttggattagttctgcggttaacaatcgctcctcagatatcaacaaaaggattcgcacagcacttgggaaaggtaagaaaattgtttttcttactagagttgatccttttccagtagctttactggctgttctttttggcgttaagaatgaaattctgagttctaacgccactaatcctatgctgacgcgacttcttgagaactgtaagagtctcaaatatctggttgatgagtgtccttttgcatttgtgaactagtatgtagtattttattcacttaaataaagcgcattactatgtgca

SEQ ID NO: 36505 - DNA, 149 bp, Glycine max
  Clone ID: LIB3138-104-Q1-N1-E12
ctttttcatcttcttcctcctctcataccaccttcacttccatgaagccacaacatcaatatcaatgacaacaacagtttccaccgatttcctccccctgttcaacccccaccccaaccgcaccaattcccattctaattcccgtacac

SEQ ID NO: 36506 - DNA, 368 bp, Glycine max
  Clone ID: LIB3138-104-Q1-N1-E4
tttctatagggggaggagctggtgcaaagaatgctattctcatgaatatgccaaatgctgttctttcaatgtggagatattttgttggagatctcgtctttgaagtttctaagatgacttctccctacattaaatgtacagtctctttcttcatagcatttggaaatttggctgatgataccatcaattttgaggcttttccccacaagctggtgcagtttggagagattcaggaaaaagttgtattgaaattttcacaagaggaatttcttacagcttggtcaactcaggtgcgttctgcaacaactctgttggctgatgggtgtccatatttgtatgcaatggtgcatgatagttcagtgtctaca

SEQ ID NO: 36507 - DNA, 362 bp, Glycine max
  Clone ID: LIB3138-104-Q1-N1-E7
ggctgttctcatcctggttgtgagccagcttatcggactcccaagtgtgttaaaaagtgtgtaagtggaaaccaagtttggaagaagtcaaagcactatagtgttagtgcatacagagtcaactctgatccccatgatatcatggcggaagtttacaagaatgggccagttgaagttgcatttaccgtttatgaggattttgcttactacaaatcaggagtttacaaacacatcactggttatgaactaggtggtcatgcagtaaagctaattgggtggggaacaactgatgatggggaggactattggcttctcgcaaatcagtggaacagaaaatggggagatgatggttacttcaagat

SEQ ID NO: 36508 - DNA, 426 bp, Glycine max
  Clone ID: LIB3138-104-Q1-N1-E8
attgggaagaagcttgtgaactcaaaagatggacctccaacctttgagcagcccaagatgactctggagaagctcttgacgtatggtaacatgcttgtccaagaacaagagaatgtcaagagagtccaattggctgacaagtacttgaacgaggctgcacttggaaatgctaacgaggatgctattaacaggggaactttcttccaatcttgaattggaggcaaagcaaacttggcaagtaaatatttctgttcctgaaggttgtgctgatccaagtgctagaagttgtgatgggacttgcgtgtaacattcttagaattctcaatgtcttaggtgcaaagagaagatgccaagtttgagatgattttactatatttttcatattggactgtcttcctctataattttgagttaaagtgtccactt

SEQ ID NO: 36509 - DNA, 344 bp, Glycine max
  Clone ID: LIB3138-104-Q1-N1-E9
ggcaaattttttgacagagggcaattttagagcaagtgttgatttgcagcgcactcatcgtattagaggaatgattaaaatggtggccacagttggtattcctgagaatacaggtatatcattggcctgtgctatgaatagttcttttagggggcgcgccagttctgatatttacaccatctgctctcaagactgtgaattgtggaatcctgtttgcacaaaagcaatgactatgtcatttaatccaaacccgtgttctgatgcatggagtttggaatttctgaagcgtactggatttcattgcgatatcatttgtgtcactggatggactgccaccccaatgc

SEQ ID NO: 36510 - DNA, 416 bp, Glycine max
  Clone ID: LIB3138-104-Q1-N1-F10
gaaaaaaaaatcaacgctttgggtttttctcttggctgcaacttttggtctctccgcagaatctcgttccaattggagttcatcctctaaaggggaaggtggtgtttggaatctgggaaaatgggtttgttttctgggatttttatgggggtgttgttcggcatcgcattgatggctggatgggcgcgcatgatgaagtaccgaagtgccaaacgaattgcaaaggcagctgacattaaactccttggatcccttaatagagatgatttgaagaaaatttgtggtgataatttgcctgagtggatatcttttcctgtatatgaacaggtgaaatggctaaacaagaaactgaccaaactttggccatttgtagcagaagcagcaaccatggtgataagagaatctgttgaaccact

SEQ ID NO: 36511 - DNA, 469 bp, Glycine max
  Clone ID: LIB3138-104-Q1-N1-F11
acttatacaaaattctccaattagtaacttgttgagagttgctgcttggaagaaaggctgtttaatggtcaagattgtgatgtctgggaatgcagcagtcaaaaggagtgattgggcctcattggtacaagtgtttttaacaaacagcaacagtacagagcattttgatgcatgtaagtggacaaaatcagaaccacattcctgggaattgatcttcccaatagaggtatgtggtcctaataatggttttgaaatgtggagttctgagtgggcaaatcaaacttcatggcatttgagtttccttattgacaatcccaaacagtctacagtttttgatattctcttgggaatctctcaagattttgaaattgctggtaatactcttatgccagctttttcttgtccacaagctactgccagatcttctgaaatgcggaatcctctgcatgatctggaattgggtttcttt

SEQ ID NO: 36512 - DNA, 346 bp, Glycine max
  Clone ID: LIB3138-104-Q1-N1-F12
gaagttacaactggagcagctggtgatttgcagcaaatcaccagtttggcaaaacagatggtgaccacatttggaatgtctgatattggtccttggtcacttatggaaccatcagcacaaggtggggatgtcatcatgagaatgatggcaaggaactcaatgtcagagaggcttgcagaagacattgatgctgccatcaagaggatctcagatgaagcatatgaaattgcactggagcatataaggaacaaccgtgaggccattgacaagattgtggaagtccttctggagaaggagactctgagcggagatgaattccgtgctatattgtctgagtttgttgaaa

SEQ ID NO: 36513 - DNA, 424 bp, Glycine max
  Clone ID: LIB3138-104-Q1-N1-F2
cggctcgagctcgagccgaatcggctcgagcgctattcctctctcaaacttgaaaccttgtccaaagttatcttgttgttgtatgaagaaactctttttcactcactcagtccccatttctcgcatcccaacaacgccaaagcgtactcccaccaccgtagttcgagccacttcctcttttcgggtctcgcctcgaagacaccatcaagaagactgtagccgagaacccagtggtgctttattccaaaacatggtgctcctattcttctgaggtcaaaatcttgttcaaaaagctcggcgtcgacccattggtcttcgaattagacgaaatgggtcctcaaggcccacagttgcacaaggtattggaaaggatcacagggcaacacactgtgccaaatgtatttattggcggcaagcacattgg

SEQ ID NO: 36514 - DNA, 163 bp, Glycine max
  unsure at all n locations
  Clone ID: LIB3138-104-Q1-N1-F5
ctcgagccgttcatttgtaaggtaggaacacgactttcaaaccagttcattgaacctccaaaatgagagcaagttgtaagattttgtctttnaaaaaaaaaaaaaaaaaaaaaaaaaaaaaaaaaaaaaaaaaaaaaaaaaataaaaaaaaaaaaaataaaaa

SEQ ID NO: 36515 - DNA, 319 bp, Glycine max
  Clone ID: LIB3138-104-Q1-N1-F6
aaaacctggtgagaaaggcttggactggccaacaaggaaacgcgtggcttttggcactgcccatggtttggagtatttacatgagcaatgcaatcccaagataatacatcgtgatctaaaggctgcaaatatcctactagatgatgaatttgaagctgttctaggtgattttgggctagccaagctggttgatgcaaggatgactcatgtcaccactcaagttaggggcacaatgggtcacattgccccagagtatttgtccactggaaaatcttcagaaaagactgatgtttttggatatggcataacacttcttgaa

SEQ ID NO: 36516 - DNA, 326 bp, Glycine max
  Clone ID: LIB3138-104-Q1-N1-F7
gagaaggcaagatgtcgaagagaggacgcggtggttcggcggggaacaagttccggatgtcgctgggtctgccggtggcggcgacggtgaactgcgccgacaatacgggggcgaagaacctctacatcatatcggtgaaagggatcaaagggcgtttgaaccgtctcccctcggcttgcggttggcgacatggtgatggccaccgtgaagaaggggaaacccgatctgaggaagaaggttttgccagctgtcattgttcgccagcgcaagccatggcgccgaaaggacggcgtctacatgtatttcgaagataatgctggtgttat

SEQ ID NO: 36517 - DNA, 261 bp, Glycine max
  Clone ID: LIB3138-104-Q1-N1-F8
gttgaagtcttgcccttctctcttcaactccaaacacaagacatcatcatccatggctgcctccgtctccactgtcggagctgtcaacagagctcttttgaacctgaatgggtctggacctggggtttcagcttcccagttcatccttctttgggagcagcttgaagaaggttattggctcaagggtccccaacacaaagatttcctctggaagcttcaagattgttgctgtagaagagaagaaagagattgaagagaccc

SEQ ID NO: 36518 - DNA, 442 bp, Glycine max
  Clone ID: LIB3138-104-Q1-N1-G10
gcagcagtcaaaaggagtgattgggcctcattggtacaagtgtttttaacaaacagcaacagtacagagcattttgatgcatgtaagtggacaaaatcagaaccacattcctgggaattgatcttcccaatagaggtatgtggtcctaataatggttttgaaatgtggagttctgagtgggcaaatcaaacttcatggcatttgagtttccttattgacaatcccaaacagtctacagtttttgatattctcttgggaatctctcaagattttgaaattgctggtaatactcttatgccagctttttctgttccacaggctactgccagatcttctgaaaatgcggaatcctctgcatgatctggaatttgtgttttctttcgcttgttcgtttgtttaattcaataaaggaaattaggcatgacccttcttgtgagtatgc

SEQ ID NO: 36519 - DNA, 381 bp, Glycine max
  Clone ID: LIB3138-104-Q1-N1-G11
atattttctgtgctggtcgtgtagctgaagaagatctaaaaagggttgctgctgcgactggtggaaccgtacaaacatctgtgaataacgttattgatgaggtccttggaacttgtgaagtttttgaggaaaggcaggttggaaatgagaggttcaatattttcagtggatgttcatctggccaaacagccaccatagttcttcgtggtggagctgatcagttcatagaggaagcagagcgaagtttgcatgatgcaatcatgattgttaggagggctttgaagaattcaacagtggttgctgggggaggtgcaatagatatggagataagccggtatctgaggcagcatgcacgtacaatagcttgaaagtctcagcttt

SEQ ID NO: 36520 - DNA, 95 bp, Glycine max
  Clone ID: LIB3138-104-Q1-N1-G12
ctcgagccgattctatctacattgaaagggtagccatctctggccacaatactgatgatagcctcaatgtgggacgacacgctacagatggccac

SEQ ID NO: 36521 - DNA, 185 bp, Glycine max
  Clone ID: LIB3138-104-Q1-N1-G2
ttttacacagacaaaaagagatgctgatgaagtatcattggcattaacaaatagtataatgtctgaagcactgcatggtgatatatctcagcatcagagagagagaacattgaatggtttccggcaaggaaaattcacagtgcttgttgccactgatgttgcagctcgcggacttgacattccca

SEQ ID NO: 36522 - DNA, 343 bp, Glycine max
  Clone ID: LIB3138-104-Q1-N1-G4
cgcatcagcaaagtggctccgtggctttgctaaaaaactgaaccctgcttatgcagtgcaccagacagagttagaagccattctcacgggcttgaaggtggcttcagagatgaatgttaagaaactaattgtggagtcagacagtgactctgtggtgagcatggtggagaatggggttaagcccaatcaccctgactatggtgtcgtggaacttataaggacgaagcggcgtcgttttgactgggaagtgaggtttgtttctgtctccaacaaggcgaatcgtgtggctgataggctcgccaacgatgctcggaaattggcttgtgatgatgtttgtgaggag

SEQ ID NO: 36523 - DNA, 415 bp, Glycine max
  unsure at all n locations
  Clone ID: LIB3138-104-Q1-N1-G7
ccttcttatatttcccagggaaccaaacctgtggcttccatctctcaaaagctcaaccacttgccatggcagcagcagcgtcaatgtgtatgagcttcaacctggcaacagcattcaagggtctctctttttcttcttcttcctcatcgntcttcgctggaagtggtagttattctctccgcgcgggtcccacctcggtggtgtcgctgccccggcgctgcccgctgaccatagagaacgcccacaagaagggggcgggcagcaccaagaacggccgcgactcgcagggcaagcgtctcggagtcaagatatacggcgaccaggtcgccaagcccggctccatcatcgtccgccagcgcggaaccaagtttcatgcangaaagaatgtggggcttggcaaagatataccattttc

SEQ ID NO: 36524 - DNA, 314 bp, Glycine max
  Clone ID: LIB3138-104-Q1-N1-G8
tcgtaaatgtgttacgagaattgtatttgcacagtccagaggaagctcgccaattgagaaggaaagctctctctcgtattgaatggctgcaaaaagctgatgtgcctaccatagcacagattgaagagttccattcgatgcagaggatgatgaatgctcctgattcaaatgataatattgatttactgttgagcattgatttgttgggtttacaaggagcaggtaaagcttttccaaacaaaattgtttttgatgataagcttgtgttggctaacacacaagaattctttgatggaaattttccagtggattct

SEQ ID NO: 36525 - DNA, 360 bp, Glycine max
  Clone ID: LIB3138-104-Q1-N1-G9
gaattctttgatggaaattttccagtggattcttggttaccaatttttgtgaattgtctttatcctgtaagtcaattaccttcagaagctgtcgttgtaaatgttacatgtggtagtggacgtggtggtttacccaccactgcttggattagttctgcagttaacaatcgctcctcagatatcaacaaaaggattcgcacagcacttgggaaaggtaagaaaattgtttttcttactagagttgatccttttccagtagctttactggctgttctttttggcgttaagaatgaaattctgagttctaacgccactaatcctatgctgacgcgacttcttgagaactgtaagagtcttaaa

SEQ ID NO: 36526 - DNA, 342 bp, Glycine max
  unsure at all n locations
  Clone ID: LIB3138-104-Q1-N1-H1
ctaggcgccacttactgaccactgngtggagtgtctntgtcagttccaaaaaattagtggctggtgatgcatttatattcttaaggggtgaaaatggagagctgcgagttggagttaggagactcatgagacagcatagcaacatgccatcttctgttatatccagtcacagtatgcatctgggtgtcctggctactgcatctcatgccattgccacaggaacattgttttctgtattttacaagcccagaactagcccgtctgagtttattgtgagtgtcaacaagtaccttgaagctcaaagtcataaactttctgttgggatgagattcaaaatgagat

SEQ ID NO: 36527 - DNA, 328 bp, Glycine max
  Clone ID: LIB3138-104-Q1-N1-H10
ctcgagccgaatcggctcgagctgaaaatgcggaatcctctgcatgatctggaatttgtgttttctttcgcttgttcgtttgtttaattcaataaaggaaattaggcatgaccctcttgttgagtatgctctgcctatttgaaaatttccacacctcttttaattgtcgtaatgatgtgtgaagtgtgtgttattttaaaaaaaaactatggaagcttcaaaattgttgctgtaaaaaagaaaaaagagattgaaatagacctcacccaccgacaaggacagaaggaaaggacttgcctatgataactaaaaaaaaccgggggggccc

SEQ ID NO: 36528 - DNA, 379 bp, Glycine max
  unsure at all n locations
  Clone ID: LIB3138-104-Q1-N1-H11
gaagcttcttccaccatgaactgcaaggccaacgtttccaaagagctcaacgccaagcacaagaagatactggaagggcttcttaaattaccagagaataggggatgtgctgactgcaaagctaaaggtccaagatgggctagtgtaaatcttggcatctttatatgcatgcagtgttcaggaatacatcgaagtttgggggtacatatatcaaaggttcgttctgcaaccctggacacttggcttccagatcaagttgcattcatccaatcaatgggaaacgaaaaagcaaatagtttctgggaagcagaattacctccaaattatgacagagttggaaatgagaatntcattcgtgcaaagtatgacgagaagagat

SEQ ID NO: 36529 - DNA, 285 bp, Glycine max
  Clone ID: LIB3138-104-Q1-N1-H12
gcaggatgagcatctggtagatcattttgttagaagcgactttctcaaaccaatagtagatgcctttgttgctaatggtaatcgctacaatctgctcaactctgctgttcttgaacttttcgagtatattagcaaggagaatctgaaattattattgaagtatttagttgattctttctgggaccagttagtgaaatttgagtatttggtttccattcattcactgaaagtaaaatatgagcaggtattttcaaatttatatttacccagtcctacccaagcaca

SEQ ID NO: 36530 - DNA, 264 bp, Glycine max
  unsure at all n locations
  Clone ID: LIB3138-104-Q1-N1-H3
atttgaccataaaattttattaatacacttgaattaaccataaaatttcgtacagcatgggagtatatattttttttattcaaatttataagctaatntnnaaaaaaaaaaaaaaaaaaaaaaaaaaaaaaaaaaaaaaaaaaaataaaaaaaaaaaaaannnnaaaaaaaaaaaaaaaaaaaaagaggaaaaagaaaaaaaagaaaaaaaaaaaaaaaaaagggggggggcccccaaaaaaagaactttcaaacccggaaaaa

SEQ ID NO: 36531 - DNA, 144 bp, Glycine max
  Clone ID: LIB3138-104-Q1-N1-H4
caattgaagttgaagtcttgcccttctctcttcaactccaaacacaagacatcatcatccatggctgcctccgtctccactgtcggagctgtcaacagagctcttttgaacctgaatgggtctggacctggggtttcagctccc

SEQ ID NO: 36532 - DNA, 436 bp, Glycine max
  Clone ID: LIB3138-104-Q1-N1-H5
gttttcattgttgacaaggctgaggaagaaggcattgaacttccctactcgtgcagggctggttcttgcgtttcatgtgttgggaaaattgtgaaaggtgacgtggaccagtcagatggtagcttccttgatgatgaacaaatagaaagtggatgggttctcacctgtgttgctctacctaggtcagacgttgtcattgagacacacaaggatggagagatcgaatgatcgatatatatcataatgtaatcttgtccattgctcttctaatgccatctatctatgtcgtgttttgattttgttagagtgatttggcattggctagttagctagctgaaatcatcgcgagtttattaattacttttgtcatgtttgtggaaacaagtgaaattgttgcactttaaataattagtttggtaatgcttactgtttatgc

SEQ ID NO: 36533 - DNA, 409 bp, Glycine max
  Clone ID: LIB3138-104-Q1-N1-H8
gttctttcaatgtggagatatttcgttggagatctcggctttgaagtttctaagatgacttctccctacattaaatgtacagtctctttcttcatagcatgtggaaatttggctgatgataccatcaattttgaggcttttccccacaagctggtgcagttcggagagattcaggaaaaagttgtattgaaattttcacaagaggaatttcttacagcttggtcaactcatgtgcgtcctgcaacaactctgttggctgatgggtgtacatatttgtatgcaatggtgcatgatagttcagtgtctacaataccacgtgattttgtcattggtgtcaagttgacaaccataaacaatatgtgcgcatatgggctcaatcctggtatttcaggatctcgtcttttgggca

SEQ ID NO: 36534 - DNA, 436 bp, Glycine max
  Clone ID: LIB3138-104-Q1-N1-H9
ttcggttcgagttgagatagtgcccatgaatttgacaagccacactttagtggccctggagtgaaaagctctctagctagtcataactatcactcattacatgattggtatgcgacatatactagatgcaacttttgcacatttagaaagtttgcagattgtgattttctcaatagaaactttaagcagatgtctaatgttttgtgggtggcttcctgctgtcatggcgagtttatggtcacaacttggttacgcttcgtgtaataatctcgaaacgccaagaagcttatcttgccaaccttgtagatgtgttacgagaattgtatttgcacaattcaaaggaggcttgtcatatgagaagggatggtctcttttgaaaaaaatggctgcataaagcttttttgcactaccttgcctcagattgtatagtttcatt

SEQ ID NO: 36535 - DNA, 370 bp, Glycine max
  Clone ID: LIB3138-105-Q1-N1-A1
aggaaagctctctctcgtattgaatggctgcaaaaagctgatgtgcctaccatagcacagattgaagagttccattcgatgcagaggatgatgaatgctcctgattcaaatgataatattgatttactgttgagcattgatttgttgggtttacaaggagcaggtaaagcttttccaaacaaaattgtttttgatgataagcttgtgttggctaacacacaagaattctttgatggaaattttccagtggattcttggttaccaatttttgtgaattgtctttatcctgtaagtcaattaccttcagaagctgtcgttgtaaatgttacatgtggtagtggacgtggtggtttacccaccactgcttgga

SEQ ID NO: 36536 - DNA, 399 bp, Glycine max
  Clone ID: LIB3138-105-Q1-N1-A10
gatattattgcacttgcaggtttgaaagatactattacaggtgaaacattgtgtgaccctgataatccaattgtgcttgagcggatggacttcccagatcctgttattaaggttgctattgaaccaaaaactaaagctgatgttgacaagatggcaactggtttaatcaagcttgcacaggaagacccttctttccacttctcccgtgatgaagagataaaccagacagtgattgaaggaatgggagaattacatcttgaaatcattgttgatcggcttaaaagagaatttaaggtggaagctaatgttggtgccccccaagtaaactacagggaaagcatttccaaaactgcagaagtgaagtatgtgcacaagaaacaatcacgtggacaaggtcag

SEQ ID NO: 36537 - DNA, 359 bp, Glycine max
  Clone ID: LIB3138-105-Q1-N1-A11
tatacctactaggtctttccttccaactcctatggcgggagaaacatcttggatcagccactatgatgacagacaaagggagactggggcgtttgattcatttttagaacttggtgaggaaggtgaaaaagaagcaactgctgtttctttggatgttttgccagatgacttgttggaacgaatcctagcctatctccccattgcaagcatttttagagctggctgtgtgtctaagaagtggcatgaaattgttaattcagagaggtttgtatggaacctttcacatgttctaccgcagaaaccttggtactttatgtttacgagctctgatgaaccagatggttatgcttttgatcccg

SEQ ID NO: 36538 - DNA, 476 bp, Glycine max
  Clone ID: LIB3138-105-Q1-N1-A12
ctgtgctatgaatagttcttttagggggcgcgccagttctgatatttacaccatctgctctcaagactgtgaattgtggaatcctgcttgcacaaaagcaatgactatgtcatttaatccaaacccgtgttctgatgcatggagtttggaatttctgaagcgtactggatttcattgcgatatcatttgtgtcactggatggactgccaccccaatgcaggatgttcaggttacaattgattggtttatttcctctcaggaatgtgttcccaggacctattgtgttttaaatccacaaaatccttttgtgttaaataggtggatgggaaaattgactttcccccagggcacttcccgaagtgttaagagaatgcctctttctatagggggaggagctggtgcaaagaatgctattctcatgaatatgccaaatgctgttctttcaatgtggagatattttgttggagatctcgtct

SEQ ID NO: 36539 - DNA, 303 bp, Glycine max
  Clone ID: LIB3138-105-Q1-N1-A3
ctattgttgtcacgaaaatatgttggccttcattcgtttgtacctctctgtgaacaaataatggttgcattgcgactaatggacttcgagagagagctcttacttttaagaggcgagtgctctcttctatcgcctacagctatctttcccgacttttttaccggataatggggacctcattactttaagcaaagatgaggaaaaatggattctcccgagagtaatatgtgctcaagaaggcaagagtttgtttatatggttaaagatcttaattcatttaattgtagggggaaggagaaccct

SEQ ID NO: 36540 - DNA, 390 bp, Glycine max
  Clone ID: LIB3138-105-Q1-N1-A5
acagttgacctttggtacaatgatagaaaagaggttttgcaatggcaagaggagcgtaaaaaggaagctcgtgtgttacattgtgtttacacattgctagggcgagctcggcggttccctttgatggcccaagctaacacctatcaaaaaggtcatattgagcgagctgctattaatactccagtgcaggtccttagctctttctaataaacaaatcaatactgtgtctccctccctcatctatcaaactgtctttacactctcaagttagtaaataaaatatgtactgaattatttaacttgtgattcttgtctagtttggaacttttcccttttaagaacaatgaatgataagatcatattttcaaagcccacttgtaaaatatcata

SEQ ID NO: 36541 - DNA, 386 bp, Glycine max
  unsure at all n locations
  Clone ID: LIB3138-105-Q1-N1-A6
gccagttctgatatttacaccatctgctctcaagactgtgaattgtggaatcctgcttgcacaaaagcaatgactatgtcatttaatccaaacccgtgttctgatgcatggagtttggaatttctgaagcgtactggatttcattgcgatatcatttgtgtcactggatggactgccaccccaatgcaggatgttcaggttacaattgattggtttatttcctctcaggaatgtgttcccaggacctattgtgttttaaatccacaaaatccttttgtgttaaataggtggatgggaaaattgacttttccccagggcacttnccgaagtgttaaagagattgcctcttttctataagggggagggagctggtgcaaaagaatgct

SEQ ID NO: 36542 - DNA, 405 bp, Glycine max
  unsure at all n locations
  Clone ID: LIB3138-105-Q1-N1-A8
aagaaacccaaaatctcttcggctctctctcttttccatatccatatatatccccaaaccctaccgttaggttccccaattcaacaccccgtgggccggtgcgctgcttctttgttcgtacggtttccgtcgattgcctccgaaacgatgtcgtatcgcccaagcgggaactccaggaccgaggtccgccgcaaccggtacaaggtggcggtggacgcggacgaaggtcggagacgacgagaggacacgatggtggagatccgcaagaaccgcagagaagagagtttgcagaagaagaggcgcgaaggattccaaccttagcagatacctgcgttcgttcactctagctcggtagagaagaagttggaacacctaacatntatggttacttgtgtttggactgat

SEQ ID NO: 36543 - DNA, 318 bp, Glycine max
  Clone ID: LIB3138-105-Q1-N1-A9
aatgaagactattagctcattctctgaatattctgacatccgccaccgccacgtgtcaacctaattgggatccacagtcttcttccttcttcagctccacgcgccctctttccctttcctgtttctagctgttaccgacgtcaattgttactccgattatttattcttatttattttccccatctcactctccttcgattcgggatcactcacaacacaagtactactaccttggaatcaatttttagggtttctgattcctttatgtgtttgtctcgcaattgatcatcgcaaccacaatgtccggtcccctcgatc

SEQ ID NO: 36544 - DNA, 309 bp, Glycine max
  Clone ID: LIB3138-105-Q1-N1-B1
aaccaatctccaaacccgtggcacgtgtcgttctcgtatgccagagccctccaaaacactgccttgaagacatggggaggccgcccagagaacgtgaaggcggcacaagatgcactccttttccgtgccaagtccaactcgctcgcccagcttgggaagtacaccggtgagggtgaatccgaggaagccaagaaggagttgttcgtcaaaggctactcctactaagatgtatgtagtgaatatgatacatgttaggcagcagcaacaccagcagttatagtaggtgttgacggaggatgaagtggaaga

SEQ ID NO: 36545 - DNA, 467 bp, Glycine max
  Clone ID: LIB3138-105-Q1-N1-B10
tgatagttcagtgtctacaataccaggtgattttgtcattggtgtcaagttgacaaccataaacaatatgtgtgcatatgggctcaatcctggtatttcaggttctcgtcttttgggcaccattcctcagtccatttcacagcaaactgtttggaatcaaatggcaacagtgagaacaccattgaattttgattctagcaagcagagcttttgtcagttttctattgaccttctcggtggaggaatcttagtggacaaaactggagattggatcacacttatacaaaattctccaattagtaacttgttgagagttgctgcttggaagaaaggctgtttaatggtcaagattgtgatgtctgggaatgcagcagtcaaaaggagtgattgggcctcattggtacaagtgtttttaacaaacagcaacagtacagagcattttgatgcatgtaagtggacaaaatcag

SEQ ID NO: 36546 - DNA, 452 bp, Glycine max
  Clone ID: LIB3138-105-Q1-N1-B11
attccttccaagttttatcaaactgttcccaatcttttcgtgttcgaatcttcttcatctttttttgtcccttcgaaaagctaaggaattggtgaattggtgtatgacatgaagccttctgcaaggagttcatagattttctcttcttagaataatcaattagaaccaccttgaagttgagacaagagtaattgcagccttattttaattagacaatatcaggacaaatcactattcaagagatattatgatcactatggatgtaaaaggtataagatgggttggaaatatgtaccagaaatttgagaatatgttcctggaggcagaagacgtgatgtacgaggatacagttaaatacatagagaatcagatgcagactgttggggaaagtgttaaaaagttatattcagaaattgtgggagatttacttcccccaggtgaaaaggtaagca

SEQ ID NO: 36547 - DNA, 446 bp, Glycine max
  Clone ID: LIB3138-105-Q1-N1-B12
atcaattttgaggcttttccccacaagctggtgcagtttggagagattcaggaaaaagttgtattgaaattttcacaagaggaatttcttacagcttggtcaactcaggtgcgtcctgcaacaactctgttggctgatgggtgtccatatttgtatgcaatggtgcatgatagttcagtgtctacaataccaggtgattttgtcattggtgtcaagttgacaaccataaacaatatgtgtgcatatgggctcaatcctggtatttcaggttctcgtcttttgggcaccattcctcagtccatttcacagcaaactgtttggaatcaaatggcaacagtgagaacaccattgaattttgattctagcaagcagagcttttgtcagttttctattgaccttcttggtggaggaatcttagtggacaaaactggagattggatcacact

SEQ ID NO: 36548 - DNA, 369 bp, Glycine max
  Clone ID: LIB3138-105-Q1-N1-B2
acactttctcagtgccatgaagaagaggccagagctccaacaacaccaagactttgaagttctgaaagctgttgcacaggcatggtacagccactccggcacttgcaagcccatgagcgaatttgaagcgcacagaagaaacttcagaggcaagccttcaaggtttaagcttgaagcattgaacaagccacaagcttcttcttccagttctagggacacttctacttactgggattttcagcagtcactttgggactcctatgagcttgtcacagtgtccagaaggattgagactgggttaactttggataacccttttgatgaattgtgtggttcccctccaatccaacaaaagcgcaagcctgagag

SEQ ID NO: 36549 - DNA, 365 bp, Glycine max
  Clone ID: LIB3138-105-Q1-N1-B3
ggagtccatatagcattgctactgataatggctggaggaactcttagtgcttgtgggagcttcagaggttcagtcactgtgccccaggggctgaattttggtgtatatgatgttctggctccttctggctttctatcctctccaaccgatgcttttaatacagagattcatgtcaacaaattctacatggattattatgagagtggagaggtttcacagttccacactgatctttcccttcgtaacatggatgggaaagaagtaatgaggaagacaatcagagaatgatcctttaagatatggtggtatcaccatatatcagacagattggagtatttccgctctgcaaattcttaaggacaatg

SEQ ID NO: 36550 - DNA, 411 bp, Glycine max
  Clone ID: LIB3138-105-Q1-N1-B4
ctctgttggctgatgggtgtccatatttgtatgcaatggtgcatgatagttcagtgtctacaataccaggtgattttgtcattggtgtcaagttgacaaccataaacaatatgtgtgcatatgggctcaatcctggtatttcaggttctcgtcttttgggcaccattcctcagtccatttcacagcaaactgtttggaatcaaatggcaacagtgagaacaccattgaattttgattctagcaagcagagcttttgtcagttttctattgaccttctcggtggaggaatcttagtggacaaaactggagattggatcacacttatacaaaattctccaattagtaacttgttgagaagtgctgcttggaaagaaagctgtttaatggtcaagattgtgatgtctgggaatg

SEQ ID NO: 36551 - DNA, 450 bp, Glycine max
  unsure at all n locations
  Clone ID: LIB3138-105-Q1-N1-B5
ctcgagccgattcggctcgagcccaggacctattgtgttttaaatccacaaaatccttttgtgttaaataggtggatgggaaaattgactttcccccagggcacttcccgaagtgttaagagaatgcctctttctatagggggaggagctggtgcaaagaatgctattctcatgaatatgccaaatgctgttctttcaatgtggagatattttgttggagatctcgtctttgaagtttctaagatgacttctccctacattaaatgtacagtctctttcttcatagcatttggaaatttggctgatgataccatcaattttgaggcttttccccacaagctggtgcagtttggagagattcaggaaaaagttgtattgaaattttcacaagaggaatttcttacagcttggtcaactcaggtgcgtnctgcaacaactctgttggctgat

SEQ ID NO: 36552 - DNA, 371 bp, Glycine max
  Clone ID: LIB3138-105-Q1-N1-B6
gtttggagagttgaatgtggaatcccttctggatttccgctcacagttatttgcaatagcatttttaatgagatgctcattagatatagctatgaaaaattactgcgccaggctaaagctccaagtatgtttttacaatccttcaaaaattttgtttctttgtgtgtgtatggtgatgataacttaattagtgttcatgaatatgtcaagccttactttagtggttctaaattgaaaagctttctagctagtcataacatcaccattactgatggtattgacaaaactagtgcaactttgcaatttagaaagttagcagattgtgattttctcaagagaaactttaagcagatgtctaatgttttgtgggt

SEQ ID NO: 36553 - DNA, 425 bp, Glycine max
  Clone ID: LIB3138-105-Q1-N1-B7
aaaagattttatttgactagatgttgaattttacgacggagaattttttttaagtcaaaagttaagtaattattttgctcagctagaagaaagatcttacgagagaatagaaaaattaaacacttatgttaatgatttgtataaaactttagactttgattttttattttttaatgaaagtttagatataaaacaagatgatgaattagattatcttgaaaacttaaaaaatgaaaaagattttggtgatattggacgcatttacgaaaatgaatttcccgaaattaaaattcaatatggtgaagaaaaaattatgcctggagattgtaatgaaaattttttagatgataatctagatgaagaatatgataaaattttttcagaatggtgacgatgatgaccatgatactatttttcaatttttt

SEQ ID NO: 36554 - DNA, 364 bp, Glycine max
  Clone ID: LIB3138-105-Q1-N1-B8
cgcacatgtcgatcttgtatgccagacccctccaaaacactggcttgtagacatggggaggcctcccaaagaacgtgaaggcggcacaagatgcactcattttccgtgccaagttcaactcgctcgaccagcttgggaagtacaccggtgagggtgaatccgaggaagccaagaaggagttggtcgtcaaaggctgctcctactaacatgtatctaatgaatatgatacatgttaggcagcagcaacaccagcagttatagtaggtgttgacggaggatgaagtggcagaagactaaattgtctaaaaaggaatgtctctatagtcttggagactattattgtttatggttacatgtaccttta

SEQ ID NO: 36555 - DNA, 365 bp, Glycine max
  Clone ID: LIB3138-105-Q1-N1-C10
gaaaagggacaaacttagttgtcaagttggaatcaacccatactccatggaatggactggtttggccaatagattactgagtaagggcaatgatattctgtgttgcgattatgctagttttgatggttgattaccaagcaagttatgagcaagatggcagaaatgataaacagtctttgtggtggtgatgaaaaattgatgcgtgaaaggacgcacctgctgttggcttgttgttcaaggatggcaatttgtaagaaagatgtttggagagttgaatgtggaatcccttctggatttccgctcacagttatttgcaatagcatttttaatgagatgctcattagatatagctatgaaaaattact

SEQ ID NO: 36556 - DNA, 371 bp, Glycine max
  Clone ID: LIB3138-105-Q1-N1-C11
tttcgttcaattatttctccccttttcttaaaatcgaattgaatcgaatccttcacaagtcaagagttagcacacccaaaagaacgcgtttcagctggccacactgttgatttggctgacacatagtaaagaatcatattaatgtcgtcaagaacattgaggagaagactctatcatggggatgttgatggcaaaaggcaggagcatttggagacttcgggattggattctttgagtgagcccttgctggcagacgatgattatattgagaataagaagatatgtactcttgaagatctatgggatgatgagaagaagaaggcgcaagttcattggacattcatattctcaaaccttattgtgcaatgggc

SEQ ID NO: 36557 - DNA, 453 bp, Glycine max
  Clone ID: LIB3138-105-Q1-N1-C12
gttttctattgaccttctcggtggaggaatcttagtggacaaaactggagattggatcacacttatacaaaattctccaattagtaacttattgagagttgctgcttggaagaaaggctgtttaatggtcaagattgtgatgtctgggaatgcagcagtcaaaaggagtgattgggcctcattggtacaagtgtttttaacaaacagcaacagtacagagcattttgatgcatgtaagtggacaaaatcagaaccacattcctgggaattgatcttcccaatagaggtatgtggtcctaataatggttttgaaatgtggagttctgagtgggcaaatcaaacttcatggcatttgagtttccttattgacaatcccaaacagtctacagtttttgatattctcttgggaatctctcaagatttgaaaattgctgtatactcttatgcagcttt

SEQ ID NO: 36558 - DNA, 435 bp, Glycine max
  unsure at all n locations
  Clone ID: LIB3138-105-Q1-N1-C2
cgagaaagcttttccaaacaaaattgtttttgatgataagcttgtgttggctaacacacaagaattctttgatggaaattttccagtggattcttggttaccaatttttgtgaattgtctttatcctgtaagtcaattaccttcagaagctgtcgttgtaaatgttacatgtggtagtggacgtggtggtttacccaccactgcttggattagttctgcagttaacaatcgctcctcagatatcaacaaaaggattcgcacagcacttgggaaaggtaagaaaattgtttttcttactagagttgatccttttccagtagctttactggctgntctttttggcgttaagaatgaaattctgagttctaacgccactaatcctatgctgacgcgacttcttgagaactgtaagagtctcaaatatctggttgatga

SEQ ID NO: 36559 - DNA, 350 bp, Glycine max
  unsure at all n locations
  Clone ID: LIB3138-105-Q1-N1-C4
tgtttcagatctgaagccacataaccctaaccatcaaacggctaggtgtcgctgggacttcaatggcagtgactgaagctcanaatcctcttcttggagaaaacacatgtggttccttgttaaaaaagcttcaggaaatatgggatgaggttggtgagagcgacnagcaacgagacaagatgcttcttcagttagagcaggagtgcttggatgtgtacaagagaaaggttgagcaggctgccaagtcaagggcgcagctacttcaagctctgtctgatgctaagcttgagctttccactcttctatcagcacttggagaaaagagctttgctggaattcctgagaatact

SEQ ID NO: 36560 - DNA, 120 bp, Glycine max
  Clone ID: LIB3138-105-Q1-N1-C5
atcacatcactgccagcacctgcccggctcgctccatcctcgatttcgtgttagggttttcagatttcacatgccaacttcccaattctcttggatccattgtcgacaccgacggagatg

SEQ ID NO: 36561 - DNA, 382 bp, Glycine max
  Clone ID: LIB3138-105-Q1-N1-C6
ctcgagccgctgtccgccaaggagatctccgaggttatccttgttggtggtatgacccgtatgcccaaggtcaccgagtccgttaagagcatcttcggccgcgaccccgccaagtcggtcaaccccgatgaggccgtcgccattggtgctgcgattcagggtgctgtcctggctggtgaggtcactgaccttctcctcctcgatgtcactcccctgtctctcggtatcgagaccctcggtggtgtcttcacccgtctgatcaaccgcaacaccaccatccccaccaagaagtcccaggtcttctccaccgctgctgacttccagtctgctgtcgagatcaaggtctaccagggtgagcgtgagctcgtccgtgacaacaagc

SEQ ID NO: 36562 - DNA, 196 bp, Glycine max
  unsure at all n locations
  Clone ID: LIB3138-105-Q1-N1-C7
ccaaagcctgcctagaacgaaaaaaaaaaagaagagcaattttccctcaccaaagaagaagaagcaaacaatggccgatcaacttaccgatgaacagatctncgagttcaaggaagccttcagcttgtccgacagggacgggaatggtggcttaacacccaaggggctgggaactggtttgcgttcatgggggcaa

SEQ ID NO: 36563 - DNA, 329 bp, Glycine max
  Clone ID: LIB3138-105-Q1-N1-C9
ctcaatttttctctcaaccggcccaatttagcataagcccagcatggccaccgcaacagcagcagccacctcgtccttcatggggacgcgcctcctggaggcccactccggggcggggcgggtgcaggcccggttcgggtttggcaagaagaaagccgccgccccgaagaaagtttccagggggtcgggctctagctccgataggcccctgtggtatccgggcgccaaggcgcccgagtacctggatgggagccttgtcggagactacggattcgacccatttgggctagggaagcccgccgagtacctgcagttcgagttggactcgc

SEQ ID NO: 36564 - DNA, 332 bp, Glycine max
  Clone ID: LIB3138-105-Q1-N1-D1
tatgacgtagcatgcacacttacgttagcgggaattcagcattcaaaaggagtgattgtccctcattggtacatgtcgttttaacagacagcaacagtacagagcattttgatgcatgtaagtggacaaaatcagaaccacattcctgggaattgatcttcccaatagaggtatgtggtcctaataatggttttgaaatgtggagttctgagtgggcaaatcaaacttcatggcatttgagtttccttattgacaatcccaaacagtctacagtttttgatattctcttgggaatctctcaagattttgaaattgctggtaatactcttatg

SEQ ID NO: 36565 - DNA, 332 bp, Glycine max
  Clone ID: LIB3138-105-Q1-N1-D10
aaatggcaacagtgagaacaccattgaattttgattctagcaagcagagcttttgtcagttttctattgaccttctcggtggaggaatcttagtggacaaaactggagattggatcacacttatacaaaattctccaattagtaacttattgagagttgctgcttggaagaaaggctgtttaatggtcaagattgtgatgtctgggaatgcagcagtcaaaaggagtgattgggcctcattggtacaagtgtttttaacaaacagcaacagtacagagcattttgatgcatgtaagtggacaaaatcagaaccacattcctgggaattgatc

SEQ ID NO: 36566 - DNA, 428 bp, Glycine max
  Clone ID: LIB3138-105-Q1-N1-D11
acctgttagcaataatttgaatggccaaaggtcaagggtgaataatttagtaataacatatattgttcttaagacaattttggtaagtatcattgctttgtagctttgaaagttctctcaggggtttataatgtgatttttggtgttaatgccgcaatgcttaactattaggacactacctgcaagaaacatcgccaagagctgataagaaaatgcagttatatcatcatccgttggatttggacagccagagggtgagatttgcattggaggaggagggtgtagattatacatcccaccatgtcaatccgataactggcaagaacttggattcctctttcttcaagatgaatcgccatggaagggttccggttttccaaaatggctctcacatcatttacaatactattgatataatccagtacata

SEQ ID NO: 36567 - DNA, 270 bp, Glycine max
  Clone ID: LIB3138-105-Q1-N1-D12
gcaaacactattgcctggaaagggctaacacgcaatgacattaggagggaacaagaacaggggattcactgaccaaacattaccagatgagcttgtcaagagaggatcgactgccgaggaaccctgtgccccacaaggtctcatgcttgagatagacgactaccctaatgcatgacgatggacttgaaatattggatgctaataagacatgtgaacatgagcatgtctatgtgtattacccaacaaatgcagcaatataacaggacactg

SEQ ID NO: 36568 - DNA, 366 bp, Glycine max
  Clone ID: LIB3138-105-Q1-N1-D2
gttccaaattttttggtttggggatagatagagtgatacgcgtcacattttcataataataaaaaaatggcagcggcggcggcagtgacggtgctactcccacctaggattccgaccaccaccaacgttacccgctgctctgctttgccttctctccctcctcgcgtctccaacaccaaaaccactttgttctcaccttccctcaacaacttttcagtgtcccgaaaatcttctctgcttcagaccagagcttcttcagaggaatcatcctcagtagatgccaatgaggtgttcacagatttgaaggaaaagtgggatgctcttgaaaacaagtccacagtacttctttatggtggaggggctata

SEQ ID NO: 36569 - DNA, 234 bp, Glycine max
  Clone ID: LIB3138-105-Q1-N1-D3
ggaacacacactaaagatagcgtgaactctgctgctcctcaccggaagcttcagcaggcggtatagatacaggctacagttacgtcgccatcaccacaacaagaaagtctcactgctgggtcaaattcggcccagtccagatcctctgtggtggctgcatcatggacatatttgactccgagcgtgcactgatagccaaggaggacaatacctgcgcagtgatggatctggagc

SEQ ID NO: 36570 - DNA, 435 bp, Glycine max
  Clone ID: LIB3138-105-Q1-N1-D4
ctcgtattgaatggctgcaaaaagctgatgtgcctaccatagcacagattgaagagttccattcgatgcagaggatgatgaatgctcctgattcaaatgataatattgatttactgttgagcattgatttgttgggtttacaaggagcaggtaaagcttttccaaacaaaattgtttttgatgataagcttgtgttggctaacacacaagaattctttgatggaaattttccagtggattcttggttaccaatttttgtgaattgtctttatcctgtaagtcaattaccttcagaagctgtcgttgtaaatgttacatgtggtagtggacgtggtggtttacccaccactgcttggattagttctgcagttaacaatcgctcctcagatatcaacaaaaggattcgcacagcactttgggaaaggtaagaaaatt

SEQ ID NO: 36571 - DNA, 473 bp, Glycine max
  Clone ID: LIB3138-105-Q1-N1-D5
aggacctattgtgttttaaatccacaaaatccttttgtgttaaataggtggatggggaaattgactttcccccagggcacttcccgaagtgttaagagaatgcctctttctatagggggaggagctggtgcaaagaatgctattctcatgaatatgccaaatgctgttctttcaatgtggagatattttgttggagatctcgtctttgaagtttctaagatgacttctccctacattaaatgtacagtctctttcttcatagcatttggaaatttggctgatgataccatcaattttgaggcttttccccacaagctggtgcagtttggagagattcatgagaaagttgtattgaaattttcacaagaggaatttcttacagcttggtcaactcaggtgcgtcctgcaacaactctgttggctgatgggtgttcatatttgtatgcaatggtgcatgatagttcagtgtctac

SEQ ID NO: 36572 - DNA, 419 bp, Glycine max
  Clone ID: LIB3138-105-Q1-N1-D6
tggatattcaaaaaaaaaaataataaataaaaaaattaagagccataattagaattctgtatgatatttacgtttacggcgtgtgataaaaagatactatatagaactaaaggagattcccgtttcagttacattcaattcaacgattgaccaaaagagaattcaaaaaataacatttagatcacccaaattccaatatttctatgaaacaataattaaatctaacgaatttatttcgattgattgtatccatatggggtaataataaaagggggaggagagcttaaaaaaacaagataacaaataaagtttaagtgcggggggtcaaactgggtgtatataatcggatcactataagacaactctttcttttgaggtttcaaaagaatgattttcgaattcgattgaatctaaaacac

SEQ ID NO: 36573 - DNA, 464 bp, Glycine max
  unsure at all n locations
  Clone ID: LIB3138-105-Q1-N1-D7
tattttttagagtatagtttgttgtctctgggaagatatgtgatcatgcatggtaagaaaaaatatacttgagaggaaaaatcagaaaacggttattattttgttatttttgtttcctaatcctaccaaacatgacaagatcatttttaatctctttttttttaatttatatacttaatgctcttcatttttttttaatttttcatttctgacacttgaagtagcttgttaatgtcacatgcttctaagtgttataagtgcggccatttttgtcaaaagtttcctttcccattttcatgcactctgatccttagcatgtttttcatataacctattatttcacatttcagaatgagacatactgattctgaatctatgattcataaaacatgtttagattttataagaatatantaaatgatatgcttgaaaaaatagaagtgtcactgaattgctagcgaaaa

SEQ ID NO: 36574 - DNA, 404 bp, Glycine max
  Clone ID: LIB3138-105-Q1-N1-D8
gtagatgatgagagatacatcttcatgtcatctatgctggggttgctcgctgaatatggcctttggcctcgtgttatgaatgcctcttcaatatccagctgtgtaaagcatttacatgatcaattacaatggaggattcgaagttcacatgatagaatgggagagttaacttctgttctagaaagccgtgctgataatggtaatcacgttgttgaaagtccaggttctggaaatttgacaagtcacactcataatgatttcatgtttcagcataacttcccccagcaaaatcttattgggaatgaacaaagccatcaaccaatgagcaatgttgcaggatatatgcacccagctcttcattctgatgtaaactggggattaaaaacattcaactattagcagac

SEQ ID NO: 36575 - DNA, 465 bp, Glycine max
  unsure at all n locations
  Clone ID: LIB3138-105-Q1-N1-D9
gagatattttgttggagatctcgtctttgaagtttctaagatgacttctccctacattaaatgtacagtctctttcttcatagcatttggaaatttggctgatgataccatcaattttgaggcttttccccacaagctggtgcagtttggagagattcaggaaaaagttgtattgaaattttcacaagaggaatttcttacagcttggtcaactcaggtgcgtcctgcaacaactctgttggctgatgggtgtccatatttgtatgcaatggtgcatgatagttcagtgtctacaataccaggtgattttgtcattggtgtcaagttgacaaccataaacaatatgtgtgcatatgggctcaatcctggtatttcaggttctcgtcttttgggcaccattcctcagtccatttcacagcaaactgtttggaatcaaatggcnacagtgagaacaccattgaattt

SEQ ID NO: 36576 - DNA, 412 bp, Glycine max
  unsure at all n locations
  Clone ID: LIB3138-105-Q1-N1-E1
tccaactccactagtaaagtacagaaaagaagaattggaaaatctaagaggagatggaagaggggagcgcaaggaacttgataggatctatgattatgatgtctataatgatttgggcaacccagacgagaatgacgatctagctcgtcctattcttggcgggtctagtaagcatccataccctcgcaggggaagaactggtagaaaaccaacaaagaaagaccccagatgtgagagaccaaccagcgacacttacatcccgagagacgaaaattttggtcacttgaagtcatcagacttccttacatatgcaataaaatccttaactcaaaacgttntacctcaattcaacactgcatttggtttcaataatgagtttgatagcttcgaggacgtgcgttgtctctttgat

SEQ ID NO: 36577 - DNA, 116 bp, Glycine max
  Clone ID: LIB3138-105-Q1-N1-E10
gtttcctaacccatcgtgcgaggtccctcgacctccgcacaaccccaactccaaggggctgtgcctgtcgccgtcgtcttccacgctcatgtcggaacccgacatccacgcgccgg

SEQ ID NO: 36578 - DNA, 441 bp, Glycine max
  Clone ID: LIB3138-105-Q1-N1-E12
ggctgaagaagaagtaccggaacgtcctcaacaagatttgctccggcaaggaattctccttcaagagcgctcacgatcaagccaccttcgaaatctcgcgcaagatctggagcaacgtgactccagtcggcgacaattcattggacgacgacgaaatcaaccctagccgtagccccaaccctaaccttaattttagccctgtaattcttaagaatgaaacgattttcaggaattccacggagaagaaaacaccgaaacgctctcggcctcgatcggcggtgaaaatcgagccaaatgacggatccgcgtcgaacagagatcataattgtattagcaatactacacctactgctactgctgctgctactaacactactgctgctgcttgctgtactaacaataataacttgtacagtggttatgggaataacataccgagtt

SEQ ID NO: 36579 - DNA, 390 bp, Glycine max
  Clone ID: LIB3138-105-Q1-N1-E2
atctaacatttttctttagaagacttgcagttgcagcagcatctgttcccagtcggtggcagaacagcaccaccctcaatggattccaattccaaaccttccgcaccacccccgaaccctaaccctaaccctaattcatcaccctcggagaaacaccagagagacctactgaaccacgtcgaagcctacctcgcgaagcgcgacggcgtggacaagctcctcaagatttcgcgctacaccgcgaaactcatcctcgccacttcgctcctccaatccaacaaccctaccctctcccaccgcctaaaatccttcgaatccagcgtcggcgtgagccgaaaggccttcagactcggtaaattcgttcaagacctaaacgccctcaaaaccacc

SEQ ID NO: 36580 - DNA, 77 bp, Glycine max
  Clone ID: LIB3138-105-Q1-N1-E3
ggtaaatatgcgtagacgtgtccatctgaatgctgttaggcccatcatgaatactagtccacccagtgtacaggatg

SEQ ID NO: 36581 - DNA, 373 bp, Glycine max
  unsure at all n locations
  Clone ID: LIB3138-105-Q1-N1-E7
ctctccacaccaacaacaccaacctcactctccttcacatcatcctccatcttcttctcttcacaccaattccacacacacaataattctttcaaatccaacagctttcccgttttaccctccaaaaaacccctctccatttcctgcaaggcctcccctcctcttcccgtcctcaacttctccggcgagagggtcggcgagtccttcctcgacctccgctccgcccctcccgacaccgcccgagccgtcgtccaccgcgccgtcgtcaccgacctccagaacaagcgccgnggcaccgncttcaccctcacccgcggagaggtccgaggcggcggacggaagcccttcccgcagaaaaaaaccggtcgcgccc

SEQ ID NO: 36582 - DNA, 401 bp, Glycine max
  unsure at all n locations
  Clone ID: LIB3138-105-Q1-N1-E8
gcaggatgttcaggttacaattgattggtttatttcctctcaggaatgtgttcccaggacctattgtgttttaaatccacaaaatccttttgtgttaaataggtggatgggaaaattgactttcccccagggcacttcccgaagtgttaagagaatgcctctttctatagggggaggagctggtgcaaagaatgctattctcatgaatatgccaaatgctgttctttcaatgtggagatattttgttggagatctcgtctttgaagtttctaagatgacttctccctacattaaatgtacagtctctttcttcatagcatttggaaatttggctgatgataccatcaattttgaggcttttccccacaagctggtgcagtttggagagattcangaaaaag

SEQ ID NO: 36583 - DNA, 132 bp, Glycine max
  Clone ID: LIB3138-105-Q1-N1-E9
gtatgatgaacaggatgcacttactgggggtattttctatcaggaaggtgatattacaacttattgtatattaactacacacaatactttagaggttaaatagtgtgttggaaaaaatgttacaaattcatt

SEQ ID NO: 36584 - DNA, 274 bp, Glycine max
  Clone ID: LIB3138-105-Q1-N1-F1
ctcgagccgattccgctcgagctaaattgcaaagctgtctagctggtcataacatcaccattactgatggtattgacaaaactagtgcagctttgcaatttagaaagttagcagattgggattgtctcaagagaaactttaagcagatgtctaatgtgttgtgggtggctcctgaggacaatgcgagtttatggccacaacttcattatggttcgggtcataatctggaaatgcaagaagcttatgttgtcaatctcggcaatgtgttacgaga

SEQ ID NO: 36585 - DNA, 336 bp, Glycine max
  Clone ID: LIB3138-105-Q1-N1-F10
caaagagaatggctcaagcaatggcatcaatgactagcttacgtggttcctctcaggctgtgttggaaggtagccttggctccacacgcttgaatgtggggagtggaagcagggtggcctcagtcacacgtgcagggttcacagttagagcacagcaacaacaagtgaatggtggtgaggtacaaagtagccgtagggcagtgctttcacttgttgctgctggtttgaccactggctcttttgttcaagctgtgcttgctgatgccaaacctatcaaagttggaccaccttccccaccttctggcggattacctggaacattgaactcagatgaac

SEQ ID NO: 36586 - DNA, 446 bp, Glycine max
  Clone ID: LIB3138-105-Q1-N1-F12
gagaatgcctctttctatagggggaggagctggtgcaaagaatgctattctcatgaatatgccaaatgctgttctttcaatgtggagatattttgttggagatctcgtctttgaagtttctaagatgacttctccctacattaaatgtacagtctctttcttcatagcatttggaaatttggctgatgataccatcaattttgaggcttttccccacaagctggtgcagtttggagagattcaggaaaaagttgtattgaaattttcacaagaggaatttcttacagcttggtcaactcaggtgcgtcctgcaacaactctgttggctgatgggtgtccatatttgtatgcaatggtgcatgatagttcagtgtctacaataccaggtgattttgtcattggtgtcaagttgacaaccataaacaatatgtgtgcatatgggctca

SEQ ID NO: 36587 - DNA, 395 bp, Glycine max
  unsure at all n locations
  Clone ID: LIB3138-105-Q1-N1-F2
ctttaagcagatgtctaatgttttgtgggtggctcctgaggacaaggcgagtttatggtcacaacttcattatgtttcgtgtaataatctggaaatgcaagaagcttatcttgtcaatctcgtaaatgtgttacgagaattgtatttgcacagtccagaggaagctcgccaattgagaaggaaagctctctctcgtattgaatggctgcaaaaagctgatgtgcctaccatagcacagattgaagagttccattcgatgcagaggatgatgaatgctcctgattcaaatgataatattgatttactgttgagcatttgattgtgggtttacaaggagcaggtaaagctttttcaaacaaaatngtttttgatgataagcttgtgtggctaacaca

SEQ ID NO: 36588 - DNA, 349 bp, Glycine max
  Clone ID: LIB3138-105-Q1-N1-F5
gggcgttccttatcctgccggcggctattacggttactactatccaggttatggtggtttctatggagagtcagacaaccaagggtactatgttggtgccgatgccgtggatcttcagtaccctgtcatgcaagcagataatggttcttatgtctatctcgtgccaggatttcagactggctacccttcatactatcatcctctaagtccagctggtattgaaggacagtatgttggccataacgtctacccccctggctccatctatcaacaaccgattggatcgcctggttattatccagcttctctatcatatggagagttacagccaacaacatactcgtgggat

SEQ ID NO: 36589 - DNA, 275 bp, Glycine max
  Clone ID: LIB3138-105-Q1-N1-F7
ctggagctctgtggaagttactatggacacaagcaggtctgagggaaaaagggtcatgaggtacaaagaagaagatgatgataatgatgatgaagaagaagaagaggtggtgagtgagatgggttttgaagaagatggaaggaggaataagagagtaataagagatctctatggaaagagagggtccaaaggtggaggctcaataacaccttcttgccaagtggacaattgtgatgctgatctgagtgaagctaagcagtaccacagaagacaca

SEQ ID NO: 36590 - DNA, 388 bp, Glycine max
  Clone ID: LIB3138-105-Q1-N1-F8
aaagaagccagtgctaggatttgttagtgaagcaatggctcaaaccatgttgctcatgtctagtgtctctagcagttattccgtggatttgaagaaagaccttttcctccaattgcagagtcaaagtttaaggcctaagttctctcagctctcattcaacccacttccatcatcaacttcttccttttcttcaccccgtacattcacaactctggccctcttcaaatctaagaccaaagccgctcctgctaagactaaggttacaaagccaaagcaaaaggttgaagatggtatctttggcacttctggaggatttggttttactaagcagaacgagctctttgtgggtcgtgttgctatgcttggttttgcagcatcactgttgggt

SEQ ID NO: 36591 - DNA, 361 bp, Glycine max
  Clone ID: LIB3138-105-Q1-N1-F9
tttcaggttctcgtcttttgggcaccattcctcagtccatttcacagcaaactgtttggaatcaaatggcaacagtgagaacaccattgaattttgattctagcaagcagagcttttgtcagttttctattgaccttctcggtggaggaatcttagtggacaaaactggagattggatcacacttatacaaaattctccaattagtaacttgttgagagttgctgcttggaagaaaggctgtttaatggtcaagattgtgatgtctgggaatgcagcagtcaaaaggagtgattgggcctcattggtacaagtgtttttaacaaacagcaacagtacagagcattttgatgcatgtaagtg

SEQ ID NO: 36592 - DNA, 336 bp, Glycine max
  Clone ID: LIB3138-105-Q1-N1-G10
attggcctgtgctatgaatagttcttttagggggcgcgccagttctgatatttacaccatctgctctcaagactgtgaattgtggaatcctgcttgcacaaaagcaatgactatgtcatttaatccaaacccgtgttctgatgcatggagtttggaatttctgaagcgtactggatttcattgcgatatcatttgtgtcactggatggactgccaccccaatgcaggatgttcaggttacaattgattggtttatttcctctcaggaatgtgtttccaggacctattgtgttttaaattcacaaaattcttttgtgttaaataggtggatgggaaa

SEQ ID NO: 36593 - DNA, 362 bp, Glycine max
  unsure at all n locations
  Clone ID: LIB3138-105-Q1-N1-G11
gatttgttgggtttacaaggagcaggtaaagcttttccaaacaaaattgtttttgatgataagcttgtgttggctaacacacaagaattctttgatggaaattttccagtggattcttggttaccaatttttgtgaattgtctttatcctgtaagtcaattaccttcagaagctgtcgttgtaaatgttacatgtggtagtggacgtggtggtttacccaccactgcttggattagttctgcagttaacaatcgctcctcagatatcaacaaaaggattcgcacagcacttgggaaaggtaagaaaattngttttcttactagagttgatccttttncagtagctttactggctgttctttt

SEQ ID NO: 36594 - DNA, 306 bp, Glycine max
  unsure at all n locations
  Clone ID: LIB3138-105-Q1-N1-G2
gagaatccgaggcgaaaagaagagaaaaattaagatggaggggaaggagcaggatgggtcgctgggagcgaacaagttcccggagagacagccgattgggacggcggcgcaaagccaagacgaacggcaggactaccaggagccggcgccggcgccactggttgacccgacggagtttacgtcatggtccttttacagagcagggatagcagagtttgtggccacttttctgtttctatacatcactgtcttaaccgtcatgggagtcgncggggctaagtctaagtgcaataccgttggggattc

SEQ ID NO: 36595 - DNA, 264 bp, Glycine max
  Clone ID: LIB3138-105-Q1-N1-G3
gctgattgtggtcaagattgcgatgcctgtgaatgcaactgccaataagagtgatggtgcctcatagctacaagtgttcttaacatacagcagcattccagagcattgtgatgcatgtaagtggacaaaatcagaaccacattcctgggaattgatcttcacaatagagtttgttgatctaattatggctttgaaatgttgggttctgagtggtcaaaataaactttatggcatttgagatttcttattgacaattccaaacag

SEQ ID NO: 36596 - DNA, 346 bp, Glycine max
  Clone ID: LIB3138-105-Q1-N1-G6
gaaaaattactgcgccaggctaaagctccaagtatgtttttacaatccttcaaaaattttgtttctttgtgtgtgtatggtgatgataacttaattagtgttcatgaatatgtcaagccttactttagtggttctaaattgaaaagctttctagctagtcataacatcaccattactgatggtattgacaaaactagtgcaactttgcaatttagaaagttagcagattgtgattttctcaagagaaactttaagcagatgtctaatgttttgtgggtggctcctgaggacaaagcgagtttatggtcacaacttcattatgtttcgtgtaataatctggaaatgc

SEQ ID NO: 36597 - DNA, 429 bp, Glycine max
  Clone ID: LIB3138-105-Q1-N1-G8
gcaaaaagctgatgtgcctaccatagcacagattgaagagttccattcgatgcagaggatgatgaatgctcctgattcaaatgataatattgatttactgttgagcattgatttgttgggtttacaaggagcaggtaaagcttttccaaacaaaattgtttttgatgataagcttgtgttggctaacacacaagaattctttgatggaaattttccagtggattcttggttaccaatttttgtgaattgtctttatcctgtaagtcaattaccttcagaagctgtcgttgtaaatgttacatgtggtagtggacgtggtggtttacccaccactgcttggattagttctgcagttaacaatcgctcctcagatatcaacaaaaagattcgcacagcacttgggaaaggtaagaaaattgttttcttact

SEQ ID NO: 36598 - DNA, 275 bp, Glycine max
  Clone ID: LIB3138-105-Q1-N1-H10
gggcgtatggagaagttctactgggcaccaacaagggatgaccgcattggtgtctgcactggaatttttcgcaccgattcaattcctgaacaggacgttgtcaagattgttgacaccttccctggccaatccattgatttctttggtgcactgagggccagagtatatgatgacgaagtgaggaagtggatttctggtgttggtgttgacggcattgggaagaagcttgtgaactcaaaagatggacctccaacctttgagcaagccaagatgac

SEQ ID NO: 36599 - DNA, 320 bp, Glycine max
  Clone ID: LIB3138-105-Q1-N1-H11
ggacattgtcaagcttgttgacaccttccctggccaatccattgatttctttggtgcactgagggccagagtatatgatgatgaagtgaggaagtggatttctggtgttggtgttgacagtgttgggaagaagcttgtgaactcaaaagatggacctccaacctttgagcagcccaagatgactctggagaagctcttgctgtatggtaacatgcttgtccaagaacaagagaatgtcaagagagtccaattggctgacaagtacttgaacgaggctgctcttggaaatgctaacgaggatgctattcagaggggaactt

SEQ ID NO: 36600 - DNA, 295 bp, Glycine max
  unsure at all n locations
  Clone ID: LIB3138-105-Q1-N1-H12
gctgatgtgcctaccatagcacagattgaagagttccattcgatgcagaggatgatgaatgctcctgattcanatgataatattgatttactgttgagcattgatttgttgggtttacaaggagcaggtaaagcttttccaaacaaaattgtttttgatgataagcttgtgttggctaacacacaagaattctttgatggaaattttccagtggattcttggttaccaatttttgtgaattgtctttatcctgtaagtcaattaccttcagaagctgtcgttgtaaatgttacat

SEQ ID NO: 36601 - DNA, 353 bp, Glycine max
  unsure at all n locations
  Clone ID: LIB3138-105-Q1-N1-H2
gttttgatggtttgattaccaagcaagttatgagcaagatggcagaaatgataaacagtctttgtggtggtgatgaaaaattgatgcgtgaaaggacgcacctgctgttggcttgttgttcaaggatggcaatttgtaagaaagatgtttggagagttgaatgtggaatcccttctggatttccgctcacagttatttgcaatagcatttttaatgagatgctcattagatatagctatgaaaaattactgcgccaggctaaagctccaagtatgtttttacaatccttcaaaaatttntgttctttgtgtgtgtatggggatgataacttaattagtgttcatgaatatgtc

SEQ ID NO: 36602 - DNA, 505 bp, Glycine max
  Clone ID: LIB3138-105-Q1-N1-H3
acactatacaagcagctctgacgtcacatgcacgcttcggctcgagcttctttgaaggcatattggtcaaggtaaaggtactcgcggctcacaacattctaatacttctcctgctgctaatcattaccagtttaatcgtgtggctgctccacctcttgagagcccttcttctccttctgcttccccatcaggctcagcaaaaccaccagtgccaaagctagctcctcataggaaaaatgcttctgattcttctcctccccactctacatcaggttctggaacactatctaaaactaaaagcacctcatcaaaggttcatacagttcctattttggctggagttataggtggtgctgtgtttcttattttttcaagcattggcatatatctttgtaaaacaaaggtagctaatgtcagaccttgggccatgggactaagtggacagcttcagaaggcatttgtaactggtaaatctaagcatttcttttactataagttacatgag

SEQ ID NO: 36603 - DNA, 386 bp, Glycine max
  unsure at all n locations
  Clone ID: LIB3138-105-Q1-N1-H5
aagacactanagaagagctatacgtaagctgggcacgtccgctcgagctttcgcttttgctttctaggttttttttttttttttcttgctctttctctgtgtcgatggcgggaaaaggagggaaggggcttgtggccggaaaaaccacggcagcgaacaaggacaaagacaaggataagaaaaggcctgtctctcgttcatcccgtgctgggatccagtttcctgtgggtcgtatccataggcagttgaagcaaagggtgcaagcaaatggacgtgtgggggcgactgctgctgtgtacttggcctccattctggaatatctgactgctgaggtgcttgagctggcggggaatgctagcaaaaatctgaaagtgaaaaagatcaca

SEQ ID NO: 36604 - DNA, 310 bp, Glycine max
  Clone ID: LIB3138-105-Q1-N1-H6
cgagatgggttccctccctcacgtagtagaggattgcatgggcttcctccaactctatagcgacggttccattttccgttccaacggcatagaattcaaagtttcacccattcaagacaactccataacctataaggattatctctttgacaaaagattcaacctttctcttcgcttctacaagccccaacaacaacacatagcactcagcaataagaaggtccctattgtgattttccttcacggtggaggcttttgcttcggttcgcgcacctggccccatattcacaactgttgcatgcgcctcgcg

SEQ ID NO: 36605 - DNA, 319 bp, Glycine max
  Clone ID: LIB3138-105-Q1-N1-H7
cgagaactaccacaatgcatctaatagcttattcgatgtacgaacatttggggccattggagatggaataactgatgatacagagtcattcaaaatggcatgggacactgcttgccaaagtgaatcgccggtcaaagttatccttgttccccaaggtttctccttcgttattcaatctactattttcacaggtccttgtaaaggtggcttagtactaaaggttgatggcactcttatgccacctgatggacctgaatcttggccaaagaacaatagtaagcgtcaatggcttgtcttttttagaatcaatgggatgtca

SEQ ID NO: 36606 - DNA, 349 bp, Glycine max
  Clone ID: LIB3138-105-Q1-N1-H8
gtcaattccaacaacaccacaatgggaagaagaccggcgaggtgttaccggcagataaagaacaaaccgtacccgaaatcccgtttctgccgcggcgtgccggagccgaagatccgaatctacgacgtgggaatgaagaagaaaggcgtggacgagttcccgttctgcgtgcacctggtctcgtgggagaaggagaacgtctccagcgaggctttggaggcggcgcgcatcgcatgcaacaagtacatggccaagttcgccggaaaagatgccttccacctgcgcgtgagggtgcattccttccacgtgctccgcatcaacaagatgctatcgtgcgccggggccgaca

SEQ ID NO: 36607 - DNA, 451 bp, Glycine max
  Clone ID: LIB3138-105-Q1-N1-H9
gggaggagctggtgcaaagaatgctattctcatgaatatgccaaatgctgttctttcaatgtggagatattttgttggagatctcgtctttgaagtttctaagatgacttctccctacattaaatgtacagtctctttcttcatagcatttggaaatttggctgatgataccatcaattttgaggcttttccccacaagctggtgcagtttggagagattcaggaaaaagttgtattgaaattttcacaagaggaatttcttacagcttggtcaactcaagtgcgtcctgcaacaactctgttggctgatgggtgtccatatttgtatgcaatggtgcatgatagttcagtgtctacaataccaggtgattttgtcattggtgtcaagttgacaaccataaacaatatgtgtgcatatgggctcaatcctggtatttcaggttctcgcttt

SEQ ID NO: 36608 - DNA, 149 bp, Glycine max
  Clone ID: LIB3138-106-Q1-N1-A1
caactattaagcactaaaaagttgacagacatatgaagtttccagcaggtagctggccatactccagtcctagtataacaaaagaaactacatatgtctgtcaactttttaccgcttaatactagaaattttttgttatgcaactgagg

SEQ ID NO: 36609 - DNA, 479 bp, Glycine max
  Clone ID: LIB3138-106-Q1-N1-A10
ccaggacctattgtgttttaaatccacaaaatccttttgtgttaaataggtggatgggaaaattgactttcccccagggcacttcccgaagtgttaagagaatgcctctttctatagggggaggagctggtgcaaagaatgctattctcatgaatatgccaaatgctgttctttcaatgtggagatattttgttggagatctcgtctttgaagtttctaagatgacttctccctacattaaatgtacagtctctttcttcatagcatttggaaatttggctgatgataccatcaattttgaggcttttccccacaagctggtgcagtttggagagattcaggaaaaagttgtattgaaattttcacaagaggaatttcttacagcttggtcaactcaggtgcgtcctgcaacaactctgttggctgatgggtgtccatatttgtatgcaatggtgcatgatagttcagtgtctacaata

SEQ ID NO: 36610 - DNA, 405 bp, Glycine max
  Clone ID: LIB3138-106-Q1-N1-A11
agctaacacactctgcacattatgccttgttcatagaacgaaaaatattatagggagaggcacatggtgctaagaagacaacactgatcaatacacgcctgagccacccaacgacgatgctatacgacgaggctcagatgcttctgtgaaccgctattatgacgatggccgtacacgaaacctacggtgcacaaagattatagcatctggaagcactgatgcggactcaagatgagcaaagggctgtccgacgagcatgcctgcacgactagagtagcaaggacagattcattgggacaatgtacaataacgaaacccgacgacctcgcccaaatatgcagtgaccagccacagatcctaaggacaccacgagcctaaatcggtaaacactgtaatctggacgag

SEQ ID NO: 36611 - DNA, 421 bp, Glycine max
  Clone ID: LIB3138-106-Q1-N1-A12
gatgattgaggtggttttgaacgatcgattggggaagaaggtgcgcgtgaagtgcaacgacgatgataccatcggcgacctgaagaagcttgtggcggctcagactggcacaagagccgacaagatccgcatccagaagtggtacaccatctacaaggatcacatcactctcaaggattacgagatccatgacggcatgggtctcgaactctactacaactaaacacaacaaggtgtgttttatgcgtaatatactatgtgctgggaatgggataagcgctaaatgtaattctgacttgcgaaagttcccatgatttgaaataatgtacatctccaaatgatattgggtattatataccgttgacagcttaagttgctttgttatataacctatatctgatgacttgtttggcttgttgct

SEQ ID NO: 36612 - DNA, 465 bp, Glycine max
  Clone ID: LIB3138-106-Q1-N1-A2
ggtgattttgtcattggtgtcaagttgacaaccataaacaatatgtgtgcatatgggctcaatcctggtatttcaggttctcgtcttttgggcaccattcctcagtccatttcacagcaaactgtttggaatcaaatggcaacagtgagaacaccattgaattttgattctagcaagcagagcttttgtcagttttctattgaccttctcggtggaggaatcttagtggacaaaactggagattggatcacacttatacaaaattctccaattagtaacttattgagagttgctgcttggaagaaaggctgtttaatggtcaagattgtgatgtctgggaatgcagcagtcaaaaggagtgattgggcctcattggtacaagtgtttttaacaaacagcaacagtacagagcattttgatgcatgtaagtggacaaaatcagaaccacattccttggaaatgatc

SEQ ID NO: 36613 - DNA, 442 bp, Glycine max
  Clone ID: LIB3138-106-Q1-N1-A3
gccctttcttttctctactcttcccccattttttcttctttaatccctcgcctatatcttcagaaaattagatctgcttcagatctagggtttcccttttccaaatcacgagtccgttgagtttgattttgtggatgaaagcatagggatagggcttttgcaaacctctccaatgtttctcgaaattatatgaccatgcgtcgaattcgtatgctgcactccttctccgtcgtgttcctctactggttctacgttttctcatgaactccctctcaaatccgtaattaattagatcgatctccttccgtagttaatccttgtctctttttcaataattaattagatctgcgtctcctatttcctttttttggtttggtctggtatcaaaatcaaataaaaaatctccttcttcgaaatggcgtcgtcaatccaacaacaacgc

SEQ ID NO: 36614 - DNA, 481 bp, Glycine max
  unsure at all n locations
  Clone ID: LIB3138-106-Q1-N1-A4
gggaatatacccatatctccgttatcagataattgctggggtaggggagcatcggctttctgaacagtttgcttctcaaacattctttgtaaatatgctttcttttgtagcacggacagtaaattcgtattggggaacccagcaatggattgacctagcgcgctttactggcctacaagttagaaagacagagtcaccaacatcagatactccgaatcctgctgcaattttgtgcaatgaaacagaagaagccagcattgatgagatagaaaaataaatgcggtgaaattaggttgcaacattttttttttttcttggtaattttgtattattcttgaaaagctggtaaaataggcacaaaggaataggttctggttttcatcacaatctggttttcttggtaattttatactattcttgtatacgtttttgatatttcccatttcatagttnggtgaatgtaatatttttatttttaaat

SEQ ID NO: 36615 - DNA, 305 bp, Glycine max
  Clone ID: LIB3138-106-Q1-N1-A5
cttctccacggttactttcggtgatgatggaggacccgacaacgttgttgaacagcgaatattcgaggctgttcggcgaagacacggacttgtacaaccgcattgtgttgggcgccctattgccgcactctgtgtggggcccactcccgcgcttcctccagacgtggcttcgcaattacctcggcggcgttctcctctacctcctctctgggctcttgtggtgcttctacatttattattggaagcgcaacgttcatgtccccaaagatgctattccctctcaaagagccatgctcttgcaaata

SEQ ID NO: 36616 - DNA, 359 bp, Glycine max
  Clone ID: LIB3138-106-Q1-N1-A6
aaaaagattcgcacatcacttgggaaaggtaagaaaattgtttttcttactagagttgatccttttccagtagctttactggctgttctttttggcgttaagaatgaaattctgagttctaacgccactaatcctatgctgacgcgacttcttgagaactgtaagagtctcaaatatctggttgatgagtgtccttttgcatttgtgaactagtatgtagtattttattcacttaaataaagcgcattactatgtgcaatgagtgtgtttaaatatcctataaaaaagccatgctcttgcaaatatctgttgctatgaaagccatgccgtggttctctttacttccaactgtttaagaa

SEQ ID NO: 36617 - DNA, 186 bp, Glycine max
  Clone ID: LIB3138-106-Q1-N1-A7
acacaaggcagaaagcaagctcatcctagagttttaaaaatggcagcagcctcctccatggctctctcttccccatccttggctggcaagggcctgaaacttggcccattaaccccccaaagtcggaagggtcagcatgaggaagaccgtcaccaagcaggcctcctccggaagcccatggtacgg

SEQ ID NO: 36618 - DNA, 459 bp, Glycine max
  Clone ID: LIB3138-106-Q1-N1-A8
ctctctcttcattctctttctcttttcctttcacacaaactcctcttatgatgggtcttgatcaagatgctagcagcaactctggccttcagcttattctagggttagctttgactgccaccaccaccaccactccatcatcaccaccatccatttccaacaagcttgatcatgttgatcatcaccaccatcttataactcttagaccaacaacaaagtcatcctataattcctctgaggctgaaccatcattaacgttgggtctttcccgggagagttacctcaaagtccccaaaagcatcataggacacaacaacaacaaagtctcatcctgtgatgaccctcttgacttgtccacacagactaattcacctcatcacagtgctgtttcctccttctccagtggcagggtcaagagggagagggatctcagctgtgaagaagttgtggatgcaaaag

SEQ ID NO: 36619 - DNA, 476 bp, Glycine max
  Clone ID: LIB3138-106-Q1-N1-A9
attatcaactctttcaaaagggagaagaaaaggaaaggaaacaaaacgcacaaaggattattatagcaatggcagaacaaaaccaaaaccagacaactgaagctggaaggcaccaagaggttggccacaagagccttctccagagtgatgctctttaccagtatattctggagaccagtgtctacccaagagaacctgaatccatgaaagaactgagagagttgacagcaaaacacccatggaacatcatgacaacctctgcagacgaagggcaattcttgaacatgctccttaagctcatcaatgccaagaacaccatggaaattggtgtctacactggatattcacttcttgccaccgctctcgctcttcctgaagatggaaagatcttggccatggatattaacagggagaattatgaattgggtttgccagtaattaagaaagctggtgttgaccacaaaattgaattcaga

SEQ ID NO: 36620 - DNA, 470 bp, Glycine max
  Clone ID: LIB3138-106-Q1-N1-B1
gcgaaatggtatacaaagtcaacagatctaaatgaataaaaaatagtatttatggctacgcaaaccgttgaggataattctagatctggtccaagacgaactgttgtaggggatttattgaaaccattaaattcagaatatggtaaagtagctccggggtggggaactactcctttgatgggtgttgcaatggctctatttgcgatatttctatctattattttggagatttataattcgtccattttactcgacggaatttctatgaattagattcacaagaatcgggtaattagtttttcaatagaaaggaaagttaagcattttggtttcttattggttgttagtctatttcatttggatttggtagtttgatcgtggaatttctttgtttctgtatttccggaatatgagtaaagtctatgattggttcgaaaaacgtcttgaaattcaagcgattgccgatgata

SEQ ID NO: 36621 - DNA, 476 bp, Glycine max
  Clone ID: LIB3138-106-Q1-N1-B10
ttggaatgtgagacacatgactctcctgctgctagtcagagtgctggtcctagttttttccatgacacagcaaatcataatagtagtggtgtatacagaagtgatggaaatgctacttcagctaaggtagccaaggagagccatgaaatttttattgatagtggtcaacgcagttatgatggattcatagggacagattctcatcgcactagccaacgagaagcagctctaacaaagtttcgactgaagcggaaagacagatgctatgagaaaaaggtgcgatatcaaagccggaagagattggcagagcagcgccctcgcgtgaaagggcaatttgttcgccaagtacacgatgatcatccagtagcagatgtgggtggtggttcctgaaattgttttgttaccatcatcattgaattacagtctgacttccaaaactgtattgcctctcttgacaaggattaactgtaggatct

SEQ ID NO: 36622 - DNA, 474 bp, Glycine max
  Clone ID: LIB3138-106-Q1-N1-B11
gcaacagtgagaacaccattgaattttgattctagcaagcagagcttttgtcagttttctattgaccttctcggtggaggaatcttagtggacaaaactggagattggatcacacttatacaaaattctccaattagtaacttgttgagagttgctgcttggaagaaaggctgtttaatggtcaagattgtgatgtctgggaatgcagcagtcaaaaggagtgattgggcctcattggtacaagtgtttttaacaaacagcaacagtacagagcattttgatgcatgtaagtggacaaaatcagaaccacattcctgggaattgatcttcccaatagaggtatgtggtcctaataatggttttgaaatgtggagttctgagtgggcaaatcaaacttcatggcatttgagtttccttattgacaatcccaaacagtctacagtttttgatattctcttgggaatctctcaagat

SEQ ID NO: 36623 - DNA, 468 bp, Glycine max
  Clone ID: LIB3138-106-Q1-N1-B12
attaccaaatattgcaaagcaattcatgccatgataatagcagcagccagggaaccactatttcttttgaaaccagcaaggagcaatactttacccttgaatcatccccagcaatcaatgatctcataggttgtgattctccttcctatgctagtgtatcatccaataggagtcctttttctccacaagcttctcattcagaccagcatcagtcatcagacaacacctatggatcaccaacaagtgcacactctagatatgatgatgacggctacgaattgaagaacaagcttagagaactcgagatttcgttgttggggcctgattcagacattgttgatagttggcactgctcctacaagggtggccgccacagagcatcatctccaacggctaaacacaattgggatcagattgtggaaatgattccaaaattagacttgaaagaagtcctcattcggtgtgcac

SEQ ID NO: 36624 - DNA, 464 bp, Glycine max
  unsure at all n locations
  Clone ID: LIB3138-106-Q1-N1-B2
gaaggaaagctctctctcgtattgaatggctgcaaaaagctgatgtgcctaccatagcacagattgaagagttccattcgatgcagaggatgatgaatgctcctgattcaaatgataatattgatttactgttgagcattgatttgttgggtttacaaggagcaggtaaagcttttccaaacaaaattgtttttgatgataagcttgtgttggctaacacacaagaattctttgatggaaattttccagtggattcttggttaccaatttttgtgaattgtctttatcctgtaagtcaattaccttcagaagctgtcgttgtaaatgttacatgtggtagtggacgntcggtttacccaccactgcttggatagttctgagttaacaatcgctcctcagatataacaaaaagattcgcacagcacttgggaaaggaagaaaattgttttcttactagagtgatc

SEQ ID NO: 36625 - DNA, 410 bp, Glycine max
  Clone ID: LIB3138-106-Q1-N1-B3
acatgccgccactttctccacaggctcagctactgtcatcgttgctatgctggagaagaatggaactctgaagattgctaatgttggagattgtggattaagactcatccgtaatggtcatgtagttttttccacttctccacaagagcactactttgactgcccattccaactaagctctgagagggttggccaaacataccttgatgcagcggtatgcaatgtggagttgatacaaggagacacaattgtcatgggatccgacgggcttttcgataatgtttttgatcatgaaattgcgccaaccattgttagatacaaagatgttgcagaggctgcaaaggcattagctaacttggcaagcagtcatgcaatggattcaaattttgattctccctattcgttggaag

SEQ ID NO: 36626 - DNA, 102 bp, Glycine max
  Clone ID: LIB3138-106-Q1-N1-B4
atgaattttcacgggtctgaaaatgctgggaacaagcaacatcaaaatattgcttcaaatggcacctctagcgtagtggactaacatggatgggagaaacct

SEQ ID NO: 36627 - DNA, 395 bp, Glycine max
  Clone ID: LIB3138-106-Q1-N1-B5
cacgaagcaccaattatggctctgaatctttgtatctcacctaagtttaaatgggttccttccttagatagtgcttcctattctttgagaccttcacttgggtcttgttttggtaacataaacattgctagtgtgagtctaagtactactagaagtttgagtttgaggaggagtgggagtgttagtgtaagatctagtttagaaactgcggggcccacagtcacagtgggacaggtcactgaggttaacaaggacaccttctggccgatcgttaaggctgccggggataaaaccgttgtccttgacatgtacacacaatggtgtggcccttgcaaagtgatggctccaaagtttcaagaattatctgaaaagtatctgggatgtgtctttctaaa

SEQ ID NO: 36628 - DNA, 462 bp, Glycine max
  Clone ID: LIB3138-106-Q1-N1-B7
caggttcatcatcataaccttcaatgaaaagaaatggctgaggcaagcattggcagcaaaagcagcagatggtctttacagggaatgacagctctcgtcaccggtggatccaaaggaatcggatatgctatcgtggaggagttggcacagcttggagccactgtgcacacttgcgctcggaacgaagctgaactcaatgaatccttaaatgaatggaacacaaaaggatacagagtaactggttccgtctgtgacgtggcgtctcgtgcagaaagacaagacctcatagctagagtctccaatgagtttaatggcaaactcaatatccttgtaaacaacgtgggaacaaacgtaccgaaacatacccttgatgttacggaagaagacttctcatttctgataaatacaaatcttgaatctgcttaccacctaagccagcttgcacatcctctcctgaaagct

SEQ ID NO: 36629 - DNA, 474 bp, Glycine max
  Clone ID: LIB3138-106-Q1-N1-B9
ccgttttaaaactatctcttgtactaaaatatgaaacaccacctgagaaataaagcctaacattaacttgtttcattggtctttacttcctgctcctatactcacgtctaagttagctgctataacttgcagcttgattaactaagaaatatggttcccaaagtttatgctggtcaagaaatggcaatggttgagaatgagaattgcataatgaatgggaagtggaagaaacgtgtgcatgtttttggtgagagggtgatgagatttcctaacaaggcttggcagacaacgtggaaggtgggacgtgaagacccaagaaggttgatccatgcatttaaagtgggtttgtctctaactcttgcttctttgttgtatttgttggagccacttttcaaggggattggacagagtgctatttgggctgtcatgaccgtggttgttgtgttggaattcactgcaggggcaactttatgc

SEQ ID NO: 36630 - DNA, 296 bp, Glycine max
  Clone ID: LIB3138-106-Q1-N1-C1
ctcgagccgaatcggctcgagcagtttttgatattctcttgggaatctctcaagattttgaaattgctggtaatactcttatgccagctttttctgttccacaggctactgccagatcttctgaaaatgcggaatcctctgcatgatctggaatttgtgttttctttcgcttgttcgtttgtttaattcaataaaggaaattaggcatgaccctcttgttgagtatgctctgcctatttaaaaatttccacacctcttttaattgtcgtaatgatgtgtgaagtgtgtgttatttt

SEQ ID NO: 36631 - DNA, 479 bp, Glycine max
  Clone ID: LIB3138-106-Q1-N1-C10
gttgtctgacagggggaattttttccgagaatttcttttggacgagatcgtcaagggcatcgatgcagtaacaagggaacaactggtgagagtaatgtccttgctaggagttcagaatgtaacccctgttttcagcatggtacctacagtgggaccctttaagcctgcggctcttatacccaccataactgaagaggatgaagttatattgaacaatgtccagatggtggtggagttcttgactgctggaagttccctatcaagaacatctggtcaggcactgaatattcctcagattatccaagagcttctcccagtgttaccaggcatctctgttaaagtgcttccggaggttgttagcagattatcttctcgggttttagcacgattaattcgtgatacatttttgtaagagaattctgtctaccttactgcacacaattgtgtatattttgacagttgttcaaaaattgtatata

SEQ ID NO: 36632 - DNA, 479 bp, Glycine max
  Clone ID: LIB3138-106-Q1-N1-C11
ataaactaaaacccatccttccctaaaacaaatagcaacttgtttatccttaatctcccaatcaactcctccctcataagtcataacaccaaaatttgatcacctttttgcaacctatcttgctgtgctgtggtagcttctttgatgtagtcaatcatcttgtgctcaatcttgattggttgcaagtgaatccctgaactgaattacaatggctgaggaagatgtttacacaaaagatggaacagtagattaccgtggaaatcgtgctaacaaaaaggaaactggaacttggagagcctgcccctttattttaggaaatgaatgttgtgagagattggcatactatgggatgagcacaaatcttgtgacttatttcaatactaaactaaatcagtctggtcctactgcttccaagaataatgcaaattggggtggaacatgctacatcactccgttgattggagcatttgtggctgatg

SEQ ID NO: 36633 - DNA, 408 bp, Glycine max
  Clone ID: LIB3138-106-Q1-N1-C12
ctttgatggaaattttccagtgagattcttggttaccaatttttgtgaattgtctttatcctgtaagtcaattaccttcagaagctgtcgttgtaaatgttacatgtggtaatggacgtggggggttacccaccactgcttggattactcctgcatataacaatcgctcctcagatatcaacaaaaggattcccacatcacttgggaaaggtaagaaaattgtttttcttactatagttgatccttttccaaatctttactggctgttctttctggcgttaagaatgaaattctgagttctaacgccactaatgctatgctgacgcgactttttgagaactgtatgagtttgaaatatctggctgattaatgttctttaacatttgtgaactagtttgttttatttta

SEQ ID NO: 36634 - DNA, 405 bp, Glycine max
  unsure at all n locations
  Clone ID: LIB3138-106-Q1-N1-C2
gcgaaactggtttatgggttgaagtctggttcaggatttgtggggggaagagaagagcactcacaccatatccattatcaatggacttggccgcgaagcttcaccacttagacctgaccggcgtggtcattttggacgcccgaaagccctccgcactccgccaccttccgccacgcgttctcagcagaacaaacaccaacaccaatttgatttacacgaaccggttctcgggcccaccgaggcccaattccgcttcctcaacgggcctgtccatgataaccgtcgaggacgatatcgagtctcttttctccgagacgaactcggaggaggagcggcgcgtgaggaagcaacctagcattggggcgtcggggatttcctttcgngtgaagctcgaaaacgtgggga

SEQ ID NO: 36635 - DNA, 473 bp, Glycine max
  Clone ID: LIB3138-106-Q1-N1-C3
gtcaactcctgttcaattgaattcagtttcccttggtaggatttattgccaggccttgaggtaagcaacttaccaacatgggaacacaaccccagcaaacattttgggaggaagaggatgaggagatgcaaggccgtggaaccactatctcaggtcaatcaatgtcaacaagcagaagtttggggtctccatccagccggagtgaacagacaatggcaacacctgctagtgatagcacttttcttaggttaaaccatcttgacatacatggtgatgatgctggatcacagggtgcagttgctagcaagaagaaaaagaggggccaacgtgctattggaggtgataagagtggaagaggtctccgccaatttagtatgaaagtgtgtgagaaggtagaaagcaagggaagaacaacttacaatgaggtaactgatgaacttgtggctgaatttgctgatccaatcaatggtgtt

SEQ ID NO: 36636 - DNA, 488 bp, Glycine max
  Clone ID: LIB3138-106-Q1-N1-C5
ctctctcatccccatccttggctggcaaggccgtgaagctgggcccatcagccccagaagtgggaagggtgagcatgaggaagaccgtcaccaagcaggtctcctcaggaagcccatggtacggcccagaccgagtcaagtacttgggcccattctctggcgagcccccgtcctacctaaccggtgagttcccaggcgactacggctgggacactgctgggctttccgcagacccagaaaccttcgccaagaaccgtgaactcgaagtgatccactccaggtgggccatgctcggagccttgggctgcgtcttcccggagttgctgtcccgcaacggggtgaagttcggagaagccgtgtggttcaaggccgggtcccagatcttcagcgagggtgggctcgactacttgggcaacccaagcctgatccacgcccagagcatcctcgccatctgggccacacaagttatcctaatgggtgccgttgaa

SEQ ID NO: 36637 - DNA, 284 bp, Glycine max
  Clone ID: LIB3138-106-Q1-N1-C6
ctccgagcatccacaagcgacatcatgccaggcaagtctgacgacacggtcatcgaggagttcaacgagtatgtgaacatgtccgtcaaggagctcgaggagtggctcgagacggaggactcgcagggcgccggctggggcgacggcgatgagagcgtatgacatcaaagtggacgaaagatcgttgacatccttcagcgtaacccgaagaaggacccgagcaagtacacggacgaagatctggcccacatgcgcaaggtcgcctcgtactgcaagcgccacct

SEQ ID NO: 36638 - DNA, 378 bp, Glycine max
  Clone ID: LIB3138-106-Q1-N1-C7
ggaggccgcccagataacgtgaaggcagcacaagatgcactcgcattccgtgccaagtccaactcactcgctcagcttgggaagtacactggtgagggtgaatccgaggaagccaagaaggagttgttcgtcaaaagctactcctactaagatgtttgcagtgaatatgatacttgttaggcagcaacaccagcagttacagtaggtgttgacggacgatgaagtggaagactaatttgtctaaaatgtaatgtttttatagtcttggagactatttttgtttatggttaaatgcacctttacagcttaataaaccttttgctatgagttgtgtacttgattatgtctcaatatataacaaaatggtttaagctcggc

SEQ ID NO: 36639 - DNA, 460 bp, Glycine max
  Clone ID: LIB3138-106-Q1-N1-C8
gcagaattttgggtacggaaataggtttcagaatggccgccatgatgagcgatttgtctctgagttgaagctttcaaaaagtgaagaaactctatcacgaaagtgcattgcttttcaggagccttgtgaagttgcttgttatagtcgtgtcgaaggcggagaagtatactttgacgatcgtagtttgagactttttaagcgccatattactgaggatgttggagctgatttgaatgaaggttatgatacatacattcccaaaaaagacttaggctcagagggctttggcgatcttcttgcttgcattagagacaaaaatatccctcttcaaaacattcattttgtgacattccgtaataaccttaacaagatactggcaacagcttatatccgtcatgagccttgggaaatgggagtgcacaaaaggaatggtgttgtctatcttgatgtgcataaatta

SEQ ID NO: 36640 - DNA, 473 bp, Glycine max
  Clone ID: LIB3138-106-Q1-N1-C9
cccttcacaagattctcacaaacaactcttgagaaagaaagaatggctgccaacacattgatgagttctgccatctcagccttcccatctctcctttcctcctcaaaatccagatttgccgcagcagttcctctttccagctttgttgtcaccaatgcctcttcttctcgcttttccatgagtgctgactggatgcctggccagcctagacccccctaccttgatggttcagcacctggtgactttggattcgaccctcttcgtcttggtgaagtaccagagaatcttgagaggttcaaagagtcagaactcattcactgcagatgggccatgcttgctgttccaaggattttggttccagaggcattgggcttaggcaactgggtaaaggctcaggaatgggctgcagttcctggtggccaagcaacctacctaggcaacccagttccatggggcaccctacccaccattct

SEQ ID NO: 36641 - DNA, 465 bp, Glycine max
  Clone ID: LIB3138-106-Q1-N1-D1
attgtggatgaatacaaccgtcttcttacatctcagttggagacacaaagacaatattatgaatctttactagtggagacaaaaagtaaaatggaaagttccatgtctgaagcagtggagaaagctgcagcttctgaaatgctggatatccaaaatgaactggaaaagtgtacagaagaaagaaatgccattgctgaggtcaatcagaaactcataaaaaatcaagagatatggcggaagaaggttaaagaagctgaagggagggaggctacatcaattaaattgaagaatgagaggataaatgatttggaggaacagattagagatatcaagatttttcttgaagcgcaaaaaacaattgataaaatgtcagattcaaatgggatcaaggagggaacagtcctaccggtggcttatgagcaatcttctccaggccacagtaagagaaacaaaaagtctggtcgt

SEQ ID NO: 36642 - DNA, 463 bp, Glycine max
  Clone ID: LIB3138-106-Q1-N1-D10
tgcaactttgcaatttagaaagttagcagattgtgattttctcaagagaaactttaagcagatgtctaatgttttgtgggtggctcctgaggacaaggcgagtttatggtcacaacttcattatgtttcgtgtaataatctggaaatgcaagaagcttatcttgtcaatctcgtaaatgtgttacgagaattgtatttgcacagtccagaggaagctcgccaattgagaaggaaagctctctctcgtattgaatggctgcaaaaagctgatgtgcctaccatagcacagattgaagagttccattcgatgcaaaagatgatgaatgctcctgattcaaatgataatattgatttactggtgagcattgatttgttgggtttacaaggagcaaggtaagcttttccaaacaaaattgtttttgatgataaagcttgtgtggctaacacacaagaattctttgat

SEQ ID NO: 36643 - DNA, 390 bp, Glycine max
  Clone ID: LIB3138-106-Q1-N1-D11
caagagcttgctgaaagagtgatggtaactcggcttcacctttatggaaaatgggtcaagaaatgtaatcatgctgagatatatcaagaaatctctgatgaaaacttggagttaatgagggaacggctcatggagacagtaatatggccctcagatgacacaaacacagaaaagattggctgataattcatctcaaatttttactttctgtcttcaacctcttcctagtctaggtatattttttgtttcaatatcaatctgttttgtttccaaaattgtcatttgtgtcattttcctttgataggattctcagttttacgttatgtaaattatgtatatatttgtaccttgttaaatacacaatccattatatatcgctagtttcagatg

SEQ ID NO: 36644 - DNA, 361 bp, Glycine max
  Clone ID: LIB3138-106-Q1-N1-D2
ctcttttttgttgttgtggtgtttcatttgtgaaactaacaacaacacaaggccatcatcatggcagctgcttccccaatggcaagccaactcaagtccaccttcactaggactcttgtagctcccaagggcctctctgcctcttcaccacttcacctcgtgccttctagaaggcaatttagcttcactgttaacgccatccaatcagagaagccaacctatcaagtgattcagccaatcaacggtgacccattcattggaagcctggaaaccccagttacatccagccctttgatcgcatggtacttgtccaacctgcccgcatacagaaccgcagtgagcccactactaagaaggatcg

SEQ ID NO: 36645 - DNA, 477 bp, Glycine max
  Clone ID: LIB3138-106-Q1-N1-D3
ctcgagccgtggggacttcgcctctgccttttcctcctattcagaattttgcagtggggagaggaccggcgcttcgatgaaatgcgtagtaatttgggtagactggccatattttggatatttcaggctgtctgggtgtgggttgtgagtttacctgttacgttggttaatgcaagcgacagaaatcccttcctacaggttgttgatatagtagggtggattttgtgggctgtgggttttattgtggaaggtacagcagatcaacaaaagctgcatttcaaaagatcttcagaaaatagagggaagtggtgtaatgttggactatggaaatattctcgtcatcctaactattttggtgaaatattgctttggtggggaatttttgtggcatctacacctgtactgaagggtgctgaatggctggtgatcattggaccaatctttctcacattattgcttctttttgtcagtggcatt

SEQ ID NO: 36646 - DNA, 398 bp, Glycine max
  Clone ID: LIB3138-106-Q1-N1-D4
atacttgacactcttcgtagtacacaagatgataaaactgcagtctatgatcagatgaaaagacaagttgttgagttggctaggcaaactttccatccagagttcatgaatcgcattgatgaatatattgttttccagcctctggattccgaacagatcagcaaaatagtggagctccagatggagcgagtgaaaaacaggctcaagcagaagaaaattgatcttcattacacagaaaaagctgttaaacttcttggtgtactgggttttgatccaaattttggagctagaccagttaaaagagtgatacagcaattggttgaaaatgaaattgctatgggagttctaaggggagatttcaaagaagaagactcaatcattggtgatgctgatgtgac

SEQ ID NO: 36647 - DNA, 384 bp, Glycine max
  Clone ID: LIB3138-106-Q1-N1-D5
tggactgccaccccaatgcaggatgttcaggttacaattgattggtttatttcctctcaggaatgtgttcccaggacctattgtgttttaaatccacaaaatccttttgtgttaaataggtggatgggaaaattgactttcccccagggcacttcccgaagtgttaagagaatgcctctttctatagggggaggagctggtgcaaagaatgctattctcatgaatatgccaaatgctgttctttcaatgtggagatatcttgttggagatctcgtctttgaagtttctaagatgacttctccctacattaaatgtacagtctctttcttcatagcatttggaaatttggctgatgataccatcaattttgaagcttttccccac

SEQ ID NO: 36648 - DNA, 354 bp, Glycine max
  Clone ID: LIB3138-106-Q1-N1-D6
gttacatgtggtagtggacgtggtggtttacccaccactgcttggattagttctgcagttaacaatcgctcctcagatatcaacaaaaggattcgcacagcacttgggaaaggtaagaaaattgtttttcttactagagttgatccttttccagtagctttactggctgttctttttggcgttaagaatgaaattctgagttctaacgccactaatcctatgctgacgcgacttcttgagaactgtaagagtctcaaatatctggttgatgagtgtccttttgcatttgtgaactagtatgtagtattttattcacttaaataaagcgcattactatgtgcaatgagtgtgttt

SEQ ID NO: 36649 - DNA, 446 bp, Glycine max
  Clone ID: LIB3138-106-Q1-N1-D7
ctcgagccgaatcggctcgagcaaaaatggcggcgaaacttcaaatatttacgggattgccccccgcgccatttcaatcttcctcctccactctctgcgtactcaagaagcctctcactacctccttcttcggcactgcacgagtggaagttctgaaacttcgagtgatgaggattgcgaagcctgcgcgcggtggaggtgctctcggtgctcgcatgaacctctttgacaggttcgccagagttgtgaagtcgtacgcaaacgctgtcttaagctcgtttgaagatccggagaaaatattggagcaagctgtgcttgaaatgaacgacgacttgaccaaaatgcgttaagctactgcacaagtgttggcatctcaaaagcggttggaaaataaatacaaggctgcacaacaagcttctgaagagtggtaccggaaagcacaactt

SEQ ID NO: 36650 - DNA, 473 bp, Glycine max
  Clone ID: LIB3138-106-Q1-N1-D8
aagaagcttatcttgtcaatctcgtaaatgtgttacgagaattgtatttgcacagtccagaggaagctcgccaattgagaaggaaagctctctctcgtattgaatggctgcaaaaagctgatgtgcctaccatagcacagattgaagagttccattcgatgcagaggatgatgaatgctcctgattcaaatgataatattgatttactgttgagcattgatttgttgggtttacaaggagcaggtaaagcttttccaaacaaaattgtttttgatgataagcttgtgttggctaacacacaagaattctttgatggaaattttccagtggattcttggttaccaatttttgtgaattgtctttatcctgtaagtcaattaccttcagaagctgtcgttgtaaatgttacatgtggtagtggacgcttgtgttacccaccactgcttggattagttctgcagttaacaatcgct

SEQ ID NO: 36651 - DNA, 471 bp, Glycine max
  Clone ID: LIB3138-106-Q1-N1-D9
gaaattttcacaagaggaatttcttacagcttggtcaactcaggtgcgtcctgcaacaactctgttggctgatgggtgtccatatttgtatgcaatggtgcatgatagttcagtgtctacaataccaggtgattttgtcattggtgtcaagttgacaaccataaacaatatgtgtgcacatgggctcaatcctggtatttcaggttctcgtcttttgggcaccattcctcagtccatttcacagcaaactgtttggaatcaaatggcaacagtgagaacaccattgaattttgattctagcaagcagagcttttgtcagttttctattgaccttctcggtggaagaatcttagtggacaaaactggagattggatcacacttatacaaaattctccaattagtaacttattgagagttgctgcttggaaaaaaagctgtttaatggtcaagattgtgatgtcttggaatgc

SEQ ID NO: 36652 - DNA, 282 bp, Glycine max
  Clone ID: LIB3138-106-Q1-N1-E1
acagttcaagcactccgcaggactgtcccacctgcggtgccaggggttgtgtttctgtctggtgggcaaagtgaagaaaaagctaccctcaacctgaatgcaatgaacaagttggaggtgttgaagccatggactctctcattctcattcgggcgagcactgcaacaaagcacactcaagacatggggtggaaagaaggagaatgtcgccaaagctcaagaggcatttctggcaagatgcaaggccaattctgatgctactctgggaaagtatgttggtgga

SEQ ID NO: 36653 - DNA, 248 bp, Glycine max
  Clone ID: LIB3138-106-Q1-N1-E10
cggctcgaggtgaattgtggaatcctgcttgcacaaaagcaatgactatgtcatttaatccaaacccgtgttctgatgcatggagtttggaatttctgaagcgtactggatttcattgcgatatcatttgtgtcactggatggactgccaccccaatgcaggatgttcaggttacaattgattggtttatttcctctcaggaatgtgttcccaggacctattgtgttttaaatccacaaaatcctttt

SEQ ID NO: 36654 - DNA, 397 bp, Glycine max
  Clone ID: LIB3138-106-Q1-N1-E11
attaaaatggtggccacagttggtattcctgagaatacaggtatatcattggcctgtgctatgaatagttcttttagggggcgcgccagttctgatatttacaccatctgctctcaagactgtgaattgtggaatcctgcttgcacaaaagcaatgactatgtcatttaatccaaacccgtgttctgatgcatggagtttggaatttctgaagcgtactggatttcattgcgatatcatttgtgtcactggatggactgccaccccaatgcaagatgttcaagttacaattgattggtttatttcctctcaagaatgtgttcccaggacctattgtgttttaaatccacaaaatccttttgtgttaaataggtggatgggaaaattgactttccccc

SEQ ID NO: 36655 - DNA, 186 bp, Glycine max
  Clone ID: LIB3138-106-Q1-N1-E12
ccaaacacaaagacttatattatccgtggttgcctccgtatacactgtcggagcttgaaacagagctcttttgaacctgaatggttctggagctggagcttcagttccaagttcagccttctttgggaccagcttgaagaaggttattgcctcaagggtccccaacagcaaggtttccggtggaag

SEQ ID NO: 36656 - DNA, 279 bp, Glycine max
  Clone ID: LIB3138-106-Q1-N1-E2
aaggatggtttaaatggggggccacagtgggttttctggaaattccaggtttttaatgggcctgggctatgaatagttttttaagggggccccccagttttgatattaacaccatttgttttaaaaactgtgaatgggggaatcctgctggcccaaaaccaatgactatgtcatttaatccaaacccgtgttctgatgcatggagttggaaatttctgaagcgtactggatttcattgcgatatcatttgtgtcactggatggactgccacccaaatgc

SEQ ID NO: 36657 - DNA, 477 bp, Glycine max
  Clone ID: LIB3138-106-Q1-N1-E3
gcctctttctatagggggaggagctggtgcaaagaatgctattctcatgaatatgccaaatgctgttctttcaatgtggagatattttgttggagatctcgtctttgaagtttctaagatgacttctccctacattaaatgtacagtctctttcttcatagcatttggaaatttggctgatgataccatcaattttgaggcttttccccacaagctggtgcagtttggagagattcaggaaaaagttgtattgaaattttcacaagaggaatttcttacagcttggtcaactcaggtgcgtcctgcaacaactctgttggctgatgggtgtccatatttgtatgcaatggtgcatgatagttcagtgtctacaataccaggtgattttgtcattggtgtcaagttgacaaccataaacaatatgtgtgcatatgggctcaatcctggtatttcaggttctcgtcttttgggcaccat

SEQ ID NO: 36658 - DNA, 304 bp, Glycine max
  Clone ID: LIB3138-106-Q1-N1-E4
agcaaattgttgggaatcaaagggcaccggtgggaccacccttgaattttgattctagcaagcaaagcttttgtcagttttttatggaccttctcggtggaggaatcttagtggacaaaactggagattggatcacacttatacaaaattctccaattagtaactttgtgagagttgctgcttggaagaaaggctgtttaatggtcaagattgtgatgtctgggaatgcagcaatcaaaaagagtgattgggcctcattggtacaagtgtttttaacaaacagcaacagtacaaagcattttga

SEQ ID NO: 36659 - DNA, 360 bp, Glycine max
  Clone ID: LIB3138-106-Q1-N1-E5
cgaggtttcttagcaagggagacttccagaaggcttttgacattattgtgtctcttgatgtgtggaaatttgtgagaaatcgagacactgtgcttgaaatgcttaaggacaaaatcaaggaggaggcattgaggacatacctctttaccttctcttcatcttatgaatccttgagcctggatcagctcacaaaattttttgatctccctgtttcttgcactcatagcattgtcagtaggatgatgatcaatgaggagcttcatgcaagctgggaccagccaactgggtgcattcttttccaagatgttgaacactctaggctgcaggccttggcattccagttgacagagaaattatcta

SEQ ID NO: 36660 - DNA, 342 bp, Glycine max
  Clone ID: LIB3138-106-Q1-N1-E6
attatgctagttttgatggtttgattaccaagcaagttatgagcaagatggcagaaatgataaacagtctttgtggtggtgatgaaaaattgatgcgtgaaaggacgcacctgctgttggcttgttgttcaaggatggcaatttgtaagaaagatgtttggagagttgaatgtggaatcccttctggatttccgctcacagttatttgcaatagcatttttaatgagatgctcattagatatagctatgaaaaattactgcgccaggctaaagctccaagtatgtttttacaatccttcaaaaattttgtttctttgtgtgtgtatggggatgataacttaa

SEQ ID NO: 36661 - DNA, 430 bp, Glycine max
  Clone ID: LIB3138-106-Q1-N1-E7
ccgccagctaaccacaggtaatcgacaacagcaagatcgatctctgtccagtcgaatcttccaaaatggccgactctcaagttactctgcgcacgcgcaagttcatccgcaaccccctcctcggacgtcgtcagatggtcgtcgacgtcctccaccccaaccgcgcgaacgtttccaaggacgagctccgtggcaagctcggtgagctgtacaaggccaagaaggacgatgtctccgtcttcggtttcaagacacacttcggtggcggcaagagcaccggcttcgctctcatctacgacagcgccgaggccatgaagaagttcgagccccgctacaggctagtacgctacggcatggccaccaaggtcgagaaggccagcaggcagcagcgcaagcagcgcaagaacaggatgaaggagttccggggcac

SEQ ID NO: 36662 - DNA, 472 bp, Glycine max
  Clone ID: LIB3138-106-Q1-N1-E8
gttctcgtcttttgggcaccattcctcagtccatttcacagcaaactgtttggaatcaaatggcaacagtgagaacaccattgaattttgattctagcaagcagagcttttgtcagttttctattgaccttctcggtggaggaatcttagtggacaaaactggagattggatcacacttatacaaaattctccaattagtaacttgttgagagttgctgcttggaagaaaggctgtttaatggtcaagattgtgatgtctgggaatgcagcagtcaaaaggagtgattgggcctcattggtacaagtgtttttaacaaacagcaacagtacagagcattttgatgcatgtaagtggacaaaatcagaaccacattcctgggaattgatcttcccaatagaggtatgtggtcctaataatggttttgaaatgtggagttctgagtgggcaaatcaaacttcatggcatttgag

SEQ ID NO: 36663 - DNA, 435 bp, Glycine max
  Clone ID: LIB3138-106-Q1-N1-E9
aatgatattaacaatgaggagcaggcattacaatgtaggagcccgtgggctactttatcacctgatctgttcatgatggagttaagacaagctaaaatgagccttggtaaaactataagtgatctcagggcgatacagtcttctgttgaagctttgaataagaagatgaagaaggataggctttttgttgagaggacccgtgagaagctagcatcaaagtttgctgctgtatctgctcaagaagtggccagaaaagaagcaaggttaactccacctgaagctactgtaggaacaagttgcacttgtcatcatctcctaaatgttgggaggagtttcaaatttgatactggacagtcaaatggaatgagtgaaacaagaatatctgaagtttcaaggcccttgcctgagtttggagagaatggaattagtattaag

SEQ ID NO: 36664 - DNA, 478 bp, Glycine max
  unsure at all n locations
  Clone ID: LIB3138-106-Q1-N1-F1
cttagttgtcaagttggaatcaacccatactccatggaatggacgggtttggccaataaattactgagtaagggcaatgatattctgtgttgcgattatgctagttttgatggtttgattaccaagcaagttatgagcaagatggcagaaatgataaacagtctttgtggtggtgatgaaaaattgatgcgtgaaaggacgcacctgctgttggcttgttgttcaaggatgggcaattgtaagaaagatgtttggagagtngaatgtggaatcccttctggatttccgctcacagttatttgcaatagcatttttaatgagatgctcattagatatagctatgaaaaattactgcgccaggctaaagcttcaagtatgtttttacaatccttcaaaaatttgtttctttgtgtgtgtatggtgatgataacttaattagtgttcatgaatatgtcaagccttactttagtggttctaa

SEQ ID NO: 36665 - DNA, 432 bp, Glycine max
  Clone ID: LIB3138-106-Q1-N1-F11
gttctcgtcttttgggcactattcctcagtccatttcacagcaaactgtttggaatcaaatggcaacagtgagaacaccattgaattttgattctagcaagcagagcttttgtcagttttctattgaccttctcggtggaggaatcttagtggacaaaactggagattggatcacacttatacaaaattctccaattagtaacttattgagagttgctgcttggaagaaaggctgtttaatggtcaagattgtgatgtctgggaatgcagcagtcaaaaggagtgattgggcctcattggtacaagtgtttttaacaaacagcaacagtacagaacattttgatgcatgtaagtggacaaaatcagaaccacattcctgggaattgatctttccaataaaagtatgtggtcctaataatggttttgaaatgt

SEQ ID NO: 36666 - DNA, 348 bp, Glycine max
  Clone ID: LIB3138-106-Q1-N1-F12
tggagattggatcacacttatacaaaattctccaattagtaacttattgagagttgctgcttggaagaaaggctgtttaatggtcaagattgtgatgtctgggaatgcagcagtcaaaaggagtgattgggcctcattggtacaagtgtttttaacaaacagcaacagtacagagcattttgatgcatgtaagtggacaaaatcagaaccacattcctgggaattgatcttcccaatagaggtatgtggtcctaataatggttttgaaatgtggagttctgagtgggcaaatcaaacttcatggcatttgagtttccttattgacaatcccaaacaatctacaagttt

SEQ ID NO: 36667 - DNA, 348 bp, Glycine max
  Clone ID: LIB3138-106-Q1-N1-F4
gtgaacagaatcctactgggaaggctactgccaatgttgttccactgcattggcaacccaacaatggtcttcttatgactaatgatatctcgggcgtcaaccttgaagaagcagtaccttgcattgccctctcaaaaaatgactcatacgttatgtctgcctgtggtggaaaggtttctctatttaacatgatgacattcaaggtaatgacaacattcatgccgccgcctcctgcttctaccttcctagctttccatccccaggataacaacattattgccattgggatggaggattcaaccattcacatctataatgtcagagtcgatgaggtgaaataaaaattga

SEQ ID NO: 36668 - DNA, 370 bp, Glycine max
  Clone ID: LIB3138-106-Q1-N1-F6
caaatggcaacagtgagaacaccattgaattttgattctagcaagcagagcttttgtcagttttctattgaccttctcggtggaggaatcttagtggacaaaactggagattggatcacacttatacaaaattctccaattagtaacttattgagagttgctgcttggaagaaaggctgtttaatggtcaagattgtgatgtctgggaatgcagcagtcaaaaggagtgattgggcctcattggtacaagtgtttttaacaaacagcaacagtacagagcattttgatgcatgtaagtggacaaaatcagaaccacattcctgggaattgatcttcccaataaaagtatgtggtcctaataaatggtttg

SEQ ID NO: 36669 - DNA, 442 bp, Glycine max
  Clone ID: LIB3138-106-Q1-N1-F7
ggctgttcttgtgggtgttgttggattggaatcggagagaaatggagagcagcgccgtctacggaagcattcgaccaagttacccgatctgcccctctcgacgttcttcctctcttctctctcaccaatctcccttcctattcgagccttctctttctctcaagcttcgcaagcagtttcctctcatttcgcagaattttctggaagccgcttctcctctcaggccttctgccactttgtcttctgattcctaccgtgagacgattgaattagctgatatagaatgggacaaccttggttttgggcttcaacccacggattatatgtattccatgaaatgcacacgaggtggaaccttctccaaaggtgaactgcagcgttttggtaacattgaattgaacccctcagcaggagttttaaactatggtcagggattatttga

SEQ ID NO: 36670 - DNA, 441 bp, Glycine max
  Clone ID: LIB3138-106-Q1-N1-F8
aaaaattactacattgtaatggatgcaatcgacacacttttcacggatcacagaacattctttggtatacaagttaagatgggtgagggaaaactttctacgcattgagcgcgaacaggtggtagtgataggctgatcataatgatgtgcgacggctatatgacgtctggagttgagttcctgtatagtaggagaacgaatgactgagtatgtaatgcgaacactatcgagtatctatcagtatcggagacgattgttttgcatatcagattgatggtattggcgtagaaacaaatcaacagacattggctaactaacagatgaacagacagaacatgtgacctatcgttggcctacaaagagaacttgagctatggaattttttaagatacatgctactagtcaagatggttattctttatgtggatctagagagaatac

SEQ ID NO: 36671 - DNA, 477 bp, Glycine max
  Clone ID: LIB3138-106-Q1-N1-F9
gtactgatgatcttggaggaacaccctgaaaattatcgtaacagactttaagcatctttaagcatactgtgccaaaaaagaagatactgtaccaaaaaagcatctctaagcatgaaaatgagttatttttttaatgcaacatctggataaaaaaaaagttctaacacaaggcttctaatcaattgcattagctgatacaataacaatccacgaatatcaaccatgtaaataggaagtttcttctaacacctataaacttcatggaaaaagggcaaaaaggagagggggtaaaagattaccccgatgattatggtttacctagaaggatgcttgagcttaaactaatataatttgttccccacaccaccttagaatcacctcagaagtgttaatcaaattgaaaataccttgcagaaggtgggaatgggagcataaaagggaaagaaaaatgaaaaggtaacccacattggataaact

SEQ ID NO: 36672 - DNA, 281 bp, Glycine max
  Clone ID: LIB3138-106-Q1-N1-G10
ggatgaggaggagccttccatggaccctgcctggccttacttgcaaattgtgtatgaactgcttctaaggttcgttacgtcaccagagactgatgcaaagttggcaaaaaggtatattgatcattcatttgttctgagactgttagacctttttgattcagaggatcccagggagcgggattacttgaagacagttcttcatcgtatttatgggaaatttatggttcaccgaccattcatcagaaaagcaatcaacaatatattctaccgcttcatttttg

SEQ ID NO: 36673 - DNA, 354 bp, Glycine max
  unsure at all n locations
  Clone ID: LIB3138-106-Q1-N1-G11
gtggtagtggacgtggtggtttacccaccactgcttggattagttctgcagttaacaatcgctcctcagatatcaacaaaaggattcgcacagcacttgggaaaggtaagaaaattgtttttcttactagagttgatccttttccagtagctttactggctgttctttttggcgttaagaatgaaattctgagttctaacgccactaatcctatgctgacgcgacttcttgagaactgtaagagtctcaaatatctggttgatgagtgtccttttgcatttgtgaactagtatgtagtattttattcacttaaataaagcgcattactatgtgcaatgagtgtgtttaantttt

SEQ ID NO: 36674 - DNA, 301 bp, Glycine max
  Clone ID: LIB3138-106-Q1-N1-G12
ctcgagccgaatcggctcgaggttgcatcaccgcaagtccacaacatggctgccactgccgctgcaggcatagcttccttgttttcttcttctattaacagtgtcaaatgtcttcgttcctccaagaactgctccattatagacccccttataaccacagtgccctcaaaccgtggcatgtttgtgtcacacttggtggaacctttgtccattgggggtgccattaattcgcacaagttgtgggggcctagaatttctgctgctgttgcacaagaagaagcttgtgttgtggctgatgatg

SEQ ID NO: 36675 - DNA, 471 bp, Glycine max
  unsure at all n locations
  Clone ID: LIB3138-106-Q1-N1-G2
aatggttcgattgtgttgatgaggaggattcctttgaggaagtttctttaagtgcagcacttaatggtgttgagggtttggactatatggaaagaattcctcttgccacatctganggatttcctcatgtgctttcacgcaaaaatggtgaaaaaggcaaaaggagatttgtctctggngatggtgaagagatgacactgattccgggaaccagtgttgaagaggcttacaacaagctaatagttgaacttgagaaaagtgttcctacattggttggcattgaatgtcccaaggatgagaaacttcctcgtcgcaaaatttttgacaaacctaagacgcgctgcttcactattctccctatggagtttaatcttgtggtccgtcaaaagtttttaaaatttgtgagggtcattatgaagaaaagggacaaacttagttgtcaagttggaatcaacccatactccatggaat

SEQ ID NO: 36676 - DNA, 330 bp, Glycine max
  Clone ID: LIB3138-106-Q1-N1-G4
tttgactcggtatgtgatgaattacataagtttgatctctgattacaaggttactttgaatgagcttatagtgtcgaagccctcaacggggtctaggtattctggtgatcctgggatacctgatatggatttgagtgagtttgaggagaagacacctttggatgttcacttgatttggattattgtgatattgcaattcaacttggatgggaagagtaagcactacagggatgcgtctttggctcacctttttgtcatgaacaatgtgcactacattgttcagaaggtgaaggggagtcccgagttgagggagatgataggggatgacta

SEQ ID NO: 36677 - DNA, 361 bp, Glycine max
  Clone ID: LIB3138-106-Q1-N1-G5
gttcctgctcctcgaacccttgagagcgagaaaccacgtttctctcttgaggttaattattattattattgagtattgagcatggaggcgccatctctcaccaaacccaacgacccaacaaaaccttccaacacttccagcacccttagtctggagggggggccgggcgaagcgagcccactccgaaaaatgtttgcggtggcgtccatcgccgccggcatacagttcgggtgggctctgcagctgtctctcttaaccccctacgttcagctcttaggagtcccccacgcggcggcctccttcatctggctctgtgggcccatctcggggctggtggtgcagcccattgtgggctactaca

SEQ ID NO: 36678 - DNA, 323 bp, Glycine max
  Clone ID: LIB3138-106-Q1-N1-G6
ttctgaagcgtactggatttcattgcgatatcatttgtgtcactggatggactgccaccccaatgcaggatgttcaggttacaattgattggtttatttcctctcaggaatgtgttcccaggacctattgtgttttaaatccacaaaatccttttgtgttaaataggtggatgggaaaattgactttcccccagggcacttcccgaagtgttaagagaatgcctctttctatagggggaggagctggtgcaaagaatgctattctcatgaatatgccaaatgctgttctttcaatgtggagatattttgttggaaatctcgtc

SEQ ID NO: 36679 - DNA, 472 bp, Glycine max
  Clone ID: LIB3138-106-Q1-N1-G7
cagattcagagactatttgggcagtgttatcattgaaattcaagtggggatgggtccttgtggggagctgagatatccatcttatccagaaagcaatggaacatggaggtttcctggaattggagaatttcagtgctatgacaagtatatgagagcttccttggaagcatcaactgaggccattgggaagaaagagtggggaaaaaatggaccacatgactcaggccaatacaaccaatttcctgaggacactggttttttccagagggaaggaacatggaacacagaatatggacgattcttccttgactggtactccaccaaacttcttgaacacggtgagaagatccttgtatcagccaaaagcattttcaactcatgcggggtgaaactatctgccaaagtagctggaattcattggcactacaaggcaaggtcacacgcggctgaactaactgcaagctactacaac

SEQ ID NO: 36680 - DNA, 463 bp, Glycine max
  unsure at all n locations
  Clone ID: LIB3138-106-Q1-N1-G8
gttttacttgtcaatgtacctaaagtttttaatggaatacctggtaggcctcatcatgttttttgcctataaagcaaatcaaattcagaaaaagggtagcggggttaccagggggatatagggaaaaactgaaaaaggatttgtggggaaggtgaaaatcagcgccgtattcggtataactttggcaccaatgaactattccgtcggaagctgggggtgtttgtatgtttccactggtttgactatgatgtaatattaatatcccagcattactgtaaatgatcattatggcgtattcattgcttgagattgcaatgcatgtaatgacaggtttagggtattagatcnaattgaatacgacagtgtccccaaatcatctatacacaagtttaaaatgtaaggcggatgcggagtgaatcaacgtgattcatgtattatatcggttagttttatgttggccgtc

SEQ ID NO: 36681 - DNA, 470 bp, Glycine max
  Clone ID: LIB3138-106-Q1-N1-G9
ggattttgatcgtgggatttctggttgcttattctggggtgtcaccaagttcccttaatcaactgaatatcgaaccttatctgggtatttggcctttgattcctgttgggtatttccttttttttttttttacttttaatttgtgtggaatctgaataattttgatcttggagggtaccctgaatcggtgaattggcgttgttgttttggtttaaagatggttgctgatgctagttgtggcttaaggtgatttagggaagtttttagataacggtataataaggatggcagcacagtcaaacgctggatttcacaatgaagatatagattctattttgaacaggcatgcaatatcatttcaacctggtggtgctattaacccgttgtctgagatggttccaatgggaaattattttgggctaagtagttcgtctgggatgatatattctgggaattcaagcatcattaac

SEQ ID NO: 36682 - DNA, 261 bp, Glycine max
  Clone ID: LIB3138-106-Q1-N1-H11
atggcaacagtgagaacaccattgaattttgattctagcaagcagagcttttgtcagttttctattgaccttctcggtggaggaatcttagtggacaaaactggagattggatcacacttatacaaaattctccaattagtaacttattgagagttgctgcttggaagaaaggctgtttaatggtcaagattgtgatgtctgggaatgcagcagtcaaaaagagtgattgggcctcattggtacaagtgtttttaacaaac

SEQ ID NO: 36683 - DNA, 469 bp, Glycine max
  unsure at all n locations
  Clone ID: LIB3138-106-Q1-N1-H2
gcaaaacgagctctttgtgggtcgtgttgctatgcttggttttgcagcatcattgttgggtgaaggaataactgggaaaggaatcctagcacaattaaacctggaaactggaattcccatttatgaagcggagcctcttcttctgtttttcatcctcttcaccctgctaggagccattggaggtttaggtgaccgtggaaaatttgtcgatgacgaacctactactggaggtgttattccttcaggcaaaggcttcagggaagcccttgggctcggttcaggtcctttattcggattcacgaaagcgaacgagctatttgtgggaagattggctcaattgggtttcgttttctcattgattggagaaattattactggaaagggagctctagcccaactcaacattgagaacggggtaccaatcaacgaaatcgagcccctaatgttgntcaacgttcttttcttcttc

SEQ ID NO: 36684 - DNA, 476 bp, Glycine max
  Clone ID: LIB3138-106-Q1-N1-H3
gcatgctgcacaactctgtgttcttgcagaagactgtgaccagcctgactatgttaaactggttaaggccctttgtgcagagcacaatgttagcctgctgacagttccgagtgcaaagacccttggagaatgggctggtttgtgcaagattgattccgaaggaaaagcaaggaaggttactggttgctcctgtgtggttgtgaaggatttcggtgaggagcatgaagcctataacgtcgttctgcagcatgtgaaatctcaatgagttgcaagattcatagattttatgcacttcacattttcattttgggttattccttgagaatgaattttgccttgtggctggattatatctaccctgggttttgattgtttaatatgactttgccacattctcaatgttgcttgtacttttttttatcctctgatgcattgctgtggctctaattaagaactcttgtttcacattaatcata

SEQ ID NO: 36685 - DNA, 275 bp, Glycine max
  Clone ID: LIB3138-106-Q1-N1-H4
aaagaaaagatgtttgagccacaacagctatacactcgcgcgaagaccgaggaattcgacctcgaatcaggagaaaccctctacccagggctgagcgtcggcgagaaccagctccgatggggtttcatccgcaaggtctacggcatcctctccgcgcagatcgtcctcaccaccctcgtctccgtcaccaccgttttctatactccaatcaatgacctcctcaagggcaattccaccctcctcctcatcctcctcttccttcccttcatcttttt

SEQ ID NO: 36686 - DNA, 345 bp, Glycine max
  Clone ID: LIB3138-106-Q1-N1-H5
acaataccaggtgattttgtcattggtgtcaagttgacaaccataaacaatatgtgtgcatatgggctcaatcctggtatttcaggttctcgtcttttgggcaccattcctcagtccatttcacagcaaactgtttggaatcaaatggcaacagtgagaacaccattgaattttgattctagcaagcagagcttttgtcagttttctattgaccttctcggtggaggaatcttagtggacaaaactggagattggatcacacttatacaaaattctccaattagtaacttgttgagagttgctgcttggaagaaaagcttgttaatggtcaagattgtgatgtct

SEQ ID NO: 36687 - DNA, 269 bp, Glycine max
  Clone ID: LIB3138-106-Q1-N1-H6
ctggcatccccgttgactgtgttggtgacgagcagaaaagcaatgttgggttatttcaaaacaattcccagagagcttttactgatgttaatatgggtcaagtatacaatgtagttgatgattatgagcaacaaagaatctgtagtgcagttgctagtggcaatactggaatcataaggaggcatcgtgaggtacgaaatgaacagctaagcataaactcaacacaaggtactgcacagaggagaattcgtttgtcaatggctacacat

SEQ ID NO: 36688 - DNA, 479 bp, Glycine max
  Clone ID: LIB3138-106-Q1-N1-H8
ctcaggtgcgtcctgcaacaactctgttggctgatgggtgtccatatttgtatgcaatggtgcatgatagttcagtgtctacaataccaggtgattttgtcattggtgtcaagttgacaaccataaacaatatgtgtgcatatgggctcaatcctggtatttcaggttctcgtcttttgggcaccattcctcagtccatttcacagcaaactgtttggaatcaaatggcaacagtgagaacaccattgaattttgattctagcaagcagagcttttgtcagttttctattgaccttctcggtggaggaatcttagtggacaaaactggagattggatcacacttatacaaaattctccaattagtaacttattgagagttgctgcttggaagaaaggctgtttaatggtcaagattgtgatgtctgggaatgcagcagtcaaaaggagtgattgggcctcattggtacaagtgttttta

SEQ ID NO: 36689 - DNA, 447 bp, Glycine max
  Clone ID: LIB3138-106-Q1-N1-H9
ctaaattgaaaagctttctagctagtcataacatcaccattactgatggtattgacaaaactagtgcaactttgcaatttagaaagttagcagattgtgattttctcaagagaaactttaagcagatgtctaatgttttgtgggtggctcctgaggacaaggcgagtttatggtcacaacttcattatgtttcgtgtaataatctggaaatgcaagaagcttatcttgtcaatctcgtaaatgtgttacgagaattgtatttgcacagtccagaggaagctcgccaattgagaaggaaagctctctctcgtattgaatggctgcaaaaagctgatgtgcctaccatagcacagattgaagagttccattcgatgcaaaggatgatgaatgctcctgattcaaatgataatattgatttactgttgagcattgatttggtgggtttac

SEQ ID NO: 36690 - DNA, 463 bp, Glycine max
  Clone ID: LIB3138-119-Q1-N1-A10
atcaaatggcaacagtgagaacaccattgaattttgattctagcaagcagagcttttgtcagttttctattgaccttctcggtggaggaatcttagtggacaaaactggagattggatcacacttatacaaaattctccaattagtaacttgttgagagttgctgcttggaagaaaggctgtttaatggtcaagattgtgatgtctgggaatgcagcagtcaaaaggagtgattgggcctcattggtacaagtgttttttaacaaacagcaacagtacagagcattttgatgcatgtaagtggacaaaatcagaaccacattcctgggaattgatcttcccaatagaggtatgtggtcctaataatggttttgaaatgtggagttctgagtgggcaaatcaaacttcatggcatttgagtttccttattgacaatcccaaacagtctacagttttgatattct

SEQ ID NO: 36691 - DNA, 384 bp, Glycine max
  Clone ID: LIB3138-119-Q1-N1-A11
cgccaatctcacccttcgtcgaccgccgccaacacaccagcctcgacaatgcctcccaaaggatccggaaagaagcctgcggctttcccccaggccacctctaaggcctctgccgccaagaagcaaaagaaccctctcatcgagaagcgtcctcgcaactatggcatcggtcaggacatccagccccagcgcaaacgtcggccgcatggtccgatggcccgcttacgtccgccttcagcgccagaagaagatcctcaacatgcgcttgaaggtcccaccggcgattgcccagttccagcacgttgccgaccgtaaccttgccacccaggctttcaagatcctcaacaagtaccgtcccgagaccaaggccgagaagaaggagcg

SEQ ID NO: 36692 - DNA, 332 bp, Glycine max
  Clone ID: LIB3138-119-Q1-N1-A12
ggaatctgcaccataacaaaatcagcaacaaatattcataaaaaaggggaaaattaaaaaagggaaagggaaagggaaagggatttctgttgaatgattaagaacctacccttttgtgcttattgggaataaaaaccccaacaaggtggagttaaaaaaatattacttggttccaaaaggggttgccgaacccttttaccaaccggaagtgaaaggaaagaaaaaaaatggttgaatttgattggttaaattggggagaaaaaaattaataacacttgctttgagagttggcattgaatttccctttaaagattccaaattttgtttgtgcc

SEQ ID NO: 36693 - DNA, 298 bp, Glycine max
  Clone ID: LIB3138-119-Q1-N1-A4
aaataaacaaaaagaaaaatgagtactaagtactaataccatataataattattaaaacagaaagaggaggtactacttgtattgggtaacgcgctatggcgggcgaatcgggtggtagtgctacgaacttgaactttgatcttcccgaggaggtggtgcaagtgctaccgtccgatcccttccagcagctcgatgtggctcgcaagatcacttccattgctctatcgacacgtgtcaacaccctcgaatcagacctatcctcacttcgcgcccagatcgccgacaaaaacaacctca

SEQ ID NO: 36694 - DNA, 402 bp, Glycine max
  Clone ID: LIB3138-119-Q1-N1-A5
gaaactttaagcagatgtctaatgttttgtgggtggctcctgaggacaaggcgagtttatggtcacaacttcattatgtttcgtgtaataatctggaaatgcaagaagcttatcttgtcaatctcgtaaatgtgttacgagaattgtatttgcacagtccagaggaagctcgccaattgagaaggaaagctctctctcgtattgaatggctgcaaaaagctgatgtgcctaccatagcacagattgaagagttccattcgatgcagaggatgatgaatgctcctgattcaaatgataatattgatttactggtgagcatttgattgttgggtttacaaggagcacgtaaagcttttccaaacaaaattgtttttgatgataaagctgtgttggctaacacac

SEQ ID NO: 36695 - DNA, 345 bp, Glycine max
  Clone ID: LIB3138-119-Q1-N1-A6
cgaatctgcaccatttcaaaatcagcaacaaacatccatacgggggggaaatataaagaaggagacggagaaagacaatgagatttccgtcaaatgaccaggaacctaccctcttgtgctgatcgaaaatacccaccaaaacaggttccacctaacaacatttacctcgttccagacatgaatacccaacccatctaacaaaccgtgtgtcaatgacacgattacatacgctttaatctcatcaataaactccttaacatgcacatgaatcacactcccttgaatgcccatcatcaatacgctttcaacctatacctttccttccatgttttaaaaaaactcaac

SEQ ID NO: 36696 - DNA, 376 bp, Glycine max
  Clone ID: LIB3138-119-Q1-N1-A7
gggtaatgataaatgtaatttggatctattcaggacgggggaaagtaagcacgctatctgatgtttatggaaatgtagaacttctgccctgcttttgggctatctattggagtgtttggcatgggcagagctgtttcagaaccaattttgattttctatgttccagattgggaataaaacaaagtaatacacagatttactcatttttataaagaaaaacacaggtttcgactgccgcaattatctaagtcaagtaacttgttccttagcccatgggagaaaattgttccatatgctatttaagcatcttttttttcaggaaagaaatatgggagatgaagtgtcaatggtctgtgaatttcaaacggtgttcaaa

SEQ ID NO: 36697 - DNA, 431 bp, Glycine max
  Clone ID: LIB3138-119-Q1-N1-A8
catgaatatgtcaagccttactttagtggttctaaattgaaaagctttctagctagtcataacatcaccattactgatggtattgacaaaactagtgcaactttgcaatttagaaagttagcagattgtgattttctcaagagaaactttaagcagatgtctaatgttttgtgggtggctcctgaggacaaggcgagtttatggtcacaacttcattatgtttcgtgtaataatctggaaatgcaagaagcttatcttgtcaatctcgtaaatgtgttacgagaattgtatttgcacagtccagaggaagctcgccaattgagaaggaaagctctctctcgtattgaatggctgcaaaaagctgatgtgcctaccatagcacagaatggagagttccattcgatgcaaaggatgatgaatgctcctgattc

SEQ ID NO: 36698 - DNA, 209 bp, Glycine max
  Clone ID: LIB3138-119-Q1-N1-A9
gccaaatgctgttctttcaatgtggagatattttgttggagatctcgtctttgaagtttctaagatgacttctccctacattaaatgtacaggctctttcttcataacatttggaaatttggctgatgataccatcaattttgaggcttttccccacaagctggtgcaatttggagagattcaagaaaaagttgtattgaaattttcac

SEQ ID NO: 36699 - DNA, 435 bp, Glycine max
  unsure at all n locations
  Clone ID: LIB3138-119-Q1-N1-B10
ggagagttgaatgtggaatcccttctggatttccgctcacagttatttgcaatagcatttttaatgagatgctcattagatatagctatgaaaaattactgcgccaggctaaagctccaagtatgtttttacaatccttcaaaaattttgtttctttgtgtgtgtatggtgatgataacttaattagtgttcatgaatatgtcaagccttactttagtggttctaaattgaaaagctttctagctagtcataacatcaccattactgatggtattgacaaaactagtgcaactttgcaatttagaaagttagcagattgtgattttctcaagagaaactttaagcagatgtctaatgttttgtgggtggctcctgaggacaaggggagtttatggtcacaacttcattatgtntcgtgtaataatctggaaatgc

SEQ ID NO: 36700 - DNA, 432 bp, Glycine max
  Clone ID: LIB3138-119-Q1-N1-B12
ccttacagagaaggacaatcaattggggtaattccagatggtattgacaagaatggcaaacctcataaactgagattgtattctattgctagcagtgccattggtgattttggagattccaaaactgtttctctatgcgtgaaacggctggtgtacacaaatgaaaatggagaaattgtcaagggagtctgctcaaatttcttgtgtgacctgaagccaggagctgaagtaacaataactggacctgttgggaaagaaatgcttatgccaaaagatccaaatgccaccatcatcatgttgggaactggaaccgggattgccccatttcgctcatttttatggaaaatgttctttgagaagcacgaagattacaagttcaatggtttggcatggctcttcttgggtgtccctacaagcagctcattgctttac

SEQ ID NO: 36701 - DNA, 173 bp, Glycine max
  Clone ID: LIB3138-119-Q1-N1-B2
ccgggcttaatcttaatgtaatacccgtgggatttaaaggattgcttgggccttccgggggattatcttttcccttttttaattgaccgcttggattttaaggggacacataaaacccgcggggacattttggcttttttttgggaagaaatttttcttttcccaagcgaatt

SEQ ID NO: 36702 - DNA, 305 bp, Glycine max
  Clone ID: LIB3138-119-Q1-N1-B4
gaaatgataaacattctttgttgtggagatgaaaaatagatgcgtgaggggacgcacctgctgttggcttgatgttcaaggatggcaatttgttagaaagatgtttggagagttccatgtggactcccttctgaatttacgctcacacagatttgcaatagcatatttaatgagatgctcattagatatagctatgaaaaattactgcgccaggctaaagctaccagtatggttttacaatcctccaaaaataactgattcggtgtgagagtattgtgatcatatcttaattagtgtccatgaat

SEQ ID NO: 36703 - DNA, 365 bp, Glycine max
  Clone ID: LIB3138-119-Q1-N1-B5
gcactctctgtcttagagaagaatacctgatcatcccttgttgagacagaatacttcccagaagatttcataaatttgctacctacgttcttctacttctgcattggatcaatgcagaagtgattcatgtaactatttttcctgtatatatattcttgtgtagcacaaatctacgacttgagaaattaatttatttataaattcttcctttgaaaattggaattatacaaaaaatatagatttcaatagttaaaatgcatcatacaatcaatgatatggatatatacatctcgccttgtataatgaaacaatagcttaaatatgattttggttgctataaatatactcatttcattttgactttt

SEQ ID NO: 36704 - DNA, 469 bp, Glycine max
  Clone ID: LIB3138-119-Q1-N1-B6
attttgttggagatctcgtctttgaagtttctaagatgacttctccctgcgttaaatgtacagtctctttcttcatagcatttggaaatttggctgatgataccatcaattttgaggcttttccccacaagctggtgcagtttggagagattcacgaaaaagttgtattgaaattttcacaagaggaatttcttacagcttggtcaactcaggtgcgtcctgcaacaactctgttggctgatgggtgtccatatttgtatgcaatggtgcatgatagttcagtgtctacaataccaggtgattttgtcattggtgtcaagttgacaaccataaacaatatgtgtgcatatgggctcaatcctggtatttcaagttctcgtcttttgggcaccattcctcagtccatttcacagcaaactgtttggaatcaaatggcaacagtgagaacaccattgaatttgattctagc

SEQ ID NO: 36705 - DNA, 450 bp, Glycine max
  Clone ID: LIB3138-119-Q1-N1-B7
gacatagggcaattttagagcaagtgttgatgtgcagcgcactcatcgtattagaggaatgattaaaatggtggccacagttggtattcctgagaatacaggtatatcattggcctgtgctatgaatagttcttttagggggcgcgccagttctgatatttacaccatctgctctcaagactgtgaattgtggaatcctgcttgcacaaaagcaatgactatgtcatttaatccaaacccgtgttctgatgcatggagtttggaatttctgaagcgtactggatttcattgcgatatcatttgtgtcactggatggactgccaccccaatgcaggatgttcaggttacaattgattggtttatttcctctcaagaatgtgttcccaggacctattgtgttttaaatccacaaaatccttttgtgtaaataaggggatgggaaaattgact

SEQ ID NO: 36706 - DNA, 346 bp, Glycine max
  Clone ID: LIB3138-119-Q1-N1-B8
gacgtggtggtttacccaccactgcttggattagttctgcaggtaacaatcgctcctcagatatcaacaaaaggattcgcacagcacttgggaaaggtaagaaaattgtttttcttactagagttgatccttttccagtagctttactggctgttctttttggcgttaagaatgaaattctgagttctaacgccactaatcctatgctgacgcgacttcttgagaactgtaagagtctcaaatatctggttgatgagtgtccttttgcatttgtgaactagtatgtagtattttattcacttaaataaagcgcattactatgtgcaatgagtgtgtttaaattttt

SEQ ID NO: 36707 - DNA, 315 bp, Glycine max
  Clone ID: LIB3138-119-Q1-N1-B9
tcttgattcattagaaattggacaggtaaggaaattgcttgttgagttacgtgcttacttaaacacgaataaacctcaattcaaagaaatcatatcttctaccaagacattcactggggaagcagaagtccttttgaaggaagctattcaagaacagatggaactctttttactacaggaacaggtagaaaaaaattgattaatcatttaataactttataatttcactttcaaattcttataattagtatcttttaatatctttttatttcatttgaatataatattaatatataaataaaatgaattcgaatg

SEQ ID NO: 36708 - DNA, 293 bp, Glycine max
  Clone ID: LIB3138-119-Q1-N1-C1
ttacaagtatttgccataacctttttaatgggatgctcctttgatattacttttgaaaaatactgggcccgggttaaacttccaagatttttttaccatccctcaaaaaatttggttctttggggggggattggggagataacctaaataggggtcattgatattggcaagcctaacttaaggggtcttaaatggaaaagctttttacctggccttaccttcccctttcctgttggttttgccaaacctggggcacctttgcaattaaaaaagttggccaatgggattttttt

SEQ ID NO: 36709 - DNA, 400 bp, Glycine max
  Clone ID: LIB3138-119-Q1-N1-C11
ctgtcaacagagctcttttgaacctgaatggttctggagctggagcttcagctcccagttcagccttctttgggaccagcttgaagaaggttattgcctcaagggtccccaacagcaaggtttccggtggaagcttcaagattgttgctgtagaagagaagaaagagattgaagagacccagcagaccgacaaggacagatggaagggtcttgcctatgatatctcagacgaccaacaagacatcacaagaggaaagggtttggttgactcccttttccaagctccacaagatgctggaactcactatgcagtcatgagctcctacgagtacctcagcactggactttggccagtacttggacaacaaaatggatggattctacattgctccagctttta

SEQ ID NO: 36710 - DNA, 412 bp, Glycine max
  unsure at all n locations
  Clone ID: LIB3138-119-Q1-N1-C2
gttcaggttacaattgattggtttatttcctctcaggaatgtgttcccaggacctattgtgttttaaatccacaaaatccttttgtgttaaataggtggatgggaaaattgactttcccccagggcactttccgaagtgttaagagaatgcctctttctatagggggaggagctggtgcaaagaatgctattctcatgaatatgccaaatgctgttctttcaatgtggagatattttgttggagatctcgtctttgaagtttctaagatgacttctccctacattaaatgtacagtctctttcttcatagcatttggaaatttggctgatgataccatcaattttgaggcttttccccacaagctggtgcagtttggagagattcangaaaaagttgtatcgaaattttcac

SEQ ID NO: 36711 - DNA, 396 bp, Glycine max
  unsure at all n locations
  Clone ID: LIB3138-119-Q1-N1-C5
ttacgcatgcctcgactgatcgtcgattcttagatggtccagaccattggtttaaatcacnaatccttttggttaataggtggatgggaaaattgactntcccccagggcacttcccgaagtgttaagagaatgcctctttctataaggggaggagctggtgcaaagaatgctattctcatgaatatgccaaatgctgttctttcaatgtggagatattttgttggagatctcgtctttgaagtttctaagatgacttctccctacattaaatgtacagtctctttcttcatagcatttggaaatttggctgatgataccatcaattttgaggcttttccccacaagctggtgcaagttggagagattcaagaaaaagttgtattgaaattttcac

SEQ ID NO: 36712 - DNA, 464 bp, Glycine max
  Clone ID: LIB3138-119-Q1-N1-C8
gttaaaccactggtttaacatgcccatcaataaagtcaaaggagctcttaaattggttgaaagctggacttatagaatcatggtttgtgataaccgttagtccaaactatgctaaagaactggtgtcaggtccagacaaaggagtggaattggacaacatcattcgcaaaattgatgatgatggtcgtttggttggaattgtgaatggcatggatgttcaggagtggaatccaaccactgacaaatatatagctgtcaaatatgatgtttcaacagtattggaagcaaaggctcttctgaaagaagccctccaagcagaagttggattgccagtcgacagaaatattcctctcattggtttcattggtaggcttgaagagcaaaaaggttctgatattcttgcagaagccattccccaatttatcaagcagaatgttcagttggtagccctaagaacaggaaaa

SEQ ID NO: 36713 - DNA, 447 bp, Glycine max
  unsure at all n locations
  Clone ID: LIB3138-119-Q1-N1-D1
acgccactaatcctatgctgacgcgacttcttgagaactgtgagagtctcaaatatctggttgatgagtgtccttttgcatttgtgaactagtatgtagtattttattcacttaaataaagcgcattactatgtgcaatgagtgtgtttaaatttaaaaaaaaaaaaaaaaaaaaaaaaaaaaaaaaaaaaaaaaaaaaaaaaaaaaaaaaaaaaaaaaaaaaaaaaaaaaaaaaataaaaaaaaaaaaaaaaaaaaaaaaaataacaaacaaanannnaaaaaaaaaaaaaaaaataaaaataaaaaaaaaaaanngggggggcccccccattttgggcccctcccccccggaattttaattggggccgggctttgggggggcacaatttttttttttaggggggttttttaaacgcgggcgaaaaaaggggaaaagttgtttttt

SEQ ID NO: 36714 - DNA, 364 bp, Glycine max
  Clone ID: LIB3138-119-Q1-N1-D11
gtaaattttccaaaggtcccaattattttccagaaagtttaagagtactggaatggcacgggtatccttctaattgtttaccatctaattttcctccgaaggaacttgtcatatgcaagttatctcaaagttacattacgtcatttgggttccatggctcaaggaagaagttcaggaagctaaaggttctgaaatttgactattgtaaaattttaacagagatacctgacgtatctgttctcgtaaatttggaagaactttcatttaatcggtgtgggaatttaattacagttcaccactcaattggttttctaaataaacttaaaatattgagtgcttatggttgcagcaagcttaccacatt

SEQ ID NO: 36715 - DNA, 412 bp, Glycine max
  Clone ID: LIB3138-119-Q1-N1-D12
gaagggtcgtgtttccctgcttcagtttcagcttcggcttcgagaagcgtcgattgggtccttaagctgttccttctatgtttctgatgacaagcgcttggacaaatatgagctttgcaatcaaacatagggatatagagagggaatgggagaatcggggtggagttatggttatttttttaaaattattggagattcttgctcactctcagaagatgtatgcctgctaatatactggaatggatgaagagatcaaatttaatttcaatattgatatagctttggagcattttggagcacatgagcaatggagcttgtggagcacggctcacctcaaggattgctctcttgacaaactgtataactgctatcaaacatgagcggtcgcttttctcgcacaatttatgtcggc

SEQ ID NO: 36716 - DNA, 170 bp, Glycine max
  Clone ID: LIB3138-119-Q1-N1-D3
gttttctattgaccttctcggtggaggaatcttattggacaaaactggggattggatcacacttatacaaaattctccaattaggaacttgttcagagttgctgcttgcaccaaaggctgtttaaaactaaaaagtgcgaggtctaggaatgcaccagtcaaaaggagtt

SEQ ID NO: 36717 - DNA, 315 bp, Glycine max
  Clone ID: LIB3138-119-Q1-N1-D6
attaaatgtacagtctctttcttcatagcatttggaaatttggctgatgataccatcaatttggaggcttttcctcacaagctggtgcagtttgtgagagattcatgaaaaagttgtatcgaaattttcacaagatgaatttcttacagcggtgtcaactaatgtgcgtgctgcaataactatttttttctaattgttgtacatatttgcttgcttttatgcaatatattgcatggtatattactgaagtgatgacgagatcaaatttaatttgaatattgatattgctttggagcatttttgagcaaatgaaca

SEQ ID NO: 36718 - DNA, 397 bp, Glycine max
  Clone ID: LIB3138-119-Q1-N1-D7
gaatatttctccctctccttgaattcttccttctcggaattgtttggttgctttttaataatatttattcagtgaattgtatgagggtgtgaactctatgatctttggaataatgggtgtttgtttaactgagactccatttgaaagttacgtgctttgatgacaaacatgaagcaaagtgaacttgtggtgtatctttccaattgaagtgaaagagtaaggatgtcaagtgggacaacatactggtgttacacatgcatgcagccaatctggcttgaagggagggaagccatttgcccctactgtgacagaggctttgtgcaagaacttaatgagctgcgatgagttgctcgccaacactgcttcttattgcggattgaagatgcttatcaaatgc

SEQ ID NO: 36719 - DNA, 303 bp, Glycine max
  Clone ID: LIB3138-119-Q1-N1-D8
attaaaatggtggccacagttggtattcctgagaatacaggtatatcattggcctgtgctatgaatagttcttttagggggcgcgccagttctgatatttacaccatctgctctcaagactgtgaattgtggaattctgcttgcacaaaagcaatgactatgtcatttaatccaaacccgtgttctgatgcatggagtttggaatttctgaagcgtactggatttcattgcgatatcatttgtgtcacttgatggactggcaccccaatgcaagatgttcaagttacaattgattggtttatt

SEQ ID NO: 36720 - DNA, 458 bp, Glycine max
  Clone ID: LIB3138-119-Q1-N1-D9
cgttgataaggtcaccggcggtgatactggcgatcctgacgatctcggcgtgcatcgcgtgtacggcgtcgtacgggggattggtcgggggaaggtcgaagatccctgacgtgaaggcgaacaagaaggtgcaggatctagggcggttctcggtggaggagcataaccggatgctgaggcaggcgcagaaggaggaggagcaagtcacgttcgtggaagtggtggaggcgcaacaacaagtggtgtctgggatcaagtactacatgaagatatcggccacgcagggtggcgacggtggagattccagaatattcgaatccgttgtggtggtgaagccgtggcttcgttccaagcagcttctcaatttcgctccttccacgcagtgaaatacgatcaatttcggttccgtttcaattacttttttaactcataataacatgcttaattggttagtatgc

SEQ ID NO: 36721 - DNA, 469 bp, Glycine max
  unsure at all n locations
  Clone ID: LIB3138-119-Q1-N1-E1
gaatggggtcctcaggagggtcatgggcatggccatggatgcttcccggcaccaaactctcatttccatcatactggccatgaaaaaacgcgtgtagatttatggcttaaagagaacacataatggccatggcaagatctgtaatgcacctcaagcaggaggagcatggccaattattggccatttacacctctttgggggtcatcaacatactcacanaacacttgtgataatggcagagaaacatggaccaattttcacaataaagctnggtcatacaaagttcttgttttgagtagctgggaagatggccaaagagtgtttcactgtccatgacaaaagcatttttaccagacccttgtgtgcaacctcaaagctaatgggctacaactatgccatgtttggcttcactccttatggtccttattggcgtgagataaagaaatttaattactattaagttttattt

SEQ ID NO: 36722 - DNA, 394 bp, Glycine max
  Clone ID: LIB3138-119-Q1-N1-E10
gagaagcgcgacacgcccatccctgtccagctcgaccatgagaagctgcaccagactcggactcgccgcaaagctaccgaaggcctcaagaaagcactccgactgctctcggcacaatatgctatattcgtgtctctacacaagatctaccagtccgagggtgtcggcggcctctactcgggtcttgaggccgaagtcctcaaaggcttcctcagtcacggcttgacgatggtgatgaaggatcgggtgcacgttggggtcatccagctatactatgctttgctcaaggtcacgaagaaatggccggatgagctgcagaaagcgcaagccaaagcgactcacgctattgaagatgcgaaggacaaggtacaggcttctgcggctcatgctatcg

SEQ ID NO: 36723 - DNA, 467 bp, Glycine max
  Clone ID: LIB3138-119-Q1-N1-E11
gctctctctcgtattgaatggctgcaaaaagctgatgtgcctaccatagcacagattgaagagttccattcgatgcagaggatgatgaatgctcctgattcaaatgataatattgatttactgttgagcattgatttgttgggtttacaaggagcaggtaaagcttttccaaacaaaattgtttttgatgataagcttgtgttggctaacacacaagaattctttgatggaaattttccagtggattcttggttaccaatttttgtgaattgtctttatcctgtaagtcaattaccttcagaagctgtcgttgtaaatgttacatgtggtagtggacggtgtgtttacccaccactgcttggattagttctgcagttaacaatcgctcctcagatatcaacaaaaagattcgcacagcacttgggaaaggtaagaaaattgtttttcttactaaaagtgatcctttt

SEQ ID NO: 36724 - DNA, 295 bp, Glycine max
  Clone ID: LIB3138-119-Q1-N1-E3
aaaaaaaaaaaaaattttaattttaaaaaaaaaaaaaaaaaagtgaaagtgaaaaataaaaatattgaaaaattaataaaaaaaaaaaaaaaaataataaaatttaaaaaatacatttttaattataaaaaaaaaaaaaaaacgggggcgcccccctctttttaacttttccaccccggaaataaattcggacccgttccctttaagccgttccaatttttctattatgaagtctttttaaaccttggcaaaataatgtcaaaacttttttctttttaaaattttttttcctttt

SEQ ID NO: 36725 - DNA, 434 bp, Glycine max
  Clone ID: LIB3138-119-Q1-N1-E4
cgcgtgcgcgcgcacggaaactcggaatgagactcgaggaagaatttctacattcccatccctgtccagctcgggcatgggaggctgcaccagagtgggactcgccgcaaagctaccgaaggcctcaagaaagcactccgactgctctcggcacaatatgctatattcgcgtatctacacaagaactaccagttcaagggtgtaggtagtctctactcttgtatagaagccgaagttcttaaatgcttcctcaatcacggcttgacgatggagatgaatgaacgggtgcacgttggggtcatacagctatactatgctttgctcatggtcacgaaaaaatggccggatgaactgtataaggcgcaggccaaagcgactcacgctatttaatattccaaggataaggtacaggcttctgcggctaatgctatcta

SEQ ID NO: 36726 - DNA, 381 bp, Glycine max
  Clone ID: LIB3138-119-Q1-N1-E6
ccaatggtgattttgttcaagggaaagatctcgcaatggttaaagttaatgtagcatgtgctgctgttggcttgacatcaagttacactccaactccattgttggaatctggtttgcaaaaagacagagggttaattgtggagtattttggaaggatgtcttacgttgctcataacgttaatcagccccaagagaaagatttgttggagggaaatttttcctttgatattaaatctcgctctagattggaaaaagtttcctctacaaaagcacaatttgttagtggaaaaaccttcaaatatgatataattggtgctggttcacattcttcagaagattttcctgaaaagggaagatcaagaaaaacccaaaaaggatgat

SEQ ID NO: 36727 - DNA, 226 bp, Glycine max
  Clone ID: LIB3138-119-Q1-N1-E7
atcttctgctgtgctcaggaagcaataatctccattggcctgtgttggattgatactttgatcaaaaatggttggaaaaacttttttcaaataactagaaagtggattggggcttattaataatattggcattccaaaagggcttgggatttggagagggcttgaacttatattaatactggtggtattgggtctgggggtttttctcttggaatgggcactttcc

SEQ ID NO: 36728 - DNA, 468 bp, Glycine max
  Clone ID: LIB3138-119-Q1-N1-E8
aggattctaaggcgaataaagaagcaaatccaacaaaaaatagcaactaattaatcctcggacagtgtaaaatcaaatttccacatttccgagagagaggatatggcaaaggaatacgagcaagctattgaagaactccagaaattgttgagggagaagagtgaactcaaagccacagctgctgagaaagtggagcagataacagcttctctgggaacatcatcatctgatggcatcccatcatcagaagcctcagacaggatcaaagctggtttcattcacttcaagaaggagaaatatgacaagaatccagctttgtatggtgaacttgccaaaggccagagccccaagtttatggtgtttgcttgctcagactcaagggtgtgcccatcttatgtgctagatttccaaccaggagaggcctttgtggtcagaaatgttgctaacattgtcccaccatatgaccag

SEQ ID NO: 36729 - DNA, 439 bp, Glycine max
  Clone ID: LIB3138-119-Q1-N1-E9
ctcataacacaaagcacaaagcaaagctcatccttgagttaaaaaatggcagcagcttcttccatggctctctcatccccatccttggctggcaaggccgtgaagctgggcccatcagccccagaagtgggaagggtgagcatgaggaagaccgtcaccaagcaggtctcctcaggaagcccatggtacggcccagaccgagtcaagtacttgggcccattctctggcgagcccccgtcctacctaaccggtgagttcccaggcgactacggctgggacactgctgggctttccgcagacccagaaaccttcgccaagaaccgtgaactcgaagtgatccactccaggtgggccatgctcggagccttgggctgcgtcttcccggagttgctgtcccgcaacggggtgaagttcggagaagccgtgtggttcaaggccg

SEQ ID NO: 36730 - DNA, 325 bp, Glycine max
  Clone ID: LIB3138-119-Q1-N1-F1
cttggtgttgcttcaggatccgcagattgacacagacagtggagttttaacgaagctttcagcggggagaacacttgtgaagacatccaaggcgcagtcattaatcccaccggtggtagcttattggatcggatctttaccagcagggggtcagagttgaattggataaaggctagaaagaaagacttctgatggaagagtggttgatttgcacaagagcaacaaaacagctcaccacgcagagaagtgaattaggctccatctgaaacaaagcagaaacaatggttctttcttgcagtgatcaaaacccgcttttacccgctta

SEQ ID NO: 36731 - DNA, 466 bp, Glycine max
  Clone ID: LIB3138-119-Q1-N1-F10
gcatttggaaatttggctgatgataccatcaattgtgaggcttttccccacaagctggtgcagtttggagagattcaggaaaaagttgtattgaaattttcacaagaggaatttcttacagcttggtcaactcaggtgcgtcctgcaacaactctgttggctgatgggtgtccatatttgtatgcaatggtgcatgatagttcagtgtctacaataccaggtgattttgtcattggtgtcaagttgacaaccataaacaatatgtgtgcatatgggctcaatcctggtatttcaggttctcgtcttttgggcaccattcctcagtccatttcacagcaaactgtttggaatcaaatggcaacagtgagaacaccattgaattttgattctagcaagcagagcttttgtcagttttctattgaccttctcggtggaggaatcttagtggacaaaactggagattgga

SEQ ID NO: 36732 - DNA, 329 bp, Glycine max
  Clone ID: LIB3138-119-Q1-N1-F11
cggacatggcaagttttgatgacaccatacttggccgaatgaactgtttctgccgagcactgacggcctaaggatattattattatgtgaggcaatgattctagggtggatgggttgacaacgaagcaaggaatcagcaagactgcaaaaatggtccacaaactttggagcagtcataaataactgatgcgaaaaacgacccacatggtgacatgctggtgcaaaaacatgacaatgtgaaaaaaggacaattggctagcaagatcttgaactaggctgttattggaaatgctaacgatgatgctattcataggggaacagactctcat

SEQ ID NO: 36733 - DNA, 433 bp, Glycine max
  Clone ID: LIB3138-119-Q1-N1-F12
gaatgattaaaattttggccacagttggtattcctgagaatacaggtatatcattggcctgtgctatgaatagttcttttagggggcgcgccagttctgatatttacaccatctgctctcaagactgtgaattgtggaatcctgcttgcacaaaagcaatgactatgtcatttaatccaaacccgtgttctgatgcatggagtttggaatttctgaagcgtactggatttcattgcgatatcatttgtgtcactggatggactgccaccccaatgcaggatgttcaggttacaattgattggtttatttcctctcaggaatgtgttcccaggacctattgtgttttaaatccacaaaatccttttgtgttaaataggtggatgggaaaattgactttcccccaaggcactttcccgaagtgttaagagaatgc

SEQ ID NO: 36734 - DNA, 330 bp, Glycine max
  unsure at all n locations
  Clone ID: LIB3138-119-Q1-N1-F2
gcaaaacaatcagccaaataattgaacatgaaatcaatggtcgaacaagtttgaaccaaaattgttaaaatccttaatacaaattttttaataaaagtttttttaaattattgaaaaaaaaaaaaaaaaaaattataataaaaaaaaaaaaaaaaaaataaaaaaaaaaaattaaaaaaaattaaaaaaaaaaaataaaaaanggggccgccccccactattggactctttaaccccggaatttatttcggacccggtccttgaagctttacaatttttcttataaggaggcttatttaaactttggctaaataatggaaaaactttttt

SEQ ID NO: 36735 - DNA, 448 bp, Glycine max
  unsure at all n locations
  Clone ID: LIB3138-119-Q1-N1-F4
cgttggtactgaattccttaatcgagtccagtattcataatctttgagttgatatgggcaactggagcagtgaacgtcatcaaaccactcaacaaagtgatctcggtgcagttttgcgtgatggaaaagaagtacttcttcaagcattcaactgggagtccaacaaatacaactggtggaataatttagaaggcaaagtttctgacatagctaaagcaggatttacttcagtctggttgccaccaccaacccactccttctcacctgaaggttatactccgcagaacctttactctcttaatagtaaatatggttctgagcgtcagttaaaagctttacttcaaaagatgaagcaatacaaagtaagagccatggctgacatagttattaatcatcgtactggcaccacccaaggacgcgganggatgtattaatcgtttgatggaat

SEQ ID NO: 36736 - DNA, 242 bp, Glycine max
  Clone ID: LIB3138-119-Q1-N1-F5
ccatttgttcttgcatgtggatcttatgttcttcataagggctgggggattttttggcggcaagctcttattgctctcactattttgagttatattttgaaatgtaaatatgaagaattttggggttccacctattttgatggaaaagggaattttcttattgtacagggaaatttcttggtttattgtatcagaggattgcaatttgtagtatatcaataaattatacgcattgtgctttc

SEQ ID NO: 36737 - DNA, 260 bp, Glycine max
  Clone ID: LIB3138-119-Q1-N1-F6
ccatgacagtttatgcgacgatcgtccgcccgaacggtgagaccttgcgcggtatgcagaaagagaatgacgtacttattttcaacatattcactgccgaagcgatctgcaaactctatgcgtacgaaactaagaccacgttgtatggaccagctgatataacaaagaaattgtctggtggttttatataactagtgcggcacattacatagctgaatgcaggtttacttcagaataggagaatttctcaagaaaatttt

SEQ ID NO: 36738 - DNA, 463 bp, Glycine max
  Clone ID: LIB3138-119-Q1-N1-F7
ggtgattttgtcattggtgtcaagttgacaaccataaacaagatgtgtgcatatgggctcaatcctggtatttcaggttctcgtcttttgggcaccattcctcagtccatttcacagcaaactgtttggaatcaaatggcaacagtgagaacaccattgaattttgattctagcaagcagagcttttgtcagttttctattgaccttctcggtggaggaatcttagtggacaaaactggagattggatcacacttatacaaaattctccaattagtaacttgttgagagttgctgcttggaagaaaggctgtttaatggtcaagattgtgatgtctgggaatgcagcagtcaaaaggagtgattgggcctcattggtacaagtgtttttaacaaacagcaacagtacagaacattttgatgcatgtaagtggacaaaatcagaaccacattcctgggaattga

SEQ ID NO: 36739 - DNA, 454 bp, Glycine max
  Clone ID: LIB3138-119-Q1-N1-F9
ctcgagccgaatcggctcgagtctccctacattaaatgtacagtctctttcttcatagcatttggaaatttggctgatgataccatcaattttgaggcttttccccacaagctggtgcagtttggagagattcaggaaaaagttgtattgaaattttcacaagaggaatttcttacagcttggtcaactcaggtgcgtcctgcaacaactctgttggctgatgggtgtccatatttgtatgcaatggtgcatgatagttcagtgtctacaataccaggtgattttgtcattggtgtcaagttgacaaccataaacaatatgtgtgcatatgggctcaatcctggtatttcaggttctcgtcttttgggcaccattcctcagtccatttcacagcaaactgtttggaatcaaatggcaacagtgagaacaccattgaattttgattctagcaagc

SEQ ID NO: 36740 - DNA, 261 bp, Glycine max
  unsure at all n locations
  Clone ID: LIB3138-119-Q1-N1-G10
gtcaaatttacatttataaacaaaaaaggcgcagggggagtggatcctggtatccaaggtcctcgcctnaccngaacaactattctgggcatggtacaccaacatggttgggatgaactggacaccactagttatcaaacaagtggtattattagtatgctgggttccagagaggaacctataggttggatgggttacctgatttttgagaaaaacttatacgttgaggtaccatctgtaatggcaatgactgatgctgaa

SEQ ID NO: 36741 - DNA, 469 bp, Glycine max
  Clone ID: LIB3138-119-Q1-N1-G11
ggtgatgataacttaattagtgttcatgaatatgtcaagccgtactttagtggttctaaattgaaaagctttctagctagtcataacatcaccattactgatggtattgacaaaactagtgcaactttgcaatttaaaaagttagcagattgtgattttctcaagagaaactttaagcagatgtctaatgttttgggggtggctcctgaagacaaggcgagtttatggtcacaacttcattatggttcgggtaataatctggaaatgccagaagcttatttttgtaaattcgtaaatgtgttacgagaattgtatttgcacagtccagaggaagctcgccaattgagaaagaaagctctctctcgtattgaatggctgcaaaaagctgatgtgcctaccatagcacagattgaagagttccattcgatgcaaaggatgatgaatgctcctgattcaaatgataatattg

SEQ ID NO: 36742 - DNA, 371 bp, Glycine max
  Clone ID: LIB3138-119-Q1-N1-G12
gccgtcgttttcatgactccataattcaccggaagcagaacaacaacaagaagcagcagcagcagcgcgagttcacatgggattgggaacaaccgcgagaagcagaagaagaatcgtcatcgaagaaggttctagaacaagaacacacaacaacaccaacaacgccgatgccgatggagctggagcaagagctaggttcaacaacaatccagcgttccttcgacgcgcgctacacccgccacgcgcgcgaattggctcggcgaattgcctgacagcttcaccatcaccgacccctgcatccccggccaccccatcgtcttcgccagcccgggcttcctcaagctcacgggctactccctccgcgaagtcct

SEQ ID NO: 36743 - DNA, 367 bp, Glycine max
  Clone ID: LIB3138-119-Q1-N1-G2
agagcttttactgatgttaatataggccaagtatataatgtagtcgatgattatgagcaacgaggaatctacagtgcagttgctagtggcaatactggaatcattaggaggcatcgtgaggtacaaaatgaacagctaagctcaaattcaacccaaggtactgcacagagaagaattcgtttgtcaatggctacacatggctcaaataagatggtgaaaagtggaagttgtgcacaagaagagcttaatttaaaatccgtcattgctatggtaagaattttgtttttttagcttctgtccaaagagaagagattgtctttgcatgcgaaatgaggtttgtttttttttttgtaggaagagaaaagct

SEQ ID NO: 36744 - DNA, 458 bp, Glycine max
  Clone ID: LIB3138-119-Q1-N1-G3
gaaattaagaatgcttatcggaagcttgcccggagttatcatcctgatgtgaacaaagaacctgatgcagaacagaaatttaaagaacttagtaatgcatatgaggtcttgtcagatgatgagaaacgatccatatatgacacatatggagaggctggacttaagggttcaggaatgggcttgggggatttcagcaatccttttgacctgtttgagacactgtttgagggcatgggtggcatggggggaagcagaagatcttggaatggagcaagtgaaggcgaggatgagtattacagtcttgttttgaacttcaaagaagccatttttggggtggaaaaagagatagagattcggcgattagagagctgtggaacctgcaatggtttgggggctaaaccagggactaaatcatccaagtgtagcacttgtggtggtcagggtcgggttgtcacgtc

SEQ ID NO: 36745 - DNA, 339 bp, Glycine max
  unsure at all n locations
  Clone ID: LIB3138-119-Q1-N1-G4
gaatgattaaaatgttttccacaganggtattccggagaatgcgaggtatatcattggcctgtgctatgaatagtacttttagggggcgcgccagttctgatatttacaccatctgctctcaagactgtgaattgtggaatcctgcttgcacaaaagcaatgactatgtcatgtaatccaaacccgagttctgatgcatggagtttggaatttctgaagcgtactggatttcattgcgatatcatttgtgtcactggatggactgccaccccaatgcaggatgttcatgttacaattgattggttaatttcctcgtatgaatgtgttcccaggacctat

SEQ ID NO: 36746 - DNA, 150 bp, Glycine max
  Clone ID: LIB3138-119-Q1-N1-G5
ttggaatcaacccatactccatggaatggactggtttggccgatagatgactgagtaagggcaatgatattctgtgttgcgataatgctagttttgatggttcgattaccaagcaagttatgagcaagatggcagaaatgataaacagtc

SEQ ID NO: 36747 - DNA, 345 bp, Glycine max
  Clone ID: LIB3138-119-Q1-N1-G6
gggcaatagcggccctcacattgtcctcgccacctacttcggtgacgtggtccacaactgcgatgtcatcgactctgccctgaccggcacctacaccttccacgttgacctcgttcgccacccaaaacagctcatccaggtcattgaccacctcggaccaaagcagatcctctctgccggtgtcgttgacggtcgcaacatctggaagaacaacttcaagaagtccattgagactgttgaggctgccatccagaagctcggcaaggagcgtgtcattgttgccaccttcagctcgcttgtacacaccctacacacgctcgccagcgagaagaacctcgacgagga

SEQ ID NO: 36748 - DNA, 429 bp, Glycine max
  Clone ID: LIB3138-119-Q1-N1-G7
ctgaggcacaacctcgttccaacagccatggcggttcctgcgacatcctcagcccctgtccttcgacccatccccaccaaccgttccttctcttccccattccgttcactccccactcccaccacccgaaaacccctaaccgtcttcgccatggcccctaagaagaaggtgaacaagtacaacgaaaactggaaaaaggagtggtttggcgcggggatattctacgaggggagcgaggaagtggaggtggacgtgttcaagaagctggagaagaggaaggttttgagcaacgtggagaaagcaggcttgctctccaaggcagaacaattaggattctcgctctcttccatagagaagctcggcgtcttctccaaagccgaagagctcggcttgctcagcttgctcgaccgagccgccagcttcttcccc

SEQ ID NO: 36749 - DNA, 431 bp, Glycine max
  Clone ID: LIB3138-119-Q1-N1-G8
ggaataaccaagaacaagagatttaaaaaaagaaaaaataaacaaaaaaacaagagagagaatagatagaggatgatggtgagcacatcctctgtttccattcccagttttttcctttcctcttcctcccattgaagcatttttcacaagcccgtgatttttccgccatctccatcatcgaatgattttctggttcgggttttgattgatgctcggaagatccgatgctgctagatcgaatttgacaaaacccacttcgtgtctgatcgaagcaacaactgggttctgtctgaattttgagataagatggaatcggatcttggcaagctcttcattgggggaatatcttgggacactgatgaggaacgtctaaaggaatactttgggaaatatggggaggtgatagaggctgtgatcatgagggatcgtgt

SEQ ID NO: 36750 - DNA, 452 bp, Glycine max
  Clone ID: LIB3138-119-Q1-N1-G9
gttcgacttcgtgaaaaagcatcatgagccgctacgacagccgctccggcgacccaacttcctatcgtgaccggaggagcgattctgggctaggtgcacctacagggtttggtggttctgtacaacactcttcatcaaacaggagggattatgatgatggtgggtaccaaagaggaacctcagtttggatggtttacctcattttgagaaaaacttctacgttgagtcaccagctgtaagggcaatgacagatgctgaagttaatgagtaccggcagcagagggaaataactgttgaaggtcgagatatcccgaaacctgtcaagtcctttcatgatgctggttttccagaatatgtaatggaagaaattacaaaagctggctttactgaacctacgcccattcaatctcaaggttggcccatggctttgaaagggcgtgatctgataggaa

SEQ ID NO: 36751 - DNA, 407 bp, Glycine max
  Clone ID: LIB3138-119-Q1-N1-H11
cggctctatgcaatttaaacttcatggcatttgagggtcctggttgacagtcggaaacagtctacagatattgatatacacttgggaatctctcaagattctgaaattgcggtgtaatactatttatgccagctattttctgttgcacaggctactagacatatctattgaaaatgccggagccagtgtataactccgaatatgtgtttacaatccttcgaacatttggtttatttatgtgtggatggtgatcatgacttaattagtgtgcatgaatatgtcaagccttactttagagagtctaaattagaaaagctttttatctgggcataacatcaccattactgatggtatggacaaaactagtgcaactttgcaattggggttgtttgcatattttgattttc

SEQ ID NO: 36752 - DNA, 345 bp, Glycine max
  Clone ID: LIB3138-119-Q1-N1-H12
gctcaacaaagtgctgtttttggatgatgatatagttgtgcagaaggatctgactggtctttggtcaattgatttgaagggcaatgttaatggtgccgtagaaacttgtggagaacgtttccatcgttttgatcgctatctcaacttctcaaatcctcttatcgcaaagaattttgaccctcgtgcatgtggatgggcatacggcatgaatgtttttgatttggtccagtggaagaggcaaaacatcaccgatgtgtaccacaaatggcaaaagatgaatcatgatagacaactatggaagttaggaacactgccgcctggtcttataacattctggaaacgcac

SEQ ID NO: 36753 - DNA, 187 bp, Glycine max
  Clone ID: LIB3138-119-Q1-N1-H2
gggattccttctggattttcgctcacaagtatttgccataacatttttaatgagatgctcattagatattactattaaaaaatactgcgcccggcttaaacttccaagatggttttaccatccttcaaaaaatttggttctttggggggggatggggaggataacctaaataggggtcatgaatatt

SEQ ID NO: 36754 - DNA, 237 bp, Glycine max
  unsure at all n locations
  Clone ID: LIB3138-119-Q1-N1-H4
gacgtcgcattgcaccgcccgtacgtnnaagactcggaaatttcggctcgaagtcgaggggttttgggttttctcttttcttcccttggagaaaaagaaaagccaccgctgcgacgccgctcgtgcatttttgaggtgccgctgtcatgtttgggcgtggtggaccaaagaggagtgataactccaaatattatgatattctcgggatttccaaaaatgccagtgaagatgaaatca

SEQ ID NO: 36755 - DNA, 387 bp, Glycine max
  Clone ID: LIB3138-119-Q1-N1-H5
gtgttggtcatctgagatgtgtggaggagctatcatctgtgatttcattccggcggcggcgatcgccgggtctcgccgcctgaccgccgattacctgtggccggatttgaagaagcggaagtctgacttggacgttgacttcgaggctgatttcaaggattttaaagacgattctgatatcgacgacgacgacgacgatcaccaagtcaagccctttgctttcgccgactcttctcgtctgtctacggcagcgaaatctgtggcattccaaggtcgggctcggatatctgcgaatagaaagaggaagaatgagtatatgggaatccgtcaacgcccttggggaaaatgggcagctgagattcgggatccaaaaaaagggggttcgtg

SEQ ID NO: 36756 - DNA, 303 bp, Glycine max
  Clone ID: LIB3138-119-Q1-N1-H7
cacggccagggtctcagctcatactcctaccgccaccttgcccaatccctcgccgccaacggactccacgttacctccctcgacctccccggacacggcttcttcgacaagtccgtcgaggctttcgtcgagggcgtaaacggggtttttgggagggtttggtacgtttacagcgagattcaagagaggggtcttttctgggcgtttgatcagatggtggaaaccgggcaaaattccggacgaggaaattcaagctcgtatgtcgaagagaaaaacaagaaagcctattgatttgggtccaca

SEQ ID NO: 36757 - DNA, 400 bp, Glycine max
  Clone ID: LIB3138-119-Q1-N1-H8
gaaatatacgcgttgccatacgcagttccattttgagtcttggggattttttttgtcaataggtggtagctttgaaagtagccgcgagctgtgttctaactgagaaccggtgcttattgcttttttgagagaaaaacaattacatggcatatgggcaaaaagatttcgttatcttccaaacatgattcatgtaatttttttgtcttgcatatcggacgttaatagcatttgtagaatgtacatacatataaatactaaaatagttttttaggacaaaaaaaactattgatttgagtacacaagatatagagaaaggatttggtggaagttattgattccatgggacttgcacttgttcacttgaatctgcacaatttcgtattgttgttaaagtgataat

SEQ ID NO: 36758 - DNA, 312 bp, Glycine max
  Clone ID: LIB3138-119-Q1-N1-H9
ggaggatttgataaagaatttggggacaatagcaaaatctgggacttctgcatttgttgagaagatgcaaacaagtggagatctcaatctgattgggcagtttggagtcggcttctactctgtttatctcgtggctgactatgtcgaagtcatttgcaagaataatgatgataaacaggatgtatgggaatcaaaagctgatggagcatttgcaatttcagaagatacatggaatgaacctctatggcgtggaactgagattagattacacctcaaggaagaggctggggagtacttgcaggagtctaaact

SEQ ID NO: 36759 - DNA, 415 bp, Glycine max
  Clone ID: LIB3138-120-Q1-N1-A1
ggaaatttggctgatgataccatcaattttgaggcttttccccacaagctggtgcagtttggagagattcaggaaaaagttgtattgaaattttcacaagaggaatttcttacagcttggtcaactcaggtgcgtcctgcaacaactctgttggctgatgggtgtccatatttgtatgcaatggtgcatgatagttcagtgtctacaataccaggtgattttgtcattggtgtcaagttgacaaccataaacaatatgtgtgcatatgggctcaatcctggtatttcaggttctcgtcttttgggcaccattcctcagtccatttcacagcaaactgtttggaatcaaatggcaacagtgagaacaccattgaattttgattctagcaagcaaagcttttgtcagttttctattg

SEQ ID NO: 36760 - DNA, 324 bp, Glycine max
  Clone ID: LIB3138-120-Q1-N1-A10
gtggtaatggcagcgtcactacaagcagcagctactttcatgcaacccaccaagttgagcaggagcaacactttgcagcaaaagtctactcagtccatttccaaggcttttggtttggaacctgttggagctaaaaaggtcacatgctcccttcaggctgatcttaaggacttggctcacaagtgtgttgatgctaccaaaattgcaggattcgcccttgccacctctgccctcgttgtctctggggcaagtgctgaaggtgttccaaagaggctaaccttcgacgaaatccagagcaagacctacttggaagtgaaggggaca

SEQ ID NO: 36761 - DNA, 215 bp, Glycine max
  Clone ID: LIB3138-120-Q1-N1-A11
gcgctgcttcactattctccctatggagtttaatcttgtggtccgtcaaaagtttttaaattttgtgaggttcattatgaagaaaagggacaaacttagttgtcaagttggaatcaacccatactccatggaatggactggtttggccaatagattactgagtaagggcaatgatattctgggttgcgattatgctagtttggatggttggttac

SEQ ID NO: 36762 - DNA, 383 bp, Glycine max
  Clone ID: LIB3138-120-Q1-N1-A12
gaagatatttttcagcaagatcaatcactgggtttctttctgatgtttatcctgcagctgctgatgaagttggaaaaatccatttaattgcagatgaaaaggttcaaggagctgtttttgatcttcctgaggagattgctaaagaattacttaatagggacataccacctggaaacaccgtttccaagatcaccaagctaccttctttgcaagatgatgggccttcaagtgatttctatgggaggttctctgacagagatagaagtagccgaagaggttctacttctaggggaggttttagttctaggggaggttccgcttctagggaccggagaggttttaaatcctcacggggctgggatgtggtagactccggtgatgac

SEQ ID NO: 36763 - DNA, 293 bp, Glycine max
  Clone ID: LIB3138-120-Q1-N1-A3
ttcaattttgcgtttctctgcctaaaaggattgaaagatgggtcaagcattcggttgctaccaagtcgatcagtcaaatgtggctatcaaggagcattttggaaaatttgatgatgtcctagagcctggatgtcactgcctgccttggtgtcttgggtaccagattgctggtagtctgtcgctgcgagtgcagcaacttgatgttcgatgtgagacgaaaaccaaggacaatgtctttgtcaatgtggttgcatctgtgcaataccgagctgtgtctgagaaagcatctgatg

SEQ ID NO: 36764 - DNA, 413 bp, Glycine max
  Clone ID: LIB3138-120-Q1-N1-A5
ggaagtcatgtagaggacactatagactggctagacagactgatagaggtgataaatcaaccaaagtttccctgagcccatctcctggttttcagatgatgcagtcaaatgaggtgcagcagtttgggcatattgactcaaatagtacaaagtcatttgctgttgtaaatacttcaacatatagcattccagatttgaacacttctgcttctccacctgttttgtttcatcagcctttcacagatcagcagcaagtacaattacgtgcacagatctttgtatatggagctttgattcaaggcatggtaccagatgaggcttatatgatatcagcttttggaggatcagatggtggaaggagcctttgggataatgcttggcgtgcctgcattgaaaggcaacatggtcaaaaa

SEQ ID NO: 36765 - DNA, 386 bp, Glycine max
  Clone ID: LIB3138-120-Q1-N1-A6
ctctgcaatcagcttctgactgatttctgcaaggatctgactggtatccagcaaattcaggtggacagaggtgttacattgagtgaggctctacttaggcatgacaaatggcttgagaagaagggaataaagaattccaactttgcttgggttacatggtccaactgggattgtcgggtgatgcttgaatctgagtgccgattcaagaagatacggaagcctccttacttcaaccgctggatcaacttgaggattcctttccgtgaggtatttggtgctgtgaggtgcaatctaaaagaagctgttgagatagccggcttggcctggcagggacgtgcacattgcggccttgatgatgccaaaaatactgctcacctattggcact

SEQ ID NO: 36766 - DNA, 343 bp, Glycine max
  Clone ID: LIB3138-120-Q1-N1-A7
ctattattttattcttcatccaatgactatacattcattatatttttgtgtaaatagaggaaaaactcgatggaaaaatggtggtttaattctatgttgtttaataggaagttagaatacaggtgtgaattaagtaaatcaatggatagtcttggtcctattgaaaataccagtctaagggaagaccctaaaattttaaccgatatagaaaaaaaaattcacagggatttggattatttagaaatggaaggttttttttctagcgatctgaatactgtttctaagaatgatgatgatcattacatgtatgagactcaatttagttttaacaataatattacta

SEQ ID NO: 36767 - DNA, 430 bp, Glycine max
  Clone ID: LIB3138-120-Q1-N1-A9
agcacatagaagagaaagaaagaaaacgaaagaggagaaagaaagtagttgaggaagatacaaacaatttttgcagattgttgagaatgcctttcaagaagcctcatcacacctcagacaagaactacataacaggggacgacggaggcaagttcgagatacaacctagaggactcaacattgtgtggggaaatgattctcgatactggaaaattccagaacaaggtcctgcggagctgatccaagtttcatggttggaggtatccggcgtggtaaacttaccaggtgtcaagaaatatagggttgaattcgaagtgagagttaaagacgatgggttcggttggagtggcacggacgtgctagtgatggctaagattgggaaaacgggaaaatatacgtataaggtgacgaaactaaaccctggtgaaac

SEQ ID NO: 36768 - DNA, 423 bp, Glycine max
  unsure at all n locations
  Clone ID: LIB3138-120-Q1-N1-B10
gtttcctagtcccaatgagtactcttcttttatgggtgacttctctactgcaactggaattgccacattcacaatgatgcttgtcagccaatttatatttgacaagtatggatggggagttgctgccacaatcacccctacggtcctgcttttgacaggagttggtttcttttctcttatattgtttgggggcccgcttgcacctggtcttgcaagtcttggaatgactccacttctagctgctgtatatgtgggtgctttgcagaacatatttagcaagagtgccaagtacagcttatttgatccctgcaaagaaatggcctacattccattggacgaggataccaaggttaaagggaaagcagccattgatgttgtgtgcaatccattngggaagtctggaggtgcccttatccagcaatt

SEQ ID NO: 36769 - DNA, 155 bp, Glycine max
  unsure at all n locations
  Clone ID: LIB3138-120-Q1-N1-B12
tgaataggtttagaatgacacataaccctctaaagtgtataaaaacatttgaaaaaatatatattcatggaattttctnttaaatgaanaggtttatattgacacatatatttttttattttatatagataattttattgaatttattatttttt

SEQ ID NO: 36770 - DNA, 369 bp, Glycine max
  Clone ID: LIB3138-120-Q1-N1-B2
ccggaaatcgttcctatcatcacttctcaaatctcgaaccctctcgttcgtgccgatcactaggtcacacttcatcaatggcgggtagaggcaaaaccctaggatccagcgccgctaagaaggccacctcaaggagcagcaaagccggcctccaattccccgtcggtcgtatcgccaggttcctcaaggccggaaagtacgccgagcgcgtcggcgccggagcccccgtctacctcgccgccgttctcgaatatctcgctgctgaggttttggaattggctggaaacgctgcgagagataacaagaagactcgaattgttccacgccacatccaattggcggtgaggaacgacgaagagttgagcaagc

SEQ ID NO: 36771 - DNA, 347 bp, Glycine max
  Clone ID: LIB3138-120-Q1-N1-B3
cggctcgagggagagttgaatgtggaatcccttctggatttccgctcacaggtatttgcaatagcatttttaatgagatgctcattagatatagctatgaaaaattactgcgccaggctaaagctccaagtatgtttttacaatccttcaaaaattttggttctttgtgtgtgtatggcgatgataacttaattagtgttcatgaatatgtcaagccttactttagtggttctaaattgaaaagctttctagctagtcataacatcaccattactgatggtattgacaaaactagtgcaactttgcaatttagaaagttagcagattgtgattttctcaagagaaac

SEQ ID NO: 36772 - DNA, 427 bp, Glycine max
  Clone ID: LIB3138-120-Q1-N1-B4
gtgcactgcgagctgcgctcggcgaggcccgcggttcggccgagggaaccggccggtccggttcaggttacgatccccaaacccaaacccaaagcggcggaggcggaaggcgcgaacatcgttttgcagccgcggttgtgcactctcagatcctacggttcggatcgagccggggtgcttatcaagactcgcaaggagggtgaccatgatgacgtgtcacccttcttcgccgcgctttccgactatattgagagctctaagaaaagtcaagattttgagatcatctctggtcgtctagctatgatggtgtttgcagcgacggtgacaatggaagtggtgacagggaactctgtgttcagaaagatggatattgaaggaatcacagaggcttggtgggtgtgtttgggtgcagtaacttgcgcagcac

SEQ ID NO: 36773 - DNA, 273 bp, Glycine max
  Clone ID: LIB3138-120-Q1-N1-B5
ctatgaacacacgctccatgtttcctagtcccaatgagtactcttcttttatgggtgactacactacagccaccagactcgcacattctcaaaggctcatgcacaacagcacatatttgacaagtatggatggggagttgctgccacaatcacccctacggtcctgctttagacaggagttggtttcttttctcttatattgtttgggggcccgcttgcacctggtcttgcaagtcaatgaatatacttcacctatagctattataaatatca

SEQ ID NO: 36774 - DNA, 375 bp, Glycine max
  Clone ID: LIB3138-120-Q1-N1-B6
ctcgagccgaatcggctcgagtgaaattttcacaagaggaattgcttacagcttggtcaactcaggtgcgtcctgcaacaactctgttggctgatgggtgtccatatttgtatgcaatggtgcatgatagttcagtgtctacaataccaggtgattttgtcattggtgtcaagttgacaaccataaacaatatgtgtgcatatgggctcaatcctggtatttcaggttctcgtcttttgggcaccattcctcagtccatttcacagcaaactgtttggaatcaaatggcaacagttggaacaccattgaattttgattctagcaagctgagcttttgtcaagtttttattgaccttctcggtggaggtattttag

SEQ ID NO: 36775 - DNA, 340 bp, Glycine max
  Clone ID: LIB3138-120-Q1-N1-B9
tgggagtccctttggatcaggtggaagtagtcgaggtaggaggcagaggcgcggagaagacgtggttcaccctctcaaggtctctttggaggacctttatcttggaacttccaagaagctctccctctccagaaatgttatatgctccaagtgcagtggcaagggttctaagtctggtgcttcgatgaagtgtgctggttgtcaaggaactggtatgaaggtttctataagacatcttggcccatccatgattcagcagatgcagcatgcctgcaatgaatgtaagggtactggagaaactatcaatgacagagatcgctgcccacagtgcaagggagag

SEQ ID NO: 36776 - DNA, 338 bp, Glycine max
  Clone ID: LIB3138-120-Q1-N1-C1
ttaacgatggcgtcttcaatcgaaaagctcctagaaagtggtcgtcccttccttcgcggtgatctggagtccatcgacaagaacttacctcggctggttggcgtcctgcagagtgtgggtgccggggagtgctggcacaaacacggcagcttccttcaccacctcgtcgacatatttcgcattctcaagctctggaaagcccctcactctgtctgcctctgtggcctcttccactcagcctactccaattcttacgttaacctcgccatcttcgacccttcaaccggtcgagaagtggttcgtgcactcgttggcgaggaagctgagagtctgattca

SEQ ID NO: 36777 - DNA, 270 bp, Glycine max
  Clone ID: LIB3138-120-Q1-N1-C10
ggacaaaactggagattggatcacacttatacaaaattctccaattagtaacttattgagagttgctgcttggaagaaaggctgtttaatggtcaagattgtgatgtctgggaatgcagcagtcaaaaggagtgattgggcctcattggtacaagtgtttttaacaaacagcaacagtacagagcatttttacgcatgtaagtggacaatatcagaaccacatttcttggaattgatctttccattagaggtttgttgtctaataattgt

SEQ ID NO: 36778 - DNA, 424 bp, Glycine max
  Clone ID: LIB3138-120-Q1-N1-C11
ctcacctcacttgcgttattagggtttagtgagatagtggcggggtagtgacattacagtgtgggcataaaattttcaaagtcgaagcgagaacttgccatttcgagggttttagggttagggttttctcaaattgcaagaacatgggtttcaacattcaaccctatgggattcagtccatgctcaaggaaggccataagcacctttctggcctcgatgaagcggttctcaagaacatcgacgcctgcaaacaactttccactatcactcgaacttccctcggtcccaatgggatgaataagatggttataaatcacttggacaagctttttgtcacgaacgatgctgggacgattgtgaatgaacttgaagttcagcattctgctgccaaggttttggttttggctgggaaggctcaacaaga

SEQ ID NO: 36779 - DNA, 363 bp, Glycine max
  Clone ID: LIB3138-120-Q1-N1-C12
ggacagtaccaatatctatgcctacatttccatcattgctctaattgtctgtataccacctgccgtaattttggaagggcctacactgttgaagcacggcttcaatgatgccattgctaaagtaggtttggtcaagttcgtctcagatctcttctgggttggtatgttttaccatctctacaaccaggtggctaccaacacactggagagagtggctcctctcactcatgcagttgggaacgtactgaaacgtgtatttgtgattggattttcaattatagtctttggtaacaagattagcacccaaactggtataggaacagccattgcaattgctggagtggcactttactcgttcataaa

SEQ ID NO: 36780 - DNA, 319 bp, Glycine max
  Clone ID: LIB3138-120-Q1-N1-C2
tgtcaacctgctgcgcaattgttcgatataagactgatacttcgttcatcagtccatccttcgtttacaactctcgctgtatagcaattccacacccgttacctcgataaacagtccgatcgatcttctgaggatgaagtccttcgccgtactcgcccttgctgccactggcgtattggctcagagctctcctccatcaggatgccaggcttcgcgtgctggaaccttcaacgtccagactgtcaatgtcacccgttccgcgaagcgtgagctcgcagcgcgccagcaagctggtactttgaccttgactctacaagat

SEQ ID NO: 36781 - DNA, 192 bp, Glycine max
  Clone ID: LIB3138-120-Q1-N1-C3
cagtgattcagagctgcaatggtgagtaaaaatagcaagcctcaagctactgcaatgcatgtgggagctatagaaattatcattgatagtttcgcaagtcctgattgcaacatagttggtgcaatgcttttggttgatacttatcataccaatcctgaaaatgcagttcgtagtatttttgttgcgcctttc

SEQ ID NO: 36782 - DNA, 342 bp, Glycine max
  Clone ID: LIB3138-120-Q1-N1-C5
cgccaattgagaaggaaagctctctctcgtattgaatggctgcaaaaagctgatgtgcgtaccatagcacagattgaagagttccattcgatgcagaggatgatgaatgctcctgattcaaatgataatattgatttactgttgagcattgatttgttgggtttacaaggagcaggtaaagttttttcaaacaaaattgtttttgatgattagcttgtgttggcttacacacacgaattctgtgttggaaattttccagctgattcttggttactaaatttttgtgaaattgttttaattctgtatgtcaattacctttacaagctttcgtatgtatatttt

SEQ ID NO: 36783 - DNA, 369 bp, Glycine max
  Clone ID: LIB3138-120-Q1-N1-C6
aaaaggaagaaggaatgagtgcaacagtgactctaactctaaacctatgccgttcttccatcgtcgcttcttgtccacattatagccacaaaccaaaccctaatttcaatgccttttttagcttctctttgtctctgtctctgtctcaccacagacgcatcgttatctacaagaaaccattcccctctagacggacgtggctttatggatatatgaatagagatcgagattatgaattggagaatgggttagccttattcggttctgatgaagaactagcaacacaaattccaactcaggcccagtcacttgttgaaggatcaggctccattcgcatagcggagttcaagcctggtcctgatgttgata

SEQ ID NO: 36784 - DNA, 459 bp, Glycine max
  Clone ID: LIB3138-120-Q1-N1-C7
tgcaactttgcaatttagaaagttagcagattgtgattttctcaagagaaactttaagcagatgtctaatgttttgtgggtggctcctgaggacaaggcgagtttatggtcacaacttcattatgtttcgtgtaataatctggaaatgcaagaagcttatcttgtcaacctcgtaaatgtgttacgagaattgtatttgcacagtccagaggaagctcgccaattgagaaggaaagctctctctcgtattgaatggctgcaaaaagctgatgtgcctaccatagcacagattgaagagttccattcgatgcagaagatgatgaatgctcctgattcaaatgataatattgatttactgttgagcattgatttgttgggtttacaaggagcaggtaatagctttccaaacaaaattgtttttgatgataagcttgtgttggctacacacaataattcttt

SEQ ID NO: 36785 - DNA, 316 bp, Glycine max
  Clone ID: LIB3138-120-Q1-N1-D1
aacacaacaacactctctcttctcgctcttggcttttcgctcttcactcactctcatgcattcatttccaccgttcatggatccagtaagcgtgtggggtaacacgcccttggcgacggtggatcccgagatccatgacctcatcgagaaggagaagcgccgtcaatgccgcggaatcgagctcatcgcctccgagaacttcacctccttcgccgtcatcgaggccctcggcagcgctctcacgaacaaatactccgagggcatgccgggcaaccgctactacggcggcaatgaatacatcgaccagatcgaaaac

SEQ ID NO: 36786 - DNA, 421 bp, Glycine max
  Clone ID: LIB3138-120-Q1-N1-D10
attgtgtgaccctgataatccaattgtgcttgagcggatggacttcccagatcctgttattaaggttgctattgaaccaaaaactaaagctgatgttgacaagatggcaactggtttaatcaagcttgcacaggaagacccttctttccacttctcccgtgatgaagagataaaccagacagtgattgaaggaatgggagaattacatcttgaaatcattgttgatcggcttaaaagaaaatttaaggtggaagctaatgttggtgccccccaagtaaactacagggaaagcattttcaaaactgcagaagtgaagtatgtgcacaagaaacaatcaggtggacaaggtcagtttgcaaatatcaccgtccggtttgaacccatggacccaagtagtggatatgagttcaagagtgaaaat

SEQ ID NO: 36787 - DNA, 395 bp, Glycine max
  Clone ID: LIB3138-120-Q1-N1-D11
cgaagaagccctaactacgcacgcattcgtgagaaaactcaatattcgtcgctcatggcactctcttctcgtctcttttccaaatccaaattgatctatggcagtcaaatacttctacaaaaggagcatgctattccagttcgtcactttgctaaagagtctgcccctcctgcccttaagggagacgagatgctgaagaacatttttgtggaggtgaagaacaaatttgagaccgccataggaatattaaagaaggagaaaatcaccattgacccagaagatccagctgctgtttctcattatgcaaaggtcatgaaaacaattatagagaaggcaagcttattgtcggagtcccaagacatactatccaccattgaaattgagacacaagatat

SEQ ID NO: 36788 - DNA, 473 bp, Glycine max
  Clone ID: LIB3138-120-Q1-N1-D12
ctcgagccgggaaggaagaatgtagacacgtcttctgcagaagatttccatgtgttgtacccagattggatgcatgacctagttcatggagatgtacatatccatgttgaggatgaaggtgatgttaaaattgcaagaaaactagcaattgttggactttggtgcattcagtggcagccattgaaccggccatccataaaatctgtcatacaaatgttggaaagtaaagaggaagacctattaactgttcctcctaatccatttcactcatctacttccaccattcctagtggattcacttcggcaagactacctttggatttggaagtaattcaagaatgagaaattaccttattgatttatttacaacgggagatgattagtgtttacacataatttgttttcttctcaaaagtaaaaatggttgggtttgatttaaatgtattaaaataaaataaatattttttttaatt

SEQ ID NO: 36789 - DNA, 448 bp, Glycine max
  Clone ID: LIB3138-120-Q1-N1-D2
ttgaccttctcggtggaggaatcttagtggacaaaactggagattggatcacacttatacaaaattctccaattagtaacttgttgagagttgctgcttggaagaaaggctgtttaatggtcaagattgtgatgtctgggaatgcagcagtcaaaaggagtgattgggcctcattggtacaagtgtttttaacaaacagcaacagtacagagcattttgatgcatgtaagtggacaaaatcagaaccacattcctgggaattgatcttcccaatagaggtatgtggtcctaataatggttttgaaatgtggagttctgagtgggcaaatcaaacttcatggcatttgagtttccttattgacaattccaaacagtctacagtttttgatattctcttgggaatcttttaagaatttgaaattgctggtaatactcttatgccagcttt

SEQ ID NO: 36790 - DNA, 351 bp, Glycine max
  unsure at all n locations
  Clone ID: LIB3138-120-Q1-N1-D3
ctctcctccgcagagacccaaacatcagaacggtggatggcatgcgtgctttgtatggagacgactactatgtctgcagatttcagaaaccaggggaaatggaggctcagatggctgaagttggcactgagtatgttctcgaaaacatccttacaactcgcaatcctggtcctccaattcttcccaagggaaggtttcaattcaatccaaaaatgctcacacctttgcccttttgctcacagaagaagatctcgcctattatgtcctcaaatttgagaaaaccggattcactggaccctngaactactacagaaatttcaacttaaattgggagttgacggcaccatggac

SEQ ID NO: 36791 - DNA, 323 bp, Glycine max
  unsure at all n locations
  Clone ID: LIB3138-120-Q1-N1-D4
caggccgactctagaggatcccctcggggaattccaattccacattttcaagaaataaggaggcaaaaatgttcatatatgaatnggaattatttgttttcttattaggcctatcctgaagccaaaggaaatgagatcggaattcctcggggaattccaattccacattttcaagaaataaggaggcaaaaatgttcatatatgaattggaattatttgttttcttattaggcctatcctgaagccaaaggaaatgagatcggaattcctcggggaattccaactccacattttcaagaattaaggaggcaaaaatgttcata

SEQ ID NO: 36792 - DNA, 380 bp, Glycine max
  unsure at all n locations
  Clone ID: LIB3138-120-Q1-N1-D6
cattggcctgtgctatgaatagttcttttagggggcgcgccagttctgatatttacaccatctgctctcaagactgtgaattgtggaatcctgcttgcacaaaagcaatgactatgtcatttaatccaaacccgtgttctgatgcatggagtttggaatttctgaagcgtactggatttcattgcgatatcatttgtgtcactggatggactgccaccccaatgcaggatgttcaggttacaattgattggtttatttcctctcaggaatgttgtcccaggacctattgtgttttaaatccacaaaatccttttgtgttaaataggtggatgggaaaattgacttttccccagggcactntccgaagtgttaagagaatg

SEQ ID NO: 36793 - DNA, 275 bp, Glycine max
  Clone ID: LIB3138-120-Q1-N1-D7
ctacaataccaggtgattttgtcattggtgtcaagttgacaaccataaacaatatgtgtgcatatgggctcaatcctggtatttcaggttctcgtcttttgggcaccattcctcagtccatttcacagcaaactgtttggaatcaaatggcaacagtgagaacaccattgaattttgattctagcaagcagagcttttgtcagttttctattgaccttctcggtggaggaatcttagtggacaaaactggagattggatcacacttatacaaaat

SEQ ID NO: 36794 - DNA, 398 bp, Glycine max
  Clone ID: LIB3138-120-Q1-N1-D9
ttcaaaagaaagggcgtttgtctacatcaaaagtgctacgcttcgctcttgatattgccaggggcatgaactatcttcacgaatgcaaaccagatccgggtattcactgtgatttaaagccaaaaaatattttgctggataatggagggcaattgaagatagctggatttggcactgggagagtttcgctaatctcacctgatgaagcaaagctggtacagccagagcctaacattgatctttcaagcttgtacgtggcaccggagatttacaaagatggagtttttgatagaagtgtggatgcatattcttttggactcattatatatgagacgatagagggtacacatcccttccatcccaagacctcggaggaggcagttagactgatgtgcttg

SEQ ID NO: 36795 - DNA, 350 bp, Glycine max
  Clone ID: LIB3138-120-Q1-N1-E1
tgagcaaggttaacaagcctccaatttctttgtcaaggttaattaagtatacgaaggggaaggaggataaaattgctgtagtagtggggactgtaactgatgatatcagagtatatgaagttccagcattgaaaattacagcactcaagtttacagagagagcacgtgcaagaatagaaaaggctggcggtgaatgcttgacatttgatcagcttgcccttagggctcctttgggacagaatacggtccttcttagaggccccaagaatgctcgggaagctgtgaaacactttggtcctgctcctggtgtgccacacagccataccaagccctatgtacgagcaaaagga

SEQ ID NO: 36796 - DNA, 476 bp, Glycine max
  Clone ID: LIB3138-120-Q1-N1-E11
ggcttatgggtccaaggacatattaggcatgaggagcaatagcagcctgagaagtaatagtagtttggttcatgggaatgctgttgatgctcctaaaaataccaacattggtggaggttggcagttggtttataaatcagctgatggtgctgggggtgggaaaagagaaggactccaaagggtttatttgcacgcagatactgctgcactttctcactctcagcatgtttcatttgtttcaacttctggctatgacataccgatagatggcggtgaagcatatcaagctgctgctcttgtcagccagtcagttctaggtactcatgatatgttgcatctgacagaagttgctgcaaaagggccaaaatggagagctctgctagagccaggagtcaagcgtgcattaattgttggagtaggacttcaaatacttcaacaggctgctggtataaatggggttctctactatgctcccc

SEQ ID NO: 36797 - DNA, 432 bp, Glycine max
  Clone ID: LIB3138-120-Q1-N1-E12
gaaattttgataaaccgcgatcacaggttgccgcaccttaaagccggaaacaaaagcaatcgttacttgatttcaagaatctctcaatttcttcctacttctttgtgtacggtttcttaagggaaagaaaatcactctctgtgctggccacagacttcgtgaatcattttcttttccactcttagtttatttgctgaacactctcctatttgatataggacttcgtgtcagatttaaacttcttctgtctctttctcagttctctgtttaatttcaagttcaagctggtgaaatcttggattagtgctcccactctcctatctggtataggacttcgtgggtagacttttctatttctctcctttctttcactctcttcttctcactgatccgcattgccgttcaaagtggtcttatttgaaaaacactttg

SEQ ID NO: 36798 - DNA, 252 bp, Glycine max
  Clone ID: LIB3138-120-Q1-N1-E2
gtgagaacaccattgaattttgattctagcaagcagagcttttgtcagttttctattgaccttctcggtggaggaatcttagtggacaaaactggagattggatcacacttatacaaaattctccaattagtaacttattgagagttgctgcttggaagaaaggctgtttaatggtcaagattgtgatgtctgggaatgcagcagtcaaaaggagtgattgggcctcattggtacaagtgtttttaacaaac

SEQ ID NO: 36799 - DNA, 330 bp, Glycine max
  Clone ID: LIB3138-120-Q1-N1-E3
ctcgagccggatctggtcatcgttgggatctccatacgccggatctgctaaaatacgcttgatccatatgggcctccttgaccacttgtgggacgacaccgtcgccggcccaaggccggaaaacggtctcggcaagctccgaaaacaccacaccttcactttccgacctagctccggcaaggaaacggagggcgggagcgtgagatcgtacggagacgaatcgtcggaggaagcgacgagagtgacgcgtagtatcatgatcgtgaaaccgcccgggtaccagagtggatcgcctccggtttctcccgccggttctactactccgatttc

SEQ ID NO: 36800 - DNA, 365 bp, Glycine max
  Clone ID: LIB3138-120-Q1-N1-E4
cacgcgtatgggcgatgatttgtatttgattttgatgattccaataataatattcatctttctctctactctctagtgctgggacttgtctcacacatggaaactactacgtgcgtaggataacaaccaacaaacctagcgcacgatagccctccatcacccatgcttggagtactctgcgccactcgctccaaaccttggctcttctccctcgtccacgcctcccttcctcgcctatcccatgcccctctctcacctttcgcctcgccgccgccccgtcgccgccatttcaccgcctgcaaactctttctctccgctggcggcgccgcctccatatggcacgccatcatgccccgagtgaatga

SEQ ID NO: 36801 - DNA, 228 bp, Glycine max
  Clone ID: LIB3138-120-Q1-N1-E5
gattcaaaaagagagagtggaaaagatggcgcggttgatcacagtggtgtggtgcgcggtggcggtgctattatgcgccgcggccggtgcgtcgtgggtggaggaggcggctaacccgatacgaatggtgtctggcgtggaggcggaggtggttcgggtgatcggggagggccggcttgcgttgaaatttgcttaggttcgtgagcagtgttcgggaagaggttctca

SEQ ID NO: 36802 - DNA, 308 bp, Glycine max
  Clone ID: LIB3138-120-Q1-N1-E6
ggggcatttgatctcttccatgcaggccatgttgagatacttaagagggctagggagcttggagactttcttctagttggtatccactcagatgagacagtgagtgagcatagaggaaatcactatccaattatgcatctgcatgagcgtagccttagtgtgttagcttgccgttatgttgatgaagttattattggttcaccttgggaaattacaaacgacatgatcaccactttcaatatctcaggagttgtgcatggtactggttctgagaagtcattaaattgtgaactagattcatatgagat

SEQ ID NO: 36803 - DNA, 415 bp, Glycine max
  Clone ID: LIB3138-120-Q1-N1-E9
gaaggtccatgcttacggcctgaaaccaaggaggatacttctgaaactatattgccagttaaaaaggagactaatgcagaccctggagactgtaaattaaagtcaaggacttcttttgatgatgatcagaaggttgatcacatgaatgaggaaaccgctgaggatgagaaaatgttggttccaaaagctgttgcaagtgttaagtctgaaaatgaatcgggtgaaaaacatcctgagttatcctcaggtgtggataatgagaaccagattagtgcatagaaatcaacatgtactggtatactagtgcaaaaggcctctccagtttctgaaaactgtgagtctttgtatttaaaaaaggagtcacctacttctggtaatgctgtaatgggatcccaggatgaaaatgctgatgaca

SEQ ID NO: 36804 - DNA, 337 bp, Glycine max
  Clone ID: LIB3138-120-Q1-N1-F1
ttctttttctctctttctctctgcttgcggtgcttcacaagccaaatctaacttgtctctgttttctccgatctagtactactatcaatggccggaaaaggagatggtcctgctatcggaatcgatctcggcaccacctactcctgcgtcggagtgtggcagcacgaccgtgtcgaaatcatcgccaatgaccagggtaacagaaccacgccgtcttacgtcgctttcactgattccgagcgtttgatcggtgacgccgccaagaaccaggtcgccatgaaccccgtcaacaccgtcttcgatgctaagcgtttgattggaaggagattttctgatg

SEQ ID NO: 36805 - DNA, 493 bp, Glycine max
  unsure at all n locations
  Clone ID: LIB3138-120-Q1-N1-F10
attgagggacaaggatcattgctccaatgtgttctgacgccaggagatccatacatgcccttaccaaatgacgaaattattgcaagggtagcaaaacaggttttggcactgttcccatcatctcaaggtttggaagtgacttggtcttctgttgttaaaattggccaatctctgtaccgtgagggtcctggtaaagatccatatagacctgatcaaaagacaccagtgaggaatttctttcttgctggctcttacacaaagcaggactacatagacagcatggaaggtgcaaccttgtctggcagacaagcttcggcctatatctgcgatgcaagggaagaattagtggcattgcggaagaagctcgacgctgagtttaaagacgacttaaaaatatcaaatactaaagatgaattgagcttagtatgataaaatttcatgaggtggtcatgtngacatgaagcaaatctgttnttttgcatgcaaacatttt

SEQ ID NO: 36806 - DNA, 194 bp, Glycine max
  Clone ID: LIB3138-120-Q1-N1-F11
gaacaagtagttgagaactaagaaggagaagcaaatggctgcgtcaatgatctcttgcccagctgataccactgacaaccgtgccggttccggcatggttgctccattcactggccttaagttcatggctggcttgcgcatcagtatgactaacaatgacatgacctatattgctagcaacgggggacgagtgc

SEQ ID NO: 36807 - DNA, 403 bp, Glycine max
  Clone ID: LIB3138-120-Q1-N1-F12
gtcattgctgagattgttcttgtgggaggtgcagagtactacagaattattaatggcctgacagccacaaatatggagcaaactgcggtcctgaggctgtttggttcaagactggagctctgcttcttgatgggggtaccttgaactacttcgggaaacccatccccatcaatcttattgtggctgtcattgctgagattgttcttgtgggaggtgcagagtactacagaattattaatggcctgaatttcgaagacaaacttcatccaggtggtccatttgacccattggggcttgcaaatgatccagaccaagctgcactgctaaaggtgaaagaaattaaaaatggaagacttgctatgtttgccatgcttggtttctacttccaagctatgtcactgga

SEQ ID NO: 36808 - DNA, 398 bp, Glycine max
  Clone ID: LIB3138-120-Q1-N1-F2
cttcattttttgttttattttccaacaagaagttccaagacaatttaattcaattttttgtttccaacactactatttcctaagacatttaactgaacacaaatttccacacttcctaaggtagacccattttactggaagctcggtaacagcttcctgcttaccaaccttccaaaattgaggtcattatcctattatcttgtacatatttttaattactattgtctccctttcctgttaaataccatatgaacttctaaacacgtgcaagaatttacaaaggtccccgatttccttactttttaaaaatatttttctccactattttcccctatacgaactcgtgttttatttttaaacagtgtattaattgcggggtgctgatcctctattcattc

SEQ ID NO: 36809 - DNA, 194 bp, Glycine max
  Clone ID: LIB3138-120-Q1-N1-F3
cgcgaaagcaaacgtgaagagaagatgtccgagctatttaaaaatatcagggagctaaagtcaatcctgtatggaaatagtgaatctgaaccagtgtctgaagcctgtgcgcagttgactcaggagttctttaagggggatacgttgcgactgcttatcaagtggcttccaaaattgaatttgggggccagaaa

SEQ ID NO: 36810 - DNA, 293 bp, Glycine max
  Clone ID: LIB3138-120-Q1-N1-F4
gcaagcttgttacttggctttgtttgattgattgccccaatggccgcgtgtggctatatatctgctgccaacttcaatcatcttgttggcgccagaaacttatccaaattcagttcttcggatgccacaatttcgttatcatttggcgggagcgattcaatgggtcttagtttgcgacccgctccaattcgtgctcctaagaggaaccatttctctcccttgcgtgtcgtttgcgtcgattatcctcgaccggagctcgaaaacactgttaatttcgtcgaagctgcttactt

SEQ ID NO: 36811 - DNA, 316 bp, Glycine max
  Clone ID: LIB3138-120-Q1-N1-F5
acttatcataccaatcctgaaaatgcagttcgtagtatttttgttgcgcctttcagaggcggaaggcccattcgggtggttacatttccgaataccattgtgcagattgaaccagacatgaattcaaggtttcagcttttgagtaccactaccaatggtgattttgttcaagggaaagatctcgcaatggttaaagttaatgtagcatgtgctgctgttggcttgacatcaagttacactccaactccattgttggaatctggtttgcaaaaagacagagggttaattgtggagtattttggaaggatgtcttacg

SEQ ID NO: 36812 - DNA, 344 bp, Glycine max
  Clone ID: LIB3138-120-Q1-N1-F6
agtgctatagagatagagagagagagagaaagaaaagagtgtatgtatttatgcgtttgtgtgagagatagagagatagagagagagaaagagttgttgataaaaacataattattttttcttcttggtctttggagggtcatgtagatgtagtagctatagatttttggtttatttgttgataccctttttcttctttatcttatttttgttttgaaatctgaaacctttcaaaatcggttttgggtgtgagtgaatctcgtgagttgaagatttttttctttctttctatctttgcaccgatgaggatccggaaaaggccggcgctttttccttcttcgctc

SEQ ID NO: 36813 - DNA, 391 bp, Glycine max
  Clone ID: LIB3138-120-Q1-N1-F9
ctcgagccgaatcggctcgagggaatggactggtttggccaatagattactgagtaagggcaatgatattctgtgttgcgattatgctagttttgatggtttgattaccaagcaagttatgagcaagatggcagaaatgataaacagtctttgtggtggtgatgaaaaattgatgcgtgaaaggacgcacctgctgttggcttgttgttcaaggatggcaatttgtaagaaagatgtttggagagttgaatgtggaatcccttctggatttccgctcacagttatttgcaatagcatttttaatgagatgctcattagatatagctatgaaaaattactgcgccaggctaaagctccaagtatgtttttacaatccttcaaaaaatttgtt

SEQ ID NO: 36814 - DNA, 404 bp, Glycine max
  Clone ID: LIB3138-120-Q1-N1-G1
tctaattctccagaaagaatcagatggtcttcctgaacaagccttttatttggtaggtaatatcgatgaagctactgcgaaagctacgaacttagaaatggagagcaatttgaagaaatgactttaaatctttgtgtactgacccccaatcgaattgtttgggattcggaagtgaaggaaatcattttatctactaatagcggacaaattggagtattaccaaatcatgcgcctattgccacagccgtagatataggtattttgagaatacgtcttcttaaagaccaatggttaacgatggctctgatgggcggttttgctagaataaacaataatgagatcactgttttagtaaatgatgcggaaaagggtagtgacattgatccacaagaagcacagcaaac

SEQ ID NO: 36815 - DNA, 456 bp, Glycine max
  Clone ID: LIB3138-120-Q1-N1-G10
ctcgagccgaatcggctcgagaactaactccgttccgttccgttctgttctgttccgttacaatggcggaaacctctgctgcactatgcttctccacattcagattctctttcgctccgtcccgttctccttccaagaccttcttcaacaacagctccttccatttccctcctccttctagttctcacacgtgtcttctccatttcgctcccaaagcctccccctccggcaacttctccggcgacgattctttcggttttttcccttggtccgattccgacaacaacgaaattcaatggattcctgaggagagaattacgttgttcactgctgatggattgatccagattggaggctccatggttcctcgccgtgtcagctcttcagataagaacacgggaaatccaaactgctaaaaaattcaacggttcaggagagtattacatgaatccaatc

SEQ ID NO: 36816 - DNA, 383 bp, Glycine max
  Clone ID: LIB3138-120-Q1-N1-G11
gggaatttttgctggttatgcctctgcccgcatatataaaatgttcaaaggaacagagtggaagagtattgccctcagaactgcaatcatgttccctgcaatcgtttctgccattttctttgtattgaatgctctcatatggggacaaaaatcatccggagctgtgccttttggaacaatgtttgccctgatctttttatggtttgggatctcggttccgcttgtttttgttggtgcctatgttggatttaagaagcctgcaattgagaatcctgtgaagacaaacaaaatcccaaggcagatccctgagcaggcatggtacatgaatccggtcttctcagttctgatcggaggaatccttccatttggagctgttttcatcg

SEQ ID NO: 36817 - DNA, 358 bp, Glycine max
  unsure at all n locations
  Clone ID: LIB3138-120-Q1-N1-G12
tctttctccgngaacaaaaaaaaaagaaaaaaaaaatccgcgattcgctcttctcttggaaaagtgaaaaccagaagtacgaacgaaagagaagagcgatttagaagtgagagaagatggggttgtcgttcacgaagctgttcagcaggttgtttgcgaagaaggaaatgaggattctgatggtaggtctcgatgctgctggtaagacaaccatcttgtacaagctcaagcttggagaaatcgtcaccactatccccaccatcggatttaatgttgagactgtggagtacaagaacatcagcttcactgtgtgggatgttggtggtcaagacaagatccgtccactgtggaggcatta

SEQ ID NO: 36818 - DNA, 341 bp, Glycine max
  Clone ID: LIB3138-120-Q1-N1-G2
gagaatgcgggttgtttgttgttccaattcaggcgtgagtgctttccctagttgtcttagattccctccactgatcgcaatttcaacaacaccctcttcgatccgctttctaaattctccacccctccgttccactgcttcgtcgcaacacgttacaataatggcttcgaagaattctcaacaagacacgcgcttagcgagaatcgcctctgcaatccgagtcatccccgactttcctaagccaggaattttgtttcaggacataaccacgctgcttcttgatacaaaggctttcaaagacaccattgacttgtttgttgagaggtacagagatcaaaaca

SEQ ID NO: 36819 - DNA, 322 bp, Glycine max
  Clone ID: LIB3138-120-Q1-N1-G3
atttgttggagggaaatttttcctttgatattaaatctcgctctagattggaaaaagtttcctctacaaaagcacaatttgttagtggaaaaaccttcaaatatgatataattggtgctggttcacattcttcagaagattttcctgaaaaggaagatcaagaaaaacccaaaaagattgatgccagattgagacaaagaatagatcctcaatacaatgaggttcaagctcaaatggaaacaaatttgtttaaattggctcttgatgatgttgaaactcctaaaagttccatgttggatctgaaaatttctcaatctaaaat

SEQ ID NO: 36820 - DNA, 268 bp, Glycine max
  Clone ID: LIB3138-120-Q1-N1-G4
gaaaggattaatagtgacatcaaagttgagggtgagaacaactgtttcaagtcaaaggagccagcttgtgattacaatagaacacatgaatggatctcttcttggcgcgctttacaacaacaataaacatatctgtgtaggtggagatggtctcaattgaggctctaacaaacgaagttactccaagcctggctttgccaatgttaacaacaatattaacctgaatcttgatcctaacggacacaggtttaatggtgaacatgagctt

SEQ ID NO: 36821 - DNA, 325 bp, Glycine max
  Clone ID: LIB3138-120-Q1-N1-G5
cacagtttcggaggagaagaaaatagtcgttcgagatggcccgtacgaagcaaactgctcgtaagtccacaggaggaaaggctcctaggaagcagcttgcaaccaaggctgcacgtaagtctgcaccaactactggtggtgtgaagaagccacatcgttaccgtcctggtaccgttgctcttcgtgagattaggaaataccagaagagtaccgagcttttgatcaggaagctccccttccagaggctggttcgtgaaattgctcaggacttcaagactgatctgcgtttccagagccacgccgtgcttgcattgcaagaagctgc

SEQ ID NO: 36822 - DNA, 398 bp, Glycine max
  Clone ID: LIB3138-120-Q1-N1-G6
cttgtgttggctaacacacaagaattctttgatggaaattttccagtggattcttggttaccaatttttgtgaattgtctttatcctgtaagtcaattaccttcagaagctgtcgttgtaaatgttacatgtggtagtggacgtggtggtttacccaccactgcttggattagttctgcagttaacaatcgctcctcagatatcaacaaaaggattcgcacagcacttgggaaaggtaagaaaattgtttttcttactagagttgatccttttccagtagctttactggctgttctttttggcgttaagaatgaaattctgagttctaacgccactaatcctatgctgacgcgacttcttgagaacttgtagagtctcaaatatctggttgatgagtg

SEQ ID NO: 36823 - DNA, 390 bp, Glycine max
  Clone ID: LIB3138-120-Q1-N1-G7
ctactgggcaccaacaagggaagaccgcattggtgtttgcaccggaattttccgcactgatggtattcctgaacaggacattgtcaagcttgttgacaccttccctggccaatccattgatttctttggtgcactgagggccagagtatatgatgatgaagtgaggaagtggatttctggtgttggtgttgacagtgttgggaagaagcttgtgaactcaaaagatggacctccaacctttgagcagcccaagatgactctggagaagctcttgctgtatggtaacatgcttgtccaagaacaagagaatgtcaagagagtccaattggctgacaagtacttgaacgaggctgctcttggaaatgctaacgaggatgctattcagagggg

SEQ ID NO: 36824 - DNA, 376 bp, Glycine max
  unsure at all n locations
  Clone ID: LIB3138-120-Q1-N1-G9
ggaatcttagtggacaaaactggagattggatcacacttatacaaaattctccaattagtaacttattgagagttgctgcttggaagaaaggctgtttaatggtcaagattgtgatgtctgggaatgcagcagtcaaaaggagtgattgggcctcattggtacaagtgtttttaacaaacagcaacagtacagagcattttgatgcatgtaagtggacaaaatcagaaccacattcctgggaattgatcttcccaatagaggtatgtggtcctaataatggttttgaaatgtggagttctgagtgggcaaatcaaacttcatggcatttgagtttncttattgacaatcccaaacagtctacaagttttgatattc

SEQ ID NO: 36825 - DNA, 254 bp, Glycine max
  unsure at all n locations
  Clone ID: LIB3138-120-Q1-N1-H1
gtgacagtgattagatcttatatgttaagcaggtgtacggtacgatggtagtgaggagccagaatccctcttcctgctttatgatataatacaaataaaatagcgattccggaaatcatgtctgtagctgctctttttatttatgtgataaatgtaaaacgctttggtttggcttggccgttgtgcattaggttgaaaaaataaatgttataattactcagaatctcagatctttctcatactttgcccctgng

SEQ ID NO: 36826 - DNA, 111 bp, Glycine max
  Clone ID: LIB3138-120-Q1-N1-H10
gtattttggaaggatgtcttacgttgctcataacgttaatcagccccaagagaaagatttgttggagggaaatttttcctttgatattaaatctcgctctaaattggaaaa

SEQ ID NO: 36827 - DNA, 380 bp, Glycine max
  unsure at all n locations
  Clone ID: LIB3138-120-Q1-N1-H11
gcagagtacctcaaggaggtcgacaaggctcgccgcgatctccgcgcactcatcgctaacaggaactgcgctcctctcatgctccgattagcctggcacgatgccggaactaacgatgctaagaccaagaccggtggacctaacggttcgatccggaacgaggaagagtattctcacggagccaataatggcttgaagaaagctattgatttctgccaggaagtgaaggcaaaatatcctaaaattacatatgcagatctcttccagcttgcgggtgttgntgcagttgaggttactgggggtccaacaattgattttcgtcctggtagaagagattcaaaagtatctgctaatgaagggcggcttcctgatgctaaaaa

SEQ ID NO: 36828 - DNA, 325 bp, Glycine max
  Clone ID: LIB3138-120-Q1-N1-H12
acaaaaaacaaaaattaaataaacagggcacaacaaaatctgggcgcactcataaataacaggaactgcgctactttcatgctacatttagcctggcacgataccggaacttactatgcttagaccaataccgtttgacctaacaaaacgattcggatctaggatgagtattgttacgtaacctttaatggctgaaaaaaatctgttggttttttcctagaagctaaagcagattgttctaaaattgcataatcacatctatgccaactatcttgtgttttagcctctgatgtaactaaaaatccatcaattgattttgattatg

SEQ ID NO: 36829 - DNA, 303 bp, Glycine max
  Clone ID: LIB3138-120-Q1-N1-H2
ctagttttgatggtttgattaccaagcaagttatgagcaagatggcagaaatgataaacagtctttgtggtggtgatgaaaaattgatgcgtgaaaggacgcacctgctgttggcttgttgttcaaggatggcaatttgtaagaaagatgtttggagagttgaatgtggaatcccttctggattttcgctcacagttatttgcaatagcatttttaatgagatgctcattagatatagctatgaaaaattactgcgcccgggctaaagctccaagtatgtttttacaatccttcaaaaatttt

SEQ ID NO: 36830 - DNA, 284 bp, Glycine max
  Clone ID: LIB3138-120-Q1-N1-H3
agaatctgcaaggttcctctacttcaccacctcttcctcctgggacacaaaagactcttgcctttcattgaggctttttttgttttgtgtgaaaagctacaagcaaatgaatccttcatgcggcgggaccattttaatgcatctgccaccgaagtcaaagagtctgctggttgcttagcttcaacaagtgtttaaatttgtggagacccacagcgaaaatatgacagtgctatcactttcactaggtttactaaaaagcatcgcctactgttaaatgctttcat

SEQ ID NO: 36831 - DNA, 315 bp, Glycine max
  Clone ID: LIB3138-120-Q1-N1-H4
ggtgaggtaaacttgaattgaagtgaagaaggagatggctgcaacctcttccttgtgctcatcgaccctccaatcccagatcaatggattcttccttcacaaaacctctctttcccatactccttccctcactttctccaggaggaaaatttcaaccacagtgaaggctacatctcgagtcgacaagttttcaaaaagcgatatcattgtctctccgtccattctttctgcaaacttttcaaaattgggagagcaggtgaaagcagtggaattggctggttgtgattggattcacgttgatgtaatggatggtcg

SEQ ID NO: 36832 - DNA, 84 bp, Glycine max
  Clone ID: LIB3138-120-Q1-N1-H5
ctcaggaatgtgttcccaggacctattgtgttttaaatccacaaaatccttttgtgttaaataggtggatgggaaaattgactt

SEQ ID NO: 36833 - DNA, 331 bp, Glycine max
  Clone ID: LIB3138-120-Q1-N1-H6
tgggtgtccatatttgtatgcaatggtgcatgatagttcagtgtctacaataccaggtgattttgtcattggtgtcaagttgacaaccataaacaatatgtgtgcatatgggctcaatcctggtatttcaggttctcgtcttttgggcaccattcctcagtccatttcacagcaaactgtttggaatcaaatggcaacagtgagaacaccattgaattttgattctagcaagcagagcttttgtcagttttctattgaccttctcggtggaggaatcttagtggacaaaactggagattggatcacacttatacaaaattctccaattagt

SEQ ID NO: 36834 - DNA, 231 bp, Glycine max
  Clone ID: LIB3138-120-Q1-N1-H7
gtttttcttactagagttgatccttttccagtagctttactggctgttctttttggcgttaagaatgaaattctgagttctaacgccactaatcctatgctgacgcgacttcttgagaactgtaagagtctcaaatatctggttgatgagtgtccttttgcatttgtgaactagtatgtagtattttattcacttaaataaagcgcattactatgtgcaatgagtgtgttt

SEQ ID NO: 36835 - DNA, 296 bp, Glycine max
  Clone ID: LIB3138-120-Q1-N1-H9
cgtaaatgtgttacgagaattgtatttgcacagtccagaggaagctcgccaattgagaaggaaagctctctctcgtattgaatggctgcaaaaagctgatgtgcctaccatagcacagattgaagagttccattcgatgcagaggatgatgaatgctcctgattcaaatgataatattgatttactgttgagcattgatttgttgggtttacaaggagcaggtaaagcttttccaaacaaaattgtttttgatgataagcttgtgttggctaacacacaagaattctttgatggga

SEQ ID NO: 36836 - DNA, 353 bp, Glycine max
  Clone ID: LIB3138-121-Q1-N1-A1
attcctcagtccatttcacagcaaactgtttggaatcaaatggcaacagtgagaacaccattgaattttgattctagcaagcagagcttttgtcagttttctattgaccttctcggtggaggaatcttagtggacaaaactggagattggatcacacttatacaaaattctccaattagtaacttgttgagagttgctgcttggaagaaaggctgtttaatggtcaagattgtgatgtctgggaatgcagcagtcaaaaggagtgattgggcctcattggtacaagtgtttttaacaaacagcaacagtacagagcattttgatgcatgtaagtggacaaaatcagaaccaca

SEQ ID NO: 36837 - DNA, 393 bp, Glycine max
  Clone ID: LIB3138-121-Q1-N1-A10
ctcgagccgcgcaaaaggattactccatggcaactgcggatgtagtggatgcggaagtgagggaactggtagagagagcatattctagggcaacacatattatctcaactcacattgatatccttcacaagcttgctcaacttctcatagaaaaagaaactgtggatggtgaagagttcatgagtctattcattgatggaaaagccgaattatatgttgcataatcatacacgcaagtcacagaattatgtttgtactataaaatacgctctgacttgtacactgtaagaatcaataattattttatcaaattcaaggagaaaaaacaattagcacagcagcttacgcaataaataaataaaaaatatggttctacggctgagttacactttc

SEQ ID NO: 36838 - DNA, 384 bp, Glycine max
  Clone ID: LIB3138-121-Q1-N1-A11
gccaaatgctgttctttcaatgtggagatattttgttggagatctcgtctttgaagtttctaagatgacttctccctacattaaatgtacagtctctttcttcatagcatttggaaatttggctgatgataccatcaattttgaggcttttccccacaagctggtgcagtttggagagattcaggaaaaagttgtattgaaattttcacaagaggaatttcttacagcttggtcaactcaggtgcgtcctgcaacaactctgttggctgatgggtgtccatatttgtatgcaatggtgcatgatagttcagtgtctacaataccaggtgattttgtcattggtgtcaagttgacaaccataaacaatatgtgtgcatatgggct

SEQ ID NO: 36839 - DNA, 169 bp, Glycine max
  Clone ID: LIB3138-121-Q1-N1-A12
cagtgttagagcgtcggtaggatcgaagatggttggcatgtagccatttgttttggctgggtgataatatcttaatagaatatggaaatgttgtgacgaactctgcagtagcagttctatttaaataaaacaatttagttaggtgatctatagattttattttccactt

SEQ ID NO: 36840 - DNA, 269 bp, Glycine max
  Clone ID: LIB3138-121-Q1-N1-A2
ctagggtttttctttttctcttctcactgcatcgcttcaggttctgctgaaaagatgtctcgcgtgtatgttggtaacttggattcacgagtcactgagagagatctcgaagacgaattccgcgttttcggagttattcggagtgtttgggttgcacgtagaccacctggttatgcttttattgactttgatgaccgcagagacgcacaggatgctatccgtgaattggatggcaagaatggttggagggttgagctttctcacaactc

SEQ ID NO: 36841 - DNA, 432 bp, Glycine max
  unsure at all n locations
  Clone ID: LIB3138-121-Q1-N1-A4
cgagaaatggcgatggcaatggcgcttcgcaggctttcatcttcaattgacaagcctctgcgccctctcttcaatgccggttccctctactacaagtcgtctttgcctgatgaagctgtttacgacaaggagcgacccggagttacatggccgaagcagttgaatgctccacttgaggtcgtggatcctgagattgctgatattattgagcttgagaaagctaggcaatggaaggggctagaattgataccgtcagagaatttcacctctgtgtctgtgatgcaagcggttggatcggttatgaccaacanatacagtgaggggtaccctggtgcaagatattatggtggaaatgagtatattgacatggctgaaacactgtgccaaaagcgtgccctagaaagctttagattggatcccgctaaatgggga

SEQ ID NO: 36842 - DNA, 386 bp, Glycine max
  unsure at all n locations
  Clone ID: LIB3138-121-Q1-N1-A5
atctcagaattctctaaaagagatctttttctgctctttgaagaaagaagggtctttgcttgattttggagatgtctctgctctcagatctcatcaaccttaacctctccgataccaccgagaaggtgatcgcagagtacatatggatcggtggatcaggaatggacctgaggagcaaagcaaggactctcccaggaccagttagcgacccttcagagcttcccaagtggaactatgatggttccagcacaggtcaaagctctggtgaagacagtgaagntgatttatacccacaagccattttcagggatccattcagaaggggtaacaatatctnggttatctgtgatgcctacacntctgctggagaacctattcccactaac

SEQ ID NO: 36843 - DNA, 406 bp, Glycine max
  Clone ID: LIB3138-121-Q1-N1-A6
ggtgatgataacttaattagtgttcatgaatatgtcaagccttactttagtggttctaaattgaaaagctttctagctagtcataacatcaccattactgatggtattgacaaaactagtgcaactttgcaatttagaaagttagcagattgtgattttctcaagagaaactttaagcagatgtctaatgttttgtgggtggctcctgaggacaaggcgagtttatggtcacaacttcattatgtttcgtgtaataatctggaaatgcaagaagcttatcttgtcaatctcgtaaatgtgttacgagaattgtatttgcacagtccagaggaagctcgccaattgagaaggaaagctctctctcgtattgaatggctgcaaaaagctgatgtgcctaccatagcac

SEQ ID NO: 36844 - DNA, 337 bp, Glycine max
  Clone ID: LIB3138-121-Q1-N1-A7
tgcaattgaagttaaaagccttagccttccctacaactccaaacacaaagacatcatcatccatggctgcctccgtctccactgtcggagctgtcaacagagctcttttgaacctgaatggttctggagctggagcttcagctcccagttcagccttctttgggaccagcttgaagaaggttattgcctcaagggtccccaacagcaaggtttccggtggaagcttcaagattgttgctgtagaagagaagaaagagattgaagagacccagcagaccgacaaggacagatggaagggtcttgcctatgatatctcagacgaccaacaagacatcac

SEQ ID NO: 36845 - DNA, 360 bp, Glycine max
  Clone ID: LIB3138-121-Q1-N1-A8
tttttaatgagatgctcattagatatagctatgaaaaattactgcgccaggctaaagctccaagtatgtttttacaatccttcaaaaattttgtttctttgtgtgtgtatggtgatgataacttaattagtgttcatgaatatgtcaagccttactttagtggttctaaattgaaaagctttctagctagtcataacatcaccattactgatggtattgacaaaactagtgcaactttgcaatttagaaagttagcagattgtgattttctcaagagaaactttaagcagatgtctaatgttttgtgggtggctcctgaggacaaggcgagtttatggtcacaacttcattatggttcgt

SEQ ID NO: 36846 - DNA, 416 bp, Glycine max
  Clone ID: LIB3138-121-Q1-N1-A9
ggcagaaatgataaacagtctttgtggtggtgatgaaaaattgatgcgtgaaaggacgcacctgctgttggcttgttgttcaaggatggcaatttgtaagaaagatgtttggagagttgaatgtggaatcccttctggatttccgctcacagttatttgcaatagcatttttaatgagatgctcattagatatagctatgaaaaattactgcgccaggctaaagctccaagtatgtttttacaatccttcaaaaattttgtttctttgtgtgtgtatggtgatgataacttaattagtgttcatgaatatgtcaagccttactttagtggttctaaattgaaaagctttctagctagtcataacatcaccattactgatggtattgacaaaactagtgcaactttgcaatttaaaa

SEQ ID NO: 36847 - DNA, 425 bp, Glycine max
  Clone ID: LIB3138-121-Q1-N1-B1
caatctcactctttcttccggccatcgctgcctcctcgtcggttcgaacggcgccggaaagaccactctcctcaagatattaggagggaaacacttggtggagcctgacatggttcgcgtgctcggaagatcagcttttcacgacaccactctaatatcttctggtgatctctgttaccttggtggcgagtggaggcgagatgttgcttttgcgggttttgaggttccaatacaaatggacatatctgctcaaaaaatgatatttggtgtgcctgggattgatcctcaaagaagagccgagctaatcaaggtattagatatcgatctttcctggagattgcataaagtatctgatggtcaaagaagaagggtgcagatttgtatgggtctcctcaaaccattcaagggtctcttctcgatgagat

SEQ ID NO: 36848 - DNA, 402 bp, Glycine max
  Clone ID: LIB3138-121-Q1-N1-B10
gttgctcgcaatgagactgctactttaacagcagctgctgtccctgcgcttttgcttcctcctccaacgacagctctggatgagcatcttgttgctggattaccagctctggaaccatatgctcgtttatttcatagatattatgcaattgctactccaagtgctacacaaagacttcttcttggacttctagaagcacccccatcatgggctccagatgcacttgacgctgctgtgcagcttgtggagcttcttcgagctgctgaagattatgcatctggcataaggcttcctagaaattggatgcatttgcatttcttgcgtgcaatagggactgcaatgtccatgagagctggtatagccgctgatgctgcagctgctcttctttttcgtatactttcc

SEQ ID NO: 36849 - DNA, 347 bp, Glycine max
  Clone ID: LIB3138-121-Q1-N1-B11
ccaaaactgtttctttatgcgtgaaacgtcttgtgtacacagatgaaaacggagaacttgtcaaaggagtttgctcaaatttcttgtgcgacttgaagccaggacccgaagtaaagattactggacctgttggtaaagaaatgcttatgccaaaagatcctaatgcaaccgtcatcatgttggcaactggaacaggaattgccccattccgctcatttttatggaaaatgttctttgagaagcatgatgattacaagttcaatggtttggcatggctcttcttgggtgtccccacaagcagctcactactttataaggaggaatttgaaaagatgaaggagaaagca

SEQ ID NO: 36850 - DNA, 288 bp, Glycine max
  unsure at all n locations
  Clone ID: LIB3138-121-Q1-N1-B12
atcccaaacagtctacagtttttgatattctcttgggaatctctcaagattttgaaattgctggtaatactcttatgccagctttttctgttccacaggctactgccagatcttctgaaaatgcggaatcctctgcatgatctggaattngtgttttctttcgcttgttcgtttgtttaattcaataaaggaaattaggcatgaccctcttgttgagtatgctctgcctatttgaaaatttccacacctcttttaattgtcgtaatgatgtttgaagtgtgtgttatt

SEQ ID NO: 36851 - DNA, 343 bp, Glycine max
  Clone ID: LIB3138-121-Q1-N1-B2
atggtggccacagttgttgttcctgagaatacaggtgtatgatcgggctgtgctctgaatagttcttttagggggcgcgccacttctgatatttacaccatctgctctcaagactgtgaatcgcggaatcctgcttgcacaaaagcaatgactatgtcatttaatccaaacccgtgttctgatgcatggagtttggaatttctgaagcgtactggatttcattgcgatatcattggagtcactggatggactgccaccccaatgcacgatgttcaggttacaattgattggattatgttctctcaagaatgagttcccaggacctattgtgttataaatccac

SEQ ID NO: 36852 - DNA, 426 bp, Glycine max
  unsure at all n locations
  Clone ID: LIB3138-121-Q1-N1-B3
cacacactcaccaggttaaattatgtgactttggaagtgcaaaggttttggtacgttatatatgtctgcatttcagccccttcctccttaaattattcctcttcattcaacctttctgttttccttggttagattgtagttttacttttccttatttggtcttgacctttgacaggtaaaaggtgaaccaaatatatcatacatatgttctagatactatagagcacctgagctcatatttggcgcaactgaatatactacagccattgacgtctggtctgttggatgtgttttagctgagctgcttcttggacagcctttgttccctggtgagagtggagtngatcaactttgtgagattatcaaggttctgggcactccaacaagggaagagattaagtgcatgaaccctattatacagaattt

SEQ ID NO: 36853 - DNA, 353 bp, Glycine max
  unsure at all n locations
  Clone ID: LIB3138-121-Q1-N1-B4
ggaggaattccatgcaatgtaaagagataggcatggcggggcaatcgcggaagtggatgatcctggtggccagcatatggattcaggcattcaccggcaccaacttcgacttctccgagtcctcctcttccttgaaatcccatctcaacatctctcagctgcaactcaactacctcgccaccgccagcgacatgggcaaggtcttcggttggtcctctggcctcgctctcatccacttaccgctctccctcgtcttgctcatcgcctnctncatgggcttcatcggctacggcctccagtggctcgccatcaaaaatctcatcaccttgccttattctctctacttttcttct

SEQ ID NO: 36854 - DNA, 397 bp, Glycine max
  Clone ID: LIB3138-121-Q1-N1-B6
gccaccccaatgcatgatgttcaggttaaaattgattggtttatttcctctcacgaatgtgttcccaggacctattgtgttttaaatccacaaaatccttttgtgttaaataggtggatgggaaaattgactttcccccagggcacttcccgaagtgttaagagaatgcctctttctatagggggaggagctggtgcaaagaatgctattctcatgaatatgccaaatgctgttctttcaatgtggagatattttgttggagatctcgtctttgaagtttctaagatgacttctccctacattaaatgtacagtctctttcttcatagcatttggaaatttggctgatgataccatcaattttgaggcttttccccacaagctggtgcaagttggag

SEQ ID NO: 36855 - DNA, 375 bp, Glycine max
  Clone ID: LIB3138-121-Q1-N1-B7
ctttccccatccatccatccaccgaaccctaaccctaatcctccatcatcgatttgactcgattctctcgctgtctgttatttccttcaaagcaaaacaattccatcgatgaatcgggcgtcgcagctttcgtgataatgatcttggcgctgcgaatcgattgcatgggtttggagaatgccggagcttcgtagtggaccgcgacgacgtcgtgctccggttgctcgtaaaagctccgaaccaccgtctccggccgggagatacgtcaagactcgcgctgcagtcgccagagaggcaacggcggtggagaggccaagaactcgtttggcggccaaaaaaagaggagaatccccttataataatatccgatcacac

SEQ ID NO: 36856 - DNA, 467 bp, Glycine max
  Clone ID: LIB3138-121-Q1-N1-B8
ctcgaattctatttggcaaacctatcaagtgttcatggggtagcaagcctactcctccagggactgcctcaactcctctcccaccacctacttctgcgaatgtgtcgggattttctcttgctagtcttgcagcttatgaacgccaaatggctttgagtaaaatgggtggtgcacatgcccttatgcatcaacaaggtcaacatgccctaaaacaggtagccatgggaatgggtgctcctggggctggttatgatgcaagattccagaatgttgcgaccacccaacacctaatgtactatcagtaaaatgtgttggtgtgcaactctccgcgataaacaagggaggattaaagtatgtaagaacggttttacaataccgattggttcttctgggcttatggatgggtattacatttgtaatactacagttatttaacccgtgcatgcatgaaatgggtggtttctaat

SEQ ID NO: 36857 - DNA, 377 bp, Glycine max
  Clone ID: LIB3138-121-Q1-N1-B9
caagcacccaaattcagtgtggtctgagagaactgagaacccgcattgagtctgtgaagaacacgcagaaaatcacggaggcaatgaagcttgttgctgcagccaaagtgagaagagctcaagaagctgttgtgaacggaagacccttctcagagaccctggttgaagtcctctacaacatcaacgagcagctccaaactgaggacgtagacatccctctcacaaaggttagacctgtcaagaaagttgcacttgttgtgatcaccggcgaccgcggcctctgcggcggtttcaacaacgcaatcataaagaaagccgaggctagaatcaaggaattgaaggagcttggcttgcaatttactgtcataagtgttggc

SEQ ID NO: 36858 - DNA, 465 bp, Glycine max
  Clone ID: LIB3138-121-Q1-N1-C1
ggaatgatggattaaaggttgatgaagaggactggcttgatgttctggtctccttgaaagattccaacaataacccattattgacgttggaggagatcaatgcacaaattatagaattgatgcttgcaacaattgacaatccatcaaatgcttttgaatgggcacttgctgaaatgataaaccaaccggagttactccaccgagccgttgaagaattggatagtgtggtaggaaaagagagactggtccaagaatcagatatacctaaactcaactatgtgaaggcttgtgcaagagaagctcttcgccttcatcccattgcaccttttattcctccccatgtctctatgagtgacacaatggtgggaaattacttcatccctaagggtagccatgtaatgcttagcagacaagagcttgggaggaacccaaaagtgtggaatgaaacctacaagttcaaacctg

SEQ ID NO: 36859 - DNA, 320 bp, Glycine max
  Clone ID: LIB3138-121-Q1-N1-C10
cccatctcatgtgctagatttccaaccaggagaggcctttgtggtcagaaatgttgctaacattgtcccaccatatgaccagtcaaaatacgctggaactggggcagcagttgagtatgctgttttgcatcttaaggtgtctgagattgtggtcattggacacagtgcttgtggtggtattaaggggcttctgtctttcccatatgatggaacctactctactgattttattgaggagtgggtcaaaattggcttgcctgcaaaggcaaaggtgaagacacaacatggggatgcaccttttgctgagttgtgctcacact

SEQ ID NO: 36860 - DNA, 387 bp, Glycine max
  Clone ID: LIB3138-121-Q1-N1-C11
gtctttgtggtggtgatgaaaaattgatgcgtgaaaggacgcacctgctgttggcttgttgttcaaggatggcaatttgtaagaaagatgtttggagagttgaatgtggaatcccttctggatttccgctcacagttatttgcaatagcatttttaatgagatgctcattagatatagctatgaaaaattactgcgccaggctaaagctccaagtatgtttttacaatccttcaaaaattttgtttctttgtgtgtgtatggtgatgataacttaattagtgttcatgaatatgtcaagccttactttagtggttctaaattgaaaagctttctagctagtcataacatcaccattactgatggtattgacaaaactagtgcaactt

SEQ ID NO: 36861 - DNA, 133 bp, Glycine max
  Clone ID: LIB3138-121-Q1-N1-C12
ttcaaaattttgttttcctgaatccttaaataccagaagcacttaatctgtatatgctttctaaaaccgtttttcttatttgcccttactgtagatcgtgatatataatatacctgatgtattatatcattgt

SEQ ID NO: 36862 - DNA, 399 bp, Glycine max
  Clone ID: LIB3138-121-Q1-N1-C2
gatgaaaaattgatgcgtgaaaggacgcacctgctgttggcttgttgttcaaggatggcaatttgtaagaaagatgtttggagagttgattgtggaatcctttttggatttccgttcacagtatttgccaatcacatttaaagagaactcttttatatatctcttaaaattctcggccacgcttagctccagttgtttttcaattcttcaaaattttgttctctggtgtgttgggatgatactaattaggtcataatattaagcttcttatggtctaataaagctttactatatactacctctgtggatgcaactatcacttcattaaagacaatgattttcaaaactacaatttatgttggtgtctggacagagtatgccactctattcttatattga

SEQ ID NO: 36863 - DNA, 266 bp, Glycine max
  Clone ID: LIB3138-121-Q1-N1-C3
aaaacaaaaataattgaattaaataatggagaaaaaaaaaaaaaaaaaaaaaaaaaaaaaaaaaaagggccggcccccaataaaaaacctctcaaccccggaaataaattcggacccggtccttgaagggtaacaacttttccttatatgaggccgaataaaacttgggcttaataatggcaaaacttattccctggtgaaaatagttttccgttacaatttcaaaaaaaaatataacccgaaagaataaacttaaaaccctgggg

SEQ ID NO: 36864 - DNA, 287 bp, Glycine max
  Clone ID: LIB3138-121-Q1-N1-C4
aaaaaaaaaaataaatttaaaaaaaaaaaaaaaaaaaaaagggaaggaaaaaaaaaaaaaaggaaaataaaaaaataaaaaaaaaaaaaaaaaaaaaaaaaaaaaaaaaaaaaaaaaaaaaaaaaaaaaaaaaaaagggggggggccgccaattaggggctttgtcaccccggaaataaattcgggccggggcctggaggggtacccatttttctttttggggggggttttaaaacttgggggaaaaaagggaaaaacttgtttcctggggaaaaattttttccttt

SEQ ID NO: 36865 - DNA, 432 bp, Glycine max
  unsure at all n locations
  Clone ID: LIB3138-121-Q1-N1-C6
ctcgagccggatgaagtgaggaagtggatttctggtgttggtgttgacagtgttgggaagaagcttgtgaactcaaaagatggacctccaacctttgagcagcccaagatgactctggagaagctcttgctgtatggtaacatgcttgtccaagaacaagagaatgtcaagagagtccaattggctgacaagtacttgaacgaggctgctcttggaaatgctaacgaggatgctattcagaggggaactttcttccagtcttgaattggaggcaaaagcaaacttggcaagtaaatatttctgttcgtgaaggttgttgtactaatccaagtgctagaagttgtgatggaactngcgtgtaacattcttagcattctcaatgtcttaggtgcaaagagaagatgcctaggttgagatgatcttactatattt

SEQ ID NO: 36866 - DNA, 398 bp, Glycine max
  Clone ID: LIB3138-121-Q1-N1-C7
ggggaggtggcatcgagctcagcatcttatcacaggagttcgacatcgaaatcgccagtatcaacgtgcaggatcttagagtggaccgcttcaacgagacaaggtcaaagcgctgtatccttgtatactcgggcatccactacgacactatcgcacttgttccgtatggctcgccaacgtatgatccagaaaacgatatcaagcagttcgacgtagacgatgacgtcgtgctcgaggctgcacgacagctctgcggcgagctaaagaagaagaactactttacagacactcaaaaatttagtatcaaatgcaacacttgcgggtggaagggtgcgggcgagcaaggcgccacacagcacgctatggacaccggccacactgattttggtgaagcgagc

SEQ ID NO: 36867 - DNA, 394 bp, Glycine max
  Clone ID: LIB3138-121-Q1-N1-C8
gtagctgtaacaggtgatggaactaatgatgccccaacacttcatggaactgacatgggacttgcaatgggcattgctggaactgaggttgcaaaagaaagtgcagatgtcataattctggatgataacttctccacgatagtaactgtggccaaatggggacgttcggtttacataaatattcagaaattcgtacagtttcagcttaccgttaatgtggttgcattaatagtgaatttcacatcagcctgcttgacaggaactgcacccctcacagctgttcaactcttgtgggtgaacatgataatggacacactgggagcacttgctcttgctactgaacctccaaatgatgatttaatgaaacgttcacctgttggaaggaagggaaatt

SEQ ID NO: 36868 - DNA, 340 bp, Glycine max
  Clone ID: LIB3138-121-Q1-N1-C9
ggacgtggtggtttacccaccactgcttggattagttctgcgagttaacaatcgctcctcagatatcaacaaaaggattcgcacagcacttgggaaaggtaagaaaattgtttttcttactagagttgatccttttccagtagctttactggctgttctttttggcgttaagaatgaaattctgagttctaacgccactaatcctatgctgacgcgacttcttgagaactgtaagagtctcaaatatctggttgatgagtgtccttttgcatttgtgaactagtatgtagtattttattcacttaaataaagcgcattactatgtgcaatgagtgtgttt

SEQ ID NO: 36869 - DNA, 416 bp, Glycine max
  unsure at all n locations
  Clone ID: LIB3138-121-Q1-N1-D1
ctttaagcagatgtctaatgttttgtgggtggctcctgaggacaaggcgagtttatggtcacaacttcattatgtttcgtgtaataatctggaaatgcaagaagcttatcttgtcaatctcgtaaatgtgttacgagaattgtatttgcacagtccagaggaagctcgccaattgagaaggaaagctctctctcgtattgaatggctgcaaaaagctgatgtgcctaccatagcacagattgaagagttccattcgatgcagaggatgatgaatgctcctgattcaaatgataatattgatttactgttgagcattgatttgttgggtttacaaggagcaggtaaagcttttccaaaacaaaatgtttttgatgataagcttgtgtnggctaacacacaagaattctttgatggaa

SEQ ID NO: 36870 - DNA, 377 bp, Glycine max
  Clone ID: LIB3138-121-Q1-N1-D10
cgaatttccagaatacaaattcacactctctttggctctggtgttgtgttgtgttgaggtacttgagaagagaaaatggtgtcgtcgcaggttgtgaatacgtacccgttgtcgagctacacgttcggcacgaaggagcccaagatggagaaggatacctccgtcgcggatcgtctcgctcgcatgaaagtcaactatatgaaggagggaatgaggaccagtgtggaaggaattttactggtacaagagcacaatcatcctcatatacttcttctgcaaattggaaacacattctgcaaactcccaggtggtcgtctcaaaccaggagagaatgaaaatgagggcttgaagagaaagttgactagcaagcttggtgc

SEQ ID NO: 36871 - DNA, 369 bp, Glycine max
  Clone ID: LIB3138-121-Q1-N1-D11
tagaaatagaggcattcctgctgatgttcttgcaaagcgagctcatgaatttgaaaaacatgttgctcatgaaagcctcaaggatcaaattcctgctgttgacaagttgtattctactaaggttaataagtttgcaaaaattatgaaccttagacaaagtgttgttggtgatcttaaacttcttactgatgggaagttgtatgagggtaagcatattcctgtatctaatattagtgcaggggaaaatcatgtagttcaaatacccttaatggcacaggaggaaattctgtcttctagtgcaagtgatttcagaactgcaatggtgagtaaaaatagcaaacctcaagctactgcaatgcatgtgggagc

SEQ ID NO: 36872 - DNA, 170 bp, Glycine max
  Clone ID: LIB3138-121-Q1-N1-D12
gaagattccgcaacagagagtagaaaagatggcgcggttgatcacagtggtgtggtgcgcggtggcggtgctactgtgcgccgcggcgggcgcgtcgtgggtggaggaagcggcgaacccgatacgaatggtggcgggggtggaggcggaagtggttccggtgatagggc

SEQ ID NO: 36873 - DNA, 336 bp, Glycine max
  Clone ID: LIB3138-121-Q1-N1-D6
cggctcgagtggtgatgataacttaattagtgttcatgaatatgtcaagccttactttagtggttctaaattgaaaagctttctagctagtcataacatcaccattactgatggtattgacaaaactagtgcaactttgcaatttagaaagttagcagattgtgattttctcaagagaaactttaagcagatgtctaatgttttgtgggtggctcctgaggacaaggcgagtttatggtcacaacttcattatgtttcgtgtaataatctggaaatgcaagaagcttatcttgtcaatctcgtaaatgtgttacgagaattgtatttgcacagtcc

SEQ ID NO: 36874 - DNA, 335 bp, Glycine max
  Clone ID: LIB3138-121-Q1-N1-D7
cggctcgaggcttgaagaaggttattgcctcaagggtccccaacagcaaggtttccggtggaagcttcaagattgttgctgtagaagagaagaaagagattgaagagacccagcagatcgacaaggacagatggaagggtcttgcctatgatatctcagacgaccaacaagacatcacaagaggaaagggtttggttgactcccttttccaagctccacaagatgctggaactcactatgcagtcatgagctcctacgagtacctcagcactggacttcgccagtacttggacaacaaaatggatggattctacattgctccagcttttatggac

SEQ ID NO: 36875 - DNA, 339 bp, Glycine max
  Clone ID: LIB3138-121-Q1-N1-D8
tctatccatctatcttttctaacatggctgctgggactggactctttgcagagattttggatggagatgcgtacaagtactatgctgatggagagtggaagaaatctgcttctgggaaaagtgtttccatcatcaaccccactaccagaaagactcaatacaaagttcaagcttgttcacaagaggaggttaataaggtcatggacttagcaaaatctgcacaaaagttatgggcaaagaccccactatggaaacgtgctgagcttcttcacaaggcagctgctatccttaaagagcacaaaactccaattgcagagtgcctggtgaaagaaatagcaa

SEQ ID NO: 36876 - DNA, 488 bp, Glycine max
  unsure at all n locations
  Clone ID: LIB3138-121-Q1-N1-D9
atgaatttcattcacagggatgaggaggttaattacttccgttcaaggtatgatcctgttcgtcatgcagaaacgttccccatacctcctgctatctgcagtggaaggcgtgaaaagtgtggaattgagaaggagaacaactttaagcagcccggagagagataccgatcttgggcacctgacaggcaagatagatttaatcgccgatgggttgatgctttatctgacccacgggtcacccatgaaatccgcagtgtctggatatcttactggtctcaggctgaccgttctctaggccaaaagatagcatctcgtctgagcatgaggccaaatatttaatgttgttgccaaccccagaatgattgttagagttgcagacgtgcaaagagtacgataaggatgtgattttcgatcaatttgaaagaacttatccatttcttgcaattnntagtgtgtacccataactccatgcatgcaaactcgtgagc

SEQ ID NO: 36877 - DNA, 362 bp, Glycine max
  Clone ID: LIB3138-121-Q1-N1-E1
gaaattctcatcaccgccgcacatgtcaccttctacgagttcaacatcgacctcagtcaatggagccgcaaggacgttgaaggatctctcttcgttgtcaagaggaacacacaacctcgatttcagtttattgtgatgaaccgtcgcaatactgaaaatttggtggagaatctcttgggcgattttgagtatgaagttcagattccatatttactgtatagaaatgctgctcaagaagtgaatggtatctggttctataatgcacgtgaatgtgaagaggttgccaatctttttagcaggatccttaatgcgtatgccaaggttccttctaagtcaaaggtttcttctacaaagagtgagtt

SEQ ID NO: 36878 - DNA, 433 bp, Glycine max
  unsure at all n locations
  Clone ID: LIB3138-121-Q1-N1-E11
cttggaaaacccacaggcacgctgagcatggaacacagaaccctagaactcaacctggcttcagcaaaggatctcaaagacttgaatatattctcaaagatggatgtatatgctgtgctttcactctccggcgatcaaaagaccaagactcccgtccacagaaacggcggcaccaacccaacatggaattttccggtcaagttcacttttgatgaatcggtggcgcggcagaaaccgtttggccctcgaaatcaagatccgctccgagcgcgccctcgccaccgataaggacatcggccaggtccacgttcctctcatggaactcctcaagcaacctggcgacggtaaatccttccagcacgttagttaccaagtcagaaaaccctttcgcaaacccaanggaagccctaatttctcctacaaatttggcgat

SEQ ID NO: 36879 - DNA, 426 bp, Glycine max
  unsure at all n locations
  Clone ID: LIB3138-121-Q1-N1-E12
gtaagtggacaaaatcagaaccacattcctgggaattgatcttcccaatagaggtatgtggtcctaataatggttttgaaatgtggagttctgagtgggcaaatcaaacttcatggcatttgagtttccttattgacaatcccaaacagtctacagtttttgatattctcttgggaatctctcaagattttgaaattgctggtaatactcttatgccagctttttctgttccacaggctactgccagatcttctgaaaatgcggaatcctctgcatgatctggaattgtgttttctttcgcttgttcgtttgtttaattcaataaaggaaattaggccttgacccctttgtgagtatgctcttgcctatttgaaaattncacaccctctttaattgtcgtaatgatgtgtgaagtgtgtgtatttt

SEQ ID NO: 36880 - DNA, 378 bp, Glycine max
  Clone ID: LIB3138-121-Q1-N1-E2
gttggtattcctgagaatacaggtatatcattggcctgtgctatgaatagttcttttagggggcgcgccagttctgatatttacaccatctgctctcaagactgtgaattgtggaatcctgcttgcacaaaagcaatgactatgtcatttaatccaaacccgtgttctgatgcatggagtttggaatttctgaagcgtactggatttcattgcgatatcatttgtgtcactggatggactgccaccccaatgcaggatgttcaggttacaattgattggtatatttcctttcaggaatgtgttcccaggacctattgtgttttaaatccacaaaaaccttttgcgttaaatatgcggatggcaaaattgacttttccc

SEQ ID NO: 36881 - DNA, 302 bp, Glycine max
  unsure at all n locations
  Clone ID: LIB3138-121-Q1-N1-E3
ctccaactccattgttggaatctggttggcaaaaagacagagggttaattgtggagtattttggagggatgtcttacgttgctcataacgttaatcagccccaaaagaaagatttgttggagggaaatttttcctttgatattaaatctcgctctagattggaaaaagtttcctctacaaaagcacaatttgttagtgggaaaaaccttcaaaatatgataataattggtgctgggntcacaattctttcagaagattttccttgaaagggaagatcaagaaaaaacccaaaaagattgatg

SEQ ID NO: 36882 - DNA, 159 bp, Glycine max
  Clone ID: LIB3138-121-Q1-N1-E4
ttgaagagtaacattcgatgcataggatgatgaatgctcctgagtgaaatgattatattgattgactgctgagcattgatatgatgggttcacagggagcaagtgaagcttctccaagcaaaattgtttttgatgataagcttgcgttgcctaacacac

SEQ ID NO: 36883 - DNA, 340 bp, Glycine max
  Clone ID: LIB3138-121-Q1-N1-E5
cgttgccttactttttggctacttaagttgttgtcatctctggccttgttctgaatttcttgaattactttggtatactgaatgctggaatctggcgcttttgggaagatttcattacaattgggggtttatcagtgcttccccaaataatgtggtctacatttgtcccctatgtacctaacagcatcttacctggggccacttcctttgtgatagctgtcttggcccgtaccttggcaagaaccggaaaactttctgagaaaggtgtcaaatttgttggaggaatatctggatggacagctacgttactctttatgtggatgccagtttctcaaatgtg

SEQ ID NO: 36884 - DNA, 414 bp, Glycine max
  Clone ID: LIB3138-121-Q1-N1-E6
gtggcgggggtggaggcggaggtggttcgggtgatagggcagtgccggcgcgcgctgaagtttgctaggttcatgagcaggttcgggaagagttaccgaagcgaggaagagatgagggagaggtacgagatattctcgcaaaacctcaggttcatccgctcccacaacaagaaccgcttgccctacactctctctgttaatcattttgctgattggacttgggaggagttcaaaagacacagactaggcgctgcccaaaattgctctgccactcttaacggcaaccacaagctcactgatgctgttcttcctcccacgaaagactggaggaaagaaagaaatagtgagtgatgttaaagatcaaggcagctgcgggatattgcttgacattcagcacaactggggctttagaag

SEQ ID NO: 36885 - DNA, 466 bp, Glycine max
  unsure at all n locations
  Clone ID: LIB3138-121-Q1-N1-E7
ctcgagccgctcgagccgattcggctcgagctaagacaatattatacgtgaatgcttgggttattcatagagatcccgaatcttggaaaaatcctcaagagtttattcccgaaagattcttggatagcgacgtagattttcgtggacaagatttccaactaattccttttggatcaggtcgcagaagttgcccaggtttacctatggcagttgtgatattagaacttgttcttgctaatcttcttcattcctttgattgggaattgccacaagggatgataaaggaagacattgatgttcaagtattgccaggactcacccaacacaagaagaacgatctttgtctttgtgccaagactaggagccatatataactactagatggactntgtgatcaaaataataaaataatgcatgttataatgttctatcaagaaattntaatgtgctatactngactttttgg

SEQ ID NO: 36886 - DNA, 280 bp, Glycine max
  Clone ID: LIB3138-121-Q1-N1-E8
gttcgtttgtttaattcaataaaggaaattaggcatgaccctcttgttgagtatgctctgcctatttgaaaatttccacacctcttttaattgtcgtaatgatgtgtgaagtgtgtgttattttaaaaaaaaaaaaaaaaaaaaaaaaataaaaaaaaaaaaaaaaaaaaaaaaaaataaaaaattagtctaaaaaattataatatataaaaatcttaaataaaaatctatcacatactataataatatatcaacttatataaaatataagttaaatata

SEQ ID NO: 36887 - DNA, 437 bp, Glycine max
  unsure at all n locations
  Clone ID: LIB3138-121-Q1-N1-E9
gcaattaataaagttagggggggtgcggttcaggaaggagcgaaagggaaatcagaaaatggcacagtcctcctcgatcgtcgttactctgaggcagcacttgtttaaaaggaacctcacctctctcactctgcctcactctccttctcttccttccttctccttctctctgagaacaacaccccacactcctctctctctctccgcttccttctcttctcacacctccatggcccacacttcccttccctccgccgatgccggcatggacgctgtccagcgccgtctcatgttcgaagacgaatgcattttggtggatgagaatgaccgtgtggttggtcatgattcaaaatacaattgtcacttgatggaaaagattgaagctgagaatttgctgcatagagncttcagtgtattcctggtcaactcaaagtatg

SEQ ID NO: 36888 - DNA, 402 bp, Glycine max
  Clone ID: LIB3138-121-Q1-N1-F10
ctcatgaatatgccaaatgctgttctttcaatgtggagatattttgttggagatctcgtctttgaagtttctaagatgacttctccctacattaaatgtacagtctctttcttcatagcatttggaaatttggctgatgataccatcaattttgaggcttttccccacaagctggtgcagtttggagagattcaggaaaaagttgtattgaaattttcacaagaggaatttcttacagcttggtcaactcaggtgcgtcctgcaacaactctgttggctgatgggtgtccatatttgtatgcaatggtgcatgatagttcagtgtctacaataccaaggtgatttgtcattggtgtcaaagtgacaaccataaacaatatgtgtgcatatgggctcaatcct

SEQ ID NO: 36889 - DNA, 411 bp, Glycine max
  Clone ID: LIB3138-121-Q1-N1-F11
ttttgttcctcacccagtcaccaaccccgttgtccggagccaccattttgcgctccggcaatgttcttcccggtggccatcgtcccttaaacccaccacacttcaaagtcatgggtattccatgggacgacgtcgttgtgatccagcaagggaaggatcacaatgagccctgcatcgtcaccgtcaattgccccgacaaggctggtctcggctgtgatctttgcagaatcatcctcgagttcggtctccgcattacccgtgctgatatttccacggatggaagatggtgctacatcggcttatggggttcttgcacatccagcatcgctcaacgttgattgggagagtttgaagactcggctcctttcagcttgcccttcatgtttgctttcctatcacttcaatcagcac

SEQ ID NO: 36890 - DNA, 311 bp, Glycine max
  Clone ID: LIB3138-121-Q1-N1-F12
ccgttccaaaccacataagcttcaacaaagatggatgtagaaaagttgaagaagatggccagttctgttcgaactggtgggaagggtactatgagaaggaagaagaaagctgtccacaagactactactacagatgacaaaaggcttcaaagcaccctgaagaggataggagtgaatgctatccctgcaattgaagaagtcaacatctttaaggatgaaatagttatccagtttttaaaccccaaagtacaagcatctattgctgccaacacttgggttgttagtggttcaccacaaacaaagaagttgca

SEQ ID NO: 36891 - DNA, 375 bp, Glycine max
  Clone ID: LIB3138-121-Q1-N1-F4
ggagcaggtaaagcttttccaaacaaaattgtttttgatgataagggtgtgttggctaacacacaagaattctttgatggaaattttccagtggattcttggttaccaatttttgtgaattgtctttatcctgtaagtcaattaccttcagaagctgtcgttgtaaatgttacatgtggtagtggacgtggtggtttacccaccactgcttggattagttctgcagttaacaatcgctcctcagatatcaacaaaaggattcgcacagcacttgtgaaaggtaagaaaattgtttttcttactagagttgatccttttccagtagctttactggctgttctttttggcgttaagaatgaaattctgagttctaac

SEQ ID NO: 36892 - DNA, 212 bp, Glycine max
  Clone ID: LIB3138-121-Q1-N1-F6
gtttcagggacctgtcagatttagttaacgtttttacatcatcagtgggtgaagataatatagatatggaaatctcccatgacatcaagatcaaggatgacaagctaggtggtgtgaaggaagagaagattaaggtagaagttgaactgaagaataatcagttgaaaagagcatacataaagtaagagagaagaacataagatgaaataata

SEQ ID NO: 36893 - DNA, 443 bp, Glycine max
  Clone ID: LIB3138-121-Q1-N1-F9
aaaccctacttctacttcccccctttgctctcaaaccttatcacctaatccttatcctcccaaaccagaaaaccatgtctacctccgcagcttccctcgcactcccaaccctcactctccgaacccgacaacctctatgttctccccaatgcttctcctcgtccctctccctcacacccaacaacaaacccatttccatttctgctgtttttctcaaaccaacaactctgtcgtcgtctcgcttcgttccccacgtcgtggtgtcgtcggatttggggcaggaggaggacaccttcagtgacggagacggccccagcttctcccccgaccttaagctctttgtcgggaatcttccgttcaacgtcgacagcgcgcagctcgcggagctctttgagagttgccggaatgtggaggtggttgaggtgatttatgataagactact

SEQ ID NO: 36894 - DNA, 147 bp, Glycine max
  Clone ID: LIB3138-121-Q1-N1-G10
cctaaactagcactcagatccaacggccccatctgcacgcagtccacaccatcaacagcggcgatcgcgccagcgttcgccacgccctcctcggactccacctggcacatgattaacagctcgtcgaggtaattaccgagatacccc

SEQ ID NO: 36895 - DNA, 412 bp, Glycine max
  Clone ID: LIB3138-121-Q1-N1-G11
cctaaactagcactcagatccaacggccccatctgcgcgcagtccacaccatcaacagcggcgatcgcgccagcgttcgccacgccctcctcggactccacctggcacatgattaacagctcgtcgaggtaattaccgagatacccctcgtcgaggccgtacttggaggcccggacgatggggtgggccgcgccgcggagtccggtgggaggaaaacggcagtaggagaccgcgtcctgtgccgactgcagggagtcaatcatggggaacatgaggccctgtgggccgaggtcgagggctttcttggcccaagcagcggtggacttcgggacgcggaggatggcggcggtgttggcggcggctagggcgtggaggcaggggagggcgtcttggatgcccccaggaccgtgct

SEQ ID NO: 36896 - DNA, 487 bp, Glycine max
  Clone ID: LIB3138-121-Q1-N1-G2
ctcgaacagcatttggaagtagttatgaagaaggaagaaaaatatttcaacttctaaaagagcaagcagaacttgcaatgaaagctataatgaaactttacatccctggatggagatttctacctactgctaaccataggaggatgaaggaaattgatagagaaataaaagcttcacttacagatatgattagcaacagagagaaagcactaaaggcgggtgaggctaccgagaatgacttgttaggtatacttttggagtcaaatcacaaggaaactgaagaacatggaaacagtaagaatgttggaatgagtcttgaagatgtaatcgaggaatgcaagctattctacttcgcagggcaagagaccacttcagctttactttgttggaccatggtgttggtaagtaggtaccctgattggcaagcacgtgcgagggaggaattttacaagtaattgtcaaacaaaaccaaattttgatgggctaa

SEQ ID NO: 36897 - DNA, 166 bp, Glycine max
  Clone ID: LIB3138-121-Q1-N1-G3
catggcaagagtggtggcactccaacagaaccaactatctttctctaccttagcttcctctctttctgacttcagtggaaccagacttcaaactcaacttcagttcaagagaaagcaatgccatccaaaagggtctttctacgtctccgcatcgagcaccaagaaa

SEQ ID NO: 36898 - DNA, 327 bp, Glycine max
  Clone ID: LIB3138-121-Q1-N1-G4
gttatagaacgtgagcggccggactgtcttcaatgggctcggatgggtacttcattaggatctaacatccatgaaaatggccaaactgaattttattcaaagatgtctggttcacagactgatatgtcattaactccggaatcaagtgtttcttcagacacgaagtatgtccagcaggctgatgacactaaaaatgttcaagctaggccctctggcagatatgattctagatcatcaaatactctctttccaatgtctatctacaataatacaaccacatttatgcaatcaccaactgattcaatgatggtttcccaaaattacttg

SEQ ID NO: 36899 - DNA, 212 bp, Glycine max
  unsure at all n locations
  Clone ID: LIB3138-121-Q1-N1-G5
tcaggttacaattgattggtatattccctctcacgaatgtgttcccaggacctattgtgttttaaatccacaaaatccttttgtgttaaataggtggatgggaaaattgactttactccagggcacttcccgaagtgttcagagaatgcctctntctatacgggcatgagcaccccccaaagaatgctattctcatgaatatgccacatgct

SEQ ID NO: 36900 - DNA, 395 bp, Glycine max
  unsure at all n locations
  Clone ID: LIB3138-121-Q1-N1-G6
gtgttaaataggtggatgggaaaattgactttcccccagggcacttcccgaagtgttaagagaatgcctctttctatagggggaggagctggtgcaaagaatgctattctcatgaatatgccaaatgctgttctttcaatgtggagatattttgttggagatctcgtctttgaagtttctaagatgacttctccctacattaaatgtacagtctctttcttcatagcatttggaaatttggctgatgataccatcaattntgaggcttttccccacaagctggtgcagtttggagagattcaggaaaaagttgtattgaaattttcacaagaggaatttcttacagcttggtcaactcaggtgcgtcctgcaacaaactctgtggctgatgggtg

SEQ ID NO: 36901 - DNA, 424 bp, Glycine max
  Clone ID: LIB3138-121-Q1-N1-G7
atttgtaatagcatttttaatgagatgctcattagatatagctatgaaaaattactgcgccaggctaaagctccaagtatgtttttacaatccttcaaaaattttgtttctttgtgtgtgtatggtgatgataacttaattagtgttcatgaatatgtcaagccttactttagtggttctaaattgaaaagctttctagctggtcataatatcaccattactgatggtattgacaaaactagtgcaactttgcaatttagaaagttagcagattgtgattttctcaagagaaactttaagcagatgtctaatgttttgtgggtggctcctgaggataaggcgagtttatggtcacaacttcattatgtttcgtgtaataatctggaaatgcaagaagcttatcttgtcaatctcgtaaatgtgt

SEQ ID NO: 36902 - DNA, 437 bp, Glycine max
  Clone ID: LIB3138-121-Q1-N1-G8
caagaacttcatgaccctgcccaacatcaaggttcctctcattcttggtatctggggaggcaagggacaaggaaaatctttccaatgtgagcttgtctttgccaagatgggaatcaaccccatcatgatgagtgctggagagttggaaagtggaaatgcaggagagccagcaaaactgatcaggcagagataccgtgaagccgcagacttgatcaagaagggaaagatgtgtgctctcttcatcaacgatcttgatgcaggagctggtcgtcttggtggaaccacccaatacactgtcaacaaccagatggtgaatgccaccctcatgaacattgctgataaccccaccaatgtgcagcttcctggtatgtataacaaggaagagaatccccgtgtgcccatcatcgtcaccggtaacgatttctccacactctatg

SEQ ID NO: 36903 - DNA, 403 bp, Glycine max
  unsure at all n locations
  Clone ID: LIB3138-121-Q1-N1-H1
ctcgagccgaatcggctcgggaaaaaaaaaaaaaaaaaaggggggggtatataaatgaaggaatggtagtataaattaaattagatattatattaattaaaagaaaagatgtaaggagtagatttatattatgtgattatttatgaagtatattttatatataaaatnggggggggggccccctcctgggggccctcccccccggggattaatttcgggccgggccctggggggggccccgttttcccttttggggggtcgtttagggctggggggaaaccggggccaagggggttcccggggggaattggtttccccttccaattcccccccaaattccggccggggaccttaaggggaaaccccggggggccctagggggggcccccccccctttattggg

SEQ ID NO: 36904 - DNA, 348 bp, Glycine max
  Clone ID: LIB3138-121-Q1-N1-H11
ctttgattctttatctatctcgctcacgaaaaatagctccaggcaacgtcggaaaccggatttgtcaaacccatccgacaaccatggagtaccgcaacaaacttgttctcgctcctatggtccgcgttggcactctcccatttagattactagctgctcaatatggtgcagatatcacttactgcgaggaaatcattgaccacaagatgctaaagtgcgagcgccgaattaacgaactcattggatccactgattttgtggagaaggggacaaacaatgttgtgtttagaacctgtgatgaagaaaaagatagggttgtgtttcaaataggaacatcagatgctgtga

SEQ ID NO: 36905 - DNA, 191 bp, Glycine max
  Clone ID: LIB3138-121-Q1-N1-H12
gcattgaccattctccaattcccttattcggtttttatgcaccgtgctctcactctcaagtatcaaatcatttaactgttttagctgagtctttaccttctgaattgagtgaggcatcattaattcctgaacccagccgcggcaaccggaacaggtgttctgtttcagggatactttacaacactaatact

SEQ ID NO: 36906 - DNA, 285 bp, Glycine max
  unsure at all n locations
  Clone ID: LIB3138-121-Q1-N1-H2
cacgaccacactcgcggagagtcacaaccatgccgtccaaaatggcttcagaactgctggatttcgacatggaccgctatgtaaatccatggctacctcataatcgtgtgggctacctacctgcgcccatatcacgatttctcggatacagaaaaggcacatacaaagagccaccagcattagtccaatggttttcagcattcgtcggcgcttttcgtggcattctactgatcggcgcaatattcaaatacgcccctggagtngtcgacaaacaccctccgatca

SEQ ID NO: 36907 - DNA, 66 bp, Glycine max
  Clone ID: LIB3138-121-Q1-N1-H3
aatcaggcaggacctgaggcaggcatacctcctttaatttggccaccaggttggattttgaataat

SEQ ID NO: 36908 - DNA, 196 bp, Glycine max
  unsure at all n locations
  Clone ID: LIB3138-121-Q1-N1-H4
gcttcagttctctcatttctcgtcttcactgagaaaaatccttcttcgtgcatgctcctcgtttctatctaaaggggcgaaagagtagattataagggggtaagtgagaaagagagntaaaacaaaatttaaacatgactatggaagaaggcaaggtcgagaacgaggactacacacaagatggtactgtcaaaca

SEQ ID NO: 36909 - DNA, 300 bp, Glycine max
  unsure at all n locations
  Clone ID: LIB3138-121-Q1-N1-H5
tggtgcatgatagttcagtgtctacaataccaggtgattttgtcattggtgtcaagttgacaaccataaacaatatgtgtgcatatgggctcaatcctggtatttcaggttctcgtcttttgggcaccattcctcagtccatttcacagcanactgtttggaatcaaatggcaacagtgagaacaccattgaattttgattctagcaagcagagcttttgtcagttttctattgaccttctcggtggaggaatcttagtggacaaaactggagaatggatcacacttatacaaaattctc

SEQ ID NO: 36910 - DNA, 167 bp, Glycine max
  Clone ID: LIB3138-121-Q1-N1-H6
aatgtacagactacccttattccacaccacactctactcagatgtgtgaatattctcacaaaagtatgctctacctcccggaatggagtccacgccggtgaattgggaagccctcgacgctctgctcatcgatttcgccaaatcggaaaacctaatcgaggacttct

SEQ ID NO: 36911 - DNA, 361 bp, Glycine max
  Clone ID: LIB3138-121-Q1-N1-H7
ctcgagccgattcggctcgagaattttttgacagagggcaattttagagcaagtgttgatttgcagcgcactcatcgtattagaggaatgattaaaatggtggccacagttggtattcctgagaatacaggtatatcattggcctgtgctatgaatagttcttttagggggcgcgccagttctgatatttacaccatctgctctcaagactgtgaattgtggaatcctgcttgcacaaaagcaatgactatgtcatttaatccaaacccgtgttctgatgcatggagtttggaatttctgaagcgtactggatttcattgcgatatcatttgtgtcactggatggactgccaccccaatgc

SEQ ID NO: 36912 - DNA, 448 bp, Glycine max
  Clone ID: LIB3138-121-Q1-N1-H8
gttggtattcctgagaatacaggtatatcattggcctgtgctatgaatagttcttttagggggcgcgccagttctgatatttacaccatctgctctcaagactgtgaattgtggaatcctgcttgcacaaaagcaatgactatgtcatttaatccaaacccgtgttctgatgcatggagtttggaatttctgaagcgtactggatttcattgcgatatcatttgtgtcactggatggactgccaccccaatgcaggatgttcaggttacaattgattggtttatttcctctcaggaatgtgttcccaggacctattgtgttttaaatccacaaaatccttttgtgttaaataggtggatgggaaaattgactttcccccagggcacttttccgaagtgttaaagagaatgcctctttctatagggggaggagctggtgcaaagaatgc

SEQ ID NO: 36913 - DNA, 375 bp, Glycine max
  unsure at all n locations
  Clone ID: LIB3138-121-Q1-N1-H9
ctcgagccgaatcggctcgaggtccagaggaagctcgccaagtgagaaggaaagctctctctcgtattgaatggctgcaaaaagctgatgtgcctaccatagcacagattgaagagttccattcgatgcagaggatgatgaatgctcctgattcaaatgataatattgatttactgttgagcattgatttgttgggtttacaaggagcaggtaaagcttttccaaacaaaattgtttttgatgataagcttgtgttggctaacacacaagaattctttgatggaaattttccagtggattcttggttaccaatttttgtgaattgctntatcctgtagtcaattaccttcagaagctgtcgtgtaatgtacatgt

SEQ ID NO: 36914 - DNA, 212 bp, Glycine max
  Clone ID: LIB3138-122-Q1-N1-A1
caaaattgtttttgatgataagcttgtgttggctaacacacaagagttctttgatggaaattttccagtggattcttggttaccaatttttgtgaattgtctttatcctgtaagtcaattaccttcagaagctgtcgttgtaaatgttacatgtggtagtggacgtggtggtttacccaccactgcttggattagttctgcagttaacaatc

SEQ ID NO: 36915 - DNA, 412 bp, Glycine max
  Clone ID: LIB3138-122-Q1-N1-A10
ctcctgaggacaaggcgagtttatggtcacaacttcattatgtttcgtgtaataatctggaaatgcaagaagcttatcttgtcaatctcgtaaatgtgttacgagaattgtatttgcacagtccagaggaagctcgtcaattgagaaggaaagctctctctcgtattgaatggctgcaaaaagctgatgtgcctaccatagcacagattgaagagttccattcgatgcagaggatgatgaatgctcctgattcaaatgataatattgatttactgttgagcattgatttgttgggtttacaaggagcaggtaaagcttttccaaacaaaattgtttttgatgataagcttgtgttggctaacacacaagaattctttgatggaaatttccagtggattctggttaccaattt

SEQ ID NO: 36916 - DNA, 394 bp, Glycine max
  Clone ID: LIB3138-122-Q1-N1-A11
tgaaattttcacaagaggaatttcttacagcttggtcaactgaggtgcgtcctgcaacaactctgatggctgatgggtgtccatatttgtatgcaatggtgcatgatagttcagtgtctacaataccaggtgattttgtcattggtgtcaagttgacaaccataaacaatatgtgtgcatatgggctcaatcctggtatttcaggttctcgtcttttgggcaccattcctcagtccatttcacagcaaactgtttggaatcaaatggcaacagtgagaacaccattgaattttgattctagcaagcagagcttttgttcagttttctattgaccttctcggtggaggaatcttagtggacaaaactggagattggatcacacttatgcaaaatt

SEQ ID NO: 36917 - DNA, 365 bp, Glycine max
  Clone ID: LIB3138-122-Q1-N1-A12
gtttatggtcacaacttcattatgtttcgtgtaataatctggaaatgcaagaagcttatcttgtcaatctcgtaaatgtgttacgagaattgtatttgcacagtccagaggaagctcgccaattgagaaggaaagctctctctcgtattgaatggctgcaaaaagctgatgtgcctaccatagcacagattgaagagttccattcgatgcagaggatgatgaatgctcctgattcaaatgataatattgatttactgttgagcattgatttgttgggtttacaaggagcaggtaaagcttttccaaacaaaattgtttttgatgataagcttgtgttggctaacacacaagaattctttgatgga

SEQ ID NO: 36918 - DNA, 125 bp, Glycine max
  Clone ID: LIB3138-122-Q1-N1-A2
atgagggttaggattgcattagctgaaaagggtgttgagtatgaatacaaggaagaaaatctcaggaacaagagtcctttgcttttgcaaatgaacccaattcacaagaaaattccagttctgat

SEQ ID NO: 36919 - DNA, 374 bp, Glycine max
  unsure at all n locations
  Clone ID: LIB3138-122-Q1-N1-A3
cgaagtgttaagagaatgcctctttctatagggggaggagctggtgcaaagaatgctattctcatgaatatgccaaatgctgttctttcaatgtggagatattttgttggagatctcgtctttgaagtttctaagatgacttctccctacattaaatgtacagtctctttcttcatagcatttggaaatttggctgatgataccatcaattntgaggcttttccccacaagctggtgcagtttggagagattcangaaaaagtngtattgaaattttcacaagaggaatttcttacagcttggtcaactcangtgcgtnctgcaacaacttctgttgcttgatggtgtccattattgtatgcaatggtgcatga

SEQ ID NO: 36920 - DNA, 488 bp, Glycine max
  unsure at all n locations
  Clone ID: LIB3138-122-Q1-N1-A4
attgaaacaactctatggtcgattgagtggggcattgctgagcttgtgaaccacccagagatccagcaaaagttaagggatgagattgacagagttcttggagcagggcaccaagtgactgagccagacatccaaaagctcccatacctccaagcagtggtcaaggaaactcttcgtcttagaatggcaatccctctccttgtaccacacatgaacctccacgacgcaaagcttgggggctatgatatcccagctgagagcaagatcttgggtgaatgcatggtggctggccaacaaccctgcacactggaagaagccagaggagttccggcctgagaggttcttcgaggaggagtcgcttgttgaagccaatggcaatgactttaggtaccttccctttggtgttggcagaagaagctgccctggaatcattcttgcattgccaattcttggcatcactttgngacgtttggtccaaaactttgagc

SEQ ID NO: 36921 - DNA, 386 bp, Glycine max
  Clone ID: LIB3138-122-Q1-N1-A6
cagcttcactgcacaggatttatgtgatcgcaacatgggagtttgtttgagcgcccaaattaaagctgaaagcccatataacactgggttcaattcaaagtatgtgagtacggatggaaatgatttcggcagcacaaacgataaggtttcagcaaactcaattcctcaaactcctcggagtgagggtgagatcttgcggtcatccaatttgaagagctttcccttgtcagaacttaagacggccactagaaatttccgtccagatagcgtgttaggaagaaggtggttttggatcagttttttaaggggtggatcgatgagaattcattgactgctaccaaacctggcactggcattgttattgctgtaaaagacttaatcaagat

SEQ ID NO: 36922 - DNA, 309 bp, Glycine max
  Clone ID: LIB3138-122-Q1-N1-A7
tgaatatgccaaatgctgttctttcaatgtggagatattttgttggagatctcgtctttgaagtttctaagatgacttctccctacattaaatgtacagtctctttcttcatagcatttggaaatttggctgatgataccatcaattttgaggcttttccccacaagctggtgcagtttggagagattcaggaaaaagttgtattgaaattttcacaagaggaatttcttacagcttggtcaactcaggtgcgtcctgcaacaactcttgtggctgatgggtgtccataattgtatgcaatggtgcatg

SEQ ID NO: 36923 - DNA, 275 bp, Glycine max
  Clone ID: LIB3138-122-Q1-N1-A8
gttaaacatgtatatacacacaaaatacagacctgtctggcggacgccttcccataacactgaaaacacacgaccgacgatgcacaagaccatggggaagtcctgcgtaggcggcaaggacgcggccgagaacgatggcacgacccatactggtgatgtctgtaccatcgaggagaaccgtgactcgatcgactctgaactcgccgcgatgccccctcaagagcgcgtcgcctacctgaaagaattcgaagactcagacaagcacgacacgccaa

SEQ ID NO: 36924 - DNA, 359 bp, Glycine max
  unsure at all n locations
  Clone ID: LIB3138-122-Q1-N1-A9
gggttgctttgaaatctcactcggggacacaattggagttggtactcccggaactgtagttccaatgcttttggctgtaatggctgttgtgccagcggagaagcttgctgtccacttccatgacacttacgggcaatcccttgcaaatattcttgtgtcccttcaaatggggatcagtgcagttgattcttcagttgctggtctaggtggctgtccatatgctaagggagcttcaggaaatgtagctaccgaagatgttgtgtacatgctgaatggacttggtgtgaagaccaacgttgatctncgaaagctcatgtcagctggtgaagtcatcngcaagcatttggggcgcccatccg

SEQ ID NO: 36925 - DNA, 317 bp, Glycine max
  unsure at all n locations
  Clone ID: LIB3138-122-Q1-N1-B1
cctctttcaatgcccaggcctaaaaggcctcggtctaatgcagtgccttcatccccagattcttctgttcttactcgagaagcatcatctaaagtaagcatagacccttcaccggcaaatgggtttccaagggtcttgcaaggtcaagaattctcgaccttgagaggcaattttacagaaagtaacgagtttgatactgccgagaagtctgttgtttggccacctactgcagtagatgatgaaaagatggatgtttctacttcaaggaagtatggttcagagagctggatgtcaatggngaggaatgagcctacata

SEQ ID NO: 36926 - DNA, 450 bp, Glycine max
  Clone ID: LIB3138-122-Q1-N1-B10
gggcaattgtacaagattttctgattttaaagggcccttgtcccaactgtggtactgaaaatacctctttctttgggactatactgtcggtttcaagtggcgattccaccaacaaagtcaaatgtgaaaactgtgaaactaaaatggtgtatgattcaaaaacaagattgattacattaccagaaggaagtaatgcttaaatggaggcacgcttgatactattgtttcctgtaatgagatgagatcgtcataggtagaagctactgaaatcattgttctctatgggccatgaaatcattgttctcaatgtcgcacaccatatattcctagtgagttgtaatggtatgaactttgtatagcatacgtaggatcgtctaccagaagagatgaatattatgaggatattctaacatcaagatttttaattgtaggcacactttgggcctttgc

SEQ ID NO: 36927 - DNA, 376 bp, Glycine max
  Clone ID: LIB3138-122-Q1-N1-B11
ggtatttcaggttctcgtcttttgggcaccattcctcagtccatttcacagcaaactgtttggaatcaaatggcaacagtgagaacaccattgaattttgattctagcaagcagagcttttgtcagttttctattgaccttctcggtggaggaatcttagtggacaaaacttgagattggatcacacttatacaaaattctccaattagtaacttgttgagagttgctgcttggaagaaaggctgtttaatggtcaagattgtgatgtctgggaatgcagcagtcaaaaggagtgattgggcctcattggtacaagtgtttttaacaaacagcaacagtacagagcattttgatgcatgtaagtggacaaaatcag

SEQ ID NO: 36928 - DNA, 413 bp, Glycine max
  unsure at all n locations
  Clone ID: LIB3138-122-Q1-N1-B12
gtcgcttggtcctgaataagaacatagataatttctttgctgagaatgaacaacttgcattttgccctgccattgtggttcctggtgtatactactcagatgataagatgcttcaaaccaggatattctcttatgctgattcacaaaggcacagacttggaccaaactatctgcaacttcctgctaatgctcccaagtgtgctcaccacaacaatcatcatgaaggtttcatgaatttcattcacagggatgaggaggttaattacttcccttcaaggtatgatcctgttcgtcatgcagaaacgttccccatacctcctgctatctgcagtggaaggcgtgaaaagtgtggaattgagaaggagaacaactttaagcagccccgagagagataccgatcttnggcacctgac

SEQ ID NO: 36929 - DNA, 361 bp, Glycine max
  unsure at all n locations
  Clone ID: LIB3138-122-Q1-N1-B2
ggaaagctctctctcgtattgaatggctgcaaaaagctgatgtgcctaccatagcacagattgaagagttccattcgatgcagaggatgatgaatgctcctgattcaaatgataatattgatttactgttgagcattgatttgttgggtttacaaggagcaggtaaagcttttccaaacaaaattgtttttgatgataagcttgtgttggctaacacacaagaattctttgatggaaattttccagtggattcttggttaccaattattgtgaattgtctttatcctgtaagtcatttaccttcagaagctgtncgtgtaaatgttacatgtggtagtggacgtggtggttacccaccact

SEQ ID NO: 36930 - DNA, 381 bp, Glycine max
  Clone ID: LIB3138-122-Q1-N1-B4
gaaaaggaagatcaagaaaaacccaaaaagattgatgccagattgagacaaagaatagatcctcaatacaatgaggttcaggctcagatggaaacaaatttgtttaaattgtctcttgatgatgttgaaactcctaaaggttccatgttggatctgaaaatttctcaatctaaaattgcacttcccaagaacacagttggaggaaccattctgcgtagtgatctattggcaaattttttgacagagggcaattttagagcaagtgttgatttgcagcgcactcatcgtattagaggaatgattaaaatggtggccacagttggtattcctgagaatacaggtatatcattggcctgtgctatgaatagttcttttaggggg

SEQ ID NO: 36931 - DNA, 478 bp, Glycine max
  Clone ID: LIB3138-122-Q1-N1-B5
ctcgagccggaggtgatggctttgaatttgccttctcccgcccaagtgaagcccttatttttctcttcaaataactccacaaaacttccaggtagcttttctttgaagagaaaagatagtgacacaacagtagagagacgagtttattgctctgccgctgctcaatcaccaccaccagcatggccaggaacagctattcccgagccttctgatttcaagacatgggatgggcaaaaacctatttctgtcttaggatctacgggttcaattggaactcagacactgagtatagtggctgagttcccagaaagatttaaagttgtgagccttgctgctgggctctaatattactcttcttgctgaccagattaaaacatttaagccctgaagttgttggtcttagaaatgagtctttaattgatgaactcaaagaggctttggctgatgtggatcacaaacccgaaatcatccctggaga

SEQ ID NO: 36932 - DNA, 452 bp, Glycine max
  unsure at all n locations
  Clone ID: LIB3138-122-Q1-N1-B6
tgggagaagcttcagttagcagctagggttattgttgcaattgagaaccctcaggatatcattgttcaatccgcaaggccttatggtcaaagagcggttctgaagtttgctcagtacactggtgctcatgctattgctggaaggcacactcccggtaccttcaccaatcagcttcagacttcgttcagtgagcctcgtctccttatcctcactgatccaagaacagatcaccagcctattaaggaagctgctcttgggaatattcccaccattgctttctgtgacactgattcgcctatgaggtatgtggacattggaattcctgccaacaacaagggaaaacacagcattggttgtctcttttggctccttgcaaggatggtattgcagatgaggggtacaattcgccctggccttaaaatgggatgtcatggtaaaatatatattntttt

SEQ ID NO: 36933 - DNA, 194 bp, Glycine max
  Clone ID: LIB3138-122-Q1-N1-B7
gctttaatatgggcctcgctgtcggcgattctacagatatgggatcatgtcatatccagatccgatacagtgttctagaacatgtttgttaaacctacaactaaaagattgtagacactgatgatgcgaggaagatatgctcgacttatgggggaggttagcaggatactatacaactcgtagagtggaatgat

SEQ ID NO: 36934 - DNA, 329 bp, Glycine max
  Clone ID: LIB3138-122-Q1-N1-B8
ggaggtctcagcatacatttgcaacaacaacttcatcttctcttcttctcgtgccataacacacaaatcttctgcttctttctcatcacctatgcttgtcaaatccatggccactcccaagcctcttccctcagtctctagaactgtaggctctagaaagaactcaactgtgttcccacttggggaacaacctaggagcagccccgcgacagccacgcctcccataaagcttttgacaaggatggagcaactgaagctgctgagcaaagcaaaaaacgcagggttgctatctgcaacagagaagtttggattctccctctcaacaatag

SEQ ID NO: 36935 - DNA, 413 bp, Glycine max
  Clone ID: LIB3138-122-Q1-N1-C10
cttgaatcttcgttatccttctttttttctccttgaactcgaatattcactatggcagatgaggtggttctgctagatttctggccaagtccatttgggatgagggtcaggattgcacttgctgaaaagggtatcaaatatgagtccaaagaagaggacttgcagaacaagagccctttgctcctcaaaatgaacccggttcacaagaaaatcccggttctcatccacaatggcaaacccatttgtgaatctctcgttgctgttcagtacattgaggaggtctggaatgacagaaatcccttgttgccttctgacccttaccagagagctcaggctagattctgggctgactttgttgacaataagatatttgatcttggaagaaagatttggacatcaaagggagaagaaaa

SEQ ID NO: 36936 - DNA, 464 bp, Glycine max
  Clone ID: LIB3138-122-Q1-N1-C11
caacaactctgttggctgatgggtgtccatatttgtatgcaatggtgcatgatagttcagtgtctacaataccaggtgattttgtcattggtgtcaagttgacaaccataaacaatatgtgtgcatatgggctcaatcctggtatttcaggttctcgtcttttgggcaccattcctcagtccatttcacagcaaactgtttggaatcaaatggcaacagtgagaacaccattgaattttgattctagcaagcagagcttttgtcagttttctattgaccttctcggtggaggaatcttagtggacaaaactggagattggatcacacttatacaaaattctccaattagtaacttattgagagttgctgcttggaagaaaggctgtttaatggtcaagattgtgatgtctgggaatgcagcaatcaaaaggagtgattgggcctcattggtacaagtgttttta

SEQ ID NO: 36937 - DNA, 462 bp, Glycine max
  Clone ID: LIB3138-122-Q1-N1-C12
ttgcgatcgaagagagatgggggacggaagtgggaaccggtggagcagggcggagtgggtgcagcagtacgatctcttaggcaaaatcggagaaggcacttacggcctcgtcttcctggcccgaaccaaaggcactccctccaaatccatcgccatcaaaaagttcaagcaatccaaggacggcgacggcgtctcccccaccgccatccgcgaaatcatgctgctcagggagattacgcacgagaacgtcgtcaagctcgtcaatgtccacatcaaccacgccgacatgtcgctctacctcgcctttgattaacgccgagcacgatctctattaaattattaggcatcacagggataaactcaaccattccattaaccaatacactgttaagtctttgctctggcagttgctcaatggactaagctatctgcacagtatttggatgatacatcgagatttga

SEQ ID NO: 36938 - DNA, 64 bp, Glycine max
  Clone ID: LIB3138-122-Q1-N1-C2
ggcgaagctagtagagagatagacctagtttgttaaactggagagagaatacatgctcaatcat

SEQ ID NO: 36939 - DNA, 440 bp, Glycine max
  unsure at all n locations
  Clone ID: LIB3138-122-Q1-N1-C3
accaggtgattttgtcattggtgtcaagttgacaaccataaacaatatgtgtgcatatgggctcaatcctggtatttcaggttctcgtcttttgggcaccattcctcagtccatttcacagcaaactgtttggaatcaaatggcaacagtgagaacaccattgaattttgattctagcaagcagagcttttgtcagttttctattgaccttctcggtggaggaatcttagtggacaaaactggagattggatcacacttatacaaaattctccaattagtaacttgttgagagttgctgcttggaagaaaggctgtttaatggtcaagattgtgatgtctgggaatgcagcagtcaaaaggagtgattgggcctcattggtacaagtgtttttaacanacagcaacagtacagagcattttgatgcatgtaagtggacaa

SEQ ID NO: 36940 - DNA, 452 bp, Glycine max
  unsure at all n locations
  Clone ID: LIB3138-122-Q1-N1-C4
ggttgccacactacaccgatatttccaccaaacccgtttgcgttgttgtttgcgaataaatggcaactaagaggagcgtgggaacgttgaaggagggtgatttgaaggggaagagggtattcgtgagggtcgatctgaacgtgcctttggatgacaaccttaacatcaccgatgacactagagtccgtgctgctgttcccaccatcaagtacttgactggttatggtgctaaagtgatcctttctagccatttgggacgtccaaaaggtgtaacacctaaatacagtttgaagcctcttgtgccaaggctgtctcaacttcttggaattgaggttacgatggccaatgactctattgnggagaagttgaaaagtggttacacaacttncagaangtgggttttgcttctaaagaatgtaggttctacaaggaggaagagaagaatgatcctg

SEQ ID NO: 36941 - DNA, 409 bp, Glycine max
  Clone ID: LIB3138-122-Q1-N1-C7
cagatgtctaatgttttgtgggtggctcctgaggacaaggcgagtttatggtcacaacttcattatgtttcgtgtaataatctggaaatgcaagaagcttatcttgtcaatctcgtaaatgtgttacgagaattgtatttgcacagtccagaggaagctcgccaattgagaaggaaagctctctctcgtattgaatggctgcaaaaagctgatgtgcctaccatagcacagattgaagagttccattcgatgcagaggatgatgaatgctcctgattcaaatgataatattgatttactgttgagcattgatttgttgggtttacaaggagcaggtaaagcttttccaaacaaaattttttttgatgataagctttgtgtggctaacacacaagatttctttgatggaa

SEQ ID NO: 36942 - DNA, 372 bp, Glycine max
  Clone ID: LIB3138-122-Q1-N1-C8
ctttgatggaaattttccagtggattcttggttaccaatttttgtgaattgtctttatcctgtaagtcaattaccttcagaagctgtcgttgtaaatgttacatgtggtagtggacgtggtggtttacccaccactgcttggattagttctgcagttaacaatcgctcctcagatatcaacaaaaagattcgcacagcacttgggaaaggtaagaaaattgtttttcttactagagttgatccttttccagtagctttactggctgttctttttggcgttaagaatgaaattctgagttctaacgccactaatcctatgctgacgcgacttcttgagaactgtaagagtctcaaatatctggttgatgagtg

SEQ ID NO: 36943 - DNA, 445 bp, Glycine max
  Clone ID: LIB3138-122-Q1-N1-C9
cattggtgtcaagttgacaaccataaacaatatgtgtgcatatgggctcaatcctggtatttcaggttctcgtcttttgggcaccattcccagtccatttcacagcaaactgtttggaatcaaatggcaacagtgagaacaccattgaattttgattctagcaagcagagcttttgtcagttttctattgaccttctcggtggaggaatcttagtggacaaaactggagattggatcacacttatacaaaattctccaattagtaacttgttgagagttgctgcttggaagaaaggctgtttaatggtcaagattgtgatgtctgggaatgcagcagtcaaaaggagtgattgggcctcattggtacaagtgtttttaacaaacagcaacagtacagagcattttgatgcatgtaagtggacaaaatcagaaccacattcctggg

SEQ ID NO: 36944 - DNA, 482 bp, Glycine max
  unsure at all n locations
  Clone ID: LIB3138-122-Q1-N1-D1
cactttgccaatatggaagaaagcaaattgtcccacaacatacctacagggagttcgagaaaactcgtcacttcccaaagccctccttcactttcccttgaaccaaatgagaagctcaagaataacagtcaagaatgcaagtctccaaatactaatgacaaggccaaggacccagaaaaagggcatagtgagaatattggtaaggttgatgatgatgtagaggaaacggggcgtgagaggctgaagaggctccgggaagaggtgaccatggagaaggtcaacattccagaaaattggggtcaggagccaaagttgaaggactggatggactatactatgtttgatgcattctttcctcatagcttgattgtgactgctcgtgatgctcttatttgctatgcancgtaagcaaagtcaccaagactatattaaggatctagagtagttgctaatatatatttctatggactctatatatatat

SEQ ID NO: 36945 - DNA, 470 bp, Glycine max
  Clone ID: LIB3138-122-Q1-N1-D10
gtttttaacaaacagcaacagtacagagcattttgatgcatgtaagtggacaaaatcagaaccacattcctgggaattgatcttcccaatagaggtatgtggtcctaataatggttttgaaatgtggagttctgagtgggcaaatcaaacttcatggcatttgagtttccttattgacaatcccaaacagtctacagtttttgatattctcttgggaatctctcaagattttgaaattgctggtaatactcttatgccagctttttctgttccacaggctactgccagatcttctgaaaatgcggaatcctctgcatgatctggaatttgtgttttctttcgcttgttcgtttgtttaattcaataaaggaaaattaggcatgaccctcttgttgagtatgctctgcctatttgaaaatttccacacctcttttaattgtcgtaatgatgtgtgaagtgtgttgtatttt

SEQ ID NO: 36946 - DNA, 484 bp, Glycine max
  Clone ID: LIB3138-122-Q1-N1-D11
tgttcccaggacctattgtgttttaaatccacaaaatccttttgtgttaaataggtggatgggaaaattgactttcccccagggcacttcccgaagtgttaagagaatgcctctttctatagggggaggagctggtgcaaagaatgctattctcatgaatatgccaaatgctgttctttcaatgtggagatattttgttggagatctcgtctttgaagtttctaagatgacttctccctacattaaatgtacagtctctttcttcatagcatttggaaatttggctgatgataccatcaattttgaggcttttccccacaagctggtgcagtttggagagattcaggaaaaagttgtattgaaattttcacaagaggaatttcttacagcttggtcaactcaggtgcgtcctgcaacaactctgttggctgatgggtgtccatatttgtatgcaatggtgcatgatagttcagtgtctacaata

SEQ ID NO: 36947 - DNA, 364 bp, Glycine max
  unsure at all n locations
  Clone ID: LIB3138-122-Q1-N1-D2
atcctcttctttctctctctaccattgccatggatccctacaagcaccggccatccagcgccttcaattctcccttctggactacaaattctggtgctcctatttggaacaacaactcctctttaaccgttggagctagaggtccaattctgctggaggattatcatcttgtggagaagcttgcaaattttgatagggaacgtatcccagaacgtgttgtccatgccaggggcgctagtgcaaagggtttctttgaggtcacccatgacatttctcacctgacatgtgcagatttccttcgagcccctggagttcagacgcctgtnnatgttcgtttctcaactgtcattcatgagcgtggtag

SEQ ID NO: 36948 - DNA, 399 bp, Glycine max
  Clone ID: LIB3138-122-Q1-N1-D3
ctcgagccgcggcgggtgctgtccacgctctgagcactgccgtcggcggtggccaggagcgcaccgacggctcttcgcgggccacgccgaccgaggccagcagccgaacagctccgacgggcggcgcacgcatccgcactccggcgcccttcgtcggcggcgactatggccttgagcacctgtacgccgtcgtcgacgcagcagcgcggcgcgacccgcgtcgtgcctctccgtcggccaaggccagcatgcccatctcgcctcgctcgcgcgccgcggccctctcgccgcaggtggccggtctctttgcgccgcaggtgccgccattcgaaggcccggccaagacgcgcgagtcgtacgtcaggctcgacaatcagctgaacgcgcctgaagacacac

SEQ ID NO: 36949 - DNA, 474 bp, Glycine max
  unsure at all n locations
  Clone ID: LIB3138-122-Q1-N1-D4
ctcgagcctgagctttttctatccacgctcngagcactgtcgttgggggtagtcttaagcggaccgactgttcttcgtgggccacatcatccgaagccagcagtcgaacatgtattgactgtcgtagcacgcgttcttactgggccaaactaacttgacggcaactgaggtcttgtgcagactgtcccaaacagtctacagtcttttgattattcttcttgggaatctctcaagattttgaaattgctgggtatactcttatgccagctttttctggtccacaggctactgccagaacttctgaaaatgcggaatcctctgcatgatctggaatatgtgttactatcgcttgttcgcttgtttaatgcaatacaggaaattaggccatgaccctcttgttgagtatgctctgcctatttgaaaatttccacaccttttttaattgtcgtaatgatgtgtgaagtggtgttattt

SEQ ID NO: 36950 - DNA, 410 bp, Glycine max
  unsure at all n locations
  Clone ID: LIB3138-122-Q1-N1-D5
attttatctttattccactgaatagaacatgagcatataaatggataccctttatattatctatctttatattatctataaagggtaaagatatccgatgtgaatctatttgtttagttttctatcggtatgtatataggtgaataatccaacatgcctttttgtgaagtaaaaaaactaccctcgatccatgcctcaaaagggttgataataagtaaaaaaaatcaatgaattcatgataaaacccttctgcgtttttttattataaatttttttgtcaataaagggatcaaggggttgggggatcaaatggtaaagttcttttgttggtaaattggaggattagaaacatgactattgctttccaattagcntgttttgcattaattgctatttcatttattttattg

SEQ ID NO: 36951 - DNA, 342 bp, Glycine max
  Clone ID: LIB3138-122-Q1-N1-D6
agttaatataaattttttattttcgttaaattcccaaaaagggggggttattaataaaataggggtggttatcatctattaagctggcacctccccgaattgtgaacagaatgcctttttctatatggggaggagctggctctaaaaatgctattcttacttatatgccagatgaattacattccagtgttaaaatttttataaggggatttctgtgttaaaattttttattttatcttttactaaaatcattgcgcctggttccttttcataacatttggaaatttggctgatgataccatcatttatctttttgtttgtctcttaattctctctttttta

SEQ ID NO: 36952 - DNA, 423 bp, Glycine max
  Clone ID: LIB3138-122-Q1-N1-D7
ctgttctatagttatgtttcttttgtctacatgatatatataatcattgtattcatatagttctgtctcaatagttatcatatactattaaatataataagtggttttgttcttcttcacttccacgttccatgaaatgaatatgctcttcttatagtactaggatggatctgcagtttgtgttgttcaagatctgtgtggtttatttcattgttgtttgcttaagatatatttatttactttactaaagtaaaatttctctttgtgcgtaggattaataattagcacatagttttttggaagagttgtgaaaatgggacttgtggagctttttggagtggcatctatgcccgtgatcaaagtactaataatcactgcagttggcttgcttcttgcactggataacgtaaaattgttgggaaa

SEQ ID NO: 36953 - DNA, 425 bp, Glycine max
  Clone ID: LIB3138-122-Q1-N1-D8
atcaaatattattatgagcaataaaagagacagacttgaggtcaccgagtgttaggagcagcagccaccatgttccatgtttccaccgttgcgctgaatcctcaacctcacactttcctctttccactccccttttttacttcccgcaacctccaactttcacaaactctacaattccccagaaactggaacctccgctctatctcgccatcgctgcacccaacgccgcaatacgacgattccgaagaccacgtcatcggcgactgcgtcgtgttcgaggacggcgttttcgacgaaccgcttttccataaccaccaccacaatcccgacaatcttaccgtcgataagcccaagcccaagcccaggcccagttggaggaaaaaaagtgaggagacattgggcgagaatttgtcccggacaagtgg

SEQ ID NO: 36954 - DNA, 349 bp, Glycine max
  Clone ID: LIB3138-122-Q1-N1-D9
tggtagtggacgtggtggtttacccaccactgcttggattagttctgcagttaacaatcgctcctcagatatcaacaaaaggattcgcacagcacttgggaaaggtaagaaaattgtttttcttactagagttgatccttttccagtagctttactggctgttctttttggcgttaagaatgaaattctgagttctaacgccactaatcctatgctgacgcgacttcttgagaactgtaagagtctcaaatatctggttgatgagtgtccttttgcatttgtgaactagtatgtagtattttattcacttaaataaagcgcattactatgtgcaatgagtgtgtttaaa

SEQ ID NO: 36955 - DNA, 408 bp, Glycine max
  Clone ID: LIB3138-122-Q1-N1-E1
ggtcgctccactccgaagaaggttctcaatattcgagaaaccgccacgtggcttctggaagcagcaagtttggtctagaaagatcccaaggagtcggtccgaacgaggatccacccccttccttgacgaacacagagacgtgtgttttggattctatttgtgccgtggtttgagatttagatgcaaataaatatataccctgtcttgtgccgtgtcccctttaagccaattgcaatcaaacaaagtttcggttattggtgttcatttttcttcctccatctttctctaaaacattaattgaactctccattccttaaattttaccaacgagctagttccgacacagacaaagcaatggcaaagactgagttagaggtgactggtgagagcaagaacaaagaactaaag

SEQ ID NO: 36956 - DNA, 429 bp, Glycine max
  Clone ID: LIB3138-122-Q1-N1-E10
ggacaaccaacccgccaaaatggtcaacctccgcactcagaagcgcctcgcggcctccgtggtcggttgcggaaagcgcaagatctggctcgaccccaacgagaccagcgaaatcgccaacgccaactctcgtcagaccgtccgcaagctcgtccaggatggcctcatcatccgcaagcccgtcaccatgcactcgcgtgcccgcgcccgggagctgaccgccgctcgacgaattggtcgccaccgtggtttcggtaagaggaagggtaccaaggacgctcgtatgccaagccaaatcgtctggatgcgccgtctccgtgtcctccgccgtctcctcgtcaagtaccgtgccgccggaaagatcgacaagcacctttaccacgagctgtaccacctgtcccagggtaacaccttcaagcacaagcgtgc

SEQ ID NO: 36957 - DNA, 287 bp, Glycine max
  Clone ID: LIB3138-122-Q1-N1-E11
tgcgattctcctctgttcttccttctccgatacacatggtccacaacatcacactcttcctctcaagctcttagctttatccgaaaccaacccaccccatcttcctcttcttccttctcttccaccaccatgcctcttcttctcgcacgcaccccaccatcctcactctctccattccctcttcaaaacgcacgcgcgcctctaatcactgcctctcagaagcgcttccctcttgccgcaactcgaatagttcttttcacttcccggcgcagcattctagcatcccc

SEQ ID NO: 36958 - DNA, 395 bp, Glycine max
  Clone ID: LIB3138-122-Q1-N1-E12
ctggtcaaccttgtcatagtagctggttatattgatgtaaagaagtccagtgacagagaagaaattgcagaaattgagaagatgcatgagctcatgaaaaagtataacttagttggtgattttcgttggattgctgcccaaacaaatagggcacgtaatggggagctgtatcgctacatagcagacacacaaggtgctttcgttcagcctgctttctatgaagcttttggacttacagttgtggaggccatgaattgtggactccccacttttgctacttgccatggtggtccggctgagatcattgagcatggtatatcaggattccacattgatccttatcaccctgatcaagcttcacagctattagttgaatttttccaaaagagcaagga

SEQ ID NO: 36959 - DNA, 383 bp, Glycine max
  Clone ID: LIB3138-122-Q1-N1-E2
cacaacttcattatgtttcgtgtaataatctggaaatgcaagaagcttatcttgtcaatctcgtaaatgtgttacgagaattgtatttgcacagtccagaggaagctcgccaattgagaaggaaagctctctctcgtattgaatggctgcaaaaagctgatgtgcctaccatagcacagattgaagagttccattcgatgcagaggatgatgaatgctcctgattcaaatgataatattgatttactgttgagcattgatttgttgggtttacaaggagcaggtaaagcttttccaaacaaaattgtttttgatgataagcttgtgttggctaacacacaagaattctttgatggaaattttccagtggattcttggttacca

SEQ ID NO: 36960 - DNA, 292 bp, Glycine max
  unsure at all n locations
  Clone ID: LIB3138-122-Q1-N1-E3
cttaattagtgttcatgaatatgtcaagccttactntagtggttctaaattgaaaagctttctagctagtcataacatcaccattactgatggtattgacaaaactagtgcaactttgcaatttagaaagttagcagattgtgattttctcaagagaaactttaagcagatgtctaatgttttgtgggtggctcctgaggacaaggcgagtttatggtcacaacttcattatgtttcgtgtaataatctggaaatgcaagaagcttatcttgtcaatctcgtaaatgtgtta

SEQ ID NO: 36961 - DNA, 441 bp, Glycine max
  Clone ID: LIB3138-122-Q1-N1-E4
aaaatttaaagaaatcaacacacacaaacacaacaacatatggaggtgctaagggtgcaaaccatagcttccaaatccaaagatgctgccatcccagccatgtttgttagggcagagacagagcaaccaggcatcacaaccgttcaaggggtgaaccttgaggtgccaattattgattttagtgacccagatgaagggaaagtggtgcatgagattttggaggcaagtagggactggggcatgttccaaattgtgaaccatgacatacctagtgatgttataagaaagttgcaaagtgttgggaaaatgttctttgagttgccacaagaggaaaaagagttgattgctaagcctgctgggtctgattctattgaagggtatggcacaaagcttcagaaagaggtgaatggcaagaaaagggtgggtggatcatttgttcca

SEQ ID NO: 36962 - DNA, 309 bp, Glycine max
  unsure at all n locations
  Clone ID: LIB3138-122-Q1-N1-E5
ttgcagcgcactcatcgtattagaggaatgattaaaatggtggccacagttggtattcctgagaatacaggtatatcattggcctgtgctatgaatagttcttttagggggcgcgccagttctgatatttacaccatctgctctcaagactgtgaattgtggaatcctgcttgcacaaaagcaatgactatgtcatttaatccaaacccgtgttctgatgcatggagtttggaatttctgaagcgtactggatttcattgcgatatcatttgtgtcactggatggactgccaccccaatgcangatgtt

SEQ ID NO: 36963 - DNA, 316 bp, Glycine max
  unsure at all n locations
  Clone ID: LIB3138-122-Q1-N1-E6
gccccaaactcaagaacacattcttttatcgaaacaagttggtgtccccaacatggtcgtgttcttaaacaagcaagaccaagtcgacgacgaagagcttctccaactagtggagctcgaagtccgcgaccttttgagctcctacgaattccccggtgacgatacccccattgtctcgggctccgcgctcttagccctagaagcactcatggccaaccctgcaatcaaacgcggcgacaacgagtgggtcgacaagatttttcaactcatggacgaggtcgacaactacattntcattccccagcgccagaccgag

SEQ ID NO: 36964 - DNA, 367 bp, Glycine max
  Clone ID: LIB3138-122-Q1-N1-E7
ctcctctgattcattcacccagttttttttttctgtcctcttttcctctcagaggagcctctgagtctgctcaggtgttccttgtgaagagatccttttgtttttgaggtgtgaagggaaagagaaaaaaaaaagatgaatcagtgtggttatcagcagaagaatgctttgacaagctgtgaggagatgaggatggaatcagtggtgtgccctaaaccacgaagattgggcctgttgaaccactcaacctttgatgaccacatcagacccttgaggccaccctttatcaactaccaatcagaaattgaagattcaggagttggggctgagcttctggacatcattcttcccaagagatctggagggc

SEQ ID NO: 36965 - DNA, 417 bp, Glycine max
  Clone ID: LIB3138-122-Q1-N1-E8
tgcaattgaagttgaagtcttgcccttctctcttcaactccaaacacaagacatcatcatccatggctgcctccgtctccactgtcggagctgtcaacagagctcttttgaacctgaatgggtctggacctggggtttcagctcccagttcatccttctttgggagcagcttgaagaaggttattggctcaagggtccccaacacaaagatttcctctggaagcttcaagattgttgctgtagaagagaagaaagagattgaagagacccagcagaccgacaaggacagatggaagggtcttgcctatgatatctcagacgaccaacaggacatcacaagaggaaagggtttggtgactcccttttcagctcacagatgctgactactatctgcatgagctctacagacctacactg

SEQ ID NO: 36966 - DNA, 477 bp, Glycine max
  Clone ID: LIB3138-122-Q1-N1-E9
cttcaaaatttatctagtgatgctattgctcgaacagcatttggaagtagttatgaagaaggaagaaaaatatttcaacttctaaaagagcaagcagaacttgcaatgaaagctataatgaaactttacatccctggatggagatttctacctactgctaaccataggaggatgaaggaaattgatagagaaataaaagcttcacttacagatatgattagcaacagagagaaagcactaaaggcgggtgaggctaccgagaatgacttgttaggtatacttttggagtcaaatcacaaggaaactgaagaacatggaaacagtaagaatgttggaatgagtcttgaagatgtaatcgaggaatgcaagctattctacttcgcagggcaagagaccacttcagctttacttgtttggaccatggtgttgttaagtaggtaccctgattggcaagcacgtgcgagggaggaagtttac

SEQ ID NO: 36967 - DNA, 464 bp, Glycine max
  unsure at all n locations
  Clone ID: LIB3138-122-Q1-N1-F1
ctggtatttcaggttctcgtcttttgggcaccattcctcagtccatttcacagcaaactgtttggaatcaaatggcaacagtgagaacaccattgaattttgattctagcaagcagagcttttgtcagttttctattgaccttctcggtggaggaatcttagtggacaaaaactggagattggatcacacttatacaaaattctccaattagtaacttattgagagttgctgcttggaagaaaggcttgttaatggtcaagattgtgatgtctgggaatgcagcagtcaaaaggagtgattgggcctcattggtacaagtgtttttaacaaacagcaacagtacagagcattttgatgcatgtaagtggacaaaatcagaaccacattcctgggaatngatcttcccaatagaggtatgtggtcctaaatatggttttgaaatgtggagttctgagtgggcaaa

SEQ ID NO: 36968 - DNA, 448 bp, Glycine max
  Clone ID: LIB3138-122-Q1-N1-F10
gatggagtgtcttccatttgtgctcttgatttccgcatggatgaatggggagttgatgtggcaataactggctcccagaaggccctttcccttcccactgggataggtattgtggttgcaggccctaaagctattgaggcctcaaaacatgctaaatcacttagagttttctttgactggaaagactacctcaaattctaccagctaggaacctattggccatacactccttccatacatttgctgtatggtctgagagctgctcttgatctgatttttgaggaaggactcgaaaatgtgatcgcaaggcacagtcgtttaggcaaagcaaccagacttgctgtagaggcatggggtttgaagaattgcacccaaaaggaagagtggtacagtgacactgtgactgctgttcttgttcctgcttacattgatagtactgaaatagtta

SEQ ID NO: 36969 - DNA, 492 bp, Glycine max
  Clone ID: LIB3138-122-Q1-N1-F11
ggaaggaaccggcaaattcataatcaattaccgcgacgctaaggaatatcttcaaggaaatccattgtggcttcaatacattaaggtccccttaataactttgggatatgaaagtaattatgatgtttttgtcaaagctgagggtggtggcctgtctggtcaggctcaggcaatctctcttggcattgctcgtgccttgctgaaggtgagcgatgatcatagagcacctttgagacaggaaggacttcttaccagagattccagagtggttgagaggaagaaagttggtctcaagaaagctcgtaaagcccctcaatattccaaacgttgaggttgggatgttacatgtatggtctgtcttttctttcctcctggtgtctctggaaatgggttacatttggaactattgattgttttcatttgtagttgtaggcttccaagttaggaaagtaaaagagaaattgaaaaatatcccaaaggcgtatgtattca

SEQ ID NO: 36970 - DNA, 480 bp, Glycine max
  Clone ID: LIB3138-122-Q1-N1-F12
gaagaatgtgttggatatcaacagcatcaccagtgttgacgggatcgtcggcaccggcttagacttcttaggcagtgcactcgatacagttacttttttagcctcctccatctccatccaacttattagtgctaccaaggctgatggtgggaaaggaaaagttggaaaggctacaaatttgagaggaaagataacattaccaaccataggagctaaggaagaagcatacgatgctcaatttgattgggacagtgacttcggaattcccggtgcattttatattaagaacttcatgcaaaacgagttctacctcaagtctttaattctcgaagacattccaaaccatggaaccattcacttcatatgtaactcctgggtttacaattcaaaacactacaagactgatcgcattttctttgccaacaatacatatcttccaagcgagacaccggctccacttgtcaagtacagagaagaaga

SEQ ID NO: 36971 - DNA, 89 bp, Glycine max
  Clone ID: LIB3138-122-Q1-N1-F2
gctctgcctatttgaaaatttccacacctcttttaattgtcgtaatgatgtgtgaagtgtgtgttattttaaaaaaaacaaagagaaca

SEQ ID NO: 36972 - DNA, 441 bp, Glycine max
  Clone ID: LIB3138-122-Q1-N1-F3
caaaggttgctgtaggagataagattgcagtagtgctaagtgctaacacctgcagtgaacaatggcctctgcatcagcatctctgctcaagtcttcacttgttcttgacaagtctgagtgggtgaagggacaaacccttcgccaaccttctgcatcagttgtgagatgcaaccccaccaccccatcaggcctcaccatcagagctggttcctatgctgatgagctcgttaagaccgcgaaaacagtggcttcaccagggaggggtattttggccatggatgagtccaatgctacctgtgggaagcgtttggcttcaattgggctagagaacactgaagctaaccgccaggcataccgtaccctcctcgtgacagttccaggccttggtcagtacatctctggtgccattctctttgaggaaacactctaccaatccacaac

SEQ ID NO: 36973 - DNA, 457 bp, Glycine max
  unsure at all n locations
  Clone ID: LIB3138-122-Q1-N1-F5
ctcatcccagaaaagtggaagaggccagtctcaaacagtatttgtaaggggtttcgatacatcccttggagaagatgagatacgagggagtttgcaagaacattttggatcttgtggggacattaccagggtgtcgattcctaaagattatgagtctggtgctgtcaaggggtttgcttacgtagacttcagtgacgttgatagcatgggcaaagctctagaactccatgaaactgaacttggaggttataccttaacagtggatgaagccaaacctagagataatcagggttctggtggtagaggtgccggtggaaggagtggtggcggtcgatttggtggtaggaagtggttggttggttgtgggtcnatttngttggaagaggtggtggcggtcgatttggtggaaagtggtggtggggtcgaattggttggaagtggtggtggccgatttggt

SEQ ID NO: 36974 - DNA, 483 bp, Glycine max
  unsure at all n locations
  Clone ID: LIB3138-122-Q1-N1-F6
cgaagagttgcaggcatggtggacagagattagaacacttggtcatgctgacaaaaaagacgagccatggtggccacgtcttaaaaccccaaaagacctcattggaatcctcaacacaatcatatgggtaacttctggtcaccatgcagctgtgaactttgggcaatatgtttatgggggatatttcccaaataggcctacaattgtcaggaccaaaatgccctcagaggaccctacagaggaagagtggaaaaagttcattgcaaaccctgaaagagcactcctcaagtgctttccttcacaacttcaagcaactagagtcatggctgtcttggacatactctcaactcattcacctgatgaggaatacataggagagaagatggaaccatcatggggtgagatcctgtcataaaggatgcctttgaaagatttagagaaagactgaagaaattagaacactgatngatgagaggaatgaaa

SEQ ID NO: 36975 - DNA, 428 bp, Glycine max
  unsure at all n locations
  Clone ID: LIB3138-122-Q1-N1-F7
tggaaatgcaagaagcttatcttgtcaatctcgtaaatgtgttacgagaattgtatttgcacagtccagaggaagctcgccaattgagaaggaaagctctctctcgtattgaatggctgcaaaaagctgatgtgcctaccatagcaccagattgaagagttccattcgatgcagaggatgatgaatgctcctgattcaaatgataatattgatttactgttgagcattgatttgttgggtttacaaggagcaggtaaagcttttccaaacaaaattgtttttgatgataagcttgtgttggctaacacacaagaattctttgatggaaattttccagtggattcttggttaccaatttttgtgaattgtctntatcctgtaagtcaattaccttcagaagctgtcgttgtaaatgttacatgtggtag

SEQ ID NO: 36976 - DNA, 379 bp, Glycine max
  unsure at all n locations
  Clone ID: LIB3138-122-Q1-N1-F8
gggttgtggaccaagaacccaatgaaatccgccgcttcgagcttctgcgaaatgagctaatagaacttgagaaacgagttcaaagaagtgcctatcaatcagaaaataatgaagatttactggttattgatgatggtgccccttatagcgatgatgctgggggtgttcagatggtcagggttgagaagaaagaaaatatcctggaaaaatcttttagtttgccaaaagatttttccaggatattttggcaaactaaaagaaacaggaacggatgtctggcaaggaactcagctgctcgctattgatgttgctgctgccatgggtttacttagaagggcatngattggggatgaattgaccgagaaggagaagaaaacac

SEQ ID NO: 36977 - DNA, 411 bp, Glycine max
  Clone ID: LIB3138-122-Q1-N1-F9
tacaactacaaaggttgctgtaggagataagatattgaagtagtgctaagtgcctaacacctgcagtgaacaatggcctctgcatcagcatctcttctcaagtcttcacttgttcttgacaagtctgagtgggtgaagggacaaacacttcgccaaccttctgctgcatcagttgtgagatgcaaccccaccaccccatcaggcctcaccatcagagctggttcctatgctgatgagctcgttaagaccgcgaaaacagtggcttcaccagggaggggtattttggccatggatgagtccaatgctacctgtgggaagcgtttggcttcaattgggctagagaacactgaagctaaccgccaggcataccgtaccctccttgtgacagttccaggacttggtcagtacatc

SEQ ID NO: 36978 - DNA, 451 bp, Glycine max
  unsure at all n locations
  Clone ID: LIB3138-122-Q1-N1-G1
ttttcaattcactctctgatgatcaccgattccgtttttcgtttgcatttttcctcccaacattctatttctcttttttggcatttcattttcgatcatccgcagatcgcttgcgtttttgttctacgacgctgatcgnatctttattttttattttatttttttttccttctgttacttcggttttttttttagaaatatatatatttcttattcatttattttgttgaactcctgctattatgcatatggaatttggaagaatttgattcagtaatgagttttgcaagtctcgtttggtgttattagactgatctactgaatagccagctagtttgtgtatttggaattttacatgataatctgtgtttacttacggtcaactcaaatcgtttcttctctgatttaggattaacatcagaaacttaatcaattgaacataatacacatg

SEQ ID NO: 36979 - DNA, 270 bp, Glycine max
  Clone ID: LIB3138-122-Q1-N1-G10
ggcagcttctgaactacaggaagtgttttcttgtttggacacttctgatcctgattacaagggtgccccgtctatgcaggattggaagctggttgagaccctctgcacatacttgaagcccctatttgatgcagcaaacattcttaccacaacaactcatcccactgttattaccttcttccatgaagtttggaaattgcagttggatctgtctcgtgccattgtgaatgaggatcctttcatcagcaaccttactaaacccatgcaaca

SEQ ID NO: 36980 - DNA, 450 bp, Glycine max
  Clone ID: LIB3138-122-Q1-N1-G11
ccaaacacaaagacatcatcatccatggctgcctccgtctccactgtcggagctgtcaacagagctcttttgaacctgaatggttctggagctggagcttcagctcccagttcagccttctttgggaccagcttgaagaaggttattgcctcaagggtccccaacagcaaggtttccggtggaagcttcaagattgttgctgtagaagagaagaaagagattgaagagacccagcagaccgacaaggacagatggaagggtcttgcctatgatatctcagacgaccaacaagacatcacaagaggaaagggtttggttgactcccttttccaagctccacaggatgctggaactcactatgcagtcatgagctcctacgagtacctcagcactggacttcgccagtacttggcaacaaaatggatggattctacattgctccagctttta

SEQ ID NO: 36981 - DNA, 457 bp, Glycine max
  Clone ID: LIB3138-122-Q1-N1-G12
caacagtacagagcattttgatgcatgtaagtggacaaaatcagaaccacattcctgggaattgatcttcccaatagaggtatgtggtcctaataatggttttgaaatgtggagttctgagtgggcaaatcaaacttcatggcatttgagtttccttattgacaatcccaaacagtctacagtttttgatattctcttgggaatctctcaagattttgaaattgctggtaatactcttatgccagctttttctgttccacaggctactgccagatcttctgaaaatgcggaatcctctgcatgatctggaatttgtgttttctttcgcttgttcgtttgtttaattcaataaaggaaattaggcatgaccctcttgttgagtatgctctgcctatttgaaaatttccacacctcttttaattgtcgtaaatgatgttgtgaaagtgtgtgttatttt

SEQ ID NO: 36982 - DNA, 458 bp, Glycine max
  unsure at all n locations
  Clone ID: LIB3138-122-Q1-N1-G2
gagaaggaaagctctctctcgtattgaatggctgcaaaaagctgatgtgcctaccatagcacagattgaagagttccattcgatgcagaggatgatgaatgctcctgattcaaatgataatattgatttactgttgagcattgatttgttgggtttacaaggagcaggtaaagcttttccaaacaaaattgtttttgatgataagcttgtgttggctaacacacaagaattctttgatggaaattttccagtggattcttggttaccaatttttgtgaattgtctttatcctgtaagtcaattacccttcagaagctgtcgttgtaaatgttacatgtggtaagtggacggtgtggtttacccaccactgcttggattagttctgcagntaacaatcgctcctcagatatcaacaaaaggattcgcacagcacttgggaaaggtaagaaaattgtttt

SEQ ID NO: 36983 - DNA, 406 bp, Glycine max
  Clone ID: LIB3138-122-Q1-N1-G3
ttttgtatgcacttcaaacagtttgggcgtcatgtggagagagagagcgttattggtgatcctgctactgcttctagtccagcaaatttgtgctaccaagaagcaagatcatggttgccccctttcttcctgcggcaaaatcaccaacataacttacccatttcgattaaagggccaccctaaaagctgcggcgacaataggtatgagctagcttgtgaaaacaatgttactgtgttacatttgtactctggaaaatatcatgtgcaggcaatcaactacaattaatttcactatccgagtggttgatccaggagtcgatcaacaaacaaattgctcctcccttcctcgctatttcttgtctcgctccaatttcactgatacttacagtgatatttacaacatgga

SEQ ID NO: 36984 - DNA, 488 bp, Glycine max
  Clone ID: LIB3138-122-Q1-N1-G4
tacaaaggttgctgtaggagataagatattgaagtagtgctaagtgcctaacacctgcagtgaacaatggcctctgcatcagcatctcttctcaagtcttcacttgttcttgacaagtctgagtgggtgaagggacaaacacttcgccaaccttctgctgcatcagttgtgagatgcaaccccaccaccccatcaggcctcaccatcagagctggttcctatgctgatgagctcgttaagaccgcgaaaacagtggcttcaccagggaggggtattttggccatggatgagtccaatgctacctgtgggaagcgtttggcttcaattgggctagagaacactgaagctaaccgccaggcataccgtaccctccttgtgacagttccaggacttggtcagtacatctctggtgccattctctttgaggaaactctctaccaatccacaactgatggcaggaagattgtcacgtgctcctcgagcaaaac

SEQ ID NO: 36985 - DNA, 429 bp, Glycine max
  Clone ID: LIB3138-122-Q1-N1-G5
gggcaaagcaacctttatcgcatttgagattccttaaagacaaacggctacagtcgacagagttggatattctcttgtgaatcatctaagatgtcggaatagccggtaatacgctgatgccaggttctgctgagccacaagctgctgccagaccttctgaaaaagcctaatacgatccatgatcggggatttgggtaaactttcgctagatgcgcagtggacaatagtaacacaaactaggcctgaccctatggatggaatgctctgtctatttgtaaagtgccacacctatcataattgtcgacataatgtttgaggtgatgatgatcttgctctacaactagccatggaaagtggaacgaaatctgacactgggagaacccacaattgacttttgaaatgtactttacatagatttgatatgtaaat

SEQ ID NO: 36986 - DNA, 436 bp, Glycine max
  Clone ID: LIB3138-122-Q1-N1-G6
ctcgagccgaatcggctcgagcttccagaagaactcaaaggcacggctcttctgcttgccctctttcgcttcctgcaaatctttctgagaatcgagtcacagactagagctaaatcagcatagagatacaaaaatgccaaaagtaaagacaaatcgtgttaaatacccagagggctgggaattaattgagcctacactccgtgaacttcaagcaaagatgagggaagctgagaatgatccgcatgatggcaaaagaaaatgtgagaccttatggcctatatttaagattgcacaccagaagagccgctacatatttgatctataccatcggaggaaggaaatttctaaagaactgtatgaattctgtttagatcaaggatatgctgaccgcaatctaattgcaaaatggaagaagcctggttatgaacgtctttgc

SEQ ID NO: 36987 - DNA, 485 bp, Glycine max
  Clone ID: LIB3138-122-Q1-N1-G7
tctttattccactgaatagaacatgagcatataaatggataccctttatattatctatctttatattatctataaagggtaaagatatccgatgtgaatctatttgtttagttttctatcggtatgtatataggtgaataatccaacatgcctttttgtgaagtaaaaaaactaccctcgatccatgcctcaaaagggttgataataagtaaaaaaaatcaatgaattcatgataaaacccttctgcgtttttttattataaatttttttgtcaataaagggatcaaggggttgggggatcaaatggtaaagttcttttgttggtaaattggaggattagaaacatgactattgctttccaattagctgtttttgcattaattgctatttcatttattttattgattagtgtacctgttgtatttgcttctcctgaaggttggtcgaataacaaaaatgttgtattttcccgtacatcattatgg

SEQ ID NO: 36988 - DNA, 108 bp, Glycine max
  Clone ID: LIB3138-122-Q1-N1-G9
atttgcttagttttctatcggtatgtatataggtgaatggtcgaacatgcctttttgtgaagtaaaaaaactaccctcgatccatgcctcaaaagggttgataataat

SEQ ID NO: 36989 - DNA, 465 bp, Glycine max
  Clone ID: LIB3138-122-Q1-N1-H1
gcatttggtcaagcagcaatgcttctgtcgcttggaacaaagggttatcgtgctgtacagccaaattcatctacaaaattatatctcccaaaagtcaatagatcaagtggtgctgttatagacatgtggattaaggcaaaagagctagaggcaaatactgagtattacattgagctgttggcaaaagggacagggaaatcaaaggaagaaattgctaaagatgtccagaggcctaagtatcttcaagcacaggatgctatagactatggaattgctgacaaaataattgattccagttcaagggatgttgcatttgagaagaggaattatgatgaaatgcttgctcaatcaagagctatgaggagacaaggtggtggcaatcctcaagcggctccttcaggattaggtaatcacacagcataaggccacttattcagctttcaaatccaatgccttcaaaggatg

SEQ ID NO: 36990 - DNA, 360 bp, Glycine max
  Clone ID: LIB3138-122-Q1-N1-H10
ccgctagacaggatctgttaatactgactagttgtccagttgagcgtccttgacggactgactgcctacgatcttgcccctaatgacccccacctcatagacattctcaccatgaacggcgtcaacatatgcgtcgtcgagggcgaattcctcaacagcttgttcaacatcataagcgactggctgtttcctttactcgtattacacggcctgtatttgctcttccgcagagcccaaggcgggcccggcgggcctcgccgactgggaaggcccatggacttcgggcggaacaagtacaagttccaggaagcttcccagacctgcgtgagcttcgctgacttgacatgcgcggaccaagcg

SEQ ID NO: 36991 - DNA, 456 bp, Glycine max
  Clone ID: LIB3138-122-Q1-N1-H11
gaaaaaaaacagcacaataatacatgagcttatccacaagtctaggagtgcattttccacagttgtttgtttaactagaatttacacaaaaaagcatagctagcatgggcatggagaactgtttacgagtgaccacagtaggcacagccacaccccaatgcctttctccattctttccatcttcaagggataagcttgtcttcccaactcacagaggtttcaagaaatccttgcaaaactcaacactgtcatgcccttctctttactcaaccggtgctgcctatagaaagtcccgttttgtttgcaatgctcgtgaagcagtaaatgaagttaaagtggtgactgactcaagctggaataaccttgtgattgcaagtgagacccctgtgctggtagagttttgggcaccgtggtgtggtccatgcaggatgatagcgcctgttatcgatgagttag

SEQ ID NO: 36992 - DNA, 417 bp, Glycine max
  Clone ID: LIB3138-122-Q1-N1-H12
tgtgactttgtaacttggtctcgtggtatggagagggtatagcttcaaaggactcgtctctcggttcctcaggctctgataggctataggatttgctggcggtgattacaaatcacaagcatttatcatggtccttttcccatcttttgtgaatggattggtaagaactgtgtcaatcaagaaagagaagaattgtcaaaaggaggatggaagaaaagctgtggaagaattggcaaaggaagcaaggaagaatgaattgctattgagttcatctggagttgtgaagtcaaccaaggccaacaattttgtttctgtgttcactaataggggccagaaaggagtcaatcaggatcgtcttcttgtttgggaaggaatttggtgccaacaagaacatgatgttcttgtggagtttttgat

SEQ ID NO: 36993 - DNA, 186 bp, Glycine max
  Clone ID: LIB3138-122-Q1-N1-H2
gtcttctagtgcaagtgatttcagagctgcaatggtgagtaaaaatagcaagcctcaagctactgcaatgcatgtgggagctatagaaattatcattgatagtttcgcaagtcctgattgcaacatagttggtgcaatgcttttggttgatacttatcataccaatcctgaaaatgcagttcgtag

SEQ ID NO: 36994 - DNA, 455 bp, Glycine max
  Clone ID: LIB3138-122-Q1-N1-H3
gtttggtgtttgaatcgtgaaaatgttcagaaaccagtatgacacggacgtgacgacatggagcccggcggggaggctgttccaggtggagtacgcgatggaggcggtgaagcagggctcggctgcgatagggctccgatccaagacccacgtggtcctcgcatgcgtcaacaaggctaactccgaactttcatcgcaccagaagaagatcttcaaggtcgacaaccacatcggcgtcgccatcgccggcctcaccgccgacgggccgcgtcctctcccgctacatgcgatccgagtgcatcaactataactacacctacgagtcaccgctccccgtagggagactcgtcgttcagctcgccgataaaggctaggtttgcacccagcggtcatggaaacggccttatggagtggactcctgtagctggatagatgaatcgggagctcaccttata

SEQ ID NO: 36995 - DNA, 494 bp, Glycine max
  Clone ID: LIB3138-122-Q1-N1-H4
gctgtttaatggtcaagattgtgatgtctgggaatgcagcagtcagaaaggagtgattgggcctcattggtacaagtgtttttaacaaacagcaacagtacagagcattttgatgcatgtaagtggacaaaatcagaaccacattcctgggaattgatcttcccaatagaggtatgtggtcctaataatggttttgaaatgtggagttctgagtgggcaaatcaaacttcatggcatttgagtttccttattgacaatcccaaacagtctacagtttttgatattctcttgggaatctctcaagattttgaaattgctggtaatactcttatgccagctttttctgttccacaggctactgccagatcttctgaaaatgcggaatcctctgcatgatctggaattgtgttttctttcgcttgttcgtttgtttaattcaataaaggaaattaggcatgaccctcttgttgagtatgctctgcctatttgaaaat

SEQ ID NO: 36996 - DNA, 476 bp, Glycine max
  Clone ID: LIB3138-122-Q1-N1-H5
gatctattggcaaattttttgacagagggcaattttagagcaagtgttgatttgcagcgcactcatcgtattagaggaatgattaaaatggtggccacagttggtattcctgagaatacaggtatatcattggcctgtgctatgaatagttcttttagggggcgcgccagttctgatatttacaccatctgctctcaagactgtgaattgtggaatcctgcttgcacaaaagcaatgactatgtcatttaatccaaacccgtgttctgatgcatggagtttggaatttctgaagcgtactggatttcattgcgatatcatttgtgtcactggatggactgccaccccaatgcaggatgttcaggttacaattgattggtttatttcctctcaggaatgtgttcccaggaccctatgtgttttaaatccacaaaatccctttgtgttaaataggtggatggggaaaatgactttccc

SEQ ID NO: 36997 - DNA, 366 bp, Glycine max
  Clone ID: LIB3138-122-Q1-N1-H6
ctcgagccgctcgagccgattcggctcgaggtggtggtttacccaccactgcttggattagttctgcagttaacaatcgctcctcagatatcaacaaaaggattcgcacagcacttgggaaaggtaagaaaattgtttttcttactagagttgatccttttccagtagctttactggctgttctttttggcgttaagaatgaaattctgagttctaacgccactaatcctatgctgacgcgacttcttgagaactggtagagtctcaaatatctggttgatgagtgtccttttgcatttgtgaactagtatgtagtattttattcacttaaataaagcgcattactatgtgcaatgagtgtgttta

SEQ ID NO: 36998 - DNA, 407 bp, Glycine max
  Clone ID: LIB3138-122-Q1-N1-H8
gttctttcttataaatacaagcataccatcttgaacaattcctacatatccttccttcatcttcaaaatatggctctaacacttcgttcttcaacttcttttattaatcagaaggaaaccaaagtccttaaaacttctgatgatatccctgcgacagttagtttttcaaaattcaagccattggtccgtctccgggcgaaaaattcaatgcaagaagcgcatcacactcgcgagaacagcttcaatgaagcaagtagaagcgagaaatgggagaaggtgcttgctccatcggttgcacataaccacaatgattcgaagagagtacctgtgtatgtgatgctgccactggacacggtaacaatggaaggaagattgaacaagcctagagcaatgaatgcgagtttgat

SEQ ID NO: 36999 - DNA, 429 bp, Glycine max
  Clone ID: LIB3138-122-Q1-N1-H9
ctcaattgggcagttcctttctcagattttgaaagatcatccgcatcttgtgcctgctgccgttgaccagcagctccagcaactccaaactgaccgcgatgctcatcaacaaaacgaacaaccttctgcttcaaccactgatttagttttgtacaggagaattgctgaggtgaaggctaatgaaaggaggaaagctctggaagagatcttgtatgcattggtagtgcagaagttcatggatggctaatatttctttgataccctctgtaaccccagatctttctggtaaggttgatttgtggccaaatgaagatggtaaacttgagctgcttcactcacacgaagcatatgagatgattcaaaaccacctggctctcattctcggtaacagagctggagatttaacatcaatagctgaaatcagcaaat

SEQ ID NO: 37000 - DNA, 333 bp, Glycine max
  unsure at all n locations
  Clone ID: LIB3138-123-Q1-N1-A1
agcaaagccaaagtgatcgtgtggcagagcagcgagagagaaagctcttcttgttctgatgtcggatcatcttccgcgagaagtggtaaccgacatcctcttccggttaccggcgaaatccctactccgattccggtcaacctcaaagtcatggaagtcactaatcgacagccagcactttaactcggtccatctcagcagatccctgagcttaacctccaacaccaccctcattctncgnctcgactctgatctataccagacaaatttcccaaccctagaccctcccctttttcttaaccaccctcttatgtgttacagcaacaacatcac

SEQ ID NO: 37001 - DNA, 280 bp, Glycine max
  Clone ID: LIB3138-123-Q1-N1-A10
accagcggctgagccatggtcattattgccgtgcttgggaatgcatctgtcagaaggtgtcattgcaccttattgtgacgagagttttatacacacaacgtctgtgccgagccttttggtgcatgatgctgggctaaatcagaaccacattcatgggaactgatcttgctaatagagggatgtggttctaatgatgcttttgaaatatagcgttcttgatgatcaactgaaacttcatggcattggagcattcttattgacgatgtcaaacaggctacat

SEQ ID NO: 37002 - DNA, 358 bp, Glycine max
  Clone ID: LIB3138-123-Q1-N1-A11
cttacagcttggtcaactcaggtgcgtcctgcaacaactctgttggctgatgggtgtccatatttgtatgcaatggtgcatgatagttcagtgtctacaataccaggtgattttgtcattggtgtcaagttgacaaccataaacaatatgtgtgcatatgggctcaatcctggtatttcaggttctcgtcttttgggcaccattcctcagtccatttcacagcaaactgtttggaatcaaatggcaacagtgagaacaccattgaattttgattctagcaagcagagcttttgtcagttttctattgaccttctcggtggaagaatcttagtggacaaaactggagattggatcacac

SEQ ID NO: 37003 - DNA, 361 bp, Glycine max
  Clone ID: LIB3138-123-Q1-N1-A2
aaattgacgagaaaaagaaagaggttgttgttgaaaaaactggaggccctgctgagagctatgatgatttcactgcatccttgcctgaaaatgattgccgatatgctatctttgactttgattttgtgacatctgagaactgccaaaagagcaaaatcttttttattgcatgatggactcgaagaaaacttattactgaggtctccttcggtagcccgcattcgccctaagatgctatatgcaacatccaaggacaggttcaaaagggagctgcagggcatccattatgagattcaggcaacagacccaaccgagatggatcttgaagtcctcaaagagcgtgcaaactgagcacctacac

SEQ ID NO: 37004 - DNA, 372 bp, Glycine max
  Clone ID: LIB3138-123-Q1-N1-A3
cgaccatcatcgcacaccaaaatgagttctttagatctgttcgctccctctgcagagactcgtcgtctctcggttaagctcaccaatgatcaattagagaagatcggtatgacaaagcaggaggcagctgattttcaacgtctgagaaaccgtttcttggacaagccccttatggaatgggagagagtcaaacctcttcctgatgatttttgtaaatcggcagaagatctccctgaaccctccccaaagaaagcaaaagagctgctcaacaagttggtttttgtccaactcaacggaggtcttggcacagccatgggcctgaaatccaccaaatcaggacttcagatcttgaaacagggaggatctgcttac

SEQ ID NO: 37005 - DNA, 361 bp, Glycine max
  Clone ID: LIB3138-123-Q1-N1-A4
atgtatcaagtcctttaatgttagagttcaaaaacaaataagttgtcttcaatgacaatgaattacatttgctagctttttcccaattctagttcccgtggggaatcaaagtttcactttttgactttaaactagtaattattatatatctttgactcctttaaagtgagcaaatcactttaacagttaaactaaataatctcagtcaatgagaaaatcatcggtcgatattatatgatattatatgcacacgcataacaaattataaatgtgttggaattctcaattgttgattttttcataaatgactatgattacttactttatccatgctcctcaatttagagaagtcatccaatcc

SEQ ID NO: 37006 - DNA, 342 bp, Glycine max
  Clone ID: LIB3138-123-Q1-N1-A5
caaccccaccaccccatcaggcctcaccatcagagctggttcctatgctgatgagctcgttaagaccgcgaaaacagtggcttcaccagggaggggtattttggccatggatgagtccaatgctacctgtgggaagcgtttggcttcaattgggctagagaacactgaagctaaccgccaggcataccgtaccctccttgtgacagttccaggacttggtcagtacatctctggtgccattctctttgaggaaactctctaccaatccacaactgatggcaggaagattgtcgacgtgctcctcgagcaaaacattgttcccggtattaaagtcgacagggg

SEQ ID NO: 37007 - DNA, 342 bp, Glycine max
  Clone ID: LIB3138-123-Q1-N1-A6
ggtgtccatatttgtatgcaatggtgcatgatagttcagtgtctacaataccaggtgattttgtcattggtgtcaatttgacaaccataaacaatatgtgtgcatatgggctcaatcctggtatttcaggttctcgtcttttgggcaccattcctcagtccatttcacagcaaactgtttggaatcaaatggcaacagtgagaacaccattgaattttgattctagcaagcagagcttttgtcagttttctattgaccttctcggtggaggaatcttagtggacaaaactggagattggatcacacttatacaaaattctccaattagtaaacttgtgagag

SEQ ID NO: 37008 - DNA, 268 bp, Glycine max
  unsure at all n locations
  Clone ID: LIB3138-123-Q1-N1-A8
gtctggcctacaatctgttggatagagcgggaagttgggtgccctggggaggctatgatgatttcactgcatccttgcctgaaaaggattgccctgttgctcttgtggtctctcgtagctcctatcatgaacccagaaagggggttctgagcattaggttcgtcaggtccgagtttatgacggaaaacgtgccgcctaactactatatatgccagtggtgtngatgtttataattggatatacggactgcatctatatgagcctgcat

SEQ ID NO: 37009 - DNA, 371 bp, Glycine max
  Clone ID: LIB3138-123-Q1-N1-A9
agaatggcgacgacagcagccttgtgcggcactatgatgagcagctccttcctgaggagaaaagcagtggtcacaagcctgaaggcattccccaatgctaacgcagtgtttggtgtaaagggtggacttttaagcggtgggactgccatggctagctccaaggtgaagctgataaccccagagggagagaaagaatttgaatgcccagatgatgtatacattcttgaccaggcagaggaggaagggcttgagcttccctactcatgcagggctggttcttgctctgtgtgtgctggcaaagctgtatctggcaaagttgacaattcagatgccaccttccttgaggatgaacaattagaagcaggatttac

SEQ ID NO: 37010 - DNA, 371 bp, Glycine max
  Clone ID: LIB3138-123-Q1-N1-B1
ggattatcctgctgggacatgctcctagctcaaaaaatgcactcattgagccatcaaatcaaaaggttgatattgaacttggccccctttgggttctaagggctcgtgcaccagctgttacaaccatacgtagacctaatgttcgtgttgcagaagattggactataacagttatataacatttccggttcgagggaggagtttaatgttcaaagttactgctagtgcacaacgagattttgtttctgtagttgagttgatatgaagttcagctgcaacgttggggtaagaagaaagaaaatcattaattttgaagaatgcatttgcaccaactcagtttgagcggcttatttaatgtaggactcgttgac

SEQ ID NO: 37011 - DNA, 356 bp, Glycine max
  Clone ID: LIB3138-123-Q1-N1-B10
ctagaattcctctatatggtgaatttacaagccagaatgctattattgctgagcggtttattgaaggaggtagcccgtatgtatccaaaaattgtacatgactattggccggtaattttataaattgaagttctaaactgcaacttattatatcattttcaaagcgctgaaaatatcttgtatagctttgcacagattgaaagtaaacaatttaattagcttaggaatataaactaacaactttgcatctctatctagcccttcctctaacttgctttataagtatattgctcctatacggctatactataaatcaaggaatgttcatactaggtttcagcaccaccttaagcaat

SEQ ID NO: 37012 - DNA, 369 bp, Glycine max
  Clone ID: LIB3138-123-Q1-N1-B11
gaagggacaaacccttcgccaaccttctgcatcagttgtgagatgcaaccccaccaccccatcaggcctcaccatcagagctggttcctatgctgatgagctcgttaagaccgcgaaaacagtggcttcaccagggaggggtattttggccatggatgagtccaatgctacctgtgggaagcgtttggcttcaattgggctagagaacactgaagctaaccgccaggcataccgtaccctcctcgtgacagttccaggccttggtcagtacatctctggtgccattctctttgaggaaacactctaccaatccacaactgatggcaggaagattgttgacgtgctgcttgagcaaaacattgttcctgg

SEQ ID NO: 37013 - DNA, 303 bp, Glycine max
  unsure at all n locations
  Clone ID: LIB3138-123-Q1-N1-B12
atcaaagtgatcaaattaatggttaacttctccaagttaatttgattttatggaaaagttaatttttagattaattattagttacttggttttgccatatatgtacaatatcatcactaggtcaggtttctcttgcttgggatatttatttctttctctaacaggtctagctagtactaatggaaatgtggtagcccctctcagcattttgaaggctttggtaatcaatttcagaagccctttttcaatgttgcttgattgtcatcatatgngtgagaatctgacactgatctgaattttatt

SEQ ID NO: 37014 - DNA, 348 bp, Glycine max
  Clone ID: LIB3138-123-Q1-N1-B2
gttggagatgttccattgtcaaagaaaatacttgctgcattgacaactggtgcttttgcaattgcagtggcaaatccaaccgatcttgtgagaagttggactttaagctgaaggaaaattaccttctggtgttcccaggcgctactctggatctttaaatgcttattcaacaattgtgagacaggaaggagttggggctctttggactgggcttggccccaatatcgcaagagatggcatcatcaatgctgccgaattagccagctatgatcaagtggaacagactcttttgaaaattccaagattcactgacaatgtctgtactgatcttcttgctggtcttggggc

SEQ ID NO: 37015 - DNA, 369 bp, Glycine max
  Clone ID: LIB3138-123-Q1-N1-B3
cttttcttctcttcttcttcttcttctacccttcaatattaatattccgtgcaaaaaccaccaacaacaacatcaccaccaacaagaagaacaagattggcgttatgggtctcttcctttctaggaatttggcttgcaaattcatatacccttttcttttctccaagaaggtttccaaggatttgtttcccaagcagttggagaacatgatgtctctgatctctcctcgtactggcaggcatttgcagcgctatgacaatggctgtcgccaagttgtgggatgcattccttatagatacaagaacaatggtacacaggataaggaattggaggttcttgtgattagtgctcagaagggtcatggaatgc

SEQ ID NO: 37016 - DNA, 368 bp, Glycine max
  Clone ID: LIB3138-123-Q1-N1-B4
ccggggatcttctagaactgattgaaagagactttggttcatttgtaaaattccttgatgagttcaaggctgctgctgcaacacaatttggttcagggtgggcttggctagcatatagagcaagaaaatttgatggggaaaatgtagcaaatcctccttcacccgatgaggacaacaagctagtggtgctcaagagtcccaatgctgtgaacccccttgtttggggaggttactacccacttcttaccattgatgtttgggagcatgcttactaccttgattttcagaaccggcgtcctgattatatatcagtgttcatggataagcttgtttcctgggatgcagtgagctctagacttgaacaagct

SEQ ID NO: 37017 - DNA, 97 bp, Glycine max
  Clone ID: LIB3138-123-Q1-N1-B7
cgcacacgtgaatgcatgaggaaactccttgagggactatgatgcagaacgagcatggcctggaacggtggaagagttatactacgatgcaacacat

SEQ ID NO: 37018 - DNA, 363 bp, Glycine max
  unsure at all n locations
  Clone ID: LIB3138-123-Q1-N1-B8
tgttactgcagatcttaaggacattgattacaagtctggggatgtttgtggtgtgcttgtgcagtaccctggcactgagggagaggttttggactatggggagtttgtgaagaaagctcatgctcatgaggtgaaggttgttatggcaagtgatttgttggcactgactgtgttgaagcctcctggtgagttcggngcagatattgttgttggatcagctcagaggtttggggtgccaatggggtatggagggcctcatgcagctttcttggccacttcacaagagtacaagaggatgatgcctgggagaatcattggggtcagtgtcgattcttccggaaagactgctttgaggatggcgat

SEQ ID NO: 37019 - DNA, 368 bp, Glycine max
  Clone ID: LIB3138-123-Q1-N1-B9
acctttgagaagggtgttcttgtcttgcccaagtgttctgccatattatactggttgattttatataaaatcgtaaattttcctcctattggtttcgttagcctgtaggcaatatagcccccacatggagaagtaggaatttatacaagggcaatctgtgctctatgtaattttaatgtagagaccatgcgctgctaaacatgttgagacactttatatattacctagggaagacttttttctgtgtttttaaggatctctcgattcattgctttgttgtctttccaggtcagctgtaagttgtatcattctatcattctgtttgaccttaagccatgtgttctaaattattgtcattaatttatttt

SEQ ID NO: 37020 - DNA, 353 bp, Glycine max
  Clone ID: LIB3138-123-Q1-N1-C10
ccaaaaaccaccaaatcgcggttccaaattgcaatttctcgagcgaactttgcgagttctagggttcccccactgccatggaccaggccgaattaacctccgaacaggttctgaggagggacatcccatgggagacctacatgtccaccaagctcatctcaggcaccagccttcagctcttaaggcgctacgatcaccggccagagagtcacagagcacagttgctcgatgatgatggtccctcttatgttcgcgtgtttgttcgtgttttgcgtgacattttcaaggaagaatccgtggagtatgttttggcactgaatagatgaaatgcttgctgcaaaccccaaaagagc

SEQ ID NO: 37021 - DNA, 319 bp, Glycine max
  Clone ID: LIB3138-123-Q1-N1-C12
caactgcgaattagttcatcctttcccaagccagccaagcgaggcatgctctcaatttttgaaattacttgcatagatagagcatcatggccatgatgaaacgtgctgcttcctcttcggttcgctcgctactttcctcatcctccaccttcaccagaaaccttcatgcctcaggtgaaaagaagaaaattgtgggggtgttctacaaagggaatgagtatgctaaattgaaccccaatttcgtggggtgtgttgaaagagcattgggtatacgtgagtggctggaatcacagggtcatcagtacattgtcactgatga

SEQ ID NO: 37022 - DNA, 370 bp, Glycine max
  Clone ID: LIB3138-123-Q1-N1-C2
cggctcgagattgaccttctcggtggaggaatcttagtggacaaaactggagattggatcacacttatacaaaattctccaattagtaacttattgagagttgctgcttggaagaaaggctgtttaatggtcaagattgtgatgtctgggaatgcagcagtcaaaaggagtgattgggcctcattggtacaagtgtttttaacaaacagcaacagtacagagcattttgatgcatgtaagtggacaaaatcagaaccacattcctgggaattgatcttcccaatagaggtatgtggtcctaataatggttttgaaatgtggagttctgagtgggcaaatcaaacttcatggcatttgagtttccttattg

SEQ ID NO: 37023 - DNA, 361 bp, Glycine max
  Clone ID: LIB3138-123-Q1-N1-C5
ccaaaaaccaccaaatcgcggttccaaattgcaatttctcgagcgaactttgcgagttctagggttcccccactgccatggaccaggccgaattaacctccgaacaggttctgaggagggacatcccatgggagacctacatgtccaccaagctcatctcaggcaccagccttcagctcttaaggcgctacgatcaccggccagagagtcacagagcacagttgctcgatgatgatggtccctcttatgttcgcgtgtttgttcgtgttttgcgtgacattttcaaggaagataccgtggagtatgttttggcactgatagatgaaatgcttgctgcaaacccgaaaagaagaagactggt

SEQ ID NO: 37024 - DNA, 363 bp, Glycine max
  Clone ID: LIB3138-123-Q1-N1-C6
atttatccaagcaggactgaatgaactaatggagtctaaaggtgggaaaaagaagtctagtagtagtagtagtaaatcattgttctacgaagctcccctcggatacagcattgaagacgttagaccaaacggtggaatcaagaaattcagatctgctgcttactccaactgcgctcgcaaaccttcctgatatccatccagattgatagttcattgcatgcaaccatagttttattaggttttttcttctttgttttcaattaggtttttgctgctctccttcaaactccgtctttccgaatcctctctttgtgattgtgttctgttctgcttcctaccgcgatagtttctcttctgaagcat

SEQ ID NO: 37025 - DNA, 368 bp, Glycine max
  unsure at all n locations
  Clone ID: LIB3138-123-Q1-N1-C7
caactccaaacacaaagacatcatcatccatggctgcctccgtctccactgtcggagctgtcaacagagctcttttgaacctgaatggttctggagctggagcttcagctcccagttcagccttctttgggaccagcttgaagaaggttattgcctcaagggtccccaacagcaaggtttccggtggaagcttcaagattgttgctgtagaagagaagaaagagattgaagagacccagcagaccgacaaggacagatggaagggtcttgcctatgatatctcagacgaccaacaagacatcacangaggaaagggtttggttgactcccttttccaagctccacaggatgctggaactcactatgca

SEQ ID NO: 37026 - DNA, 366 bp, Glycine max
  Clone ID: LIB3138-123-Q1-N1-C8
gaaaattgaccttctcagaactaagatcaagggagggcgattcctgaatgatctcctccccagctgctaccaccgtcaaccgtgccggtgccggcatggttgctccattcaccggcctcaaatccatggctggcttgcccacgaggaagaccaacaatgacattacctccattgctagcaacggtggaagagtacaatgcatgcaggtgtggccaccaattggcaagaagaagttcgagactctttcctacttgccagacctcgatgatgcccaattggcaaaggaagtcgaataccttctaaggaaaggatggattccttgctggaattcgagttggagcacggattccatttgagttttcttat

SEQ ID NO: 37027 - DNA, 371 bp, Glycine max
  Clone ID: LIB3138-123-Q1-N1-C9
gcttttgtcagttttctattgaccttctcgggggaggaatcttagtggacaaaactggagattggatcacacttatacaaaattctccaattagtaacttattgagagttgctgcttggaagaaaggctgtttaatggtcaagattgtgatgtctgggaatgcagcagtcaaaaggagtgattgggcctcattggtacaagtgtttttaacaaacagcaacagtacagagcattttgatgcatgtaagttgacaaaatcagaaccacattcctgggaattgatcttcccaatagaggtatgtggtcctaataatggttttgaaatgtggagttcttagtgggcaaatcaaacttcatggcatttgagtttt

SEQ ID NO: 37028 - DNA, 354 bp, Glycine max
  Clone ID: LIB3138-123-Q1-N1-D1
ggaatcccttctggatttccgctcacagttatttgcaatagcatttttaatgagatgctcattagatatagctatgaaaaattactgcgccaggctaaagctccaagtatgtttttacaatccttcaaaaattttgtttctttgtgtgtgtatggtgatgataacttaattagtgttcatgaatatgtcaagccttactttagtggttctaaattgaaaagctttctagctagtcataacatcaccattactgatggtattgacaaaactagtgcaactttgcaatttagaaagttagcagattgtgattttctcaagagaaactttaagcagatgtctaatgttttgtgggtg

SEQ ID NO: 37029 - DNA, 367 bp, Glycine max
  Clone ID: LIB3138-123-Q1-N1-D10
cataaacttattttttctttctcttttgcacttgtttcataaaatgccggaccaagatattttcagttgcattagtgaacctcgtcttgtagccagaaagttcttggccagacctcagcatgagggtgttggagccgttgttagaagaagcatagggagatttgaactcaagtactttgatcctttccttgtcttggatgaattctcagtgactgctcctgctgggtttcctgatcatccacatagaggatttgagacggtcacatacatgttgcagggagctgtaacgcacgaagattttgaaggacataaaggaacaattgaagcttgtgacttgcaatggatgactgcagggagagggttagtt

SEQ ID NO: 37030 - DNA, 322 bp, Glycine max
  Clone ID: LIB3138-123-Q1-N1-D12
gttcttggaagcaccttggaggtaataaaaatggagaagggtgatgctgttttgagtgagatctgcacgagctccaacttgcggttggagaccttccggccgctggaacctcttacatcaaggaagttagagaaatttattttagggggatagagaagatgctcatagcggaaaatatttatttatgtctagtgctaataggggatactcaaatttgcagaaatggttttctccatggggggtgggtgggggagatttttatgtacggatttctgtctaaaatatttttgctgccactgcaattataaaaggtttagttatt

SEQ ID NO: 37031 - DNA, 374 bp, Glycine max
  Clone ID: LIB3138-123-Q1-N1-D2
gtctgggaatgcagcagtcaaaaggagtgattgggcctcattggtacaagtgtttttaacaaacagcaacagtacagagcattttgatgcatgtaagtggacaaaatcagaaccacattcctgggaattgatcttcccaatagaggtatgtggtcctaataatggttttgaaatgtggagttctgagtgggcaaatcaaacttcatggcatttgagtttccttattgacaatcccaaacagtctacagtttttgatattctcttgggaatctctcaagattttgaaattgctggtaatactcttatgccagctttttctgttccacaggctactgccagatcttctgaaaatgcggaatcctctgcatgatctg

SEQ ID NO: 37032 - DNA, 374 bp, Glycine max
  Clone ID: LIB3138-123-Q1-N1-D4
caagcctgaaactttgaagagaatttgcagctaccttcatgtccaaataaaacaagagctgtcagatggtcaaaaatgtatttacattacataatagttagcctttattcattttgttagtcagttttatagattgacacgtgtgattatactaactttcttatacacatatttaagagaagcagagacaagtattgtaatttttcattcaaacaaatttcaaaactttcttctttttttattcacatagatgattttatacggttccatacatgttgcagggagctgttacccaccaatattttgatggacataatggaacaatttgagtctgtgacttgcaatggattactgcagggagagggttagttcac

SEQ ID NO: 37033 - DNA, 376 bp, Glycine max
  Clone ID: LIB3138-123-Q1-N1-D5
ctggggtgttaaatagaaaagaggagtttgagaatggcaacgatcagcgcggttcaggtggagttcctggagtttccagcggtggttacttcaccagcctccggcaagacctatttcctcggcggcgcaggggagagaggattgacgattgaggggaagttcataaagttcacaggcataggagtatacttggaggataaggcggtgccatcactcgccgctaagtggaagggtaaaacttcagaggagttagttcacaccctccacttctacagggatatcatttcagggccgtttgaaaagctaattagagggtcgaagattctgccattggctggcgctgaatactcaaagaaggtgatggaaaactgcgtgg

SEQ ID NO: 37034 - DNA, 365 bp, Glycine max
  Clone ID: LIB3138-123-Q1-N1-D8
atttacccgagcaactctctctctccctctctcttggaagctactgtctaaccattttttttttttactccttttgcttttgtgcggcgccaccaaccctaaactttgacacctccaacgagcaaagaaaggggaaagagatatgagcggaaagaagggatggcggcggtggtgcgagcggcggtgatgaggcggtgcgagtggtggcgtgagcagcggcgaagcgagatagaggaaagggaaaataaagggggctacacggatgttttccggcgacctggactacgattgcgagggttcgtggcggcgctggcagcggtgctttggctaacggatccagagcggcggcgacagatgcaggcgga

SEQ ID NO: 37035 - DNA, 365 bp, Glycine max
  Clone ID: LIB3138-123-Q1-N1-D9
gaaaaattgatgcgtgaaaggacgcacctgctgttggcttgttgttcaaggatggcaatttgtaagaaagatgtttggagagttgaatgtggaatcccttctggatttccgctcacagttatttgcaatagcatttttaatgagatgctcattagatatagctatgaaaaattactgcgccaggctaaagctccaagtatgtttttacaatccttcaaaaattttgtttctttgtgtgtgtatggtgatgataacttaattagtgttcatgaatatgtcaagccttactttagtggttctaaattgaaaagctttctaactagtcataacatcaccattactgatggtattgacaaaactagtgc

SEQ ID NO: 37036 - DNA, 364 bp, Glycine max
  unsure at all n locations
  Clone ID: LIB3138-123-Q1-N1-E1
tgataactatacaacacaagcacgaacactcccttaccaaaacggcacttgtttattgtcgtttagatcccatggatcacacgcctgctgcgcaacgtcgtctcaaagccattcacgcccacctcaccgccaccgccgatgaatctccctcccacctccgatccaatcccaccgccggcgagttcttctccgaacaagggtatagtgttgtactcccagagaaattacaaacaggaaagtggaacgtttacagatctgtacgatctcctctgcagctggtgaccaagtttcctaatcatcctgaaattggtaccctgcacgataattntgtgcgctcagttgacacctttcgagactacaaata

SEQ ID NO: 37037 - DNA, 356 bp, Glycine max
  Clone ID: LIB3138-123-Q1-N1-E10
tttaatttactcaaatcctttaaatcatctaagtcgttcaaaacatacaactctttcaagtcaattatggatgaaatgccggggattgtaggtctttctgaaattgaccttgaagctttgataaagagaaaaagaagatcaccatatgtgaggattgtgagcaagcaaatggttgggattttcatcaccgattgggttcgtcggagcttgcgtaaacaaattcagaatttaaaggtttcaactgttggagttggtgttatgggctatattgacaacaagggatcaatctctgacagcatgtccatacatcagacgtttgtttgactcatatgtactcaccttacgtcaggttaaaa

SEQ ID NO: 37038 - DNA, 374 bp, Glycine max
  Clone ID: LIB3138-123-Q1-N1-E11
tgctgcttggaagaaaggctgtttaatggtcaagattgtgatgtctgggaatgcagcagtcaaaaggagtgattgggcctcattggtacaagtgtttttaacaaacagcaacagtacagagcattttgatgcatgtaagtggacaaaatcagaaccacattcctgggaattgatcttcccaatagaggtatgtggtcctaataatggttttgaaatgtggagttctgagtgggcaaatcaaacttcatggcatttgagtttccttattgacaatcccaaacagtctacagtttttgatattctcttgggaatctctcaagattttgaaattgctggtaatactcttatgccagctttttctgttccacaggcta

SEQ ID NO: 37039 - DNA, 371 bp, Glycine max
  Clone ID: LIB3138-123-Q1-N1-E12
ccattcctcagtccatttcacagcaaactgtttggaatcaaatggcaacagtgagaacaccattgaattttgattctagcaagcagagcttttgtcagttttctattgaccttctcggtggaggaatcttagtggacaaaactggagattggatcacacttatacaaaattctccaattagtaactttttgagagttgctgcttggaagaaaggctgtttaatggtcaagattgtgatgtctgggaatgcagcagtcaaaaggagtgattgggcctcattggtacaagtgtttttaacaaacagcaacagtacagagcattttgatgcatgtaagtggacaaaatcagaaccacattcctgggaattgatc

SEQ ID NO: 37040 - DNA, 363 bp, Glycine max
  Clone ID: LIB3138-123-Q1-N1-E2
cttcatcttgttctatctgtgacgagcatcatggcctcaagagcagtgttattgttggctatgtgtgtgcttccggcgatggttgtggccattcgcccagcaaagaaccctttttgcgtgaagggtcgtgtctactgtgacccttgccgtgctggttttgagacctcagctaccacctacattgctggtgctgagattatgttgcaatgcaagagcagggttagcaacgaggttgtgtacacgaagaaggggtacaccgactcaaccggagcatacacaatgtacgtggatgaggatcacgcagatcagatctgcagtgccaagcttgtaagcagccctcaccctcaatgcaaggaagtcacc

SEQ ID NO: 37041 - DNA, 358 bp, Glycine max
  Clone ID: LIB3138-123-Q1-N1-E3
caactctgttggctgatgggtgtccatatttgtatgcaatggtgcatgatagttcagtgtctacaataccaggtgattttgtcattggtgtcaagttgacaaccataaacaatatgtgtgcatatgggctcaatcctggtatttcaggttctcgtcttttgggcaccattcctcagtccatttcacagcaaactgtttggaatcaaatggcaacagtgagaacaccattgaattttgattctagcaagcagagcttttgtcagttttctattgaccttctcggtggaggaatcttagtggacaaaactggagattggatcacacttatacaaaattctccaattagtaacttgttgag

SEQ ID NO: 37042 - DNA, 372 bp, Glycine max
  Clone ID: LIB3138-123-Q1-N1-E4
gccagattgagtcaaagaatagatcctcaatacaatgaggttcaggctcagatggaaacaaatttgtttaaattgtctcttgatgatgttgaaactcctaaaggttccatgttggatctgaaaatttctcaatctaaaattgcacttcccaagaacacagttggaggaaccattctgcgtagtgatctattggcaaattttttgacagagggcaattttagagcaagtgttgatttgcagcgcactcatcgtattagaggaatgattaaaatggtggccacagttggtattcctgagaatacaggtatatcattggcctgtgctatgaatagttcttttagggggcgcgccagttctgatatttacaccatc

SEQ ID NO: 37043 - DNA, 371 bp, Glycine max
  Clone ID: LIB3138-123-Q1-N1-E5
gaacgacaacatttctcactctttatgttaattaacttacgcttactactatatatcacaatgaacaacactgatgctgccaacggaaagggaaagttcaaaccctacagaaatcgacctgtaaagagacaaggacttcttgagctcttcaggtttctcttaattcttgcatcaggtcctgcctttatgggaggagtcttctctatcttcgaagctctctctgcatttgtcctttgaataattggactcttcgcatggactcgaagacacgctaaactctttatttttgtagcaattgctgagatcgcagcagccattggcagcatcattttgagaggaacattccacgctcagtgcgtttcctttcacca

SEQ ID NO: 37044 - DNA, 221 bp, Glycine max
  Clone ID: LIB3138-123-Q1-N1-E7
agggtgtcttacgttgctcattacgttaatcagccccaagagaaagatttgttggaggggaatttttcctttgatattaaatctcgctcttgattggaaaaaggtttctctaccaaagcaccatttggtagtgggaaaacctctaaatattatattaatggggcctggtcacattctttaaaagaattttcttgaaagggaggttcaggaaaaccccaaaa

SEQ ID NO: 37045 - DNA, 363 bp, Glycine max
  Clone ID: LIB3138-123-Q1-N1-E8
cgacgatggcaaatatgaacacgaacagcaactccaaagaagaaagcaaaaaaatggatgaaagagaggcgatacccttgctcaccccatacaagatgggaaattttaatctatctcacaggattgtgttggcaccgttatcacgatcgaggtcttacaacttcatccctcagccgcatgctgctctatattattctcaaagaacaactaagggtggctttttgattggggaagcctccggtgtgtctgatacggcacagggataccctaatacacctggcatctggacaagagaacagctggaagcttggaaacctattgtgagcgctgttcatgaaaaggggggtattttcttttgtcaac

SEQ ID NO: 37046 - DNA, 364 bp, Glycine max
  unsure at all n locations
  Clone ID: LIB3138-123-Q1-N1-E9
gcaaaaagtagaaggagggaagaagaacgctctcatcactttattcatttcatttttggaccttacggagagcccctttcttgtcccttccctctctcgacaccactatttaattctaactttctgctctttatctctttcgccccgaatgtggctcgatttttatttccaccaccaccgaaccgtcgaaaaatacctacttttttccttcctcggccttttggtccctcttccggccttgtggttaaagcgccgccccgatgatgggaagactccagacgacaagcgtagaaagcctcctcctttctccagtgtggtgcgtgacgtgatgaanttacaatcactcgggcatttgctggagcca

SEQ ID NO: 37047 - DNA, 368 bp, Glycine max
  Clone ID: LIB3138-123-Q1-N1-F1
ggcagcttggtctgggttccagaatacgtatggtttccactcctcatcttgttccttgcattgattcctcttattatgttaaagatagatctgctacactggctcgaggaaacatgggttcagagggacagacttttagaattcctggaagttacataaagagaattgcttgtggaggtcgacatagtgcagtaattacagatgctggagccttgcttacttttggttggggactttatggacagtgtgggcaaggaattaccgatgatgaactaagcccaacttgtgtatcttccctattgggtatccacatagagggaattgctgcaggactgtggcatacagtctgtacatctgctgatggtgat

SEQ ID NO: 37048 - DNA, 245 bp, Glycine max
  Clone ID: LIB3138-123-Q1-N1-F10
attgcttcccttctaaaaaaaaaaaaaaaaaaaaagaaaaaaaaaaaaaaaaaaagaaaaaaaaaaaaaaaaaaaaaaaaaaaaaaaaaaaaaaaaaaaaaaaaaaaaaaaaaaaaaaaataaaaaataaataaacaaaaggattacgaacaaaactagggaaaaggtaagaaaaatgaaaaaaatatactatagttgggcgctgtcctaattattgtacttggccgcccgataataataattaa

SEQ ID NO: 37049 - DNA, 352 bp, Glycine max
  Clone ID: LIB3138-123-Q1-N1-F11
gtataatgctggtgataaatcacagctaggggtagatcgagttatttggcatgtgacctgtgttagcatggggaatccacactgtgtaactttcagtagagaaggaagccagaatttgcttgttgatgaattgaagctagcagaaattgggccaaaatttgaacatcatgaggggtttcctgcacgaactaacacagagtttgtgcaagtattatctaactctcacttgaaaatgcgtgtttgggagcggggagcaagagcaaccctagcctgtggaactggagcttgtgctactgttgttgcaacagatcttgagggtcgtgctgggaagaattgcacggttgatctacct

SEQ ID NO: 37050 - DNA, 100 bp, Glycine max
  Clone ID: LIB3138-123-Q1-N1-F12
gaaattaggcatgaccctcttgttgagtatgctctgcctatttgaaaatttccacacctcttttaattgtcgtaatgatgtgtgaagtgtgtgttatttt

SEQ ID NO: 37051 - DNA, 360 bp, Glycine max
  Clone ID: LIB3138-123-Q1-N1-F2
gatgaatcaggtccccaaagagactgtggtaaatctagtttaaaagaaggttataagagtgaacagaaggagtcaaatgatcaaaaccttccatgggaagagaaaagaaaacatgatgatactgagactgggaagggtaaagactggaaaactagacaagcaagcgagcagtgtggtattgaagacaaagaatcttctggaaagaaactaaagttgtttgatcttgacaaggatgacaattatagaaaagatgatgaaagtaagacttcaagttcaaagctttctcacgagagcaaggcagatgtaagggctgccaagaccagtggctttgatggtgacaatgacctagatgctgcgaaa

SEQ ID NO: 37052 - DNA, 368 bp, Glycine max
  Clone ID: LIB3138-123-Q1-N1-F3
cttttgtcagttttctattgaccttctcggtggaggaatcttagtggacaaaactggagattggatcacacttatacaaaattctccaattagtaacttgttgagagttgctgcttggaagaaaggctgtttaatggtcaagattgtgatgtctgggaatgcagcagtcaaaaggagtgattgggcctcattggtacaagtgtttttaacaaacagcaacagtacagagcattttgatgcatgtaagtggacaaaatcagaaccacattcctgggaattgatcttcccaatagaggtatgtggtcctaataatggttttgaaatgtggagttctgagtgggcaaatcaaacttcatggcatttgagtt

SEQ ID NO: 37053 - DNA, 378 bp, Glycine max
  unsure at all n locations
  Clone ID: LIB3138-123-Q1-N1-F4
tgcgaatctcttgaatgaagctgctatattagctggtcgccggggaaagacaggtatttcatctaaagaaatcgatgattctattgataggattgtggctggaatggaaggaacagttatgacagatgggaagagcaaaagcttagtggcatatcatgaagttgggcatgctatttgtggaactttgactcctggtcatgatgctgtgcaaaaggtaacactagttcctcgtggtcaagctcggggtcttacatggttcattcctaatgatgatccaactctgatctccaaacaacaactctntgcaagaattgttggaggactaggtggaagggctgcagaagaaattatttttggtgagcctgaagttacaactgg

SEQ ID NO: 37054 - DNA, 261 bp, Glycine max
  Clone ID: LIB3138-123-Q1-N1-F5
aaaaaatttaattaaaaaaaaaaaaaaaaaaaaaaagaaaataaaaaaaaaaaaaaaaaaaaaaaaaaaaaaaataataaaaaaaaaaaaaaaaaaaaaaaaaaaaaaaaaaaaagggggcggcccccacttattaacctcttcaacccggaaattaattccgaaccggtccctgcaggcttcccacttttccttttatggagccgttttaaaccttggcgtaataatggccatagctttttcctgtgtaaaatttttttc

SEQ ID NO: 37055 - DNA, 209 bp, Glycine max
  Clone ID: LIB3138-123-Q1-N1-F6
aattactgcgccaggctaaagctccaagtatgtttttacaatccttcaaaaattttgtttctttgtgtgtgtatggtgatgataacttaattagtgttcatgaatatgtcaagccttactttagtggttctaaattgaaaagctttctagctagtcataacatcaccattactgatggtattgacaaaactagtgcaactttgcaattt

SEQ ID NO: 37056 - DNA, 365 bp, Glycine max
  Clone ID: LIB3138-123-Q1-N1-F7
gaaaaagttgtattgaaattttcacaagaggaatttcttacagcttggtcaactcaggtgcgtcctgcaacaactctgttggctgatgggtgtccatatttgtatgcaatggtgcatgatagttcagtgtctacaataccaggtgattttgtcattggtgtcaagttgacaaccataaacaatatgtgtgcatatgggctcaatcctggtatttcaggttctcgtcttttgggcaccattcctcagtccatttcacagcaaactgtttggaatcaaatggcaacagtgagaacaccattgaattttgattctagcaagcagagcttttgtcagttttctattgaccttctcggtggaggaatctt

SEQ ID NO: 37057 - DNA, 363 bp, Glycine max
  Clone ID: LIB3138-123-Q1-N1-F8
caatgggcacatgcacaaagaacattgcatggattacaaccacctgacaccaagatgttcaccgagcgcccacatttcaacgaactcaaccaaatggctgaagaagctaaaaggagagctgaaattgcacggctgcgagagctgcatacactgaagggtcatgtagaatcagttttgaaattgaagggtattgatgtagacacaattcagcaagcatacacagtctgaatatgcttttatatatatttgcatactgatacaatccaatggtgctaactatattgaagaggaatagaagaaatataatgttgtttactcactccagttgagttcaatgtcctctcaccgttttgagcacttaaa

SEQ ID NO: 37058 - DNA, 365 bp, Glycine max
  Clone ID: LIB3138-123-Q1-N1-F9
gtctttatcctgtaagtcaattaccttcagaagctgtcgttgtaaatgttacatgtggtagtggacgtggtggtttacccaccactgcttggattagttctgcagttaacaatcgctcctcagatatcaacaaaaggattcgcacagcacttgggaaaggtaagaaaattgtttttcttactagagttgatccttttccagtagctttactggctgttctttttggcgttaagaatgaaattctgagttctaacgccactaatcctatgctgacgcgacttcttgagaactgtaagagtctcaaatatctggttgatgagtgtccttttgcatttgtgaactagtatgtagtattttattcactt

SEQ ID NO: 37059 - DNA, 371 bp, Glycine max
  Clone ID: LIB3138-123-Q1-N1-G1
gcattctcaacacctcctccctcactcactcatcaatggcatcaacaatatcagcaatggccatgatcaacgccaaatgcgtcaacccaaagttccccaaccccaccaagctcgtaccatcaaaaccttcccttcaggtcaaccttccaaagggcctaatagcctcacccgaaaacaccaaactttccactgcgacagcaatcgcaggagcaatattcacaaccctcggaacctgcgacgccgctttcgccgttcaacaaatagccgacatagcagaaggcgacaaccgcggtctggcactgttgctgcccataattcctgcaatagggtgggttctgttcaacattctgcagccggcgctgaaccaactg

SEQ ID NO: 37060 - DNA, 371 bp, Glycine max
  Clone ID: LIB3138-123-Q1-N1-G10
tggagattgcatcacacttatacaaaattctgcaattagtaacttattgagagttgctgcttggaagaaaggctggttaatggtcaagattgtgatgtctgggaatgcagcagtcaaaaggagtgattgcgcctcattggtacaagtgtttttaacaaacagcaacagtacagagcattttgatgcatgtaagtggacaaaatcagaaccacattcctgggaattgatcttcccaatagaggtatgtggtcctaataatggttttgaaatgtggagttctgagtgggcaaatcaaacttcatggcatttgagtttccttattgacaatgccaaacagtctacagattttgatattctcttgggaatctctc

SEQ ID NO: 37061 - DNA, 371 bp, Glycine max
  Clone ID: LIB3138-123-Q1-N1-G11
gatcgatcaccctctttcataatattcccagctggtcccccaaaaatcaatcaaatggcggcgaaacgattttttgatgattctgatcaagacaacaataataagccaccaggcgataaacggatgagaactacaccaagaccttcttttgcttcggtaataggagaagtggtgatggtgaaaaacttgcagaaccttttctcaggcttggagcccttgcttagaagagtggtgaatgaagagatggagagagtgatgaggcattttagtgtgccacgttcaatattaagtaggtccccttcgttgaggatagaagcagcatcaatggagcaagaatcaaagtatgaactggtgttcagcaagaagctatc

SEQ ID NO: 37062 - DNA, 384 bp, Glycine max
  Clone ID: LIB3138-123-Q1-N1-G12
aataaaaaaaaaaaaaaaaaaaaaaaaaaaaaggaaagaaaaaaaaaaaaaaaaaaaaaaaaaaaaaaaaaaaaaaaaaaaaaaaaaaaataaaaaaaaaaaaaaaaaaaaaaaaaaaaaaaaaaaaaaataaggggggcccgccacatcttgggttggttcccccggaaattaattcgggccgggtccctgaggggtcccaacttttctttatttggggccttttaaaacctggggaatacaagggatatagtgttttcctggggaaaattgttttccgttcaaaattccacaaaaaaaacaccccggaggcttaagtggaaaagccgggggggcctaaggggggacctacctcactttaatggggtggccctccctgcccct

SEQ ID NO: 37063 - DNA, 370 bp, Glycine max
  Clone ID: LIB3138-123-Q1-N1-G2
taaaaatgcctacccgcttctccaacacccgcaagcaccgcggccacgtctcggccggtcacggtcgtgtcggcaagcacaggaagcatcccggtggtcgtggtcttgccggtggtctgaggcaccaccgatcgaactttgacaagttccaccctggttacttcggaaagctcggtatgcgccactaccacttgctgcgcaaccagtactaccgccccaccatcaacatcgacaagctcatctccctgcccgaggcccaggtcgaggcccccgagggctcggtccccgtcattgacctgcagcacctcggcaagttcaagctgttgggcaagggccgcatcgacaagccgttcatcgtcaagacccgctt

SEQ ID NO: 37064 - DNA, 342 bp, Glycine max
  Clone ID: LIB3138-123-Q1-N1-G4
atcaaacctcttctttcaggtccaattcactcgcttattcttttctttccatacacatgcagacaataagttcgaacaagttcaggactggcatggacttctttcaccgcgcgaaggcggtgcgcctccgcagccaccacgacaagtacctcctcgcggaggacgacgaggattcggtgacgcaggaccgcaaaggctcctcgaaaagcgcgcggtggacggtagaatacgtggctgaatacgataacataattcgcctgaagagctgttacggcaagtacctcaccgccttcaaccaccgcttcctcttgggcatgaccggccaccaggtcctccagacgc

SEQ ID NO: 37065 - DNA, 374 bp, Glycine max
  unsure at all n locations
  Clone ID: LIB3138-123-Q1-N1-G5
ggttaccaatttttgtgaattgtctttatcctgtaagtcaattaccttcagaagctgtcgttgtaaatgttacatgtggtagtggacgtggtggtttacccaccactgcttggattagttctgcagttaacaatcgctcctcagatatcaacaaaaggattcgcacagcacttgngaaaggtaagaaaattgtttttcttactagagttgatccttttccagtagctttactggctgttctttttggcgttaagaatgaaattctgagttctaacgccactaatcctatgctgacgcgacttcttgagaactgtaagagtctcaaatatctggttgatgagtgtccttttgcatttgtgaactagtatgtagta

SEQ ID NO: 37066 - DNA, 359 bp, Glycine max
  Clone ID: LIB3138-123-Q1-N1-G6
gttttgtctgtcacgctctttctctctctccgcttcacttttccgtaataaacctttcaaaagcgaaaaccgtttctcgttttgtttttggaccttatctttattcttaggttcgattctgcgtacgttgggaggaggaacagacacacatgaaggattcgaattcgaattcggatctgtttgacccggtcatggcgatggagtccgagtggtctcgcggcggcggcggcacctccgacgccgatttcgccttcgccttcaacgacagcaacttctccgacagggttctccggatcgagattatgaacgaccccgtcgacgcccgccccgattccgacgcctgcgccaccattgccgac

SEQ ID NO: 37067 - DNA, 366 bp, Glycine max
  Clone ID: LIB3138-123-Q1-N1-G9
taagacgcgctgcttcactattctccctatggagtttaatcttgtggtccgtcaaaagtttttaaattttgtgaggttcattatgaagaaaagggacaagcttagttgtcaagttggaatcaacccatactccatggaatggactggtttggccaatagattactgagtaagggcaatgatattctgtgttgcgattatgctagttttgatggtttgattaccaagcaagttatgagcaagatggcagaaatgataaacagtctttgtggtggtgatgaaaaattgatgcgtgaaaggacgcacctgctgttggcttgttgttcaaagatggcaatttgtaagaaagatgtttgagagttgaatgt

SEQ ID NO: 37068 - DNA, 347 bp, Glycine max
  Clone ID: LIB3138-123-Q1-N1-H10
ctcctgtgaatcagacctctttcagtgttctccatggggttgttggtcttcgtcaacacattccaaattgcacccaaaaaaagcttttgtttctcgatggatagaaatgcaaaaagaagggttagcaaatactagtttgaactcttatggaatttatgcttatgacacagtttgggcagttgcacgtgcaattgatatattcatcaaagtacacaatactattaccttctcgtttcctgataactataacttatctcatatggtaggaattggtattcagcttgacaagctcaaaatctttgctggtggatctgatcttgtcgccattttattccaatcaaattttc

SEQ ID NO: 37069 - DNA, 384 bp, Glycine max
  Clone ID: LIB3138-123-Q1-N1-H12
gtaaaggtgacagaagatctgataggtcagtagtaagtaatgatagcacaaaatctgattctgcattagatgatcatgaagtcgctgaggttgacattccatgggaggaaatcacgctcggtgagcgtattggacttgggtcgtatggggaggtgtaccatggtgaatggcatggaactgaaattgctgtaaagaggtttctagatcaagatatatctggtgaatcacttgaagaatttaaaactgaggtcagaataatgaaaagattgaggcatccaaatgttgttctcttcatgggagctgtaactcgacctccaaatctttcaattgttactgaatttcttcccagaggaagtttgtatagattacttcacagaccaaaca

SEQ ID NO: 37070 - DNA, 374 bp, Glycine max
  Clone ID: LIB3138-123-Q1-N1-H2
aacccacgttctctaacgcgcttctccttcaaagttcaaattcctatacatttgcgtaatcgcttctcaaatctcaacaaaagtattcccaaaaaaccctaattattattattaaacatgaggccgattctgatgaaaggccacgagaggccactgacgttcctcaagtacaacagggacggcgatctccttttctcctgcgccaaggaccacaaccccaccgtctggttcgccgacaacggcgaacgcctcggcacctaccgcggccacaacggcgccgtttggtgctgcgacgtctcaagagattcgggtcggctcataacgggaagtgcggatcagaccgccaagctatggaacgtgcagaccggtcagca

SEQ ID NO: 37071 - DNA, 380 bp, Glycine max
  Clone ID: LIB3138-123-Q1-N1-H4
aaacaatatgtgtgcatatgggctcaatcctggtatttcaggttctcgtcttttgggcaccattcctcagtccatttcacagcaaactgtttggaatcaaatggcaacagtgagaacaccattgaattttgattctagcaagcagagcttttgtcagttttctattgaccttctcggtggaggaatcttagtggacaaaactggagattggatcacacttatacaaaattctccaattagtaacttgttgagagttgctgcttggaagaaaggctgtttaatggtcaagattgtgatgtctgggaatgcagcagtcaaaaggagtgattgggcctcattggtacaagtgtttttaacaaacagcaacagtacagagcatt

SEQ ID NO: 37072 - DNA, 358 bp, Glycine max
  Clone ID: LIB3138-123-Q1-N1-H5
gctgggcataaacctatattgctggaagcaagagacgttctaggtggaaaggttgctgcatggaaagacaaggatggagactggtatgagacaggtctacacatcttctttggggcttaccctaatgtacagaacttatttggagaacttggcattaatgatcggttacaatggaaggagcattctatgatttttgctatgccaaataagcctggagagtttagtcgatttgatttttccgatgtccttcccgccccattaaatggaatatgggcaatattgaggaacaatgagatgctgacctggccagagaaagtcaaatttgcaattgggcttctaccagctatgcttggtggac

SEQ ID NO: 37073 - DNA, 382 bp, Glycine max
  Clone ID: LIB3138-123-Q1-N1-H6
gtaataatctggaaatgcaagaagcttatcttgtcaatctcgtaaatgtgttacgagaattgtatttgcacagtccagaggaagctcgccaattgagaaggaaagctctctctcgtattgaatggctgcaaaaagctgatgtgcctaccatagcacagattgaagagttccattcgatgcagaggatgatgaatgctcctgattcaaatgataatattgatttactgttgagcattgatttgttgggtttacaaggagcaggtaaagcttttccaaacaaaattgtttttgatgataagcttgtgttggctaacacacaagaattctttgatggaaattttccagtggattcttggttaccaatttttgtgaattgtcttta

SEQ ID NO: 37074 - DNA, 368 bp, Glycine max
  Clone ID: LIB3138-123-Q1-N1-H7
gaaactttaagcagatgtctaatgttttgtgggtggctcctgaggacaaggcgagtttatggtcacaacttcattatgtttcgtgtaataatctggaaatgcaagaagcttatcttgtcaatctcgtaaatgtgttacgagaattgtatttgcacagtccagaggaagctcgccaattgagaaggaaagctctctctcgtattgaatggctgcaaaaagctgatgtgcctaccatagcacagattgaagagttccattcgatgcagaggatgatgaatgctcctgattcaaatgataatattgatttactgttgagcattgatttgttgggtttacaaggagcaggtaaagcttttcaaacaaaattg

SEQ ID NO: 37075 - DNA, 356 bp, Glycine max
  Clone ID: LIB3138-123-Q1-N1-H9
gagagattcaggaaaaagttgtattgaaattttcacaagaggaatttcttacagcttggtcaactcaggtgcgtcctgcaacaactctgttggctgatgggtgtccatatttgtatgcaatggtgcatgatagttcagtgtctacaataccaggtgattttgtcattggtgtcaagttgacaaccataaacaatatgtgtgcatatgggctcaatcctggtatttcaggttctcgtcttttgggcaccattcctcagtccatttcacagcaaactgtttggaatcaaatggcaacagtgagaacaccattgaattttgattctagcaagcagagcttttgtcagttttctattgac

SEQ ID NO: 37076 - DNA, 332 bp, Glycine max
  Clone ID: LIB3138-124-Q1-N1-A1
caaattctctgtgttgtgttgtgtacttgtgttaattgtgttggggttgtaggaaatttaagtgaagagagaatgatgatgaagtctgctatgtgtgcattggtgcttgtggcactggttgtggttgaagtggggcccatggctgaggctgcggtgacttgcaacccaacacagttgactccttgtcttccggcaattaattcaagttctgcaccttcgagtgcttgttgccagaagctgaaggagcaaaagccatgcttctgtggctacctcaaaaaccctagcttgaagcaagatgttaactctcctaatgccaaaaaaaccggtagttc

SEQ ID NO: 37077 - DNA, 358 bp, Glycine max
  Clone ID: LIB3138-124-Q1-N1-A10
ggacagcggagttatcttttctactccagattttactggtgactggtgcaaagccatcggttctcttgttcgtggtgcggtcgcctcgtcttctttcgacgatttccacaagcgctctgccgatatcattcattctgctgttttcggtaagggccaagacaagttgatcttctctggaaacaacttggtagtgaccaacatcgatgttcaatccgtcgagccagttgaccaacgtactctcgactcactacagaaatccgtccagctcgctatcgagatcaccaccaagtctcaggaagcagctgctcgtcaagaggccgagcgtttggagcaagaagcacgcggaagattagagcga

SEQ ID NO: 37078 - DNA, 326 bp, Glycine max
  Clone ID: LIB3138-124-Q1-N1-A11
aaaatgaagaaacaattcgcgagttcattactgaggaaattaagaaccctttgcacgtcgccatcattcttatagaatgattttgagtcagtttatgaaaatgtagaatgatgggtaatcatttgaatcagtttattacaacattcaaggaaagtatgtctttcgagtaaaaaaaaaaaaacaacaagaaagggcccaacatcactagttaaattcgtcgagccatgtgtccaactgtgctcttgactcaatacaaaaattcacgtcaacttatttttagaaataatagggggggggcgcgaatatgggtgcttgttaacccggga

SEQ ID NO: 37079 - DNA, 367 bp, Glycine max
  Clone ID: LIB3138-124-Q1-N1-A12
caagctggtgcagtttggagagattcaggaaaaagttgtattgaaattttcacaagaggaatttcttacagcttggtcaactcaggtgcgtcctgcaacaactctgttggctgatgggtgtccatatttgtatgcaatggtgcatgatagttcagtgtctacaataccaggtgattttgtcattggtgtcaagttgacaaccataaacaatatgtgtgcatatgggctcaatcctggtatttcaggttctcgtcttttgggcaccattcctcagtccatttcacagcaaactgtttggaatcaaatggcaacagtgagaacaccattgaattttgattctagcaagcagagcttttgtcagttttct

SEQ ID NO: 37080 - DNA, 357 bp, Glycine max
  unsure at all n locations
  Clone ID: LIB3138-124-Q1-N1-A2
caattttgaggcttttccccacaagctggtgcagtttggagagagtcaggaaaaagttgtattgaaattttcacaagaggaatttcttacagcttggtcaactcaggtgcgtcctgcaacaactctgttggctgatgggtgtccatatttgtatgcaatggtgcatgatagttcagtgtctacaataccaggtgattttgtcattggtgtcaagttgacaaccataaacaatatgtgtgcatatgggctcaatcctggtatttcaagttctcgtcttttgggcaccattcctcantccatttcacagcaaactgtttggaatcaaatggcaacagtgagaacaccattgaattttga

SEQ ID NO: 37081 - DNA, 371 bp, Glycine max
  Clone ID: LIB3138-124-Q1-N1-A3
gtaaatgttacatgtggtagtggacgtggtggtttacccaccactgcttggattagttctgcagttaacaatcgctcctcagatatcaacaaaaggattcgcacagcacttgggaaaggtaagaaaattgtttttcttactagagttgatccttttccagtagctttactggctgttctttttggcgttaagaatgaaattctgagttctaacgccactaatcctatgctgacgcgacttcttgagaactgtaagagtctcaaatatctggttgatgagtgtccttttgcatttgtgaactagtatgtagtattttattcacttaaataaagcgcattactatgtgcaatgagtgtgtttaaatataaaaa

SEQ ID NO: 37082 - DNA, 299 bp, Glycine max
  Clone ID: LIB3138-124-Q1-N1-A4
ctcgagccgattcggctcgagaaaaaaaaaaaaaagggaaaaaaaaaaaaaaaaaaaaaaaaaaaaaaaaaaaaaaaaaaaaaaaaaaaaaaaaaaaaaaaaaaaaaaaaaaaaaaaaaaaaaaaaaaaaaaaaaaaaaaaaaaaaaaaaaaaaaaaaaaaaaaaaagggaaaaaaaaaaaaaaaaaaaggggggggccacccaataaaaattccccacaccggaaaaaaaattaagcacggaccccaaagggctgacaagtttaacaattgaggggacataaaaaaatcggggaaaaa

SEQ ID NO: 37083 - DNA, 359 bp, Glycine max
  Clone ID: LIB3138-124-Q1-N1-A5
gcaagatcgtcaagtccaccaccgagaagcccgctctcaagggcgaccaggtcctcctcaaggtcactgcttccggtctctgcggcactgacctccactacaaccatgccgacatgggtatcggccacgagggtgtcggtatcgtcgaggagctcggccccaactgcaccatcctcaagaagggtgaccgcgtcggctggggttacgagcacgactcttgcggcagctgccaggagtgcctccgcggcaacgagaccttctgcgccaagcgtgtcatgtacggcttcgccgacctcgaccagggcagcatggctgagggcgccgtctggcgcgagtctttcctcttcaagatccccgac

SEQ ID NO: 37084 - DNA, 353 bp, Glycine max
  Clone ID: LIB3138-124-Q1-N1-A6
ctgtgatgtctgcaatcatctctctctgtttctttgtgttgctaatcatgacaaacttcttccaggatggagtcattttgcgcaattcacaatagctgtggtcaataaagatccaaagaaatcaaaatattctgatacattacaccgattttggaagaaggagcatgactggggttggaaaaaatttatggagctctcaaaagtgtatgatggctttgttgacgcatctgacaatctgataataaaagctcaagttcaagtcattaaggaaaaagctgacaggccttttcgttgcctggattgtcagtataagagagaacttgttagaatatatttgacaaatgtagaacaaa

SEQ ID NO: 37085 - DNA, 317 bp, Glycine max
  Clone ID: LIB3138-124-Q1-N1-A7
gtctgggaatgcagcagtcaaaaggagtgattgggcgcgcattggtacaagtgtttttaacaaacagcaacagtacagagcattttgatgcatgtaagtggacaaaatcagaaccacattcctgggaattgatcttcccaatagaggtatgtggtcctaataatggttttgaaatgtggagttctgagtgggcaaatcaaacttcatggcatttgagtttccttattgacaatcccaaacagtctacagtttttgatattctcttgggaatctctcaagattttgaaattgctggtaatactcttatgccagctttt

SEQ ID NO: 37086 - DNA, 317 bp, Glycine max
  Clone ID: LIB3138-124-Q1-N1-A8
aaagcagaacgctccgaccttctccgcgccctagaagcttccatgggttcccctttcagctcggagcctctctccccaaaccctaactctctcatcatcgtcatcagcggtcccagcggcgtcggcaaggacgccctcatcgcgcgcctccgcgacaactcccgcctcgccctccacttcgtcgtcaccgtcaccacccgcccccgccgccccgccgaggtcgacgggaaagactacatcttcgtatccaaagaagagtttctcgggatggtggagcgggaggagctgctggagtatgcactggtctacggtgacta

SEQ ID NO: 37087 - DNA, 353 bp, Glycine max
  Clone ID: LIB3138-124-Q1-N1-A9
gcagcatccaaatcttgtgaaactttatggctgttggattgaaggaaaccagttgctgctagtatatgagtacatggagaacaatagtcttgctcgtgcactttttggtaaagaaaatgagaggatgcaattggactggcccagaagaatgaaaatttgtgtggggattgcaaagggattagcttatcttcatgaggagtcaaggttgaaaattgtgcacagggatattaaggcaaccaatgtcttacttgataaacatctgcatgccaagatctctgactttggtttagccaaacttgatgaagaagagaacactcatatcagcacaaggatagccgggacaattgggtaca

SEQ ID NO: 37088 - DNA, 317 bp, Glycine max
  Clone ID: LIB3138-124-Q1-N1-B1
actacttctctgcctttaatcttccttcttatggaaccaaactgtaacaacaacccaaagatgttacagaaaaagtggctttctactgctttgaatgtgagaagccaacgatcaggcagtgaaaccatagtctttgctcatggctatggaacagaccagtccatctgggagaagatcactccctcctttgctgaaaactaccgggttgtgctgtttgattggcccttttctggagctgtgaacgatccaagcctctatgaccctttgaagtatacctccttggaagcttttgcagatgagttgatcactcttatgga

SEQ ID NO: 37089 - DNA, 347 bp, Glycine max
  unsure at all n locations
  Clone ID: LIB3138-124-Q1-N1-B10
ttcggggtttccaaattagatgagttgttgttcttgctctgccatggccttccttctcaaagcaccttcctttctccctcctcttaaccaaaagttgaattatacccataaaagcttttctccataaacctgcaatccaaattttaccatgctagtgtcagaaatgggagatggaacgttcctagcatgacaataaaagctcangcagctgttgaaggggatgtactacttgacgaagaatccatctgtgtcaatgaagaaagtgattacggggtcgtttgtatgcaccatgttggaattttatgtgaaaacctagaaagatcacttgacttttatcaaaatgttct

SEQ ID NO: 37090 - DNA, 365 bp, Glycine max
  Clone ID: LIB3138-124-Q1-N1-B11
cactgcgactcttgcactttttcttttctgcttcttgtcttggggctacttcaaaacacactgtgaaaatatgggcttctcctcctttctgggtcgcgtcctctttgcttccctcttcatcctctcagcatggcagatgtttaatgaatttgatgacaatggtggacccattgtaaaggagttgattcccaagctcactgttgtgaggagaaatttatcctccaagctcggggtagcgataccagatattaatgttcggacagtcattgcctctaccatgttactaaaaggggttggaggagttctatttgtgcttggcagtacatttggatcttatcttttgctcttgtatctggggatttcta

SEQ ID NO: 37091 - DNA, 366 bp, Glycine max
  Clone ID: LIB3138-124-Q1-N1-B2
ctcgtattgaatggctgcaaaaagctgatgtgcctaccatagcgcacattgaagagttccattcgatgcagaggatgatgaatgctcctgattcaaatgataatattgatttactgttgagcattgatttgttgggtttacaaggagcaggtaaagctcttccaaacaaaattgtttctgatgataagcttgtgttggctaacacacacgaattctttgatggaaattttccagaggattcttggttaccaattttagtgaattgactttatcctgcaagtcaattaccttcagaagctgttggtgtaaatgttacatgtggtagtggacgtggtggcttacccaccaatgcttggattacttgtg

SEQ ID NO: 37092 - DNA, 307 bp, Glycine max
  Clone ID: LIB3138-124-Q1-N1-B3
ggaatactaaaggatgtagagcttcttcggcagataactgaagcttcgcgtggagcaattacttcctttgtgcagaggactactaataagaagggtcaagttgttgacgtagctgataaacttacctcaatccttggatttggcataaatgaaccatgggtcgagtacttgtcaaacaccaaattttaccgagctgatagggaaaaactcagaaccttgttcgatttcttgggagaatgtttgaagttggttgtagccgataatgaattgggaagtttgaaacaagccttggaaggtaagtatgtgg

SEQ ID NO: 37093 - DNA, 358 bp, Glycine max
  Clone ID: LIB3138-124-Q1-N1-B4
ggaagctcgccaattgagaaggaaagctctctctcgtattgaatggctgcaaaaagctgatgtgcctaccatagcacagattgaagagttccattcgatgcagaggatgatgaatgctcctgattcaaatgataatattgatttactgttgagcattgatttgttgggtttacaaggagcaggtaaagcttttccaaacaaaattgtttttgatgataagcttgtgttggctaacacacaagaattctttgatggaaattttccagtggattcttggttaccaatttttgtgaattgtctttatcctgtaagtcaattaccttcagaagctgtcgttgtaaatgttacatgtggtagt

SEQ ID NO: 37094 - DNA, 349 bp, Glycine max
  Clone ID: LIB3138-124-Q1-N1-B5
agctactaagccattggggtggcatatctgcccaaaaagtggtgcattttgaaaacctcagcaaacctcaatagtgatcaagtggcaccaagtgtgtcttatgcttgtcaaaatgcagattgcacaagtcttggatatcaaacttcatgtggtggtttagatattcgtggtaatatttcttatgcattcaatagctacttccaagtgaatgaccagattgacagtgcatgcaaattccctggcctttctgttgtcactgacaaagatccttcaactggagattgcaagttcaaaatcatgattcagacagattctgctggtctacatgggaatgggagaatttggtctc

SEQ ID NO: 37095 - DNA, 290 bp, Glycine max
  Clone ID: LIB3138-124-Q1-N1-B6
gtcagagtacacactcgcactttgacaaggctaaacaggggtttgggggtggcatatgcacgtttgcgcaaacacagcgcgctctcatcctttggtaacgcgcgttccaaatggtgagggggatttggcgaacctggatctaacttgcccgctcgaacttgtggcttggatatacctggttcgaggaggcattacttgttgacaagtgcgcagtcgtgaagaccacctctttgttctgcctcaccctgctttccaccaaaacacacgccattctagctgggtttctcatt

SEQ ID NO: 37096 - DNA, 362 bp, Glycine max
  Clone ID: LIB3138-124-Q1-N1-B7
gcttcttggaatgagccttcacaccacaaaagacagcgaagtagtaatgatgagttactttctgattctcaggatggagaactaggaaatcaagttcaaacactttcgcatcatttgagtttgccaagaacgtcgtcggatatgtttgctatggatagtttgcttcagttttcagattctgttccttgtaaaatcagagctaagagaggctttgctacacatcctcgaagcattgccgaaagggtgagaagaagtcggatcagtgaacgaataagaaaattgcaagagcttgttccaaacatggacaagcaaactagcacagcagagatgttggacttggcttgagactacataaaagatct

SEQ ID NO: 37097 - DNA, 356 bp, Glycine max
  Clone ID: LIB3138-124-Q1-N1-B8
caacaactctgttggctgatgggtgtccatatttgtatgcaatggtgcatgatagttcagtgtctacaataccaggtgattttgtcattggtgtcaagttgacaaccataaacaatatgtgtgcatatgggctcaatcctggtatttcaggttctcgtcttttgggcaccattcctcagtccatttcacagcaaactgtttggaatcaaatggcaacagtgagaacaccattgaattttgattctagcaagcagagcttttgtcagttttctattgaccttctcggtggaggaatcttagtggacaaaactggagattggatcacacttatacaaaattctccaattagtaactta

SEQ ID NO: 37098 - DNA, 192 bp, Glycine max
  Clone ID: LIB3138-124-Q1-N1-B9
cgacagtgaaccttaccgtgcgcattccaacaccatggctgaatacggcctgaacgggattaacaatttgaactaaatccacatctagatcgactacagaaataacgtgcccatggactttaatgcaacctaggatgggggcacacgtggcataagctgcgctgcggacattaactgacagagccctagtga

SEQ ID NO: 37099 - DNA, 228 bp, Glycine max
  Clone ID: LIB3138-124-Q1-N1-C1
ggtaatactcttatgccagctttttctgttccacaggctactgccagattttatgagaatgcggaatcctctgcatgatctggaattagtgttatctttcgcttgttcgtttgtctaattcaataaaggaaattaggcatgaccctcttgttgagtatgctctgcctatttgaaaatttccacacctatcctaattgacgtaatgatgtgtgaagtgtgtgttatttt

SEQ ID NO: 37100 - DNA, 305 bp, Glycine max
  Clone ID: LIB3138-124-Q1-N1-C10
cttcattatgtttcgtgtaataatctggaaatgcaagaagcttatcttgtcaacctcgtaaatgtgttacgagaattgtatttgcacagtccagaggaagctcgccaattgagaaggaaagctctctctcgtattgaatggctgcaaaaagctgatgtgcctaccatatcacacattgaagagttccattctatgcacaggatgatgaatgctcctgattcaaatgataatattgatttactgttgagcattgatttgttggggttacaaagagcacgggtaaagcttttccacacaaaattgtt

SEQ ID NO: 37101 - DNA, 364 bp, Glycine max
  Clone ID: LIB3138-124-Q1-N1-C11
gtttctttcaaaaaatggtgcagagtctctgtttgatggcttctcatggttaccctcctggccttgtcttgcacccacaagtactgggcttgccctgcgctaccatgaagggctaccaaacattctttccttctccagtagcaaaagcagacctgatcagatatcagtctcgttgtcttgagccaagtccatgtgaggagtcaatgaaatctcaaaatgaatggtttgattataacaagtttgtcaatgtcgacttctcagttgaaaggcccatgcttattgatgaccaagcaaactgctcaaatgcagttcttcttggctttggcattgttgaccaatgcactaagcgtgatgaaattataaa

SEQ ID NO: 37102 - DNA, 363 bp, Glycine max
  Clone ID: LIB3138-124-Q1-N1-C12
acctcttccattaacgggtggtgcctctcttccatctccccagccaaaacctctctcaagaaggccacattaggcccttctgtcttcgcaaccgttagcactccttcttctccttcttcttcttcttcttcttccttcccttctctcattcaagacaggcctgtctttgctgcccctgcccccatcatcaccccaactgtgagagaggatatggcaaaggaatacgagcaagctattgaagaactccagaaattgttgagggagaagagtgaactcaaagccacagctgctgagaaagtggagcagataacagcttctctgggaacatcatcatctgatggcatcccatcatcagaagcctca

SEQ ID NO: 37103 - DNA, 366 bp, Glycine max
  Clone ID: LIB3138-124-Q1-N1-C2
cgaagtgttaagagaatgcctctttctatagggggaggagctggtgcaaagaatgctattctcatgaatatgccaaatgctgttctttcaatgtggagatattttgttggagatctcgtctttgaagtttctaagatgacttctccctacattaaatgtacagtctctttcttcatagcatttggaaatttggctgatgataccatcaattttgaggcttttccccacaagctggtgcagtttggagagattcaggaaaaagttgtattgaaattttcacaagaggaatttcttacagcttggtcaactcaagtgcgtcctgcaacaactctgttggctgatgggtgtccatatttgtatgcaatg

SEQ ID NO: 37104 - DNA, 333 bp, Glycine max
  Clone ID: LIB3138-124-Q1-N1-C3
aacttctaacacatacactactctctctctctctcttattgtatggccgccaattccagtagccgagggatcaccgccttagggaagcgagtcgccaaccggatctggacttccaacgcacctcctctcacttcaaggaggggagcatacagtagcggctcagtgtacgacaagaaccctgatgatgagatccagtctgggcaagtcccaaaccatttgatccaagccgcaacacaatccggcaaatactgggccccaaaatccacaaactggggtatttgggccccccggaggaggtgaccaaactgcttttgccattcactctgatgcgct

SEQ ID NO: 37105 - DNA, 243 bp, Glycine max
  Clone ID: LIB3138-124-Q1-N1-C4
cctaccatagcacagattgaagagttccattcgatgcagaggatgatgaatgctcctgattcaaatgataatattgatttactgttgagcattgatttgttgggtttacaaggagcaggtaaagcttttccaaacaaaattgtttttgatgataagcttgtgttggctaacacacaagaattctttgatggaaattttccagtggattcttggttaccaatttttgtgaattgtctttatcct

SEQ ID NO: 37106 - DNA, 358 bp, Glycine max
  Clone ID: LIB3138-124-Q1-N1-C6
tcttcacaaagctctccaccatttctctttctctctctctctctctctctcttctggtttttttattctgaatcagaaacaatctctcttcccttgaattattttcatggcttatcatccaccgccgttctacttgtttctctcatactccttctctcccaattccttccacatcttacttttccgtcacattcgcattcaatcctgtaacactttctgacgcttagcaggtaccaccaaactcaacagcgtaggagccgttaccgttatgggaaagcgtaattctcaacgtaaaaatgctgcaatgttggatagcgacgatgatagtagtagtgtgagttcatcatcaacttcacga

SEQ ID NO: 37107 - DNA, 351 bp, Glycine max
  Clone ID: LIB3138-124-Q1-N1-C7
tcctgaggttgctgtgaattattatacaggagatgacttgtatttatttgatgaatttcaaacttccagagttcctaattcaagaagacctaagatagagaatctgtacgatgtatttgtaaatatcagagatgacgaagctgaacattgtaagacaatgaaggcttgtcaaacccatgggaacctccggtcacctcattcatatgcagaggatgatgacagctcagtctgtgctcttgaagcagattgtgaaggaatagtagactgtataaagaaatctgttgcttctaatccagctaaagtgaagtaagataagtggcccaatacatagtacattcatttaataagatt

SEQ ID NO: 37108 - DNA, 367 bp, Glycine max
  Clone ID: LIB3138-124-Q1-N1-C8
cctgattcaaatgataatattgatttactgttgagcattgatttgttgggtttacaaggagcaggtaaagcttttccaaacaaaattgtttttgatgataagcttgtgttggctaacacacaagaattctttgatggaaattttccagtggattcttggttaccaatttttgtgaattgtctttatcctgtaagtcaattaccttcagaagctgtcgttgtaaatgttacatgtggtagtggacgtggtggtttacccaccactgcttggattagttctgcagttaacaatcgctcctcagatatcaacaaaaagattcgcacagcacttgggaaaggtaagaaaattgtttttcttactagagttg

SEQ ID NO: 37109 - DNA, 339 bp, Glycine max
  Clone ID: LIB3138-124-Q1-N1-C9
caatccttcattcgttccaatggcgctagggttttatctcaattagaggcaccgaacgctccaaacggaaccatgaatctctcgttggcagctccttcggcatttcgcgggaatctcctcgttcctctgtcgcgctgcacctcttgcttcaaacttgatctccgttttcagcattccgacggttttcgccattcgcgttgtcgtcggagtttgttcaagctgattcgggatccgagatcgaacatgaagagagggattgcttgtagtgttaccgagccagataacggtagcgacgagaaagagaaagaaacagattaaaatggagaaacgctacgtgtg

SEQ ID NO: 37110 - DNA, 362 bp, Glycine max
  Clone ID: LIB3138-124-Q1-N1-D1
gggagaccctgttgcaattctcaatgatgttgagatgtataagcatcctaaagaagaaagaatagcccgaacttggggaaccactgcccctggcctaccctatgttgaacaaactataaccaatgctggaaattggttgattgggggtgacctagaggtcattgaaccaatccagtacaatgatggacttgatcattttcggctgtctccagcagaactccgtgcagagttcacaaggcgcaatgcagatgctgtgtttgccttccagctccggaatcctgttcacaatggccacgctttgctaatgactgacacccgtaagcggcttcttgagatgggttataagaatcctgtcctcttgc

SEQ ID NO: 37111 - DNA, 242 bp, Glycine max
  Clone ID: LIB3138-124-Q1-N1-D10
taagatttaccgctatgctttccacaatattgttaccacttgttctatgtcttactctccttgtgcttctcttgttcttcatccgcaatctcagaaccttcaagaacccaccccttcctccaggtcctaaaggccttccaataataggaaatttacatcaatttgatagttccattctttatctgcagctatggcaactctcaaagaaatatggccctatattttctcttcaattagggtta

SEQ ID NO: 37112 - DNA, 324 bp, Glycine max
  Clone ID: LIB3138-124-Q1-N1-D11
gggaaagacacagtttgcatcatagaggccaaagctgtacaggtgctaaaagggatggatcaggacctgaatctccatctggaaaaagtattaaaatctggagacattcagaggttttcatgcagaatgtctcagacacacattgataggaaaggacaaatgggcatttattgatatgagtgcacgtcccttatgatggcgaccagctaattgtggacaaagagtgcgtacagaatcaagtttaccgactgtgtaaaaaacaatacgttctgttttagaaatgtaagaacaaaaagctgaagaccgatcgcaaaatggtataca

SEQ ID NO: 37113 - DNA, 360 bp, Glycine max
  Clone ID: LIB3138-124-Q1-N1-D2
ttttgtgttaaataggtggatgggaaaattgactttcccccagggcacttcccgaagtgttaagagaatgcctctttctatagggggaggagctggtgcaaagaatgctattctcatgaatatgccaaatgctgttctttcaatgtggagatattttgttggagatctcgtctttgaagtttctaagatgacttctccctacattaaatgtacagtctctttcttcatagcatttggaaatttggctgatgataccatcaattttgaggcttttccccacaagctggtgcagtttggagagattcaggaaaaagttgtattgaaattttcacaagaggaatttcttacagcttggtcaac

SEQ ID NO: 37114 - DNA, 361 bp, Glycine max
  Clone ID: LIB3138-124-Q1-N1-D3
cacaacttcattatgtttcgtgtaataatctggaaatgcaagaagcttatcttgtcaatctcgtaaatgtgttacgagaattgtatttgcacagtccagaggaagctcgccaattgagaaggaaagctctctctcgtattgaatggctgcaaaaagctgatgtgcctaccatagcacagattgaagagttccattcgatgcagaggatgatgaatgctcctgattcaaatgataatattgatttactgttgagcattgatttgttgggtttacaaggagcaggtaaagcttttccaaacaaaattgtttttgatgataagcttgtgttggctaacacacaagaattctttgatggaaattt

SEQ ID NO: 37115 - DNA, 357 bp, Glycine max
  Clone ID: LIB3138-124-Q1-N1-D4
caaaactggagattggatcacacttatacaaaattctccaattagtaacttattgagagttgctgcttggaagaaaggctgtttaatggtcaagattgtgatgtctgggaatgcagcagtcaaaaggagtgattgggcctcattggtacaagtgtttttaacaaacagcaacagtacagagcattttgatgcatgtaagtggacaaaatcagaaccacattcctgggaattgatcttcccaatagaggtatgtggtcctaataatggttttgaaatgtggagttctgagtgggcaaatcaaacttcatggcatttgagtttccttattgacaatcccaaacagtctacagtttttga

SEQ ID NO: 37116 - DNA, 350 bp, Glycine max
  Clone ID: LIB3138-124-Q1-N1-D5
tgtatttgcacagtccagaggaagctcgccaattgagaaggaaagctctctctcgtattgaatggctgcaaaaagctgatgtgcctaccatagcacagattgaagagttccattcgatgcagaggatgatgaatgctcctgattcaaatgataatattgatttactgttgagcattgatttgttgggtttacaaggagcaggtaaagcttttccaaacaaaattgtttttgatgataagcttgtgttggctaacacacaagaattctttgatggaaattttccagtggattcttggttaccaatttttgtgaattgtctttatcctgtaagtcaattaccttcagaagct

SEQ ID NO: 37117 - DNA, 367 bp, Glycine max
  Clone ID: LIB3138-124-Q1-N1-D7
atccaatagtaaccacacaccaaaacttcgtctctccgattcactacttgtattcttccttctcttttattctattctaaatttcgcattggacatggctttcacacagcttatcccttcaccttcttcttcctccttaaaccctatcacactctccctaaaccctaaatccccaacctctccgccgcagcagcatttcaatctcgatattctccggcaccggcgccggaggcctaattccactcttcggtgctccgcctcctcgttctcggagaagcaccacacgaactcctcgaactccgacgacgtggtggagctccccctgttccctctccctctggtcctcttacctggcgccatcctaccc

SEQ ID NO: 37118 - DNA, 363 bp, Glycine max
  Clone ID: LIB3138-124-Q1-N1-D9
agagagtgatttcattgagtgatcggtgttcacttgatctcatcataatcgtcagcgtcaattgaagaagatgccgatcagaaacatcgccgtcggaaggcctgaagaggcgactcaccccgacacgttgaaggcggctttggctgagttcatctcaaccttcatcttcgtgttcgccggctcaggctccggcatcgcctacaacaagctcaccgacaacggcgctgccacccctgccggcctcatctccgcctccatcgcccatgcattcgccctcttcgtcgccgtctccgtcggcgccaacatcttcggcggccacgtcaaccccgccgtcaccttcggcgccttcgtcggcggcaacat

SEQ ID NO: 37119 - DNA, 328 bp, Glycine max
  Clone ID: LIB3138-124-Q1-N1-E1
gaaaaacttgaacacgtgaatttttcaattgtcaatggaaaaccaaacctcatcgatgcaggttctcatcctcgaacaagttcagttcttgaaggtgaacgacgattccctcttgcagtgggaactcgtcgacgttgttgacgccgaataggagatcgatgggttcgggtcttcatcggattgttcttgcgtttcttggttcgaattcgattcttgtaccatcgatgcctcaattgaagaaattcgccaacttcttgttcataccgatgtgggtgtacaagatccttgggaatcggaacactgaattgttttagaaaatcaccactac

SEQ ID NO: 37120 - DNA, 366 bp, Glycine max
  Clone ID: LIB3138-124-Q1-N1-E11
gttgagcactagtactgcacattaatgaattatttgctgttttggcttcttcaatgagatgttgattttgcaggtggttttgactcccacacatttagcaatagtgatggagtatgcagcagggggagagctctttgagaggatatgcagtgctggcaggttcagtgaagatgaggctagatatttctttcagcagctgatctccggtgtccatttctgtcataccatgcaaatatgccacagagatttgaagctagaaaatacccttctagatggaagtcctgctcctcggttgaaaatttgtgacttcggttattccaagtcatctttgctgcattcgcgaccgaaatcaactgttggaacacc

SEQ ID NO: 37121 - DNA, 232 bp, Glycine max
  Clone ID: LIB3138-124-Q1-N1-E12
agcatagtcaagcttcgaattgttgaatgtggaaggaggagaaggagaaggagggtgttgcgccacgaacacatgaattagaaaagaagcagctgcagcaacttttcttgttcaatacccatcaaatgcaaatacaaagacactctcttttttaattactactgttttatgttcctttcttccttctgaatctgaccaaccagtaagactccttcaaagggattttgagtat

SEQ ID NO: 37122 - DNA, 321 bp, Glycine max
  Clone ID: LIB3138-124-Q1-N1-E2
ccttgagttgtaaagatcacggttcagatacactcaattattcatacacatagctatagtgcatcggtacaaaaagctatgtgtatgaataattgagtgtatctgaaccttgagttgtaaagatcacgaagataagtggttgccaataactttgatatctcattggtagttgctttccatatgccggggaatctaaattacttaaatgaaaggagggtgctatggttataatgctgtgtaagataagatggtgttggtgtttttattttttatttttatatctactttttggattataaattaagataaggtgttgttggt

SEQ ID NO: 37123 - DNA, 358 bp, Glycine max
  Clone ID: LIB3138-124-Q1-N1-E3
acctcgtactcgcgctccggagtttcaacggcgcagaccgaatcgaatcctccaacatacgtttccaacgatagatagacaaaacaaaatccgaagctccaaaattcctcctaagtgcagtaaccgaaacccaatgacccacctagccatggtttggcttcaaacatggctccctgaaccctagcgtttctccctcttcgccaacaacgctgatccgatcccgatctgtttctgattccgatccgatccaatccaatggctggggcagcctctgctctgttcctccttgacatcaaaggccgcgtcctcatctggcgcgactaccgcggtgacgttaccgccgtcgaagctgaacgct

SEQ ID NO: 37124 - DNA, 354 bp, Glycine max
  Clone ID: LIB3138-124-Q1-N1-E4
cccacctgaactactgaacaacaacctcttcttcttctctctctctctttagcataatcattcatcaccacacaagagaaaaaagaaaaagaacaaagaacaaataaaccttttttttttataaaaaaagaaagaaaaggaaataaagttttttgttttttcgatgaaccagaagttcatcggaaagccgccggcgacggtggacctggatcggatgccggagcgtgggtcccaccaccggcgttcccactccgacacctccttccgcttcgccgcgaacttcgacgaccttctcctcttcgacccctccgacttcgacatctccggcctcccgtcgccgctccctctgccatc

SEQ ID NO: 37125 - DNA, 353 bp, Glycine max
  Clone ID: LIB3138-124-Q1-N1-E5
ggaaaattgactttcccccagggcacttcccgaagtgttaagagaatgcctctttctatagggggaggagctggtgcaaagaatgctattctcatgaatatgccaaatgctgttctttcaatgtggagatattttgttggagatctcgtctttgaagtttctaagatgacttctccctacattaaatgtacagtctctttcttcatagcatttggaaatttggctgatgataccatcaattttgaggcttttccccacaagctggtgcagtttggagagattcaggaaaaagttgtattgaaattttcacaagaggaatttcttacagcttggtcaactcaagtgcgtcctgc

SEQ ID NO: 37126 - DNA, 352 bp, Glycine max
  Clone ID: LIB3138-124-Q1-N1-E6
cttgagatccaggcattattttactcggctttacgctgctctcgtgagatgctgatagtcaatgatgcaaccaagagtctggtggctgctgttagtaatcgcctgagtgcactctgctttcacatgagagagtcttattgggttgatatgaaaaagactaatgaaatttaccggtacaagacataagagtatgctactgatgctggacacaagtttaacatctatgcagagcaaattccttcatggctagtagactggatttacgaggaaggtggctacttcattggcaatttgcaacctgctcatatggacttcaggtttttctcactcggaaacctttgagccattgttt

SEQ ID NO: 37127 - DNA, 283 bp, Glycine max
  Clone ID: LIB3138-124-Q1-N1-E7
ctctccaggaaatcgacttgaagaaccacaaatggggacattattttatttgtgggtacaaaggtttccatgactatgcaaaattgaaaggagtggatgttgccaaacctgttggacttgaagttcttgttgatggaacagtgccgacaggttctggactatcaagctctgcagcatttgtctgctcatccacaattgctattatggctgcttttgatgtgaacttcccgaagaaagaacttgcacaagttacatgtgattgtgaacaacatatatggactca

SEQ ID NO: 37128 - DNA, 348 bp, Glycine max
  Clone ID: LIB3138-124-Q1-N1-E8
ggattctccgagtttggataatttgcgtgcaaagaatatatcttgcggtgctcgccacactgctttagtaacagagggtggaaaagttttctgctggggatggaacaaatatggacagctgggcctcggtgacgtaattgaccgaaacattccttctgaagtcatcattgaaggttgtgcccctaaaaatgttgcttgtggttggtggcatactcttcttctggccgagtcccccacttgatgtcatggtttatcagaagctcttgacccaattgttagatagtggttctgcaatgtatatgaacatacggcaggggtatacataacataggcttcatacatgtttgc

SEQ ID NO: 37129 - DNA, 353 bp, Glycine max
  Clone ID: LIB3138-124-Q1-N1-E9
ctcgagccgcttggttaccaatttttgtgaattgtctttatcctgtaagtcaattaccttcagaagctgtcgttgtaaatgttacatgtggtagtggacgtggtggtttacccaccactgcttggattagttctgcagttaacaatcgctcctcagatatcaacaaaaggattcgcacagcacttgggaaaggtaagaaaattgtttttcttactagagttgatccttttccagtagctttactggctgttctttttggcgttaagaatgaaattctgagttctaacgccactaatcctatgctgacgcgacttcttgagaactgtaagaagtctaaatatctggttgatgag

SEQ ID NO: 37130 - DNA, 359 bp, Glycine max
  Clone ID: LIB3138-124-Q1-N1-F1
agcaaatggcttcctcaatgatctcttccccagctgttaccactgtcaaccgtgccggtgccggcatggttgctccattcactggcctcaagtccatggctggcttccccaccagaaagaccaacaatgacattacctccattgctagcaacggtggaagagtgcaatgcatgcaggtgtggccaccagttggcaagaagaagtttgagactctttcctacctgccagaccttgatgatgcacaattggcaaaggaagtagaataccttcttaggaagggatggattccttgcttggaattcgagttggagcacggtttcgtgtaccgtgagcacaacaagtcaccaggatactacgat

SEQ ID NO: 37131 - DNA, 364 bp, Glycine max
  Clone ID: LIB3138-124-Q1-N1-F10
agcatttggaaatttggctgatgataccatcaattttgaggcttttccccacaagctggtgcagtttggagagattcaggaaaaagttgtattgaaattttcacaagaggaatttcttacagcttggtcaactcaggtgcgtcctgcaacaactctgttggctgatgggtgtccatatttgtatgcaatggtgcatgatagttcagtgtctacaataccaggtgattttgtcattggtgtcaagttgacaaccataaacaatatgtgtgcatatgggctcaatcctggtatttcaggttctcgtcttttgggcaccattcctcagtccatttcacagcaaactgtttggaatcaaatggcaaca

SEQ ID NO: 37132 - DNA, 366 bp, Glycine max
  Clone ID: LIB3138-124-Q1-N1-F11
gcttccaaaaagcagtgagggctgtgaggcgcttttggccggaggtgcttctctcatcgtgagttgtcgttacgttggtcgaccgagtgtctgtgcagctaattctgcaaagcgaagagggaattttgttaggatggttgaatattgacaagagaaataacgggaaacaatagacatggataccggtggcaattctttaccatctgcacctgatggggtgaagagaaaggtgtgctatttttatgatccggaggttgggaattactattatggtcaaggtcacccaatgaatccacatcgtatacggatgacacatgctcttctagcccattatggattgctacagcacatgcaggtccacaagcc

SEQ ID NO: 37133 - DNA, 307 bp, Glycine max
  Clone ID: LIB3138-124-Q1-N1-F12
gatacttgtaaaattactgaagcccaatttgaaagtggaaggtcttattattgctgcatgttcatcaggaaatatgggtaaccttcctattgtaatcatccctgctatctgtgatgagaaaggaggcccatttggtgcacgtgatatttgccgcaataatgcactctcttatgcatctttctctatggcgcttggtggcatcttcatttggacctacacataccagacggtaaaaagcagatctttgaaatttaaagcactggaagctgctgagattgtaagggttccaacaaaaatttgatgctat

SEQ ID NO: 37134 - DNA, 362 bp, Glycine max
  Clone ID: LIB3138-124-Q1-N1-F2
cattatctatcagtatacaaacatcaccttgacaccaacacaggcagatcgctttgtcttggcatttcgaaactggctaaggcggcatggcaatggccaaccagaatggtttggcaacagcagcgaccaaccattgccatcaactgttttatcaaaacgtcaggtacaataacatgattcatgattttcattttgaagccccttaatttgaacaacgaagaatgttaacaatacacactttctaactcttttttatcgattaaaattcacttaagacatacaatgaataagttgtgtgcttattcttacccaacaattaagaagtttctggtatcatttcgctgtgctaaccaagaactaaa

SEQ ID NO: 37135 - DNA, 358 bp, Glycine max
  Clone ID: LIB3138-124-Q1-N1-F3
tactgatggtattgacaaaactagtgcaactttgcaatttagaaagttagcagattgtgattttctcaagagaaactttaagcagatgtctaatgttttgtgggtggctcctgaggacaaggcgagtttatggtcacaacttcattatgtttcgtgtaataatctggaaatgcaagaagcttatcttgtcaatctcgtaaatgtgttacgagaattgtatttgcacagtccagaggaagctcgccaattgagaaggaaagctctctctcgtattgaatggctgcaaaaagctgatgtgcctaccatagcacagattgaagagttccattcgatgcagaggatgatgaatgctcctgat

SEQ ID NO: 37136 - DNA, 338 bp, Glycine max
  Clone ID: LIB3138-124-Q1-N1-F5
agaactttaatttcagaaccattagatggtgctgacgatgatggcggcgatcggcatcggcatcaagcaagagaagaaaatgccaacggtggtggcggagagcgagctgaagaagcggaacgaggagctggagaaggagctcagagagagcaaggagagggaggagcagatgaagcgcgaactccagagcgcgtgggagaggctgcgcgtggccgaagaggccgaggagaggctctgctcccagctcggggagctcgaagcagaggcagtttaccaggcgcgtgactaccacgcgcgaatcgtctctctcatggaccagctctcacgcgctcagagcc

SEQ ID NO: 37137 - DNA, 360 bp, Glycine max
  Clone ID: LIB3138-124-Q1-N1-F6
gacagtttagaaatggggaaacccatagaagagctgaacaaagcaccggaaggcactgcaaatggtgatctttctaacagtaagacagatgccaattgtgagtctgctgaccatccgaacatgccttctcttactgttccagagattgttaatcgtgtgagatcaaaccctggtgatccttgcattcttgagacacaagaaccactgcaggatttggtcagaggtgttctgaagatattttcttccaaaacagcacccttaggagcaaagggttggaaggtactcgcagtttatgaaaaatctaccagaagttggtcatggactggcccagttattcataattcacctgactatgatacc

SEQ ID NO: 37138 - DNA, 348 bp, Glycine max
  Clone ID: LIB3138-124-Q1-N1-F7
ctcgagccggtctattgttttgtgggtggctcctgaggacaaggcgagtttatggtcacaacttcattatgtttcgtgtaataatctggaaatgcaagaagcttatcttgtcaatctcgtaaatgtgttacgagaattgtatttgcacagtccagaggaagctcgccaattgagaaggaaagctctctctcgtattgaatggctgcaaaaagctgatgtgcctaccatagcacagattgaagagttccattcgatgcaaaggatgatgaatgctcctgattcaaatgataatattgatttactgttgagcattgatttgttgggtttacaaggagcaggtaaaagctt

SEQ ID NO: 37139 - DNA, 359 bp, Glycine max
  Clone ID: LIB3138-124-Q1-N1-F8
gccaaatgctgttctttcaatgtggagatattttgttggagatctcgtctttgaagtttctaagatgacttctccctacattaaatgtacagtctctttcttcatagcatttggaaatttggctgatgataccatcaattttgaggcttttccccacaagctggtgcagtttggagagattcaggaaaaagttgtattgaaattttcacaagaggaatttcttacagcttggtcaactcaagtgcgtcctgcaacaactctgttggctgatgggtgtccatatttgtatgcaatggtgcatgatagttcagtgtctacaataccaagtgattttgtcattggtgtcaagttgacaacca

SEQ ID NO: 37140 - DNA, 368 bp, Glycine max
  Clone ID: LIB3138-124-Q1-N1-F9
agtacatacattcccctaaccaagttttaagtttttctcaacgggatggaagcaaccaacagaagctcttcctccacttcctcttcctctgattgctgctcttccgagtccaaccccaacaagcccgacagaatcaaaggcccatggagcgccgaagaggatcggatcctgaccggactcgtcgaacgatacggcccacgaaattggtccctcatcagccgctacattaagggaaggtccggcaagtcatgccggctccgatggtgcaatcaacttagccccgccgtggagcaccgccccttctcggcccaagaggacgacaccatcatcgcggcccatgcccaatatggtaacaagtgggccactat

SEQ ID NO: 37141 - DNA, 356 bp, Glycine max
  Clone ID: LIB3138-124-Q1-N1-G1
cattcatcaagttcctagaggaaaagaagctgccgccgcattactcctcaactgatctgggaaaataaggcgtctcttcttaccagctgctgctaatgtttttcctgcctgcaattttccatcttccctgcagaaatttccaaaacaaatagttgttggtgatttgtcaacatgaagaagttgttagattttgggaagaaagccctcttttatgttagggtgctttctggatatgaagagcgaagaatacgatcttataggctgcagcttgagcaacgtgtacaacaggcacaagcaaggagggcggccataaataaagtaccagaacaggttatattatccgaagttcgtcgaat

SEQ ID NO: 37142 - DNA, 229 bp, Glycine max
  Clone ID: LIB3138-124-Q1-N1-G10
gcatcgtttgaatctattccagcgatggcaaaaaacttggatgggggttcttgcaaaatgtaaggaaagaacttatcaaaactgggaacaatgatatagatgttttgaatgggatagctagggatggtgagcagaagcagatatttttgactggaaaactgcggccaaagctgcatgaaattaaagggcctccggtggacaaaccaattgaacaagggattactgagca

SEQ ID NO: 37143 - DNA, 303 bp, Glycine max
  Clone ID: LIB3138-124-Q1-N1-G11
gaggaatcttactgtacaaaactggagattggatcacacttatggggaattatccaattagtgacttgctaacagtaaatgcttggaagaaaggctgtttaatggtcaagattgtgatgtctgggaatgcacacaccaaaaggagtgattgggccttattggtacaagtgtttttaacaaacagcgaccggacagagcattttgatgcatgtaaatggacaaaatcagaaccacattcctgggaattgatcttcccaatacaggtatgcgggcctaataatggttttgaaatgtgaaattctg

SEQ ID NO: 37144 - DNA, 337 bp, Glycine max
  Clone ID: LIB3138-124-Q1-N1-G12
aattaagatcaccaaattacttgtgagtgtatacccaacacagacgaagatcaacatgggctactacacccgcgtttcacaagttgagagggaacctatcaaggtgtattccacaccacgaccaatgatgggcaactaccaccaccctaatgctcaccgtgtcctcaacgagaagattgtttatgaggaggatgtgattggaggatcctgacacaaccacatgcatgaccaccaccctgagactcatgagagagtcaaggtggtggagtatgaacaagttcctgagaggcgcgttgtctataaagagaaagttgcttatgacaacgatcgttactac

SEQ ID NO: 37145 - DNA, 356 bp, Glycine max
  Clone ID: LIB3138-124-Q1-N1-G2
gcattaatatgaatatatagtttgagttggggcacacgccatgttgagagatggagggaagtatacggtgctctgccaactacgttcctctcactccaatcagcttcttggaccgcgccgacgtcgtttaccgcgacagactttctcttgtctccggtgacgttacctacacgtggacccagacacaccaacgctgcatcaaacttgcttcttccatttctcaacttggggtcggactttctcccctcaatgtggttgctgtattggcccctaatgttccagctatgtatgaactgcattttgctggtcccatgtcaagggctgttctctgcacgctaaatacacgtcatgattct

SEQ ID NO: 37146 - DNA, 356 bp, Glycine max
  Clone ID: LIB3138-124-Q1-N1-G4
ggagtgagaaatggaccttccatggtgcccccatttaatccctccagctttcactctctttcccctcaacccccactctcctcttctcttcttttccaaaaacaatgaagctcattagcaccatcaaccccaaaaacctcaaactaagccccaaacgcttctttcgtaaaaaggaaccatctttagtctcacgctccgacccgccttctttcggatccggatcctcttccgttgactcttccaccgcaaatcacaaaccttccgccggtaaccaaactccgaccagcgttctcccggacgtctccggcgagtggtccgaggtcgccaccgccgccgttgacgtgcggtgggacctc

SEQ ID NO: 37147 - DNA, 347 bp, Glycine max
  Clone ID: LIB3138-124-Q1-N1-G5
cacacacaatgaagcggaaggaaaagagaaggatgggggactaaagagaatttggacgccaaagacggaaatctcccattctgcattaccagctttatcgttgagttcgtgacttcgtttagcacatgcaggtgagtttgtaggtttgttatggacgaattggatctggactggatacgaccggagtgccccgttgaaaagactgcaacaaaagcccattgtattctctcaaccactcatcttcttgcaatgccctgctagctgctccaaattgaggaaaagcaaccaaaatggtgaagattattagtagcattatgaagagggtcatcttgtaagagaatgccatc

SEQ ID NO: 37148 - DNA, 367 bp, Glycine max
  Clone ID: LIB3138-124-Q1-N1-G7
cagcatctcttctcaagtcttcacttgttcttgacaagtctgggtgggtgaagggacaaacacttcgccaaccttctgctgcatcagttgtgagatgcaaccccaccaccccatcaggcctcaccatcagagctggttcctatgctgatgagctcgttaagaccgcgaaaacagtggcttcaccagggaggggtattttggccatggatgagtccaatgctacctgtgggaagcgtttggcttcaattgggctagagaacactgaagctaaccgccaggcataccgtaccctccttgtgacagttccaggacttggtcagtacatctctggtgccattctctttgaggaaactctttaccaatccac

SEQ ID NO: 37149 - DNA, 365 bp, Glycine max
  Clone ID: LIB3138-124-Q1-N1-G8
ctcacttctgctctcaacgaggacaatagagcagaccttgtcaatgctcttaagagcaagatacagagtttggctggacaacactcggatattctagagtctctgtcgcccaatgtccgaaagcgtgttgaggttcttagagagatccagggccaacatgatgaattagaggctaaattttttgaagagagagcagctctcgaggccaaataccaaaaattgtatcaaccactttacacaaagcggtacgaaatagtaaatggtactacggaagttgaagaaggggcagtgaaagaaacagcacctgataatgaagaggatcaagaaaaggagtgcctgcattttggcttactgctatgaaaaac

SEQ ID NO: 37150 - DNA, 53 bp, Glycine max
  Clone ID: LIB3138-124-Q1-N1-G9
ctcgagccgaatcggctcgaggtcgtaatgatgtgtgaagtgtgtgttatttt

SEQ ID NO: 37151 - DNA, 364 bp, Glycine max
  Clone ID: LIB3138-124-Q1-N1-H1
ccacttctcaaccaacaatggcaatggcaacccaagcctctctcttcaccccacccctctccggtctcaaacccagcgaccgagccaccgcgccatggaaacaatcctccaccctctccttctccacctcgaagcccctcaagttctcgcgaacaatcagagcagcagccaccgaccagaccacagaggcaccggttgggttcaccccaccggaactggacccaaacaccccttccccgatcttcggaggcagcaccggcgggctcctgcgcaaggcccaagtggaggagttttatgtcatcacatgggactgcccgaaagaacagatctttgaaatgcccactggcggcgctgccatcatgag

SEQ ID NO: 37152 - DNA, 367 bp, Glycine max
  Clone ID: LIB3138-124-Q1-N1-H11
gtgagagtagttcttttgaaagttcagattttgatcactctgctgttgaagaatgtgcagcagatagaagttttacttctgcgtatctggagcgcccctcaagaagtttgcaacagcagcgatcctgcactaaaagtgagaagccaatagatgtactgcgaagagtttgtgggaatgataaatgtgccgattgtggagctcctgaacctgattgggcatcgctaaatcttggtgttcttgtttgcattgagtgttctggtgtacatcgtaaccttggtgtccacatatcaaaggtcaggtctcttacattggatgttaaagtgtgggaaccttctgtcataagtttatttcagtctcttgggaatac

SEQ ID NO: 37153 - DNA, 361 bp, Glycine max
  Clone ID: LIB3138-124-Q1-N1-H2
gagcttttgtcagttttctattgaccttcggggtggaggaatcttagtggacaaaactggagattggatcacacttatacaaaattctccaattagtaacttgttgagagttgctgcttggaagaaaggctgtttaatggtcaagattgtgatgtctgggaatgcagcagtcaaaaggagtgattgggcctcattggtacaagtgtttttaacaaacagcaacagtacagagcattttgatgcatgtaagtggacaaaatcagaaccacattcctgggaattgatctttccaataaaagtatgtggtcctaataatgggttttgaaatgtggagttttttagtgggcaaattaaactttat

SEQ ID NO: 37154 - DNA, 361 bp, Glycine max
  Clone ID: LIB3138-124-Q1-N1-H3
ctacggcacacggaaagaatttcgttgtagtgttcattacacccaacaaccaagtgcagcaatcaccaaaaaagaagaaggcaaatcaaagttttgaaccttggttcaatatctagagtccctgcaagctcaacacatcagagataatcaaaatgcatcctgcgcagatcgttttgtatggatcaactttatgtgtcatgataacagtgcacttctccatgaagctactcgctgaacatgttttgaactggaagaaaccaaaggagcaaaaggccatagtaattataatccttatggccccattgtacgctgtggactcctatgttggtttgataaatttctttggaagtgaagcattttt

SEQ ID NO: 37155 - DNA, 352 bp, Glycine max
  Clone ID: LIB3138-124-Q1-N1-H4
caaaaattttgtttctttgtgtgtgtatggtgatgataacttaattagtgttcatgaatatgtcaagccttactttagtggttctaaattgaaaagctttctagctagtcataacatcaccattactgatggtattgacaaaactagtgcaactttgcaatttagaaagttagcagattgtgattttctcaagagaaactttaagcagatgtctaatgttttgtgggtggctcctgaggacaaggcgagtttatggtcacaacttcattatgtttcgtgtaataatctggaaatgcaagaagcttatcttgtcaatctcgtaaatgtgttacgagaattgtatttgcacagt

SEQ ID NO: 37156 - DNA, 358 bp, Glycine max
  Clone ID: LIB3138-124-Q1-N1-H5
gtgatgataacttaattagtgttcatgaatatgtcaagccttactttagtggttctaaattgaaaagctttctagctagtcataacatcaccattactgatggtattgacaaaactagtgcaactttgcaatttagaaagttagcagattgtgattttctcaagagaaactttaagcagatgtctaatgttttgtgggtggctcctgaggacaaggcgagtttatggtcacaacttcattatgtttcgtgtaataatctggaaatgcaagaagcttatcttgtcaatctcgtaaatgtgttacgagaattgtatttgcacagtccagaggaagctcgccaattgagaaggaaagctct

SEQ ID NO: 37157 - DNA, 347 bp, Glycine max
  Clone ID: LIB3138-124-Q1-N1-H6
gcaatttagaaagttagcagattgtgattttctcaagagaaactttaagcagatgtctaatgttttgtgggtggctcctgaggacaaggcgagtttatggtcacaacttcattatgtttcgtgtaataatctggaaatgcaagaagcttatcttgtcaatctcgtaaatgtgttacgagaattgtatttgcacagtccagaggaagctcgccaattgagaaggaaagctctctctcgtattgaatggctgcaaaaagctgatgtgcctaccattgcacatattgaatagttgcattcgatgcataggatgatgaatgctcctgattcaaatgataatattgatttac

SEQ ID NO: 37158 - DNA, 102 bp, Glycine max
  Clone ID: LIB3138-124-Q1-N1-H7
ctcgagccgctcgagccgctcgagccgtttgcatttgtgaactagtatgtagtattttattcacttaaataaagcgcattactatgtgcaatgagtgtgttt

SEQ ID NO: 37159 - DNA, 363 bp, Glycine max
  unsure at all n locations
  Clone ID: LIB3138-124-Q1-N1-H9
ggctataatgaaggtggtgcactctcatatattcttttgagtggaagcagttggtttatggctctatcctggttgtttgctccatatttattcaacccatctggatttgagtggcaaaaggtggtggaagatttcagagattggacaaattggctactctaccgaggtggaattggtgttaagggagaagaaagctgggaagcttggtgggaagaagaactggctcatatcangagcttgggttcaaggatagcagaaaccattctgagtcttagatttttcatctttcaatatggtatcgtgtacaagcttaatgtgaaaagaacaagtacttcactgacggtttatggtctctcatgggta

SEQ ID NO: 37160 - DNA, 376 bp, Glycine max
  Clone ID: LIB3138-125-Q1-N1-A1
acatgttgtaccatactgctaggataaactgccttgcgtggtcccctgatagccttaggattgctacaggatcacttgacacatgtgtcatcatatatgaagtttatcagcctgcatctagtagaattaccataaagggtgctcatttaggcggggtttatgggttagcatttactgatgagtatagtttggttagctctggtgaggatgcttttatccgtgtttggaggataacccctcgttgactgatcaaggtcaatttggaagataagtgaatttgggaaatatttgttggatttcaaatttcttcctttagaaggcttctaaaagtcaagactggtgaggatgtgcttatcaccataagttggtcatacac

SEQ ID NO: 37161 - DNA, 383 bp, Glycine max
  Clone ID: LIB3138-125-Q1-N1-A10
ttcaaacaatgccgggcaggatgtgacttcaaatgaccagggtggagcagtggatgatgggtcaactaagaatgacccggaagaagatgacgaggatagtgatgctgaagacttggcagaagctgatgaagatgagactgacttggacctggcatggaaaatgcttgatattgccagagccattgctgaaaagcaatctgtcaatacaatagaacaggtggacatattatcaacattggcagatgttgcattggaaagagaggattttgaaacttccctctcggattaccagaaggcactaaccatcttggaacaactggttgaaccagatgatagaaatattgctgacttaaattttcgcattatgcttatgtttggaggtt

SEQ ID NO: 37162 - DNA, 323 bp, Glycine max
  unsure at all n locations
  Clone ID: LIB3138-125-Q1-N1-A11
gctatgcctagttgctaacaccctcttcctttctttcctttccgaaccttcctcgtttttgatgctttgacttcttccaattgattctctctctctctctctgggttctctggcatcaaagttcgtacctttttgtgatttggaaggatctgatgccagtttggttttctggggtggctgtgttccttgtcccactttccttctttntataggatacttgactaatttaaaaaaattccttttgttttcattgttatattatagtcaagttatttgatgtattttagttcttcagttggaatcccgtttgggtttggttatgc

SEQ ID NO: 37163 - DNA, 341 bp, Glycine max
  Clone ID: LIB3138-125-Q1-N1-A3
tagagcaagtgttgatttgcagcgcactcatcgtattagaggaatgattaaaatggtggccacagttggtattcctgagaatacaggtatatcattggcctgtgctatgaatagttcttttagggggcgcgccagttctgatatttacaccatctgctctcaagactgtgaattgtggaatcctgcttgcacaaaagcaatgactatgtcatttaatccaaacccgtgttctgatgcatggagtttggaatttctgaagcgtactggatttcattgcgatatcatttgtgtcactggatggactgccaccccaatgcacgatgttcaggttacaattgatt

SEQ ID NO: 37164 - DNA, 179 bp, Glycine max
  Clone ID: LIB3138-125-Q1-N1-A4
ctacattgagagagctgaaccaagatcaagccccatttgtacaacttattgtcagtttggtaatgagttgtttagttagggaggtggggatgaggatcggtgataaaatgaactagtatgtataatcggtagtttcattcacatgaactcattaattcacctatttttttatgtttttc

SEQ ID NO: 37165 - DNA, 380 bp, Glycine max
  Clone ID: LIB3138-125-Q1-N1-A6
cggctcgaggtaatggcagcgtcactacaagcagcagctactttcatgcaacccaccaagttgagcaggagcaacactttgcagcaaaagtctactcagtccatttccaaggcttttggtttggaacctgttggagctaaaaaggtcacatgctcccttcaggctgatcttaaggacttggctcacaagtgtgttgatgctaccaaaattgcaggattcgcccttgccacctctgccctcgttgtctctggggcaagtgctgaaggtgttccaaagaggctaaccttcgacgaaatccagagcaagacctacttggaagtgaaggggacaggaacagcaaaccagtgcccaacaattgatggtggattggactcatttgc

SEQ ID NO: 37166 - DNA, 370 bp, Glycine max
  Clone ID: LIB3138-125-Q1-N1-A7
attgcctctttaactagtagggtacctgtacctcatccacccatcttcaacttgtgataaatttctcctacctccattctgatatctcaactcaataataatagcacaccatggttgcttccctctcaaccctggttcttctattgtgtgttatttccacggtagcttggtactcatgcctctacttcctcaaactcaacaacaacactcagaagaagacccttccaccgggcccaccgggcctccctatcttcgggaaccttctatctcttgacccggacctccacacttacttcgccggactggcccagatccacggcccaattctcaagctccgactcgggagcaagctcagcatcgtcataacctc

SEQ ID NO: 37167 - DNA, 367 bp, Glycine max
  Clone ID: LIB3138-125-Q1-N1-A8
ccttttgccacattacacaagaactctccaaggatcctccttcccacgaaattcatttggtgggaaaatccaagaagagggtggaatttcaagccagggaagatggattatttcaatgcaccaggaagaaaccatctctttgttccggggccggttaacatcccggaccagatcattcgggccatgaacagaaacaatgaggactaccgttctccagcaattccagctatgaccaaaacactgcttgaggatgtcaagaagattttcaagaccataactggaatcccatttctcatccctacaactggtactggtgcttgggagagtgctctcacaaacacactgtctcctggggatcgaattgtat

SEQ ID NO: 37168 - DNA, 398 bp, Glycine max
  Clone ID: LIB3138-125-Q1-N1-A9
cagcgcgatccgtttgaaggagcaagaagaagcgtcgacgaaatccacaatcgaaaccgcgctctcttctgcctcctcggcgaaaccgtcgtcgtccacgtcacctccgccgtcggcggtcgatgtgctcatggaatctccaccgccgtctgcggcggaggttgaggttgctgtcacggtcacggtcgcggtggcgtcgagttctatttccataaactcaggttcggttgcgcaaccgaaccggtgtgccacgtgtcggaagcgcgtggggctgaccgggttcaagtgcaggtgcggagtgacgttctgcggggcccacaggtacccggaggagcacgcgtgcgggttcgatttcaagacagtgggaagagaggagattgcacgtgccaaccccgtga

SEQ ID NO: 37169 - DNA, 333 bp, Glycine max
  Clone ID: LIB3138-125-Q1-N1-B1
aaaaaaaaattaaaaaaaaaaaaaaaaataaaaaaaagggggaaaataaaaaagaagaaaagaaaaaaaaaaaaaaaataaaaaaaaaaaaaaaaaaaaaaaataaaaaaacataaaaaaaaaaaaaaaaaaaataaaaaaaaataaaggggggggcccccctcctagggcccccgtccccccggatataatttcggcccgggcccctgggggctcccaccttttctaaatggggggcttgtttaatttcgggtcgtttttaggccagcttactttttgggggcaaaaatttaacccttataatacccccacaaaatatttgctcggggacaa

SEQ ID NO: 37170 - DNA, 108 bp, Glycine max
  Clone ID: LIB3138-125-Q1-N1-B10
tgctgcaaaagctgatgtgcctacatagcacagattgagagttccattcgatgcagaggatgatgaatgcttctgattcaaatgataatattgatttactggtgagca

SEQ ID NO: 37171 - DNA, 266 bp, Glycine max
  Clone ID: LIB3138-125-Q1-N1-B11
caacaatattgtaaaactcaaaatctagtttcatactttttttcttcttcttgaaatggctctccaggctgcttctcttgttcctgcttctttctcggttcttaaagagggaaagagtggtgtgtctctcaaggactccaccttgttcggtctttcattttcagaacctatcaaagctaacttcagctcttctgcattgaggtgcaagagggaattcgaacaaaagctctgtgctgtgagggccgaaacagtggctacagcctttc

SEQ ID NO: 37172 - DNA, 347 bp, Glycine max
  Clone ID: LIB3138-125-Q1-N1-B12
ccaccacacaccgtcagccaccagcaaccatgggaaacatcatctccgccatcgcgggagcgatcaactcggtcatctctgccattgcctcgttcatcatggccatcttcagcggtatcgcccgcgttctcatcgccatctggaacttcatcacgtgtggagtctgctccggcggccgtcgtgggggaagaggcacagtctagtgggtggtgggacgaccaagctctcatcaccctaaacccttcctcccggtctcgttcagttcgcatccgcttaattccaagaccttgtccacggacaccttgtagcttataatacacgacatgcaacgacgactactgccttag

SEQ ID NO: 37173 - DNA, 327 bp, Glycine max
  Clone ID: LIB3138-125-Q1-N1-B2
gttttggttcctaacacttatgttgatcacatgagagcgagatttgggagcttcaagtctaggagcctctcggatctgaaagaacatgatgaggaacaagaacaagaagatgatgatgatgatgcgtgatgttttggattatttaataatgtggtttcggtgtcaataaactaaatattatagtgcccatttgtaattaagctagcttaatggattttgcctaaaggaaaaaaaaaaactattttggtgctgctgaaacgacaacaattttagaaaaagagtgcttaaaatgcgctgtgggttgcaaaaagagtctacaatataata

SEQ ID NO: 37174 - DNA, 399 bp, Glycine max
  Clone ID: LIB3138-125-Q1-N1-B4
acctggaatttggcttagggggggagactttgggtttttgggaccctttatttaaatgaattaaatcaccaatggctcgttttatcgttaacgccaagactttctccgctctcgtgctagacggattctccaacactctcaccagacgtggctactctcaaagcgcaacagggggaggagttgcctccatagcacccaaatcaggggaagacaaaggtgtctcatcatacaaggtttcctgggtgccagatcccgtcaccggttactacaaaccggaaaacatcaaggaggttgatgttgccgatttgcgtgctacccttctccgcaaaaaattcaacaactaatttcaacaattttaattttttaccaaaccttgggtgattgattcgttatggaatt

SEQ ID NO: 37175 - DNA, 382 bp, Glycine max
  Clone ID: LIB3138-125-Q1-N1-B5
ctgggagaggcctcacatcatggatgtggtgggcatcctgcccatgatggagcacaggattgcttggactattgacgatgctaaatctgggaaccaacctatgagactctatgctcgcgtgtggaactgctgtgactgacccaccgaacgaggttgggtgataactgataggacgaacccacgctatacagcatactacctcactgatagaggcacagagttgtacaactataatttcaatactttctctgatcgctgcatggaatagcaacgagcttgatgcctatagcatacgaagactgagatgcgctcatgaataacttcatgatctatcactgcttgcacgatcttaagcgattcccacaaggcattcccgctgagt

SEQ ID NO: 37176 - DNA, 388 bp, Glycine max
  unsure at all n locations
  Clone ID: LIB3138-125-Q1-N1-B7
cttatcttattgcatgttttgtctaaatcaattgaatagtatcaattgcttactttctattccgtgatgttttcagaggacagattggaagaaaagtagttcacgttatattttgacatcttattttcaacctttgctgttgtggactggggtaatgctcatctgcagggatttggatccactagtcctaccatcagaaaccagtcaagctattaagcaacggcggctgagttttgtacgatcgttgtcaaccgtgcttacatttgcttactgttcttcaagcttaattcgacaagcacaaaatatttgtatggggacaaatgactccagtgatgaaagaaatatgagaattgattntactgggaaagctgtatatactgcaatatgg

SEQ ID NO: 37177 - DNA, 392 bp, Glycine max
  Clone ID: LIB3138-125-Q1-N1-B8
tgtgaagccaccaccatggcgatgaccaccacaacgacgtcgtctccaccatttctcttttcattcctttctccaaaaccctttcccccaaacccttcgctccctcttccccaattgcaaaaccgaacaccgctcagttccacccatcgcttcttctctgccatccccaaagcgaaacgcggcgtttcagggacccatttgtgcctcgcttctcgcgccaaagccaaacccaccccgtcttcggtggaacaagagagcgacgacaattttagaaaaagagtgcttcaaattgcgctgtgggttgcagaaggtgtctacattctatggctcttccttcttccttatgcccctggagatcctgtatgggccatcagttctgacacattgaactc

SEQ ID NO: 37178 - DNA, 395 bp, Glycine max
  Clone ID: LIB3138-125-Q1-N1-B9
gtgtttttgcaggtaccatgggtggcttcagtttcgatgccgacttccaactgctacgctttcgacaattctagtcgcattgttgatttcagtggctggactggttatcttttcgagtatgatcaaaagcaaggttctgatttgtccgtgcgattctgcaaagatgtggagagtagatcacaaacgggatatgttgattttggccgatttgataggttcaactactttgttgctggttctggtcaatctgactttgtacaagaattttataatggtgatcttatgggttgcgaacaaagttacgacaaaatgggacgaacagcccaggtaaatatcatatgtgggaaatgtttgaatggacaatgtaaaggtcgtcctggatgcatatgtaatgt

SEQ ID NO: 37179 - DNA, 397 bp, Glycine max
  Clone ID: LIB3138-125-Q1-N1-C1
cttccctatctcccgtacaggccgacaatgccatccctgatggagctgctgcctttggccgtggcgttcgccgctgtaatcggtggcttcctctggtacagcagcaacagcggtggaagccgcaaggtgctaaagccgactgagttccaagaattcaagctttcagagaagacagtcctctcgcataataccgccatctaccgccttgaacttccacgccctaccgacatccttggcctccccattggccagcacatttctcttgccgctactatcgaaggtcagccgaaagaagttgtacgctcatacactcccattacatccgacgaagacaagggccatgtcgacctcctcatcaagtcataccccaccggtaacatctccaagcacgtcgcgg

SEQ ID NO: 37180 - DNA, 298 bp, Glycine max
  Clone ID: LIB3138-125-Q1-N1-C10
atgaatagttcttttagggggcgcgccagttctgatatttacaccatctgctctcaagactgtgaattgtggaatcctgcttgcacaaaagcaatgactatgtcatttaatccaaacccgtgttctgatgcatggagttgggaatttcggaagcgtcctggatttaattgcgatatcatttgtgtcactggatggactgccaccccaatgcaggatgttcaggttacaatggatgggttaattccctttcaggattgtgtccccagaacttatggggttttaaatcaacaaaatcctt

SEQ ID NO: 37181 - DNA, 224 bp, Glycine max
  Clone ID: LIB3138-125-Q1-N1-C11
tttcccccagggcacttcccgaagtgttaagagaatgcctctttctatagggggaggagctggtgcaaagaatgctattctcatgaatatgccaaatgctgttctttcaatgtggagatattttgttggagatctcgtctttgaagtttctaagatgacttctccctacattaaatgtacagtctctttcttcatagcattttgaaatttggcttgatgatacc

SEQ ID NO: 37182 - DNA, 368 bp, Glycine max
  Clone ID: LIB3138-125-Q1-N1-C12
cccatttccataatcactttttcctactttcttctccatccatcccttgactaattaattatccctcacaactaccaatggccgaagagaaacaccacaagcaccgcctcttccaccaccacaaggacgaggataataagccagtagaaaccgatactggttacgacaacacatcatattccaagccttctgatgactatgactctggtttcaacaagccatcgtatgagtcttctggcggtggctatgaaggtggttacaacaaaacatcttattctagtgatgagccagcttctggtggtggctatgaaggtgggtacaagaaaacaggttattctggtggcattgatgagacttctggtggctat

SEQ ID NO: 37183 - DNA, 398 bp, Glycine max
  Clone ID: LIB3138-125-Q1-N1-C2
gttaactttcataggttgaatctgaaatattttgtcttgcatggtgggttgtcgccatctattgaaaccctggataacatacgtaattttgatcgcgtacaagaagttcctcatgagggacccatgtgtgatcttctatggtctgatccagatgatcgttgtggttggggcatctctcctagaggtgctggatatacctttggccaggacatatctgagcaatttaaccataccaataacttgaagctgattgctagagctcaccagctggttatggaaggatataactggggacatgatcaaaaggtggttactatatttagtgcacctaactattgttatcgttgtgggaatatggcatcaattcttgaggttgatgactgcaaaggacacacatt

SEQ ID NO: 37184 - DNA, 321 bp, Glycine max
  unsure at all n locations
  Clone ID: LIB3138-125-Q1-N1-C3
ctttaaggattgtgttcccaggacctatggtgttttaaatccacaaaatccttttgtgttaaataggtggatgggaaaattgactttcccccagggcacttcccgaagtgttaagagaatgcctctttctatagggggaggagctggtgcaaagaatgctattctcatgaatatgccaaatgctgttctttcaatgtggagatattttgttggagatctcgtctttgaagtttctaagatgacttctccctacattaaatgtacagtctctttcttcatagcatntggaaatttggctgatgataccatcaattttgaggc

SEQ ID NO: 37185 - DNA, 326 bp, Glycine max
  Clone ID: LIB3138-125-Q1-N1-C4
gtattttttaatttgggtccacctcaccaccgctggtggccctgcgtgtggtttcctcttccaaatccttctccttttcctgtagggaagaaagagatacctttggacccattcaagttccctccgacaaattatggggagcacaaactcaaagatcgttgcagaacttcgacatcggtgggccccgcgaacgcatgcccgaacccatcattcgcgcttttggcgtcttgaagaaatgcgcttgctaggtgaacatggagtatggtcttgatcccattgtgggagaaagcaataatgcaagcggcacaagaagtagccgagggaaa

SEQ ID NO: 37186 - DNA, 394 bp, Glycine max
  Clone ID: LIB3138-125-Q1-N1-C7
cattcctcagtccatttcacagcaaactgtttggaatcaaatggcaacagtgagaacaccattgaattttgattctagcaagcagagcttttgtcagttttctattgaccttctcggtggaggaatcttagtggacaaaactggagattggatcacacttatacaaaattctccaattagtaacttgttgagagttgctgcttggaagaaaggctgtttaatggtcaagattgtgatgtctgggaatgcagcagtcaaaaggagtgattgggcctcattggtacaagtgtttttaacaaacagcaacagtacagagcattttgatgcatgtaagtggacaaaatcagaaccacattcctgggaattgatcttcccaatagaggtatgtggtcct

SEQ ID NO: 37187 - DNA, 384 bp, Glycine max
  Clone ID: LIB3138-125-Q1-N1-C8
ctcgagccgaatcggctcgagggacctattgtgttttaaatccacaaaatccttttgtgttaaataggtggatgggaaaattgactttcccccagggcacttcccgaagtgttaagagaatgcctctttctatagggggaggagctggtgcaaagaatgctattctcatgaatatgccaaatgctgttctttcaatgtggagatattttgttggagatctcgtctttgaagtttctaagatgacttctccctacattaaatgtacagtctctttcttcatagcatttggaaatttggctgatgataccatcaattttgaggcttttccccacaagctggtgcagtttggagagattcaggaaaaagttgtattgaaaatttcac

SEQ ID NO: 37188 - DNA, 393 bp, Glycine max
  Clone ID: LIB3138-125-Q1-N1-C9
cacaaaagcaatgactatgtcatttaatccaaacccgtgttctgatgcatggagtttggaatttctgaagcgtactggatttcattgcgatatcatttgtgtcactggatggactgccaccccaatgcaggatgttcaggttacaattgattggtttatttcctctcaggaatgtgttcccaggacctattgtgttttaaatccacaaaatccttttgtgttaaataggtggatgggaaaattgactttcccccagggcacttcccgaagtgttaagagaatgcctctttctatagggggaggagctggtgcaaagaatgctattctcatgaatatgccaaatgctgttctttcaatgtggagatattttgttggagatctcgtctttgagtt

SEQ ID NO: 37189 - DNA, 373 bp, Glycine max
  Clone ID: LIB3138-125-Q1-N1-D10
tggaaatgcaagaagcttatcttgtcaatctcgtaaatgtgttacgagaattgtatttgcacagtccagaggaagctcgccaattgagaaggaaagctctctctcgtattgaatggctgcaaaaagctgatgtgcctaccatagcacagattgaagagttccattcaatgcagaggatgatgaatgctcctgattcaaatgataatattgatttactgttgagcattgatttgttgggtttacaaggagcaggtaaagcttttccaaacaaaattgtttttgatgataagcttgtgttggctaacacacaagaattctttgatggaaattttccagtggattcttggttaccaatttttgtgaattgtcttta

SEQ ID NO: 37190 - DNA, 369 bp, Glycine max
  Clone ID: LIB3138-125-Q1-N1-D11
tgcatgtatctatgaatgatggaaccaccacaaacgaggttgatgatcaacgttttcatagtgagtttcttagcactacttgtgaacttggtggtgggagtgctcggcgctgataactatagcagagatgattttcctcttgactttgttttcggttcaggaacctctgcttatcaggtggaaggagctgctaacaaagatggaagaactcctagcatctgggacacctttgcctacgctggatatgcccatggagaaaatggagatgtagcctgtgatgggtaccacaagtacaaggaagatgtgcagctaatgctggaaacagggcttgatgcctatagattttcgatttcatggtcaagattgtta

SEQ ID NO: 37191 - DNA, 373 bp, Glycine max
  Clone ID: LIB3138-125-Q1-N1-D12
atgaaatggttgactcatagatgaaatgggtgaaaacacagtacaccaaagggcattttgacttgtgtcacaagcgccttgattcaatcaaataccagatggtttgggaacacatgcatcattttcgtctttaaaatttagtttccctgcttttcccaatatatcatgttgggactggtttggcataggttcatgatttcagaggttttgccggctggtgatagtgccttgtctattggtgagtgtagattattcagttgctaatttaggatgataatagtcatttgtgggattcatcaaggcagctttcgatagaatcacaggatggatgactccttaggtgtgacctaatctctcgcggtttgtgcagaaa

SEQ ID NO: 37192 - DNA, 268 bp, Glycine max
  Clone ID: LIB3138-125-Q1-N1-D2
agaaaattgtttttcttactagagttgatccttttccagtagctttactggctgttctttttggcgttaagaatgaaattctgagttctaacgccactaatcctatgctgacgcgacttcttgagaactgtaagagtctcaaatatctggttgatgagtgtccttttgcatttgtgaactagtatgtagtattttattcacttaaataaagcgcattactatgtgcaatgagtgtgtttaaattttaaaaaaaaaaaaaaaatattaa

SEQ ID NO: 37193 - DNA, 392 bp, Glycine max
  Clone ID: LIB3138-125-Q1-N1-D3
gggccatgtttaggcatgcttttcttaacttaataagagacgtggaacggaggtagaggaccgggttgtaggaattccagggtctcgccaacgaggaacccgtgatatgagggtccacaaaatgaagggaagagatattttttttgttttttgtttcatttcaaagcagcggttaaacgtgaaaagtgaaaatcgccggtaaaagtgaaagatagtgacgggttggtggcagtggaagtacttgtagaaactagctagaaatggaagaaggaagaggggacatgcaactgcaactgtaactgcacgctcagtattttatttatttattgtattattgattttgatatttaagaggggtaaaaacaaaatgggccagtttttaaagttgaagt

SEQ ID NO: 37194 - DNA, 377 bp, Glycine max
  Clone ID: LIB3138-125-Q1-N1-D8
atgaaccatcctggccagattggtaatggatacgcaccagtccttgactgccacacttctcacattgctgtgaagttttctgaaatcttgaccaagattgacaggcgatctggtaaggagcttgagaaggagcccaaatttttgaagaatggtgatgctggtatggttaagatggttccaaccaagcccatggtggttgaaactttctctgagtatcctccccttggtcgttttgctgtgagggacatgcgtcagaccgtagctgttggagtcatcaagagtgttgagaagaaagaccccaccggagccaaggtcacaaaggctgccgccaagaagaagtgattgcattttggcatttttgctagcacatgtgatca

SEQ ID NO: 37195 - DNA, 390 bp, Glycine max
  Clone ID: LIB3138-125-Q1-N1-D9
attcatgaggttaagatcaatgtttcacctggctcttctttccattgcactgagccagggtggtttagggtgtgctatgccaacatggatgatatggctgtgcaaattgcattgcaaagaattcgaaccttcgtgcttcaaaacaaggaggtcatggttcctaacaagaaacattgctggcacagtaacttgaggttgagcctcaaaaccagaaggtttgatgatatcatgatgtcacctcactcccctatacctcagtcccctttggttaaagccacaatttgagttgccatatttctctgcaccatctcagaagaagtaactgatatacgatgattatttggttctttgatttgttattttggcaaggtacataaagtgctgattttg

SEQ ID NO: 37196 - DNA, 385 bp, Glycine max
  Clone ID: LIB3138-125-Q1-N1-E1
cagagataccgtgaagctgcagacatgatcaagaagggaaagatgtgcgctctcttcatcaacgatcttgatgcaggagctggtcgtcttggtggaaccacacaatacactgtgaacaaccagatggtgaatgccactctcatgaacattgctgataaccccaccaatgtgcagcttccaggtatgtacaacaaggaagagaacccccgtgttcccatcattgtcaccggtaacgatttctcaacactctatgcacctctcatccgtgatgggcgtatggagaagttctactgggcaccaacaagggaagaccgcattggtgtttgcaccggaattttccgcactgatggtattcctgaacaggacattgtcaagcttgttgaca

SEQ ID NO: 37197 - DNA, 371 bp, Glycine max
  Clone ID: LIB3138-125-Q1-N1-E10
attctccctatggagtttaatcttgtggtccgtcaaaagtttttaaattttgtgaggttcattatgaagaaaagggacaaacttagttgtcaagttggaatcaacccatactccatggaatggactggtttggccaatagattactgagtaagggcaatgatattctgtgttgcgattatgctagttttgatggtttgattaccaagcaagttatgagcaagatggcagaaatgataaacagtctttgtggtggtgatgaaaaattgatgcgtgaaaggacgcacctgctgttggcttgttgttcaaggatggcaatttgtaagaaagatgtttggagagttgaatgtggaatcccttctggatttccgct

SEQ ID NO: 37198 - DNA, 371 bp, Glycine max
  Clone ID: LIB3138-125-Q1-N1-E11
gatgaatgctcctgattcaaatgataatattgatttactgttgagcattgatttgttgggtttacaaggagcaggtaaagcttttccaaacaaaattgtttttgatgataagcttgtgttggctaacacacaagaattctttgatggaaattttccagtggattcttggttaccaatttttgtgaattgtctttatcctgtaagtcaattaccttcagaagctgtcgttgtaaatgttacatgtggtagtggacgtgtggtttacccaccactgcttggattagttctgcagttaacaatcgctcctcagatatcaacaaaaggattcgcacagcacttgggaaaggtaagaaaattgtttttcttactag

SEQ ID NO: 37199 - DNA, 390 bp, Glycine max
  unsure at all n locations
  Clone ID: LIB3138-125-Q1-N1-E2
ccaggacctattgtgttttaaatccacaaaatccttttgtgttaaataggtggatgggaaaattgactttcccccagggcacttcccgaagtgttaagagaatgcctctttctatagggggaggagctggtgcaaagaatgctattctcatgaatatgccaaatgctgttctttcaatgtggagatattttgttggagatctcgtctttgaagtttctaagatgacttctccctacattaaatgtacagtctctttcttcatagcatttggaaatttggctgatgataccatcaattttgaggcttttccccacaagctggtgcagtttggagagattcagganaaagttgtattgaaattttcacaagaggaatttcttacagcttggt

SEQ ID NO: 37200 - DNA, 309 bp, Glycine max
  Clone ID: LIB3138-125-Q1-N1-E4
ggtcagttttctatggaccttctcggtggaggaatcttaggggacaaaactggagatcggatcacacttatacaaaattctccatttagtactttgttgagagttgctgcttgtaagataggctgtttaatggtcaagattgtgatgtacgagactgcatctgaccaaaagagcgattgtgcctcacaggcacaagtgtggttaacaaacagcaacagtacagagcattttgatgcatgtaagtggacaaaatcagaaccacattcctgggaattgatcttcccaatagaggtatgtggtcctaataat

SEQ ID NO: 37201 - DNA, 377 bp, Glycine max
  Clone ID: LIB3138-125-Q1-N1-E5
ccccaagctcgacaatcaggtgtgttctcacgcaagtgggcaaacaccaagagttttcagtttctgcactttcttccccaaaagcgccagatctgaagcttccagagctccctagaacgaaccagcgtcaatcaacctgtccactcttttaaactacttccgtcgctcgcttaaatccgtctcttcgttcaaaatgtttggaaaacgctcctttgctagctcaaaagaccgttccggcaagataaccaagcagcaaacgacgaagagatcctttcgcgatgcttccaagcagaagcaggccgtcgccgagaagctcgacacgcgcaaggatagtccgatgatggagggctccccgagccttaccagcgccatcgtga

SEQ ID NO: 37202 - DNA, 350 bp, Glycine max
  Clone ID: LIB3138-125-Q1-N1-E8
ggttcacattcttcagaagattttcctgaaaaggaagatcaagaaaaacccaaaaagattgatgccagattgagacaaagaatagatcctcaatacaatgaggttcaggctcagatggaaacaaatttggttaaaatggtctcttgatgatgttgaaactcctaaaggttccatgttggatctgaaaatttctcaatctaaaattgcacttcccaagaacacagttggaggaaccattctgcgtagtgatctattggcaaattttttgacagagggcaattttagagcaagtgttgatttgcagcgcactcatcgtattagaggaatgattaaaatggtggccacagttg

SEQ ID NO: 37203 - DNA, 387 bp, Glycine max
  Clone ID: LIB3138-125-Q1-N1-E9
ctcgagccgcgagaattgtatttgcacagtccagaggaagctcgccaattgagaaggaaagctctctctcgtattgaatggctgcaaaaagctgatgtgcctaccatagcacagattgaagagttccattcgatgcagaggatgatgaatgctcctgattcaaatgataatattgatttattgttgagcattgatttgttgggtttacaaggagcaggtaaagcttttccaaacaaaattgtttttgatgataagcttgtgttggctaacacacaagaattctttgatggaaattttccagtggattcttggttaccaatttttgtgaattgtctttatcctgtaagtcaattaccttcagaagctgtcgttgtaaatgttacatgt

SEQ ID NO: 37204 - DNA, 322 bp, Glycine max
  Clone ID: LIB3138-125-Q1-N1-F1
gtttccaaatggtaatagtagcattatcctcctcccttcccgccggaagaaacctcttctcctccattccaccaacgccgccaccccccaccaccgtcttcgccaccccacaaccaccaatcccaatccccaaatacccccctccccgcaaaaaaccccaaccacccccaccacagaaccccgcccttaaacaccaccgccgctccaagtaccaccggccagttccccgtgacggcggcatcatcgcctccgacggcgcggaccgcgccgtcgaaatcggggagtccggcgtgtcgtaccttgctccccgcgcgccgttcga

SEQ ID NO: 37205 - DNA, 372 bp, Glycine max
  Clone ID: LIB3138-125-Q1-N1-F10
cgggtttggaaggattggaaggaacttcttgaggtgctggcacggtcgcaaagactcccctcttgatgtcattgccatcaacgacaccggcggcgtgaaacaagcctctcaccttctcaaatacgattccatcctcggaaccttcgatgctgatgtcaagcctgttggcagcaatgtcatctccgtggatggaaaggaaatcaaagttgtttctgaccgcaaccctgccaaccttccttggaaggacttggggatagacttggtgattgaaggaaccggggtgtttgtagacagagaaggtgcagggaaacacattcaagcaggagctaagaaggtgctcatcactgctcctggtaaaggagatatccccac

SEQ ID NO: 37206 - DNA, 371 bp, Glycine max
  Clone ID: LIB3138-125-Q1-N1-F11
aaaataatttgcttctctctctgtctttctcacaagacaacagaggaacactcccaaacaaaccatggacgtgggtcagatgcagagacagtggatcgactacaccaaatccctcttcctcgagggcttcctggatggtcagtttctgcaacttcagcagcttcaggatgagaacaaccctgactttgtggtcgaagttgtctctctcttctttgaagattctgaaaggcttctcaaagatctcacctttgccctagatcagaatggcgttgacttcaaaaaagttgatgctcatgtgcaccagttaaagggtagcagttcaagcataggtgcacaaagggtgaaaaatgcctgcattgctttccgcaact

SEQ ID NO: 37207 - DNA, 372 bp, Glycine max
  Clone ID: LIB3138-125-Q1-N1-F12
gttgtctttgatgattttcctgctgacaaagcaagtgagatcatgtcctatgccaccaaagggatcccccaaagccagaacaattctgttttcacctacacaccgagccagccttcatttcctgctaatttggtcagaacttcagctgattcaagtgctccaattattcctagtgtgaacattaccaactccattcatgaacaccctcaagcatcatccagacctgttgtttgtgatctgccaactgctagaaaagcttcactccaccggtttctggagaagagaaaggatagaattgcttccaaagcaccatatcaactagcaaatgggtcttctaaccagccagctgagtccatgccatggcttgggctg

SEQ ID NO: 37208 - DNA, 387 bp, Glycine max
  Clone ID: LIB3138-125-Q1-N1-F2
gtgggttgatttgttgaggttgagtttgatgttgatgttgttgctgccattgttgttgaccctgaaaaagcgtgggatcagagggtggttggtgttggttttgctgggaagggaatctttgatactcgtgtggaagtgcagacgtggttagagattttgtagttaggggttgggtgaagtggttgccatagataaagtgtgttcgaagcttgaaggaggaagagagcatattggttcgcgcacgctgaatctatgtgaacgtcgccattactgagtgaaacactggcagaaacaactagggtctagggagggaggacgcttttgtatttttattccaagggggacattttgattgggctactcattttgtttttgggccatgggttt

SEQ ID NO: 37209 - DNA, 368 bp, Glycine max
  Clone ID: LIB3138-125-Q1-N1-F4
gaacagcagagaaacaaagttagaagtaaagaagatcatggcttctctagcaaccttggctgctgttcaaccagctacgatcaatggccttgctggaagttccctctctggaactaagctctctttcaaggccctctcgccacagtgtcaaatccaagaacttcaggagtggtgccgtggtagcaaagtatggtgacaagagtgtgtactttgatttggaggatctgggcaacactacagggcagtgggacttgtatggctcagatgcaccttcaccctacaaccctcttcagagcaagttcttcgagacatttgctgctccattcacaaagaggggattgttactcaagtttctgatattgggaggt

SEQ ID NO: 37210 - DNA, 162 bp, Glycine max
  Clone ID: LIB3138-125-Q1-N1-F5
gaccatggtattggagaagggaaaccgaggtgttgaccaaggagaatagcatggccgttctgcacacagcatgtcctccacgtctttgcgcaagaagtctaaccgaactcttgtctccaagcttccatgtgccacactcagaagcatccttttaaatttgca

SEQ ID NO: 37211 - DNA, 375 bp, Glycine max
  Clone ID: LIB3138-125-Q1-N1-F6
ggaaatttggctgatgataccatcaattttgaggcttttccccacaagctggtgcagtttggagagattcaggaaaaagttgtattgaaattttcacaagaggaatttcttacagcttggtcaactcaggtgcgtcctgcaacaactctgttggctgatgggtgtccatatttgtatgcaatggtgcatgatagttcagtgtctacaataccaggtgattttgtcattggtgtcaagttgacaaccataaacaatatgtgtgcatatgggctcaatcctggtatttcaggttctcgtcttttgggcaccattcctcagtccatttcacagcaaactgtttggaatcaaatggcaacagtgagaacaccattgaat

SEQ ID NO: 37212 - DNA, 385 bp, Glycine max
  Clone ID: LIB3138-125-Q1-N1-F7
tgggtgtccatatttgtatgcaatggtgcatgatagttcagtgtctacaataccaggtgattttgtcattggtgtcaagttgacaaccataaacaatatgtgtgcatatgggctcaatcctggtatttcaggttctcgtcttttgggcaccattcctcagtccatttcacagcaaactgtttggaatcaaatggcaacagtgagaacaccattgaattttgattctagcaagcagagcttttgtcagttttctattgaccttctcggtggaggaatcttagtggacaaaactggagattggatcacacttatacaaaattctccaattagtaacttattgagagttgctgcttggaagaaaggctgtttaatggtcaagattgtg

SEQ ID NO: 37213 - DNA, 386 bp, Glycine max
  Clone ID: LIB3138-125-Q1-N1-F8
tcgaaatcagtgttccaaaatccaaacacactctctctccccatggcgttgaacaatggcgtccccgccaccggcaccggcctcatcgtcagcttcggtgagatgctcatcgacttcgtccccaccgtctctggcgtgtccctggccgaggcccctggcttcctcaaggcccccggcggcgcccccgctaacgtcgccatcgccgtgtcgcgcctcggcggcaaagccgccttcgtcggcaagctcggcgacgacgagttcggccacatgctcgccggaatcctcaaggaaaacggcgttcgcgccgacggcatcaactttgaccagggcgcacgcaccgccctggccttcgtgaccctacgcgccgacggggagcgtgagttcat

SEQ ID NO: 37214 - DNA, 314 bp, Glycine max
  Clone ID: LIB3138-125-Q1-N1-G1
gtttttaaattttgtgaggttcattatgaagaaaagggacaaacttagttgtcaagttggaatcaacccatactccatggaatggactggtttggccaatagattactgagtaagggcaatgatattctgtgttgcgattatgctagttttgatggtttgattaccaagcaagttatgagcaagatggcagaaatgataaacagtctttgtggtggtgatgaaaaattgatgcgtgaaaagacgcacctgctgttggcttgttgttcaaggatggcaatttgtaaaaaaagatgtttggagagttgaatgtgga

SEQ ID NO: 37215 - DNA, 353 bp, Glycine max
  Clone ID: LIB3138-125-Q1-N1-G10
ccaaaatcttccatttggtacctaattgaaagttgctgcttgaaaaaaaggctgtttaatggtcaaaattgtgatgtctgggaatgcaccagccaaaaggagtgattggccctcattggtacaagtgtttttaaaaaacagcaacagtacagagcattttgatgcatgtaagtggacaaaatcagaaccacattcctgggaattgatcttcccaatagaggtatgtggtcctaataatggttttgaaatgtggagttctgagtgggcaaatcaaacttcatggcatttgagtttccttattgacaatcccaaacagtctacagttttttatattctcttgggaatctctcaag

SEQ ID NO: 37216 - DNA, 379 bp, Glycine max
  Clone ID: LIB3138-125-Q1-N1-G11
aaaaaaaaaaaaaaaaaaaaaaaaaaaaaaaaaaagagaaaaaaaaaaaaaaaaaaaaaaaaaaaaaaaaaaaaaaaaaaaaaaaaaaaaaaaaaaaaaaaaaaaaaaaaaaaaaaaaaaaaaaaaaaaaaaaaaaaaaaaaaaaaaaaaaaaaaaaaagggggggggcccccctttgggggcctctccccccgggatattttttggggcggggccccggggggttccccattttcccttttggggggtgttttaaggctgggggaaaatagggggataggggttcccgggggaaaaattttttccctttaaaattcccccaaaacatacagccgggattataaaagtgaaactccggggggcccaaggggggggccac

SEQ ID NO: 37217 - DNA, 372 bp, Glycine max
  Clone ID: LIB3138-125-Q1-N1-G12
ggaaaaagttgtattgaaattttcacaagaggaatttcttacagcttggtcaactcaggtgcgtcctgcaacaactctgttggctgatgggtgtccatatttgtatgcaatggtgcatgatagttcagtgtctacaataccaggtgattttgtcattggtgtcaagttgacaaccataaacaatatgtgtgcatatgggctcaatcctggtatttcaggttctcgtcttttgggcaccattcctcagtccatttcacagcaaactgtttggaatcaaatggcaacagtgagaacaccattgaattttgattctagcaagcagagcttttgtcagttttctattgaccttctcggtggaggaatcttagtgga

SEQ ID NO: 37218 - DNA, 384 bp, Glycine max
  Clone ID: LIB3138-125-Q1-N1-G2
attgatttggaaacaatgcagagagttagagaattagttcagtttgggggatttgctgacactgaatatctaaggagaacattggctaaagaatttcagctgatggaattaagctttaaagaggcttttgaaatgccttttaccacaatatcaagaaagatactttgtgaggatatactacctctgtttcctcttccatctttgccaaaatcatcttcttccatgtggattcccacttcagtatcatattatgaggatccctctagagcttcagtgccaccttactcttgtcaaaaccagtttattgattacatatctttccaagtacctgatgagtgtttctcagatattgtaaattgtatatgcatagtcagaggattcatg

SEQ ID NO: 37219 - DNA, 244 bp, Glycine max
  unsure at all n locations
  Clone ID: LIB3138-125-Q1-N1-G3
ctgaacaaggacttgctgcacattggctttacaaggaaactggcaatccttttttatccatagacagcatgcatgaacctgaaactgaagcatcctcctatttctccaaagatctagaggaaggaaattcttcanatnttttattaagtaaatataagtcattgaaggctggacatccagtcctcagagtagaaggaagtcacttacttgctgcaattatcatcagtgtagaaaatgatgaaag

SEQ ID NO: 37220 - DNA, 334 bp, Glycine max
  Clone ID: LIB3138-125-Q1-N1-G4
gaaaaaggagagaatgtggatccaactttttacaaaagtttggttggaagtttacgttacttgacatgtacaaggccggatattctgtatgttgtaggagtagtaagtcgctacatggaaactccaaccacaactcacttcaaggtggcaaagagaatccttcaatacatcaaaggtacaacaaactttggcttgcactattactcttatgacaattataacattgttggctatagtgatagcgattggagtggagacttggatgatagaaagagcactactggttttgtgttctttatgggagatactgctttcacttggatgtcaaagaagc

SEQ ID NO: 37221 - DNA, 375 bp, Glycine max
  Clone ID: LIB3138-125-Q1-N1-G5
gggcactttctgaagtgttaagagaatgcctctttctatagggggaggagctggtgcaaagaatgctattctcatgaatatgccaaatgctgttctttcaatgtggagatattttgttggagatctcgtctttgaagtttctaagatgacttctccctacattaaatgtacagtctctttcttcatagcatttggaaatttggctgatgataccatcaattttgaggcttttccccacaagctggtgcagtttggagagattcaggaaaaagttgtattgaaattttcacaagaggaatttcttacagcttggtcaactcaggtgcgtcctgcaacaactctgttggctgatgggtgtccatatttgtatgcaat

SEQ ID NO: 37222 - DNA, 375 bp, Glycine max
  Clone ID: LIB3138-125-Q1-N1-G6
tgaagtactgccaagcactactgaaatccttgaaaactggccgtgctccagaagtagagtcatggaagcagttagcactatctcttgaggagaggattagaattcaccaacagggtggatatgctgcaaatttagctcctgcaaaattagttggcaaattgctcaacttttttgatagcactgcacatcgagttgttggtggtttaccaccgcctgctccttcgtcatcagcaggaactgttcatggaagtgaaaaacaataccaaaatatggcacctagagtatcctctagccaatcaacaatgtcgttggctccatctgcttcgatggaacccataagtgagtggacagctgacaataatagaatgggaaagc

SEQ ID NO: 37223 - DNA, 384 bp, Glycine max
  Clone ID: LIB3138-125-Q1-N1-G7
agagtgtggatcgaagcaatagaaatagagagattgagatgatgcagagttcaagatcacgaaaagcagcgttgagagtcagagttccttcgcggaagctgatgattctctctctggccattttcgccattctccctcccattttcttccacttccgcctccgacgcctccaacagctgcaattcacaaagtgccgttggctcaacgatcctcctctggtctgcgcccacggtggcgattcttccaaggcttctccaaacaccatggcgtcctatttccacgctcttcagtctcgcgtcgactgcattgagatcgacgtttctcgttcttctgacggagttctctttgctctccatgacaggcagggatttgcagcgcttaact

SEQ ID NO: 37224 - DNA, 248 bp, Glycine max
  Clone ID: LIB3138-125-Q1-N1-H1
gagcattctatccagcttagtggcattggctcctcgggggcacaaggatctgctattgactcttacatatcaagcttccaccacgaggtcagatggtgcccgtttggcactgagaattaggcgaaggtgtgtaaccttaaagaaccctggcttgttgtgctccatgcaccgcggtgccgcctctgctatgcactggaggaaccatcatgtttatttggtagtaacattagctgagtcaggaatgaatg

SEQ ID NO: 37225 - DNA, 372 bp, Glycine max
  Clone ID: LIB3138-125-Q1-N1-H10
cccagagatccttgagaagaatggtgtcaaattcggcgaggccgtgtggttcaaggccggtgcacagatcttctcagagggaggccttgactacttgggcaacccaaacctgatccatgctcagagcatccttgctatctgggctgttcaggttgtgctcatggggtttgttgaaggttacagagttggtggaggaccacttggtgaaggacttgacccaatctaccctggtggtgcttttgaccctcttggtctggctgatgaccctgatgcattcgctgagttgaaggtcaaggaactcaagaacggtcgcttggctatgttctccatgtttggtttctttgttcaggctattgtcactggcaagggccc

SEQ ID NO: 37226 - DNA, 369 bp, Glycine max
  Clone ID: LIB3138-125-Q1-N1-H11
ttgtgatctgagtataaagatggagctgagtagcatcaaagatgcatttgatcgtgtagccaagaagcaaaaattatcctcttccaagtctcaagaagttgttgaccaggtggggtgtgaaattgagcaagcattggcaacaattcagtcatcacatgacccctcagctcctgttgaccagaaatctgttctcacagaacttaagtttaagcttaatgctattggaccacttcaacagttggaaggatcaaataaggaattgaacataagtcttaccaagtatcaaaaactccttgaaaaattgttaaaccctgacatatcaaaggcatacagaaatgtggactttgatactcatattgtcaatcagat

SEQ ID NO: 37227 - DNA, 213 bp, Glycine max
  Clone ID: LIB3138-125-Q1-N1-H2
gaagatgctggccagcttaatggcaatggggcctaccgagcacaaggccctgccactgtcgctgacatgtacagctgccaagacgtggccagctggagccggtttgggtttgagaatttggcacaagtgcagaaccgaagagcaccctggcttggtgcgctctatgcaccacggtgccgatattgtcaggctctgtgggaatcatatgtggat

SEQ ID NO: 37228 - DNA, 367 bp, Glycine max
  Clone ID: LIB3138-125-Q1-N1-H3
caaaactagtgcaactttgcaatttagaaagttagcagattgtgattttctcaagagaaactttaagcagatgtctaatgttttgtgggtggctcctgaggacaaggcgagtttatggtcacaacttcattatgtttcgtgtaataatctggaaatgcaagaagcttatcttgtcaatctcgtaaatgtgttacgagaattgtatttgcacagtccagaggaagctcgccaattgagaaaggaaggctctctctcgtattgaatggctgcaaaaagctgatgtgcctaccatagcacagattgaagagttccattcgatgcagaggatgatgaatgctcctgattcaaatgataatatttgatttac

SEQ ID NO: 37229 - DNA, 378 bp, Glycine max
  Clone ID: LIB3138-125-Q1-N1-H4
ttcttttatggcagtattgtgtacatggttctctttatgatacagtgtagaataattgaatatgatattaagagtgagtcagtctacagcgctatggggtttccagcagcagcggtggccaaatgaccaaacccctttcttaacctcaaatttcaacagaagacaagtcataatatgcggcctccgttccagctacaaagcgcggcgtcgcacaaggatattgtcgaaagagagcatagaagtgattcacgcactcaaactcgccagatcccccgaccacgttctcaatgccaaactctctcgcctcttgaaacccgatgccttaaacctattggacgaattgcaaagacaaaaccaactccacttatctctcaaggg

SEQ ID NO: 37230 - DNA, 223 bp, Glycine max
  Clone ID: LIB3138-125-Q1-N1-H6
atgaattgttcttttagggggcgcgccagttctgatattgacaccatctgctctcaagactgtgaattgtggaatcctgttcgcacaaaagcaatgactatgtgatttaatccaaacccgtgttctgatgcatggagtttggaatttctgaagcgtactggatttcattgcgatagcattcggtcacttgatggactgcccccccaatgcaggatgttgcggt

SEQ ID NO: 37231 - DNA, 387 bp, Glycine max
  Clone ID: LIB3138-125-Q1-N1-H8
gcgcgcgtacataagctattaattttgctcgagggacattttttcccgcattttggttttaaagttagggggacataaaccaggctgtttttcctggacttcaaggtggtccacacaatcacactatttcaggcttagcagttgcactgaagcaggctatgacaccagaattcaagaattaccaaaagcaagtacttagcaactgctcagcatttgcacagagtttgttagaaaaaggctacgaacttgtatctggaggaactgacaaccatatagagttggtgaacttaataaacaagggtatagatggttctagggtttacaatgtacatgaagcagttcatatagctgccaataaaaataccgttccaggggatgtgtctgcta

SEQ ID NO: 37232 - DNA, 380 bp, Glycine max
  Clone ID: LIB3138-125-Q1-N1-H9
cgtcgcgtgtactttcttgcgaaacagaagggcgaaggggcaaacacaacttttttgtttttttgtagagcgagagagaaaaaaatgttggggatcttcagcagttccgtggtgtcgccgccggaggagctggtggctgccggcagcagaacgccgtcgccgaagacgacggcggggaagctgctgaaccggttcgtggagaacaaggcgtcggcggtgtcgctgcaggtgggagaacacgtgcagttggcttacacgcaccacaacgagtcaccgtggcatcccaggtaattaaacgcatcataaaattcagaaattccaccatgcacgaacacgaactctacttaatcgcctaagcgacgtcgtttttgtcacgtcgc

SEQ ID NO: 37233 - DNA, 370 bp, Glycine max
  Clone ID: LIB3138-126-Q1-N1-A1
gtttcgtggagcagaggaaacaacagcttcgttgtgtgggatcctcaggctttttccatcactcttctccccagatacttcaagcacaacaacttctccagctttgtcagacaactcaacacctatgggtttagaaaggtagatccggataagtgggagtttgctaatgaagggtttcttagaggacagaagcatctattgaagaacataaggagaaagaagacattaactaatcaacaacaagctcttccaatagaccattgtgttgaagtggggaggtttggatcattagatggtgaagttgatgcattgagacgtgacaagcaagttctcatggtggagctagtgaagctcagacaacaacagcaga

SEQ ID NO: 37234 - DNA, 369 bp, Glycine max
  Clone ID: LIB3138-126-Q1-N1-A10
gtgagaacaccattgaattttgattctagcaagcagagcttttgtcagttttctattgaccttctcggtggaggaatcttagtggacaaaactggagattggatcacacttatacaaaattctccaattagtaacttgttgagagttgctgcttggaagaaaggctgtttaatggtcaagattgtgatgtctgggaatgcagcagtcaaaaggagtgattgggcctcattggtacaagtgtttttaacaaacagcaacagtacagagcattttgatgcatgtaagtggacaaaatcagaaccacattcctgggaattgatcttcccaatagaggtatgtggtcctaataatggttttgaaatgtggagt

SEQ ID NO: 37235 - DNA, 370 bp, Glycine max
  Clone ID: LIB3138-126-Q1-N1-A11
ccgccgaccgcttccaccgcccccaatcctccctcttcgccgcccgcgtctacggcttcggccaccactccccctccaacgactacaagctcctgagcattacctacttcgtggatctccagaaacgcaccttcgattcccaggtccagctctacaccctcaaatccgactcctggaagaacctccccagcatgccctacgccctctgctgcgcccgcaccatgggcgtcttcgtctccggctccctccactggctcgtcaccagaaaactccaaccccacgaacccgatctcatcgtctcctttgacctcacgcgcgagacattccatgaagtgcctctccctgtaaccgtcaacggagatttcgacat

SEQ ID NO: 37236 - DNA, 367 bp, Glycine max
  Clone ID: LIB3138-126-Q1-N1-A12
caaattcaagcaactttggtgatggtagttttgaatttattatcgaatcattcgccagatgaagagtacattgggcaatatgtggaacaatcgtgggttgagaatcaaactataaaggcagcctttgaaaggtttagtacgaaattgaaggagattgaaggtattatagactcaaggaatgcaaattgtgatttgaaaaataggaatggagctggggtggtgccttatgaactaatgaagccattctcagggcctggagtcactggaaagggtgttccatatagcatatctatttaaagattgttattttatatacaatatttataattaatttcttactaatgcaatgtatgtgttttgtggaatc

SEQ ID NO: 37237 - DNA, 100 bp, Glycine max; identical to SEQ ID NO: 37050
  Clone ID: LIB3138-126-Q1-N1-A2

SEQ ID NO: 37238 - DNA, 365 bp, Glycine max
  Clone ID: LIB3138-126-Q1-N1-A3
aaacaatctaaagaagggaaacatagagagtgctgaactctatgttcatgtgaaacctgcattgggaggagcctttactgatattgtgatgtgggttttttgccccttcaatggacctgccacccttaaagtggcattgatgaacattgagatgagcaagataggagaacacgtaggtgattgggagcactttacccttcgtataagcaacttcaccggagagctatggtctgtttacttctctcagcatagtggaggaggatggatacatgcatttgatctggagtttaataaggggaataagccaattgtttattcatcaaaagatggccatgctagctttcctcatcccgggacgtaccttc

SEQ ID NO: 37239 - DNA, 351 bp, Glycine max
  Clone ID: LIB3138-126-Q1-N1-A4
ctcgaaggcgaccgcgctgtcggcgtcaaagtggttcctacaaagcacctggccaatggcgagactccatcgcgtattatcagagcacgcaagcaaatcatcgtgtctggcggaacactgagctccccactcattcttcagcgctctggtatcggtgacccagagaagctccgcaaggctggtgtcaagccgctcgtcgacttgcccggtgttggtctcaacttccaggaccactacctcaccttcgctacctaccgtgcaaagccacatgtcgagtctttcgacgacttcgcgcgcggtgaccctgcgactcaggaacgtgtcttccagcaatggaatattaacggcact

SEQ ID NO: 37240 - DNA, 367 bp, Glycine max
  Clone ID: LIB3138-126-Q1-N1-A5
agtctcttcaattgtaagctttttgcgctagggtttcctctgcaatctcttgtacttgaagctcgttccttcttccggatctcgatctatggatacccgcaagaggggaagacccgaacccggcttcagcttaaatggcggattcaagaaatccaagcaagaaatggagtccttatcaactggtgtaggaagcaaatcgaagccatgtaccaagtttttcagcactgctggttgcccatttggtgagggctgccacttcttgcactatgttcccggtggttataatgcagttgcccatatgatgaatctaacacctgcagcacctccagcatcaagaaatgttgcagctctgcctcctgtaccaaat

SEQ ID NO: 37241 - DNA, 371 bp, Glycine max
  Clone ID: LIB3138-126-Q1-N1-A6
gcaggcttgctcagaaccgtgaagctgccagaaaaagccgcttgcgaaagaaagcgtatgtccaacagttggaaagtagtcgtttgaagctgacccaactagagcaagagcttcagcgagctaggcagcatgtgaggggattttcatatctagctcgggtgatcaagcacatacattgagtggaaatggggcaatgcaatttgatgcagaatatgcaaggtggctggaagagcagaatcgacaaattaatgagctgaaagctgctgtaaactctcatgcaagtgacactgaacttcgcatgatcgttgatggtatattggcacattatgatgagatttttaggctgaaaggtgttgcagctaaggctgatg

SEQ ID NO: 37242 - DNA, 360 bp, Glycine max
  Clone ID: LIB3138-126-Q1-N1-A7
ttggatctgaaaatttctcaatctaaaattgcacttcccaagaacacagttggaggaaccattctgcgtagtgatctattggcaaattttttgacagagggcaattttagagcaagtgttgatttgcagcgcactcatcgtattagaggaatgattaaaatggtggccacagttggtattcctgagaatacaggtatatcattggcctgtgctatgaatagttcttttagggggcgcgccagttctgatatttacaccatctgctctcaagactgtgaattgtggaatcctgcttgcacaaaagcaatgactatgtcatttaatccaaacccgtgttctgatgcatggagtttggaattt

SEQ ID NO: 37243 - DNA, 364 bp, Glycine max
  Clone ID: LIB3138-126-Q1-N1-A8
taggtagtggattcaaagaaataatctggtgagcttgaaatgaattcgacacagatttcctatttgtaactgaagtagggcctgaaacattatgcttaataagagcaagtggtagatttgattttccatggtctccatcatatcttgtaccctcagacaatccagaaaaggggagaatcttgtgtctattagagtgagggattggcctcatagaagcaacaataaatttctgtctatgactgccaatagcttcaactccccggccactagcattaatagactttgaactagagcatggttcagatctttttcgactgggtggtggaggcttcagccaacttggaataccagagaaaacatgatc

SEQ ID NO: 37244 - DNA, 368 bp, Glycine max
  Clone ID: LIB3138-126-Q1-N1-A9
ctcaatcctggtatttcaggttctcgtcttttgggcaccattcctcagtccatttcacagcaaactgtttggaatcaaatggcaacagtgagaacaccattgaattttgattctagcaagcagagcttttgtcagttttctattgaccttctcggtggaggaatcttagtggacaaaactggagattggatcacacttatacaaaattctccaattagtaacttgttgagagttgctgcttggaagaaaggctgtttaatggtcaagattgtgatgtctgggaatgcagcagtcaaaaggagtgattgggcctcattggtacaagtgtttttaacaaacagcaacagtacagagcattttgatgcatg

SEQ ID NO: 37245 - DNA, 369 bp, Glycine max
  Clone ID: LIB3138-126-Q1-N1-B1
ggtgctgttcctcctgtcaaagaccaaggaggctgtgggagctgttgggcattctcagcaatcggtgcagtagaaggaataaataagatagtaacaggcgaactgatttcgttatcagaacaagaattggtggattgtgatactggatataaccaaggatgcaatggaggacttatggactatgcatttgagttcataatcaacaatggcggcattgattctgatgaggattacccataccgtggtgttgatggtagatgcgacacatataggaaaaatgctaaagtcgtttctattgatgactacgaagatgttcctgcctatgatgagttagccttgaaaaaggccgttgcaaatcagcccgtgagc

SEQ ID NO: 37246 - DNA, 369 bp, Glycine max
  Clone ID: LIB3138-126-Q1-N1-B10
ctcgagccgcgatcacataattaagcaattacgtttaacactctaaaacatctctcgttggctatattatatatcctgaaaagctcactcatggcaagtatttctactgtctcggttcttgatagaaggcttgaagggaaagtggctcttatcagtggtggtgctagcggtataggtgaggccactgcaagactcttctctaagcatggagcacacgttgtgatagctgatattcaagacgatttgggtctctctctttgcaaacacttggaatccgcttcctatgtccattgcgatgtcacaaacgaaaacgacgttcaaaacgccgttaacacagcgattttcaagtatggcaatctagatatcatg

SEQ ID NO: 37247 - DNA, 369 bp, Glycine max
  Clone ID: LIB3138-126-Q1-N1-B11
atagaaacctctcagcccctctccgatcaaatggccaccgtaatcgacggcaaagccgttgcgcaaaccatccgatctgaaatcgccgacgaggtgcgccagctctctcaaaaatacggcaaggttccgggattagcggtggtgatagtagggaacagaagattcacagagctatgttggaatgaagagaaaggcatgcgctgaattgggaatcaaatccttcgatgtggaccttcccgaacaagtctcccaagctgaactaatcaaacaagttcaccagttgaatgctaaccctgacgtacatggtatattggttcagctcccgttgcctaagcacataaatgaagaggaagttctgactgaaatcag

SEQ ID NO: 37248 - DNA, 370 bp, Glycine max
  Clone ID: LIB3138-126-Q1-N1-B12
tccattgttggaatctggtttgcaaaaagacagagggttaattgtggagtattttggaaggatgtcttacgttgctcataacgttaatcagccccaagagaaagatttgttggagggaaatttttcctttgatattaaatctcgctctagattggaaaaagtttcctctacaaaagcacaatttgttagtggaaaaaccttcaaatatgatataattggtgctggttcacattcttcagaagattttcctgaaaaggaagatcaagaaaaacccaaaaagattgatgccagattgagacaaagaatagatcctcaatacaatgaggttcaggctcagatggaaacaaatttgtttaaattgtctcttgat

SEQ ID NO: 37249 - DNA, 369 bp, Glycine max
  Clone ID: LIB3138-126-Q1-N1-B2
agcggttctttcatttgactcttgttctgaacgacttttcaagagaatcaaaccatggcagtgaaagtatacggtccccactgtgcttccaccaagcgggtgctggtttgtctggttgagaaggaagtcgaatttgaggttgtccctgttgatgtcactaagggggagcagaaggatcctgagtacctcaaactacagccatttggagttgttcctgtcatcaaagatggagattataccttatatgaatctcgtgctataatgaggtattatgcagaaaaatacagatctcaaggggttgagttgctgggaaaaacaatagaagagaggggtctagtggagcaatggctataagttgaagcacacaac

SEQ ID NO: 37250 - DNA, 368 bp, Glycine max
  Clone ID: LIB3138-126-Q1-N1-B3
ctttgttgtgctgcttcagcgtctgcaggtagcaaagatggcgacattgactgcttcaagtaacttagtctctagaaattctcatgtccaccatggaccaacaactgcttcatatgagtctaaagcagtagcaatgggacttagatctctgaagcagacaaatactcataatggactaagaattttgaacccggtggatgagctacttaacagaaccccaattaaaaccaatgcagtgcaagctatgaggaagggacctcaaggcaagaatgccaggcctaaaggcatgatcacatgtggcatgactttcataattataggaaccgaggtggctccatggtgcaaaactggtgggttgggagatgttc

SEQ ID NO: 37251 - DNA, 326 bp, Glycine max
  Clone ID: LIB3138-126-Q1-N1-B4
atcaaacttcatggcatttgagtttccttattgacaatcccaaacagtctacagtttttgatattctcttgggaatctctcaagattttgaaattgctggtaatactcttatgccagctttttctgttccacaggctactgccagatcttctgaaaatgcggaatcctctgcatgatctggaatttgtgttttctttcgcttgttcgtttgtttaattcaataaaggaaattaggcatgaccctcttgttgagtatgctctgcctatttgaaaatttccacacctcttttaattgtcgtaatgatgtgtgaagtgtgtgttatttt

SEQ ID NO: 37252 - DNA, 374 bp, Glycine max
  unsure at all n locations
  Clone ID: LIB3138-126-Q1-N1-B5
ccccaacactcaactcggctcgtcgctattgttgttgttcttcttctccatatcaaacaaagtatagataaaatatcattgcagcttcattttcatcctccaattaattagcaatggggcacacatcccttttcactccctcttcctctcttaggttcaactctcttcttgtttcctccaccccctcttcttcttcacgctccaacagcgtttctttccccgccctctccaggaacataaggaaatcggtngaagatagaaagattaataaaaattctgctgtgaaagcagtgtatggtgatgaattttggacacctgcgaggagttcacctcaggatatttggtccataaggagtgatttgcaagtcccatct

SEQ ID NO: 37253 - DNA, 375 bp, Glycine max
  Clone ID: LIB3138-126-Q1-N1-B6
ctccagcccacactcacacacaatgggtcacgcagccgggctccgcgcgggtacgcgctatgctttctcgagagacttcaagaagaagggtatgatccctctctcgacctacctcaagcagtacaaggtcggtgatatcgtcgatgtcgtagccaacggtgcggtccagaagggtatgccctacaaggtctaccacggcgagaccggtatcgtctacaacgtcaccaagtccgctgtcggtgtcatcctccagaagcaggtcggcaaccgatacatggagaagcgcatcaacgtccgcatcgagcacgttcgccactcccgctcacgagaagacttcctcaagcgcgtcaagctcaacttcgccaagcaacaaaa

SEQ ID NO: 37254 - DNA, 366 bp, Glycine max
  Clone ID: LIB3138-126-Q1-N1-B7
catgaatatgtcaagccttactttagtggttctaaattgaaaagctttctagctagtcataacatcaccattactgatggtattgacaaaactagtgcaactttgcaatttagaaagttagcagattgtgattttctcaagagaaactttaagcagatgtctaatgttttgtgggtggctcctgaggacaaggcgagtttatggtcacaacttcattatgtttcgtgtaataatctggaaatgcaagaagcttatcttgtcaatctcgtaaatgtgttacgagaattgtatttgcacagtccagaggaagctcgccaattgagaaggaaagctctctctcgtattgaatggctgcaaaaagctgat

SEQ ID NO: 37255 - DNA, 362 bp, Glycine max
  Clone ID: LIB3138-126-Q1-N1-B9
aattgtttaaacctaattctcatttcttcatcgttcgattcttctcctcctaaagatgcagatcttcgtgaaaactttgaccggtaagaccatcacccttgaggtggagtcctccgacaccatcgataacgtgaaagctaagattcaagacaaggaagggatcccacctgaccagcagagacttatctttgcgggtaaacagcttgaggatggtcgaacccttgccgactacaacatccaaaaggaatccactctccacctcgtgcttcgcctcaggggtggcatgcaaatctttgtcaagactttgactggcaagaccatcaccctcgaggtcgaatcctcggacaccattgataatgtca

SEQ ID NO: 37256 - DNA, 353 bp, Glycine max
  Clone ID: LIB3138-126-Q1-N1-C1
gaacaatgttgtgtcacccaatcctgcagccagaccatccttcacagaaattgccagtggattgcgcataatgtctgcagcagcagctagccaaaccaaaacacagggcaataaagcatctaaatgagttacattgttatcttggcatctcttaatggtgatccatggaagtaaattatacaaggttggttccatacactgtagggtttttttcttcttctttttcttaccataataatccaatactacaagtgcagagttgttgtataccaatgttttactacaagtgcaaaaaattgtcattcaattcctgtatattggatattgtttttcttgatcctttataaaatctt

SEQ ID NO: 37257 - DNA, 371 bp, Glycine max
  Clone ID: LIB3138-126-Q1-N1-C10
gttgacaaccataaacaatatgtgtgcatatgggctcaatcctggtatttcaggttctcgtcttttgggcaccattcctcagtccatttcacagcaaactgtttggaatcaaatggcaacagtgagaacaccattgaattttgattctagcaagcagagcttttgtcagttttctattgaccttctcggtggaggaatcttagtggacaaaactggagattggatcacacttatacaaaattctccaattagtaacttattgagagttgctgcttggaagaaaggctgtttaatggtcaagattgtgatgtctgggaatgcatcagtcaaaaggagtgattgggcctcattggtacaagtgtttttaacaa

SEQ ID NO: 37258 - DNA, 371 bp, Glycine max
  Clone ID: LIB3138-126-Q1-N1-C11
attttcacaagaggaatttcttacagcttggtcaactcaggtgcgtcctgcaacaactctgttggctgatgggtgtccatatttgtatgcaatggtgcatgatagttcagtgtctacaataccaggtgattttgtcattggtgtcaagttgacaaccataaacaatatgtgtgcatatgggctcaatcctggtatttcaggttctcgtcttttgggcaccattcctcagtccatttcacagcaaactgtttggaatcaaatggcaacagtgagaacaccattgaattttgattctagcaagcagagcttttgtcagttttctattgaccttctcggtggaggaatcttagtggacaaaactggagattgga

SEQ ID NO: 37259 - DNA, 365 bp, Glycine max
  Clone ID: LIB3138-126-Q1-N1-C12
gcctcacttcctcccttcctcgcacgtgccgttctctctctcttttttgttttgcagcgaacgatggagccacgatccttgaccagatggacgtggacaaccaaatcgcgaagctgatggtggagctctcgcggagccaggactacgaaatcggcgacggaaccaccggcgtcgtcgtcatggccggcgcgcttctcgagaaggccgagcgcctcctcgagcggggaattcaccccatcaggatcgccgagggttacgaaatggcgtccaggatcgccgtcgagcatctcgagcgcgtcgccaacaagttcgagttcgacgagtctaatttggagcccctcattcaaacttgcatgaccacactc

SEQ ID NO: 37260 - DNA, 370 bp, Glycine max
  Clone ID: LIB3138-126-Q1-N1-C2
gggaaatttttcctttgatattaaatctcgctctagattggaaaaagtttcctctacaaaagcacaatttgttagtggaaaaaccttcaaatatgatataattggtgctggttcacattcttcagaagattttcctgaaaaggaagatcaagaaaaacccaaaaagattgatgccagattgagacaaagaatagatcctcaatacaatgaggttcaggctcagatggaaacaaatttgtttaaattgtctcttgatgatgttgaaactcctaaaggttccatgttggatctgaaaatttctcaatctaaaattgcacttcccaagaacacagttggaggaaccattctgcgtagtgatctattggcaaat

SEQ ID NO: 37261 - DNA, 370 bp, Glycine max
  Clone ID: LIB3138-126-Q1-N1-C3
agcatttggaaatttggctgatgataccatcaattttgaggcttttccccacaagctggtgcagtttggagagattcaggaaaaagttgtattgaaattttcacaagaggaatttcttacagcttggtcaactcaggtgcgtcctgcaacaactctgttggctgatgggtgtccatatttgtatgcaatggtgcatgatagttcagtgtctacaataccaggtgattttgtcattggtgtcaagttgacaaccataaacaatatgtgtgcatatgggctcaatcctggtatttcaggttctcgtcttttgggcaccattcctcagtccatttcacagcaaactgtttggaatcaaatggcaacagtgaga

SEQ ID NO: 37262 - DNA, 376 bp, Glycine max
  Clone ID: LIB3138-126-Q1-N1-C6
ctcgtcttcactgagaaaaatccttcttcgtgcatgctcctcgtttctatctaaaggggcgaaagagtagattataagggggtaagtgagaaagagagtaaaaacaaaattaaaacatgactatggaagagggcagggtcgagaacgaggactacacacaagatggtactgtcaacattaaagggaaacctattcttagatccaaaagtggtggttggaaagcttgctcctttgttgttgtatatgaggtattcgaaagaatggcttattatgggatatcatcaaatttgatcctttatcttacaacaaagcttcaccaaggcacagtatcctctgcaaacaatgtcaccaattgggttggcaccatttggatgac

SEQ ID NO: 37263 - DNA, 368 bp, Glycine max
  Clone ID: LIB3138-126-Q1-N1-C7
agaaaaggaagaaccgaaaattcgagaagacaattcgatacgcatcgcgaaaagcatatgcggaaacccggcccaggataaaaggccgcttcgccaaacgaacagaaattgactcggatgtggagcgtctctatagccctggccctgcggtgctcatgctggacactccatacggcgtcgtaccatcgttttagttaatttcaaaatgaagaaacgatggagtgcatgaatcttagaataatgattagcgattctgtgggattgttaggggaaaaaggtgaagaatcgaatcggtacgaacgtgattcttagctggagcgcgatgggggaagattattgtgaagatttgtctcgatcgaccagaaaag

SEQ ID NO: 37264 - DNA, 367 bp, Glycine max
  Clone ID: LIB3138-126-Q1-N1-C8
ctctgttggctgatgggtgtccatatttgtatgcaatggtgcatgatagttcagtgtctacaataccaggtgattttgtcattggtgtcaagttgacaaccataaacaatatgtgtgcatatgggctcaatcctggtatttcaggttctcgtcttttgggcaccattcctcagtccatttcacagcaaactgtttggaatcaaatggcaacagtgagaacaccattgaattttgattctagcaagcagagcttttgtcagttttctattgaccttctcggtggaggaatcttagtggacaaaactggagattggattacacttatacaaaattctccaattagtaacttattgagagttgctgcttg

SEQ ID NO: 37265 - DNA, 364 bp, Glycine max
  Clone ID: LIB3138-126-Q1-N1-C9
aaaaaggatgaatctaggcaagccagaaacaagttaggagaaggtggatttggaccggtatataagggaatattggaagatggacaagagattgcagtcaagaggctttctaaaacttcaagacaaggaactgaggagtttaaaaatgaagtaaagttgatggcaactcttcagcaccgtaatcttgtaaaacttcttggttgttctattcaacaagatgaaaagttgttgatctatgagttcatgcccaacagaagcttggattactttatttttgatacaatgcaaggtaaattactagattggactaggtgctttcaaattatagaaggaattgctcgtggacttctgtaccttcatcaag

SEQ ID NO: 37266 - DNA, 288 bp, Glycine max
  Clone ID: LIB3138-126-Q1-N1-D10
cttatatcaacaaaaggattcgcacagcacttgggaaaggtaagaaaattgtttttcttactagagttgatccttttccagtagctttactggctgttctttttggcgttaagaatgaaattctgagttctaacgccactaatcctatgctgacgcgacttcttgagaactgtaagagtctcaaatatctggttgatgagtgtccttttgcatttgtgaactagtatgtatttttttattcacttaaataaaccgcttactatgtgccatgtgggggtttaatttttt

SEQ ID NO: 37267 - DNA, 371 bp, Glycine max
  Clone ID: LIB3138-126-Q1-N1-D12
gttcaccgtcgccagtggcagtggcgtggctataatcccctgcggcaacaccggcaccgccgcactcttccctcaccgaacgagaagaaacctccacgtggcgcgcgcgaagaagcccctcaacggcgacgacgtttccgtttacgctgagctcctcaaagccgaagtttccgttttggaaaataataagcctctcgacgacaacgatgccgctttgaagttcctagagaagatagaccgtcagtttcaacagcccgatttatgggaaggaccccagtgggactggctcggcatcttcatcaagttttcccccatcattggcatcgctgttgcggtatactatcctcttcaaccttccttcttcttattct

SEQ ID NO: 37268 - DNA, 363 bp, Glycine max
  Clone ID: LIB3138-126-Q1-N1-D2
attgaccttctcggtggaggaatcttagtggacaaaactggagattggatcacacttatacaaaattctccaattagtaacttgttgagagttgctgcttggaagaaaggctgtttaatggtcaagattgtgatgtctgggaatgcagcagtcaaaaggagtgattgggcctcattggtacaagtgtttttaacaaacagcaacagtacagagcattttgatgcatgtaagtggacaaaatcagaaccacattcctgggaattgatcttcccaatagaggtatgtggtcctaataatggttttgaaatgtggagttctgagtgggcaaatcaaacttcatggcatttgagtttccttattgac

SEQ ID NO: 37269 - DNA, 364 bp, Glycine max
  Clone ID: LIB3138-126-Q1-N1-D3
agaaaattcagtgctgaaacatggcttcggctactctctctgtagccaaaccagcccttcaggcaaatgggaaaggcttctctgaattctctggcctccgaagctcatcaggcttccttcccttttctagaaaatcttcagaggatttccattctgtcattgccttccagacctatgcagttggaagcagtggaggatacaagaagggtgtgacagaagcaaaactgaaggttgccataaacgggtttggaaggattggaaggaacttcttgaggtgctggcacggtcgcaaagactcccctcttgatgtcattgccatcaacgacaccggcggcgtgaaacaagcctctcaccttttcaaata

SEQ ID NO: 37270 - DNA, 376 bp, Glycine max
  Clone ID: LIB3138-126-Q1-N1-D4
aaagaaagaaaacaaagaggagaaagaaagtagttgaggaagatacaaacaatttttgcagattgttgagaatgcctttcaagaagcctcatcacacctcagacaagaactacataacaggggacgacggaggcaagttcgagatacaacctagaggactcaacattgtgtggggaaatgattctcgatactggaaaattccagaacaaggtcctgcggagctgatccaagtttcatggttggaggtatccggcgtggtaaacttaccaggtgtcaagaaatatagggttgaattcgaagtgagagttaaagacgatgggttcggttggagtggcacggacgtgctagtgatggctaagattgggaaaacgggaaa

SEQ ID NO: 37271 - DNA, 369 bp, Glycine max
  Clone ID: LIB3138-126-Q1-N1-D5
caacaagacaaatattgccagcctcaaccaagaccttcgctccaataccaacagcaagaacccaggcatccatcaaaatgcttttcaacgtcgctgccgccgcagtcgcgctttgcgctgcctctgcatcagctattgctctcccacagaacgctggcagctctgccggatccaatatgtgcgatgcgtcgaccttcaacaacggagcagacctcgacattccacaagcaaacgcccaagattgcactgatctcgtcagcggccttgacacaagccagacctggtcggtgtcgaagagctgggctcgtctttcaacacaaggaacatgtgctttcagcgttcgtgtcatcgctggctctaaggacggat

SEQ ID NO: 37272 - DNA, 335 bp, Glycine max
  Clone ID: LIB3138-126-Q1-N1-D6
tgaaaatgcggaatcctctgcatgatctggaatttgtgttttctttcgcttgttcgtttgtttaattcaataaaggaaattaggcatgaccctcttgttgagtatgctctgcctatttgaaaatttccacacctcttttaattgtcttaatgatgtgtgaagtgtgtgttattttaaaaaaaaaaaaaaaaaaaaaaaaaaaaaaaaaaaaaaaaaaaaaaaaaaaaaaaaaaaaaaaaaaaaaaaaaaaaaaaaaaaaaaataataaaaaaaaaaaaaaaaaaaaaaaatggggggggcccccactattggacctcttcaccccggaattaaat

SEQ ID NO: 37273 - DNA, 354 bp, Glycine max
  Clone ID: LIB3138-126-Q1-N1-D7
ggcgaagtacatcatgctcgactgcgacaacacgctcgtccagtctgagcgttttgcgttcgaggcctgcgccgacctcaccaaccaggtcatggagaggcacaacatcgatgcccgctacacagccgagtcattgctcgaggacttcgtcggccacaacttccgcggcatgctcaagggcctgcaggagaagcacaagttcaagatgcccgacgacgagatggaggactttgtcgcacaagaactcggcgccgtcactctcaagctcagccagaaggctgtcgagtgccctggcgtgactgagcagctcaccaagctcaaggaggagggctaccctatgtctgttgtctctac

SEQ ID NO: 37274 - DNA, 366 bp, Glycine max
  unsure at all n locations
  Clone ID: LIB3138-126-Q1-N1-D9
ctcaggaatgtgttcccaggacctattgtgttttaaatccacaaaatccttttgtgttaaataggtggatgggaaaattgactttcccccagggcacttcccgaagtgttaagagaatgcctctttctatagggggaggagctggtgcaaagaatgctattctcatgaatatgccaaatgctgttctttcaatgtggagatattttgttggagatctcgtctttgaagtttctaagatgacttctccctacattaaatgtacagtctctttcttcatagcatttggaaatttggctgatgataccatcaattttgaggcttttccccacaagctggtgcagtttggagagattcangaaaaagttg

SEQ ID NO: 37275 - DNA, 345 bp, Glycine max
  Clone ID: LIB3138-126-Q1-N1-E1
gggggaggagctggtgcaaagaatgctattctcatgaatatgccaaatgctgttctttcaatgtggagatattttgttggagatctcgtctttgaagtttctaagatgacttctccctacattaaatgtacagtctctttcttcatagcatttggaaatttggctgatgataccatcaattttgaggcttttccccacaagctggtgcagtttggagagattcaggaaaaagttgtattgaaattttcacaagaggaatttcttacagcttggtcaactcaggtgcgtcctgcaacaactctgttggctgatgggtgtccatatttgtatgcaatggtgcatgat

SEQ ID NO: 37276 - DNA, 374 bp, Glycine max
  Clone ID: LIB3138-126-Q1-N1-E10
gaaaattgactttcccccagggcacttcccgaagtgttaagagaatgcctctttctatagggggaggagctggtgcaaagaatgctattctcatgaatatgccaaatgctgttctttcaatgtggagatattttgttggagatctcgtctttgaagtttctaagatgacttctccctacattaaatgtacagtctctttcttcatagcatttggaaatttggctgatgataccatcaattttgaggcttttccccacaagctggtgcagtttggagagattcaggaaaaagttgtattgaaattttcacaagaggaatttcttacagcttggtcaactcaggtgcgtcctgcaacaactctgttggctgatggg

SEQ ID NO: 37277 - DNA, 373 bp, Glycine max
  Clone ID: LIB3138-126-Q1-N1-E11
actctctattctaagtttccgcagccaccactcagagccagcgagtgatgatcgcttcgccgcagtaatcgccggaaacgaattcgccgtttccctgccgagatctctcaatctccgacgactcagatacctctattaattttcctccggttaggttgttagggtataaatagtacgtagtttttccttatttatggcttcggagaatgtgaagaccggggattccgccgtcaccaccatcgtcaatctcgccgaggaggccaagctcgccagagaaggcgtcgtcaaagctcccagctacgccctcgccagcatctgcaagtcgctcgtcgccggtggcgtcgccggaggagtgtcacgtactgcagttgct

SEQ ID NO: 37278 - DNA, 375 bp, Glycine max
  Clone ID: LIB3138-126-Q1-N1-E12
gaaatactgaataacccctattatagtgatactagactcttaaaataagccaacaaattataaaatgaaaaccactcgtaagatatcttctaagtcattgacacttgacaggatcattttttcccttctgtgcatggctgaatttctcttaacttttccttcatatttgacatggtggcaggaaacaaggaggaattatagttgcaggcccgggtaaaaacaacatctcataccttcacagagtatgtgcaagtgcaacaccctctattatgctccatcctttatataatatattttccttggtatttattagcttgacagcaattagttgtcaatcagcataatattcatgtcatataaacgtttttctgatat

SEQ ID NO: 37279 - DNA, 367 bp, Glycine max
  Clone ID: LIB3138-126-Q1-N1-E2
cattttgatgcatgtaagtggacaaaatcagaaccacattcctgggaattgatcttcccaatagaggtatgtggtcctaataatggttttgaaatgtggagttctgagtgggcaaatcaaacttcatggcatttgagtttccttattgacaatcccaaacagtctacagtttttgatattctcttgggaatctctcaagattttgaaattgctggtaatactcttatgccagctttttctgttccacaggctactgccagatcttctgaaaatgcggaatcctctgcatgatctggaatttgtgttttctttcgcttgttcgtttgtttaattcaataaaggaaattaggcatgaccctcttgttga

SEQ ID NO: 37280 - DNA, 79 bp, Glycine max
  Clone ID: LIB3138-126-Q1-N1-E4
gtattttctatgttgtattaaacattaagaattcagatacaatcgaaaaacaaaataaagttcaacaaaaggttttgtt

SEQ ID NO: 37281 - DNA, 377 bp, Glycine max
  Clone ID: LIB3138-126-Q1-N1-E5
gtttcatccccgaaccgggtccttcttcttccaaaaccatcaacgattcttccaccactttctaccaccacgactacaacaacaagaatgcagatttcacaccagcagggaatatttctgaaacaagtgccgagaatctaatcgtgggaaatcacgattcagccccgtggcaagacaacaacaacaacagatttgacgattcttctctaaggtgtgtgtttccttgtgaaaccaacgaaaggcctagccaaggtctttcactctctcttagttcaaccaacccttccactatcgggttgcaatcttttgagctaagacaaacaggccatcatcctgattttgtttcgtcgagttccagagaagggttctttggaaaa

SEQ ID NO: 37282 - DNA, 373 bp, Glycine max
  Clone ID: LIB3138-126-Q1-N1-E6
gctttagaattctatttcattttattgttgttgttgttgttgttgttgttgttattattattattattattattattattattattattattataactgttctttcttcaaattatgcgtttcacatattcagagtagttttagtgtttttcttaattgataagcaatgttattgtctttggaatctgaaactattaaaaaacgaatttcttatgtactccacatgtcaattaagaatttattcttgtgtgtaattttttttacaacattttttttactttagggtttatgttatgaatatctgatatctcaagtttttgtattttttcttagacaatgattttcttacattatttgtgagaagattatactg

SEQ ID NO: 37283 - DNA, 365 bp, Glycine max
  Clone ID: LIB3138-126-Q1-N1-E7
agaggattcagagggaaatggttgaactcaacaacgaccctcctcctgattgctctgctggccccaagggcgataacctctatcactggattgccaccattattggaaccccagaaacaccctaccaaggtggcatctttttccttgacatcaaatttccaattgattatcccttcaagcctcccgaggtagttttcaaaacacgcatttaccactgcaatgtagaccctgatggccgtgttagtatgggaatattgaaagatgattggagtccagcactaacaattactaaggtgctactaagaagttagatcaattttgacaaatcctgatccttcagaagaggcaaaccttattatgtgctt

SEQ ID NO: 37284 - DNA, 238 bp, Glycine max
  Clone ID: LIB3138-126-Q1-N1-E8
ccatctttttctgttccacaggctactgccagatcttctgaaaatgcggaatcctctgcatgatctggaatttgtgttttctttcgcttgttcgtttgtttaattcaataaaggaaattaggcatgaccctcttgttgagtatgctctgcctatttgaaaatttccacacctcttttaattgtcgtaatgatgtgtgaagtgtgtgttattttaaaaaaaaaaaaaaatttatattgt

SEQ ID NO: 37285 - DNA, 222 bp, Glycine max
  Clone ID: LIB3138-126-Q1-N1-E9
ctctagtccttaaaaaaaaaaaaaaaaaaaaaggaagaaatttacattcataaactaaaaaaaaattaatacccaaaaattaatattataattaaaacctaaaatcaataccaaattaacctaaaaattgggcggcccccatcttggggtcttctttccccgggatttaattccgtcccgaacccttttgccttcccaatttcccctataatgcgttcctta

SEQ ID NO: 37286 - DNA, 377 bp, Glycine max
  Clone ID: LIB3138-126-Q1-N1-F10
actcagatgataagatgcttcaaaccaggatattctcttatgctgattcacaaaggcacagacttggaccaaactatctgcaacttcctgctaatgctcccaagtgtgctcaccacaacaatcatcatgaaggtttcatgaatttcattcacagggatgaggaggttaattacttcccttcaaggtatgatcctgttcgtcatgcagaaacgttccccatacctcctgctatctgcagtggaaggcgtgaaaagtgtggaattgagaaggagaacaactttaagcagcccggagagagataccgatcttgggcacctgacaggcaagatagatttaatcgccgatgggttgatgctttatctgacccacgggtcacc

SEQ ID NO: 37287 - DNA, 372 bp, Glycine max
  Clone ID: LIB3138-126-Q1-N1-F11
gagattcaggaaaaagttgtattgaaattttcacaagaggaatttcttacagcttggtcaactcaggtgcgtcctgcaacaactctgttggctgatgggtgtccatatttgtatgcaatggtgcatgatagttcagtgtctacaataccaggtgattttgtcattggtgtcaagttgacaaccataaacaatatgtgtgcatatgggctcaatcctggcatttcaggttctcgtcttttgggcaccattcctcagtccatttcacagcaaactgtttggaatcaaatggcaacagtgagaacaccattgaattttgattctagcaagcagagcttttgtcagttttctattgaccttctcggtggaggaatc

SEQ ID NO: 37288 - DNA, 375 bp, Glycine max
  Clone ID: LIB3138-126-Q1-N1-F12
aaaggatattagcaaggacaacagagcacttggcaagctgaggagagaggctgagcgtgcaaagagggctctcagcagccagcaccaggtccgcgtggaaattgaatcactttttgatggtgttgatttttctgagccactcacccgagctcgttttgaggagttgaacaatgatttgttccggaagaccatggggccagtgaagaaggctatggaagatgcaggattacagaagagtcagattgatgagattgttcttgttggtggaagcacaaggattccaaaggtacaacagcttttgaaggactactttgatggaaaggagccaaacaagggtgtcaaccctgatgaagcagttgcctatggtgctgcagt

SEQ ID NO: 37289 - DNA, 372 bp, Glycine max
  Clone ID: LIB3138-126-Q1-N1-F2
cggctcgaggccgttgcaattccctccacacgttccagttaccttatctaccacctcagccttttctcttcactcttcctttccctccaaacaaacaaaagcaaccattaccaccaccaccttgaactttcccagttacactaccaccactttgattccaaataaccaccatcaccatgttcacggctagtaaactagccttcacattaacaccacctcgtccatgcactgcacccttgacaccaatctcttcagcttctggtgttcacctcattcagttcaatggcaggcacttatgcctccgccaaaggctgtttctactttctcctatggccactgcagatcaacaagggaaagttgaagaatttgaag

SEQ ID NO: 37290 - DNA, 365 bp, Glycine max
  Clone ID: LIB3138-126-Q1-N1-F3
atcagaaccacattcctgggaattgatcttcccaatagaggtatgtggtcctaataatggttttgaaatgtggagttctgagtgggcaaatcaaacttcatggcatttgagtttccttattgacaatcccaaacagtctacagtttttgatattctcttgggaatctctcaagattttgaaattgctggtaatactcttatgccagctttttctgttccacaggctactgccagatcttctgaaaatgcggaatcctctgcatgatctggaatttgtgttttctttcgcttgttcgtttgtttaattcaataaaggaaattaggcatgaccctcttgttgagtatgctctgcctatttgaaaatt

SEQ ID NO: 37291 - DNA, 378 bp, Glycine max
  Clone ID: LIB3138-126-Q1-N1-F4
ggtcattgtagagagtggggactgtgtgtgctgtgaccggtcaacgcagctcctacggcaagcgctcccactcgcactccgattccgacgccggctccaaaaacaagcgccgcaaccccgccgccgacgagtcctcctcctccctcatcaccgctgacgacaccgtcttccgctacctctgccccgtccgcaagatcggcagcgtcattggccgcggcggcgacatcgtcaagcagctccgcgccgacaccaaagccaagattcgcatcggtgacgcgctacccggctgcgacgagcgcgttgtcaccatccacagttcctccgaggagaccaaccatttcgacgagaccgatgatctcgtcttgcccgcgcaagacg

SEQ ID NO: 37292 - DNA, 373 bp, Glycine max
  Clone ID: LIB3138-126-Q1-N1-F5
gttcccaggacctattgtgttttaaatccacaaaatccttttgtgttaaataggtggatgggaaaattgactttcccccagggcacttcccgaagtgttaagagaatgcctctttctatagggggaggagctggtgcaaagaatgctattctcatgaatatgccaaatgctgttctttcaatgtggagatattttgttggagatctcgtctttgaagtttctaagatgacttctccctacattaaatgtacagtctctttcttcatagcatttggaaatttggctgatgataccatcaattttgaggcttttccccacaagctggtgcagtttggagagattcaggaaaaagttgtattgaaattttcacaag

SEQ ID NO: 37293 - DNA, 375 bp, Glycine max
  Clone ID: LIB3138-126-Q1-N1-F6
ctcgagccgtggctgcaaaaagctgatgtgcctaccataacacaaattgaagagttccattcgatgcagaggatgatcactgctcctgattcaaatgataatattgatttactgttgagcattgatttgttgggtttacaaggagctcgtgaagcttattcaaacaaaaaagcttttgatgataagcttgcgttggcgtaacacacaataattctttgatggaaattttccagtggattcttggttaccaatatttgtgaattgtctttatcctgtgagtcaattaccttcagaagctgtcgatgaaaatgttacatgtagtagaggacgtggtggttcacccaccactgcttgtattagttctgcagttaacaa

SEQ ID NO: 37294 - DNA, 365 bp, Glycine max
  Clone ID: LIB3138-126-Q1-N1-F7
gtaaatgtgttacgagaattgtatttgcacagtccagaggaagctcgccaattgagaaggaaagctctctctcgtattgaatggctgcaaaaagctgatgtgcctaccatagcacagattgaagagttccattcgatgcagaggatgatgaatgctcctgattcaaatgataatattgatttactgttgagcattgatttgttgggtttacaaggagcaggtaaagcttttccaaacaaaattgtttttgatgataagcttgtgttggctaacacacaagaattctttgatggaaattttccagtggattcttggttaccaatttttgtgaattgtctttatcctgtaagtcaattaccttcaga

SEQ ID NO: 37295 - DNA, 367 bp, Glycine max
  Clone ID: LIB3138-126-Q1-N1-F8
gacaaccataaacaatatgtgtgcatatgggctcaatcctggtatttcaggttctcgtcttttgggcaccattcctcagtccatttcacagcaaactgtttggaatcaaatggcaacagtgagaacaccattgaattttgattctagcaagcagagcttttgtcagttttctattgaccttctcggtggaggaatcttagtggacaaaactggagattggatcacacttatacaaaattctccaattagtaacttattgagagttgctgcttggaagaaaggctgtttaatggtcaagattgtgatgtctgggaatgcagcagtcaaaaggagtgattgggcctcattggtacaagtgtttttaaca

SEQ ID NO: 37296 - DNA, 368 bp, Glycine max
  Clone ID: LIB3138-126-Q1-N1-F9
caaagctcatccttgagttaaaaaatggcagcagcttcttccatggctctcatccccatccttggctggcaaggccgtgaagctgggcccatcagccccagaagtgggaagggtgagcatgaggaagaccgtcaccaagcaggtctcctcaggaagcccatggtacggcccagaccgagtcaagtacttgggcccattctctggcgagcccccgtcctacctaaccggtgagttcccaggcgactacggctgggacactgctgggctttccgcagacccagaaaccttcgccaagaaccgtgaactcgaagtgatccactccaggtgggccatgctcggagccttgggctgcgtcttcccggagttgc

SEQ ID NO: 37297 - DNA, 370 bp, Glycine max
  Clone ID: LIB3138-126-Q1-N1-G1
gtacaagattggaggtattggaactgtgccagtgggacgtgttgagaccggtgtcttgaagcctggaatggtggtgacttttgcaccaactggactgacaactgaagtcaagtctgtggagatgcaccatgaatctcttacagaggcacatcctggtgacaatgtgggattcaatgttaagaatgttgctgttaaggatttgaagcgtggttatgttgcctcaaactcaaaggatgaccctgcaaaggaggctgctaacttcacagcccaagtcatcatcatgaaccaccctggtcagattggaaatggctatgcccctgtcctcgactgccacacttctcacattgctgtcaagtttgctgaactcatg

SEQ ID NO: 37298 - DNA, 354 bp, Glycine max
  Clone ID: LIB3138-126-Q1-N1-G10
gttaaaagccttaacctttccttccacttccaacacaaagacacatatatttcaatggtgtgtctgcgtctccactgtcggagctgtcaacagagctcttttgaacctgaatggttctggagctggagcttcagctccaagttcagccttctttgccaccatctagaagaaggttgtcgccaaggggccccacaacaaggttttcggtggaagcttcaagattgttgctgttgaagagaagaaagagattgtagagacccagcagaccgacaaggacagatggaaaggtcttgcctatgatatctcagacgaccaacaagacatcacaagaggaaagggtttggttgacttcct

SEQ ID NO: 37299 - DNA, 374 bp, Glycine max
  Clone ID: LIB3138-126-Q1-N1-G11
atcctgacattgtggcaccatatgactatatattcatatgggatgaagacctgggtgttgagcattttaatgcggaagagtacataaaactggtgaggaagcatgggttggagatttcacagcctggcttagagcctaataaagggttgacatggcaaatgacaaaaagaagaggtgatcaggaagttcacaaagtgacagaggaaaaaccaggatggtgttctgaccctcatttgcctccttgtgcagcgtttgttgagattatggctccagtgttctcaagagatgcatggcgctgtgtgtggcatatgattcagaatgacttggtccacgggtggggtcttgattttgctcttagaagatgtgttgagcct

SEQ ID NO: 37300 - DNA, 374 bp, Glycine max
  Clone ID: LIB3138-126-Q1-N1-G12
agacctttttgctgatgctgaacaggatcagaggacccgaggggatgaaagtgatttgcatgttataatctttgatgaaattgatgctatttgcaagtcaagaggttcaactcgagatggtactggagttcatgatagtattgtaaatcagcttcttactaagatagatggtgtggagtcactaaataatgttttacttattggaatgactaacagaaaggacatgcttgatgaagctctcttaagaccagggaggttggaagtccaggttgagataagccttcctgatgaaaatggtcgattgcaaattcttcaaattcatactaacaaaatgaaagagaattcttttctagctgctgatgtgaaccttcaag

SEQ ID NO: 37301 - DNA, 370 bp, Glycine max
  Clone ID: LIB3138-126-Q1-N1-G2
gcacaagctcactgaaaaaggcttcctccccaggattggaatgcagtaccactggaaaaaccgtaactacaaaaattttgatgacttcttgatggacatgaagcaaagtaaaagaaaaaatatacgtcaagagcgcaaaaagatctcagcccagaacttgattatgaaacgcctccggggttatgaaataaaggctaggcactgggattccttctactctttttacaggaacacaactgataacaaatggggcactcctcacctgacaagggaattttttcatgagctgggagcaaaaatgggagataatgtgctacttgtggtggctgaagaaggggatgaactagttgctggagccctaaatcttatc

SEQ ID NO: 37302 - DNA, 358 bp, Glycine max
  Clone ID: LIB3138-126-Q1-N1-G4
ggcttatatcaaatccatcttttgaacctttatatatatataccgaattagtttgagaatcacaagaataatagaatgcaacccaagttcgtcgccttaacctttttggtgttgtggtcacggtggagctttgagggtgcagtaggagaccctcaactctttttactagtatcagagtgtagtggattcggggtacccaacttgtccaacttctaccaaaatctaaacgcaagttttgcagacctgagagcacaggtgagcaacaatagcaagcactttgccacggctcaatcagtcaccggaacaagccctgtctatgctatgtttcaatgcgtcaactacctctccatcactgact

SEQ ID NO: 37303 - DNA, 335 bp, Glycine max
  Clone ID: LIB3138-126-Q1-N1-G5
gaaagatctcgcaatggttaaagttaatgtagcatgtgctgctgttggcttgacatcaagttacactccaactccattgttggaatctggtttgcaaaaagacagagggttaattgtggagtattttggaaggatgtcttacgttgctcataacgttaatcagccccaagagaaagatttgttggagggaaatttttcctttgatattaaatctcgctctagattggaaaaagtttcctctacaaaagcacaatttgttagtggaaaaaccttcaaatatgatataattggtgctggttcacattcttcagaagattttcctggaaaggaagatc

SEQ ID NO: 37304 - DNA, 380 bp, Glycine max
  Clone ID: LIB3138-126-Q1-N1-G6
gagcaaatggctgaggcctctgcacaagcttgtgtctctattccttccaatccttggagttctctgcaaaggggtttcagtgcataataattcctgtaatgtgcaccagtaaagaccaaagtatgattattgttacattatgctatatgattgtacttgtatatacatattttgtcccgcctttgtaaatacaattgggacactactaggattgggaagaagggtctttacatttttagtttggcaaatagatattgcaactacctttgtataaatctatttctgaagaagcaattacaactttcaagggatgatagcattttgtggcataaggattaaggaggcataaaggaccaattgctttggaatattcactcatg

SEQ ID NO: 37305 - DNA, 371 bp, Glycine max
  Clone ID: LIB3138-126-Q1-N1-G7
gcacaagctcactgaaaaaggcttcctccccaggattggaatgcagtaccactggaaaaaccgtaactacaaaaattttgatgacttcttgatggacatgaagcaaagtaaaagaaaaaatatacgtcaagagcgcaaaaagatctcagcccagaacttgattatgaaacgcctccggggttatgaaataaaggctaggcactgggattccttctactctttttacaggaacacaactgataacaaatggggcactcctcacctgacaagggaattttttcatgagctgggagcaaaaatgggagataatgtgctacttgtggtggctgaagaaggggatgaactagttgctggagccctaaatcttatcg

SEQ ID NO: 37306 - DNA, 364 bp, Glycine max
  Clone ID: LIB3138-126-Q1-N1-G9
cgttcttcctcccctgtttcgttccactgagcaacacgctatcagttgcatgacataatacagagtgttcaattagagcataatgggatccaaaaatgcaaatgggaagaaccacaaggacaaaaggaacaaatttaaggataatttgagttctagttattcatcacccagtgatgccaaggttatcctcatcagtgatcctcgatattcaaaggctcacacggatcctcggttccgtgaggctccaaagcgtgaaacgaaggtggctgttgactctcgcttcaaccgcatgttcactcacaagagttttttgccctcttctgctcctgttgacaagagaggcaagcccaagaacaacccaacc

SEQ ID NO: 37307 - DNA, 256 bp, Glycine max
  Clone ID: LIB3138-126-Q1-N1-H1
cataatcacttgacgcgaggaacatgacaaaccacatacctgggcttctatagtgatcatatttcgtcggagaacatctcgttgaagcatctaacatgacttctaactacagaacaagctcagcctatttgaaaaccccatctggctatctggctccagataccatcaccaatggcgctctctctcactaactggaacggtctgtatagactcatggccaacggatattgcaacactcacaccaggcatgtgttcc

SEQ ID NO: 37308 - DNA, 378 bp, Glycine max
  Clone ID: LIB3138-126-Q1-N1-H10
gtagaaaagaaagtccatggccatgagtgtgggcgtggcattgccatccaccaccaccagtctcagtttccttcgctaccgctctcgctctccaattcaaaataaaatccgttttccccgtcaaattgtttctaaattaaacagtgcagaggtccaggttcaaacctgcgtgtgggattggaggggttactctattcgctatcaacattctggaaatattggccctgcactagttttagtccacggttttggagctaacagtgaccactggaggaataatatttcagttcttgcacaatcccaccgggtgtactccatcgatcttattggatatggatattcagataaaccaaatcctcgtcaaatcggagaccattc

SEQ ID NO: 37309 - DNA, 378 bp, Glycine max
  Clone ID: LIB3138-126-Q1-N1-H11
atctggttcaatgatctctgattttcatttagtaaatggattttatgtgtgataacacggttcaatattgtgttggttctcaacatgtaaatggctgatgttaattcactaaaagttgagtgattttctatccaattatgttcaaaatctctgcacaactgcgcctttgaaatctacctgtctggtctaggaatttgattcaatcttgcagaatgcaaagtacatttgcactagtagtctagtaccatgtttttctaaagttcttgttttgcatttcatggcctctttagaactgcatatgagaaaatgttagtgtaattttgccaacacagatggtgtcacttaaactctcttgatgccaaaatagaaagaaaaaga

SEQ ID NO: 37310 - DNA, 376 bp, Glycine max
  Clone ID: LIB3138-126-Q1-N1-H12
tttacaaggagcaggtaaagcttttccaaacaaaattgtttttgatgataagcttgtgttggctaacacacaagaattctttgatggaaattttccagtggattcttggttaccaatttttgtgaattgtctttatcctgtaagtcaattaccttcagaagctgtcgttgtaaatgttacatgtggtagtggacgtggtggtttacccaccactgcttggattagttctgcagttaacaatcgctcctcagatatcaacaaaaggattcgcacagcacttgggaaaggtaagaaaattgtttttcttactagagttgatccttttccagtagctttactggctgttctttttggcgttaagaatgaaattctgagt

SEQ ID NO: 37311 - DNA, 370 bp, Glycine max
  Clone ID: LIB3138-126-Q1-N1-H3
ctggaaaggaaagataatccgaacttgtttctagggtttccgatggagatgagattgcacaaacacaatactaagtcaaacaaatttctataatcccatttcatttcccttgacaacaatgccaactttgaattcagattccggataacagaacagaacaagtttgaatttctgtttttttttagaactcgagaacctcagaaagaaacccaatcggaagcgatggagaggtctagatctaagaggaactactactatgaccaagactatgattccgagaccttagcgaggacaaggccgtgctataaccaccactacaccaccggcgggaaccagcgccaccgcggaggcggcgccgcccgccacgcga

SEQ ID NO: 37312 - DNA, 381 bp, Glycine max
  Clone ID: LIB3138-126-Q1-N1-H4
agagaagagagaagagagatggatccacacgcgttggcaaaggcattcgtggagcactactacagcaccttcgacaccaaccggaacggtttagcgaatctgtatcaggagggttccatgctgaccttcgaagggcagaagatccagggcgcttccagcatcgtcgctaagctcacttccctccctttccagcagtgccaccactccatctccaccgtcgactgccagccctccggtgtcaacgctggcatgcttgtctttgtcagcggcaacctccagctcgctggcgaacagcacactctcaagttcagccagatgttccatttgataccaacgcctcagggaagctattatgtgttgaatgacatattccgtttgaac

SEQ ID NO: 37313 - DNA, 377 bp, Glycine max
  Clone ID: LIB3138-126-Q1-N1-H5
ttcattttccattcgtagacgccaagaaccctaacagatcaaaacaaagaagctgaaacctttggggtatgaggttttgcatgtctacatttatgggatttgtgtaatttacccccttttctggtttgactttatctgagctgaaacaatggcaagtttttaggagaatgcagtggacctggataatttgtgaggatatttaacatcgtgtacattgtgctcctttaattattttcatcagttggtgttgtgatggatggtgataatggtcttaacatacgtaattggggttactatgaacccgctacgtcgtttaagagccacctggggctgcagctgatgtcatccttgccggaaaaacctttaattggagggcg

SEQ ID NO: 37314 - DNA, 383 bp, Glycine max
  Clone ID: LIB3138-126-Q1-N1-H6
acccaactgaggcagagctccaggacatgatcaatgaagtggatgctgatgggaatggtaccattgacttccctgagttcctaaatctcatggccaggaagatgaaggacactgattctgaggaggagctgaaagaggcattccgggttttcgacaaggaccagaatgggttcatctctgctgctgagctccgccatgtgatgaccaacctcggggagaagctcaccgatgaagaggttgatgagatgattcgcgaggccgatgttgatggcgatggccaaataaactacgaggagttcgttaaggtgatgatggccaagtgatcatcacattatggccacaaaaacctaaatgaagaaatgttgattaaaaggaaacgacaa

SEQ ID NO: 37315 - DNA, 366 bp, Glycine max
  Clone ID: LIB3138-126-Q1-N1-H7
gatggttttgatctgaaggttgttactgcagatcttaaggacattgattacaagtctggggatgtttgtggtgtgcttgtgcagtaccctggcactgagggagaggttttggactatggggagtttgtgaagaaggctcatgctcatgaggtgaaggttgttatggcaagtgatttgttggcactgactgtgttgaagcctcctggtgagttcggggcagatattgttgttggatcagctcagaggtttggggtgccaatggggtatggagggcctcatgcagctttcttggccacttcacaagagtacaagaggatgatgcctgggagaatcattggggtcagtgtcgattcttccggaaagact

SEQ ID NO: 37316 - DNA, 361 bp, Glycine max
  Clone ID: LIB3138-126-Q1-N1-H8
caattaccttcagaagctgtcgttgtaaatgttacatgtggtagtggacgtggtggtttacccaccactgcttggattagttctgcagttaacaatcgctcctcagatatcaacaaaaagattcgcacagcacttgggaaaggtaagaaaattgtttttcttactagagttgatccttttccagtagctttactggctgttctttttggcgttaagaatgaaattctgagttctaacgccactaatcctatgctgacgcgacttcttgagaactgtaagagtctcaaatatctggttgatgagtgtccttttgcatttgtgaactagtatgtagtattttattcacttaaataaagcgcat

SEQ ID NO: 37317 - DNA, 370 bp, Glycine max
  Clone ID: LIB3138-126-Q1-N1-H9
ctttctccaagattaagtttcagtagtaatgggtaaggaaaaggttcacattaacatcgtggtcattggccatgtcgactctgggaagtcaaccaccaccggtcaccttatctacaagctcggaggtattgacaagcgtgtcatcgagagattcgagaaggaagctgctgagatgaataagaggtctttcaagtatgcctgggtgcttgacaagctcaaggctgagcgtgaaagaggaatcaccattgatattgctctgtggaagtttgagaccacaaagtactactgcacagtcattgatgcccctggacatagggatttcatcaagaacatgattactggaacatcccaagctgactgtgctgatctt

SEQ ID NO: 37318 - DNA, 353 bp, Glycine max
  Clone ID: LIB3138-127-Q1-N1-A10
gcacagtgaataaaaccaactggggtgagtcggttagggttttcaagaagtggggttggtcccaggaacacgttcttatggcgtttaagaagcatccttcttgtatgctgacggaacctgatgagatagatgctgtgttcagttattgggttaaggagttaggtgggagttctttggagcttgtcaagtatcctgttatttttcggttgagccttaagaagtggattgctcccagggcttccgtcgttcggtttcttgcagcgcaaggtctattggaaaggagtggcaacatggtcgcgctgtttattatgtctgagaaaagattcctggacacgtttgtgaaacgttatgag

SEQ ID NO: 37319 - DNA, 209 bp, Glycine max
  Clone ID: LIB3138-127-Q1-N1-A11
gacgatgggagcatggctacattgaccacttcattgcaagcactatggaaaacactgctttcatacatcggtggctacccttatggctctcagccaccactctccccaacaagacgctgaggctgtcaccaaggcttgagaaggatgggggtccgaagagaagcctgtgatagtaatactgcttcatcgaactgcctatcacaggcagt

SEQ ID NO: 37320 - DNA, 348 bp, Glycine max
  Clone ID: LIB3138-127-Q1-N1-A12
ctcgagccgcggtggaggaatcttagtggacaaaactggagattggatcacacttatacaaaattctccaattagtaacttgttgagagttgctgcttggaagaaaggctgtttaatggtcaagattgtgatgtctgggaatgcagcagtcaaaaggagtgattgggcctcattggtacaagtgtttttaacaaacagcaacagtacagagcattttgatgcatgtaagtggacaaaatcagaaccacattcctgggaattgatcttcccaatagaggtatgtggtcctaataatggttttgaaatgtggagttctgagtgggcaaatcaaacttcatggcatttgag

SEQ ID NO: 37321 - DNA, 358 bp, Glycine max
  Clone ID: LIB3138-127-Q1-N1-A3
atttttgtaagagaaatcatcctactttactgccttaggccacacaattgttacacgtgtattatatatttaaactaatcggtaacccgtgcgtacgcacgggtctttgtctaaaaaaaaaaaaaaaaaaaaaaaaaaaaaaaaaaaaaaaaaaaaaaaaaaaaaaaaaaaaaaaaaaaaaaaaaaaaaaaatctgggaatgcaacaatcaaaaaggagagattgggcctaattggtacaagaaaaaaaaataataaaaaaaaaataaagaaaataaaaatggggggggccctcccttttttgattatttctcccaagaataaattctgggccgggaccttggggggttacaattttt

SEQ ID NO: 37322 - DNA, 349 bp, Glycine max
  Clone ID: LIB3138-127-Q1-N1-A4
cattgtgatatcatttgtgtcactggatggactgccactccaatgcaggatgttcaggttacaattgattggtttatttcctctcaggaatgtgttcccaggacttattgtgttttaaatccacaaaatccttttgtgttgaataggtggatggggaaactgactttcccccagggcacttcccgaagtgttaagagaatgcctctttctatagggggaggagctggtgcaaagaatgctattctcatgaatatgccaaatgctgttctttcaatgtggagatattttgttggagatctcgtctttgaagtttctaagatgacttctccctacattaaatgtacagtct

SEQ ID NO: 37323 - DNA, 353 bp, Glycine max
  unsure at all n locations
  Clone ID: LIB3138-127-Q1-N1-A5
gagaatgagaaagaggtggttaaagcaaacttgcatgaacgagaagtggaatcgaaggcactagcaagctgctcctatgaggaaaatactctatggggaaaagagattggtgcaatatatggatgtcttgtggaggacgtgataacagggttgtggatacattcgcaaggatggaaatcaatatactacaacccaccaaggaaggctttttttggtattgctccaactaacttgcttcacacactagttcaacaaaagaggtggggtgaaggtgacttccaaattttgttcactgagtacagtcctacatggtatggtgaaagaaagatcaatttangcctactaatgggata

SEQ ID NO: 37324 - DNA, 359 bp, Glycine max
  Clone ID: LIB3138-127-Q1-N1-A6
cttacagcttggtcaactcaggtgcgtcctgcaacaactctgttggctgatgggtgtccatatttgtatgcaatggtgcatgatagttcagtgtctacaataccaggtgattttgtcattggtgtcaagttgacaaccataaacaatatgtgtgcatatgggctcaatcctggtatttcaggttctcgtcttttgggcaccattcctcagtccatttcacagcaaactgtttggaatcaaatggcaacagtgagaacaccattgaattttgattctagcaagcagagcttttgtcagttttctattgaccttctcggtggaggaatcttagtggacaaaactggagattggatcacact

SEQ ID NO: 37325 - DNA, 362 bp, Glycine max
  Clone ID: LIB3138-127-Q1-N1-A7
cctgacagtgttacagagtgaatgccaacaacttatatgtgaaattctgcgggccactcctgaagcagcatctgctgatgctgctgtgcaaacagctaggcttgcgagcaaagtcccttctaaagataaaagggatggatctgaagatggtcttacctttgcatttcgctttacagatgcttcaatatctattcctaaccagggagttgatcttgttcgccaaggttggagtaggaagggtcccaatgtgcttcaagagggttatggttctgcagcagttttgcctgaggagggcatatatttagcagcatccatataccgacctgtgcttcagttcacggataaagttgcttcaatgctgc

SEQ ID NO: 37326 - DNA, 362 bp, Glycine max
  Clone ID: LIB3138-127-Q1-N1-A8
ctcgagccgtgaattttgattctagcaagcagagcttttgtcagttttctattgaccttctcggtggaggaatcttagtggacaaaactggagattggatcacacttatacaaaattctccaattagtaacttgttgagagttgctgcttggaagaaaggctgtttaatggtcaagattgtgatgtctgggaatgcagcagtcaaaaggagtgattgggcctcattggtacaagtgtttttaacaaacagcaacagtacagagcattttgatgcatgtaagtggacaaaatcagaaccacattcctgggaattgatcttcccaatagaggtatgtggtcctaataatggttttgaaatgtgg

SEQ ID NO: 37327 - DNA, 359 bp, Glycine max
  Clone ID: LIB3138-127-Q1-N1-A9
caaacattgcaaaagatgtgactgaattaattggcaaaactccattggtatatctcaaccacatcgtggatggttgtgttgccaaagttgctgccaagcttgaaatgatggaaccttgctccagtgtcaaagacaggataggatatagcatgattgtagacgctgaggagaaaggactcatcacaccgggtgaaagtgtcctcattgaacctaccagtggaaacactggcataggtttggcattcatggcagctgctaagggttataaacttattataaccatgccttcttcgatgagtcttgaaagaagaaccattcttcgtgcttttggagctgagttagttctcactgatcccgcc

SEQ ID NO: 37328 - DNA, 352 bp, Glycine max
  Clone ID: LIB3138-127-Q1-N1-B10
catcatcacatgcacccgcgattcctacgatcccttcccatggtctcttctctgcaccctcgccgtaccttctagaaccttccctcagatctcaattccccttccgctttctcctttcatggaaatggcttccactccccgcaccgtcgaagagatcttcaaggactacaccgcccgcagaaccgccatcgttcgcgctctctctcaagatgtggatgaattctacggactctgcgatccagataaggagaacttgtgcctctatggacatccgaatgaaacatgggaggtgactttgccggcagaggaagttcctccggagcttccggagcctgcactcggaatcaatttt

SEQ ID NO: 37329 - DNA, 330 bp, Glycine max
  Clone ID: LIB3138-127-Q1-N1-B11
gaagttaaaagccttagccttccctacaactccaaacacaaagacatcatcatccatggctgcctccgtctccactgtcggagctgtcaacagagctcttttgaacctgaatggttctggagctggagcttcagctcccagttcagccttctttgggaccagcttgaagaaggttattgcctcaagggtccccaacagcaaggtttccggtggaagcttcaagattgttgctgtagaagagaagaaagagattgaagagacccagcagaccgacaaggacagatggaagggtcttgcctatgatatctcagacgaccaacaagacatcac

SEQ ID NO: 37330 - DNA, 364 bp, Glycine max
  Clone ID: LIB3138-127-Q1-N1-B2
gtttttacaatccttcaaaaattttgtttctttgtgtgtgtatggtgatgataacttaattagtgttcatgaatatgtcaagccttactttagtggttctaaattgaaaagctttctagctagtcataacatcaccattactgatggtattgacaaaactagtgcaactttgcaatttagaaagttagcagattgtgattttctcaagagaaactttaagcagatgtctaatgttttgtgggtggctcctgaggacaaggcgagtttatggtcacaacttcattatgtttcgtgtaataatctggaaatgcaagaagcttatcttgtcaatctcgtaaatgtgttacgagaattgtatttgcac

SEQ ID NO: 37331 - DNA, 362 bp, Glycine max
  Clone ID: LIB3138-127-Q1-N1-B3
gagttccattcgatgcagaggatgatgaatgctcctgattcaaatgataatattgatttactgttgagcattgatttgttgggtttacaaggagcaggtaaagcttttccaaacaaaattgtttttgatgataagcttgtgttggctaacacacaagaattctttgatggaaattttccagtggattcttggttaccaatttttgtgaattgtctttatcctgtaagtcaattaccttcagaagctgtcgttgtaaatgttacatgtggtagtggacgtggtggtttacccaccactgcttggattagttctgcagttaacaatcgctcctcagatatcaacaaaaggattcgcacagcact

SEQ ID NO: 37332 - DNA, 353 bp, Glycine max
  Clone ID: LIB3138-127-Q1-N1-B5
acagactccaagactcatgagcattactccatcaagtagaaccccagctccaaaaaagccaaaggcaaaagatcctcataaaagagacatgacatttgaggaaaagcaaaaactaagcactaaccttcagagcttgccttcagagaagcttgatgctattgtacaaatcattaagaagagaaattcagcacttaatcaacatgacgatgaaattgaagtggacattgatagtgtggatgctgagactctctgggagcttgatagatttgttaccaactataagaaaagtttgagcaaaaacaaaaggaaggctgaacttgctcaagctagagcagaagctttgcagcataatg

SEQ ID NO: 37333 - DNA, 355 bp, Glycine max
  Clone ID: LIB3138-127-Q1-N1-B6
agcgcatacggcgtttgcgaaattgcgatttcatgtcatagagaggaaaagaggagaggcggggcggagcagagacgaatggcagatcagagcgagcattcgaaaacggcgttgcctccggaggaccaggaccgtcccgttcgggtatacgcggatggcatctacgatctcttccactttggccacgcccgctcccttgagcaagccaagaaatcgtttccgaatacatacttgcttgttgggtgttgcaacgatcaagtcacccacaaatacaaaggcaaaactgttatgacagaggccgaacgatacgaatccctgcgccactgcaaatgggtggatgaagttattcctgatg

SEQ ID NO: 37334 - DNA, 352 bp, Glycine max
  Clone ID: LIB3138-127-Q1-N1-B7
atcattacttcataaatgtcgccgacattcatttgagtgcaaaggcgggtttttatgcttctagatacaagagatttggcaacctgtgctatgtcattggtgcattgcaagccttcattgggcatcaaaaccaggacatgagaatcaggttcaatgatggtccatgggagacatgtcctcaagtgacagccctttgcattggaaatgcaaaatactttggtggtggcatgaaaattacaccaaatgctgatcctttcagtagaaatttagaggttgtaactcttcagaacttcaagtggtatgattttgtcttcaaattacataagctatacagtgggacacatctctcagt

SEQ ID NO: 37335 - DNA, 361 bp, Glycine max
  Clone ID: LIB3138-127-Q1-N1-B9
ggccagtagaacccccttgtttattcggcatacacatcgtcgggggctagccaccgagtgcagtgcaaccatcggaaaataatggcagagacagattcgtcgtcctcttcagatggagaaccctcgcaatcgctggcgtcgattgcggagaatcttcagcgttctgccattcaatctgctcgaactgtgcaacatagctcttcaactcatttccgtgcctttcagaattttttaccagaagcagtatcacagtatagaacatatgaagatgcttttgtcaataaagttaaagatggactgatgattgcaaaggagaatccagctgtaagtgctggtgtagctatttctgctgcccttctgg

SEQ ID NO: 37336 - DNA, 184 bp, Glycine max
  Clone ID: LIB3138-127-Q1-N1-C1
agagtggtttcagtgagtgatcggtgttcacttgatcctgcataagtcgtcatcatgattattatcaataccggttgttggaagaaaatgccgttcagaaacatcgccatcggagggcctgaagaggctactcaccccgacacgttgaaggcggggttggctgagttcatctccaccttgatct

SEQ ID NO: 37337 - DNA, 320 bp, Glycine max
  Clone ID: LIB3138-127-Q1-N1-C10
ccagtggctagtatagaagaaccataagcactgagggaaaaagtgattagtactttagccaacaaattaaaaatggctgtcaccaaggtctacattgtgtattactccttatatggacatgtagacaccatggctagagaagtacacagaggggctgctacagttgaaggtgttgaagcaacactttggagggtacctgagatgctttcggaactaatattggataagttgaaggcccctcctaaaccaaatgatgtaccagacataatgccagaacaacttgtggaggctgatggtttgatatttggttttccttctcg

SEQ ID NO: 37338 - DNA, 352 bp, Glycine max
  Clone ID: LIB3138-127-Q1-N1-C11
atcacataatgcaagccaatcaaatcatgtaagcgatgcttcaggcattgaggaattggaaattgcggttgctgattacaattggtccctcagacatagacaaatcacatctcttaatctgaaatacttggcttcttggaacatggctcttcgtgtggatgtagaaggcaatggaactgattcacgtgggtcaagatgctacttccctaattttgaggagcattttgatgatgttatctatccgaaaggggatccggatgctgtttccctaagcaagagagatgtagatctcttgcaaccagacacattcattaatgacacaattattgatttttacatccagtatctcaag

SEQ ID NO: 37339 - DNA, 355 bp, Glycine max
  Clone ID: LIB3138-127-Q1-N1-C12
tcttcttctattacaacatcgcccgcaaccatgaccatggctgcgatcgtgctcctgttcacggtctttgccgtttcctccgccctagacatgtcgataatctcgtacgacagcgcccacgcggacaaggccgccacgttgcgcaccgaggaggagctgatgtccatgtacgagcagtggctcgtgaagcacgggaaggtgtacaacgcgctcggcgagaaggagaagcgcttccagatcttcaaggacaacctgcgattcatcgacgaccacaactccgcggaggaccgaacctacaagctcggactgaaccggttcgctgatctcaccaacgaggaatacagggccaagtact

SEQ ID NO: 37340 - DNA, 365 bp, Glycine max
  Clone ID: LIB3138-127-Q1-N1-C2
ctgatgcaagagattccttgaagtctttgcaaggattacttttggaaaaagccacggagagtgtgactgatgctgttgacaatccaggacacaatcgtcggccaactcgtggtagtgaagatgcacttgcagatgataagcaacaaggaacaactgtgtcacctgatgagctcatttctcttgcacagcagtacagctccgagttccttcaatcagagcttgagaggacacgcattaacacagcatgctttgcggaatcttttcctttggactctgtgccagaaccagccaaatctgcctactctcccttcaggaactcaatggattctcctagcagaaaccacagaggtacctacaataccgga

SEQ ID NO: 37341 - DNA, 361 bp, Glycine max
  Clone ID: LIB3138-127-Q1-N1-C3
ctcgagccgatttcattgcgatatcatttgtgtcactggatggactgccaccccaatgcaggatgttcaggttacaattgattggtttatttcctctcaggaatgtgttcccaggacctattgtgttttaaatccacaaaatccttttgtgttaaataggtggatgggaaaattgactttcccccagggcacttcccgaagtgttaagagaatgcctctttctatagggggaggagctggtgcaaagaatgctattctcatgaatatgccaaatgctgttctttcaatgtggagatattttgttggagatctcgtctttgaagtttctaagatgacttctccctacattaaatgtacagtc

SEQ ID NO: 37342 - DNA, 354 bp, Glycine max
  Clone ID: LIB3138-127-Q1-N1-C4
gcattggttggtagttgtctcaaaaatctcttgccctttggccataatcaaaaaccaagacactgttcatcaagctgctcaattatcaagccaactttgcttggttccactgcagaatttcagtttattcttatctccgtagattggattgaagtatttcttctctctttctctctccatctcttttcacgttttttgtttctaatttttttttttttcatcttcatgtctatcttcttctcatatgagtctcaaggtgttgtatatataacatgctgccttgtgcagcttgtgcggtacttgaaatttgaagacttgatctgcctttgctttgttttttcattatcagcaccc

SEQ ID NO: 37343 - DNA, 215 bp, Glycine max
  Clone ID: LIB3138-127-Q1-N1-C6
ctcgtattgaatggctgcaaaaagctgatgtgcctaccatagcacagattgaagagttccattcaatgcataggatgatgaatgctcctgattcaaatgataatattgatttactgctgagcattgatttgttgggtttacaaggagcaggtaaagcttttccaaacaaaattgtttttgatgataagcttgtgttggctaacacacaaaaattt

SEQ ID NO: 37344 - DNA, 358 bp, Glycine max
  Clone ID: LIB3138-127-Q1-N1-C7
gagcattttgatgcatgtaagtggacaaaatcagaaccacattcctgggaattgatcttcccaatagaggtatgtggtcctaataatggttttgaaatgtggagttctgagtgggcaaatcaaacttcatggcatttgagtttccttattgacaatcccaaacagtctacagtttttgatattctcttgggaatctctcaagattttgaaattgctggtaatactcttatgccagctttttctgttccacaggctactgccagatcttctgaaaatgcggaatcctctgcatgatctggaatttgtgttttctttcgcttgttcgtttgtttaattcaataaaggaaattaggcatga

SEQ ID NO: 37345 - DNA, 361 bp, Glycine max
  Clone ID: LIB3138-127-Q1-N1-C8
ctctctctttcttcctttctttaatacttattgattcatcttttttatgttgctttctttctttccccttttgtatttctgggttcgatattgttatcggttatttgtgcactgcttccgccggggctattcaggaatcatggctagggttttggctcagtctgttaatgtccctggtctagtggctgagcataggcatggtcagcaaaagggatcaggaaaattaaaaagatcgaccaaaatgatgagtgctttacggacaaatggattaagaatgttaggtttctcagggctttttactttcaatcccattggatactaatgttgaaacctggcataagatttccattctaagggtttc

SEQ ID NO: 37346 - DNA, 357 bp, Glycine max
  Clone ID: LIB3138-127-Q1-N1-C9
attaaggatggtgcagaaggaccgcgaggatggaagagtagtggtcttccttggatagcaccacggaaaacattgagtttggacaatctgacagatgctatatctgaagcaataggagatacctctgatggtgtggcagttactcttgggattgctgcagctgctgctggacttagtatattagctttttctgagatagaatcaatcctccaagttgtaggatcagctgcgctcattcagtttgcaagcaagaagcttttgtttgctgaggaccgaaagcaaaccgtgaaacaacttgatgagttcttgaacaccaaggttgcccctaaagaacttgttgatgaaataaaggatatt

SEQ ID NO: 37347 - DNA, 306 bp, Glycine max
  Clone ID: LIB3138-127-Q1-N1-D1
atttgaagaaatgactttaaatctttgtgtactgacccccaatcgaattgtttgggattcggaagtgaaggaaatcattttatctactaatagcggacaaattggagtattaccaaatcatgcgcctattgccacagccgtagatataggtattttgagaatacgtcttcttaaagaccaatggttaacgatggctctgatgggcggttttgctagaataaacaataatgagatcactgttttagtaaatgatgcggaaaagggtagtgacattgatccacaagaagcacagcaaactcttgaaat

SEQ ID NO: 37348 - DNA, 353 bp, Glycine max
  Clone ID: LIB3138-127-Q1-N1-D10
gcttgaacagttggatcgtttcgcaatacaaggccttttacttgaaacatgggacgtcatcagcgaagcgtctaccatctcaaagcgtccaccgcgaaggaaaagtttcgcggaattcccctgcgaatggtttctcgatcaaaggccatcatcgcaggaaagcagtgcatgggttcgggcctattcaatagaggcgcgcccaaacatccaggcatcttgcttcgccagtacgctcaggagtatagtccgaagcgggtaccgagactaccttcgctcgaagcttggaagcgaatagtaaaatccgaccctcactgggcgaagttacgagaaaccatcgatataaagctcgatgt

SEQ ID NO: 37349 - DNA, 334 bp, Glycine max
  Clone ID: LIB3138-127-Q1-N1-D11
ccaaagcaagaaggaacattgtaatcgtaagctccgaagcttcatgatattccaacaaccttcaaagacagagaagaaagaagaaaacaacctcaacaaacaaacatcaatggcaaacacgtattcgtggctcttcctcgcgatttgtgccaccctcttgcttcttctgtcttcgtcgccgacagcggacgcgggagcgctgggcatggaaatgacatggataccctccatgcccatggaagaggagttccagctggacagcgagatcagccggcgcatcttagccacgaccaagtacatcagctacggtgcgctgcagaagaacactgtcccc

SEQ ID NO: 37350 - DNA, 345 bp, Glycine max
  Clone ID: LIB3138-127-Q1-N1-D12
gatgaatgctcctgattcaaatgataatattgatttactgttgagcattgatttgttgggtttacaaggagcaggtaaagcttttccaaacaaaattgtttttgatgataagcttgtgttggctaacacacaagaattctttgatggaaattttccagtggattcttggttaccaatttttgtgaattgtctttatcctgtaagtcaattaccttcagaagctgtcgttgtaaatgttacatgtggtagtggacgtggtggtttacccaccactgcttggattagttctgcagttaacaatcgctcctcagatatcaacaaaaggattcgcacagcacttgggaa

SEQ ID NO: 37351 - DNA, 340 bp, Glycine max
  Clone ID: LIB3138-127-Q1-N1-D2
tggacgtggtggtttacccaccactgcttggattagttctgcagttaacaatcgctcctcagatatcaacaaaaggattcgcacagcacttgggagaggtaagaaaattgtttttcttactagagttgatccttttccagtagctttactggctgttctttttggcgttaagaatgaaattctgagttctaacgccactaaccctatgctgacgcgacttcttgagaactgtaagagtcttaaatatctggttgatgagtgtccttttgcatttgggaactagtatgtaatattttattcacttaaataaagcgcattactatgtgcaatgagtgtgttt

SEQ ID NO: 37352 - DNA, 331 bp, Glycine max
  Clone ID: LIB3138-127-Q1-N1-D3
gcttgcacaaaagcaatgactatgtcatttaatccaaacccgtgttctgatgcatggagtttggaatttctgaagcgtactggatttcattgcgatatcatttgtgtcactggatggactgccaccccaatgcaggatgttcaggttacaattgattggtttatttcctctcaggaatgtgttcccaggacctattgtgttttaaatccacaaaatccttttgtgttaaataggtggatgggaaaattgactttcccccaaggcacttcccgaagtgttaagagaatgcctctttctatagggggaggagctggtgcaaaaaatgctattc

SEQ ID NO: 37353 - DNA, 358 bp, Glycine max
  Clone ID: LIB3138-127-Q1-N1-D4
ctcgtctttgaagtttctaagatgacttctccctacattaaatgtacagtctctttcttcatagcatttggaaatttggctgatgataccatcaattttgaggcttttccccacaagctggtgcagtttggagagattcaggaaaaagttgtattgaaattttcacaagaggaatttcttacagcttggtcaactcaggtgcgtcctgcaacaactctgttggctgatgggtgtccatatttgtatgcaatggtgcatgatagttcagtgtctacaataccaggtgattttgtcattggtgtcaagttgacaaccataaacaatatgtgtgcatatgggctcaatcctggtatttcag

SEQ ID NO: 37354 - DNA, 287 bp, Glycine max
  unsure at all n locations
  Clone ID: LIB3138-127-Q1-N1-D5
cggctcgagctcgagccgaatcggctcgagcagagttgagaatgtactatacatgtaacatcgtgaaattttaatttatcttttgatcagttcaagtttgtgttggtagttaacagataacaaatatattaaatgatcctttggatacgagcaaaaaaaaaaaaaaaaaaaaaaaaaaaaaaaaaaaaaaaaaaaaaaaaaaaaaaaaanaanaaaaaaaaaaaaaaaaaaaaaaaaaaaaaaaaaaaaaaaaaaaaaaaaaaaaaaaaaaaaagggggggggcccc

SEQ ID NO: 37355 - DNA, 359 bp, Glycine max
  Clone ID: LIB3138-127-Q1-N1-D7
atcgtggagttcaacttcgagggtttccttcacaactctgtaatttctaattccacagttactcttgtgttttagcgagattcggagtgagtgatggctgggaaggaagagaatcgaatatttgttggaggtttatcttgggaagttacggagcgtcaactcgagcatgcctttgctcgttacggcaaaattctcgaatgccagatcatgatggaaagggatacaggccgtccacgtggatttggttttatcacatttgcagaccgtaggggaatggaggatgctatcaaagaaatgcatggacgggaaattggtgatcgtatcatctcagtcaacaaggcacagcccaagatgggggg

SEQ ID NO: 37356 - DNA, 308 bp, Glycine max
  Clone ID: LIB3138-127-Q1-N1-D8
ctcctcctcttcgccgccgtggccaccgccgcgatggcggtggccgcgtccgacgccgacgacatcctgatccgtcaggtggtgccagatgttggcgaagccgaagaggaggacaacctgctgaacgccgagcaccactttgcgagcttcaaggccaagttcgccaagacctacgccaccaaggaggagcacgatcatcgcttcggcgtcttcaagtccaacctccgcagagccaggctgcacgccaagctcgacccctccgccgtccacggcgtcaccaaattctccgatctaactccggccgagtt

SEQ ID NO: 37357 - DNA, 350 bp, Glycine max
  Clone ID: LIB3138-127-Q1-N1-D9
aaagagagtgagtgagtagggtttcaaattccaatcggaagaaatcggaatcggaaaaaatgggaggtggcggcggcgatcacggccatggacacggacacggtgatttcaggaacaaggtctggagtatgagcggtggcccttactgtcgcccaaagcactggaagcgcaacaccgccattgccatgttcggcgttgtcctcatctgcatccccatcgctatgaaatccgctgaactcgagcaacgaccacatcaccctgttcgccccatcccttctcaactctggtgcaagaactttggaactaaagactataatgataatgatccatgattcatcaattgcatcact

SEQ ID NO: 37358 - DNA, 358 bp, Glycine max
  Clone ID: LIB3138-127-Q1-N1-E1
cttcaatggaggactgcactcttctgggttggctgttgtgtcgcctggatctccagttactgtgcatgctccagcagagaaaggagtgagtggatttctagtggattttctgatgggtggagtgtctgctgctgtgtcaaagacagctgctgctccaattgaacgagtcaaattgcttatccaaaatcaggatgaaatgatcaaaagtggtcggttatctgagccatacaagggaattggtgattgttttgctcgaaccatgaaggatgaaggtgtgattgctctttggaggggcaatactgctaatgttatcagatatttccctactcaggctctgaactttgcctttaaggattac

SEQ ID NO: 37359 - DNA, 335 bp, Glycine max
  Clone ID: LIB3138-127-Q1-N1-E10
atccggcctccggtacaggaataccatccattcattctttctttcacccacacactcctttatctagagtccgagactcgatagcccactcccccagactcaaatacactcctttgctgatctattcctacgatctgagatctcgatacccccttcaataacgacatcatgctcaccaacatcttcgctgttacggcggccatggccgccaccgcttctgcttttgactgccatggcaactacttcagcttcttcaaccgcgctggacccatgagctaccagcagattgaccctgctctcttttcttggaagcagagccctcattttcactcctt

SEQ ID NO: 37360 - DNA, 348 bp, Glycine max
  Clone ID: LIB3138-127-Q1-N1-E11
cgaaagctttctaagaagagagagagagagagaggaaatgggtaaggggggaatgtcaattgatgaacatggagaaggcaaagaagagaatatggctgcttggcttgttggaatgaacactctcaagattcagcctttcaagcttcctactttgggaccccatgatgtcagagttagaatgaaggctgttggtatctgtgggagtgatgttcactacctcaagttaaagaaccaatggttattggtcatgagtgtgctgggatcatagaagaagttggtagtcaggtaaagagtttggtgcctggtgaccgtgtggcaattgaacctgggatcagttgttggcattgc

SEQ ID NO: 37361 - DNA, 165 bp, Glycine max
  Clone ID: LIB3138-127-Q1-N1-E12
cagatgtgcaatgcacaacagaaatgctcaattcaacctgatctatgtcatgaagggctggtgatagatattttgccacttgtacagagagtgctgacccatcatggagcgcaagcgcgagtgaggattttggcgggggcaatggatgcatgactgttgaacata

SEQ ID NO: 37362 - DNA, 207 bp, Glycine max
  Clone ID: LIB3138-127-Q1-N1-E3
ttttaattcaataaaggaaattaggcatgaccctcttgttgagtatgctctgcctatttgaaaatttccacacctcttttaattgtcgtaatgatgtgtgaagtgtgtgttattttaaaaaaaaaaaaaaaaaaaaaaaaataaaaaaaaaaaaaaaaattaaataaataaaaaaataaataaaaaaaattaaatattaaaattttt

SEQ ID NO: 37363 - DNA, 340 bp, Glycine max
  Clone ID: LIB3138-127-Q1-N1-E4
tgaaggtgatgagagtcgcgagcagcagcagcagcaacgggttgagcgtggtagccaaaatgagaagaagcagcagcgtttctttgttctccgttcgagcctgccatgatctccctcatggaccttcctgcatctacgttggccccctccacaccgcaacccaagagaccctcgaagctctttactctcaggcacgggatgcatattacagcggagagcctttgattcttgatgacatgtttgatagactagagttgaagcttaagtggtatggttctaagtcagttgtcaagtatcccagatgcagtatcagaaggcattcaacatatgctgatgctga

SEQ ID NO: 37364 - DNA, 347 bp, Glycine max
  Clone ID: LIB3138-127-Q1-N1-E5
gcatgtgctaaggctggtgggttcccagagccagagatcattcactacaaccctaaagattttgatcttgggaaaaagaaatcatttccattccgtgaccagcatttctttgcatcagttgagaaagcaaagagcgtgcttggattggaacctgaatttggacttgtagagggtctagcagactcgtacaacctggactttggtagaggaacatatcggaaagaggctgatttctcaacagatgacataattcttggcaagagtcttgttagcgtataaacttttctatttcaattttaagtatttcacttgtatttagaaaagctgttcggatttgctacattatg

SEQ ID NO: 37365 - DNA, 350 bp, Glycine max
  Clone ID: LIB3138-127-Q1-N1-E6
gcgacgacagcagccttgtgcggcactatgatgagcagctccttcctgaggagaaaagcagtggtcacaagcctgaaggcattccccaatgctaacgcagtgtttggtgtaaagggtggacgtggaggtggtgtgactgccatggctagcttcaaggtgaagctgataaccccagagggagagaaagaatttgaatgcccagatgatgtatacattcttgaccaggcagaggaggaagggcttgagcttccctactcatgcagggctggttcttgcttctgtgtgtgctggcaaagttgtatcttgcaaagttgacatttcagatgccaccttccttgaggatgaacaat

SEQ ID NO: 37366 - DNA, 257 bp, Glycine max
  Clone ID: LIB3138-127-Q1-N1-E7
gcttgtcttagctgctcatgcatctgatccatctgaagctgatcgactaagagatcttgcctcacctgctggaaaggatgaatattcagaatgggtgattacctctcagagaagtctccttgaggtcatggctgaatttccatcagccaaacctccaattggtgtcttttttgcagcagttgctcctcgcctgcagcctagattttattcaatctcctcattctcaagaatggtgccaaacagaattcatgttacct

SEQ ID NO: 37367 - DNA, 345 bp, Glycine max
  Clone ID: LIB3138-127-Q1-N1-E8
ggcttttccccacaagctggtgcagtttggagagagtcaggaaaaagttgtattgaaattttcacaagaggaatttcttacagcttggtcaactcaggtgcgtcctgcaacaactctgttggctgatgggtgtccatatttgtatgcaatggtgcatgatagttcagtgtctacaataccaggtgattttgtcattggtgtcaagttgacaaccataaacaatatgtgtgcatatgggctcaatcctggtatttcaggttctcgtcttttgggcaccattcctcagtccatttcacagcaaacttgttggaatcaaatggcaacagtgaagacaccatttgaatt

SEQ ID NO: 37368 - DNA, 225 bp, Glycine max
  Clone ID: LIB3138-127-Q1-N1-E9
catggttacacctggagctgagtccaaggacaaggccagtcctcagacagttgctgattacaccctcaagctccttcacaggagaattccccctgctgtccctggaattatgtttttgtctggtggacagtctgaggttgaagctaccctcaacttgaatgccatgaaccaatctccaaacccgtggcacgtgtcattctcgtatgccagagccctccaaaacac

SEQ ID NO: 37369 - DNA, 351 bp, Glycine max
  Clone ID: LIB3138-127-Q1-N1-F10
cacgtcaccgatcccaaagtgatcgatatgctgcttttcaaggggatggaagagctgaagaacgtcgtggaccattcaaagcagaggcatcatatcattggtcagtatgtagttggtcaacaagtacaggattcagccacaaaagaccagggcacctctacttttctgaagaatttctataacaccaattacttttgaagtttggtcatgagctgtgtctgtttcctcataaagaattatcttaaacgttttgtatgtcaacacaagatgagataatacctttggtttcagatcaaactgctgtattcaatttttcttgcataatttaagaagtgatgtttgctgattgtt

SEQ ID NO: 37370 - DNA, 357 bp, Glycine max
  Clone ID: LIB3138-127-Q1-N1-F11
gagaatacaggtatatcattggcctgtgctatgaatagttcttttagggggcgcgccagttctgatatttacaccatctgctctcaagactgtgaattgtggaatcctgcttgcacaaaagcaatgactatgtcatttaatccaaacccgtgttctgatgcatggagtttggaatttctgaagcgtactggatttcattgcgatatcatttgtgtcactggatggactgccaccccaatgcaggatgttcaggttacaattgattggtttatttcctctcaggaatgtgttcccaggacctattgtgttttaaatccacaaaatccttttgtgttaaataggtggatgggaaaattg

SEQ ID NO: 37371 - DNA, 351 bp, Glycine max
  Clone ID: LIB3138-127-Q1-N1-F12
ctttacctttctatcctcatggagtagtaaagaagtaactaatcaaccacaaacctaaacaaccccttttgcctaaagctccttccttttctccaatggcaacctgggttttatcagaatgtggcttaaggcctcttccaccagtgtttccacggtcaacaagacccatttcgtgccaaaaaccttcaaagtctagatttttaagcacaaacaagggtgtgccagatctgaatctccaagcaagagggttaacatgctgtagttttagggatagaaagtgggaattgggagtgagtgctccactgaaaagtgccaccaatgagggagaggaagaagagagaaaccaatggg

SEQ ID NO: 37372 - DNA, 243 bp, Glycine max
  Clone ID: LIB3138-127-Q1-N1-F2
aaaaaaaaattttaaataaataaaaaaaaaaaaaaaaaaaggaaaaaaataaagggtggaaataacttataataataataaaaaaaatttattaaaaaattaataaaaaaaaataattaaataaatattaaaaaaaaaaaaaaatggggcccccccccctcttttaatctctctcccccggaatttttttccggcccgttcctttgaggcttcccatttttcctttttgggggtctttttaaa

SEQ ID NO: 37373 - DNA, 347 bp, Glycine max
  Clone ID: LIB3138-127-Q1-N1-F3
attccattctctctgtgtatttccctacctctcccttcaagatgcagatcttcgtcaagaccctcaccggcaagaccatcacccttgaggtggaaagctctgacaccatcgacaacgtcaaggccaagatccaggacaaggaaggaatccccccggaccagcaacgtctcattttcgccggaaagcaacttgaggacggccgtacccttgctgactacaacattcagaaggagagtactcttcacctcgtcctccgtctccgtggtggcatgcagatcttcgttaagacactcatcggcaagaccataaccctagaggttgaaagctccgacaccatcgataacgtc

SEQ ID NO: 37374 - DNA, 329 bp, Glycine max
  Clone ID: LIB3138-127-Q1-N1-F4
agatggcagaaatgataaacagtctttgtggtggtgatgaaaaattgatgcgtgaaaggacgcacctgctgttggcttgttgttcaaggatggcaatttgtaagaaagatgtttggagagttgaatgtggaatcccttctggatttccgctcacagttatttgcaatagcatttttaatgagatgctcattagatatagctatgaaaaattactgcgccaggctaaagctccaagtatgtttttacaatccttcaaaaattttgtttctttgtgtgtgtatggtgatgataacttaattagtgttcatgaatatgtcaagccttacttt

SEQ ID NO: 37375 - DNA, 158 bp, Glycine max
  Clone ID: LIB3138-127-Q1-N1-F5
ctgtggcttaatctgctcttggggatgcaacacttattgaagacgctaaccgggaagactatgactttggatgtggagagcaacgttacgaccaaatacgacaaggcgaagatgaacgataaggaaagggtatcagccactcatcaggaaaggatctt

SEQ ID NO: 37376 - DNA, 351 bp, Glycine max
  Clone ID: LIB3138-127-Q1-N1-F6
atacctttcaatgttcttatctctgactgtggaaagcaagtctatctgttaccacagtgttatgcagagaaacaagctcttggagaagtggatgctgagcttcttgacacccaagtgaatcctgctgtgtgggaaattagtgggcacatggttctaaagaggaagaaggattatgatgaggcatctgaaggcaatgcttggaggcttcttgcagaggtgtccctctctcaagagaggtttcaagaagtcaatgatcttatttttgaagccattggctgtggtgaattggaggatgtcaacgttgaaagtgtcaaaagagttgatgcagtcagcacaagcgaacaccctact

SEQ ID NO: 37377 - DNA, 358 bp, Glycine max
  Clone ID: LIB3138-127-Q1-N1-F7
tcccgggaaaaaaagtaggtaaaaaaatatgctaagtataaattgtctactgatgaaatacgaaagctgatgatattgaaaaaaaaagaattgtaaataaggttcaggttcgacttccatagagaatatagatgatattgtctataatgatagaaaaaaataaaaaactttcgaaagattttatccaattgaaattttaaaaatgactgggataaacttaagaattcaattattgaaattgaataagtaaacaatttaattggattggtcgaatggtatcaaaaaaatggagtactaactcccatttcttatttattattgaattaaccgatcaacttgctttgttatcgaacatttt

SEQ ID NO: 37378 - DNA, 341 bp, Glycine max
  Clone ID: LIB3138-127-Q1-N1-F8
ggtaattttgctgaaagcaacgaatctgatacggtcgagaagtctgctgtgtggccacctgttgcagatgatgaaaagattgatgtttctacctcaagaaggtatgggtcagacagctggatgtcaatgggaaggcatgaactaacatatccagatctgctttcaggctttgggacccatggagatcattcatcccatccatcctttgttgatcaaaatggtcctgtagctaatgttggtagaaaacatttgttggattgtgaaggcaaacataatgttctgagtccttggtctggagtgccatctagcctgtcactgaatcttttggactcaaatacaaa

SEQ ID NO: 37379 - DNA, 341 bp, Glycine max
  Clone ID: LIB3138-127-Q1-N1-F9
caggttacaattgattggtttatttcctctcaggaatgtgttcccaggacctattgtgttttaaatccacaaaatccttttgtgttaaataggtggatgggaaaattgactttcccccagggcacttcccgaagtgttaagagaatgcctctttctatagggggaggagctggtgcaaagaatgctattctcatgaatatgccaaatgctgttctttcaatgtggagatattttgttggagatctcgtctttgaagtttctaagatgacttctccctacattaaatgtacagtctctttcttcatagcatttggaaatttggctgatgataccatcaattt

SEQ ID NO: 37380 - DNA, 165 bp, Glycine max
  Clone ID: LIB3138-127-Q1-N1-G1
gtcaagccttactttagtggttctaaattgaaaagctttctagctagtcataacatcaccattactgatggtattgacaaaactagtgcaactttgcaatttagaaagttagcagattgtgattttctcaagaaaaactttaagcagatgtctaatggtttgggg

SEQ ID NO: 37381 - DNA, 357 bp, Glycine max
  Clone ID: LIB3138-127-Q1-N1-G10
gccaccccaatgcaggatgttcaggttacaattgattggtttatttcctctcaggaatgtgttcccaggacctattgtgttttaaatccacaaaatccttttgtgttaaataggtggatgggaaaattgactttcccccagggcacttcccgaagtgttaagagaatgcctctttctatagggggaggagctggtgcaaagaatgctattctcatgaatatgccaaatgctgttctttcaatgtggagatattttgttggagatctcgtctttgaagtttctaagatgacttctccctacattaaatgtacagtctctttcttcatagcatttggaaatttggctgatgataccatc

SEQ ID NO: 37382 - DNA, 347 bp, Glycine max
  Clone ID: LIB3138-127-Q1-N1-G11
gaaggagaacaactttaagcagcccggagagagataccgatcttgggcacctgacaggcaagatagatttaatcgccgatgggttgatgctttatctgacccacgggtcacccatgaaatccgcagtgtctggatatcttactggtctcaggctgaccgttctctaggccaaaagatagcatctcgtctgagcatgaggccaaatatttaatgttgttgccaaccccagaatgattgttagagttgcagacgtgcaaagagtacgataaggatgtgattttcgatcaatttgaaagaacttatccatttcttgcaattttagttgtgtacccataacttcatgcatg

SEQ ID NO: 37383 - DNA, 332 bp, Glycine max
  Clone ID: LIB3138-127-Q1-N1-G12
gtacatagcacgctgatagtttagttgattgacttgtatcagctgtacagacacggagggcactttttaagggtcacgcttgatatttgatgtacagctgttccacacgaaccttaatcattaaaatttcagtcatttactagcaaaatataatagaccacttttattgttcataacataaactgaagtcatgaatatttcaagccttactttagtggttctaaatataaaagctttgtatctagtcataacatcaccatgtgctgaggtgtgttacacaaattttgccactttgcaattttacaaacttagcacattggggtttttttatg

SEQ ID NO: 37384 - DNA, 357 bp, Glycine max
  Clone ID: LIB3138-127-Q1-N1-G2
atttttcctttgatattaaatctcgctctagattggaaaaagtttcctctacaaaagcacaatttgttagtggaaaaaccttcaaatatgatataattggtgctggttcacattcttcagaagattttcctgaaaaggaagatcaagaaaaacccaaaaagattgatgccagattgagacaaagaatagatcctcaatacaatgaggttcaggctcagatggaaacaaatttgtttaaattgtctcttgatgatgttgaaactcctaaaagttccatgttggatctgaaaatttcttaatctaaaattgcacttcccaagaacacagttggaggaaccattctgcgtaatgatctat

SEQ ID NO: 37385 - DNA, 354 bp, Glycine max
  Clone ID: LIB3138-127-Q1-N1-G3
gtgatatttaaaagtcctccggtgcttcaagaagttggatatagcgatgatgatgtttttataaagcgtgtggttgcaaaggcaggtgatattgtggaggtaagatctctggataagagcattcatactcttgtttcgtgatgctggcttttcattgtttgttcaattccttgatgaacaaattttattgtgcattgttctatctcatggctagtgactacaactaattgttacattttcattcgtggtcctgttcttgtcttttgcttgtccctggatttgttttaccacttgcttgttttcttgtttttagagggaagtttattcttttctagttcaaaagtttggttaact

SEQ ID NO: 37386 - DNA, 351 bp, Glycine max
  Clone ID: LIB3138-127-Q1-N1-G5
gttcatccttctttgggagcagcttgaagaaggttattggctcaagggtccccaacacaaagatttcctctggaagcttcaagattgttgctgtagaagagaagaaagagattgaagagacccagcagaccgacaaggacagatggaagggtcttgcctatgatatctcagacgaccaacaggacatcacaagaggaaagggtttggttgactcccttttccaagctccacaggatgctggaactcactatgctgtcatgagctcctacgagtaccttagcactggacttcgccagtacttggacaacaacatggatggattttacattgctccagcttttatggacaaac

SEQ ID NO: 37387 - DNA, 348 bp, Glycine max
  Clone ID: LIB3138-127-Q1-N1-G6
cacaaaggcgggaaccagtttttgtcgcagaagagcaggtacactgacaaaagtgacatctttagttttggcatgatactaggtgttttgttaactggtaaggatcctacagatccattctttggagaagcagccagtgggggaagtttgggatgttggctgagacacttgcagcaagcgggcgaggcgcacgaagctctagataagagcatgttaggggaagaaggtgaggaagatgagatgctaatggcggttaggattgctgctgcatgcctctctgatatgcctgcagataggccttctagtgatgagcttggtcacatgctaacgcaactgcacagttttttg

SEQ ID NO: 37388 - DNA, 352 bp, Glycine max
  Clone ID: LIB3138-127-Q1-N1-G7
agatgatgaaggtgtgcttggtgattattatatagttgaaacttgaaagcacattaaatgatctcataatggagccccagacacgtgaaatagagggtaccaaggatgatgtctccatcaatcaggccaacaaagacgagtccagctctaggatggaagggtttatcaaggatgaatttgattgtgtattaaatgagaaggaaccacctgaagggctggttgatgctggaggaggttcatttggaaatgaagagaacccttttcatattggggatgaacctttgacagtcttgatacaaaaagagaaaaaacttgttgatgaagtatctgtaaggacttcagaactagcgca

SEQ ID NO: 37389 - DNA, 350 bp, Glycine max
  Clone ID: LIB3138-127-Q1-N1-G8
ttttgaaacctcagactgagaatggaacgtggggttattgataatatcatcaataggcttctccaagtgagaggcagaccagggaagcaggtgcaactttctgaggctgagatcaagcagctttgtcttgtctccagggatatatttatgaggcagcccaacctcttggaactcgaggcaccaattaagatatgtggagatatccacggtcaatattccgaccttctgcgactttttgagtatggtggattgcctcctcgttataactacttatttttaggggactattgtgatcgtgggaagcaaaatttggagacaatatgtctccttctgtcttataaaataaaata

SEQ ID NO: 37390 - DNA, 339 bp, Glycine max
  Clone ID: LIB3138-127-Q1-N1-H1
accaggtgattttgtcattggtgtcaagttgacaaccataaacaatatgtgtgcatatgggctcaatcctggtatttcaggttctcgtcttttgggcaccattcctcagtccatttcacagcaaactgtttggaatcaaatggcaacagtgagaacaccattgaattttgattctagcaagcagagcttttgtcagttttctattgaccttctcggtggaggaatcttagtggacaaaactggagattggatcacacttatacaaaattctgcaattagtaacttgttgagagttgctgcttggaagaaaggctgtttaatggtcaagattgtgatgtc

SEQ ID NO: 37391 - DNA, 325 bp, Glycine max
  Clone ID: LIB3138-127-Q1-N1-H10
caaacaaaacactctattactttttctttcctcacttcccttgttctcacaaagtcacaatggaccccctctctctcttctgcaccggagccctcctcgccggcggcctctactggttcgtgtgcgttctgggccccgccgagcagaagggcaaacgcgccaccgatctttccggcggctccatctccgccgagaaagtccaagacaactacaaacagtactggtccttcttccgccgcccaaaggagatcgagaccgccgacaaagtccccgacttcgtcgacaccttctacaatctagtcacagacatctacgagtgggggtg

SEQ ID NO: 37392 - DNA, 304 bp, Glycine max
  Clone ID: LIB3138-127-Q1-N1-H11
ctcgagccgaatcggctcgagatgatgaatgctcctgattcaaatgataatattgatttactgttgagcattgatttgttgggtttacaaggagcaggtaaagcttttccaaacaaaattgtttttgatgataagcttgtgttggctaacacacaagaattctttgatggaaattttccagtggattcttggttaccaatttttgtgaattgtctttatcctgtaagtcaattaccttcagaagctgtcgttgtaaatgttacatgtggtagtggacgtggtgggttacccaccactgcttgga

SEQ ID NO: 37393 - DNA, 332 bp, Glycine max
  Clone ID: LIB3138-127-Q1-N1-H12
atattatagatgtaataatataattctctcccagaagaatggaaaacaaatttttttaataaataatcaatcttctgtctagaaagatgtggtttagattaggaaatagcagctaacaaaaaataccagctaacaataatgtcaactaattttactctgtcatctattacaaaatttgacctgattgtcttattttgaccttcaaaggttgttgctttctcctgttagacttggagcttaagcattttcatgggctgctggaaaattagaatcaaatggcttatgattacctacatcaccatcatcatcagatgttcagaaaccggtgttgc

SEQ ID NO: 37394 - DNA, 352 bp, Glycine max
  Clone ID: LIB3138-127-Q1-N1-H2
ctcttgttctgttctcagagttccattatcatgctatggttgtttttcgcccccaagttaagggtgttttatttcaaagctagtattaaagcctgactgtggagtttcaaagcctgaattgcagtttatttgtcttacttgtgatgggttggtttgactctctttcaaatcccaaatgtccaagtttgaattaaggggaactcactttacagtgatttctcatgggggtaaaccctctttgtgtgtgttaatcaagtactttttttcattctttattattatagttagtggttttgctcatacatagtgagaaggactattctatgcaagaggggaagaatattaaagggca

SEQ ID NO: 37395 - DNA, 338 bp, Glycine max
  Clone ID: LIB3138-127-Q1-N1-H3
cgattctactgtacagtacatataaatggctttttttatcccatagactatagtgaacatgtaagtaacatttgatgggcaagaacgagcctgttacaacagctcaatcatgttgtctgccttgaagatatatgaatcctttagagaaatgcactggcctgtactgagttggtttgatagtcaatgatgatgagctatttgaactctgaatttttacctggaatccatccgttcaaagctgctatcatcctgatgtcctgtcaatcacattcctttgtgatagaaagtttaagggttcatgtttctgtattggaccaaaagtgtggggattggggaga

SEQ ID NO: 37396 - DNA, 365 bp, Glycine max
  Clone ID: LIB3138-127-Q1-N1-H4
gtttggagagttgaatgtggaatcccttctggatttccgctcacagttatttgcaatagcatttttaatgagatgctcattagatatagctatgaaaaattactgcgccaggctaaagctccaagtatgtttttacaatccttcaaaaattttgtttctttgtgtgtgtatggtgatgataacttaattagtgttcatgaatatgtcaagccttactttagtggttctaaattgaaaagctttctagctagtcataacatcaccattactgatggtattgacaaaactagtgcaactttgcaatttagaaagttagcagattgtgattttctcaagagaaactttaagcagatgtctaatgtttt

SEQ ID NO: 37397 - DNA, 365 bp, Glycine max
  unsure at all n locations
  Clone ID: LIB3138-127-Q1-N1-H5
cgcggcttctttctccaagattaagtttcagtagtaatgggtaaggaaaaggttcacattaacatcgtggtcattggccatgtcgactctgggaagtcaaccaccaccggtcaccttatctacaagctcggaggtattgacaagcgtgtcatcgagagattcgagaaggaagctgctgagatgaataagaggtctttcaagtatgcctgggtgcttgacaagctcaaggctgagcgtgaaagaggaatcaccattgatattgctctgtggaagtttgagaccacaaagtactactgcacagtcattgatgcccctggacatagggatttcatcaagaacatgtnatactgaacatcccaagctga

SEQ ID NO: 37398 - DNA, 355 bp, Glycine max
  Clone ID: LIB3138-127-Q1-N1-H7
gttttcactttcattctcataactcattcaattattatcataatttatgtgttctgtttctgttctcttctaagttactatttggaaacctctctctctctagaaagacccagcaagccaggttggtaaaggggtgaagaatggatgctataaggaagcaagcaagcaaattgagggagcaagttgccaggcaacagcaggctatacttagacagttgggccaaattagcaatgaaccgctcatgactgatgaatctgaaattgaatgtctccagcaacttcaaaagttatacacttctacaaagacagccaagcattttcagcggcatattgttcgtgctattgaaggattcat

SEQ ID NO: 37399 - DNA, 357 bp, Glycine max
  Clone ID: LIB3138-127-Q1-N1-H8
atccagcagtagatcctttagattcaacctcaactatgctccaacctcgaatcgttggtgaagaacattatgagactgcgcaaagagttaaacaaactttacaacgttacaaagaacttcaagacattatagctatccttggcttggacgaattatccgaagaagatcgcttaaccgtagcaagagcacgaaaaattgagcgtttcttatcacaaccttttttcgtagcagaagtttttaccggttcgccggggaaatatgttagtctagcagaaacaattagagggtttaaattgattctttctggagaattagatggtcttcctgaacaagccttttatttggtaggtaatatcg

SEQ ID NO: 37400 - DNA, 337 bp, Glycine max
  Clone ID: LIB3138-127-Q1-N1-H9
ctttgcgcagttccctacctctcctttcaagatgcagatcttcgtcaagaccctcaccggaaagaccatcacccttgaggtggaaagctctgacaccatcgacaacgtcaaggccaagatccaggacaaggaaggaattcccccggatcagcaacgtctcatcttcgccggaaagcagctcgaggacggccgtaccctcgccgactacaacatccagaaggagtcaacccttcaccttgtccttcgtctccgtggtggcatgcagatcttcgtcaagactctcactggcaaaaccataaccctagaggtcgaaagctctgacaccattgacaacgtc

SEQ ID NO: 37401 - DNA, 372 bp, Glycine max
  Clone ID: LIB3138-128-Q1-N1-A10
gctgtttactgtcgctcagattcctattgaagcgagaaggaaaggtctctgtcgcatgtaatgcatgacaaatgattatgaaacatccttcttctaatttgcactgacctaaatgaccatcctggtgagacttgctcatgactaaaatgactaacactatgactcgggaggacatacataaatataacactatgtgcgcactcaacaccggacttgacaaaacggattttgaacattatggtgtactgcttctatcacacaaatgctttgatgcaaccctttcaagatattgtcctctaccatatttggttgagagaatatgtatatgcaaatagtgaccgtgctaatcttgcaattgtaaatgatcactgg

SEQ ID NO: 37402 - DNA, 268 bp, Glycine max
  Clone ID: LIB3138-128-Q1-N1-A11
gaaattctaacaatgattttttcattttctttgtaatacttttttggtttagactccctaagaatctggcgatatttacaattaaatcttcttgttcctgtgaaggtgctataaaaaaaagggctatgccctttctttactcagaacggccttatttcaagttccacccaacaagattttatttatttgaaacaatttttttttccaataccagaaaaaaatcaatgcaagttcaaatatttctatcagatcaaatcgatatagatag

SEQ ID NO: 37403 - DNA, 373 bp, Glycine max
  Clone ID: LIB3138-128-Q1-N1-A12
cacacacagagcaacactgcactgtgtggaaacgaaacatggcaagagtggtggcactccaacagaaccaactatctttctctaccttagcttcctctctttctgacttcagtggaaccagacttcaaactcaacttcagttcaagagaaagcaatgccatccaaaagggtctttctacgtctccgcatcgagcaccaagaaaatcctaataatgggaggcaccaggtttattggtgtgtttttgtctaggctccttgtcaaagagggtcaccaggtgactttattcacaagaggtaaagcgcctgtcactcaacagttgccaggtgaatcagacagtgattatgctgatttttcttccaagatcttgcattt

SEQ ID NO: 37404 - DNA, 379 bp, Glycine max
  Clone ID: LIB3138-128-Q1-N1-A2
atcaggttcctttgtccagacaggagcattcccagtttggcttaaacaaagataaacaaacacgggcatgtagcagacaggcacatacataccccaataaccccatcatcgttgaagaagatgggacgagccaggcttctggtttcagacttcgttctgtctttcatgtgggtatggtccggtgttctccttcggatcatcgtcttcaaccaccttggcttcgctcatggccccctcggtgaggttatcaaaactaccttctccatcgccaacatgttcttcttcgccttcctcgtcaaggttacacgtggcggcgcctacaaccccctcaccgttctggccgatgctatctccagggattttaacaacttcctctact

SEQ ID NO: 37405 - DNA, 318 bp, Glycine max
  Clone ID: LIB3138-128-Q1-N1-A3
gaatactataccaaaggccgtggttcattgtcaagttagagaggctaagagatcattgctaaaccacttttatgttcatgttgggaggaaggagaaggagaaattgggtgctatgttagacgaagacccagcccttatggataggagaaatcatagctaaaaggcttgaattatacaagcaagctagggatgatattgactccgtggcttggaaataatgaaatcccagagtttgcaacagatgtttcgaggaagatttgttatagatttgatcattcttactatttttttttaatcaaacacgaacagaaaaatcta

SEQ ID NO: 37406 - DNA, 378 bp, Glycine max
  Clone ID: LIB3138-128-Q1-N1-A4
aaagcacaaagcaaagctcatccttgagttaaaaaatggcagcagcttcttccatggctctctcatccccatccttggctggcaaggccgtgaagctgggcccatcagccccagaagtgggaagggtgagcatgaggaagaccgtcaccaagcaggtctcctcaggaagcccatggtacggcccagaccgagtcaagtacttgggcccattctctggcgagcccccgtcctacctaaccggtgagttcccaggcgactacggctgggacactgctgggctttccgcagacccagaaaccttcgccaagaaccgtgaactcgaagtgatccactccaggtgggccatgctcggagccttgggctgcgtcttcccggagt

SEQ ID NO: 37407 - DNA, 100 bp, Glycine max
  Clone ID: LIB3138-128-Q1-N1-A5
ggctgtcaaacttaacaccgtggactacagcttctatccagctcccctttggttaaaaatttataaaccttctttgggctggattacaacctactacaac

SEQ ID NO: 37408 - DNA, 295 bp, Glycine max
  Clone ID: LIB3138-128-Q1-N1-A6
tgacaatcccaaacagtctacagtttttgatattctcttgggaatctctcaagattttgaaattgctggtaatactcttatgccagctttttctgttccacaggctactgccagatcttctgaaaatgcggaatcctctgcatgatctggaatttgtgttttctttcgcttgttcgtttgtttaattcaataaaggaaattaggcatgaccctcttgttgagtatgctctgcctatttgaaaatttccacacctcttttaattgtcgtaatgatgtgtgaagtgtgtgttatttt

SEQ ID NO: 37409 - DNA, 356 bp, Glycine max
  Clone ID: LIB3138-128-Q1-N1-A7
attcaactcgatcacttggaatttagacaagagggggtctgtcttcctttgtacctggatcacaatactggtcaaacatgtgttgagttttcttgagcacagtgaaacaaatactctactgggagccactctaccgagtttcataagaacttaaaatagtcggcacaattaatagttgtgctgtatgagtgttacaagacagttcaaaacactgcaggtgtatgtacttgcaagtttgcacttttaagtttggagatagtacgtgtgtagtatttatgctcgactcgagtaaatgagtaataaataaagtttcaaggtacaacttacatcataaaaaaaaaaaaaaaaaagggcgg

SEQ ID NO: 37410 - DNA, 297 bp, Glycine max
  Clone ID: LIB3138-128-Q1-N1-A8
atctctttggcctgttgaattggggaaaatttcatctcttgctggagcaatatatggtttggtgctccaagttcttccagcctatgtacgtggctgggttagtgacttgggggatccgtacaattcaactgttattgaatcctttacaaggacttgttgcagccctcctctcattgcaaatgaattgtctcagattaagaaatctgactttcgtgatgagaatttctcagttagtgtaagcaaatcagcaaatgagattgttgctacttataccaaggatgaaacgggaatggatct

SEQ ID NO: 37411 - DNA, 367 bp, Glycine max
  Clone ID: LIB3138-128-Q1-N1-A9
attcccaattcctaattgtttaaacctaattctcatttcttcatcgttcgattcttctcctcctaaagatgcagatcttcgtgaaaactttgaccggtaagaccatcacccttgaggtggagtcctccgacaccatcgataacgtgaaagctaagattcaagacaaggaagggatcccacctgaccagcagagacttatctttgcgggtaaacagcttgaggatggtcgaacccttgccgactacaacatccaaaaggaatccactctccacctcgtgcttcgcctcaggggtggcatgcaaatctttgtcaagactttgactggcaagaccatcaccctcgaggtcgaatcctcggacaccattga

SEQ ID NO: 37412 - DNA, 382 bp, Glycine max
  Clone ID: LIB3138-128-Q1-N1-B1
cttctcttccgagtgttccattccaacttgggtgtggctgtggatcgcgctcagcttcttttggtgggtgtgcctctcttcctcttctgctcagacctcttctcccttttcactcatcatccaccaccgccaccccaccaccatcacccccaccaccatccacctcaccaccaccatccacctgaccaccaccaccacccgcctcaccacccaccccaccaccaccatcacccgccccaccaccatcagcagccggtgataatagagttccctcccgagaaacccatcagcaatattgcaactccgggtctcggcaacactgtctacatcaatttctgctctttctgctcatacaagggaacagcagtggcaatgaaaaata

SEQ ID NO: 37413 - DNA, 370 bp, Glycine max
  Clone ID: LIB3138-128-Q1-N1-B10
gaaaattctaacacttctaggcacttggctgaattttggatgattgaaccggagcttgcatttgctgatctaaatgatgacatggcttgtgcaactgcttatctccagtttgtaataagacatgttctcgataactgcaaggaagacatggagtttttcgatgcatggattaataaaggaatcattgatcgcttgagtgatgtagcagataaagatgttgtgcaaataacctacactgaagcgatagatctgctgtcaggagcaaataagaaatttgaattcccggtgaaatggggtagtgatcttcagagtgaacatgagcgttatataactgaagaggtattcagtggatgccctgtgataattaaag

SEQ ID NO: 37414 - DNA, 368 bp, Glycine max
  Clone ID: LIB3138-128-Q1-N1-B11
ggggcttaacaaaaacccaaaaaacatgcatttgttcctgaatttcttgacgaatcctaattcctaactaattctactcaacagtacattcaatccaccgctttgttcaactcaaatcctcaatcgctcgcgatttcttcttctggaattctcaaggatctcgataaatggcaaccactgcctgtttcatcattgttagcagaaatgacattcctatatatgaagctgaagttggagtagctgctaaaagggaggattctgctcagctgcatcaatttatccttcatgctgctctcgatattgttcaggaccttgcatggactactagcgctatgtacttgaaatcagtagacaggtttaatgaactt

SEQ ID NO: 37415 - DNA, 373 bp, Glycine max
  Clone ID: LIB3138-128-Q1-N1-B12
cagagcctgaaaggccagtctcccctcttcagagaggtgttgcctcaaagcttttcacctcctcatgctttgaagaatacggatcatcaaatggacaacgccaatgataacaagcaaaacatagatgacaaagatgaagatcttgacggcaagaaatgcagttctaattatgaagcgatgcagaaaaacctgctatttgtagaaaataacgagggactgttaaccatagggcttggacaaggaaagcttaagactcatcgaacaggttttaaaccctacaaaagatgttccatggaggccaaggaaaatagggttggagcaagcagcaatcaaagtgaagagcaaggttgtaagagaatacgtttggaagggg

SEQ ID NO: 37416 - DNA, 375 bp, Glycine max
  Clone ID: LIB3138-128-Q1-N1-B2
tggacgtcggctctaagcttctcaaagcggactttgcaattcctgaccagactcccgccatgataattcccactcagatgaagcaattgctcgatgatggatcagtcactgatagttcactggctgacaatgtcaccgttgatcccgtcgtgcgaggatttattagagattgggatgccattgaagatttgttgcaccatgttttgtatactggcctcggatgggaaattggcaatgaaggacaaatactatttactgatccactttgtacccctaaggtttctcaaacttgtctgatttcccttttttgtttaatggaattgccagtaatagcttaatattcgttttccacttttccaggcgaacaaagaacag

SEQ ID NO: 37417 - DNA, 376 bp, Glycine max
  Clone ID: LIB3138-128-Q1-N1-B4
ataaaattagagagaaggagagcgtgagtgtgtctgtgtctgcgcttcagaaatgtggcggtgcgtggctcgtgctattcgcgtaccagcttcggagagatccatacctaatcaccaaccacttagatctcacatttcaagatttttctctggtggtggtggtggtgggagctcctcgtacaacgtggtggatcacaagtacgatgcggtcgttgtgggcgctggcggcgcagggttgagagccgccattggactttcggagcatggcttcaacactgcttgcattacaaagctgttcccaactcgttcacacactgttgcagctcagggtggtataaatgctgcattgggaaatatgactgaagatgattggagg

SEQ ID NO: 37418 - DNA, 370 bp, Glycine max
  Clone ID: LIB3138-128-Q1-N1-B5
ctcgagccgctcgagccgattcggctcgagcaagaacacaggtggaggaaccattctgcgtagtgatctattggcaaattttttgacagagggcagtattagagcaagtgttgatgtgctacgaactcatcgtattagaggaatgattaaaatggtggccacagttggtattcctgagaatacaggtatatcattggcctgtgctatgaataattattatatggggcgcatcacctatactgtatacatcaatctgtttgcaggagcaaattagaaatttgcatttcccgcgaaatggggtagtgatctttatagtgaacatgagcgttatataactgaagaggtatttagtggatgccctgcgataatt

SEQ ID NO: 37419 - DNA, 377 bp, Glycine max
  Clone ID: LIB3138-128-Q1-N1-B6
agcaaccatggcaatggcaacccaagcctctctcttaaccccacccctctccggtctcaaagccagcgaccgcgcctccgtgccatggaagcaaaactccagcctctccttctccagcccgaagcccctcaagttctccagaacaatcagagcagcagccgccgacgagaccacagaggcaccagcaaaagtagaggctgcaccggtcgggttcaccccaccagaacttgacccaaacaccccttccccgatcttcgggggcagcaccggcgggctcctgcgcaaggcacaggtggaggagttttatgtcattacgtgggactcacccaaagaacagatctttgaaatgcccactggcggcgccgctatcatgaggg

SEQ ID NO: 37420 - DNA, 266 bp, Glycine max
  Clone ID: LIB3138-128-Q1-N1-B7
ttcgcacagcacttgggaaaggtaagaaaattgtttttcttactagagttgatccttttccagtagctttactggctgttctttttggcgttaagaatgaaattctgagttctaacgccactaatcctatgctgacgcgacttcttgagaactgtaagagtctcaaatatctggttgatgagtgtccttttgcatttgtgaactagtatgtagtattttattcacttaaataaagcgcattactatgtgcaatgagtgtgtttaaa

SEQ ID NO: 37421 - DNA, 373 bp, Glycine max
  unsure at all n locations
  Clone ID: LIB3138-128-Q1-N1-B8
tcgtctttgaagtttctaagatgacttctccctacattaaatgtacagtctctttcttcatagcatttggaaatttggctgatgataccatcaattttgaggcttttccccacaagctggtgcagtttggagagattcaggaaaaagttgtattgaaattttcacaagaggaatttcttacagcttggtcaactcaggtgcgtcctgcaacaactctgttggctgatgggtgtccatatttgtatgcaatggtgcatgatagttcagtgtctacaataccaggtgattntgtcattggtgtcaagttgacaaccataaacaatatgtgtgcatatgggctcaatccttgtatttcaggttctcgtcttttggg

SEQ ID NO: 37422 - DNA, 365 bp, Glycine max
  Clone ID: LIB3138-128-Q1-N1-B9
cgtcggcctcgtcctcttcggcctcatacacagaagagcaagtctcaattatcagagagataaagagaaagaagaacttttatgagatattgggattggagaagacttgcactattgaggacgtgaggaagtcgtacaggaaactgtctcttaaggttcatcccgataagaacaaagcccatggggccgaggaagcgttcaaggccgtttcaaaggcgtttcagtgtcttagtaatgaagagagtaagaggaagtatgatgtttcgggagaggatgaagcgatctacgagcagcgcactgcaaggccggcagccaggggttataatggttactatgaagctgatattgatgctgaggagatattc

SEQ ID NO: 37423 - DNA, 362 bp, Glycine max
  Clone ID: LIB3138-128-Q1-N1-C10
gtgagattttgttggtgtatgacttgatgccaaatgggagtctagataaggccttgtatgagtctagaatggctctgtcttggcctcataggctcaaaattttgttaggcgtgtcgtctgttttggcctacttgcatcatgaatgcgaaaaccaggtaattcatagggacattaagactagtaacattatgttagatgaagggttcaatgctaggttaggtgattttggtttggcgaggcaaacggaacatgacaagtctcccgatgccaccgtagctgctgggacaatggggtacctcgcgcctgagtacgtgcttaccggtagagccactgagaaaactgatgtgtttagctatggtgct

SEQ ID NO: 37424 - DNA, 370 bp, Glycine max
  Clone ID: LIB3138-128-Q1-N1-C11
gcttcactttgttctgtttcctctcatgtccgggggccacttgctccccatgacagaccttgcaacaatattagcacagcataacatcattgttaccgtagtcacaaccccacataacgcttctcgtttatcagaaacctttagtcgtgcttcagactcagggcttaacctcagattagttcaactccaatttccatcccaagatgctggatttccagaagggtgtgagaattttgacatgcttccttcaatgggtatgggtttgaatttcttccttgctgcaaacaactttctacatgaaccagcagagaaagtgtttgaagagttaacaccaaaaccaaactgcataatctctgatgtgggtttggca

SEQ ID NO: 37425 - DNA, 369 bp, Glycine max
  Clone ID: LIB3138-128-Q1-N1-C12
acgagaattgtatttgcacagtccagaggaagctcgccaattgagaaggaaagctctctctcgtattgaatggctgcaaaaagctgatgtgcctaccatagcacagattgaagagttccattcgatgcagaggatgatgaatgctcctgattcaaatgataatattgatttactgttgagcattgatttgttgggtttacaaggagcaggtaaagcttttccaaacaaaattgtttttgatgataagcttgtgttggctaacacacaagaattctttgatggaaattttccagtggattcttggttaccaatttttgtgaattgtctttatcctgtaagtcaattaccttcagaagctgtcgttgtaaa

SEQ ID NO: 37426 - DNA, 374 bp, Glycine max
  Clone ID: LIB3138-128-Q1-N1-C2
ctggttctgctttctctctgttgcttcgattcattcacacaactcaaccatgactttcactaatggcgatgcagctgctgcctccctcaacaaggtccccacggtcaacttcaccaagctcttcattggcggacacttcgttcactctgtgtcaggaaagacatttgagacaatagatccaagaacaggagatgttatagcgaggatcagcgagggagataaagaagacattgacattgctgttaaagcagcacgtcatgcatttgacaatggtccatggcctcgccttcccggctctgagagaggaagaattttgctgaaatgggcagagctaatagaagaaaacgcagaaaaacttgcggcactagatgcca

SEQ ID NO: 37427 - DNA, 319 bp, Glycine max
  Clone ID: LIB3138-128-Q1-N1-C3
ctcgatatatattgggagcggtcgccctgaccaccggcatttgggctgatagggacataaagaccatccgatcgtgaggcaaactggccaacatgcccatttatgcatgctatgcctgacaaagtgagagaagatttaagggcaacccaacatgtaaggctacggatggtgactcctgctaacaagcttgatgttgactgaagagatctatacccgactagttttatgatagcagctgctacaatggactctggcgtaacatctaagacgacaacatcgcctgctctgctactgacaaccactgtgacaccaatgcgac

SEQ ID NO: 37428 - DNA, 212 bp, Glycine max
  Clone ID: LIB3138-128-Q1-N1-C4
ctaaacccgggaaagggtcacaaatcttcaacttacggcgcatgctgacttattgttagaccaatgtggcaagaacggctgagactcgggcactattgctatgtccaaaagggctgcggacgaaatggatgatgaccactaactggcacatgctgatctatcgggcagaagcaactctgaatatatttctgcatgatgggagactaaatcag

SEQ ID NO: 37429 - DNA, 374 bp, Glycine max
  Clone ID: LIB3138-128-Q1-N1-C5
cctgattcaaatgataatattgatttactgttgagcattgatttgttgggtttacaaggagcaggtaaagcttttccaaacaaaattgtttttgatgataagcttgtgttggctaacacacaagaattctttgatggaaattttccagtggattcttggttaccaatttttgtgaattgtctttatcctgtaagtcaattaccttcagaagctgtcgttgtaaatgttacatgtggtagtggacgtggtggtttacccaccactgcttggattagttctgcagttaacaatcgctcctcagatatcaacaaaaagattcgcacagcacttgggaaaggtaagaaaattgtttttcttactagagttgatccttt

SEQ ID NO: 37430 - DNA, 376 bp, Glycine max
  Clone ID: LIB3138-128-Q1-N1-C6
aaaaaaaaacccttagccaacacaaccatcatggccacctctgctattcagcaatcagcattcactggtcaaactgctctgaagcagctcaatgagttcgtccgcaagaccggtggcgccggcaaaggtcgcactaacatgcgccgcaccgtcaagagtgctcctcagagcatttggtatggccctgaccgtcccaagtacttgggtccattctcggagcagattccatcatacctgaccggagaattccctggtgactacggatgggacactgctggattatcagctgacccggaaaccttcgccaggaaccgggagctggaggtgattcacagcagatgggcaatgcttggtgcccttggctgcaccttcccag

SEQ ID NO: 37431 - DNA, 347 bp, Glycine max
  Clone ID: LIB3138-128-Q1-N1-C7
ggaaaaagttgtattgaaattttcacaagaggaatggcttacagcttggtcaactcaggtgcgtcctgcaacaactctgttggctgatgggtgtccatatttgtatgcaatggtgcatgatagttcagtgtctacaataccaggtgattttgtcattggtgtcaagttgacaaccataaacaatatgtgtgcatatgggctcaatcctggtatttcaggttctcgtcttttgggcaccattcctcagtccatttcacagcaaactgtttggaatcaaatggcaacagtgagaacaccattgaattttgattctagcaagcagagcttttgtcagttttctattgacc

SEQ ID NO: 37432 - DNA, 292 bp, Glycine max
  Clone ID: LIB3138-128-Q1-N1-C8
tcctaataatggttttgaaatgtggagttctgagtgggcaaatcaaacttcatggcatttgagtttccttattgacaatcccaaacagtctacagtttttgatattctcttgggaatctctcaagattttgaaattgctggtaatactcttatgccagctttttctgttccacaggctactgccagatcttctgaaaatgcggaatcctctgcatgatctggaatttgtgttttctttcgcttgttccgttgtttaattcaataaaggaaattatgcatgacccttttgttg

SEQ ID NO: 37433 - DNA, 366 bp, Glycine max
  Clone ID: LIB3138-128-Q1-N1-C9
gttgagggtttggactatatggaaagaattcctcttgccacatctgagggatttcctcatgtgctttcacgcaaaaatggtgaaaaaggcaaaaggagatttgtctctggggatggtgaagagatgacactgattccgggaaccagtgttgaagaggcttacaacaagctaatagttgaacttgagaaaagtgttcctacattggttggcattgaatgtcccaaggatgagaaacttcctcgtcgcaaaatttttgacaaacctaagacgcgctgcttcactattctccctatggagtttaatcttgtggtccgtcaaaagtttttaaattttgtgaggttcattatgaagaaaagggacaaactt

SEQ ID NO: 37434 - DNA, 326 bp, Glycine max
  Clone ID: LIB3138-128-Q1-N1-D1
ccacgatttctcgcttcagccacccgactcattcatctggacagagaccctgacgctttgctagaaacgacaaactacagtttgctcgcagcaacacaacacccaacacccacatcttcatatatccatcaacaatatggtgtcaagagcagtttccatgggccttcgtgcctggcagttgatctgcgccatcctcgtcaccgcgttcatgggtaacaacattgcgcgcgcttactcgggtgtgcactccatcgacaactactcgctctatgtcggtgactggtggatgttcactttgctgtacttcctacctacatacgggatca

SEQ ID NO: 37435 - DNA, 363 bp, Glycine max
  Clone ID: LIB3138-128-Q1-N1-D10
ctacaaggcggaacaaaaaatttgtgtccatggagaaaaactctgttgattatagtcctttgctttctcctcgaggtgatgaaactgcaatcaagacaacatcttttcttgtgtcagctactaaatggactctcaagactttgatcttggtgatctttgttctatggacaactttcattttttctctccctgcaaagcctgtgaatgagttgttctcaaaatggaatgatctcaaccgtgacactccttttggagtcacaggaagcatttttctggtcttcactgccccaattctcataattgcatttcttgccatcgcacacctaattcttactggggaggatcagcttcaggggaagaaga

SEQ ID NO: 37436 - DNA, 373 bp, Glycine max
  Clone ID: LIB3138-128-Q1-N1-D11
gagcacattcccttgttcagaactctgttccctccattccagaagtacataaccaaaggctatgtctcagaagatgaagcaggaaagagacttgctcaggttgtaagtgatccaagcctaacaaaatctggtgtttactggagctggaacaaagcatcagcttcgtttgaaaaccagttgtctcaggaggccagtgatacagagaaggctcgtaagatctgggagattagtgagaaacttgttggttttgcctaagtgggaggagcctccaacatcccatgttgttctagagaccttgcacttgcatggaggaagaaaatgatgtctcaaaagagtggatagataacatcctatcattttgaatgcattgatg

SEQ ID NO: 37437 - DNA, 343 bp, Glycine max
  Clone ID: LIB3138-128-Q1-N1-D12
cttccttctcttctgcgttttcttcttcaacattccaatctaatccaaaacgctgcgttttatttcgtattcaatttaattcaatccctaaactcctcgccggagagagcgaatcttaataaccccaccactttccggcgaaacatggccgtcgccgtcgccggccgccagaagccgagctccgacgcgagcctcttcacgctctgccccttctggagctcgcgcaacgctactcaaaggtccaccaaaacggtgtcgtccgtcgccaggtcgctgctccgtccgcgccggaaactccgcctcgatccttccagttacctctattttccatatgaaccgggaa

SEQ ID NO: 37438 - DNA, 373 bp, Glycine max
  Clone ID: LIB3138-128-Q1-N1-D2
gggtaactcaatcaatgaacatgcagatgggcagcttgctgaaatgatgactcaggtttattcaaaggtaagtggagaagcacctctggaaaaacctactattgatgtgagctccaaagaattttatggtgagggatatgatgatcgtgacaagagaattcctgacatgaccataattaataggcagcttggctggaatcctaaaacctcactttgggacctgcttgaatcaactctcacctatcagcacaggacttatgctgaagccgttaagaaagtcattgcaaagcccgtggcaagttaaacttgtatggtattgaattgcattgagaagagtgtttctgcctataggggcacttatatatagttcaat

SEQ ID NO: 37439 - DNA, 240 bp, Glycine max
  Clone ID: LIB3138-128-Q1-N1-D3
atgcttttggttcagtcacgttgaggtgcataagaaagcgtgacaagggagaaacaaacatactctaaatggacttggggactgatttgggctaagtgcattgtggcagatgtatgatacagcctaaggatttgcttctgattaacatgcttatttttgggttacatattttttacaaacatcagttattatgttataggagccaattttaatgtcaaatggtgatagcgtaccactcaa

SEQ ID NO: 37440 - DNA, 372 bp, Glycine max
  Clone ID: LIB3138-128-Q1-N1-D4
caaaagctctataaatgcatccaagtgaacaaatccaatctctctctcaatctcaccttctttctctgcgattttttcttcaatttccagatcacgaaactaaagaagatggagaaagcgatcagcagacagaagattttgcttcatcatctcaacccttcatcgtctacccacgtcaacgaatcatcctccctctatgcttcagcatgtgtggcgggggacagcgctgcttatcaaaggacatcgacattcagggatgatgttgtgatcgtggctgcttatcggactgctcattgcaaaggtaaacgtggtggtttcaaagatactcttcctgatgatctactggctcctgttttgaaagctgtaattgag

SEQ ID NO: 37441 - DNA, 374 bp, Glycine max
  Clone ID: LIB3138-128-Q1-N1-D5
gcaatttcaaatctctcttctttctcagccaagcatttccccctttttcgtttcgaatctccccttagacaacaccgatttcgccttcttctttctctttaaactttaggctcgctagggttagggttagggttagggttaggttttcggtgaggcgagagagtatgaggttgagggaggacttgccgtgtaaaaacgatgacgtttgtgagaaagaggaagtgatgatagagaatgatgtaaccgtggcccaaaatcattggtgtcccgtcgtgaatgcgggcttttcttcgcccaagagagtcgttgtggttggttacgctcttaccactaaaaagattaagagctttttgcagcctaagcttgaaggttta

SEQ ID NO: 37442 - DNA, 215 bp, Glycine max
  Clone ID: LIB3138-128-Q1-N1-D6
ggaaaagagcatttacctatttatataacagatcgtatggtaggccataaattaggagaattttcacctactctaaatttccgaggacatgcgaaaaatgataatagatctcgtcgttaacgttaattttaacataaatttttaaatcgtaatttataactaaatattacaaaatggaattcttattaaaatgaaattcaaatcatttcttttat

SEQ ID NO: 37443 - DNA, 342 bp, Glycine max
  Clone ID: LIB3138-128-Q1-N1-D7
gctcacatttatagggtacaagcaccagacggatcatgctgatgcgtgtggtggggttggcattcttggcattgcatgggcctttggtggcatgatcttcatccttgtctactgcactgctgggatttcaggaggtcacattaacccagcagtgacatttgggctgtttttggctcgcaaggtgtctttgatccgagccatcatgtacatggtggctcagtgcttgggtgctatctgtggagttggtttagttaaggcttttcaaaagtcttacttcaacaagtatggtggtggggctaattcccttcctgatgggtacagcacaagtactggattgggtgc

SEQ ID NO: 37444 - DNA, 372 bp, Glycine max
  Clone ID: LIB3138-128-Q1-N1-D9
gttgtaaatgttacatgtggtagtggacgtggtgggttacccaccactgcttggattagttctgcagttaacaatcgctcctcagatatcaacaaaaggattcgcacagcacttgggaaaggtaagaaaattgtttttcttactagagttgatccttttccagtagctttactggctgttctttttggcgttaagaatgaaattctgagttctaacgccactaatcctatgctgacgcgacttcttgagaactgtaagagtctcaaatatctggttgatgagtgtccttttgcatttgtgaactagtatgtagtattttattcacttaaataaagcgcattactatgtgcaatgagtgtgtttaaatataaa

SEQ ID NO: 37445 - DNA, 369 bp, Glycine max
  Clone ID: LIB3138-128-Q1-N1-E1
ggagcaggtaaagcttttccaaacaaaattgtttttgatgataagcttgtgttggctaacacacaagaattctttgatggaaattttccagtggattcttggttaccaatttttgtgaattgtctttatcctgtaagtcaattaccttcagaagctgtcgttgtaaatgttacatgtggtagtggacgtggtggtttacccaccactgcttggattagttctgcagttaacaatcgctcctcagatatcaacaaaaggattcgcacagcacttgggaaaggtaagagaattgtttttcttactaaagttgatccttttccagagactttactggttgttctttttggcgttaagaatgaaattctgagt

SEQ ID NO: 37446 - DNA, 287 bp, Glycine max
  Clone ID: LIB3138-128-Q1-N1-E10
aatggatcttaaagttttcttataaatgtcgaggcacgtttttaacacgagtacctccgtccagctgtagtggtctgggatcaagtgggatactaccaatcttcaaaagacccgaagactcggcaaatgcattaactttgacttgcagttgagcctactgggataacatcgagcggatccttattagcagcactgatgccagatggtgcagtctccgcctgttttggggtaatagtaactgagccgatcttaaggtcaggagctagatgtcccttctaaaaagaacc

SEQ ID NO: 37447 - DNA, 370 bp, Glycine max
  Clone ID: LIB3138-128-Q1-N1-E11
gtgacatcagagaacacaaatgttcatggtgtcgaacttatacaaaccgctactattactaacgagctagctgctgttggttgcaagaaaggttgattagtccgcacaattgcaccctcaaatatataccttgatatgaacgatatatagtgccaaatttgtacatgtgaaggaaactggctacacctatactatgccaatggacattttgaaataggctatatgcatagcacatctttgaacacaagatctgtgaagacaaggtggtggccgtaatacagataatgatatgggtgaagataatcgctgcaatgagacgccaccacaatgggggacacattatcaccatcatctgccatcagcactttca

SEQ ID NO: 37448 - DNA, 372 bp, Glycine max
  Clone ID: LIB3138-128-Q1-N1-E12
acaaaatcagaaccacattcctgggaattgatcttcccaatagaggtatgtggtcctaataatggttttgaaatgtggagttctgagtgggcaaatcaaacttcatggcatttgagtttccttattgacaatcccaaacagtctacagtttttgatattctcttgggaatctctcaagattttgaaattgctggtaatactcttatgccagctttttctgttccacaggctactgccagatcttctgaaaatgcggaatcctctgcatgatctggaatttgtgttttctttcgcttgttcgtttgtttaattcaataaaggaaattaggcatgaccctcttgttgagtatgctctgcctatttgaaaatttc

SEQ ID NO: 37449 - DNA, 246 bp, Glycine max
  Clone ID: LIB3138-128-Q1-N1-E2
aaaaatttattttaaaaaaaaaaaaaaaaaaaaaaaaggggggaaaaaaaaaaaaagggaaaaaaaaaaaaaaaaaaaaaaaaaaatgggagaccggcatttattgatgatccttaacccgtaaacttattagaagaccggggcttgccggctttccgggtttccctttagtgggtggtttttttggtgtgtttgtttttttggttggggcctttttctttttttgatcctttttttctctccctt

SEQ ID NO: 37450 - DNA, 232 bp, Glycine max
  Clone ID: LIB3138-128-Q1-N1-E3
ccaccgaagaatgcttcaggaatctacatagctttttcctcagagcgttgaaaattcccacactcgctcgcttccccaaaatttcacccctttcattcaattcttccctcttctctgctactgatccatccctcgttttctccgaacaatggctgctggtgtcactgtcaaatccgaggttctaggatctttctctcctgaaggagtttgttccaccacggtggaaaccacc

SEQ ID NO: 37451 - DNA, 182 bp, Glycine max
  Clone ID: LIB3138-128-Q1-N1-E4
tctagggttttcatcgattcggagagaggatattgatcgagcgacctcagcgagcaaggacaggaggtggagtactagatcatggattcggtgccttcgaattcgcatggaaacctcgatgagcagatttctcagctcatgcagtgcaaacccttgtccgagcaagaaggtaacgtggttcc

SEQ ID NO: 37452 - DNA, 352 bp, Glycine max
  Clone ID: LIB3138-128-Q1-N1-E5
gtcaattttctattgaccttctcggtggaggaattttagtggacaaaactggagattggatcacacttatacaaaattctccaattagtaacttgttgagagttgctgcttggaagaaaggctgtttaatggttaaaattgtgatgtctgggaatgcagcagtcaaaaggagtgattgggcctcattggtacaagtgtttttaacaaacagcaacagtacagagcatttcgatgcatgtaagtggacaaaatcggaaccacattcctgggaattgatcttcccaatagaggtatgtggtcctaataatggttttgaaatgtggagttctgagtgggcaaatcaaacttcatg

SEQ ID NO: 37453 - DNA, 177 bp, Glycine max
  Clone ID: LIB3138-128-Q1-N1-E6
gaaaatttccacacctcttttaattgtcgtaatgatgtgtgaagtgtgtgttattttaaaaaaaaaaaaaaaaaaaaaaaaaaaaaaaaaaaaaaaaaaaaaaaaaaaaaaaaaaaaaaaaaaaaaaaaaaaaaaaaaaaaaaaaaaaaaaaaaaaaaaaaaaaaaaaaaaacaaaa

SEQ ID NO: 37454 - DNA, 368 bp, Glycine max
  Clone ID: LIB3138-128-Q1-N1-E7
ttaaaatggtggccacagttggtattcctgagaatacaggtatatcattggcctgtgctatgaatagttcttttagggggcgcgccagttctgatatttacaccatctgctctcaagactgtgaattgtggaatcctgcttgcacaaaagcaatgactatgtcatttaatccaaacccgtgttctgatgcatggagtttggaatttctgaagcgtactggatttcattgcgatatcatttgtgtcactggatggactgccaccccaatgcaggatgttcaggttacaattgattggtttatttcctctcaggaatgtgttcccaggacctattgtgttttaaatccacaaaatccttttgtgttaaat

SEQ ID NO: 37455 - DNA, 371 bp, Glycine max
  Clone ID: LIB3138-128-Q1-N1-E8
cgttgccattctcatcctcctctgtctctctctctccaccattgccatggatccttacaagctccggccatccagcgccttcaattctcccttctggactacaaattctggtgctcctgtttggaacaacaactcctctttaaccgttggagctagaggtccaattctgcttgaggattatcatcttgtggagaagcttgcaaactttgacagggaacgtatcccagaacgtgttgtccatgccaggggagctagtgcaaagggtttctttgaggtcacacatgacatttctcacctgacatgtgcagatttccttcgagcccctggagttcagacgcctgtaattgttcgtttctcaactgtcattcatg

SEQ ID NO: 37456 - DNA, 358 bp, Glycine max
  Clone ID: LIB3138-128-Q1-N1-E9
ggtcaagattgtgatgtctgggaatgcagcagtcaaaaggagtgattgggcctcattggtacaagtgtttttaacaaacagcaacagtacagagcattttgatgcatgtaagtggacaaaatcagaaccacattcctgggaattgatcttcccaatagaggtatgtggtcctaataatggttttgaaatgtggagttctgagtgggcaaatcaaacttcatggcatttgagtttccttattgacaatcccaaacagtctacagtttttgatattctcttgggaatctctcaagattttgaaattgctggtaatactcttatgccagctttttctgttccacaggctactgccagatct

SEQ ID NO: 37457 - DNA, 349 bp, Glycine max
  Clone ID: LIB3138-128-Q1-N1-F1
caaaaattttgtttctttgtgtgtgtatggtgatgataacttaattagtgttcatgaatatgtcaagccttactttagtggttctaaattgaaaagctttctagctagtcataacatcaccattactgatggtattgacaaaactagtgcaactttgcaatttagaaagttagcagattgtgattttctcaagagaaactttaagcagatgtctaatgttttgtgggtggctcctgaggacaaggcgagtttatggtcacaacttcattatgtttcgtgtaataatctggaaatgcaagaagcttatcttgtcaatctcgtaaatgtgttacgagaattgtatttgcac

SEQ ID NO: 37458 - DNA, 372 bp, Glycine max
  Clone ID: LIB3138-128-Q1-N1-F10
gcagcagtcaaaaggagtgattgggcctcattggtgcaagtgtttttaacaaacagcaacagtacagagcattttgatgcatgtaagtggacaaaatcagaaccacattcctgggaattgatcttcccaatagaggtatgtggtcctaataatggttttgaaatgtggagttctgagtgggcaaatcaaacttcatggcatttgagtttccttattgacaatcccaaacagtctacagtttttgatattctcttgggaatctctcaagattttgaaattgctggtaatactcttatgccagctttttctgttccacaggctactgccagatcttctgaaaatgcggaatcctctgcatgatctggaaattgt

SEQ ID NO: 37459 - DNA, 372 bp, Glycine max
  Clone ID: LIB3138-128-Q1-N1-F11
caaattttaggtcgtcggactaaaaataatccttgtcttattggagaacctggtgttgggaagacagcaattgctgaaggtctcgctcagcggattgcaaatggtgatgtacctgaaaccatagagggaaaaaaggtcataaccctcgacatgggtctgcttgttgctggaactaaataccgtggtgagtttgaggagaggttgaagaaactgatggaagagatcaaacaaagtgacgagataatacttttcatcgatgaagtgcacactttgattggagcaggagcagcagaaggggcaattgatgctgctaacatactaaagccagctcttgcaagaggtgaactacagtgtattggagccacaacatta

SEQ ID NO: 37460 - DNA, 375 bp, Glycine max
  Clone ID: LIB3138-128-Q1-N1-F12
cattctcatcattcacccaacaaaatggctctgcttctgatagtacccatttcactggtaaccctctggctcggttacaccctataccagcggctacgcttcaagctccctcctggcccacggccctggccggtagtcggtaacctctacgacataaaacccgtccggttccggtgcttcgctgagtgggcgcagtcttacggccctatcatatcggtctggttcggttcgaccctaaacgtcatcgtttcaaactcggagttggccaaggaggttctgaaggagcacgatcagcagctggcggaccggcaccggagccggtcggcggcgaagttcagccgcgacgggaaagatctcatttgggccgattatggg

SEQ ID NO: 37461 - DNA, 302 bp, Glycine max
  Clone ID: LIB3138-128-Q1-N1-F2
caatatgtgtgtatatgggctcaatcctggtatttgaggtgtctcgtcttttgggcaccattcctcagtccatttcacagcaaactgtttggaatcaaatggcaacagtgagaacaccattgaattttgattctagcaagcagagcttttgtcagttttctattgaccttctcggtggaggaatcttagtggacaaaactggagattggatcacacttatacaaaattcttcaattagtaacttgttgagagttgctgcttggaagaaaagctgtttaatggtcaaaattgtgatgttttgg

SEQ ID NO: 37462 - DNA, 309 bp, Glycine max
  Clone ID: LIB3138-128-Q1-N1-F3
gggcgcgccatttatgctatttacaccatctggtgtgaggactgtgaattgtcgaatgctgcttgcacacaagcactgactatgtcatttaatccaaacccgggtgctgatgcatggagcacggaattgctgaagcgtactggatttcattgcgagatcatctgagtcactggatggactgccaccccaatgcaggatgtacaagatacaatggattgggttatttcctatcacgaatgtgttcccaggacctattgtgttttaaatccacagaatccttttgtgttaaataagtggatgggaaaattg

SEQ ID NO: 37463 - DNA, 377 bp, Glycine max
  Clone ID: LIB3138-128-Q1-N1-F4
caaccataaacaatatgtgtgcatatgggctcaatcctggtatttcaggttctcgtcttttgggcaccattcctcagtccatttcacagcaaactgtttggaatcaaatggcaacagtgagaacaccattgaattttgattctagcaagcagagcttttgtcagttttctattgaccttctcggtggaggaatcttagtggacaaaactggagattggatcacacttatacaaaattctccaattagtaacttgttgagagttgctgcttggaagaaaggctgtttaatggtcaagattgtgatgtctgggaatgcagcagtcaaaaggagtgattgggcctcattggtacaagtgtttttaacaaacagcaacagt

SEQ ID NO: 37464 - DNA, 378 bp, Glycine max
  Clone ID: LIB3138-128-Q1-N1-F5
gacgccgtggctggaagaatatggcttcatttgtttctacccactgtatccttcctagcggggttggatttgtgcatgaccaagatcgttcttgtggtagaactaacactttgcatcttcaaaatgctcctaaaagccctagctctctctcctttttgctctccgtgcgagcttcagaaagtagatcagatgccgttgttgttcagagcaagggtcgatcgtctttttctcaaacagctgctgtgaggcatcttacaggttctgttaccagagcccatggacttcgttttgctgtggttgttgctagatttaatgaaattgttaccaaaccgctcttggaaggtgctttgggtactttcaataattattcagttcaag

SEQ ID NO: 37465 - DNA, 371 bp, Glycine max
  Clone ID: LIB3138-128-Q1-N1-F6
aaagattttatccaattgaaattttaaaaatgactgggataaacttaagaattcaattattgaaattgaataagtaaacaatttaattggattggtcgaatggtatcaaaaaaatggagtactaactcccatttcttatttattattgaattaaccgatcaacttgctttgttatcgaacatttctttttgatttcaaaaattttccggaaaaaatttgaatctatttttatatgcgaatcaatcctactacttctggtcctgaggtttctgcgcttgaaaaaaaaaatctgggacgtatcgcccaaataattggtccggtactagatgtagcttttcccccaggtaagatgcctaatatttacaacgctc

SEQ ID NO: 37466 - DNA, 159 bp, Glycine max
  Clone ID: LIB3138-128-Q1-N1-F7
gttgttttagtaaactaggaattaaatgtgccaagaggcgtgcttgtatttactggtggggttgatatgagtggattaatccgaccttttagggagaaaggagaaatggattattggaagaagtttttgagtgttgccaagatcaatataactcctggg

SEQ ID NO: 37467 - DNA, 341 bp, Glycine max
  Clone ID: LIB3138-128-Q1-N1-F8
cggggattagattaaagattcaacaatggcctgtgcttctgctactcttctcaagtcatctcctgttcttgacaagtgcgagtgggtcaaaggccagacccttcgccaacctctcgtgagatgtaacccttcctcagcatcagctctcaccatcaaagctgcttcctatgctgacgagctcgtcaaaaccgccaaaacagtggcctcaccggggcgtggtattttggcgatggatgagtcaaatgcaacctgcgggaagcgtttggcatctattgggttagagaacacagaagctaatcggcaggcataccgtaccctacttgtgacagtacctggtcttg

SEQ ID NO: 37468 - DNA, 368 bp, Glycine max
  Clone ID: LIB3138-128-Q1-N1-F9
cgctgagtacctgcagttcgagctggactcggtggaccagaaccttgcgaagaacgtggctggggacatcattggaaccaggaccgagctcgcggacgtgaagtccacgccgtttcagccctacagcgaggtgtttgggctccagaggttccgtgagtgcgaactcatccatggaaggtgggccatgctcgccactctcggagctctcactgttgagtggctcactggtgttacatggcaagacgccggaaaggtggagctagtagaagggtcatcataccttgggcaaccacttccattctcaatcaccacactgatctggatcgaggtactcgtaattggctacatagagttccagaggaatgcag

SEQ ID NO: 37469 - DNA, 373 bp, Glycine max
  Clone ID: LIB3138-128-Q1-N1-G1
caatagttctaggagcagttggcaaggctgtgagagttgaacactgtgaacgagttcatgtaattgtagcagcaaaacgtatttgtattgctaattgccgtgaatgtgttttctttttgggggtgaatcagcaaccacttattgttggtgataaccataagctgcaggtggctccctataatactttttatgcccaattggaggagcatatgaatgaagttagaattgtgccctcagtgaaccgatggaatgaacccctagcattgggcatggttgatccccatgattcattatctcatccagctggtgtctctgatgttcaaactgagtctgctacacaggtggaccctgagcagttcactaattttgtgat

SEQ ID NO: 37470 - DNA, 346 bp, Glycine max
  Clone ID: LIB3138-128-Q1-N1-G10
caaacatacaaactctcctctcacaagggcaagacagtaattccacattcccaacaacggagccaaccaaccaaaacctttctccttcttcctcttcctccccaattcccattcagatccgattaagccttaaccctaattcccctcccaccacccaccaacaatgggggacttcaacctggcgctggtgatcgtggcgatcgtggtgtgcgtcatcgtgttcctcttcaacgtctacctcctcgtcaacttccagcaccccgacgacgtcaaccaggcttacttccccaaattcgtcgtcgtcctcggcctctccgtcgctgccatcttcatcctcatgctcccc

SEQ ID NO: 37471 - DNA, 376 bp, Glycine max
  Clone ID: LIB3138-128-Q1-N1-G11
gagagattcaggaaaaagttgtattgaaattttcacaagaggaatttcttacagcttggtcaactcaggtgcgtcctgcaacaactctgttggctgatgggtgtccatatttgtatgcaatggtgcatgatagttcagtgtctacaataccaggtgattttgtcattggtgtcaagttgacaaccataaacaatatgtgtgcatatgggctcaatcctggtatttcaggttctcgtcttttgggcaccattcctcagtccatttcacagcaaactgtttggaatcaaatggcaacagtgagaacaccattgaattttgattctagcaagcagagcttttgtcagttttctattgaccttctcggtggaggaatctt

SEQ ID NO: 37472 - DNA, 348 bp, Glycine max
  unsure at all n locations
  Clone ID: LIB3138-128-Q1-N1-G2
gtggagttctgagtgggcaaatcaaacttcatggcatttgagtttccttattgacaatcccaaacagtctacagtttttgatattctcttgggaatctctcaagattttgaaattgctggtaatactcttatgccagctttttctgttccacaggctactgccagatcttctgaaaatgcggaatcctctgcatgatctggaatttgtgttttctttcgcttgttcgtttgtttaattcaataaaggaaattaggcatgaccctcttgttgagtatgctctgcctatttgaaaatttccacacctcttttaattgtcgtaatgatgtgtgaagtgtgtgttattttnt

SEQ ID NO: 37473 - DNA, 366 bp, Glycine max
  unsure at all n locations
  Clone ID: LIB3138-128-Q1-N1-G3
caactacaaaggttgctgtaggagataagatattgaagtagtgctaagtgcctaacacctgcagtgaacaatggcctctgcatcagcatctcttctcaagtcttcacttgttcttgacaagtctgagtgggtgaagggacaaacacttcgccaaccttctgctgcatcagttgtgagatgcaaccccaccaccccatcaggcctcaccatcagagctggttcctatgctgatgagctcgttaagaccgcgaaaacagtggcttcaccagggaggggtattttggccatggatgagtccaatgctacctgtgggaagcgtttggcttcaattgngctagagaacactgaagctaaccgccaggcata

SEQ ID NO: 37474 - DNA, 379 bp, Glycine max
  unsure at all n locations
  Clone ID: LIB3138-128-Q1-N1-G4
gaaaaaaaagattctaaagaaatataactaatattctttagaataatcaaaaagaatattaaattcaaataaattttagatagaaaaaagacttaaaaaggaggatttgaaatgcgagatctaaaaacatatctttccgtggcaccagtagtaagtactctatggttcggggctttggcgggtctcttgatagagatcaatcgtttttttccagatgcattgatattcccttttttttcattctagttattgacacggaaaggggtgaagaagattatagatccaattaagtattaaatatatgtaattaatatgtaattaatctcctcttctntatttcgncttttatttcttcttttttttacaattgtaatagaat

SEQ ID NO: 37475 - DNA, 301 bp, Glycine max
  Clone ID: LIB3138-128-Q1-N1-G5
ctcgagccgctacggatcgaagtggatgggaaaagaggggggaccccaaggcactgcccgaagagcgaagagagtgcctttttctcttgggggaggagctggagcagagaatgctcttctaaagaatgtgccaaaagctgtagtggcaatggcgatagatttcgagggccatctcgggattgtagttattcacatgacttcttcctacattaaacgtacagtctctcattacataatcactgctaaaatggttgatgataccatcaattatgacgctgtggaccacaaactgatgcaactt

SEQ ID NO: 37476 - DNA, 375 bp, Glycine max
  Clone ID: LIB3138-128-Q1-N1-G6
ggggcagagagaaagatggatccatgcctaacttcttgcggtttgaggctccttgtgttctacaaaacaacagggaaattgttgataagaatggtgaaataaactacttcagtggcctgttcctttgtagaccaaccgggcaagggaaatccatgctgatagttaggtttggaggaacaaaaagatctccactagcaaaagtgtttcctaagtggtacttccatcagaatgcaagcaaggtgtttgagcaagacatgggattcttgtcatcacaaaatgaaattcttctgagagaaaaggttccaacaaaggaactatacctgaatctgaaatcatcagacacatgggttgctgaatacaggaagtggatggaca

SEQ ID NO: 37477 - DNA, 372 bp, Glycine max
  Clone ID: LIB3138-128-Q1-N1-G7
gccaaatgctgttctttcaatgtggagatattttgttggagatctcgtctttgaagtttctaagatgacttctccctacattaaatgtacagtctctttcttcatagcatttggaaatttggctgatgataccatcaattttgaggcttttccccacaagctggtgcagtttggagagattcaggaaaaagttgtattgaaattttcacaagaggaatttcttacagcttggtcaactcaggtgcgtcctgcaacaactctgttggctgatgggtgtccatatttgtatgcaatggtgcatgatagttcagtgtctacaataccaagtgattttgtcattggtgtcaagttgacaaccataaacaatatgtg

SEQ ID NO: 37478 - DNA, 243 bp, Glycine max
  Clone ID: LIB3138-128-Q1-N1-G9
gtttggagagttgaatgtggaatcccttctggatttccgctcacagttatttgcaatagcatttttaatgagatgctcattagatatagctatgaaaaattactgcgccaggctaaagctccaagtatgtttttacaatccttcaaaaattttgtttctttgtgtgtgtatggtgatgataacttaattagtgttcatgaatatgtcaagccttactttagtggttctaaattgaaaagcttt

SEQ ID NO: 37479 - DNA, 273 bp, Glycine max
  unsure at all n locations
  Clone ID: LIB3138-128-Q1-N1-H1
aaatactatttgggtactccttgcatgacatcatatatgaaagagcagtgaagactgactatggaacatgtattgcattcatataggactactaactttgcgatttttatgattgatcatgtgaattgcggtgagtttctatgatgactagtgtaactataattgcagtgagtatgaatctgcttgactatgaatattaatatatttgcttgggatatactccgcnnaaaaaaaaaataaaaatgattaataattaatattaacattccctat

SEQ ID NO: 37480 - DNA, 277 bp, Glycine max
  Clone ID: LIB3138-128-Q1-N1-H10
gcttggtcaactcaggtgcgtcctgcaacaactctgttggctgatgggtgtccatatttgtatgcaatggtgcatgatagttcagtgtctacaataccaggtgattttgtcattggtgtcaagttgacaaccataaacaatatgtgtgcatatgggctcaatcctggtatttcaggttctcgtcttttgggcaccattcctcagtccatttcacagcaaactgtttggaatcaaatggcaacagtgagaacaccattgaattttgattctagcaagc

SEQ ID NO: 37481 - DNA, 350 bp, Glycine max
  Clone ID: LIB3138-128-Q1-N1-H11
aaatttctcaatctaaaattgcacttcccaagaacacagttggaggaaccattctgcgtactgatctattggcaaattttttgacagagggcaattttagagcaagtgttgatttgcagcgcactcatcgtattagaggaatgattaaaatggtggccacagttggtattcctgagaatacaggtatatcattggcctgtgctatgaatagttcttttagggggcgcgccagttctgatatttacaccatctgctctcaagactgtgaattgaggaatcctgcttgcacaaaagcaatgactatgtcatttaatgcaaaccccgtgttctgatgcatggagtttggaatt

SEQ ID NO: 37482 - DNA, 363 bp, Glycine max
  Clone ID: LIB3138-128-Q1-N1-H12
taatggtgtaaaaccatgggctttcttgtgtgacttgagtacaatgcagagaaaaaatggcatcacccaactatatcaacaccgcccacaaaattgattgttttacccgtggcttctgctggcggtttagtttgcttccttgacattggtcatcgaaacttctttgtttgtaacccactgactcaatccttcaaggagttgccagttcgatcagttaaggtctggtctcgtgttgctgtacggatgactacaaatggaaactctgttggttcaggctacaagatcttatgggtgggttgtgatggagaatatgaagtatacgactcactcagaaattcttggagtcgtccgggaaacatgcct

SEQ ID NO: 37483 - DNA, 320 bp, Glycine max
  Clone ID: LIB3138-128-Q1-N1-H2
gacaagatggctgaattccctttggcctcttgtgaggattctctcttccctgtccgtggaacttcatcaacttccgctcagtgctcttctggttcgccaaagagtgctgactgcttaatcacgaaggacaagtgtacaatccaagttgtggacaaggccagtgtcccttccagtggcagtgatgcttgtcctgctgctccagtttcacatggcaatgaatgctctgaacatgctgtttcaagccactcctctgctgagtctagcaggcacaggtttgacacctcgtcttaccagcaacgtgcataggccttggaaggttt

SEQ ID NO: 37484 - DNA, 377 bp, Glycine max
  Clone ID: LIB3138-128-Q1-N1-H3
ctattgaccttctcggtggaggaatcttagtggacaaaactggagattggatcacacttatacaaaattctccaattagtaacttattgagagttgctgcttggaagaaaggctgtttaatggtcaagattgtgatgtctgggaatgcagcagtcaaaaggagtgattgggcctcattggtacaagtgtttttaacaaacagcaacagtacagagcattttgatgcatgtaagtggacaaaatcagaaccacattcctgggaattgatcttcccaatagaggtatgtggtcctaataatggttttgaaatgtggagttctgagtgggcaaatcaaacttcatggcatttgagtttccttattgacaatcccaaacag

SEQ ID NO: 37485 - DNA, 320 bp, Glycine max
  Clone ID: LIB3138-128-Q1-N1-H4
aacatatacaaattctctgtgttgtgttgtgtacttgtgttaattgtgttgttgttgtaggaaatttaagtgaagagagaatgatgatgaagtctgctatgtgtgcattggtgcttgtggcactggttgtggttgaagtggggcccatggctgaggctgcggtgacttgcaacccaacacagttgactccttgtcttccggcaattaattcaggttctgcaccttcgagtgcttgttgccagaaactgaaggagcaaaagccatgcttctgtggctaccctcaaaaaccctaactttgaacaagtatggttaactcttct

SEQ ID NO: 37486 - DNA, 309 bp, Glycine max
  Clone ID: LIB3138-128-Q1-N1-H5
caaaggttgctgtaggagataagattgcagtagtgctaagtgctaacacctgcagtgaacaatggcctctgcatcagcatctctgctcaagtcttcacttgttcttgacaagtctgagtgggtgaagggacaaacccttcgccaaccttctgcatcagttgtgagatgcaaccccaccaccccatcaggcctcaccatcagagctggttcctatgctgatgagctcgttaagaccgcgaaaacagtggcttcaccagggaggggtattttggccatggatgagtccaatgctacctgtgggaagcgttt

SEQ ID NO: 37487 - DNA, 304 bp, Glycine max
  Clone ID: LIB3138-128-Q1-N1-H6
ggcttttccccacaagctggtgcagtttggagagattcaggaaaaagttgtattgaaattttcacaagaggaatttcttacagcttggtcaactcaggtgcgtcctgcaacaactctgttggctgatgggtgtccatatttgtatgcaatggtgcatgatagttcagtgtctacaataccaggtgattttgtcattggtgtcaagttgacaaccataaacaatatgtgtgcatatgggctcaatcctggtatatcaagttttcgtattttgggcaccatttcttcagccatttcacagcaaact

SEQ ID NO: 37488 - DNA, 324 bp, Glycine max
  Clone ID: LIB3138-128-Q1-N1-H7
tctctggcgagcccccgtcctacctaaccggtgagttcccaggcgactacggctgggacactgctgggctttccgcagacccagaaaccttcgccaagaaccgtgaactcgaagtgatccactccaggtgggccatgctcggagccttgggctgcgtcttcccggagttgctgtcccgcaacggggtgaagttcggagaagccgtgtggttcaaggccgggtcccagatcttcagcgagggtgggctcgactacttgggcaacccaagcctgatccacgcccagagcatcctcgccatctgggccacacaagttatcctaatgg

SEQ ID NO: 37489 - DNA, 373 bp, Glycine max
  Clone ID: LIB3138-128-Q1-N1-H8
ggaaaccagacagcttcagtggggagttcctagtgccgtcttaccgtggttcctctttcttggaccccaagggaaggggtgcctcaactggttatgacaatgctgttgctttgcctgctggtggaagaggagatgaagaggaacttgccaaggagaacaataaaagtgcttcatcttccaaagggaaaatcaccttgagtgtcaccaagtccaagcctgagactggtgaggttattggggtgttcgagagtgttcagccttctgatactgatttgggggctaaagctcctaaggatgttaagattcaaggcatctggtatgctcagcttgactcatagaccttttcttaatgttgtaactctactttcttgta

SEQ ID NO: 37490 - DNA, 358 bp, Glycine max
  Clone ID: LIB3138-128-Q1-N1-H9
aaataaaaaaaaaaaaaaaaaaaaaaaaaaaagggaaaaaaaaaaaaaaaaaaaaaaaaaaaaaaaaaaaaaaaaaaataaaaaaaaaaaaaaaaaaaaaaaaaaaaaaaaaaaaaaacaaaaaaaaaaaaaaaaaaaaaaaatggggccgccccccccctttatcctcctttaccccggatatttattccgccccgttccctttgggctcccctcttttcctttttaggactcttatttacccttggggtttcacgggtcttacttttttcctggggaaaattttttcccctctaaatttcctcctaaaataataatccgcaaaaattaaaatgtaaaccctgggtgccccaattgg

SEQ ID NO: 37491 - DNA, 362 bp, Glycine max
  Clone ID: LIB3138-129-Q1-N1-A1
gtgttggctaacacacaagaattctttgatggaaattttccagtggactcttggttaccaatttttgtgaattgtctttatcctgtaagtcaattaccttcagaagctgtcgttgtaaatgttacatgtggtagtggacgtggtggtttacccaccactgcttggattagttctgcagttaacaatcgctcctcagatatcaacaaaaggattcgcacagcacttgggaaaggtaagaaaattgtttttcttactagagttgatccttttccagaagctttactggctgttttttttggcgttaagaatgaaatttgagttttaacgccactaattctatgctgacgcgactttttgagaac

SEQ ID NO: 37492 - DNA, 352 bp, Glycine max
  unsure at all n locations
  Clone ID: LIB3138-129-Q1-N1-A10
agcatcaattatcagttatcagcatggtcaaaactgtagtttggtccacttttgtgagaccgcaatataaacctgcacatttcaatcactcaccccttccatttctgaagctcagtacacccaatttgagctttcgtgggaccaacacagtacataataagcgatccaattggccaaaacctttgtcactgcgctcaaaatctgttcttgctgttgctggggctgaccctttggaaatggcagaggattggaaccgcacagcccttcttgtgatcgacatgcagaaagattttatagaagatggnggtcccatgctagtaaaaggagggaaagacattgtcccaaatgttat

SEQ ID NO: 37493 - DNA, 350 bp, Glycine max
  Clone ID: LIB3138-129-Q1-N1-A11
ggtggttacatttccgaataccattgtgcagggggaaccagacatgaattcaaggtttcagcttttgagtaccactaccaatggtgattttgttcaagggaaagatctcgcaatggttaaagttaatgtagcatgtgctgctgttggcttgacatcaagttacactccaactccattgttggaatctggtttgcaaaaagacagagggttaattgtggagtattttggaaggatgtcttacgttgctcataacgttaatcagccccaagagaaagatttgttggagggaaatttttcctttgatattaaatctcgctctagattggaaaaagttttctctacaaaagcac

SEQ ID NO: 37494 - DNA, 355 bp, Glycine max
  Clone ID: LIB3138-129-Q1-N1-A12
gttgatttcaacaaaagtatggatttctggcaacaggataagtggaatggatatttctctgtcaaatggcacattataaaggatgttccaaatcctcaactacgccacataatactcgagaataatgatcacaagcctgtcacaaatagtagagacacacaagaggtgagttttccccaaggtgttgaaatgcttaacattttcaagaattatgtggcaagaacttccatattggatgactttgaattttacgaaagccgccagaaggtattgcaggagaagaaaacaaggcaatctatgccccataccagtgtacagcaaatagaggaattaaccactacacttgggtcagtag

SEQ ID NO: 37495 - DNA, 362 bp, Glycine max
  Clone ID: LIB3138-129-Q1-N1-A3
accgagtcacgcactcgcctcgactcgtacggactccgatcccccccgagtcacactcagccagcaccaccgcccgatccgacgatgtctcgcgcctcttccgccgcctccggcgagatcatgctgttcggggtcagagtcgtcgtcgattcgatgaggaagagcgtcagcatgaacaacctctcacagtacgaacatcctttagacgccaccaccaccaacaacaacaaagacgccgtcgccgccggctacgcctccgccgacgacgccgctcctcagaactccgggcgccaccgcgagcgcgagcgaaagcgaggagttccgtggacggaggaagaacacaagttgtttttggttggatt

SEQ ID NO: 37496 - DNA, 345 bp, Glycine max
  Clone ID: LIB3138-129-Q1-N1-A4
tttaacaataggtcatttatgaagatctcccatcaaacttgtgtgcaataagagactatatcgagaacaagacagcatcaaatattttggaagcatgtaagcagaatacaaattcagggcaacaaactgttccatctggctttgaagatgatgacagctattgttcagctgaagacttgtctgattgcaatgctcaaagctcatctcaacaaagaccaagagttccaggcttacaaagagatattgaagtcctaaaatctgaacttctgaaattcattgcagaacatggacaggaaggatttatgccaatgaggaagcaacttcgtttgcatggaaaagtggata

SEQ ID NO: 37497 - DNA, 363 bp, Glycine max
  Clone ID: LIB3138-129-Q1-N1-A5
accaaaagcactatagtgaagggggtcaagtcaagtgcccaagatgtctcttccaagcccaagattgattctttagctctcaagaagaagctgaacacctcaatcaaacgcccacctgattctaatctgaagtctgtcaccaccactgtcacaaaatctgaggttaaatcaaaaccggtaactgcatcatcagcatcgtccaaaacaataacaacgacaactactaccaaaaccaaagtgagagagaagaaagtctatagtctgcctggccagaaacatgatcctccagaacagaaagaacctctgaggattttttatgagtcattgtcaaaacaaatgccaacaagtgaaatggcggaattt

SEQ ID NO: 37498 - DNA, 362 bp, Glycine max
  Clone ID: LIB3138-129-Q1-N1-A6
taaccttgcaacttcgagaaatttcaaccacctctctctcccaaaatctcagagtgtgctgcttcagtgtctgcaggtatcaaagatggcaacattgactgcttcaagtaacttagtctctagaaattctcatgtccatcatggaccaacaactgcttcatatgagtctaaagcagtagcaatgggacttagatctctaaagcagacaaatactcatagtggacttagaatttttaacccggtggatgagctacttaacagaaccccaattaaaaccaatgcaatgcaagctatgaggaagggacctcaaggcaagaatgcctggcctaaaggtataatcacatgtggcatgactttcataa

SEQ ID NO: 37499 - DNA, 362 bp, Glycine max
  Clone ID: LIB3138-129-Q1-N1-A7
aataaaggtaatttctatcgaatacgcagtgcttttaagtatggtgcccgtaaacttggctggattcttaggttaccagaagacagaatagctgaggagcttattaggttctttgcaaacactctggaaaggcatggaagcactcaggggaatgtagacaagtcatttttgagcttatctacagcttccggaaaggataggaaacctggaaatcaacataattttgaaagcagagatgaaagagaaagatatgtagtacaagatgcaggggagttctttgactcctctagggatggaaatgcagttacaagttttaaacttggtgaagattctaaggatattgcaacatctggggtcttgga

SEQ ID NO: 37500 - DNA, 357 bp, Glycine max
  Clone ID: LIB3138-129-Q1-N1-A8
gttccattcgatgcagaggatgatgaatgctcctgattcaaatgataatattgatttactgttgagcattgatttgttgggtttacaaggagcaggtaaagcttttccaaacaaaattgtttttgatgataagcttgtgttggctaacacacaagaattctttgatggaaattttccagtggattcttggttaccaatttttgtgaattgtctttatcctgtaagtcaattaccttcagaagctgtcgttgtaaatgttacatgtggtagtggacgtggtggtttacccaccactgcttggattagttctgcagttaacaatcgctcctcagatatcaacaaaaagattcgcacagc

SEQ ID NO: 37501 - DNA, 355 bp, Glycine max
  Clone ID: LIB3138-129-Q1-N1-A9
caaaatccttttgtgttaaataggtggatgggaaaattgactttcccccagggcacttcccgaagtgttaagagaatgcctctttctatagggggaggagctggtgcaaagaatgctattctcatgaatatgccaaatgctgttctttcaatgtggagatattttgttggagatctcgtctttgaagtttctaagatgacttctccctacattaaatgtacagtctctttcttcatagcatttggaaatttggctgatgataccatcaattttgaggcttttccccacaagctggtgcagtttggagagattcaggaaaaagttgtattgaaattttcacaagaggaatttctta

SEQ ID NO: 37502 - DNA, 365 bp, Glycine max
  Clone ID: LIB3138-129-Q1-N1-B1
ctcgagccggtctctttcttcatagcatttggaaatttggctgatgataccatcaattttgaggcttttccccacaagctggtgcagtttggagagattcaggaaaaagttgtattgaaattttcacaagaggaatttcttacagcttggtcaactcaggtgcgtcctgcaacaactctgttggctgatgggtgtccatatttgtatgcaatggtgcatgatagttcagtgtctacaataccaggtgattttgtcattggtgtcaagttgacaaccataaacaatatgtgtgcatatgggctcaatcctggtatttcaggttctcgtcttttgggcaccattcctcagtccatttcacagcaaac

SEQ ID NO: 37503 - DNA, 282 bp, Glycine max
  Clone ID: LIB3138-129-Q1-N1-B10
gcatgacaaatcatcgtacacaataccaggggctaaagagattcatcgccagttgacaaccaataacaactggcgctcatatgggcttgatcgggggattaaaagttctaggctgtagcgcacaatgcctgcgtgcattatacaagaagactgatgggaatgactgggctacacagcgaacactattagcttttgcatttagcgagcagagcttaagacagaatgctatcgaccttatcgggggcggaaactgatgatatagaactggaaagatgatcacac

SEQ ID NO: 37504 - DNA, 357 bp, Glycine max
  Clone ID: LIB3138-129-Q1-N1-B11
ggatatgggaacttctgcgatcctctaatgattatgatccagatcttttactacctatactacaggttcttcagcaacctgaagcacgcagacttggggagcgtgttatgggtgggatcactcaacgtcttgcagcacgctttctgcaacaagtacttcgagttccaatgccagcttcctcatagattttgtgccactgtcaaggtcaacagatgtaatctagataaggttaccatgaacagggaatagaggagctatattcttacaaagcaagaaaaaaatatattctttcaaaattgtttgattagcttgtttgtttggatcctctaatttgcaaaaaatctgtatatattatat

SEQ ID NO: 37505 - DNA, 352 bp, Glycine max
  Clone ID: LIB3138-129-Q1-N1-B12
cttttctctctcgttttttctcaaaaagttgcaagagttaaagcaaaaaccaaagtgagagagaaaatgatgaagccatcgatgctcagatctcttcactctgccgccacccgcggcgcctcccacctctcccgccgtggctacgcctccgagccggtgccggagcgcaaggtggccgttctaggtgccgccggcgggatcgggcaacccctctcccttctcatgaagctcaaccccctcgtttccagcctctccctctacgatatcgccggaactcccggtgtcgccgccgatgtcagccacatcaacaccggatctgaggtagtggggtaccaaggtgacgaagagctcg

SEQ ID NO: 37506 - DNA, 355 bp, Glycine max
  Clone ID: LIB3138-129-Q1-N1-B2
gctgaatctgcacaggctgctttggacattatgaatggtgtggaggtacaaggtcggcccttgcggttgaatttggctgaagcaagggcaccttcatctcctccagtaattcagaaaaatgtaggaagcaatgttgaaagctcggaattggtgtctagtgccagcacataaggaaatatggtcgatcaaaattttgcccgcaaaatgcacgtcattcagcttcttcctgaaaggtttctcttggcaaatttcctgtcaattgctagtcactttggtatacactaactagaccttcaagcagttgtgaaatgtacttgttattgaacatatctataaagggtcgatgttaattata

SEQ ID NO: 37507 - DNA, 360 bp, Glycine max
  Clone ID: LIB3138-129-Q1-N1-B3
caaatggcaacagtgagaacaccattgaattttgattctagcaagcagagcttttgtcagttttctattgaccttctcggtggaggaatcttagtggacaaaactggagattggatcacacttatacaaaattctccaattagtaacttgttgagagttgctgcttggaagaaaggctgtttaatggtcaagattgtgatgtctgggaatgcagcagtcaaaaggagtgattgggcctcattggtacaagtgtttttaacaaacagcaacagtacagagcattttgatgcatgtaagtggacaaaatcagaaccacattcctgggaattgatcttcccaatagaggtatgtggtcctaat

SEQ ID NO: 37508 - DNA, 358 bp, Glycine max
  Clone ID: LIB3138-129-Q1-N1-B4
gcttttgtcagttttctattgaccttctcggtggaggaatcttagtggacaaaactggagattggatcacacttatacaaaattctccaattagtaacttgttgagagttgctgcttggaagaaaggctgtttaatggtcaagattgtgatgtctgggaatgcagcagtcaaaaggagtgattgggcctcattggtacaagtgtttttaacaaacagcaacagtacagagcattttgatgcatgtaagtggacaaaatcagaaccacattcctgggaattgatcttcccaatagaggtatgtggtcctaataatggttttgaaatgtggagttctgagtgggcaaatcaaacttcatg

SEQ ID NO: 37509 - DNA, 358 bp, Glycine max
  Clone ID: LIB3138-129-Q1-N1-B5
gttgagagttgctgcttggaagaaaggctgtttaatggtcaagattgtgatgtctgggaatgcagcagtcaaaaggagtgattgggcctcattggtacaagtgtttttaacaaacagcaacagtacagagcattttgatgcatgtaagtggacaaaatcagaaccacattcctgggaattgatcttcccaatagaggtatgtggtcctaataatggttttgaaatgtggagttctgagtgggcaaatcaaacttcatggcatttgagtttccttattgacaatcccaaacagtctacagtttttgatattctcttgggaatctctcaagattttgaaattgctggtaatactcttatg

SEQ ID NO: 37510 - DNA, 357 bp, Glycine max
  Clone ID: LIB3138-129-Q1-N1-B7
gattcggataattttaatctccagaagtacccctcttatgagatcgactgggattctctgtgaagccgtgttttcttagtgtcctatgttgttatgtaagggtattaatcttcattatgtatggtctagtctaggtcttagtgtcttctcaggtggctgctactgcaatggagtttttggcaattgcagagccagtcttagttaattactagtattctgtgtataatctctctctaccttgggtcatagctggttttttttcttgcttgaccagggagaattagtccacttaatatgtttctcaagtgcatcgctgtaatctactacttttaattataaaaatatggatttattatt

SEQ ID NO: 37511 - DNA, 357 bp, Glycine max
  Clone ID: LIB3138-129-Q1-N1-B8
attagctggtcgccgtggaaagacagctatttcatctaaagaaattgatgattctattgataggattgtggctggaatggaaggaacagtgatgacagatgggaagagcaaaagtttagtggcatatcatgaagttggtcatgctatttgtggaactttgactcctggtcatgatgctgtgcaaaaggtaacactagttcctcgcggtcaagctcgtggacttacatggttcattcctaacgatgacccaactctgatctccaaacaacaactctttgcaagaattgttggaggactaggtgggagggctgcagaagaaattattttcggtgagcctgaagttacaactggagcagc

SEQ ID NO: 37512 - DNA, 358 bp, Glycine max
  Clone ID: LIB3138-129-Q1-N1-B9
gtcgaaaaaaacctgttaccggtcgagacggttgacgccggactcaaatcgctcgcgggcgggtgccctaatttacgcaagctcgaggtggcaggttgcagcgaggccgggatttcgacgattggcgcggaatgtgttactctgcaggagctcgagctgcagaggtgcgacgacgccgttttgggaggcgttgcagggtgtgagaatttgcagattttgaaaatagttgggtgtgtgaggggtttttatgagtctgtggtttcggacattgggctcacgattttagcgcaggggtgtaggagattggtgaaattggagcttgtggggtgcgaagggagtttcgacggggtgaaggcga

SEQ ID NO: 37513 - DNA, 360 bp, Glycine max
  Clone ID: LIB3138-129-Q1-N1-C1
gtgcggaccgttctggaccgccgcacgtcgaagggaacagggtcaactaacacgtttacctgatcccctccaatcaagacagtccgccaacgggtctacaaccgcccaccatgttccgtctcataaccaacctgggaatcgcgcccctgaccgtcttgctcgtcgctacgtacttctccttcttctgcgccgggatgcttgaggtcatccgccccatccccatcatacagaacaaggtctctgcggtgaacctgaagccctcgcacagggtggccatctggtctcgtttcttccaacgggctgcggttgctataatcggcgctgcattgaccaacaccgtggtgtccttctacactgcac

SEQ ID NO: 37514 - DNA, 355 bp, Glycine max
  Clone ID: LIB3138-129-Q1-N1-C10
ggacaaagtccaaacctatcccaccaggtggcacataccctgcaaaagatcattgcagtcgttgtgggttgtgtgatacttactatattgcccatgtcaagaatgcatgtgctttcttgggagatggaatgtctaagattgaaagattggaacctgttgttcatggtagaggcaggaagactgataacttggatgagacctacttaggggtatatgaggaactgctatatgctcggaaacttaaccctgtggaaggagctcaatggactgggatagtaacaaccattgcaatagaaatgcttaaatcaggcatggtggaggctgtcatttgtgtacaaagtgatcctgatgatag

SEQ ID NO: 37515 - DNA, 357 bp, Glycine max
  Clone ID: LIB3138-129-Q1-N1-C11
aacctcaccacgccatcgccgttttccctcgacacaaccgaagcgctcttccatcgacacctccaacacctccaacactctcttgaacagcagcaatcatggccaactacctcgcctccatcttcggtaccgagcaggacaaggtcaattgctccttctactacaagattggcgcctgccgtcacggcgaccgctgctccagaaaacacgtcaagccgtcgtactcgcagactatcctgctgcccaacctctaccagaacccggcgtacgaccccaagaacaagatgaacccgcagcagatgcagatgcactttgatgcattttacgaggacatctggtgcgagctgtgccagtatg

SEQ ID NO: 37516 - DNA, 352 bp, Glycine max
  Clone ID: LIB3138-129-Q1-N1-C12
cgaggattccctcaaaaggatggaattgacttcaatgaagttttctctcctgtagtgaaacacaggtcaatcataattcttatgactatggtggcagaatttgatcttgtgttagaacaaatggatgtgatgacaacatttttgtatggaaagcttgatgaggtgatattgatgaaacaacccgaggggtttgaagtcaaaggtaaagaggattatgtttgcaaattaaacaaatccttgtatggtctaaagcagtcgcctagacaatggaataggagatttaatgaatttatggctcacatacagtttcatagaagtcactatgatgactgtgtttacttcaaatttcctt

SEQ ID NO: 37517 - DNA, 296 bp, Glycine max
  Clone ID: LIB3138-129-Q1-N1-C2
tccaagcaactacagtgcagacatactgtgtctacaacgctcccaccatgttactgatcataaccaacctgaaaatgccgctcctgaccgtttcgctcgtccctacatactcctactgcttattcgcctggatacattagggcataccatccatcacaatgatccagaccttagtttaagcgttcaacttttaacttccactcacgatggtgattttgttcaaggaaaaacactcccaatggtaaagttaatgtaacatgtgctgctgttggcttgacatcaagttacactccaac

SEQ ID NO: 37518 - DNA, 359 bp, Glycine max
  Clone ID: LIB3138-129-Q1-N1-C4
gtcaatctcgtaaatgtgttacgagaattgtatttgcacagtccagaggaagctcgccaattgagaaggaaagctctctctcgtattgaatggctgcaaaaagctgatgtgcctaccatttcgcagattgaagagttacattcgatgcagaggatgatgaatgctcctgattcaaatgataatattgatttactgttgagcattgatttgttgggtttacaaggagcaggtaaagcttttccaaacaaaattgtttttgatgataagcttgtgttggctaacacataagaattctttgatggaaattttccagtggattcttggttaccaatttttgcgaattgactctatcctgtaag

SEQ ID NO: 37519 - DNA, 355 bp, Glycine max
  Clone ID: LIB3138-129-Q1-N1-C5
gaatattttgcggtattgggtgaacaacagatgtctgcagatgctattgccaggtgtctatatgcccttgaatgtgcatggcatcccatgttcaatccattgcagggaaattgccggctgaagttcaaacatgatacaaacaaacctatattcacagctcttttcacccacatgaaaaacttggacaggcgtggctgtcatagatctgccttagaggtctgcaaattgttgctttcgctagattctgatgatcccatgggggctattttctgcattgactactttgctttaagggctgaggagtatgcatggctggagaagttttctgaagaatataaaagtgataactccattt

SEQ ID NO: 37520 - DNA, 326 bp, Glycine max
  Clone ID: LIB3138-129-Q1-N1-C6
agtatatcaaagctgcatatttaaagaaacacaagaagactctgaacgatgaagtacactcagaaacatccagtcactacaggacttttcttctctcacttttgggccctaatcactagccaagatgttcaatgatgtaagtggaataaattcacccttgatgtgtaaatttgactgtttttagtgctttgtgatcaatgtagccgacaacttgtagaataaggcctttgttgttgttgttgttgttgtagtgctttgtgagtgttaatttatcagcctatagcacagatgaagatttgttgtgtattatttaagtatgcttaact

SEQ ID NO: 37521 - DNA, 356 bp, Glycine max
  Clone ID: LIB3138-129-Q1-N1-C7
aaaaatagcaagcctcaagctactgcaatgcatgtgggagctatagaaattatcattgatagtttcgcaagtcctgattgcaacatagttggtgcaatgcttttggttgatacttatcataccaatcctgaaaatgcagttcgtagtatttttgttgcgcctttcagaggcggaaggcccattcgggtggttacatttccgaataccattgtgcagattgaaccagacatgaattcaaggtttcagcttttgagtaccactaccaatggtgattttgttcaagggaaagatctcgcaatggttaaagttaatgtagcatgtgctgctgttggcttgacatcaagttacactccaac

SEQ ID NO: 37522 - DNA, 356 bp, Glycine max
  Clone ID: LIB3138-129-Q1-N1-C8
gtggattgtggtgctttcttccccgcaaaccctagcgcaaacagcgttcctccgaaattcaattcccagcccaaccagagtgtccctttctctcaaaaccccgtgttcttcattaacagcaaaatgccagcaacaacaaaaaactcaagaagacggcattcccgcggacgaggttaaaatccttgcgaaattcaagtcccgccacaactacatccgcgttctagaagtttctagaaaagcagaacaccccttccgcggctccaggctcctccttctcgacacccccggaaacatccacagcatatctttcctcttcaagtccctcaccaatacttacttcgacgtcttcgccacgc

SEQ ID NO: 37523 - DNA, 358 bp, Glycine max; identical to SEQ ID NO: 37509
  Clone ID: LIB3138-129-Q1-N1-C9

SEQ ID NO: 37524 - DNA, 360 bp, Glycine max
  Clone ID: LIB3138-129-Q1-N1-D1
caattttctagggttttattcattttccgatggcttctggggatgttgagtaccgttgctttgtcggagggctcgcttgggccactgacgaccatgccctcgagagagccttctctcagtacggcgaaatcgttgaaacgaagattatcaacgatcgtgagactggcagatccaggggttttggatttgtgaccttcgcctcggagcagtccatgaaagatgcgatcggagcgatgaatggacagaacttggacggccgtaatatcactgtcaatgaagctcactcccgcggtggcggctgctgtggctgttcgaggaggaggaagatacaatcgtggtggcggtggatattgttgtcgt

SEQ ID NO: 37525 - DNA, 354 bp, Glycine max
  Clone ID: LIB3138-129-Q1-N1-D10
ctcaaagaaaagccaccttaacatctcttctctgaaaattctctttagagagatagagagaggaagaaagaatggcagcttgcactgtctactcaacacaatctctgagcacaaattgctccatctcaaccccatcaaagacgcaactcagttttttccaccaaaagcaggtagttttctggaggaacagcaagaagggcagctgcagcagcagaagaagctatgtgataacatgtgcagcaggtgactcacagacagtggtgattggcctggctgcagactcagggtgtgggaagagcaccttcatgaggaggctgaccagtgtttggaggagcagcagagccaccaaagggt

SEQ ID NO: 37526 - DNA, 354 bp, Glycine max
  Clone ID: LIB3138-129-Q1-N1-D11
gtcactggatggactgccaccccaatgcaggatgttcaggttacaattgattggtttatttcctctcaggaatgtgttcccaggacctattgtgttttaaatccacaaaatccttttgtgttaaataggtggatgggaaaattgactttcccccagggcacttcccgaagtgttaagagaatgcctctttctatagggggaggagctggtgcaaagaatgctattctcatgaatatgccaaatgctgttctttcaatgtggagatattttgttggagatctcgtctttgaagtttctaagatgacttctccctacattaaatgtacagtctctttcttcatagcatttggaaat

SEQ ID NO: 37527 - DNA, 337 bp, Glycine max
  Clone ID: LIB3138-129-Q1-N1-D12
ctcaaatctgataacgtctggatgcaaattgggataacgtgccctatcgaacctggaattatgcccattaataattacaagggctttatccgcatgactgggttttgcaaaacaaagattccagctgacattatggctgctttagagcctatcaaggacaacgaataaactgtcaaggcttatggaattcacctgggaactgaaatgtgcaaaaagattttagctcatggaattaatacattgcatctttatacactaaatatggagaaatcggcattagcgatactaatgaaccttggcctaattgaaaagaccaaagtttctaggaccttacctt

SEQ ID NO: 37528 - DNA, 360 bp, Glycine max
  Clone ID: LIB3138-129-Q1-N1-D2
ttacaatccttcaaaaattttgtttctttgtgtgtgtatggtgatgataacttaattagtgttcatgaatatgtcaagccttactttagtggttctaaattgaaaagctttctagctagtcataacatcaccattactgatggtattgacaaaactagtgcaactttgcaatttagaaagttagcagattgtgattttctcaagagaaactttaagcagatgtctaatgttttgtgggtggctcctgaggacaaggcgagtttatggtcacaacttcattatgtttcgtgtaataatctggaaatgcaagaagcttatcttgtcaatctcgtaaatgtgttacgagaattgtatttgcac

SEQ ID NO: 37529 - DNA, 140 bp, Glycine max
  unsure at all n locations
  Clone ID: LIB3138-129-Q1-N1-D3
gtcccatattcacatgctattttaatttgcttacaatgtgcagagccaatgtctgactgtnccttataacaaaacatcatttactatggggggtaacaattgagatgtgaaccatcattttaaaccccttattatgttgg

SEQ ID NO: 37530 - DNA, 370 bp, Glycine max
  Clone ID: LIB3138-129-Q1-N1-D4
ctcgagtcctttaaaaaaaaaaaaaaaaaaaaaaaaaaaaggattatatataaaataaaaaaaaaaaaaaaaaaaaaaataaaaaattaataactataaaacaacacatttttttattacaaaaatgattacttttaacctcccacaaattctcttcttaaaattttttctcctataacactttttttttcttccctatcactttcttcattcaaattcaaatacctattatttttccaacttaaacaaatccttgtatgacttaaagccatcccctagacaatggaataggacatttaatgaatttatggctcacatacagtttcatagaagtcactatgatgactgtgtttacttcaaatttcctttt

SEQ ID NO: 37531 - DNA, 331 bp, Glycine max
  unsure at all n locations
  Clone ID: LIB3138-129-Q1-N1-D5
ctagcgttcttgtggccgcgcaggaagtgaacagccccttcgagtattgcgacattgtgaccaccacgactcacaagagcttgcggggcccacgtgcggggatgatcttttaccggaagggccccaagccgccgaagaaggggcagccggagaacgcggtttatgatttcgaggacaagattaacttcgcggtgttcccttcgctgcagggtgggccccacaaccaccagatcggtgctctcgccgtggcgctgaagcaggccgcgtcgcccgggtttaaggcctacgcgaagcangttaaggcgaacgccggtgcgcttggaaaatactt

SEQ ID NO: 37532 - DNA, 338 bp, Glycine max
  unsure at all n locations
  Clone ID: LIB3138-129-Q1-N1-D6
ggcgaagcgaaacgctgcgttgcgccaatcgcggcgttgttgttggtggtgctactcgcgggagtgtggtggtggaggctcaggagaactcggacgtgaagacgctggtgaacacatgcacgggaagaagtactgcgacaaagatgggaatgtaagggctggtcaatttactgtgaacctcactattactgattatttcagacctaccagttcagantctcttctcaagcggaactcgccggtggccacgccgtcggattttgggactaccactcgttcatcgccgctgccggcttttnagccgaagggttcggcaccaccgggaacagaaatgcaga

SEQ ID NO: 37533 - DNA, 357 bp, Glycine max
  Clone ID: LIB3138-129-Q1-N1-D7
tgagattttattactacagtcagaacttgacgagtggaagaatcgagcgaatttcgcaagagaaaaattccaaagcctcaagagagaatcaaattaccaggtaattaataggcgataagaattgagggctgtccaagcaattgagacactttagtacaacatttccttcttttttctttttacagttgcttgtgttgaagaatgaaaaggaatcaatagcagaggctgaaactagagctcgcaatgtgattcacagtttacataaaaagctaaaccacttgcaggttttggatttgactatttgaatttccagtacttgatagttgtgccattttttgagtatcaacctacttgggt

SEQ ID NO: 37534 - DNA, 355 bp, Glycine max
  Clone ID: LIB3138-129-Q1-N1-D8
cattttgatgcatgtaagtggacaaaatcagaaccacattcctgggaattgatcttcccaatagaggtatgtggtcctaataatggttttgaaatgtggagttctgagtgggcaaatcaaacttcatggcatttgagtttccttattgacaatcccaaacagtctacagtttttgatattctcttgggaatctctcaagattttgaaattgctggtaatactcttatgccagctttttctgttccacaggctactgccagatcttctgaaaatgcggaatcctctgcatgatctggaatttgtgttttctttcgcttgttcgtttgtttaattcaataaaggaaattaggcatga

SEQ ID NO: 37535 - DNA, 355 bp, Glycine max
  Clone ID: LIB3138-129-Q1-N1-D9
gctggtgcttctcacaatcttccgcaatcgatgttgcatcctggtacaaaaccttctgctagtgttgggtccacattcccacaggggcagacaccacttccaggtcaaccatcatctcagccaccttatcaggttgggaatatgcctttagggcctgattttggcaaccaagctggaaatgctatgcaagtagacagagggtcttcttggatgcttggtccctcagaaaacctagcacatctatctggtcctcctggaccaccatctgtagtttctggtcagatgggtgctgctgctaagcagcctcttcggcctcctgggttgacaccggagatggagaaggcactgcttcagc

SEQ ID NO: 37536 - DNA, 355 bp, Glycine max
  Clone ID: LIB3138-129-Q1-N1-E1
aatctttgtcgattccagaaatgtgtagcactagcattagcatagcttcctcacaccaaagctttctcaccaacgcccttattccaccaaagttcaggaccaccaggattagtattgtttcttgcagttccccacaacaatctccaaggaagaagaataatgagaacaagttggcaaagttagcaatggttgcagttgctgttggggtgctaacacttgggtcagttcatgatgcatcagctgccaagactggtggtagaattggtggccaggccttcaagtcagcagctccacgctccgcaccaagaatcaacaattccaggaccaacatctatatcaatcctcgagtggcacc

SEQ ID NO: 37537 - DNA, 351 bp, Glycine max
  Clone ID: LIB3138-129-Q1-N1-E11
atcaaatggcaacagtgagaacaccattgaattttgattctagcaagcagagcttttgtcagttttctattgaccttctcggtggaggaatcttagtggacaaaactggagattggatcacacttatacaaaattctccaattagtaacttgttgagagttgctgcttggaagaaaggctgtttaatggtcaagattgtgatgtctgggaatgcagcagtcaaaaggagtgattgggcctcattggtacaagtgtttttaacaaacagcaacagtacagagcattttgatgcatgtaagtggacaaaatcagaaccacattcctgggaatttatcttcccaatagaggtat

SEQ ID NO: 37538 - DNA, 349 bp, Glycine max
  Clone ID: LIB3138-129-Q1-N1-E12
ctcaagtctctcgaagcctctttctctctcttctaggttcgtttctctctcctcctcgttcttgtttcttcggtgattttatgtgtgtgtttgtgtataacggtggtcgtgtgttttgagtagcttgaaacacgtttgacgaacgatgttttactacgttgttgtgtcttgtttattttaaatcatagtcttgtaagttcgtagatcgtgaatttgcttatgatttatttcttagatataaaaaattatggggttttgttggggattttatcatgataaaataaaagctttctcttttcttgaatgaaattggctttttttgtaacttttgttctgttttggtatgatt

SEQ ID NO: 37539 - DNA, 352 bp, Glycine max
  Clone ID: LIB3138-129-Q1-N1-E2
caacaactctgttggctgatgggtgtccatatttgtatgcaatggtgcatgatagttcagtgtctacaataccaggtgattttgtcattggtgtcaagttgacaaccataaacaatatgtgtgcatatgggctcaatcctggtatttcaggttctcgtcttttgggcaccattcctcagtccatttcacagcaaactgtttggaatcaaatggcaacagtgagaacaccattgaattttgattctagcaagcagagcttttgtcagttttctattgaccttctcggtggaggaatcttagtggacaaaactggagattggatcacacttatacaaaattctccaattagtaa

SEQ ID NO: 37540 - DNA, 347 bp, Glycine max
  Clone ID: LIB3138-129-Q1-N1-E3
ccaaaaccactttactctctcgttcactctgcatctgactcctatagtttcctctgctaattccatatccccgttttccttcactcttgaaccccgattcatttccaccagcacaagaagcatggctgcaatatcaataccttctcacatgaaagcttggacatactctgagtatggaaaatccaaggaagttctcaagtttaatcagagtgtggctttgcctgaggtgaaggaagaccaggtcctcatcaaggtcgctgctgcttcccttaaccccattgatcataagagaatggaaggctatttcaagaacagcgactcccctttacctactgctgcgggatatg

SEQ ID NO: 37541 - DNA, 354 bp, Glycine max
  Clone ID: LIB3138-129-Q1-N1-E4
ctagtttcttacaaggctctactctactgcttcaccttctgctctagaaaattcagtggtgatacatggcttcggctactctctctgtagccaaaccagcccttcaggcaaatgggaaaggcttctctgaattctctggcctccgcagctcatcaggcttccttcccttttctagaaaatcttcagaggatttccattctgtcattgccttccagacctatgcagttggaagcagtggaggatacaagaagggtgtgacagaagcaaaactgaaggttgccataaacggatttggaaggattggaaggaacttcttgaggtgctggcacggtcgcaaagactcccctcttgatg

SEQ ID NO: 37542 - DNA, 356 bp, Glycine max
  Clone ID: LIB3138-129-Q1-N1-E5
ggaaatgcaagaagcttatcttgtcaatctcgtaaatgtgttacgagaattgtatttgcacagtccagaggaagctcgccaattgagaaggaaagctctctctcgtattgaatggctgcaaaaagctgatgtgcctaccatagcacagattgaagagttccattcgatgcagaggatgatgaatgctcctgattcaaatgataatattgatttactgttgagcattgatttgttgggtttacaaggagcaggtaaagcttttccaaacaaaattgtttttgatgataagcttgtgttggctaacacacaagaattctttgatggaaattttccagtggattcttggttaccaattt

SEQ ID NO: 37543 - DNA, 353 bp, Glycine max
  Clone ID: LIB3138-129-Q1-N1-E6
aatccttcaaaaattttgtttctttgtgtgtgtatggggatgataacttaattagtgttcatgaatatgtcaagccttactttagtggttctaaattgaaaagctttctagctagtcataacatcaccattactgatggtattgacaaaactagtgcaactttgcaatttagaaagttagcagattgtgattttctcaagagaaactttaagcagatgtctaatgttttgtgggtggctcctgaggacaaggcgagtttatggtcacaacttcattatgtttcgtgtaataatctggaaatgcaagaagcttatcttgtcaatctcgtaaatgtgttacgagaattgtatttg

SEQ ID NO: 37544 - DNA, 356 bp, Glycine max
  Clone ID: LIB3138-129-Q1-N1-E7
aattaatctttttattatagttattgttgttgttattattcctcaaatatggattcgttgtgcctctccaacgactcagttgtttctggattcaaagacaaggagtcaatggttgacccctttttggtcgaggctctccagaaccctcgtcaccgcctcaccattttgaggatggagctggacatccagaagtttttgaataatgctgatcagcagcattttgagtttcaacatttcccttcttcctacctccgactggctgcacaccgtgttgctcaacactacaacatgcaaacaatggttcaagataatggcttagatggccagggaagtaaaattctggtgaggaagttacc

SEQ ID NO: 37545 - DNA, 359 bp, Glycine max
  Clone ID: LIB3138-129-Q1-N1-E8
ataatttcctcttcttctctcgtttctctctctttgtttctctcaaagtgttgaacttgaagttgcagagagaaaatggattgagaattctctctcttttctctttctcttcccaactttccttccttgggatcattctgcttctttgctatggaagactcagattcagttgctacgctgatagattccacaacttctaagatacagcagctgcaaaaggcatttgctgaacttgaaagttaccgagctgttactctgaacttgaaatggaaagaactcgaggaacattttcatggtctggagaaatccttgaagaggcgctttcatgaattggaagaccaagaaaaagagtttgagaa

SEQ ID NO: 37546 - DNA, 317 bp, Glycine max
  Clone ID: LIB3138-129-Q1-N1-E9
agcatttggaaatttggctgatgataccatcaattttgaggcttttccccacaagctggtgcagtttggagagattcaggaaaaagttgtattgaaattttcacaagaggaatttcttacagcttggtcaactcaggtgcgtcctgcaacaactctgttggctgatgggtgtccatatttgtatgcaatggtgcatgatagttcagtgtctacaataccaggtgattttgtcattggtgtcaagttgacaaccataaacaatatgtgtgcatatgggctcaatcctggtatttcaggttctcgtattttgggcacca

SEQ ID NO: 37547 - DNA, 363 bp, Glycine max
  Clone ID: LIB3138-129-Q1-N1-F1
tgcttacagagtcccacggcttgattatgtttcgcaatttctttgctaccccttctgcctgaattagctattatagttcctttgcctttatagcctcaatggaagaagaggactttgaatgctgcctgaaagcattgaaaggaattagggttattgctgcgggtgatctcattcagcctcctagatgctgtcttccctactcttgaccagagtttctcagttgttggatattccaagtactcctccaagtcaaggaccacttggaatgcttgctctaaaagtctatccttgcttgatgcaatgatctctttgggtctctattgtatatcttcaacacctgtctaccaaactttaactaaacct

SEQ ID NO: 37548 - DNA, 353 bp, Glycine max
  Clone ID: LIB3138-129-Q1-N1-F10
ggagctttcctccatacgaatcaaaggaggagagagagagagagagagagaggagacacagacacaaaggaaacggaaaaagcaacacacaaaaaaaaagaggtctgtgcctcctcttatatgtaatagctagtttccgagacaagaaaaaaaataaaagtaaaaagagaacatggattatgaaaacaacagttggatttgggagggggtaaactactacccgtgtgtgtttggcggtctaatggttacagcagccttgctgggcttgtcaaccagctactttggtgggattggggttccttatttatcgctgccatgttcctggtctaatttggggattttccaccagaaaa

SEQ ID NO: 37549 - DNA, 327 bp, Glycine max
  Clone ID: LIB3138-129-Q1-N1-F11
agcgttgccattctcatcctcttctttctctctctaccattgccatggatccctacaagcaccggccatccagcgccttcaattctcccttctggactacaaattctggtgctcctatttggaacaacaactcctctttaaccgttggagctagaggtccaattctgctggaggattatcatcttgtggagaagcttgcaaattttgatagggaacgtatcccagaacgtgttgtccatgccaggggcgctagtgcaaagggtttctttgaagtcacccatgacatttctcacctgacatgtgcagatttacttcgagcccctggag

SEQ ID NO: 37550 - DNA, 350 bp, Glycine max
  Clone ID: LIB3138-129-Q1-N1-F12
aacccaaccacattatcaacatgtctgacattggacgacagtcgctcggagacaaggccggagccgccctcaagcccgactcgcagaagacctacctcgagcaggccggcgacgccatcaagggcaaggccgactccgccgcctccaccggacagccggaatcccagaagtcgtacacccagcaggccggtgacgctctctcgggcaaccagaacgagaacaagggctcgctcctcgactctgccaaggacgcccttggtatgaacaacaacaaccgagcttaagtcgatcgttatcggtccggcgccggttggttgatcggagggaagaaggaagaagacattcagtag

SEQ ID NO: 37551 - DNA, 363 bp, Glycine max
  Clone ID: LIB3138-129-Q1-N1-F2
ctttgcttcactccttcaacgccgtactatcgtttccgagaaccatctctttttttctcgccgctcttccccgcaatcgcaacgcgcgttttgcttctccttttatcgcagattctctgcgtcgtcaccagactcacttccgtgattcgaacgcggcgtggggaagagaaaaccctaatccgacatggggaagaagaagccgacggcgagggacgaagagaacgcgtcgcagcaaggcggcggcgggaaatcgaagaagaaggcggttgtcatcgacgacgatgagtactccgtcggaactgagctctccgaggagcaggcaccggcgtcagaggagaaacccgccgcggcgggaaagaagaa

SEQ ID NO: 37552 - DNA, 363 bp, Glycine max
  Clone ID: LIB3138-129-Q1-N1-F3
gggcaatgcaccggcactgcccgagactcttaagaattacaacaagctggtgtctcttggcttcaagattatattcttgtcaggaagaacactggacaaacaggccgtaacagaagcaaacttaaagaaggctggctaccacacatgggaaaaattaattctcaaggatccacaagatccttccactccaaatgcagtttcatacaaaacagcagcgagagagaaactgataaggcagggatacaacattgttgggatcattggagaccaatggagcgatctcctcggaggccacagaggcgaaagcaggacctttaagcttcctaatcccctgtactacattcagtagttccttcacctctc

SEQ ID NO: 37553 - DNA, 349 bp, Glycine max
  Clone ID: LIB3138-129-Q1-N1-F4
gaaggacagcaccacctgattttctagccaagttaacgttcctcatatggaatcaccatgaacagatcaagcacatagatactgttagagcttacacctttggtgcacattactttgtggaagttgacattgtgttgccggaagacatgcttctccaccaagcacacaacattggtgagacactccaagagaagctggagcagcttccagaagtcgaaagggcttttgtgcacgtagattttgagtccactcacaggccagagcacaagaccatggtgtgatgatatgccatgggacaatgatggcatatcttagctttgctaattttcttagttattttatgcaagtc

SEQ ID NO: 37554 - DNA, 353 bp, Glycine max
  Clone ID: LIB3138-129-Q1-N1-F5
gattggcagggcgtaatatcaaatctaagacccagtgacaatgtggagatttttgtagttcttggtcatggattgacggttgtgaagacagctctctatctaatatatgatgatgagtcaatcactgtgaaaatggagccatcacctaatgtgataatggagtcatcgtctaacatgaaaacagatccatcacctaatgttaaaatggagccattatctaacatgaaatcagagccatccatgaagccaaagaaaaatatttttgctagacttatacagagaatgggagaatgtacatgcatgaggtgaaatagaggcttcaacaattttttactaggtctgccaatgccatt

SEQ ID NO: 37555 - DNA, 350 bp, Glycine max
  Clone ID: LIB3138-129-Q1-N1-F6
cgccgtcgttttgtacagcccaagaatcttcgagaaggccgggatcaaatccgataactaccgtctcctcgccacggttgcggttgggttcgtcaagaccgtttccattttggtcgccacttttttcttggaccgggccgggcggcgcgtgttgctgctttgcaacgttagtgggctcatactctcgcttttgactctgggcctgagtctcactgtggtggaccattcgcagaccacgctgaattgggccgttgggctcagcatcgctgcggtgctgtcctacgtggcaactttctctatcgggtctgggcccatcacgtgggtttatagctccgagatattcccgttga

SEQ ID NO: 37556 - DNA, 358 bp, Glycine max
  Clone ID: LIB3138-129-Q1-N1-F7
ggaaatgcaagaagcttatcttgtcaatctcgtaaatgtgttacgagaattgtatttgcacagtccagaggaagctcgccaattgagaaggaaagctctctctcgtattgaatggctgcaaaaagctgatgtgcctaccatagcacagattgaagagttccattcgatgcagaggatgatgaatgctcctgattcaaatgataatattgatttactgttgagcattgatttgttgggtttacaaggagcaggtaaagcttttccaaacaaaattgtttttgatgataagcttgtgttggctaacacacaagaattctttgatggaaattttccagtggattcttggttaccaattttt

SEQ ID NO: 37557 - DNA, 361 bp, Glycine max
  Clone ID: LIB3138-129-Q1-N1-F8
ggtagagcgacacaatggctcagccaaagaagcaagtccccttgccgttcacgtacactttctcctttggcgccatcgccggtgtcacagagctgctgctgctgtacccccttgatgtggtcaagacgaggcagcaattggaggctggtaagggcggtatgggcatgatggcgacgttcaaaaacattatctcgacccaggggacgtcaagattgtacaagggtataataccgcctttactcatggaggcccccaagcgtgctatcaaattcagcgcgaatgggtggtggtctggtctgatcaccaacaacggtcaaagagaaaccacgcaggccatcgctattctcactgggtgcgcagc

SEQ ID NO: 37558 - DNA, 350 bp, Glycine max
  Clone ID: LIB3138-129-Q1-N1-F9
attggtgtcaagttgacaaccataaacaatatgtgtgcatatgggctcaatcctggtatttaggttctcgtcttttgggcaccattcctagtccatttcacagcaaactgtttggaatcaaatggcaacagtgagaacaccattgaattttgattctagcaagcagagcttttgtcagttttctattgaccttctcggtggaggaatcttagtggacaaaactggagattggatcacacttatacaaaattctccaattagtaacttgttgagagttgctgcttggaagaaaggctgtttaatggtcaagattgtgatgtctgggaatgcagcagtcaaaaggagtgatt

SEQ ID NO: 37559 - DNA, 358 bp, Glycine max
  Clone ID: LIB3138-129-Q1-N1-G1
aacatctcaatgggttcttcttctattacaacatcgcccgcaaccatgaccatggctgcgatcgtgctcctgttcacggtctttgccgtttcctccgccctagacatgtcgataatctcgtacgacagcgcccacgcggacaaggccgccacgttgcgcaccgaggaggagctgatgtccatgtacgagcagtggctcgtgaagcacgggaaggtgtacaacgcgctcggcgagaaggagaagcgcttccagatcttcaaggacaacctgcgattcatcgacgaccacaactccgcggaggaccgaacctacaagctcggactgaaccggttcgctgatctcaccaacgaggaataca

SEQ ID NO: 37560 - DNA, 342 bp, Glycine max
  Clone ID: LIB3138-129-Q1-N1-G11
ggaaaagtctaaaagcaggatttagggtatcctggatttcctcttttgtctaatcaagtgtttattgttggatcctccggaatgggaaaagcaaaggatgatgactgaaatcctggcattggtggtttaacgcccttccacttatttgttttcaagtccctcaagagtttgtcatggtcctgtgttaatttgttaccactgtaatatcatatgaaagctacaatgaaatattagtatttgtggagtctgtaatcattataggaatccgtttgttttggaagaattgaacatctgttacagccgccaccatacggatctaacactatatttgtgatttgcgtc

SEQ ID NO: 37561 - DNA, 228 bp, Glycine max
  Clone ID: LIB3138-129-Q1-N1-G12
cttgtccatctatcccacaactaatttttgattttccttgtttatttatcttcttcctcccttgtttgtttgtttctttgtttctttggcttgacaagaagaagatgatgatgatggacaagggggtgttggatgatgtgataagaaggcttctggaagggaaaggagggaaacaggtgcagctctctgagtccgagatccgtcaactctgcgtcaacgccagacaaa

SEQ ID NO: 37562 - DNA, 362 bp, Glycine max
  Clone ID: LIB3138-129-Q1-N1-G2
cttctctgattctctccatatattatctcaaacccctctgacagaatgggaagtgctggaggaactgactatggtgcatacacttatgagaatcttgggagagagccttactggccatcagagaagcttaagattttcatcactggcgctgggggttttatcgcgtcacacatagctcggcgcctcaagacagaggggcattacattattgcttctgattggaagaaaaatgagcacatgactgaggacatgttctgtgatgaattccatcttgttgatctcagggtcatgaataactgcctcaaggttacagagggggttgatcatgttttcaatcttgccgcagacatgggtgggatggg

SEQ ID NO: 37563 - DNA, 364 bp, Glycine max
  Clone ID: LIB3138-129-Q1-N1-G3
ctcgttcccactctcatattttcccttctgctgatattcggctaaactaagtcaataagatgactcagggaaagatagttgaagctgcagaagctcataaaacacttgaggatttcgatcctccaaagaagcgcaaaaggaacaagtatgcttttgcttgtgctgtgctggcctccatgacttccatcttgcttggctacgatattggtgtgatgagtggagcagccttgtacataaaaagggacctgaaagtgtcggatgtgcaaatcgagatcctgctcggaatcatcaacctctactctctgataggctcatgcctcgccggcagaacctccgactggataggtcggcgttacacgattgt

SEQ ID NO: 37564 - DNA, 345 bp, Glycine max
  Clone ID: LIB3138-129-Q1-N1-G4
attctcttctgcgttcttcccaccaacatcgaaaccatgtccaccgacttgcacctccacaacgacctgccccagctccgaatcgcctacgccgccgccgccgatgccgtcgtcaaaaccgacgacctcccctccgacgatgacgaccgcaacgccgtctcttccgtcatcactcaaaccgagaccgaaactgacggagccaccatcgtcgacgtcgccgtcgccgtcaacgtcaacgtcaacgtcaacgacgagaattaccgtactccgacttcgaaggagagcaaaattccagcgacgatgacgtgtccgccggcgccgaggaagccgaagctcgcctcctgc

SEQ ID NO: 37565 - DNA, 346 bp, Glycine max
  Clone ID: LIB3138-129-Q1-N1-G5
tagaaattatcattgatagtttcgcaagtcctgattgcaacatagttggtgcaatgcttttggttgatacttatcataccaatcctgaaaatgcagttcgtagtatttttgttgcgcctttcagaggcggaaggcccattcgggtggttacatttccgaataccattgtgcagattgaaccagacatgaattcaaggtttcagcttttgagtaccactaccaatggtgattttgttcaagggaaagatctcgcaatggttaaagttaatgtagcatgtgctgctgttggcttgacatcaagttacactccaactccattgttggaatctggtttgcaaaaagacag

SEQ ID NO: 37566 - DNA, 354 bp, Glycine max
  Clone ID: LIB3138-129-Q1-N1-G6
cgccaattgagaaggaaagctctctctcgtattgaatggctgcaaaaagctgatgtgcctaccatagcacagattgaagagttccattcgatgcagaggatgatgaatgctcctgattcaaatgatgatattgatttactgttgagcattgatttgttgggtttacaaggagcaggtaaagcttttccaaacaaaattgtttttgatgataagcttgtgttggctaacacacaagaattctttgatggaaattttccagtggattcttggataccaatttttgtgaattgtctttatcctgtaagacaattaccttcagaagctgtcattgtcaatgttacatgtggtagtgga

SEQ ID NO: 37567 - DNA, 360 bp, Glycine max
  Clone ID: LIB3138-129-Q1-N1-G7
cgtgaaaggacgcacctgctgttggcttgttgttcaaggatggcaatttgtaagaaagatgtttggagagttgaatgtggaatcccttctggatttccgctcacagttatttgcaatagcatttttaatgagatgctcattagatatagctatgaaaaattactgcgccaggctaaagctccaagtatgtttttacaatccttcaaaaattttgtttctttgtgtgtgtatggtgatgataacttaattagtgttcatgaatatgtcaagccttactttagtggttctaaattgaaaagctttctagctagtcataacatcaccattactgatggtattgacaaaactagtgcaactttt

SEQ ID NO: 37568 - DNA, 317 bp, Glycine max
  Clone ID: LIB3138-129-Q1-N1-G8
tggctgcctcactacaagctgcagctaccttcatgcaacccaccaaggttggcatagcctctcgcaacctcaaatctacacaatgcatttctaaggcttttggcttggaacctgctgcagctaaactcacttgctcccttcagcctgatctcaaagaatttgctcaaaaatgtgtcgacgctaccaaaattgcaggattcgcccttgccacctctgctctcgttgtttctggagcaagtgcagaaggtgttccaaaaaggctaaccttcgacgaaatccagagcaagacatacttggaagtgaagggaactggaact

SEQ ID NO: 37569 - DNA, 357 bp, Glycine max
  Clone ID: LIB3138-129-Q1-N1-G9
ctcgagccgtttgccacattacacaagaactctccaaggatcctccttcccacgaaattcatttggtgggaaaatccaagaagagggtggaatttcaagccagggaagatggattatttcaatgcaccaggaagaaaccatctctttgttccggggccggttaacatcccggaccagatcattcgggccatgaacagaaacaatgaggactaccgttctccagcaattccagctatgaccaaaacactgcttgaggatgtcaagaagattttcaagaccataactggaatcccatttctcatccctacaactggtactggtgcttgggagagtgctctcacaaacacactgtcttct

SEQ ID NO: 37570 - DNA, 363 bp, Glycine max
  Clone ID: LIB3138-129-Q1-N1-H1
caagttgacaaccataaacaatatgtgtgcatatgggctcaatcctggtatttcaggttctcgtcttttgggcaccattcctcagtccatttcacagcaaactgtttggaatcaaatggcaacagtgagaacaccattgaattttgattctagcaagcagagcttttgtcagttttctattgaccttctcggtggaggaatcttagtggataaaactggagattggatcacacttatacaaaattctccaattagtaacttattgagagttgctgcttggaagaaaggctgtttaatggtcaagattgcgatgtctgggaatgcagcagtcaaaacgagtgattgggcctcattggtacaagt

SEQ ID NO: 37571 - DNA, 326 bp, Glycine max
  Clone ID: LIB3138-129-Q1-N1-H10
tctggcttggcaaggatgaaaagtgggttttgcctaaattggaaggacttcaatttgatgttccaactgctatatccaaaaaaggtgatggtggtgagccctgtaatgatttggtgcaaaactatgctaactggtgggataatagattaaataagaggaatgcaaaagctcccgatttcaagcacaaagaaaccggtaaagggttgtggcttgattcttcatcagagtgggttttggaaaaattgccgccacctctgaagcctaaacaaagtgtagatactgaaaggacactggtttcataagcaatggacagtgaagtagaaaat

SEQ ID NO: 37572 - DNA, 348 bp, Glycine max
  Clone ID: LIB3138-129-Q1-N1-H11
gttttctattgaccttctcggtggaggaatcttagtggacaaaactggagattggatcacacttatacaaaattctccaattagtaacttattgagagttgctgcttggaagaaaggctgtttaatggtcaagattgtgatgtctgggaatgcagcagtcaaaaggagtgattgggcctcattggtacaagtgtttttaacaaacagcaacagtacagagcattttgatgcatgtaagtggacaaaatcagaaccacattcctgggaattgatcttcccaatagaggtatgtggtcctaataatggttttgaaatgtggagttctgagtgggcaaatcaaacttcatg

SEQ ID NO: 37573 - DNA, 351 bp, Glycine max
  Clone ID: LIB3138-129-Q1-N1-H12
atttgcaatagcatttttaatgagatgctcattagatatagctatgaaaaattactgcgccaggctaaagctccaagtatgtttttacaatccttcaaaaattttgtttctttgtgtgtgtatggtgatgataacttaattagtgttcatgaatatgtcaagccttactttagtggttctaaattgaaaagctttctagctagtcataacatcaccattactgatggtattgacaaaactagtgcaactttgcaatttagaaagttagcagattgtgattttctcaagagaaactttaagcagatgtctaatgttttgtgggtggctcctgaggacaaggcgagtttatgg

SEQ ID NO: 37574 - DNA, 361 bp, Glycine max
  Clone ID: LIB3138-129-Q1-N1-H2
ctcgagccgtcattggcctgtgctatgaatagttcttttagggggcgcgccagttctgatatttacaccatctgctctcaagactgtgaattgtggaatcctgcttgcacaaaagcaatgactatgtcatttaatccaaacccgtgttctgatgcatggagtttggaatttctgaagcgtactggatttcattgcgatatcatttgtgtcactggatggactgccaccccaatgcaggatgttcaggttacaattgattggtttatttcctctcaggaatgtgttcccaggacctattgtgttttaaatccacaaaatccttttgtgttaaataggtggatgggaaaattgactttccccc

SEQ ID NO: 37575 - DNA, 362 bp, Glycine max
  Clone ID: LIB3138-129-Q1-N1-H3
gtccaagcagcctccaattcgtgccactctcttcaaaatggccgttaccttctcaaatctccacacagaatcaggtctcaagtccctcgacgacttcctctctgggaaggtctacgtttctggggatcagttcacaaaggacgacatcaaagtgtatggtgctgttttggagaagccaggtgactcttttcccaatgctgccaagtggtacgaggttgtctcatctcagcttgctgcaagcttccccggcaatgctcaaggggtgagattcagtggcaaagcttctgctccagcggaggctgctcctgcgaaaccggatgcttctgctgctgaagatgatgatgaccttgatctctttggcg

SEQ ID NO: 37576 - DNA, 315 bp, Glycine max
  Clone ID: LIB3138-129-Q1-N1-H6
agcttggcttgactcctctcatcagaagaaagcgaaaaaagcaaaaatgcaatctatgtccctgacgctgagcaagaggctctccaattcaaagcctctcttcagaatctcttccagcctcgtcgctcacgcatcctccgccacaacctctccgccgccaccttcgccgccagtcccctctccctccgccctcaacagcctcctcaccgctccgtggtccgccactcagtcacgcggaatcacgctttccagatctgatattatagtcgggaatctcattggaaaccgaagacgcgctcaccaagttatgaaact

SEQ ID NO: 37577 - DNA, 257 bp, Glycine max
  Clone ID: LIB3138-129-Q1-N1-H7
gcaaaatccagatcgtcattgctgatttatcccaaggaagaaattatttggagggaggttttaattattgaatttaccaggggaattatttgaagcaagaacttcaaggtaccctggagaattttgccaaattaaaaaaatgagtctgctgaattggaaaaccttctaactttgtcaaacaaactgtgcaaagagctcgagctcgaggtctataagctcttatctgacctcactgaggttaatgaatctacacagaa

SEQ ID NO: 37578 - DNA, 360 bp, Glycine max
  Clone ID: LIB3138-129-Q1-N1-H8
gagaagaagaaacttaatcgatcatcacttcacttcactaatacatcatggcagacgagacccagaacaagtatgagagctctgaggttgaggtccaggatcgtggtgtttttgactttctcggtaagaaaaaggatgaagaagacaagcctcatcctcaggaggaggtcatcgccaccgagtttcaaaaagtcactgtctcagaccaaggagagaacaagcacagcctcttagaaaagcttcaccgatctgacagcagctctagctcttcaagtgaggaggaaggagaagatggagagaaaaggaagaagaagaagaaggaaaagaaagggctgaaagagaagatcgaggagaaaatag

SEQ ID NO: 37579 - DNA, 350 bp, Glycine max
  Clone ID: LIB3138-129-Q1-N1-H9
aatggaaacataagatgttcttgttggatgagactcgtattacatcatgcgtaatgttaccacttccatgttatttgctcgcacaagaagttcatatggagtgcaaccactgattgtaagtaggcagcagattcaaaatcaggttgttaggccattccttgactgttgcagagtagtgtcaatactttgttgaggtgacttaccactgtgatgaaacacaaatcctttctgaatagatttggttgtttccatgacagtacaccatgccaatgagttcaagttgaaaaactgtagataccattcatggacttcagaaatcagatcattcacttacaattttgacaaaatgc

SEQ ID NO: 37580 - DNA, 205 bp, Glycine max
  Clone ID: LIB3138-130-Q1-N1-A1
gtcaactttttggcatcaaatgtcaacacatttaacaccagagtgtttagattctagcgggaacagttataacacctttgactttggctttttgcatggagggatcttgttggacttatatggacgattgtggcatgctgattcataatagaccaaactggatcttgggtcgagcttatgctaagttaaacagttatttactggt

SEQ ID NO: 37581 - DNA, 348 bp, Glycine max
  Clone ID: LIB3138-130-Q1-N1-A10
gccaaggagaaaagaaaaaaaaaaaagaactggactccttcaattagtgcattgtttcttttcttcaaatggtagcaagaagacattgttaatttgagagatggcgagttacgaggctattaagaactttgatgatgatgatgatgatgatgatgatgtggagatggcactcccccatagccagatctctgaatcaagatctgccactgtttcttcccccattggccaaactaccccgcttcacattcacaacattattgaggaacaacgcattatctccaggcaccaacctcaacccaaatctccgcgtctggtttctcttgatgtttttcgtggtctcaccgtcgc

SEQ ID NO: 37582 - DNA, 230 bp, Glycine max
  Clone ID: LIB3138-130-Q1-N1-A11
aagctatgacgtcatgcacctactagctgaattcggtcgaggtcacaaggtccccactggtcctatgttgaaagacctgtctttttactgagcttttatattgccaactggggactttttggcagattctactggggcttcagaattaggatgggatggggtgggctgggtatctgctctacgttatgcatatatccctgttactcaaatcatcctttttttaagggagg

SEQ ID NO: 37583 - DNA, 312 bp, Glycine max
  Clone ID: LIB3138-130-Q1-N1-A12
gttttaactccgaagacttggaggtggaggcgggcgcggaattgcatagagatgggagtcaaagatggcagcaataacaatgttttaatttcattggtagcatctgagtttgatggtttcaacgaagaaagaaaacaaaacccccatccttattcacctctctccctcccagagaggattgtaatcattcaaatctaataataatggcagcagtgtcaggaggaggagggactgatatatggaacgcccacacggctattgcgatggtgcaattatttaacggaggctatcacgtcatcaccaaagatgcac

SEQ ID NO: 37584 - DNA, 330 bp, Glycine max
  Clone ID: LIB3138-130-Q1-N1-A2
aaaaaattaaaaaaaaaaaaaaaaaaaaaaaaaaaaaaaaaaaaaaaaaaaaaaaaaaaaaaaaaaaaaaaaaaaaaaaaaaaaaaaaaaaaaaaaaaaaaaaaaaaaaaaaaaaaaaaaaaaaaaaaaaaaaaaaaaaaaaaaaaaaaaaaaaaaaaaaaaaaatgggggccccccccattaaggggcttttcccccccgaaattttttttgggccggttcttttggggtgccccaatttttctttttggggggttttttaaaaattgggcaaaatagggggatggggtttttcctggaaaaaattttttcccttcaaatttcccccct

SEQ ID NO: 37585 - DNA, 345 bp, Glycine max
  Clone ID: LIB3138-130-Q1-N1-A3
tagttctgtattcagattacattgcaaaaatggcatcattcaccatgacagcttctatctttggctgcccagctgtcaccaaacggtcggcagtggctgcgcagaggagattactcgtagtgagtgctgccaaagctgaaggggaaaaggtcagttatgacaacaatgatagcaatggaaggaggaacttgatgttcgctgtggctgctgctgctgttttctctgttgctgggatggcagtggcagatgagcctaaaccaggaacctcagaagccaagaaaaagtatgccccggtttgtgtcaccaatcctacagctaggatttgtcgcaattgaggatctcctg

SEQ ID NO: 37586 - DNA, 351 bp, Glycine max
  Clone ID: LIB3138-130-Q1-N1-A4
aaatcattacatggtcatagtctacacctaattagccaaacacaccacagcaccaaactagttggctcaattctctttgaatggctttggaggctttgaattcaccaacagcagccaccactcccttccgtggttaccaagaagaggaggaggaggttgaccttcacctacgcgagccttgggccaagagaaaacgctccaaacgacctcgttttgagtcggaggaagagtacttggctctttgcctcatcatgcttgcacaaagcggtaacaacaacaacacccaattaccgtcttcgtcacagtcacacaaagaagcgtcaccgccgctgaaactatcacacaggtgca

SEQ ID NO: 37587 - DNA, 351 bp, Glycine max
  Clone ID: LIB3138-130-Q1-N1-A5
taagaatctgagtcagaaggatctgcaattaattgcttcatctgtcgttctggctgcactttcagtgcctcctcatgatcgaacccatggtgcatctcatttggaactggagcatgaaaaagagagaaatttgaggatggctaatctcattggctttaatcttgaaactaaacctgagagcagagaaatgctatcaagagcatcacttcttgctgaactggcatccaagggtgtgatgtcttgtgtaactcacgaagtgaaggacatttaccatcttttggaacatgagttttatccctcagatcttgcattaaaagcactgcccttaataactaaaatctcaaagttagg

SEQ ID NO: 37588 - DNA, 282 bp, Glycine max
  Clone ID: LIB3138-130-Q1-N1-A6
cacaaatttatttaaacaactccatacattttccagggggaatgacaaaaaagtgttgacaaatcctgaatttaactccaacttatgccatatcattaaatcaatatctaactccaacctgtttagaccaggcatgcttgcacacaggacaaccttctttttcctcaggatgcagaacgttatgcgagtgagcgtcccccactcgctcacgtcttttctaatcaccaagacagtacatatgctctagaagcacctaattgaacacattcagcacctcattaa

SEQ ID NO: 37589 - DNA, 326 bp, Glycine max
  Clone ID: LIB3138-130-Q1-N1-A8
ggtttctctttctctttctctgtctgctacttcacgttctctcgtttcaatcggacaaaatcatgggcagaaaattcttcgtcggtggcaactggaaatgcaatgggaccactggggacgtgaagaagattggttctactttaaatgaagctaaagtccctggagaagaagtgagagaagttgttgagagccctactttagggatccttcctttcgtaaaaagactgctgcgccctgagttccatgtctcgggccaaaattgtgggcgtcgcaaagtgcgtgcttatactggagaggatagtgctcaaacgcttgtgaatttggga

SEQ ID NO: 37590 - DNA, 343 bp, Glycine max
  Clone ID: LIB3138-130-Q1-N1-A9
tgaagctctggatgaatcattttgtgaagatggcttgtcgaagcttgaggctttgataaccaagattttccctcaacggtactcttttttaaaattacctaatactcgtgcctcaaaggcttcaagagcgagttattggttagcttgtctaatctcacttgttgagcagacacgatatttaaaatttcgaaagtggcctgttgagtggggttggtgccgagaccttcaatcatttatttttgtttttgagagacataacaggatagtgctggagcgccctgaatatggttatgcaacctacttctttgaactggtagaatccttacctgttgaatggcagctc

SEQ ID NO: 37591 - DNA, 345 bp, Glycine max
  Clone ID: LIB3138-130-Q1-N1-B1
ctcgacttttgggcaccattcctcagtacatttcacagcaaactgtttggaatcaaatggcaacagcgagaacaccattgaattttgattctagcaagcagagcttttgtcagttttctattgaccttctcggtggctgaatcttagtggacaaaactggagattggatcacacttatccaaaattctccaattagtaacttgttgagagttgctgcttggaagaaacgctgtttaatggtcaagattgcgatgtctgggaacgcagcagtcaaacagagtgattgggcctcattggtacaagtgtttctaacaaacagcaacagtacagagcattttgatgcat

SEQ ID NO: 37592 - DNA, 342 bp, Glycine max
  Clone ID: LIB3138-130-Q1-N1-B12
acttgttgagagttgctgcttggaagaaaggctgtttaatggtcaagattgtgatgtctgggaatgcagcagtcaaaaggagtgattgggcctcattggtacaagtgtttttaacaaacagcaacagtacagagcattttgatgcatgtaagtggacaaaatcagaaccacattcctgggaattgatcttcccaatagaggtatgtggtcctaataatggttttgaaatgtggagttctgagtgggcaaatcaaacttcatggcatttgagtttccttattgacaatcccaaacagtctacagtttttgatattctcttgggaatctctcaagattttgaaa

SEQ ID NO: 37593 - DNA, 349 bp, Glycine max
  Clone ID: LIB3138-130-Q1-N1-B2
agaaagagtgatgactcactaaaatgatggatgtggtgaagaacggttagcagcacatggcttcttctacactcgctcccactctcagcctctccaccaaatcccactgctatctccccaacaccaaacaccggttttcatgtcccagaataaagttattctactccaagcaccgctccttctccgtctcagcttctgcttctgcttccacttcaaattcgcttcaggctctcatattcgactgcgacggcgtgatcctcgagtctgagcacctgcatcgccaagcctacaacgatgcctttgttcacttcaacgttcgctgcccctcttcttcttctccgggcccact

SEQ ID NO: 37594 - DNA, 348 bp, Glycine max
  Clone ID: LIB3138-130-Q1-N1-B3
agcaagcagagcttttgtcagttttctattgaccttctcggtggaggaatcttagtggacaaaactggagattggatcacacttatacaaaattctccaattagtaacttgttgagagttgctgcttggaagaaaggctgtttaatggtcaagattgtgatgtctgggaatgcagcagtcaaaaggagtgattgggcctcattggtacaagtgtttttaacaaacagcaacagtacagagcattttgatgcatgtaagtggacaaaatcagaaccacattcctgggaattgatcttcccaatagaggtatgtggtcctaataatggttttgaaatgtggagttctgag

SEQ ID NO: 37595 - DNA, 352 bp, Glycine max
  Clone ID: LIB3138-130-Q1-N1-B4
ctcgagccgcgagagctaagtaatgttgaaagtgatggcggtgtaactgacctaagttttggatagatcagccgcgagatgatcgagctgcagggcggcgaaatcggcgtcagatctcgacctggaaaaggcgctacattcgccttctacatcgccgctcgcactgcagatgcgccgccgccgtccgtgcaacaaagtctctcttctccggcgctaatgtcgggaagacgaccgtcggagaataccagagccagatattccatcctggtggtggaagacaacctggtcaaccagaagatcttgagaatgcagctccaaaagctcggccacgaggtgcacgtcgtctgccacg

SEQ ID NO: 37596 - DNA, 351 bp, Glycine max
  Clone ID: LIB3138-130-Q1-N1-B5
gcaaactgtttggaatcaaatggcaacagtgagaacaccattgaattttgattctagcaagcagagcttttgtcagttttctattgaccttctcggtggaggaatcttagtggacaaaactggagattggatcacacttatacaaaattctccaattagtaacttattgagagttgctgcttggaagaaaggctgtttaatggtcaagattgtgatgtctgggaatgcagcagtcaaaaggagtgattgggcctcattggtacaattgtttttaacaaacagcaacagtacagagcattttgatgcatgtaagtggacaaaatcagaaccacattcctgggaattgatctt

SEQ ID NO: 37597 - DNA, 177 bp, Glycine max
  Clone ID: LIB3138-130-Q1-N1-B6
ctcgagccgaagtcaattaccttcaaaagctgtcgctggagatgttacatgtggtagcggacgtggcggtttacccaccactgttggcattatcggtggaggaaacattcgctactaaaatgtcaacagaaggacacttacacaacttggtaaaggtaagaaaatagtgtgagttac

SEQ ID NO: 37598 - DNA, 337 bp, Glycine max
  Clone ID: LIB3138-130-Q1-N1-B7
gttttattgcactacatgatacaactccatggggcagaagctttgatgggtgtgactagtatattgctgacgatggaagggttctttattagctcgttgcacacttgcccgacaaagcaaataactacttgacaccagcactctctgtcttagataagaatacctgatcatcccttgttgagacaaaaaacttcccataagtaagattttataaatttgctttctacggccttatacttctacacaactgccaaactgattcatggaccgatttttcctgtatatatatacttgggtataacaatttactacttgaaacattaatatatttataaat

SEQ ID NO: 37599 - DNA, 345 bp, Glycine max
  Clone ID: LIB3138-130-Q1-N1-B8
ccagttgctactaatatatgaatacatggagagcaacagtcttgctcatgcactttttggtgaacaagagcagaagctgcacttggattggcccacaagaatgaagatctgtgtggggatagcaaggggattggcttatcttcatgaggagtcaaggttgaaaatagtacacagggacattaaggcaaccaatgtcttacttgacaaggatctgaatgccaagatctctgactttggtttagctaagcttgatgaagaagagaatactcatatcagtacacgtatagctggaacaattggttacatggctccagaatatgctatgagaggttacttgacggataa

SEQ ID NO: 37600 - DNA, 332 bp, Glycine max
  Clone ID: LIB3138-130-Q1-N1-B9
cactaatgacataatttttgctccaggaaagaagagatatagattctgtgagcatatatcaaagcaacggttacaaggtttgacagatgatctgatgaagaaaggaaagcacttcattctgataagaaatcctcttgatatattggttgtccctccatctttctatgagttgggtttggcagagctggtttgtatatacaacgagcttcgtgaaattggaaaggcaccacctgttattgatgccgcagaacttcaacaagatcctgaggctactctacgcagtctctgtaatgatttggagattccttttcaatctgcaatgctcaagtggg

SEQ ID NO: 37601 - DNA, 343 bp, Glycine max
  Clone ID: LIB3138-130-Q1-N1-C1
cagcaaactgtttggaatcaaatggcaacagtgagaacaccattgaattttgattctagcaagcagagcttttgtcagttttctattgaccttctcggtggaggaatcttagtggacaaaactggagattggatcacacttatacaaaattctccaattagtaacttgttgagagttgctgcttggaagaaaggctgtttaatggtcaagattgtgatgtctgggaatgcagcagtcaaaaggagtgattgggcctcattggtacaagtgtttttaacaaacagcaacagtacagagcattttgatgcatgtaagtggacaaaatcagaaccacattcctggg

SEQ ID NO: 37602 - DNA, 348 bp, Glycine max
  Clone ID: LIB3138-130-Q1-N1-C11
gtggccatatggaaagatgtcacatgcctcacataaacactagttagttgtaacatactggagattagctttttgtagtctataatagtgaaaattttgaagttaaactcaaaagggagaatttgaatatgtataacattgtatgcactaatgtgtggtttatgtgtcgagaacaacagggtttggtaccccttgctggttccaacgacgagtcatggtgccaaggtcttgatggtcttgcctctcgctcggctgcatactaccagcaaggtgcccgtttcgccaaatggtgagtgctaacttccccccctttgtggtggcagcaaaatcattttcataattccatgc

SEQ ID NO: 37603 - DNA, 342 bp, Glycine max
  Clone ID: LIB3138-130-Q1-N1-C12
gttcaggctcatatggaaacacatgtgactaaatcgcctctcgatgatgtcgaaactcctaatggttccatgtggcatctgcaaatctctcaatctaaaattgcgcttaccaagaacacagttggaggaaccattctgcgtcgtgatctattggcaaattttttgacacgagggcaattttagagcaagtgttgatctgcagcgcactcatcggattaaaccaatgattaaactggtggccacaattaggattcctgagaatacaagtatatcattggcctgtgctatgaatagttcttttatggagcacgccaattctgatatcaacaccatatgctctca

SEQ ID NO: 37604 - DNA, 343 bp, Glycine max
  Clone ID: LIB3138-130-Q1-N1-C2
ctcgagccgaatcggctcgagcttgtttcttctccctttgtcttaccagaagctcctttcctgttcctaagcggagttagggggtcaaattgaattcatttgcaacaaacacctttttgttaatgttgttgcattctcttttcctattgccgtaaacgggtcctgtcctcgcttttctcacaagccactgaaaaattttgcacctttcgccccaaaactttaacagaggggtgttgttcaccgcaattcctcaccccgatggaagaatcaagtgaattgcaatcagaagaaaataaagtctccaatgagaaaaataagaaaagaaagctgaaaacaccggccc

SEQ ID NO: 37605 - DNA, 345 bp, Glycine max
  unsure at all n locations
  Clone ID: LIB3138-130-Q1-N1-C3
ctttgtttgcttttcaagtctctcgaagcctntnnnnnnctcttctagaagctatctgtgtttggtgttactaagtctccaacaagcaaagtacatggttgatttggaaatccaggtccccaccccattcgacccgtttgccgaggcgagagaatcggatgcccccggagcaaaggagtatgtgcatattcgaattcagcagaggaatgggaagaagagtctgaccacagtgcaagggctgaagaaggagttcagctacgagaagatcctcaaggacctcaagaaggagttctgctgcaactgaaccgtggtgcatgacaaggagcttggcaagatcatccaact

SEQ ID NO: 37606 - DNA, 346 bp, Glycine max
  Clone ID: LIB3138-130-Q1-N1-C4
cctgcatgccctgaaccagatttaactttgggaaccacaaagcattctgataattgtttcctcacagtgcttctccaggatcatattggtggcctgcaggttctttaccagaacatgtggattgatataaccccagaacctggggctcttgttgttaacattggtgatcttctacagcttataacaaatgacagattcaagagcgtagaacatagagtacaggcaaatctcataggtccaagaatatctgttgcatgctttttcagcgaaggtcttaaatcatcaccaaaaccctatggacctataaaagaattattgacagaagacaatcctcccaaatacagag

SEQ ID NO: 37607 - DNA, 350 bp, Glycine max
  Clone ID: LIB3138-130-Q1-N1-C5
atccgttccaaaccacataagcttcaacaaaggtatcggcttgtccaatttaacaggttttcattcgcttaatcggttttcgttttttcaatttctgatttcgatctatgcctgcggttaatgtaatgatttcaatttgtaattggagatagaagtatgctgattttttttttttgttttctttttacataaaaaggtaaaatttaggaatgtgatgagtttgaagtttctcgattggaaatctttctgtgtggcatttataatttgcattttaaggatgtttgcattgcctctgaggatgagttgactgaaaaaagatgtggttcttttgagttgttctattcggagaa

SEQ ID NO: 37608 - DNA, 240 bp, Glycine max
  Clone ID: LIB3138-130-Q1-N1-C6
ctcgagccgaatcggctcgaggcgcattactatgtgcagtgagtgtgtttaaatagaaaatactacatactagttctcaaatatctggttgatgagtgtccttttgcatttgtgaactagtatgtagtattttattcacttaaataaagcgcattactatgtgcaatgagtgtggttaattttaaataacaaataaatttttaatgtactcataatattaaaccgatgattgtaaattgg

SEQ ID NO: 37609 - DNA, 341 bp, Glycine max
  Clone ID: LIB3138-130-Q1-N1-C7
gcctggttgattcctgccgcacctgccaaaactgttgtgacaatcttgagaattattgtcctcaatctacgttcacatggtgccaaatatagagatggaaccatcacatatggaggctactctgactcaatggttgctgatgagcattttgtggttcgcattccagatagattaccacttgatgctgctgcacctcttctttgtgctggcatcactgtgtatagccctctcagatattatggacttgacaagcctggtctgcatgtgggtgtggttggtcttggtggactaggccatatggctgtcaagtttgccaaagcttttggtgctaaggtcacagt

SEQ ID NO: 37610 - DNA, 343 bp, Glycine max
  Clone ID: LIB3138-130-Q1-N1-C8
ctcattttatatagctatgaaaaattactgcgccaggctaaagctccaagtatgtttttacaatccttcaaaaattttgtttctttgtgtgtgtatggtgatgataacttaattagtgttcatgaatatgtcaagccttactttagtggttctaaattgaaaagctttctagctagtcataacatcaccattactgatggtattgacaaaactagtgcaactttgcaatttagaaagttagcagattgtgattttctcaagagaaactttaagcagatgtctaatgttttgtgggtggctcctgaagacaaggcgagtttatggtcacaacttcattatgttt

SEQ ID NO: 37611 - DNA, 245 bp, Glycine max
  Clone ID: LIB3138-130-Q1-N1-C9
aaaaaattaaaaaaaaaaaaaaaaaaaaaaaaagaaaaaaaaaaaaaaaagggggaaaaaaaaaaaaaaaaaaaaaaaaaaaaaaaaaaaaaaaaaaaaaaaaaaaaaaaaaaaaaaaaaaaaaaaataaaaaaaaaaaataaaaaaaaaataggggcccccctcccttttctgttctcttcccccctatattttttttcttgcctaatccttgggtttttctttctttcctattgtttagtttt

SEQ ID NO: 37612 - DNA, 345 bp, Glycine max
  Clone ID: LIB3138-130-Q1-N1-D1
ctagggttcatcaggtgttgtagagagacacatctattgacactgtaatggtgccaaattaagtgcccatttcttcttgtagtggttattagaggatttgctcgctatcatatcacagtatatatcttcttatttgtttaatttttatgtttcttaggtgaattactcaagagggctcgacaatcccacaaagtagaaaaagaggttatgttatggcgggcaaaggtgttagttcggtggctaaggcggtagcagaatatcactatccttggcgtgagaagttggggaaatataaggatgagcttgccaagggtgtgtggggatactgggagctgggggcatgga

SEQ ID NO: 37613 - DNA, 322 bp, Glycine max
  Clone ID: LIB3138-130-Q1-N1-D10
aaaaaataaaaaaaaaaaaaaaaaaaaaaaaaaggggaaaaaaaaaaaaaaaaaaaaaaaaaaaaaaaaaaaaaaaaaaaaaaaaaaaaaaaaaaaaaaaaaaaaaaaaaaaaaaaaaaaaaaaaaaaaaaaaaaaaaataaaaaaaaaggggcccccccccccttttgaattttttccccccgaaattattttcccccctgtccctttggggtaccccctttttttcttttttggggtttttttaatctctccctaaattatgctataggtgtggcgggggggaaaatttttttccctttcacatttcccccataaatctt

SEQ ID NO: 37614 - DNA, 350 bp, Glycine max
  Clone ID: LIB3138-130-Q1-N1-D11
cggctcgaggggaggagctggtgcaaagaatgctattctcatgaatatgccaaatgctgttctttcaatgtggagatattttgttggagatcttgtctttgaagtttctaagatgacttctccctacattaaatgtacagtctctttcttcatagcatttggaaatttggctgatgataccatcaattttgaggcttttccccacaagctggtgcagtttggagagattcaggaaaaagttgtattgaaattttcacaagaggaatttcttacagcttggtcaactcaggtgcgtcctgcaacaactctgttggctgatgggtgtccatatttgtatgcaatggtgcatg

SEQ ID NO: 37615 - DNA, 206 bp, Glycine max
  Clone ID: LIB3138-130-Q1-N1-D12
ccagattcacttcaattcttgcctaagcatatgccgaaactcacgctgtgggtgctcgaacttcccaattcccacgcttccaccatcatctcttcaaccactcgaactgtgcacaatgatgcatcccctcatacgttgaaacactcagaaaaaccctttcgtgttaggaaaggggaggaaactaccacaacaccagcgacttgtcc

SEQ ID NO: 37616 - DNA, 345 bp, Glycine max
  Clone ID: LIB3138-130-Q1-N1-D2
attgtctctaccttgctgcaaaaccctgcagcccatgctgcagcgagttttgctgctacattttggccatatgcaaatgcagaaacttctgcagattctcccgtgtgcactccagattttccatcaagacaaattggctcgcctccaagtgtgacagctattgcagctgctacagtagctgctgcaactgcatggtgggctgcccatggactgcttcctttatgtggtccactccatacagcttttgcctgtcctcctgcatcagcaactacagttccatcaatgattattgatgaatcaccacaaaaaacagaacgaggagagattaaaccacaaaatcctcct

SEQ ID NO: 37617 - DNA, 343 bp, Glycine max
  Clone ID: LIB3138-130-Q1-N1-D3
gtgtctcttttgtattgaatatgcctctttatttcacatgttaatgtagtggtcaaatgttaaatccaatgaccaaaaagactatggtaatgcctaatcagtgaggttggttttgtttctcagatatgatgcattgctagtttctagaatgatgtaagtaattggtgagcagatggtagatttgattattgagcctttatttacttctctgatgaatgtttaatgactcaatgctattaaatttgtgtaatctgctgtgtcttactaagtaatttcatttattttttgtgacagaaacatatccaagcccagtagattttggctttggcatcattgaacgatg

SEQ ID NO: 37618 - DNA, 353 bp, Glycine max
  Clone ID: LIB3138-130-Q1-N1-D4
ctgaggacaaggcgagtttatggtcacaacttcattatgtttcgtgtaataatctggaaatgcaagaagcttatcttgtcaatctcgtaaatgtgttacgagaattgtatttgcacagtccagaggaagctcgccaattgagaaggaaagctctctctcgtattgaatggctgcaaaaagctgatgtgcctaccatagcacagattgaagagttccattcgatgcagaggatgatgaatgctcctgattcaaatgataatattgatttactgttgagcattgatttgttgggtttacaaggagcaggtaaagcttttccaaacaaaattgtttttgatgataagcttgtgttg

SEQ ID NO: 37619 - DNA, 351 bp, Glycine max
  Clone ID: LIB3138-130-Q1-N1-D5
gaaaaattgatgcgtgaaaggacgcacctgctgttggcttgttgttcaaggatggcaatttgtaagaaagatgtttggagagttgaatgtggaatcccttctggatttccgctcacagttatttgcaatagcatttttaatgagatgctcattagatatagctatgaaaaattactgcgccaggctaaagctccaagtatgtttttacaatccttcaaaaattttgtttctttgtgtgtgtatggtgatgataacttaattagtgttcatgaatatgtcaagccttactttagtggttctaaattgaaaagctttctagctagtcataacatcaccattactgatggtatt

SEQ ID NO: 37620 - DNA, 353 bp, Glycine max
  Clone ID: LIB3138-130-Q1-N1-D6
gcgtgattggtctttgccaacagatgctgcaaaagatgaataaggttgaatattggggtgggttgaatccccgggttgaaccgtatcgcacatgacggctcttataagcgtgtctagctctctcacacatgtcccaactgtacgacggaggacatgttgcgttactgccaccaatccttctccgctccgagggcgtggtgcttcaccttctgaaggcgagagctccttcagactgcgctcttcttagctatgagcgggaatgcgtgcttctagctgcttgttaactcttttaattcaatactactaataagctaccacgctttcaaaataacagcaacaaacacttgcttact

SEQ ID NO: 37621 - DNA, 321 bp, Glycine max
  Clone ID: LIB3138-130-Q1-N1-D7
attgaatggctgcaaaaagctgatgtccctaccgtagcacagattgaagagggccattctatgcataggatgatgaatgctcctgattcaaatgataatattgatttactggtgagcattgatttgttgggtttacaaggagcaggtaaagcttttacaaacaaaattgtttttgatgataagcttgggttggctaacacacaagaattctttgatggaaattttccagtggattcttggttaccaatttttgttaattgtattgatcctggcagtcaattacctttagaagctgtcactgcaaatactacatgtggtagt

SEQ ID NO: 37622 - DNA, 344 bp, Glycine max
  Clone ID: LIB3138-130-Q1-N1-D8
ctcgagccgaatcggctcgagaatcgtgtttctgactaccagaaaccctaagcctcaatccaaaccccactctcttctttttcacttaggttttctccactctctccgaccacttccactgcctcaaccctcgtcgactccctcaacaactctaagggcctccgatccttcctcacgtgcccctctccacacactccctctcacgcgtcgtcgtcgaaatcgggtacgaaatccaagcctggatcgaccgcgaaactctccaccgcctctctgcctcgctacgaaatcctaacattaataacaatgatttggtcgcgctgctgactcagtttcatgaccgagtc

SEQ ID NO: 37623 - DNA, 344 bp, Glycine max
  Clone ID: LIB3138-130-Q1-N1-D9
gtcgcgagtgctgtcacgcgccggaaccttgggctgcctccctcacctggggaagccgccgcgggaggccgtctccagcgcctccctcgtcgccgtgaaggccgtgggctccgtcgcggacggcggaaacctgatttgggggaggcagctgcgcccggagctctgctcgccggtgctgaagaaggaggctgtcctcctccggccatgcctcgccgccgcctcctcgccggccgagggtagtgattccgccggagaagcaaaggttgctccggcggggttcttcgacaagtacccggctctggtcaccggatttttcttcttcacgtggtacttcttgaacgtga

SEQ ID NO: 37624 - DNA, 341 bp, Glycine max
  Clone ID: LIB3138-130-Q1-N1-E1
tagaccctcctctcaaaccctccatagaccctcgccacgtgttgtcacaaaacttcgcccccgtccacgagcttcctccgacggagtgtgaagtcattgaaggctctctcccaccgtccctcgacggcgcctacatccgaaacggccccaacccccagttcctcccgcgtgggccctaccacctcttcgacggcgacggcatgctccacgcgcttcgcatctcccatggcaaaaaacccacgctctgcagccgctacgttaaaacctacaaatacaccatggaaaacgacgccggtttccctctcatccccaacgtgttctccggcttcaactccctcgtg

SEQ ID NO: 37625 - DNA, 218 bp, Glycine max
  Clone ID: LIB3138-130-Q1-N1-E10
aatttatttaataataaaaaaaaaataaaataggctaaaaattaaagctggggagaaaaaaaattaaattaaatcaaaacataaaaaaaacatctcaacttcaaaactattataatggggcggccctcctactttttactttttttccccgttattttattccctcccggatccttaaggttacccaatttttccctttatttattcacttataactt

SEQ ID NO: 37626 - DNA, 350 bp, Glycine max
  Clone ID: LIB3138-130-Q1-N1-E11
gaactttttcttaatttggtgatggaatatgttccagagtctatgtatcgagtctcaaagttctatagtaatactaatcagagcatgccacttatctatgtaaaactttacatgcaccagattttcagtgggctggcttatatccacactgttcctggagtttgccacagagatttgaagcctcaaaatatactggttgaccctcttacacaccaggttaagatatgtgattttgggagtgcaaaagtgctggtcaaaggaaaagctaatatatcacacatatgttcacttttctatcgggcaccggaacttatgtttggtgccactgagtatactacttcaattgatat

SEQ ID NO: 37627 - DNA, 350 bp, Glycine max
  Clone ID: LIB3138-130-Q1-N1-E12
caaatggcaacagtgagaacaccattgaattttgattctagcaagcagagcttttgtcagttttctattgaccttctcggtggaggaatcttagtggacaaaactggagattggatcacacttatacaaaattctccaattagtaacttgttgagagttgctgcttggaagaaaggctgtttaatggtcaagattgtgatgtctgggaatgcagcagtcaaaaggagtgattgggcctcattggtacaagtgtttttaacaaacagcaacagtacagagcattttgatgcatgtaagtggacaaaatcagaaccacattcctgggaattgatcttcccaatagaggtatg

SEQ ID NO: 37628 - DNA, 346 bp, Glycine max
  Clone ID: LIB3138-130-Q1-N1-E3
cgcacctgctgttggcttgttgttcaaggatggcaatttgtaagaaagatgtttggagagttgaatgtggaatcccttctggatttccgctcacagttatttgcaatagcatttttaatgagatgctcattagatatagctatgaaaaattactgcgccaggctaaagctccaagtatgtttttacaatccttcaaaaattttgtttctttgtgtgtgtatggtgatgataacttaattagtgttcatgaatatgtcaagccttactttagtggttctaaattgaaaagctttctagctagtcataacatcaccattactgatggtattgacaaaactagtgcaac

SEQ ID NO: 37629 - DNA, 252 bp, Glycine max
  Clone ID: LIB3138-130-Q1-N1-E4
aaaaaatcgaagaattacagacgaatatgcaaaaaaaactgaattgtgtgaatcgaaaactaaacattgctattgtaaaagttgcaaatgcttataaacaccctaatattattgcagaatttatagctggacaattaaagaatagagtttcgtttcgtaaagcaatgaaaaaagctattgaattaactgaacaggcgggtacaaaaggagttcaagtacaaattgcaggacgtatcgacggaaaagaaattg

SEQ ID NO: 37630 - DNA, 349 bp, Glycine max
  Clone ID: LIB3138-130-Q1-N1-E5
gacctttatctgccattgaaagataggttcttccttcaaccattgtctcctactgaggctgcacaaagggcaaaggaatcagccaaggagattgttggtgttaagaagttgattgaaaagaaggcttggccatatgttcagaatgatctgcgtctcacggctgagtatttgcgctttgatctcaacactgtcattgctggaaagcctaaggatgagaagaaatcactcaaggaactcactggcaagctcttccaggatatcagcaatctggatcatgcaccaaaaattaagagcagcccagaagcagagaagtactatgctgctactgtatcttatctgaacgatgtcc

SEQ ID NO: 37631 - DNA, 235 bp, Glycine max
  Clone ID: LIB3138-130-Q1-N1-E6
aagtacttcatggtgcaaaattggtactctggggatgaagaatggaagggtggtgtttacaatttcgggacgaagagagggctgtgtgctggtgccggttctaagatatcgtggacgcaggtggagacgggttcggcgatcacgtggaagtaccccaccgttgtgttggacggagatggcagtgcgggggagttttattctgtggctttgaccaataactatcaacaggccgata

SEQ ID NO: 37632 - DNA, 340 bp, Glycine max
  Clone ID: LIB3138-130-Q1-N1-E7
gatccttttattgagctaattcaaaaccttgccactcacatattgcccggtggtgatgatagtcttgggaccgatgtacgagtgatggctgaggactgtttcgatagagttgatcaggaggattacacgagctaagtatccaccagtgcgtcccttaccggtctgtagcggtgatgactataacgcaagaattgctatagcctcgtctgatgaatatacttatgaccattctcacacaaatggtcaaaacgtacataagcgtttggtctctgccgatgataataatatgacacatgttccagctaccaatctcaagagacggttacaacgatctaatacc

SEQ ID NO: 37633 - DNA, 344 bp, Glycine max
  Clone ID: LIB3138-130-Q1-N1-E9
atgagatgctcattagatatagctatgaaaaattactgcgccaggctaaagctccaagtatgtttttacaatccttcaaaaattttgtttctttgtgtgtgtatggtgatgataacttaattagtgttcatgaatatgtcaagccttactttagtggttctaaattgaaaagctttctagctggtcataatatcaccattactgatggtattgacaaaactagtgcaactttgcaatttagaaagttagcagattgtgattttctcaagagaaactttaagcagatgtctaatgttttgtgggtggctcctgaggataaggcgagtttatggtcacaacttcat

SEQ ID NO: 37634 - DNA, 347 bp, Glycine max
  Clone ID: LIB3138-130-Q1-N1-F10
atttccgctcacagttatttgcaatagcatttttaatgagatgctcattagatatagctatgaaaaattactgcgccaggctaaagctccaagtatgtttttacaatccttcaaaaattttgtttctttgtgtgtgtatggtgatgataacttaattagtgttcatgaatatgtcaagccttactttagtggttctaaattgaaaagctttctagctagtcataacatcaccattactgatggtattgacaaaactagtgcaactttgcaatttagaaagttagcagattgtgattttctcaagagaaactttaagcagatgtctaatgttttgtgggtggctcctg

SEQ ID NO: 37635 - DNA, 350 bp, Glycine max
  Clone ID: LIB3138-130-Q1-N1-F11
cacttctcccgtgatgaagagataaaccaaaggctaaagctgatgttgacaagatggcaactggtttaatcaagcttgcacaggaagacccttctttccacttctcccgtgatgaagagataaaccagacagtgattgaaggaatgggagaattacatcttgaaatcattgttgatcggcttaaaagagaatttaaggtggaagctaatgttggtgccccccaagtaaactacagggaaagcatttgcaaaactgcataagtgaagtatgtgcacaagaaacaatcacgtggacaaggtcagtttgcaaatatcaccgtccggtttgaacccatggacccaggtagtgga

SEQ ID NO: 37636 - DNA, 347 bp, Glycine max
  Clone ID: LIB3138-130-Q1-N1-F2
gtctcccttctcaccattgaggagggtattttcgaagtgaaagccactgctggtgatactcacttgggaggtgaagattttgataacagaatggtgaaccattttgttcaggaattcaagaggaagaacaagaaggatattagtggaaatgccagagcattgaggaggttgagaacagcatgtgagagggccaagaggactctctcttccactgctcaaaccaccattgagattgattccttgtatgagggtattgacttctacacaaccatcacccgtgcccgtttcgaagagcttaacatggacctattcaggaagtgcatggagcccgtggagaagtgtttgcg

SEQ ID NO: 37637 - DNA, 346 bp, Glycine max
  Clone ID: LIB3138-130-Q1-N1-F3
ctcgagccgctcgagccgtgtcaagccttactttagtgggtctaaattgaaaagctttctagctagtcataacatcaccattactgatggtattgacaaaactagtgcaactttgcaatttagaaagttagcagattgtgattttctcaagagaaactttaagcagatgtctaatgttttgtgggtggctcctgaggacaaggcgagtttatggtcacaacttcattatgtttcgtgtaataatctggaaatgcaagaagcttatcttgtcaacctcgtaaatgtgttacgagaattgtatttgcacagtccagaggaagctcgccaattgagaaggaaagctctc

SEQ ID NO: 37638 - DNA, 331 bp, Glycine max
  Clone ID: LIB3138-130-Q1-N1-F4
caaacttcaaaggaggagctttctttcaaacccgaaccgttacatctttccgacaacctcagacacccatttgagcccatcccaagagggcaagggcatgttcgagttggacgaggccgagttatggaacaacaaccactcttcagccacaacggatcagagcaaaaaggggttaccctctccgggttcccgttccgttctgaagaaagcttcaaggaacaacaacaatggttggagaggcagaatcaccccagcgtcattgcctgtgaacatacccgattggtccaagatcttgaaggaggactacaaggagcaccccaagtgggagagt

SEQ ID NO: 37639 - DNA, 352 bp, Glycine max
  Clone ID: LIB3138-130-Q1-N1-F5
gttacacacaaaaaagcagagtctgcagcactcaaacgaaacgacagtgaccaaaacagaaaaacgacattacccagagagcgacgatgccggaagaaacgacgtcgatcgactacgtgatggaggctgcatctgggccccacttctccggcctgagactcgacggccgggtcccgtcctccgccaccgccgcgttctccactcccgattcaaccctaaccctcgattcccttcccaatcaacccttcgtcataggagtttctggaggtactgcctcgggcaaaaccaccgtctgcgatatgatcattcagcaactccacgatcaccgcgttgtcctcgtaaatcaggactc

SEQ ID NO: 37640 - DNA, 319 bp, Glycine max
  Clone ID: LIB3138-130-Q1-N1-F7
gaacaatttaagaacccatgtcataacctttgcactgggttattcacagacggtgtttatagatctgggtgcaaactcagggtgtgggatgagcaccatattgatgaagatgaccagcctgtttgaacgagcacaaaatccaccccaaggataacacccttactgcaacactaaaatgtatcacgccaccactgctataccattgtatgatgaccacacctgtgaccaatctgtcataaacgagaagctcgtacatgagcttgagcctagagcctatgatactcatctgatgcatgaaccagcttatgatctcatggat

SEQ ID NO: 37641 - DNA, 346 bp, Glycine max
  Clone ID: LIB3138-130-Q1-N1-F8
gaagaagaagatggctttaggtgttcctgctcttccgttgacatacgtggctcacgttctggcagttgttgccagcgtcttggtcgtggtctgggtcgtcaatttcaggggtggcttggcttgggattctgataacaagtccctcatcttcaacattcatccagttcttattgttattggcttactagttcatgggggtgaagctattataagttacaaagcttttcccctaaagaaggaagtgaagaaattgatacaccttgttttccatgccatcgcattaatacttggaatagttggaatttatactgccttcaagtttcacaatgaaagtgggattgccaat

SEQ ID NO: 37642 - DNA, 347 bp, Glycine max
  Clone ID: LIB3138-130-Q1-N1-F9
tcttaactcaacttctgctacccactctcttcttccaagtccaaccacgcttttctctacagtcatgggcaaggtcaagatcggaatcaacggatttggaagaattggccgtttggttgccagagtcgctctgcaaagagacgatgtggagctcgttgccgttaacgaccctttcattaccaccgattacatgacatacatgtttaaatacgacagtgttcacggacactggaagcatcacgatgtcaccgttaaggacgagaagacccttctcttcggtgacaagccagtcactgtttttggacacaggaaccctgaagagatcccatgggggtcaactggagctg

SEQ ID NO: 37643 - DNA, 350 bp, Glycine max
  Clone ID: LIB3138-130-Q1-N1-G1
agcaaatattgcctattcggcaatatggcggaaaatggttcaattgagctgaacaagtttgtgttgttttgtttgttgttgctaatacaagtggcagtttctgaaatcatttttgaagagcgatttgatgatggatggcgaagtaggtgggtgaaatcagactggaaaagcagtgagggcaaagcaggttcattcaagcacacagctggaaaatgggctggtgatccagatgacaaaggtattcaaacatccagtgatgccaaacactttgccatctctgcaaaaataccagaattcacaaacaagaacagaacattggtccttcagtattctgtaaaatttgagcaaga

SEQ ID NO: 37644 - DNA, 344 bp, Glycine max
  Clone ID: LIB3138-130-Q1-N1-G10
ctcgagccgttgaaggattggaccttggaaagatggacaaagctgatgactctggacttgcttcatatgttgccggtcaaattgatcgtactcttagctggaaggatgtgaagtggcttcaaacaatcaccaaactgccaattctggtgaagggtgtgctgactgctgaggacacaaggatagctgtacaaagtggtgcagctggaattatagtgtccaatcacggagctagacaacttgattatgttccagccactatatcagccttagaagaggttgtcaaagctgctgaaggtcgtgttcctgtatttttggatggtggtgttcgccgcggaactgatgtc

SEQ ID NO: 37645 - DNA, 289 bp, Glycine max
  Clone ID: LIB3138-130-Q1-N1-G11
ctaaaactcgctgatttactgttcttgctatggcggataatcatgttgtccgtacaaagtttttaaattttgtgaggttcattatcaacaaaagggccaaacttagtgggcaagttggaatcaacccatactccatggaatggactgattaggccaatcgagtactgaatgagggcaatgatattctgtgttgcgattctgctcgttttgacgggtcgattaccaaccctgttatgaacaagattgcagaaatgattaacagactttgaggtggtgattaaaaattgat

SEQ ID NO: 37646 - DNA, 354 bp, Glycine max
  Clone ID: LIB3138-130-Q1-N1-G12
gtgatgataacttaattagtgttcatgaatatgtcaagccttactttagcggttctaaatagaaaagctttctagctagtcataacatcaccattactgatggtattgacaaaactagtgcaactttgcaatttataaagttagcagattagtgattttctgaagagaaactttaagcagatgtctaatgttttgggggtggctcctgaggacaaggcgagtttatggtcacaacttcattatgttgcgtgtaataatctggaaatgcaagatgcttatcttgtcaacctcgtaaatgtgttacgagaattgtatttgcacagttcaaaggaagcttcccaattgagaaagaaa

SEQ ID NO: 37647 - DNA, 347 bp, Glycine max
  Clone ID: LIB3138-130-Q1-N1-G2
ggtgtcaagttgacaaccataaacaatatgtgtgcatatgggctcaatcctggtatttcaggttctcgtcttttgggcaccattcctcagtccatttcacagcaaactgtttggaatcaaatggcaacagtgagaacaccattgaattttgattctagcaagcagagcttttgtcagttttctattgaccttctcggtggaggaatcttagtggacaaaactggagattggatcacacttatacaaaattctccaattagtaacttgttgagagttgctgcttggaagaaaggctgtttaatggtcaagattgtgatgtctgggaatgcagcagtcaaaaggagtga

SEQ ID NO: 37648 - DNA, 350 bp, Glycine max
  Clone ID: LIB3138-130-Q1-N1-G3
gtgggggaccaaggagcattgcttttttcaggtttaactgccgagccaagcttatccagaaaaaagcagtgggggaccaaggagcattgctgcatttttttcaaaaaggtgcttgcccccgactggggaaggttcgaaacctggtgaaacttcaccactgccacccctgaaatcatcttctgccattgatgaacgacctcaaagttcatataacatataatctctgacatcttgttgcccagtggcattttactattttcagatttcttagtaccgactctttaaaagttggagatagtgtgggttgcacttgatgctcgtttaccactgtaggcaagttcctgattacc

SEQ ID NO: 37649 - DNA, 349 bp, Glycine max
  unsure at all n locations
  Clone ID: LIB3138-130-Q1-N1-G4
ctgaaagcttcagaggctgcaaacatcatttttatatcctccattgctggtgtgctatcaataggtataggatccacttatggtgcaacaaaaggagcaatgaaccaactgactaaaaatttggcatgtgagtgggccaaagacaatataaggactaattgcgttgcaccagggccaatcaaaacccctctcggtgacaagcattttaaaaatgaaaaacttcttaatgctttcatttcgcaaaccccccttggacggattggagaagcagaggaagtgtcttcattggtggcattcctctgcttacctgcagcctcttacataacangacagaccatttgtgttgatg

SEQ ID NO: 37650 - DNA, 357 bp, Glycine max
  Clone ID: LIB3138-130-Q1-N1-G5
gttgggtttacaaggagcaggtaaagcttttccaaacaaaattgtttttgatgataagcttgtgttggctaacacacaagaattctttgatggaaattttccagtggattcttggttaccaatttttgtgaattgtctttatcctgtaagtcaattaccttcagaagctgtcgttgtaaatgttacatgtggtagtggacgtggtggtttacccaccactgcttggattagttctgcagttaacaatcgctcctcagatatcaacaaaaggattcgcacagcacttgggaaaggtaagaaaattgtttttcttactagagttgatccttttccagtagctttactggctgttctttt

SEQ ID NO: 37651 - DNA, 260 bp, Glycine max
  Clone ID: LIB3138-130-Q1-N1-G6
gctgactttacagacaaacatcaacgccttctccatcttgtgtgatgaacattttcaaatacctactggaccatgatttgaactggggcggaatattctacgactcagagaaggcatgttatttgtccgagaccaggagccccccctcagacaacaacctgattcttgcggcaacacggactaagcagcgagcgctataacaagtctttatagatacaactgtcaccatttaccgatgagtgcgctgcacgtacatgaac

SEQ ID NO: 37652 - DNA, 348 bp, Glycine max
  Clone ID: LIB3138-130-Q1-N1-G8
agacaaggagggtattcctccaaaccagcaaaggttgatttttgctggaaagcagcttgaagatggacgtacactggcagactacaacatccaaaaggagtccacccttcaccttgtccttcgtctcaggggaggtatgcagatctttgtgaagactttgacaggcaagactattaccttggaagttgaaagctcagacacaatcgataatgtcaaagcaaaaatccaggacaaggagggtatcccaccagaccatcagaggttgatatttgctgggaagcaattggaggatggaaggactcttgctgactacaacattcagaaagagtctactcttcaccttgtgtt

SEQ ID NO: 37653 - DNA, 347 bp, Glycine max
  Clone ID: LIB3138-130-Q1-N1-G9
gttctgcagagagagagagagagagtttcagaatttagagagagaattttattttgttttttcggttatctttattggtttctcttacatcgtttttgtaggcgctgaggaagaagctttggcagcataactttgttggggagcatgcattgcaacttctgctcgagtttttctttgctgaagtttggacaagccaactgttacgggactacaaagagttttaaagactaagtaggaaatcctaattagtagggatgcctaaacaaagaacatttatgatactgtacagatacgacagacactattcaaagatgaaaaaatgtgaggtgacaagggcaaataaaggg

SEQ ID NO: 37654 - DNA, 341 bp, Glycine max
  Clone ID: LIB3138-130-Q1-N1-H1
cgcatgtgttggctccaccgtttctttctttcttactttggcctagctaagctaacttgatcaataatcagatgttgtcgccgctgcaggacatgttcatgtactggcccaacaagtccttttgagcacatcatgatggttttaaattacgatccgcaattgctcttaagattttctgactcaccatgcgatcacaatcgtaatttaaaaccatgtcacataaaatccacgcgcgccgcccattcgcatttgcacggtagcacgagactcaaggtccatgagtgtgcctgtgcgaccacacacatacgattattgatcaagttagcttagctaggccaaag

SEQ ID NO: 37655 - DNA, 355 bp, Glycine max
  Clone ID: LIB3138-130-Q1-N1-H10
gcatttggaaatttggctgatgataccatcaattttgaggcttttccccacaagctggtgcagtttggagagattcaggaaaaagttgtattgaaattttcacaagaggaatttcttacagcttggtcaactcaggtgcgtcctgcaacaactctgttggctgatgggtgtccatatttgtatgcaatggtgcatgatagttcagtgtctacaataccaggtgattttgtcattggtgtcaagttgacaaccataaacaatatgtgtgcatatgggctcaatcctggtatttcaggttctcgtcttttgggcaccattcctcagtccatttcacagcaaactgtttggaatcaaa

SEQ ID NO: 37656 - DNA, 356 bp, Glycine max
  Clone ID: LIB3138-130-Q1-N1-H11
gacaaatctagtgcaactttgccattgataaagttagcagatagagattgtctcaagagaaactttaagccgatgtctaatgtttcgtgggtggctcctgacgacatggcgagtttatggtcacaacttcattatgtttagtgtcataatatggcaatgcaggaagcttatgttggcaatctcctacatgtgttacgagaattgtatttgcacagtccaaatgaagctccccaattgagaaggaaagctctctctcttattgaatggctgcaaaaagctgatgtgcctaccatagcacagatcgaatagttccattctatgcagatgatgatgaatgctcctgattcaaatgataa

SEQ ID NO: 37657 - DNA, 359 bp, Glycine max
  Clone ID: LIB3138-130-Q1-N1-H12
tttgtgttctgttgctattttcaggttaggtgacagctgctggaagaagaagttgccactttcaaatggtagagttgatgccacacttaatggtgcaaaggccttcatgaaagtgaggaaagacaactcctccttggttgttcctccaatcattgtgaaaaagaatagtaggaacactttgattgtgcttttgagtggttctgcttgtctcaatctaatattggttggagcaatctgcttgagcagtttttatgttttttggtgcaagaagaagcttagaagagttggcaaaagtggcactaatgtggaaaccaatttgcgttgcttcacttatgaggaacttgaagaagctaccaatg

SEQ ID NO: 37658 - DNA, 349 bp, Glycine max
  Clone ID: LIB3138-130-Q1-N1-H2
aaacaatttaattggattggtcgaatggtatcaaaaaaatggagtactaactcccatttcttatttattattgaattaaccgatcaacttgctttgttatcgaacatttctttttgatttcaaaaattttccggaaaaaatttgaatctatttttatatgcgaatcaatcctactacttctggtcctgaggtttctgcgcttgaaaaaaaaaatctgggacgtatcgcccaaataattggtccggtactagatgtagcttttcccccaggtaagatgcctaatatttacaacgctctgatagttaagggtcgagatactgttggtcaacaaattaatgtgacttgtgaa

SEQ ID NO: 37659 - DNA, 347 bp, Glycine max
  unsure at all n locations
  Clone ID: LIB3138-130-Q1-N1-H3
cggctcgagcacatatttaatgtaaacctccaagtttctttgagaattcgataacaacacgcatcccttttccccaccacattatttttccttctcctacttccacaaaatcggcatttcttcccacaaccactattgagtagctccaaatttttatatctagctctttcttatgctagaatttgattcctcttcattcttcaacaactccaatgtattccttagcccaacacaagtacataccacgcttncacctccaagcttgcaagaaccacccaccccaccacccatcgtctccagtgttttgttccaccacaaccacaacgtctagggacaagcccaatcct

SEQ ID NO: 37660 - DNA, 350 bp, Glycine max
  Clone ID: LIB3138-130-Q1-N1-H4
caaactcttattcccactcagtggtgaatttgccaaaccgggataaccgtatccctattcaggaatacaatgttctcgttaagactccctattcctctcgttaaaacaccaccttctccctcttgttattattctcactattatcactatcgttatcgttatcgttgttatcatcctttccatcaccgttcccaaacacagagtcttatcgtctcgaagcgcggttccgccattgcgaagtgtcacgctgatagcgtgacacttcgtgatgacggagtctcgctcgcccaagagtcggtggagccactttcggcggaactcgcggcggagatgatgccgaagcatgtggc

SEQ ID NO: 37661 - DNA, 359 bp, Glycine max
  Clone ID: LIB3138-130-Q1-N1-H5
gttatttcgaggaaactgagtaactacgcaacggtgggtccgaccccgagtgcggcacgtgtgggaaacgacggtgacaatggttcgttgatgattcctcgtttcaacgcttaccgcgtaaacaacctcaacctgtgatcaaaagcatcatctccaaaatcccaaactcatatcataacgggatcggaggctaatctattacgcgctgttctctcgtcttctacaagattttctgttcgatctcaaccaaggttgttccttccacctccgccatgagtttcatctttggaaagcgaaaaacccccgcagagcttctgcgggaaaataagaggatgctggacaaatcaatcagagaaatt

SEQ ID NO: 37662 - DNA, 346 bp, Glycine max
  Clone ID: LIB3138-130-Q1-N1-H7
attttatctttattccactgaatagaacatgagcatataaatggataccctttatattatctatctttatattatctataaagggtaaagatatccgatgtgaatctatttggttagttttctatcggtatgtatataggtgaataatccaacatgcctttttgtgaagtaaaaaaactaccctcgatccatgcctgaaaagggttgataataagtaaaaaaaatcaatgaattcatgataaaacccttctgcgtttttttattataaatttttttgtcaataaagggatcaaggggttgggggatcaaatggtaaagttcttttgttggtaaattggacgattag

SEQ ID NO: 37663 - DNA, 343 bp, Glycine max
  Clone ID: LIB3138-130-Q1-N1-H8
caaaatccttttgtgttaaataggtggatgggaaaattgactttcccccagggcacttcccgaagtgttaagagaatgcctctttctatagggggaggagctggtgcaaagaatgctattctcatgaatatgccaaatgctgttctttcaatgtggagatattttgttggagatctcgtctttgaagtttctaagatgacttctccctacattaaatgtacagtctctttcttcatagcatttggaaattttgctgatgataccatcaattttgaggcttttccccacaagctggtgcagtttggagagattcaggaaaaagttgtattgaaattttcacaag

SEQ ID NO: 37664 - DNA, 347 bp, Glycine max
  Clone ID: LIB3138-130-Q1-N1-H9
taaaaacccagattgtcaattttgttctttttaattttgaatacatatttttatccaaaaaacaattgttgttattatgtttttgctgtctcattagtggaagttatatagttcactagagatagcatctggatgctacagttgcggttgactgccatgtcaaatgacaacagttattggtttccaagaattgataataactgctgatggagaaacagattactgagtttcaataccaaaataccaatgttgcaaatcaatttaaacaacaacgacccttactaacttgcagtcatttttcttttaccatacagattctaaccatgtatttaagatgaaactttaaa

SEQ ID NO: 37665 - DNA, 458 bp, Glycine max
  Clone ID: LIB3138-013-Q1-N1-H8-F2A
gtccctcatctccatccagctcattagtgccaccaaggctgatggacatgggaaaggaaaagttggaaaggctacaaatttaagaggacaagtgtcgttaccaaccttgggagctggcgaagatgcatacgatgttcattttgaatgggacagtgacttcggaattcccggtgcattttacattaagaacttcatgcaagttgagttctatctcaagtctctaactctcgaagacattccaaaccacggaaccattcacttcgtatgcaactcctgggtttacaactcagaatcctaccattctgatcgcattttctttgccaacaatacatatcttccaagcgagacaccggctccacttgtcaagtacagagaagaagaattgaagaatgtaagaggggatggaactggtgagcgcaaggaatgggatacgatctatgattatgatgtctacaatg

SEQ ID NO: 37666 - DNA, 359 bp, Glycine max
  Clone ID: LIB3138-013-Q1-N1-H8-R2A
acataagatgatgatttattctagtttgcactttgccatgccagctatcattgttgaaacatgcgcgagaacacttaacagcaatttatacaaacagaatttcttcattaacacttaacagcaaacacgagaacattcaatcaccccaaatacataacttaaccatacataggtagatgaaggaatcatattccttctattcacttttattgaaaaccagggaaagtactgcaacaaccatagagcccctagatggagatactgttgggaattcctctgaaagtcaatccctcctcactagaaggatagagcaaagtgtaaggcattttagccggcccactgcggtttctcaacgtctc

SEQ ID NO: 37667 - DNA, 138 bp, Glycine max
  unsure at all n locations
  Clone ID: LIB3138-082-P1-N1-G11.R2
cccccccccagaggggtttttttttttnttttttttgtgggcggtcggacaccagcccccccccgccccacaccccccaaaaaaaanaaaaaaaaaaaaacaaaaaaaaaaaaaaaaaaaaaacaacaaacagagaaa

SEQ ID NO: 37668 - DNA, 425 bp, Glycine max
  Clone ID: LIB3138-048-G11-R1A
acatgacagggagcaaattccttaaaataacacgcacttcacacatcattacgccaattaaaagaggtgtggaaattttcatataggcagatcatactcatcaagagggtcatgcctaatttcctcttactggattatacaaacgaacaagcgcgagaaaacgcaaattccagatcatgcagaggattccgcattgtcagaagctctggcagtagcctgtggaacagtaaaagctggcataagagtatgaccagcaatttcaaaatcttgagagagtcccaagagaatatgccaaactgaagaccgtttggagatgcccacaaggacactcaaatgccatgaaggttgcattgcccactcagaactccacattgcaaaaccatgattaggaccacagacctctattgggaacatcgattcccagg

SEQ ID NO: 37669 - DNA, 522 bp, Glycine max
  Clone ID: LIB3138-069-G10-R1A
gggaggataattaattgattaaacgaaatgaaagggtctctgactaacaatagacactagttttctcttttgaaaagaaaaaaacaatagttctgtagaccacagtccagtggaccattatccacaacaatatgcacgtaaaagtcaacagattataaaaattttctaagccattctttcgcctccacaaacgggtaccaatgagattctatggacgtccaacttctgaggtctgcctaagcttcatcttctctttgtactccgtcaattctctcttgtacctttctttgtctcttaagccaatgttctgataaaccattctttcttctgggctaagactgttccatgactggccaatcattttggtaaactccctttctctgtttgggtagagagttttgagagtgtaatgcttttcagcaaagaagaagttatagccactcctattcggctttggataattggggtcccaccttcttttgtttttcttcctacgaccagaacggtgaggtttgcggttga

SEQ ID NO: 37670 - DNA, 480 bp, Glycine max
  Clone ID: LIB3138-126-A8-R1A
atcagcatcttattctgtttattaatttcttttgctgttgtatattttatagtgcaacaccaccacctctccaggcaggaacattctcacgtggtgtagtgactatgcgttgtgatatatcaacatgtagttctgctcatatatcacttttggtgtctggtagtgcagacacttgttttaatgatcaggcatgggtgaatttgctgccagtgtttgacattttacatatatgatcttttaaactttttacttacctatcacttattttgggtatatcctcagcttttggagaatcatattaaaaaagagctgattgagaagagtcaacttgtccaggcatttcctaatcatcaacaaagtaaagcaccttcatccgagcctcgaagatcagcctcagtagcgtgtggatctagtgtgtttgaagtttgtatgcgagttcctgcatgggcttcacaggttaattgttgtttctcaggtttc

SEQ ID NO: 37671 - DNA, 248 bp, Glycine max
  Clone ID: LIB3138-034-Q1-N1-B6.F2
gggggggcgggggggggggggaggggggcccttggcgggggggggggggggggggggggggggggtgcgggggggggcgggggggggggcgggggggggggcggggggggggcccggcgccgcggcgggcggggggcggggcgggggggggcgtggggggggggggggggggccggggcgggaggcaggttcctgcccgggggggggggggggccggccggaaccctcggcggggggggggggggggg

SEQ ID NO: 37672 - DNA, 283 bp, Glycine max
  Clone ID: LIB3138-034-Q1-N1-E2.F1
aaaaaaaaaaaaaaaaaaaaacaaaaaataaaaaaaaaaaaaaaaaaaaaaactaaaaataaaaaaaaaaaataaaaaaaaaaataaaaaaaaaaaaataacaaaaaaaaaaaaaaaaaaaaaaaaaaaaaaaaaaaaacaaaaaaaaaaaataaaacaataaaaaaaaaaaaaaaaataaaaaaaaaaaaaaaaaaaaaaaaaaaaaaataaaaaaaaaaaaaaaataaaaaaaaaaaaaaaaaaaaaaatataaaaaaaataaaaaataatctaaaaaaaa

SEQ ID NO: 37673 - DNA, 464 bp, Glycine max
  Clone ID: LIB3138-048-G11-F1A
ctcgtcttttgggcaccattcctcagtccatttcacagcacactgtctggaatcaaatggctacagtgcgaacaccatatgattttgactctagcaacagagttgtgtcagcattctattgatcttctcggtggaggaatcttagtggacaaactggagattggatcacacttatacacaactctccaatcagcaacttgttgagagatgctgcctggaagaaatgctgtgtaatcgtcaagattgtgatgtccgggaatgcagcagtccaaggagtgattgggcctcactggtacatgtgtgtttaacaaacagcaacagtacagagcattttgatgcctgtaagtgggcaaaatcagggccacattcctgcgaattgatcttcccaatagaggtatgtgcgccgaataatggatctgaaatgtcgagatctgactgggcaaatcaaacttcatggcatttga

SEQ ID NO: 37674 - DNA, 495 bp, Glycine max
  Clone ID: LIB3138-060-C7-F1A
ccgaggagggcggcgatcggcgatgagcagcggcggcggatcgtcagaggcggcggcggcggcgaaggagaaggagaaggagaaggcgcgtgtgagtcgaacgtcgctgattctgtggcacgcgcaccaagacgacgccgcagcggtgaggaagcttctggaggaggatccatcgctggtgaaggcgagggattacgacagccggacgccgctacatgtggcgtcgctccatggatgggttgaggttgcgaattgcttgatcgaattcggtgctgacgtcaacgctcaggatcgttggaaaaacactcctctggctgatgcagaaggagctaaaagaactgccatgattgagcttttgaagtcacatggtggcttgtcgtatggccagaatggaagccattttgaaccgagtcctgttcttcccccattgcctaacaaatgtgattgggaagttgacccttctgagctggacttctccaattcagtttgcattgg

SEQ ID NO: 37675 - DNA, 499 bp, Glycine max
  unsure at all n locations
  Clone ID: LIB3138-069-G10-F1A
tcaaccgcaaacctcaccgttctggtcgtaggaagaaaaacaaaagaaggtgggaccccaattatccaaagccgaataggagtggctataacttcttctttgctgaaaagcattacactctcaaaactctctacccaaacagagaaagggagtttaccaaaatgattggccagtcatggaacagtcttagcccagaagaaagaatggtttatcagaacattggcttaagagacaaagaaaggtacaagagagaattgacggagtacaaagagaagatgaagcttaggcagacctcagaagttggacgtccatagaatctcattggtacccgtttgtggaggcgaaagaatggcttagaaaatttttataatctgttgacttttacgtgcatattgttgtggataatggtccactggactgtggtctacagaactattgtttttttcttttcaaaagaganaactagtgtctattgttagtcagagaccctttcatttcg

SEQ ID NO: 37676 - DNA, 614 bp, Glycine max
  unsure at all n locations
  Clone ID: LIB3138-080-P1-N1-C1.F2
ggggggggggggggggcgggccggccggggggnnngcnccnncccccggggggggggcggggggggggggggggggnccccgccgcggggggggggggggggggggggggggggggggggggggcgggggggggggggggcgcggccggggggcgcggcggcggcgccgcggccggcgccggggggcggggggggggcgccgggcggggggccgcgcggccgggggggccccgcggccccggcgggcgcccgcgggcggcgccgggcgcggggggggggggggggggggggggcccggggggggcgggggcgcccgggggggccgcgcccccccccggggcccaccccccgacggccccgcccccccgcccccnccccccccccccnccgcccgngggccggggggggggcggggggcgcggccgggccggaggggccggccggggggcgggccgggggggggggcgggcggcggcgggggggggcgagacggggggcggcggggggggggcggggggggggcggcccgggcgcgggggggcccggggggaggggggggggggcgggggggngggcggggcggggcggggggggggggggcgggccgcgggggg

SEQ ID NO: 37677 - DNA, 822 bp, Glycine max
  unsure at all n locations
  Clone ID: LIB3138-090-P1-N1-F11.F2
ggggcggggcggggggggggggggggggggggcggggncgcgggcggggggggggggggggggggggggggggggcggggcggngcgggcgggggggggggggcgagggggggagggggcggggccggggcggaggggggggggagggccggggcgcgcgcgccgcggggggcgcccgggggggggcgcgggggggggggggggggggggggggggggggggggggagggcgggggggggggggggggcgggggggggggggggggggggaggcggcgggggcggggggggggggggggggccccccccgccccccgcgcggggggggggggggggcggggccgcgagggggcccgggcgagggncggggggcgccgcacccggggccggcgcggggccagcgcacggggggcgggggggggggaaggggggggggggggcggggggggggggggggggggggcggcgggggggggggggggggcgggggggggcgggggcgggggcggggcgggcgggggggcggggggggggggggggggggggaggcggggggggggggggggggggaggaggggggggggagaaggggggggagggcgggggggggggggagcggggggggagggggggggagggggagggcggggtggacggggccggggacgggggagagggagcggggaggaggaggcggcggagggagggcggggggggggggggggggggcggcggggggggggcggcgaccgcggaggggcggcggaggaaggggagaggggggcgggggagggggggggggaggggggggggggggggggg

SEQ ID NO: 37678 - DNA, 444 bp, Glycine max
  Clone ID: LIB3138-129-Q1-N1-C11.F1
aacctcaccacgccatcgccgttttccctcgacacaaccgaagcgctcttgcatcgacacctccaacacctccaacactctcttgagcagcagcaatcatgggcagctgcctggcctgcatcttcggtgccgaggaggaggggggcaattgctccttctagtgcaagattggcggctggcgtcgacgcgggcggtgctgcagaggacaggggaaggggggggactcgcgagtatcgtgcgggggagggtgtgccaggggccggggtgaggggggaggggcggggtgggcgcgcggggggtggggatgcggtgggatgggggtgtgggaggcgggtggtggggggtgggcgaggatgggggggggggggggtggggtgggggcgagaggagggggggcatgtggggggggggggggggggggggtggaaggagggggggaggggg

SEQ ID NO: 37679 - DNA, 591 bp, Glycine max
  Clone ID: LIB3138-129-Q1-N1-C11.F2
aacctcaccacgccatcgccgttttccctcgtcacaaccgaagcgctcttccatcgacacctccaacacctccaacactctcttgaacagcagcaatcatggccaactacctcgcctccatcttcggtaccgagcaggacaaggtcaattgctccttctactacaagattggcgcctgccgtcacggcgaccgctgctccagaaaacacgtcaagccgtcgtactcgcagactatcctgctgcccaacctctaccagaacccggcgtacgaccccaagaacaagatgaacccgcagcagatgcagatgcactttgatgcattttacgaggacatctggtgcgagctgtgccagtatggacttgctgaagagttggttgtttgcgacaacaacaatgaccatctcatcggcaatgtctacgtccgattcaagtacgaagaagacgcgcaaaaagcctgcgacgccctcaactcgcgctggtatgctggtcgtcccatctactgcgaactctcgcccgtgaccgatttccgcgaagcctgttgtcgtctgaacagtggcgaaagctgcgtccgcggcggcttctgcaacttta

SEQ ID NO: 37680 - DNA, 315 bp, Glycine max
  Clone ID: LIB3138-129-Q1-N1-C11.R3
caaagtgcatctgcatctgctgcgggttcatcttgttcttggggtcgtacgccgggttctggtagaggttgggcagcaggatagtctgcgagtacgacggcttgacgtgttttctggagcagcggtcgccgtgacggcaggcgccaatcttgtagtagaaggagcaattgaccttgtcctgctcggtaccgaagatggaggcgaggtagttggccatgattgctgctgttcaagagagtgttggaggtgttggaggtgtcgatggaagagcgcttcggttgtgtcgagggaaaacggcgatggcgtggtgaggtt

SEQ ID NO: 37681 - DNA, 220 bp, Glycine max
  Clone ID: LIB3138-001-Q1-N1-B12
ggcttgacaaaagcaatgcttgtcattaatccaacccggttctgatgcatggagttggaattctgaacgtactggatttcattgcgatatcatttgtgtcactggatggattgccaccccaatccaggatgttcaggttacaattgattggtttatttcctctcaggaatgtgttcccaggacctattgtgttttaaatccacaaaatccttttgggtta

SEQ ID NO: 37682 - DNA, 406 bp, Glycine max
  unsure at all n locations
  Clone ID: LIB3138-001-Q1-N1-B4
atagctgatgtgctctatcatagcacnagattggaagagttccattgcgatgcgagaggatgatgacatggctcctgattcanaatgataatcattgatttactcgttgagcattgactttgttgtgtttacaagggagcaggtaaaggcttttccaaacaaaattgtttttgatgataagcttgtgttggctaacacacaagaattctttgatggaaattttccagtggattcttggttaccaatttttgtgaattgtctttatcctgtaagtcaattaccttcagaagctgtcgttgtaaatgttacatgtggtagtggacgtggtggtttacccaccactgcttggattagttctgcagttaacaatcgctcctcagatatcaacaaaaagattcgcacagca

SEQ ID NO: 37683 - DNA, 284 bp, Glycine max
  Clone ID: LIB3138-001-Q1-N1-E11
agagaaactactttctgaagaatcatttttgcgtctcaaagaagctggaactggtcttcacacaaagtcagtagacgagcttatcagcatggcgcacaagttttatgatgaagttgccttgccaaagctggctatggactttggatcacttgaactttctccagtcgatggtcgtacactgactgactttatgcatttaagaggattacagatgcgatctttgggtaaagtggttaaacttgcagagaatctgccacacatacaatccctttgtattcatgaga

SEQ ID NO: 37684 - DNA, 180 bp, Glycine max
  Clone ID: LIB3138-001-Q1-N1-E6
atctccatctctacagaacttttttattcccatatacatgcatcactcaccgggggcaatgccatcctactgggctgcatccttctactactatatcttcatgcccttcaaaagaaatgaccaactgacccttacaaaatttacttgagcaatgccatatacaaaacttacgctactcca

SEQ ID NO: 37685 - DNA, 288 bp, Glycine max
  Clone ID: LIB3138-001-Q1-N1-F9
gaaaaggatttttttgaaaaacccaaatagattgatgccggatgggtacaaagaatagatcctgaatacaatgacgttcaggctctgttggtatacaaattctgttaaattgtctcttgatgatgtagaaactgctaacggttccatgttggatctcaaaatttttcaatctaaaattgcacttcataagaacacagatggtggaaccattctgcgtagtgatctataggcatattgtttgacagatggaactttatgagcaagtgtcgatatgctgcgcactcatcg

SEQ ID NO: 37686 - DNA, 225 bp, Glycine max
  Clone ID: LIB3138-001-Q1-N1-G10
caagggtgcattaatatcacttagtccaaatgttccagcgcagatatttatgggagttatgctccatccaccttaacctggagatatttcttatgacaaatactgtagggagagcaccggaatacttgaatcactgagaagaagagcaaggctaatgactgatggattcaacagttgcagaaatgtggtttgtaattatactgaaagtgccatgtattcattccc

SEQ ID NO: 37687 - DNA, 228 bp, Glycine max
  Clone ID: LIB3138-003-Q1-N1-A9
ggtaatactcttatgccagctttttctgttccacaggctactgccagatcttctgaaaatgcggaatcctctgcatgatctggaatttgtgttttctttcgcttgttcgtttgtttaattcaataaaggaaattaggcatgaccctcttgttgagtatgctctgcctatttgaaaatttccacacctcttttaattgtcgtaatgatgtgtgaagtgtgtgttatttt

SEQ ID NO: 37688 - DNA, 328 bp, Glycine max
  Clone ID: LIB3138-003-Q1-N1-B7
tagaggagttttttcaacaatctatttgtgttgttattaaagaagggttctgacacagaggggagtcagcacatcatatcatgtacactctctcactcccatgcctctcttattctcttcacactcacacttaccaatatggtcgcttctctacccctatatcttttatcttcacacataatagacgctctcacaatcacttactaactacaagctcctaccttatacagagagaacgagagagcctaaagcatctacgcactatcatcacttccccttctcgttctggcttgtatcgcttgtttatacccaataacaacaagacctt

SEQ ID NO: 37689 - DNA, 91 bp, Glycine max
  Clone ID: LIB3138-003-Q1-N1-C6
aaaaaaaaatatttaaaaaaaaaaaaaaaaaaaaaaaaaaggaaggaaaaaaaaaaaaaaaaaaaaaaaaaaaaaaaaaaaaaaaaaaaaa

SEQ ID NO: 37690 - DNA, 381 bp, Glycine max
  Clone ID: LIB3138-003-Q1-N1-D11
cggctcgagcgttgccattctcatcctcttctttctctctctaccattgccatggatccctacaagcaccggccatccagcgccttcaattctcccttctggactacaaattctggtgctcctatttggaacaacaactcctctttaaccgttggagctagaggtccaattctgctggaggattatcatcttgtggagaagcttgcaaattttgatagggaacgtatcccagaacgtgttgtccatgccaggggcgctagtgcaaagggtttctttgaggtcacccatgacatttctcacctgacatgtgcagatttccttcgagcccctggagttcagacgcctgtaattgttcgtttctcaactgtcattcatgagcgt

SEQ ID NO: 37691 - DNA, 261 bp, Glycine max
  Clone ID: LIB3138-003-Q1-N1-D4
agattgtgaagctcaaataaatccaattgttcataaaaatggtacatgatagatcacttgtaaaacttgcccactagccattgtatatttcataagttaaaatcttttggtttaattaaaaaaaaaaaaaaaaaaaaaaaaaaaaaaaaaaaaaaaaaaaaaaaaaaaaaaaaaaaaaaaaaaaaaaaaaaaaaaaaaaaaaaaaaaaaaaaaaaaaaaaaaaaaaaaaaaaaggggcggccccccctttttgacctcttc

SEQ ID NO: 37692 - DNA, 385 bp, Glycine max
  Clone ID: LIB3138-003-Q1-N1-D6
gtcaactcacattcctcccacaacatctctggaatcagagaagtgttcatctcagtttgcattcctgcaaattcatgcatatcattcaactccactataaattgtcatttgtgggaacgcgccaaccataatctttacaccatcatatctgatcactgctaattttgcaatccctcttgctcaaaaccccatactttattacataatacaaaccactgttctgattcatatagcttcaaatttatcacccttactttattacattaccataccattcttttcactgtattctcttcacccccaatgcagaataatcatattacacaaaactggataatttaccacactgattcaaaaccctgcacctattaacttgtaaatacac

SEQ ID NO: 37693 - DNA, 403 bp, Glycine max
  Clone ID: LIB3138-003-Q1-N1-G4
aaaaaaaaagggcggccgctcgcgataacagtgagaacaccatggaattttgattctagcaagcagagcttttgtcagttttctattgaccttctcggtggaggaatcttagtggacaaaactggagattggatcacacttatacaaaattctccaattagtaacttgttgagagttgctgcttggaagaaaggctgtttaatggtcaagattgtgatgtctgggaatgcagcagtcaaaaggagtgattgggcctcattggtacaagtgtttttaacaaacagcaacagtacagagcattttgatgcatgtaagtggacaaaatcagaaccacattcctgggaattgatcttcccaatagaggtatgtggtcctaataatggttttgaaatgtggagttctg

SEQ ID NO: 37694 - DNA, 55 bp, Glycine max
  Clone ID: LIB3138-003-Q1-N1-G7
aaaaaaaaataataaaaaaaaaaaaaaaaaaaaaaaaaaaaaaagaaaaaaaaaa

SEQ ID NO: 37695 - DNA, 382 bp, Glycine max
  unsure at all n locations
  Clone ID: LIB3138-004-Q1-N1-B5
ctactttggcattacttccaaggtttttcttccagaaaaacacaaaaaaatcatctgatagtcaaatagttgtagtttcttggtacttgttttgggaagctttcacaagaggttctttctctggaaattcccgttcaactgggcaaatctcctttggcattttggagtctttgagtgactccttttatcctatcaagcaaatatcctttgccattaactttcctgtttcattagtcaagatatattgttaataaactggcttactatctgtgacaaacatcagtatcaatcagacacattntgcattgtacacaaatatcctttgaagtcaatatccatacatctgttgtggacctcaataccccctggatttcaatgcttc

SEQ ID NO: 37696 - DNA, 293 bp, Glycine max
  Clone ID: LIB3138-004-Q1-N1-C5
gttaacaatcgctcctcagatatcaacaaaaggattcgcacagcacttgggaaaggtaagaaaattgtttttcttactagagttgatccttttccagtagctttactggctgttctttttggcgttaagaatgaaattctgagttctaacgccactaatcctatgctgacgcgacttcttgagaactgtaagagtctcaaatatctggttgatgagtgtccttttgcatttgtgaactagtatgtagtattttattcacttaaataaagcgcattactatgtgcaatgagtgt

SEQ ID NO: 37697 - DNA, 350 bp, Glycine max
  Clone ID: LIB3138-004-Q1-N1-D5
gttagatccacgacaaggtttcgtttcccagattcttttgtaaaaaaaaattcttcctctgcccaacaggtaagttgtaaaaaaatggaccatgacaagactgggtgccaagctcctcctgaaggtcctatattgtgcatcaacaactgtgggttttttggaagtgcagctaccatgaacatgtgttctaaatgccacaaagacatattgctgaaacaggagcaggccaagcttgcagcatcatccattgggaatattatgaatgggtcatcaagcagcactgaaaaggaacctgttgttgctgctgctgctaatattgatatcccagttattccagtagagcctaaaac

SEQ ID NO: 37698 - DNA, 384 bp, Glycine max
  Clone ID: LIB3138-004-Q1-N1-E4
ctgccaccccaatgcaggatgttcaggttacaattgattggttaatttcctctcaggaatgtggttcccagaacctattgtgtttaaatccacaaaatccttttgtgttaaataggtggatgggaaaattgacttttccccagggcacttcccgaagtgttaagagaatgcctctttctataaggggaggagctggtgcaaagaatgctattctcatgaatatgccaaatgctgttctttcaatgtggagatattttgttggagatctcgtctttgaagtttctaagatgacttctccctacattaaatgtacagtctctttcttcataacatttggaaatttggctgatgataccatcaattttgaggctttttcccacaagc

SEQ ID NO: 37699 - DNA, 225 bp, Glycine max
  Clone ID: LIB3138-004-Q1-N1-F4
caactctgaagtgtttttaagaggaagatgaagaagagtagtgggcttaagtgtctttattatgtccttgcgaaaataagtccggttttccagacagtgattgtttttctttggtgttttttcccttttatgttagaccattgttagggcgtttggaccttttattgttctactattaccatttgaacatcgaatggattttaataaatcactttgtatgcgtgc

SEQ ID NO: 37700 - DNA, 187 bp, Glycine max
  Clone ID: LIB3138-004-Q1-N1-F5
aaaatggaattctagctttgaggtcaaaatactcttgctcttacggctgataactaggttgcagttgcccgacaataaggcctcatttgtcaggccagtgtttgttttttcaagttgtagaagcagctcttacatcttacaattttgttcatattttgattttcttatggtaacagtgtttggcagt

SEQ ID NO: 37701 - DNA, 390 bp, Glycine max
  Clone ID: LIB3138-004-Q1-N1-G12
tatcgctctcttatatcttcagacaaaacaaaccaaaagccaaaccacccccaattcccgaaaccctaaccctacctcctcgcccccatgcccatggctgagaaacgaaagcttcgatcctccaacccagaacccaccaaacccgtcgagccacagcaacagaaccatgagactgttgaactcgaccaacagcatcccatccccgaaccaaccctagaagactccaacaccatggccatcgacgaaccaaaacatgaacaagaagaagaaccgcaaaacgccgaaagcgaacaagaggtagaggaagaggaagaggaagaagatgaacaacaagaggagcatgaaccagaaactcgtgaagggcaaccgggaccagaaaccctagaagct

SEQ ID NO: 37702 - DNA, 384 bp, Glycine max
  Clone ID: LIB3138-004-Q1-N1-H11
cggcgatccgtatccttttgatggtccaggcggttcttactcgcgaaaagaaccacggtgatccgtatccttttgatggtccacgtgggatattgggccatgcattcgctcccactgatgggaggcgccactttgacgccgtcgaatattgggtggcgtctggcgatgtcaccaaatcgccggtgacaagtgcgtttgaccttgaatctgtcgcagtgcacgagatccggcacttgctcagattaagccacttgtcggaccttacagccatcatgtattcttctataccacctctgactaggaaggtgaatctagcgccagatgatatttacgggattcgaaagctctatggtgtcaacccccaattattatagcttgggggtg

SEQ ID NO: 37703 - DNA, 219 bp, Glycine max
  Clone ID: LIB3138-005-Q1-N1-A2
tctggggcgcaaatcctgatttataaatgcctctcctctatttccccaccaccgccattttctatatcacagcaaactctttgcaatcaaatggcgccaacaaaaacacccttcaattttcataagctccaactatgcttttacaaaccttcaataaaccttctccgtggcggaattttagtgcacacaactgaacattctatcacacttattcaaacc

SEQ ID NO: 37704 - DNA, 280 bp, Glycine max
  Clone ID: LIB3138-005-Q1-N1-A4
cgaaaaaaaaaaaaatatataaaaaaaaaaaaaaaaaaaaaaaaaccccgcaatttttaaaaaaaagccccccccccaaaaaatccaacaattcaacccaaaaattaattcccgcccgttacctacatgcatctccaccttcccctaaaaaaaagccacatcaaacctcctcataaaaatccccttcccctttccctttccaaaataaccatcccctaacatttccacccaacatcctaccctcaatcataaattcccacccccttttttccccaattaa

SEQ ID NO: 37705 - DNA, 200 bp, Glycine max
  Clone ID: LIB3138-005-Q1-N1-A6
tcggttgggggttacctttttttattaatgaaaaacaatttgaaaaaagcgagggggccgctagaactactactttaagaaaaaaaaaatatagaaattaagaattctaaatccaattttgaattgagatttgaatgaaatattgattgatgttttgtttgaaaattacgacaattcaatttgggtttttatgttgtaag

SEQ ID NO: 37706 - DNA, 313 bp, Glycine max
  Clone ID: LIB3138-005-Q1-N1-B11
ctcgagccgaatcggctcgagcaatcccaaacagtctacaggggttgatattctcttgggaatctctcaagattttgaaattgctggtaatactcttatgccagctttttctgttccacaggctactgccagatcttctgaaaatgcggaatcctctgcatgatctggaatttgtgttttctttcgcttgttcgtttgtttaattcaataaaggaaattaggcatgaccctcttgttgagtatgctctgcctatttgaaaatttccacacctcttttaattgtcgtaatgatgtgtgaagtgtgtgttatttt

SEQ ID NO: 37707 - DNA, 305 bp, Glycine max
  Clone ID: LIB3138-005-Q1-N1-B12
catttccagatatagctttccttctcaattggcgagcttcggcgggactgtgcaaatacaattctcgtaacacatttacgagattgacaagataagcttcttgcatttccagattattacacgaaacataatgaagttgtgaccataaactcgccttgtcctcaggagccacccacaaaacattagacatctgcttaaagtttctcttgagaaaatcacaatctgctaactttctaaattgcaaagttgcactagttttgtcaataccatcagtaatggtgatgttatgacgttctagatcgcga

SEQ ID NO: 37708 - DNA, 310 bp, Glycine max
  unsure at all n locations
  Clone ID: LIB3138-005-Q1-N1-B2
aaacaaanaaaaattttaacccttagccaacacaaccatcatggccgcctcttctattcagcaatcaccattcactggtcaaactgctctgaagcaactcaatgagttcgtccgcaagaccggtggcgccggcaaaggtcgcactaacatgcaccgcaccgtcaagagtgctcctcagagcatttggtatggccctgaccctcccaagtacttgggtccattctcggagcatattccatcatacctgaccggagaattccctagtgactactgatagcacactgatggattatcaatttacccggaaacc

SEQ ID NO: 37709 - DNA, 366 bp, Glycine max
  Clone ID: LIB3138-005-Q1-N1-C11
cggctcgaggctttcggccgctcgcgatctagaactaggaaagaaaaataaaaaaaaaaaaaaaaaaaaaaaaaaaaaaaaaaaaaaaaaaaaaaaaaaaaaaaaaaaaaaaaaaaaaaaaaaaaaaaaaaaaaaaaaaaaaaaaaaaaaaaaaaaaaaaaaaaagaaaacaaaaaaaaaaaaaaaaaaaaaaaaaaaaaaaaaaaaaaaaaaaaaaaaaaataaaaaacccccggcccccccttaaggaataattttaaaccctataataattcaagaccatactttatcccattataaattttttatttgttaacattttaaaaatgtggaaaatccggggcaataattgttaaaattaaaata

SEQ ID NO: 37710 - DNA, 454 bp, Glycine max
  unsure at all n locations
  Clone ID: LIB3138-005-Q1-N1-E4
cacggattncaagcaggtgtatttctcaaacccaaattctctctgagggaagcgagccagatactcaaccttcgagtgcgcaatttcanntctgctgtnntcctgcaatgagtcatcannatctcagcccatggcgtgcaccattcctntgccaatgccacaacnagcataaanggaccatcctaactccccaaatnggctccacgtgtctcttccacaatcatcacaacttccaaacgtacctctgccttctcttcatcaaactcaaatggcaactgcttccagtcagttacagcaaccattgcagacatcggggtttccacctctgcaaccacctctgccaccacagatcagaccaactgcattgccaactttccatccccagtatcccccacaggtgggtgcaaacatgggtttccaacatgctggtacttctcacaatcttccgcaatca

SEQ ID NO: 37711 - DNA, 443 bp, Glycine max
  unsure at all n locations
  Clone ID: LIB3138-005-Q1-N1-F6
attnccccaatnttcaatgtattcttnnattctcgctttgaaatacctaacgcgggccacccnntttgttcggtcgtgctcttatttannttcgtcttcnntttggcagagttacgtgattattcgccgcagcaaanttctccaaggttatttttttccgctgattctaagctcaacgccttgtaccaattcacaccccaacttgatctgtgactttggccttttcagctacatttcaagagcttcttcatttcctttttgttttttgggggttttttgttccctatttttttattctaatacagtgatatcctagtacgtgtttttgtttttgttttaattgcagttgttgtattcgctgctaaactattctgggtctgtttttttttttttttttttgttgagcttcgttcaagtttgaattgaaagttttctcctttact

SEQ ID NO: 37712 - DNA, 408 bp, Glycine max
  Clone ID: LIB3138-005-Q1-N1-G4
ttttagagcaagtgttgatttgcagcgtactcatcgtattagaggaatgattaaaagggtggccacagttggtgtgcctgacaatacaggtatatcattggcctgtgctatgaatagttcttttagggggcgcgccagttctgatatttacaccatctgctctcaagactgtgaattgtggaatcctgcttgcacaaaagcaatgactatgtcatttaatccaaacccgtgttctgatgcatggagtttggaatttctgaagcgtactggatttcattgcgatatcatttgtgtcactggatggactgccaccccaatgcaggatgttcaggttacaattgattggtttatttcctctcaggaatgtgttcccaggacctattgtgttttaaatccacaaaatccttt

SEQ ID NO: 37713 - DNA, 286 bp, Glycine max
  Clone ID: LIB3138-005-Q1-N1-H6
aattcgtctggtggaggacggaaggttccaagcctcatatcacagatttccaaggagagaacgaacccatctcaatctgcttcttccctataatcgaacccttcaaatcgcagatcaaaatcgaagcttattatacagtgatgatgaccgcaaagcacggtttcttatctatgcgaggctcactcctctccttcgcaatcctaacccttctctccttgacctacctagctctctaatgctccaccccgacaccgaatgttgccaagctctccgtcgagaaccttaa

SEQ ID NO: 37714 - DNA, 429 bp, Glycine max
  Clone ID: LIB3138-005-Q1-N1-H8
ctactcccaaaatggcggctgctacgacgtcgtattcttccgcaatcgccgcctcggccgataccctagccaaacctgcttccaccagaacattctccgccaccaacctcgcccttcaatcgtcgtcttccaagctcggtttcaaatccctaaagcttcaccgatgcgccgccgccgccggctccgccctcggcgcgcggatggtgtcggcgccggcggtcaaggcccccgcactgctcgatttcgacacgaaggttttcaagaaggagaagattaacctcgctggacacgatgagtacatcgtaaaaggaggcagggatttgtttcacttgttgcccgatgctttcaagggtatcaagcagattggtgttatcggttggggatctcagggacctgctcaggctcagaatctacgggactctcttgctg

SEQ ID NO: 37715 - DNA, 250 bp, Glycine max
  Clone ID: LIB3138-006-Q1-N1-A4
aggctttccatctggtagccacaggccaccctcatgaggtagcagggcctgttgttgggcttggctacttccttccttggatgaaacctcgttccttttcttcacaaattcaaaaaattctgcaacttggcgtgcatattgcctcttcgcttcaatatccttgctgaaatcaatattgggttcacagtccaaaaccaaagcaggaaccttctgaatgcttgaatgcatgtgaccaccctccagataaaaa

SEQ ID NO: 37716 - DNA, 331 bp, Glycine max
  Clone ID: LIB3138-006-Q1-N1-A9
gagaaaatcctacccattttcttcgtagccaaacactctggaggtctcagttatgtcgtggcaagcgtatgtggatgatcacctactgtgtgaaatcgaaggtaaccacctcactcacgccgctatcatcggccaagacggaagcgtttgggctcagagcaccaacttccctcagttcaaacctgaggaaataactgccatcaataatgactttaatgagcctggatcacttgctccaactggattgtatatcggtggcaccaaatacatggtcatccaaggtgagcctggtgctgtcattcgaaggaagaagggtcctggtggtgttact

SEQ ID NO: 37717 - DNA, 299 bp, Glycine max
  unsure at all n locations
  Clone ID: LIB3138-006-Q1-N1-D3
aaaggattcgcacagcacttgggaaaggtaagaaaattgtttttcgtggctagagttgatccttttccagtagctttactggctgttctttttggcgttaagaatgaaattctgagttctaacgccactaatcctatgctgacgcgacttcttgagaactgtaagagtctcaaatatctggttgatgagtgtccttttgcatttgtgaactagtatgtagtattttattcacttaaataaagcgcattactatgtgcaatgagtgtgtttaaatataaaaaactcaaaaaaaaaanaag

SEQ ID NO: 37718 - DNA, 169 bp, Glycine max
  Clone ID: LIB3138-006-Q1-N1-F11
attgaagatgaagtcttgcccttctctctttaactcccaacacgagacattattattcatgggtggcttcgtcttcactgtcggagctgtcaacagagctcttttgaacctcaatgggtctggacctggggttttaacttccaattcattctttttttggagcagcttt

SEQ ID NO: 37719 - DNA, 159 bp, Glycine max
  Clone ID: LIB3138-006-Q1-N1-F12
gattaagttagagtgattcggtattggctagatctctagctgagatcatcgtgagttcatggatgacttcttgtatagtgtgtggaaacaagagaaatcgctgcactacaattaattagtttggccatgcttactggttatgcacatgttgtctaagac

SEQ ID NO: 37720 - DNA, 54 bp, Glycine max
  Clone ID: LIB3138-006-Q1-N1-F5
aaaaaaaaaaaattataaaaaaaaaaaaaaaaaaaaaaaaaaaaagaggaaaaa

SEQ ID NO: 37721 - DNA, 392 bp, Glycine max
  Clone ID: LIB3138-006-Q1-N1-H1
caaaaagacagagggttaattgtggagtattttggaaggatgtctgacgttgctcataacgttaatcagccccaagagaaagatttgttggagggaaatttttcctttgatattaaatctcgctctagattggaaaaagtttcctctacaaaagcacaatttgttagtggaaaaaccttcaaatatgatataattggtgctggatcacattcttcagaagattttcctgaaaaggaagatcaagaaaaacccaaaaagattgatgccagattgagacaaagaatagatcctcaatacaatgaggttcaggctcagatggaaacaaatttgtttaaattgtctcttgatgatgttgaaactcctaaaggttccatgttggatctgaaaatttc

SEQ ID NO: 37722 - DNA, 263 bp, Glycine max
  Clone ID: LIB3138-006-Q1-N1-H11
ggtgggggtcattttttgcagggctgatgtaggtctacaatccaggattgtattgggtaattgcacctaacaattgggctatgctaatctggatttagtctgttttgggcccattctatcattacacaacgttggataaatggcacaggaaacaccatgattttgatttacaagcaactttgtagttttatgactttcgtggagaatttatggcaaactggatggatacattatcaaatttcattgtactgtgagagtgtgtt

SEQ ID NO: 37723 - DNA, 253 bp, Glycine max
  Clone ID: LIB3138-007-Q1-N1-A3
ttctcgtgaaaaaaaaaaaattttatattaaaaaaaaaaaaaaaaaaaaagaggaaaatttaaaaataaaaaaaaaaaaaaaaaaaaaaaaataaaaaaataaaaaaaaaaaaaaaaaataaaatttatatttcacctataatataataaaatactcctcataaatattatatatccataatccaataaataatcttatttttctcccctccccccctttttattttctcctccccctattttttttcttccc

SEQ ID NO: 37724 - DNA, 73 bp, Glycine max
  Clone ID: LIB3138-007-Q1-N1-B1
aaaaaaaaaaaattaaattttaaaaaaaaaagaaaaaaaaaaggggaaaaggagaaaaaaaagggggggaaaa

SEQ ID NO: 37725 - DNA, 96 bp, Glycine max
  Clone ID: LIB3138-007-Q1-N1-B8
tgaaaaataaaaatttaaaaaaaaaaaaaaaaaaaaaagggaaaagggaaaaaataagggatggaaaaaaaaattaaaaaaatatataaaaatttt

SEQ ID NO: 37726 - DNA, 332 bp, Glycine max
  Clone ID: LIB3138-007-Q1-N1-C1
ggctttagggcagaaatgataaacagtctttgtggtggtgatgaaaaattgatgcgtgaaaggacgcacctgctgttggcttgttgttcaaggatggcaatttgtaagaaagatgtttggagagttgaatgtggaatcccttctggatttccgctcacagttatttgcaatagcatttttaatgagatgctcattagatatagctatgaaaaattactgcgccaggctaaagctccaagtatgtttttacaatccttcaaaaattttgtttctttgtgtgtgtatggtgatgataactttattagtgttcatgaatatgtcaagccttactt

SEQ ID NO: 37727 - DNA, 380 bp, Glycine max
  Clone ID: LIB3138-007-Q1-N1-C11
aaaaaattagcatgcacgcctaacttcggaacccaccgggagacagctgcactgaacaaaacaaatttaaattacgatattcgtttcaagcagaggagaagggacacacagttcacacaataataacatcttcattcgtttacccacttttctttacgaccttaattcttcgattctgtcttagaatgacgaattcactatcttcctgaaaccatgacttgggggggcaggcatcatcattgggccttacccaaaactaaaaaaggcatctttatcacatattacaatttacaaagcttctgtggttgatgggtagaaagggaatccaactggttgatgagaaaagagatgtttttttttttgtctgcaatttggggttt

SEQ ID NO: 37728 - DNA, 208 bp, Glycine max
  Clone ID: LIB3138-007-Q1-N1-C5
tcagctcgagccgattttggtcggctgggatatgcttatgaaccatatgttgagccagttgtgcaagctcaaagtgctgaagtttactttgacttcttccctgtggaggttgatagtcaagagggagttgctcacattggtgaactgaaatctggtgtctatgtttcactgcctacaaaaactaatttgggggaaactcctaaggaat

SEQ ID NO: 37729 - DNA, 198 bp, Glycine max
  Clone ID: LIB3138-007-Q1-N1-D10
ttttcgaggatggtttgtttttattgaaaagaagaagaacctgtgtgcgggagtaacctacgatattgtgcggaacatctcctacaaactcgaagacgatcctcgccactgggctcgctaagcctgtgtctgcaccaaaaactctttcctcgttagggatttctggttggaagaccaaatgctccctcaccatccccc

SEQ ID NO: 37730 - DNA, 378 bp, Glycine max
  Clone ID: LIB3138-007-Q1-N1-D11
ttttcgagaagaaatttattttcacgagctcgagaatgatgacgaagcccgctatgagtgcatttttggtggtagcactcccactactggcggaggtggggcccatggctgaggctgtgacatgcaccccaacagagttgattccgtgtcttccaacaaacacttccggtgctaaaccttccaaagcttgttgcaccaagcttaagcaacaaaaaccatgcttatgtggctaccttaaaaacccctgctagaagcaatattgtaacttttcttatgcccgaaaaaccgtagctttttgtgggatttcctttccaacttgttaattaattaaaccttttttaaaaaaaagggggggataattttaaatttatagataaa

SEQ ID NO: 37731 - DNA, 136 bp, Glycine max
  Clone ID: LIB3138-007-Q1-N1-D12
accgttttgagcggctatcttttttctcacgaagcctcggctgcaggggaggtgcctcaagctggagtgtgactcattacacacaccagcgttgcttaatacaaacaccttcaaacttctacattgtcccacaaaa

SEQ ID NO: 37732 - DNA, 74 bp, Glycine max
  Clone ID: LIB3138-007-Q1-N1-D5
tttaaaaaaaaaataatatatccaaaaaaaaaaaaaaaaaaaaaagaaaaaataaaaaaaaaattttttaaggg

SEQ ID NO: 37733 - DNA, 213 bp, Glycine max
  unsure at all n locations
  Clone ID: LIB3138-007-Q1-N1-D6
agttgcaactcttctaatttatgtggagctgntgncttggactagtgtgaatgacatatgtttggatggaggtttatttaagaagatacttaccaagggggagaaatgggagaacccaaaggatcctgatgaagttttagtcaagtatgaagcatgccttgaagatggaactcttgtggcaaaatctgatggagtggagttcacagtcaatga

SEQ ID NO: 37734 - DNA, 241 bp, Glycine max
  Clone ID: LIB3138-007-Q1-N1-G10
ctaatattgctcttaccaagaacacagtttaatgaggcattttgcgtattgaggtattggcaaattttttgacattcggtcactttagagcaagtgttgatttgttgctgcactcatcgtattataggaatgatttaaatggtggccacagttggctttactgagaattcaggtatatcattggcctgtgctatataatatttttttttaaggtgcgcgccaactctttttttttacacca

SEQ ID NO: 37735 - DNA, 388 bp, Glycine max
  Clone ID: LIB3138-007-Q1-N1-G2
tgttgatcgagataactagaaacagtgtgatgaaaatgaaggtgcttgttttcttcgttgctacaattttggtagcatggcaatgccatgcgtacgatatgttccctctccgaatgaacactggctatggtgcccgtactccggaggtgaaatgcgcaagttggaggcttgctgtggaagcacacaacatctttggctttgagaccattcctgaagagtgcgttgaagcaacaaaagaatacatccatggcgaacaatatagatcagactccaaaacagttaaccaacaagcttacttttatgccaaagaccttgaaatccattccaaggacacatttgtgttcaagataaatggcacccgactctctaatattccatactacaaaaa

SEQ ID NO: 37736 - DNA, 197 bp, Glycine max
  Clone ID: LIB3138-007-Q1-N1-H11
tgtgagcttgagattttagttttgtggcagctgtcttcttcatcaacggtggttttgggatcaatccggttgatagaaaaaccatttccatttccaatggctaacgaaatccctcacgatgtggtagtgtgtcgttccggcgccaacggaataatcggctcgtggttggtccgaacccattcggttaatgagtaccc

SEQ ID NO: 37737 - DNA, 305 bp, Glycine max
  Clone ID: LIB3138-007-Q1-N1-H3
ctttgatttgaattggacttatcgttacaagatgctttaattgagcggactcgtcatgcgtgctctcggaatgggactatctttgtacgctcgcaaggatcattctaccgatgctgctctgatttgcactcatcttcttatctatattggtggatcgttcagtgtaattggaacacgagtctgttttttaaggcttcagatgcttatgccgatcttgccatggtcattgcaatgttggctctctttaccaagcttggtaggtgccatgggtactacgattgcttgagccaattggactaacacta

SEQ ID NO: 37738 - DNA, 62 bp, Glycine max
  Clone ID: LIB3138-007-Q1-N1-H9
cacagttttcacttccattttctcaaaacattcaacggggggcggatttttaaaggggacgt

SEQ ID NO: 37739 - DNA, 243 bp, Glycine max
  Clone ID: LIB3138-008-Q1-N1-A3
caatccccttctttcttctctttctatccaaattctccaccagccatggctttttcttcagcaacagcttcctccaaactcatactattcccccatgcatcatcatcctcttcccttaattccacacccttccgctccttcaccaccaacacccacaaactaacccctctctcctcctccttcctccaccccaccaccgtccttcgtcgcaccccttcttccaccaccaccccgcgttatacc

SEQ ID NO: 37740 - DNA, 389 bp, Glycine max
  Clone ID: LIB3138-008-Q1-N1-A9
caaaaaaacaagttttttttaactaacaaggagaaccaaacgcgttcctttatgatctcttgcccggctgttaccactgtcaaccgtgccggtgccagcatggttgctccattcactggcctcaattccatggctggcttccccaccagaaagaccaactatgacattaccttcattgctagcaacggtggaagagtgcaatgcatgcaggtgtggccaccagttggcaagaataagtttgagactctttcctacctgccagaccttgatgatgcacaattggcaaacgaagtagaataccttcttaggaagggatggattcctcgcttggaattcgagttggagcacggtttcttgtactctgagcacaacagggcaccaggatacta

SEQ ID NO: 37741 - DNA, 381 bp, Glycine max
  Clone ID: LIB3138-008-Q1-N1-B6
ctgaaaaaaatttttttataaacccaaaaactaataaaaataggaaaggtcttttataaaaaaaaagaaaccttaaattcatacaaatatacaaaaaataccaaataaataaaaaaacaataaaactgccccccccctcctttttccctctccacccctcatattaatcccttcccttcccctttagccttcccaattttccctttatcaaaccctttttaaccttccctcaaccttggaccaaccttttccctgtaaaaaatttttaccccctcccatttccccccatcatcctacccgatcccttaaaatttaaaccctggggccccctattaattaccctccccccttttttttttttcccctccctcccccttttcc

SEQ ID NO: 37742 - DNA, 218 bp, Glycine max
  Clone ID: LIB3138-008-Q1-N1-C5
aagcaaatcgtacttttgttaattccatcaatttttaggcgtgttgggctcattctgtaacaggggggatagacccaagaaaaattttttttgaaattttcacatgaggtattttttacaatttggttatctaatgtacatcctgcaacatccttattcacattatgttagccatatatccatgcaataggacatagatagttgatagttctacaata

SEQ ID NO: 37743 - DNA, 281 bp, Glycine max
  unsure at all n locations
  Clone ID: LIB3138-008-Q1-N1-C6
ttgccaactttctttttttctggttaggggatttgaatgatcgggtcaatttgaaggaaggggaggttcgaaagctggtanctctaaagaattgggatgaactgatgaattacgaccagctaagtaatgaattacgtagtggtcatgtgtttgatggatggaaagaggggttgataaacttcccacccacatacaagtatgattttaattctgataaatacatcggtgagaacccaaaagaaggggaaaagaagagatctccaccctgtagtgatcgtata

SEQ ID NO: 37744 - DNA, 210 bp, Glycine max
  Clone ID: LIB3138-008-Q1-N1-C8
tatccttgaatcatgttataaaggataggcaattttgccgtggcaggctagtttacttcagattctatgtcaatcacagcttacattaaagctaaaaaacaaaaataaagaacttcatttttaaaaaaaaaaaaaaaaaaaaaataaacaaaaaaataaaaaataaatataaaaaaaaatcataaatatattacaaaaaaaataatacat

SEQ ID NO: 37745 - DNA, 330 bp, Glycine max
  Clone ID: LIB3138-008-Q1-N1-D7
tccgaactgttattataatgcctctttctatatggggaggagggagtgcttagaatgctagggtggtgaatattccaaatgctgttctttcaatgtggagatattttgttggagatctcgcctttgaagtttctaaaatgacttctccctacattaaatgtacagtctctttcttcatagcatttggaaatttggctgatgataccatcaattttgaggcttttccccacaagctggtgcagtttggagagattcatgaaaaagttgtattgaaattttcacaaaaaaaaatttcttacagctttggtcaactcatgtgcgtcctgcaac

SEQ ID NO: 37746 - DNA, 366 bp, Glycine max
  Clone ID: LIB3138-008-Q1-N1-E7
tgttacaggattttttcccgtgacattttgtacccaaaacaaacgcgcttcttagctgcgcttcatgccttttccatttgtttctagtgttattgtaaagaatctttgtcttgttttccacatttttatctgttgatatatagatatatatataatatatatctatcatttttctaattttctgccattttttttagtttcctatactatcatattgactagaatatgaaaaagaaaaaaaagattctaaagatatataactaatattctgtagaataatcaaaaaagatatttaaattcaaataaattttagatagaaaaataaccttaaaaaggaggttttggaatgccagatcttaaaacatt

SEQ ID NO: 37747 - DNA, 344 bp, Glycine max
  Clone ID: LIB3138-008-Q1-N1-F6
aagctcttccataaattggtggtgcctctcttccatctcccgaggggatacctctctcaggaaggccacattactcccttccttcttcacaacccttaacactccttcttctccttccttttcatcttccttcccctctctcattcaagacatgcctgtttttgctgcccctacccccatcatcaccccaactgtgagagatgatatggcaaatgaataccagaaagctattgaagaacctcaaaaatcgtcgatggaaaagagtgaactcaaagcgacaacttgttgaaaaagttgagcatataacaagcttctctaaggacatcattcatctgatggcattc

SEQ ID NO: 37748 - DNA, 338 bp, Glycine max
  unsure at all n locations
  Clone ID: LIB3138-008-Q1-N1-G3
cgtttacatagctatttttaccaatacaacanccataanaaagaaagaggccttattaagacaagtaatcctaacaaacagctcctcttcaaagcatttttatgcatgtaaatgaacaaaatcagaaccacattccggtcaaaatatctatccaatatacagttgtggaactaataatagctttgaaatattgatttctgagtagccaaatcaaactttataatcatttgaatttccatatcccaataccaaacagtctacattttttaattatctataataaatctctcaagaactctaaaaatagcaaactaatacttcttttgccacctttattt

SEQ ID NO: 37749 - DNA, 343 bp, Glycine max
  Clone ID: LIB3138-008-Q1-N1-G4
cgtgcacaaagcctcttttaccgtgtcaacatgaaatataagggaaagaatgtttttaagatgccaaatccaaccactgctgtcttcacaaatgtaatataaaacatgaagatgctgcccaacttaatggaaatggatgcctcccaagctaatggatctgccactgtcgctgacattttcaactcccatgatgtggtcagcttgagcaggtctgtgattgtgaatttggcataattggtaatccgaaaagaacccttgcttgttgtgctctatgcaccatagtgccgcttctgtcacgctatagaagaatcatatttttatttggcacaaaatttaccttttt

SEQ ID NO: 37750 - DNA, 220 bp, Glycine max
  Clone ID: LIB3138-008-Q1-N1-H5
gctgtgtctatttgctggcctaagttaggtgtttcttatgtggagagattgcatactagggctacccacaaccttcttgatcgctcatgaaatgtagaatatatcaaatgtggctacacgttattaggtgttaaacttttatacacaaactttgcatgcaaactattaaatacatttatgaaactaaccatacacatactgttagctgaaaataaaacaa

SEQ ID NO: 37751 - DNA, 344 bp, Glycine max
  Clone ID: LIB3138-008-Q1-N1-H8
gttctagatcgttagcggccgaccccttcattaagttgttgagataattttctatgggagatttcattgaaaactcaaataattaaaagtatcattgactctcatgcattcgtgactataaatttcggtgacctacgaagcaacctggtatattaatttggtttcagctagtcttcaatatacacttggacatggctcaaaccaatctttgttctatatctgtaccttttcttattctattaatgatcgcctttaatttcagtgcacagattactccagttagtgcaggtttgtctttctcattgaaaaatgcaaagatgtacaaaagcatatatggtagaatt

SEQ ID NO: 37752 - DNA, 106 bp, Glycine max
  Clone ID: LIB3138-009-Q1-N1-A1
aaaaaaaaaaaattataataaaaaaaaaaaaaaaaaaaaaaaaaagaaaaaaaaaaaaaaaaaaaaaaaaaaaaaaaaaaaaaaaaaaaaaaaaaaaaaaaaaaaa

SEQ ID NO: 37753 - DNA, 281 bp, Glycine max
  Clone ID: LIB3138-009-Q1-N1-A3
cagatatcaacaaaaggattcgcacagcacttgggaaaggtaagaaaattgtttttcttactagagttgatccttttccagtagctttactggctgttctttttggcgttaagaatgaaattctgagttctaacgccactaatcctatgctgacgcgacttcttgagaactgtaagagtctcaaatatctggttgatgagtgtccttttgcatttgtgaactagtatgtagtattttattcacttaaataaagcgcattactatgtgcaatgagtgtgttt

SEQ ID NO: 37754 - DNA, 303 bp, Glycine max
  Clone ID: LIB3138-009-Q1-N1-A5
gttagagttagattaacacaacaacaagaaaaaggtaagagaattgtttttattactagagttgatccttaaaccaaaaactatacatggctgaactttttggcgttaaaaaatgaaattctagaagttctaacgccactaatcctatgctgacgcggcttcttgagaactgtaagagtctcaaatcctctggttgatgagtgtccttttgcatttgggaactactatgttccattttattcacttaaataaagcgcgttactatgtgcaatgagtgtgtttctgtgtaaaataaataaccgt

SEQ ID NO: 37755 - DNA, 265 bp, Glycine max
  Clone ID: LIB3138-009-Q1-N1-C10
ttgcaaaaatttttattttaattcccaaaaaaaaaaaaaaagtgtggaatatttataaaaatggggtcaacaaaaaacaaacaccttacactttaaaaactaactatttaactattttaacaaatgccgttgcccccccttttactacctccttccccctccattatattcttacccattcctcttcttctacctcattttctttatatatatcttttttaccatttcttgtattcatttccatattattttacttctcaaattt

SEQ ID NO: 37756 - DNA, 191 bp, Glycine max
  Clone ID: LIB3138-009-Q1-N1-C7
caggttaaactaatatctgacaatcttaaagatgtaaaaaagggagaactacttgttgcttgccgcaaaccagtttacattgtatacaccgtacttgacggtggcagcatatctatactgcggcaaggactacctgaagccctcgctttgtccgatgggatacccgacagaacctacgttatggacgattt

SEQ ID NO: 37757 - DNA, 392 bp, Glycine max
  Clone ID: LIB3138-009-Q1-N1-C9
tcgcaagctatttttaagaatcccatgctaggataaagattgtgggtattgatcaagatgtgtcgtttgtaccaaacaagttccccgagagacagccgattgggacggcggcgcagatccaagacgacggcaaggactaccatgatccgtcaccggcgccgtttgttgacccgacggagtttacgtcatggtcgttttacagagcatggatatgcagagtttgtggccactattctgtttctctacatcaccgtcttaaccgatatgggagtcgccttggctaagtctaagtgtagtatccgtttgatttaaggaattccttgcgccttctgtggcatgatcttcatcctcgtttactgcacctatgtcatttcaaggggacacattaaccc

SEQ ID NO: 37758 - DNA, 368 bp, Glycine max
  Clone ID: LIB3138-009-Q1-N1-D10
cagtttttgtgttattttgaatatcacaaaatcaattcccctgggctggttccctgctctaacagcatcatcacacaataaggatttctactaaatcccttttctacccttaagcataatctcaaaggtaagttggcctcatgattcttcttttgggcttttcctcaatctgcaccttggtatgatctgcttgcacctctgctgaatattctatttgtacccctgctctgtggtctgtggattacctatcatctctctgcccttgggaaatcaccttgtcctcaaagtgatagtcattgcaaagaatagaccaattctcccaaaatgtatcatttttggatataccatgccattgaaccaaaactttc

SEQ ID NO: 37759 - DNA, 236 bp, Glycine max
  Clone ID: LIB3138-009-Q1-N1-D11
aaacatatttttttttaatggtgcatgataattcaaaatctggtgtgctttttaattttgtcattcccgtcaaattgacaaccataaacaatatgtgtgcatatgtgctcaatccttatctttcaagttctcgtaatttgttcaccattccttattccatttcacatcaaactgttttgaatcaaatttcaacattgaaaacaccatttaattatcatactaccaaacaaaacttt

SEQ ID NO: 37760 - DNA, 60 bp, Glycine max
  Clone ID: LIB3138-009-Q1-N1-D2
caagataatggatttattcaaagatattttgggcggtcgtcggctagagcactcgataca

SEQ ID NO: 37761 - DNA, 66 bp, Glycine max
  Clone ID: LIB3138-009-Q1-N1-D3
aaaaaaaaaaaaataaaataaaaaaaaaaaaaaaaaaaaaaaagaggaaaaaaaaaaaaaaaaaaa

SEQ ID NO: 37762 - DNA, 323 bp, Glycine max
  Clone ID: LIB3138-009-Q1-N1-D9
taacaacaactttttttttttctcccctcctccaaaaccttcggtcccttaaaaaccagaaggctgccaaccaatcctcaacacacaatacattgaatggttctacgttaacacctacaccaaacaatcacaatgggataaactcacctaacccttctaccctccatccttaaactctgcgctctcaccatcagactgacccccagcatacgatcactccaccagtcaaaacttttttccttaaaatacgtgccccttatgaacaaataatccttactacaattattgttattttttcaacatcacctaagacaaacattttt

SEQ ID NO: 37763 - DNA, 143 bp, Glycine max
  Clone ID: LIB3138-009-Q1-N1-E11
taactcttaatttttatacatgaatacggaaacgcaaccaggggcggcttcctattggggctgcaggctcacccattaatttcacctatctgtccaaagcaccattatatgaccccactgtaaatactgtttctttaaataaa

SEQ ID NO: 37764 - DNA, 128 bp, Glycine max
  Clone ID: LIB3138-009-Q1-N1-E9
aaaaaaaatttatttaaaaaaaaaaaaaaaaaaaaaaattgtgaatataaaaaaaaaaaaaaaaaaaaaaaaaaaaaaaaaaaaaaaaaaaaaaaaaaaaaaaaaaaagggcccccccccccctatta

SEQ ID NO: 37765 - DNA, 212 bp, Glycine max
  Clone ID: LIB3138-009-Q1-N1-F12
tagaaagcctttttcttctacaactccaaacacaaaggcgtgtgattcatagctgcctgcgcctccactgacagatctgtcaacatatctcttttgaacctgaatggttctggagcttgaacttcaactaccatttcagtcttctttttgaccagcttgaaaacatgtattgccttaagggttccctacaccatagattcctgtggaagctt

SEQ ID NO: 37766 - DNA, 352 bp, Glycine max
  Clone ID: LIB3138-009-Q1-N1-F8
aatctgatgtcgagcttaatgtcaaaattttttttcttgccactgcacaaggtctcaccgcgggtggtctctgtataaacccaagcctcctcacgagaattaccagacatttgcgctcaaaatagaggtttctgacaccctcttgcctttaactataccaggcagtgactattaggccaatggtgtgcccctcttctgcctctaccatggttgaaaccaaaaacggagagtggtttcttggtttggccagcccaacttaccttaatagcacactttctggtgacaatagatttgaccctctgggactatctgaggacccatagaacttcaagtggtacgttcaagccgacct

SEQ ID NO: 37767 - DNA, 213 bp, Glycine max
  Clone ID: LIB3138-009-Q1-N1-G11
tagagacaaatcatatttttcatgtaaatatttcttttcctcgtggtttttcttatccaagtgcgtccaagttcaaataggacttgcttgtaacattcttaaaattcttaatgtcttatgatcaaatagaactatccaatttttaaattattatactatatttttcatatatcactgtttttctttataattttgagttatattttacacttt

SEQ ID NO: 37768 - DNA, 393 bp, Glycine max
  Clone ID: LIB3138-009-Q1-N1-G5
gttctagatcgcgagcggccgcccttttttttttttttggttggttttacttgaacttcattactaaaagagtttatatatagtaatgaatacagatactaaaatgtttgagacacgcctatagctcaattcagacaattagttcaagaacatgcatttgatgttccatgacatatttttactaacccacattagcttccaaggtatatatgttcagcttgataccatgaacagtgatttaacttttattgctacaatggttgcacattggctaccatctgtgacattattgttctgtgtacttgttctatcattcaatttcaggcttagtcctatgaacataaattatttaccaatctcgttttggatcctaatgacatccatgtatgattt

SEQ ID NO: 37769 - DNA, 262 bp, Glycine max
  Clone ID: LIB3138-009-Q1-N1-H1
gcctctcccttcaaattccggcccaaaatgccacacttcattctgggggggcatcaattggttgcaagagtggcaaccatgcttctcaatcgaaattcacaagctcttcattcttgccctgggttaaaggtgatggtcgcgctctaaaagcttggaagaaaaaacttgtgccatcttccatttacttggtgcctcgagccacactcacatttgatgccccaacttccaactcagacaaaaccaaacaaaggaagcacactgt

SEQ ID NO: 37770 - DNA, 277 bp, Glycine max
  Clone ID: LIB3138-009-Q1-N1-H11
aatcaccaacctttttataaattatcaaacaaaataaaccttcgtcgattttctaaaactgcgctcacacacaaaaattctatcattaaaacttttcaatgaattatcctctaccaattcttttccataacatatatccttccagccaattactctacaaaaccttcatcttaaatgatacattgtacaacatatcatgatatccttacccactccttcttacattacttttgcagtctataatccctcctcaaatttaaataatattattcttaca

SEQ ID NO: 37771 - DNA, 312 bp, Glycine max
  Clone ID: LIB3138-009-Q1-N1-H3
tcagcctcctaaggccaagccaggttattggcaccacctccttatggtgggggtgattaacctggaatgccagaagcctatcctgtgaatctctcgaaagtgtgtcaagaaatttgttttcgcacaccccaaggaaccctccccaattgagaaggaaagctctctctcgtattgaatggctgcaaaaagctgatgtgcctaccatagcacagattgaagagttccattcgatgcagaggatgatgaatgctcctgattcaaatgataatattgatttactgttgagcattgatttgttgggtttacaaggag

SEQ ID NO: 37772 - DNA, 208 bp, Glycine max
  Clone ID: LIB3138-009-Q1-N1-H4
gttttgtctctttggtagcataggttagttgattcttatgtaaagagaaagcataccacatcaaccaacgagcttcttgatggctcatgagatgtcgaatttattaaatgtggcaacacgttattcgatgtaaaacttttgtccacaaactttgtattcaaactattaaattcatttatgaaaataaccatacacatacttttagttg

SEQ ID NO: 37773 - DNA, 181 bp, Glycine max
  Clone ID: LIB3138-009-Q1-N1-H5
aagagaacaacttgatattatcaccatcaatcactcttggcgcgttcagcaagaaacccgcttatcatatctaccagaaggccaggccaattcttcagctgcatatgttactgccccaccacctatgggttgtccttttaagaagggagctatctaacaaatggtaccagaggaaaccaca

SEQ ID NO: 37774 - DNA, 324 bp, Glycine max
  Clone ID: LIB3138-009-Q1-N1-H7
caacaccttacgcaaaaagaaatatggctctctctgtgtggcacgttataatgaagatcagcttcaactgtatacaaaggatttactgcttaaaatacaaaaaggtgttaaccctagggtatattcctcttccttttttttaagggaggcctcgccctaatcatcatgtctgctgcatgcttattcacctttcatttggaaagagcaaccgcttgcatgtgaaaaaatgtcttgggtcactcaacataaacatgttgagcttgtatagcatctctcgagcagtagcatgcatttcgacgcccaagaaatggtaaagattactga

SEQ ID NO: 37775 - DNA, 197 bp, Glycine max
  Clone ID: LIB3138-010-Q1-N1-B8
gcacactagaaattattgcatttggataatgatgatgctgtgtgcaataagtagacaccactggtttgaagtgcaacattgatgccagtttgaagattcttgagtttttttcaaggtctttttgtatttcaaattccatgttaaactggaagttgaggcgatcaaattttctaaatttttcttctgtcatgtttccc

SEQ ID NO: 37776 - DNA, 65 bp, Glycine max
  Clone ID: LIB3138-010-Q1-N1-C12
aaaaaaaaaaaaaataaaaaaaaaaaaaaaaaaaaaaaaaaaaaggaaaaaaaaaaaaaaaaaaa

SEQ ID NO: 37777 - DNA, 149 bp, Glycine max
  Clone ID: LIB3138-010-Q1-N1-D7
caggacgttacatgcatttaattttgcgaacctttctataggcgagggattttgtagaggagagacatttttctggaagcgtcattaacggattaattttgaccaccaattgtggggtgagatcaactctttctagttagatggatcca

SEQ ID NO: 37778 - DNA, 389 bp, Glycine max
  Clone ID: LIB3138-010-Q1-N1-E10
tctagatcgcgagccggccgccctttttttttttttttttttcgcataacaccactttattctaaaacttcaaacacaacacatacttattatttattgatacatgtattacagctatctctgcttgaaggttatgcatgttgatctcacttgcagctgcatgggtcgcaagtgcagtttgatccacagttgcagccaccgttctcagctgcaacacccatttaagcaccttcaaatggggctttaacgggccaacacccaaaactagagtcttatttgtgaacttctcaacgtagtcaaaagagtacttgttgcaactgcagttgctgccacagttgcagctgctttcacacccacaggttgacattttcaaaatctatgaattacat

SEQ ID NO: 37779 - DNA, 102 bp, Glycine max
  Clone ID: LIB3138-010-Q1-N1-E9
aggaaattaggcatgaccctcttgttgagtatgctctgcctatttaaaaatttccacacctcttttaattgtcgtaatgatgtgtgaagtgtgtgttatttt

SEQ ID NO: 37780 - DNA, 197 bp, Glycine max
  Clone ID: LIB3138-010-Q1-N1-H2
atctagaataaaaggcaaatttagtgtctcaatccctctaacaccaccggtcccgtgcctattcttatcttgctttctcttcactccccactccctatagctcttccttactctacttgtatgtctaaacattccctttcaaaaacatgctcctatttgcatcttcctcccggttatggatgccgctgagctctcca

SEQ ID NO: 37781 - DNA, 313 bp, Glycine max
  Clone ID: LIB3138-010-Q1-N1-H3
tagcacttatacaaaattctccaattagtaacttattgagagttgctgcttgggagaaaggctgtttaatggtcaagattgtgatgtctgggaatgcaacagtcaaaaggagtgattgggcctcattggtacaagtgtttttaacaaacagcaacagtacacatcattttgatgcatgtgagtggacaaaatcagaaccacattcctgggaattgatctttccaatagaggtatgtggtcctaataatggttttgaaatgtggagttctgagtgggcaaattatactttatggcatttgagttttctttattg

SEQ ID NO: 37782 - DNA, 135 bp, Glycine max
  Clone ID: LIB3138-010-Q1-N1-H4
tagggaaaatacgcattaccctcttgttgagtatgctctccctatttgggaaggtccacacctcttttaattgtcgtcatgatttgtgaaatgtgtgctattttaaacaacaaccttatctccaaaaaaaaacat

SEQ ID NO: 37783 - DNA, 332 bp, Glycine max
  Clone ID: LIB3138-010-Q1-N1-H6
ctttgctattacctctttttccaaactctaaaaattggtagttggacaaaaccaaaccaaaatggccgcaacctctggctcatccaccatgatatcaacaccagccttatctccaagcacaagcattcaaaagcaccatcatttgaagccatccaacgtgtgctttcaaagccttagacccctcacaaggttcacaaccaaagtgagcagcaccaccaaaagggttattccaaaaggtggtgtcggtgttagagctgaactcaacttcacacttgtcataagccttagcactgggctctccctcttttttggggaggttttgtgtttctttc

SEQ ID NO: 37784 - DNA, 193 bp, Glycine max
  unsure at all n locations
  Clone ID: LIB3138-011-Q1-N1-B2
gtgaaaaagttgcagcatgagataaaacttgaataagttcatatatgtgaagtccgatcaagcatcaattctcatattgctgtttgtgatcttttttcattttcattttttccaccttttcttctttttattacagnttatgctgtatttgtacccctatcaaggcacatgtattttaattatgctgtttgtt

SEQ ID NO: 37785 - DNA, 194 bp, Glycine max
  Clone ID: LIB3138-011-Q1-N1-B3
aaaaatctgatttgcctaccattacacccattgaatagtcccacccttgccgttcgattatgcatgcctcctcctaatatggtattttagattttctcatattcatattttcttccgagaaactttgagctcacggctcatgctctatcaaaacccctatcgacgatcatcttttttagtcacacccacaataa

SEQ ID NO: 37786 - DNA, 70 bp, Glycine max
  Clone ID: LIB3138-011-Q1-N1-C2
aaaaaaaaaaaaaaattttaaaaaaaaaaaaaaaaaaaaaaaaggggggggaatttaaaaaaaagaaaaa

SEQ ID NO: 37787 - DNA, 416 bp, Glycine max
  Clone ID: LIB3138-011-Q1-N1-D6
tgggttagcggggttagagcaaaagcttggctaataataataataataatagggataagaataataataataataatgaaaggcctactagggttcgacaccaacacagcctttccatggatggctccatccacccggatatgctgctctccgctaccgctgccgctgccgatgatgtctccggtggtggcatcgacaccaaaaaggctatgtctgctgacaagcttgctgagcttgccttagttgatcccaagcgggctaaaaggatatgggcaaatagacagtctgctgcaagatcaaaagaaaggaagatgcgttacatttccgagcttgaaaggaaagtgcagacattgcaaactgaagcaacttccttgtctgcacaattgactctcttgcagagagatacaactggaatg

SEQ ID NO: 37788 - DNA, 389 bp, Glycine max
  Clone ID: LIB3138-011-Q1-N1-E1
taaaaagccaggaggttggaaggccatgccttttattttaggcagtgaaacgtttgagaggttggctgcatttggtttgtttgctaactttatggtgtatttgacgagagagtttcatttggaccaagtttatgcttcaaatattctcaacatatggagtggtatcaccaacttcttccctttgattggtgccttcatttctgatgcctatgttggtcgcttctggaccatagcttttgcttccttttcttctctactggggatggtggtggtgactttaacagcatggttaccagagttgcatcctccaccatgcactcctcagcaacaagcattgaaccaatgtgttaaagctagcacacctcacctaggtgctctacttacgggac

SEQ ID NO: 37789 - DNA, 360 bp, Glycine max
  Clone ID: LIB3138-011-Q1-N1-E11
aaaataacacacacttcacacatcattacgacgattaaaagaggtgtggaaattttcaaataggcagagcatactcaacaagagggtcatgcctaatttcctttattgaattaaacaaacgaacaagcgaaagaaaacacaaattccagatcatgcagaggattccgcattttcagaagatctggcagtagcctgtggaacagaaaaagctggcataagagtattaccagcaatttcaaaatcttgagagattcccaagagaatatcaaaaactgtagactggttgggattgtcaataaggaaactcaaatgccatgaagcttgatttgcccactcagaacctcgagccgaataggttcg

SEQ ID NO: 37790 - DNA, 224 bp, Glycine max
  Clone ID: LIB3138-011-Q1-N1-F11
gatgaagaggccaaggataagttgaagcaagttcttctgtgggggcgtgcatttactctaagacttcaaggcaaaaactaagcttgaagttactttaattccacgaattattgttgaaataagctgaggatttagaaataaaccaatgttattctgaacgtgaatgatgccactatgtataaggatggtttttaaaataagaaggacttgatttaaatggtttg

SEQ ID NO: 37791 - DNA, 244 bp, Glycine max
  Clone ID: LIB3138-011-Q1-N1-F4
ctctttttcactattctctccctatcccaaaaattccacacctctgcaaattttacaaaccctgttttaaatctttgctattttcacataaaaattaaaacaaatctcaaaaattatttacaaaaaacattaaactcataatcttctatttaaatatactccaattttaccctcaaactaatttcaatacaaaattatatactaatcttaaatctaaacttcatcgttttctttttaataccac

SEQ ID NO: 37792 - DNA, 204 bp, Glycine max
  Clone ID: LIB3138-011-Q1-N1-F5
aaaaagttctattgtttttttcacaagaggaatttcttacagctgggtcaactcaggtgcgttctgcaacaactctgttggctgatgggtgtccatatatgtatgcaatggtgcattatagttcatcttctacaataccaggtgattttgtcattggtgtcatgtttacaaccataaacagtctttgctcatatttgcttaata

SEQ ID NO: 37793 - DNA, 89 bp, Glycine max
  Clone ID: LIB3138-011-Q1-N1-G12
aaaaaaaaaaaaaaaaaaaaaaaaaaaaaaaaaaaaaaaaagagaaaaaaaaaaaaaaaaaaaaaaaaaaaaaaaaaaaaaaaaaaaaa

SEQ ID NO: 37794 - DNA, 259 bp, Glycine max
  Clone ID: LIB3138-011-Q1-N1-G6
acgaaacatggcatgtttggtggcactccaacagaaccaactatgtttctctaccttagcttcctctctttctgacttcagtggaaccagacttcaaactcaacttcagttcaagagaaagcaatgccatccaaaagggtctttctacgtctccgcatcgagcaccaagaaaatcctaataatgggaggcaccaggtttattggtgtgtttttgtctaggctccttgtcaaagagggtcaccaggtgactttactcaca

SEQ ID NO: 37795 - DNA, 172 bp, Glycine max
  Clone ID: LIB3138-011-Q1-N1-H2
gaaaatgggtaaacgttagaaatccagttggacaggcctttataagagtaataaaaaagctgtgttgtattgtgctcgctcaagtttgctttgggaggaatagggtgtcacagagcctctctcttatttcatgacaattatcttttaatgtcactttccagctttagtgttt

SEQ ID NO: 37796 - DNA, 402 bp, Glycine max
  unsure at all n locations
  Clone ID: LIB3138-011-Q1-N1-H3
ggacaatttgtggatgctgcttcagggaaaacttttccaacatatgacccacgcacaggagaagtgattgctcaagttgctgaaggtgatgcanaagatatcaaccgtgcagtatcggcagctcgcaaggcctttgatgaaggaccttggccaaaattgactgcttatatgcaagataatactgcgctttgctgatttggttgagaaacacggtgatgaacttgcagctctggagacatggaacaatggaaagccttatgaacagtctgccactgctgaattaccaacgtttgtgcgtttgtttcgttactatgctggttgggcagataaaatccatggtctgacagtgcctgctgatggaaattatcatgtggagacattgcatgaaccaattggtgttgc

SEQ ID NO: 37797 - DNA, 325 bp, Glycine max
  Clone ID: LIB3138-011-Q1-N1-H5
tgatgaaaagggttgtgaatgcagagaagtgagatacactaagttatccgggtaaatacactctaggtaggtggcaagataagtgtctaaccttagtaacattgccacatattgtgttcattttggaattgtgccactaaaattctattcaatgcatctatggctgcctcttcttatgctatgcaatcaatcctggcaaaccctctgatccgcatttacagcgggtctagggtgaaccaatttggcgttcctgctttgcacatgagaaggaatgttggcctgagagataggtccatggctaaggaagaacaaccaagtgagtctg

SEQ ID NO: 37798 - DNA, 300 bp, Glycine max
  Clone ID: LIB3138-011-Q1-N1-H6
tgcttgaaattgataagatgtatagtgtttttactggacaggcattagagaatgtgcaacagtacacacagagggaccgttttctgtctgtttctgaggctttggagtttggtcttattgatggtgtcctggaaactgagtattgaatacagtttatttgcaggatatcttagaggttgaaaatgctaatttttgtcaaattgatattgcagaatttcattcgttaatgataatttgcaaatgtggaggattgtattttcttcttagttccccaaaattatgctattgttgaaagttaac

SEQ ID NO: 37799 - DNA, 150 bp, Glycine max
  Clone ID: LIB3138-011-Q1-N2-C11
gttgtttttaaaaaaaattatttataaaaaaaaaaaaaataaaaaaggggagggattttaataaaaaaaaaaaaaataaaaaaaaaaaaaaaaataaaaaataaaaaaaaaaaaaaaaaaaaggccgcccccccactattaacctcttcc

SEQ ID NO: 37800 - DNA, 67 bp, Glycine max
  Clone ID: LIB3138-011-Q1-N2-C9
ggggttattccggccattattccattaaagagtgggtggccaggaaacaaccacggttgggggtcct

SEQ ID NO: 37801 - DNA, 77 bp, Glycine max
  Clone ID: LIB3138-011-Q1-N2-D4
ctcgagccgaatcggctcgtgaaaaaaaaaaaaaaaaaaaaaaaaaaaaaaaaaaaagggcggccgccaacataaaa

SEQ ID NO: 37802 - DNA, 309 bp, Glycine max
  unsure at all n locations
  Clone ID: LIB3138-011-Q1-N2-E8
ggaatttatatgcccntctttgtggcacccttccttttgatgatgaaaatattccaaatctcttcaagaaaataaagggtgggatttacactcttcccagtcatctatcacccggtgctagagatttgataccagggatgcttgtggttgaccctatgaggagaatgaccatacctgagatccgtcaacacccatggttccaagctcgacttccacgttatttagctgtgccaccaccagatacaatgcaacaggccaaaaagattgatgaggagatccttcaggaagtggtgaaaatgggatttgaca

SEQ ID NO: 37803 - DNA, 143 bp, Glycine max
  Clone ID: LIB3138-011-Q1-N2-G10
aattcggtcggctcgaggtgaaaaacccgttgccagaaaagtattccttaatctttcgaggcctatgtttcttttaaaactatttgataaaaccaggaaatcgttgtggtttgggggatagtaaactcaagtttaagtcttat

SEQ ID NO: 37804 - DNA, 416 bp, Glycine max
  Clone ID: LIB3138-011-Q1-N2-H4
ccctagttgtcaagtgggatccacccaaaaaacatgggatgtgcctgtcacgactcttgagagaggaaacacggaacccctgtggctttcccctcacaggtatttgcaatagcatttttaatgagatgctcattagatatagctatgaaaaattactgcgccaggctaaagctccaagtatgtttttacaatccttcaaaaattttggttctttgtgtgggtatggtgatgataacttaattagtgttcatgaatatgtcaagccttactttaatggttctaaattgaaaagctttctagctagtcataacatcaccattactgatggtattgacaaaactagtgcaactttgcaatttaaaaagttagcaaattgtgattttctcaagagaaactttaagcagatgtctaatgtt

SEQ ID NO: 37805 - DNA, 395 bp, Glycine max
  Clone ID: LIB3138-012-Q1-N1-A6
ttgagagttctagatagcgagccggccgacctttttttttataggttggggtagttttttgagatttatgaaaaatttttttttaaataaaaaaaaaaagaaagatttttaaatttgaaaaaaaacgtgccctctgcaagaagaataaaagatgaaaagaattttttttcaattctattataaaataaactgcattttttttaaaaaaaaaatgaaaacctttattaaaattaaaaaagaattgttaaaaataaaagggaaaaaaaaaaaaaacttttatataaaaaaaaaaaattaaacacaaccttccttgttgttcttctcctaaaaatttttaaaaatagagggccaatatttttttacaaccaaaaaaaaaaattttgtttggagtgttt

SEQ ID NO: 37806 - DNA, 168 bp, Glycine max
  unsure at all n locations
  Clone ID: LIB3138-012-Q1-N1-C7
cataangacttaatttgagatgtgaataaagcgaacaaggtgggtgtaatctgagtgaactgatcggcaaacacaacccatatgaagataatcgtggggctcgaggaacctgatatcattaacgaagtgaaggcaaaacacaacatcaaaatttcgtttctgaaccag

SEQ ID NO: 37807 - DNA, 344 bp, Glycine max
  Clone ID: LIB3138-012-Q1-N1-C8
gccatatgttcagaatgatctgcgtctcagggctgagtgttggcgctttgatctcaacactgtcattgctggaaagcctaaggatgagaagaaatcactcaaggaactcactggcaagctcttccaggatatcagcaatctggatcatgcagcaaaaattaagagcagcccagaagcagagaagtactatgctgctactgtatcttctctgaacgatgtccttgccaaacttggttaatgtgattaatttcttgctttcttgtgtaagctttgtgcatcattttctcagacactttgttgactgatattttaagaaaatcaaatgatgagggaaaattttctat

SEQ ID NO: 37808 - DNA, 253 bp, Glycine max
  Clone ID: LIB3138-012-Q1-N1-E3
tccctttttactttcattttcatcacataccttttcatttcggggacggtcacttaaatatgacaccacacccccttatttatcttttctataactgatagagcccctatttctgtgaactcactgcggagttctgcgatatcttatctaatttcaaacctgcttatttttcttgttttcacttctgcgcatttttttgctttcaatatattaaatttcttattccaacacccaaaagctaactttcataata

SEQ ID NO: 37809 - DNA, 388 bp, Glycine max
  Clone ID: LIB3138-012-Q1-N1-E7
atcccgttcattttgaacaacaaagagtgattaatcaaatccggcgagcgggttttacaacaagccttacatcaaactctaggaactctaaagagttgcttgaacaacgagttacatttacctactgtcagtgctaatattggcatgtttgggacgatgaaagaaaaaataactgattagtctttctattataaaatagagtataggcattatttttttcttctaaaaaaataaaatttagaaattttcatggtaaccattcgtgcagatgaaattagttaaattatccgtgaacgcattgagcaatataatacggaaagtaaaattgtaaaatacgggtccgtactttaaagtggcgaaggtattgctcgtatttatggtcttgatg

SEQ ID NO: 37810 - DNA, 384 bp, Glycine max
  Clone ID: LIB3138-012-Q1-N1-G1
aaaaaaaaaaattttttataaaaaaaactaaattaaaaaaaaagcgaagagaaaaaattaatataatataaaaaaaaacttcataaaaaaaaaacacaaatttaatataaaacttcacaaaacaaaaaaaaaaaaaaaaaggggcccccccccccccttttccctctttcccccccaattttttttccccccctttccctttgggtttcccctttttccttttttaaactttttttaccccttccctaacctttaccaaatcttttccccttttaaaaatttttttcccttccaattcccccccaaattccccccctaaacttttaatataaaaccctccgctcctttttagttaccccccccccctttttttggtttcccccc

SEQ ID NO: 37811 - DNA, 389 bp, Glycine max
  Clone ID: LIB3138-012-Q1-N1-G11
ctagttctagatcgcgagcggccgcccttttttttttttttttgtaatgattgctcttctttattataatttattattgatgaagtgagacacagatatatcataagtctcacgattatatgggaaaaggaaagaagaaaggaaagactggatacattgtaaggcaacttaagttgagcacagagtgattggataagtctccaagcaagaaaaagcaagaaagtgataacaagtaagttgaagaggattagttgtaatcgggatgggccaaaaggtaagcctcaatggccttgaagagagcatcagccttggcttttccagttttgagttcgtcttggttgggctcagcatctccttttgtttcgtatttgacagtgagcttcccagca

SEQ ID NO: 37812 - DNA, 276 bp, Glycine max
  Clone ID: LIB3138-012-Q1-N1-H8
attgaggtttttaacaaacatcaacattgcagagcatttcgatgcatgtgggtgggcaaaattataaccacattcctgggaattgatcttcccaatagaggtatgtggtcctaataatggatttgaaatgaggagttctgagtgggcaaatcaaacttcatggtatttgagtttccttattgacaatccaaaacagtctacagattttagatattttctagggaacctctcaacattttgaaaatcctggttatactcttattacacctatttttg

SEQ ID NO: 37813 - DNA, 61 bp, Glycine max
  Clone ID: LIB3138-013-Q1-N1-C3
aaaaaaaaaaaaaaaaaaaaaaaaaaaaaaaaaaaaaaaaaaggaggaaaaaaaaaaaaaa

SEQ ID NO: 37814 - DNA, 409 bp, Glycine max
  Clone ID: LIB3138-013-Q1-N1-D1
ggggacaccaaaaaatctaccaaagttggcccgtgctactcaggagcttcggcttaagcaggagactcctgacccacctgaagctttgaaaactgttcctagcctttctctacaagatattcctaaagaacctattcgtgttcccactgaggttggggatatcaatggagtaaaagttttgcagcatgatctcttcaccaatgatgtcctttacactgaaatagtattcaacatgaaatcattgaagcaagagcttcttccattggtgccactgttttgccaatcattgttggagatgggaacaaaggacctgacttttgtccaattaaaccaattaattggaagaaaaactggaggaatatcagtttatccattcacatcatcagtgcggggcaaggaagatccatgt

SEQ ID NO: 37815 - DNA, 401 bp, Glycine max
  Clone ID: LIB3138-013-Q1-N1-D2
atttttaatttttgtgaaaaataatgttcatcgagaattttaaggttgagtgtcctaatgtgaagtacaccgagactgagattcagtccgtgtacaactacgaaaccaccgaacttgttcacgagaacaggaatggcacctatcagtggattgtcaaacccaaatctgtcaaatacgaatttaaaaccaacatccatgttcctaaattaggggtaatgcttgtgggttggggtggaaacaacggctcaaccctcaccggtggtgttattgctaaccgagagggcatttcatgggctacaaaggacaagattcaacaagccaattactttggctccctcacccaagcctcagctatccgagttgggtccttccaaggagaggaaatctatgccccattcaag

SEQ ID NO: 37816 - DNA, 311 bp, Glycine max
  Clone ID: LIB3138-013-Q1-N1-D4
atagggattgttttggccttgaggaacagcagcagattcgggggggaacccaatgtgggcaggccccacaaggctgacatgggtgtattgtttgaagcaccgaccgcaaccagtcaaccaatccgccggttggatggtacagaaacaacaccttgagaactcgtctgagtccaacccatccgtcaggaggagtgtcttctgcccatgcatgaacaccacctcaaaaacctataccatgtctgaagtccgaacgcacaacaacgccggttctgcttgtatcatagtccacgagcatgtctatgattgcaccc

SEQ ID NO: 37817 - DNA, 392 bp, Glycine max
  unsure at all n locations
  Clone ID: LIB3138-013-Q1-N1-F7
acaagaactctccaaggatcctccttcccacgagattcgtgggtgggaaaaatccaagaggtttgaaatttgaaggcagggaagatggattatttcaatgcaccaggaagaaaccatctctttgttccagggccggttaacattccggaccagatcatccgggccatgaacagaaacaatgaggactaccgttctccagcaattccagctatgacaaaaactttgcttgaggatgtcaagaagattttcaagaccactactggaaccccatttctcatccctacaactggtactggtgcttgggagagtgctctcacaaacacactgtcntcctgggatcgaattgtatcgttcctgattggccaattcagcttgctttggattgatcagca

SEQ ID NO: 37818 - DNA, 357 bp, Glycine max
  unsure at all n locations
  Clone ID: LIB3138-013-Q1-N1-G1
gttctagatcgcgagcggccgccctttttttttatttatttgttggggtttaaaaaattttgggataattataagagaaataaataaatttttatattttatttaaatttatttatataaaatattataattatatattataaaaaatattataaataattttattatttaaaataaatataaataatatatttttttttttttnnaaaaaaaaaaaaaaaaaaaaaaaaaananttatttatttttatatttaaaaaaaaaaaaaaaaaaatttaaaaaaaaaaaaaaaaaaaaaaaaaaattttaattttaataaaaaaaaaaaaaaaaaaaaaaaaanaaaaaaaatntnttat

SEQ ID NO: 37819 - DNA, 190 bp, Glycine max
  Clone ID: LIB3138-013-Q1-N1-H3
agccctttcataaaatgttggtgcagctcattactgccaccaaggctgagggacttttgaaaggacacgttacacccctacaaatttaagaccctaaaacaccctcctatcctttcagctgattaatattccccccacttatttaagaaatgcctctttttttttgcccctcccgccacattaaacattt

SEQ ID NO: 37820 - DNA, 391 bp, Glycine max
  Clone ID: LIB3138-014-Q1-N1-B2
ctaaattgaaaagctttctagctagtcataacatcaccattactgagggtattgacaaaactagtgcaactttgcaatttagaaagttagcagattgtgattttctcaagagaaactttaagcagatgtctaatgttttgtgggtggctcctgaggacaaggcgagtttatggtcacaacttcattatgtttcgtgtaataatctggaaatgcaagaagcttatcttgtcaatctcgtaaatgtgttacgagaattgtatttgcacagtccagaggaagctcgccaattgagaaggaaagctctctctcgtattgaatggctgcaaaaaactgatgtgcctaccatagcacagattggagagttccattcgatgcagaggatgatgaatgc

SEQ ID NO: 37821 - DNA, 328 bp, Glycine max
  Clone ID: LIB3138-014-Q1-N1-B3
tttacccaccactgcttggattagttctgcagttaacaatcggtgctcagatatcaacaaaaggattcgcacagcacttgggaaaggtaagaaaattgtttttcttactagagttgatccttttccagtagctttactggctgttctttttggcgttaagaatgaaattctgagttctaacgccactaatcctatgctgacgcgacttcttgagaactgtaagagtctcaaatatctggttgatgagtgtccttttgcatttgtgaactagtatgtagtattttattcacttaaataaagcgcattactatgtgcaatgagtgtgttt

SEQ ID NO: 37822 - DNA, 398 bp, Glycine max
  Clone ID: LIB3138-014-Q1-N1-B4
taaaacgggacacaactttagtgtgtcaaagttgtgaatcaacaccatactgtcatggaaatggactcggtttggcacaatgcattacctgagtaaggggcaaatgatattcgtgtgttcgcgactatagctagatcctgatggtattgatctaccaatgcaatgttattgagcagagatgtgcagaaatagataacacagtctctagcggtgagtgatgaaaatactgatgcgtgaaagtgacgcaacctgctgatggctagattgtcaaggatggcaatgtgcaagaaagatgtttggagagttgaatgtggaataccttctggatttccgctcacagttatgtgcaatagcattgttaatgagatgctcattagatatagctctgaaaaattact

SEQ ID NO: 37823 - DNA, 194 bp, Glycine max
  Clone ID: LIB3138-014-Q1-N1-B9
gttctagatcgcgagcggccgccctttctttttttgtttttggtttatatcgaaacacactcatcgcacgagctcatgcatatgtcaccaccctacctgcctattgaactgcaggacctgtctgctgaactcgccttcctagagttatcacatgacacctgtacaaacccgctcaagctttctaagttacaagc

SEQ ID NO: 37824 - DNA, 370 bp, Glycine max
  Clone ID: LIB3138-014-Q1-N1-C12
caggaattataatggcttgtctgcctttacccaaccatggggggtctgcaaccttgcaaactatatggccttttctttgacaaaaaattctgctctgctcttcctaaccacgtggtgctggttggtctacacttaccttcagcatgtaaggtgcatatactattttactaaatattgtaccaatgtcctgtattgcaccctactgcttgtgaattgttctacataatcctattcttttccatatacttgaatgctatgattgtgcttattacttgttaatgataaaacttttatttttctactctctcttacaagtcaaaaaaaaacattatatttttgcgcccgccttcttttgttttttttttccccg

SEQ ID NO: 37825 - DNA, 261 bp, Glycine max
  Clone ID: LIB3138-014-Q1-N1-F8
aagcccatttcgatttgcgatataattcagagagagagggggcgagtgtctctaactctgcatctttgattcgatcattccaatcttcacttttcctatgtatccatccatccgctaagggcagcgctctattctttcgcctatcggctactaccccatgttccttccatttcccatcgagccaagtttcttcccatgcgctacgagcggacacactcctcttaatgccaaattgtttctttactgttacacatttacttg

SEQ ID NO: 37826 - DNA, 365 bp, Glycine max
  Clone ID: LIB3138-014-Q1-N1-G12
acactggagattgcatgctgattctacaggtataaaaaaggggggaggctggttcatgggtctctcttgcccatacttggctggcaaagccgacaaacttggcccatcagcccccgaagtcaggagggttagcttgaggaagaccgtcaccaagcaggccttctgcggaagcccatggtacggcccataccgcgttaagtacttgggcccattctctggcgagcccccgtcctacctcactggcgagttcccaggtgactacggctgggacactgctgggctttcggtcgacccagaaaccttctgcagaaaccgtgagctcgaagtgatccactccaagtgggccatgctcggggccttgggct

SEQ ID NO: 37827 - DNA, 143 bp, Glycine max
  Clone ID: LIB3138-014-Q1-N1-G3
gtttgtaaaaaaaaaaaaaaaaaaaaaaaaaaaaaaaaaaaaagggaagaggaaaaaaaaaaaaaaaaaaaaaaaaaaaaaaaaaaaaaaaaaaaaaaaaaaaaaaaaaaaaaaaaaaaaaaaaaaaaaaaaaaaaagggggg

SEQ ID NO: 37828 - DNA, 246 bp, Glycine max
  Clone ID: LIB3138-014-Q1-N1-H10
gccatgaatcccaaaatcctcttcgagtttgctctgcttctgaatctcggatccaattcgttccaaaaccctaaccctaaaacccccaaatcaacgtcatcgcacgctcacgtggagctcatcaaccacggattacccgccggtcttatgcccgccaccaccgtcttgggctacgccgagaaccgtacctgcggtgactttaccgctaagctcagcggcgcgtgcaagatcacgctcacgtcggac

SEQ ID NO: 37829 - DNA, 192 bp, Glycine max
  Clone ID: LIB3138-014-Q1-N2-A6
ggaaagggaggatcatgaaaaacccaaaaagattgttcccagtttgggacaaagaatggatcctcattccaatgaggttcaggctcacaatggaaacaaatttgtttaaattgtctcttgatgatgttgaaacctcctaaagttccatgttggatcttaaaatttctcaatctaaaattgcactttccaaaa

SEQ ID NO: 37830 - DNA, 164 bp, Glycine max
  Clone ID: LIB3138-014-Q1-N2-A7
gtaagaaagatgtttggagagttgaatgtggaatcccttctggatttccgctcacaggtatttgcaatagcatttttaatgagatgctcattagatatagctatgaaaaattactgcgccaggctaaagctccaagtatgtttttacaatccttcaaaaatttt

SEQ ID NO: 37831 - DNA, 343 bp, Glycine max
  Clone ID: LIB3138-014-Q1-N2-B4
gttgggggggttcgggaaaattttgaattgacaactaaatctcccacctttggaggggaatgctctatattttgggtgagtatgccaccttgtgtatatatctcctgtgcggaatttgatagttatggttacgtttgctctataaacattggaatttttaacctgtaaccaagatactcaaatcatggttttagtattcatgatgaatagcaacgagggctaccatgctaatggaggacttatagctgggcaccaatcttttgacgacatatattaccagtttaccacagtgcacagtgctaatgtgctacatgttagtatggcacccctgtatgagctttgc

SEQ ID NO: 37832 - DNA, 350 bp, Glycine max
  Clone ID: LIB3138-014-Q1-N2-B5
ggtttcaacattgatcagaagcatagacatgatattccacgacaccaagtcaaacaggtgatttgttcactttgtgggactgaacaagaggttcagcaaaactgtataaattgtggtgtttgtatgggccaggtacttctgtggaacatgcaagctttttgatgatgatatatctaagcagcagtaccattgcagtggctgtggaatttgcaggtatgaattgctagactagttactttatcagaaatatcagcatctctgcagtctgcactctaggcaggaacgatgacatgtttgaagggagttccttttttttcccctcaattttgtgtctcaatctctttttttta

SEQ ID NO: 37833 - DNA, 434 bp, Glycine max
  unsure at all n locations
  Clone ID: LIB3138-014-Q1-N2-B6
ggttgaggatggtcctcttggtttggataagaacactgggaaacctaagggttttgcgcttttcgtgtataagtctgtggagagtgctaagaaggctttggaagagcccaataagaactatgaggggcatactttgtattgtcagaaggctgttgatggtcctaaggggagcaaggggtatcatcatcaacagcattctcattctcatcatcaccatcaccaccatcagcctcattatcagaggaaggagaagaacaagtattcctccggtggtggtggaccatcacatggaagtggtcatttgatggcgccctcgggctctgctgtggggggtttcaaccctggtgtgccggcccaagggttgaatccggtgcttggacaggcgttgactgcattgattaatcannggagctgattgggcttgggaatttttg

SEQ ID NO: 37834 - DNA, 276 bp, Glycine max
  Clone ID: LIB3138-014-Q1-N2-B9
gctaaaaggagaagcaaatggcttctaatgatctcttccagctgtaccactgtcaaccgtgccggtccgctggtgtcattcactgcctaagtcatggctggttcccaccgaaagaccaacaatgcattcctcattgtgcaacgggaagaggctgcatcagtgtggcacatgcagaaagttggactttctaccgcaactgtatcacaatggcaagagtaatacctcttagaaggtgattctgctggattggtgggcacgttctgtaccgggccacag

SEQ ID NO: 37835 - DNA, 357 bp, Glycine max
  unsure at all n locations
  Clone ID: LIB3138-014-Q1-N2-C11
aattcccgggtctactgattatttttcatctgntggggtgatatggcatggggggtgtattggaaaaccttttccctttagcaaacggtgcagtttttatcgtctagaggtgatcaatggcaaaaggcaaataacatatgggcgctactgtgttgaacctgctatcaagcctgttgatgcgactttggcagctatcatgagtgtaacatggctactgcattaatttcctcagttggcaaactggttatagtgaaagattctacattattttggtagcgcataatgtgccttcttttgcccttacaaaattagtcttttaaatttgatcgtatttggattgtttaacataaaactatt

SEQ ID NO: 37836 - DNA, 80 bp, Glycine max
  Clone ID: LIB3138-014-Q1-N2-C4
gggccatccgcatttggtgcttccaaaaaacggcgggaatagtggggctttgcgactataactcaccaaagggggggggc

SEQ ID NO: 37837 - DNA, 422 bp, Glycine max
  Clone ID: LIB3138-014-Q1-N2-C6
cttccttagcctgggattccgcttcgaggttttgttcctctttggttcttcgtccccttcccaatcttcaactttagggttcctttaatctcgttattcctcttcactcccaaactccgttcacttcaacaacactctgatttagaaatggatggaccggcttgtccaggtggtgcttgactggacatgtttctgccaaattataaattgggaaaaacacctgggattggatcctttggccaggtcaaaattgcagaacatgtattgacttgccataaggttgcgatcaagattcttaaccgacgcaggataaagaacatgggaatgggagaaaagtgagaagaggaatcaaaattttaaagatattcatgcatcctcacattatacgactttatgaagtcatagaaactccaactgacata

SEQ ID NO: 37838 - DNA, 371 bp, Glycine max
  Clone ID: LIB3138-014-Q1-N2-D10
aaaaaaaaaatatttaaaaaaaaaaaaaaaaaaaaaaaaaaaaaaaaaaaaaaaaaaaaaaaaaaaaaaaaaaaaaaaaaaaaaaaaaaaaaaaaaaaaaaaaaaaaaaaaaaaaaaaaaaaaaaaaaaaaaaaaaaaaaaaaaataaaaaaaatgggggggccccccttttttgaaactcttccccccggaatatatattagacccggtccttggggggttacaatttttttttataggggggcatttaaaaactgggcaaaaaattggcaaattttttttcctgggaaaaatttttttccgcaaaaaattccaaaaaaaaaaaatgcccgaaaaattaatttttaaacccgggggggcctaatgggggg

SEQ ID NO: 37839 - DNA, 296 bp, Glycine max
  Clone ID: LIB3138-014-Q1-N2-D2
tgttgcgaatctctcaagattttgaaattgctggtaatactcttatgccagctttttctgttccacaggctactgtcagatcttctgaaaatgccgaatcctctgcgtgatctggaatttgtgttttctttcgcttgttcgtttgtttaattcaataaaggaaattaggcatgaccctcttgttgagtatgctctgcctatttgaaaatttccacacctcttttaattatcgtaatgatgtgtgaagtgtgtgttattcttaaaaaaaaaaaagctagttcgactggaaaattttt

SEQ ID NO: 37840 - DNA, 343 bp, Glycine max
  Clone ID: LIB3138-014-Q1-N2-D6
tggggtggcctttcttaacttgtcatgtgcagatttccttcgagcccctggagtgcagacgcctgtaattgctcggttctcaactgtcattcatgagcgtggtagccctgaaaccttgagggaccctcgaggtttgccgtggagctttacaccagagaggtgaactctgaccttgttggaaacaacctttccgtcttctttgtacgtgacggcattgaatttccagatatggttcatgctctttaacccaatgccaagaaccacattcaagagaattggaggatcctcgacttcttggctcacttacagaaagccttcacatgttcacctttttatttgatga

SEQ ID NO: 37841 - DNA, 295 bp, Glycine max
  Clone ID: LIB3138-014-Q1-N2-E2
ggttcgaggtgatgatgaattggatggcgtcatgcggaatagtgaattatttttatctagaaagtgtaagcaggcacatcttttgtactttaaataggtgttgtggtatcagggctaaatctcagattattatgttctatggttagaaatcttagttatggttctctttgtgtgacaatgtgaacaataagattgcttatgcatgaataatcaacaaaataatactatggtgtaaaaaaaagtgttggatgacctcaattcatttgacatggctaatggacttgtttcgaatgaa

SEQ ID NO: 37842 - DNA, 52 bp, Glycine max
  Clone ID: LIB3138-014-Q1-N2-E4
tgggttgggggtttattcaattgctttttcagatgccatgtgcaatttttaa

SEQ ID NO: 37843 - DNA, 337 bp, Glycine max
  Clone ID: LIB3138-014-Q1-N2-E5
ggattttgtcattggtggtcaagttgacacccataaacaatatgtgtgcatatggggctcaaatcctggtatttcaggctctcgtcttttgggcaccattcctcagtccatttcacagcaaactgtttggaatcaaatggcaacagtgagaacaccattgaattttgattctagcaagcagagcttttgtcagctttctattgaccttctcggtggaggaatcttagtggacaaaactggagattggatcacacttatacaaaattctccaattagtaacttattgagagttgctgcttggaagaaaggctgtttaatggtcaagattgtgatgtct

SEQ ID NO: 37844 - DNA, 348 bp, Glycine max
  Clone ID: LIB3138-014-Q1-N2-F2
gggtgcccatatttgtatgcaatggtgcatgatagttcagggtctacaataccaggtgatttcgacattggtgtcaagttgacagccataaacaatatgtgtgcatatgggctcaatcctggtatttcaggctctcgacttttgggcaccatacctcagtgcatttcacagcacactggttggaatcaaatggcaacagtgagaacaccattgaattctgattctagcaagcagagcttatgtcagttttctattgaccttatcagcggacgaatcttagtggacaaaactggagattggatcacacttatacaaaattgtccaattagtaacttgatgagagttgct

SEQ ID NO: 37845 - DNA, 81 bp, Glycine max
  Clone ID: LIB3138-014-Q1-N2-G12
cgtgggaataggattataccaaccacttatgtttgtcccaagaaagagcactgttacgattaaatcgacccagtctgaggc

SEQ ID NO: 37846 - DNA, 322 bp, Glycine max
  Clone ID: LIB3138-014-Q1-N2-G2
gtgtttttaacaaacagcaacagtacagagcattttgatgcatgtaagtggacaaaatcagaaccacattcctgggaattgatcttcccaatagaggtatgtggtcctaataatgggtttgaaatgtggagttctgagtgggcaaatcaaacttcatggcatttgagtttccttattgacaatcccaaacagtctacagtttttgatattctcttgggaatctctcaagattttgaaattgctggtaatactcttatgccagctttttctgttccacaggctactgccagatcttctgaaaatgcggaatcctctgcatgat

SEQ ID NO: 37847 - DNA, 403 bp, Glycine max
  Clone ID: LIB3138-014-Q1-N2-G3
atgatgaatgctcctgattcaaatgataatattgatttactgttgagcattgatttgttgggtttacaaggagcaggtaaagcttttccaaacaaaattgtttttgatgataagcttgtgttggctaacacacaagaattctttgatggaaattttccagtggattcttggttacccaatttttgtgaattgtctttatcctgtaagtcaattaccttcagaagctgtcgttgtaaatgttacatgttgtaattggacgtggtggtttacccaccactgcttggattagttctgcagttaacaatcgctcctcagatatcaacaaaaggattcgcacagcactcgggaaaggtaagaaaattgtttttcttactagagttgatcctttccagtagctttactg

SEQ ID NO: 37848 - DNA, 311 bp, Glycine max
  Clone ID: LIB3138-014-Q1-N2-G6
gttaaggagggctagtttgcccatgaaagctcgagaattggctttttaaaccaacatggaaaattgtagcatgtttttcattatcttgatcgcattggagatactctttgcatgcatctgaggttgtagattctacttatccgcatataatgtccaaagattgcaaccgttacattttagccgcacacattatccatgtagatattctttgcatagatattgagatttaaagaatagttaattttttcacttgattgatttattataaatgcaggtgaatattctgcttcaaggtagaatatctgggtgat

SEQ ID NO: 37849 - DNA, 109 bp, Glycine max
  Clone ID: LIB3138-014-Q1-N2-H7
aaaaaaaaaaaaaaaaaaaaaaaaaaaaaaaaaaaaaaaaaaaaaaaaaaaaaaaaaaaaaaaaaaaaaaaaaaaaaaaaaaaaaaaaaaaaaaaaaaaaaaaaaaagg

SEQ ID NO: 37850 - DNA, 340 bp, Glycine max
  Clone ID: LIB3138-015-Q1-N1-A12
ctagttctagatcgcgatctagaactagtctcttaaaccaaggttttgctctgtctctttttattgcaccaccatccaacccttctcttctaagtaactaactaacttcatttcatttctcagttctcacccatggcgaggcctcttctcacctcttccatgcacaatcttctattctcctccatgcccatccccacacttttcttagctatactctcagtcttgtgtttattttccatcatcacttttctctgtggttctgacaaactgaagaagctccacttagaagcagagaaagaagcagcaattaaaacgaattccaaggagcacaagctgattt

SEQ ID NO: 37851 - DNA, 159 bp, Glycine max
  Clone ID: LIB3138-015-Q1-N1-A4
gtcaatgtcatcgccttgaaaaggccgcggaaaaggcacggttaaggctaagactcttccctctctttggaccattcaaattggctgctatacacgatagtttcttatgatctagactctaggcttagttaggcttttctgttatcgccatggatttcg

SEQ ID NO: 37852 - DNA, 248 bp, Glycine max
  Clone ID: LIB3138-015-Q1-N1-B1
cttttcccaacaagctggtgcagtttggagagattcaggaaaaagttgtattgaaattttcacaagaggaatttcttacagcttggtcaactcaggtgcgtcctgcaacaactctgttggctgatgggagtccatatttgtatgcaatggtgcatgatagttcagtgtctacaataccaggtgattttgtcattggtgtcaagttgacaaccataaacaatatgtgtgcatattggctcaattctggt

SEQ ID NO: 37853 - DNA, 375 bp, Glycine max
  Clone ID: LIB3138-015-Q1-N1-B3
ggaagctcgccaattgagaaggaaagctctctctcgtattgaatggctgcaaaaagctgatgtgcctaccatagcacagattgaagagttccattcgatgcagaggatgatgaatgctcctgattcaaatgataatattgatttactgttgagcattgatttgttgggtttacaaggagcaggtaaagcttttccaaacaaaattgtttttgatgataagcttgtgttggctaacacacaagaattctttgatggaaattttccagtggattcttggttaccaatttttgtgaattgtctttatcctgtaagtcaattaccttcagaagctgtcgttgtaaatgttacatgtggtagtggaccgtgtgtttaccc

SEQ ID NO: 37854 - DNA, 95 bp, Glycine max
  Clone ID: LIB3138-015-Q1-N1-B6
aaaaaaaaaaaaaaaaaaaaaaaaaaaaaaaaaaaaaaaaaaaaaaaaaaaaaaaaaaaaaaaaaaaaaaaaaaaaaaaaaaaaaaaaaaaaagg

SEQ ID NO: 37855 - DNA, 422 bp, Glycine max
  Clone ID: LIB3138-015-Q1-N1-C1
cagaaagctatactattggcagatatggcacacatcagtggattggttgcagctggtgtcatcccatcaccttttgattatgctgatgtagttactaccacaactcacaagtcacttcgaggaccacgtggagctatgatattctacagaaaaggggttaaagaaattaacaaacaaggaaaagaggtattgtatgactacgaagacaaaatcaaccaagctgttttccctggactgcaaggtggccctcacaaccacactattactggtttagctgttgcgttgaagcaggccactactcccgaatatagagcatatcaagagcaagttctcagcaacagctttaaatttgcacaggctctgagtgagagaagctatgagcttgtctctggtggaaccgagaatcacctggttttggtgaa

SEQ ID NO: 37856 - DNA, 392 bp, Glycine max
  Clone ID: LIB3138-015-Q1-N1-C3
catttctccatttctattttctctctcactttacaagaatcgtacgctatgggaaagtcttacccaactgtgagtgctgattaccagaaggccgttgagaaggcgaagaagaagctcagaggcttcatcgctgagaagagatgcgctcctctaatgctccgtttggcatggcactctgctggaacctttgacaagggcacgaagaccggtggacccttcggaaccatcaagcaccctgccgaactggctcacagcgctaacaacggtcttgacatcgctgttaggcttttggagccactcaaggcggagttccctattttgagctacgccgatttctaccagttggctggcgttgttgccgttgaggtcacgggtggacctgaagttccatt

SEQ ID NO: 37857 - DNA, 362 bp, Glycine max
  Clone ID: LIB3138-015-Q1-N1-C5
gtcaaaaggagtgattgggcctcattggtacaagtgtttttaacaaacagcaacagtacagagcattttgatgcatgtaagtggacaaaatcagaaccacattcctgggaattgatcttcccaatagaggtatgtggtcctaataatggttttgaaatgtggagttctgagtgggcaaatcaaacttcatggcatttgagtttccttattgacaatcccaaacagtctacagtttttgatattctcttgggaatctctcaagattttgaaattgctggtaatactcttatgccagctttttctgttccacaggctactgccagatcttctgaaaatgcggaatcctctgcatgatctggaaa

SEQ ID NO: 37858 - DNA, 405 bp, Glycine max
  Clone ID: LIB3138-015-Q1-N1-D1
cgtgttaaaggttgtttggctggatcaaaggctgagaatcttttagaacaaggggatatggttttagcaatcaacaaagaaccagtcacatgcttccgtgacattgaaaatgcttgccaagctttagacaaatccgacgccaatgatgggaagcttcacttgactattttccggcagggacaagaggttgaactttttgtgggaacagatgttagggatggaaatggcactgctcgtgcaattaattggtgtggttgtattgtccaagatccacatccagcagtgcgtgctcttggatttcttcccgaagaaggtcatggtgtatatgtggcaaggtggtgccatgggagtcctgtacataggtatggtctatatgctcttcagtggatagtcgaaaataaatgg

SEQ ID NO: 37859 - DNA, 436 bp, Glycine max
  Clone ID: LIB3138-015-Q1-N1-D4
caaccattaaacaatttgtgtggcatatggggctcaatccttggtatttcaggttcttcgtcttttgggcacccattcctcagtccatttcacagcaaactgtttggaatcaaatggcaacagtgagaacaccattgaattttgattctagcaagcagagcttttgtcagttttctattgaccttctcggtggaggaatcttagtggacaaaactggagattggatcacacttatacaaaattctccaattagtaacttattgagagttgctgcttggaagaaaggctgtttaatggtcaagattgtgatgtctgggaatgcagcagtcaaaaagagtgattgggcctcattggtacaagtgtttttaacaaacagcaacagtacagagcattttgatgcatgtaagtggacaaaatcagaaccacattcctggga

SEQ ID NO: 37860 - DNA, 163 bp, Glycine max
  Clone ID: LIB3138-015-Q1-N1-E2
aaaaaataatttattcttatggtacatgaaaattttacagcctagctatggaaacttcataaaaaatatatttgttttgcggttttgggattcattgtgcttccaatacttatttgtacacttcaagattaattctcgcaagttaaaatgaaataatacgggg

SEQ ID NO: 37861 - DNA, 72 bp, Glycine max
  Clone ID: LIB3138-015-Q1-N1-E3
caaacccaccgaattaaccgtttaaccaaacaaccaccaccacgggtaatccaaaaccaaacaaccaacacc

SEQ ID NO: 37862 - DNA, 231 bp, Glycine max
  Clone ID: LIB3138-015-Q1-N1-F5
tgtagaggtttgtgtccctaatatgggttttgaaatgtggagtgctgagtggccaaatcaaacttcatggcattggagtttccttattgacaatcccaaacagcctacagtttttgatattcttttgggaatctctcaagattctgaaatcgctggtaatactctaatgccaacttttcctggtccacaggctactgccagatcttttgaaaatgcggaatcctcggcatg

SEQ ID NO: 37863 - DNA, 297 bp, Glycine max
  Clone ID: LIB3138-015-Q1-N1-F7
ctggaatcctttttgcacaaaagcaatgactatgtcagggggtccaaacccgagttctgatgcatggagttaggaatttctgaagcgtactggatttcattgctatatcatttgtgtcactggatggactgccaccccaatgcaggatgttcaggttacaattgattggtttattacctttcaggaatgtgttcccaggacctattgtgttttaaatccacataatccttgtgtgtcaaataggtggatgggaaaaatgacttttttctcattgcactttctgaagtgttaagagaa

SEQ ID NO: 37864 - DNA, 389 bp, Glycine max
  unsure at all n locations
  Clone ID: LIB3138-015-Q1-N1-G2
gtcacaacttcattatgtttcgtgtaataatctggaaatgcaagaagcttatcttgtcaacctcgtaaatgtgttacgagaattgtatttgcacagtccagaggaagctcgccaattgagaaggaaagctctctctcgtattgaatggctgcaaaaagctgatgtgcctaccatagcacagattgaagagttccattcgatgcagaggatgatgaatgctcctgattcaaatgataatattgatttactgttgagcattgatttgttgggtttacaaggagcaggtaaagcttttccaaacaaaattgtttttgatgataagcttgtgttggctaacacacaagaattctntgatggaaaatttccagtggattctggttaccaatttt

SEQ ID NO: 37865 - DNA, 98 bp, Glycine max
  Clone ID: LIB3138-015-Q1-N1-H6
ccaggcttttctgttaaaaaaaaattaggcgtctaaagggccaaagcttactaagttcaaacttcttttgttgaagataaagttaaatggatggcaag

SEQ ID NO: 37866 - DNA, 268 bp, Glycine max
  Clone ID: LIB3138-015-Q1-N2-A1
gctggttggttaaataaacatcaatatcaatgcaattggagtatactatatattttgaccaatttttcttaggaatttaatcacctatatatgttgtgctaatttaatcaccatatctgtattattaattgaagtgaggattaattaaatattgatggcatacatgcatccatagtttaagaacacaagtgaagctgcaatagcgggggtgaaaagcatagctaagtattgcattaaatcgggaacggtgagacggctaatttacact

SEQ ID NO: 37867 - DNA, 82 bp, Glycine max
  Clone ID: LIB3138-015-Q1-N2-A2
gacacatacgaagagcttgacgcacacgcacgtcaagctcgagctcgggctcgggatagagctcacccccacactttcatat

SEQ ID NO: 37868 - DNA, 373 bp, Glycine max
  Clone ID: LIB3138-015-Q1-N2-A4
ggaaatctcgctctagataggaaaaagtttcctctacaaaagcacaatttgttagtggaaaaaccttcaaatatgatataattggtgctggttcacattcttcagaagattttcctgaaaaggaagatcaagaaaaacccaaaaagattgatgccagattgagacaaagaatagatcctcaatacaatgaggttcaagctcagatggaaacaaatttgtttaaattggctcttgatgatgttgaaactcctaaaggttccatggtggatctgaaaatttctcaatctaaaattgcactctccaagaacacagttggaggaaccatttctgcgtaggatctattggcaaattttttgacagagggcaattttta

SEQ ID NO: 37869 - DNA, 266 bp, Glycine max
  Clone ID: LIB3138-015-Q1-N2-A5
aaacgatttccaacggtcatgaatggcggcgctgaagcctccctcatcacaagcgcaaacaccaaacaagttccggcgaccgggcttaaagggtttagggtgccaaccgggcccttggggaaccctcccttttcaaagacttcttgggggcgttgttcattaaattgacccggggttgccccttccaccttgttgccccccctttgattgccggccttgtcccatttggggcttttttttttattggccgggaagtcccccctttt

SEQ ID NO: 37870 - DNA, 304 bp, Glycine max
  Clone ID: LIB3138-015-Q1-N2-B1
atgcataggtgcatgatagttcagtgtctacaataccaggtgattttgtcattggtgtcaagttgacaaccataaacaatatgtgtgcatatgggctcaatcctggtatttcaagttctcgtcttttgagcaccattcgtcagtccatttcacagcaaactgtttggaatcaaatggcaacagtgagaacaccattgaattttgattctagcaagcagagctcttgtcagttttctattgaccttctcggtggaggaatcttagtggacaaaactggagattggatcacacttattcaaaattc

SEQ ID NO: 37871 - DNA, 78 bp, Glycine max
  Clone ID: LIB3138-015-Q1-N2-B9
aaaaaaaaaaaaaaaaaaaaaaaaaaaaaaaaaaaaaaaaaaaaaaaaaaaaaaaaaaaaaaaaaaaaaaaaaaaaaa

SEQ ID NO: 37872 - DNA, 182 bp, Glycine max
  Clone ID: LIB3138-015-Q1-N2-C1
tcactacaagctgcagctaccttcatgcaacccaccaaggttggcatagcctctcgcaacctcaaatctacacaatgcatttctaaagcttttggcttggaacccgctgcagctaaactcacttggtcccttcagcccgatctcaaaaaatttggtcaaaaatggggcgacccttcccaaat

SEQ ID NO: 37873 - DNA, 137 bp, Glycine max
  Clone ID: LIB3138-015-Q1-N2-C2
ctcgagccgaatcggctcgagctgaacacttattactcactccttcatggccacttcgctctctttctccatttctcccaaaaccactggcacaacctcaggctttcgattcaaagtctccgccatgggtaccacca

SEQ ID NO: 37874 - DNA, 108 bp, Glycine max
  Clone ID: LIB3138-015-Q1-N2-C5
ggaagagtaccattcgttgcagaggatgttgaatgctcctgattcaaatgataatttcgattcaccgtcgagcattgatttgtcgagtgtacaaagagcacgttaagc

SEQ ID NO: 37875 - DNA, 467 bp, Glycine max
  Clone ID: LIB3138-015-Q1-N2-D1
gcttttgcccaattcgcttctgatctcgataaagctactcaaaatcaattagcaagaggtcaacgattgcgcgagttgcttaaacaatcccaatcagctcctcttaccgtggaagaacagataataactatttatactggaacgaatggttatcttgattcattagaaattggacaggtaaggaaatttcttgttgagttacgtgcttacttaaacacgaataaacctcaattcaaagaaatcatatcttctaccaagacattcactggggaagcagaagtccttttgaaggaagctattcaagaacagatggaactctttttactacaggaacaggtagaaaaaaattgattaatcatttaataactttataatttcactttcaaattcttataattagtatcttttaatatctttgtatttcatttgaatataatattaatatataaataaaatgaattcgaatg

SEQ ID NO: 37876 - DNA, 420 bp, Glycine max
  Clone ID: LIB3138-015-Q1-N2-D2
ctagttctagatcgcgagcggtcgccctgcctatttgaaaatttccacacctcttttaattgtcgtaatgatgtgtgaagtgagagttattttaaaaaaaaaaaaaaaaaaaaaaaaaaaataaaaaaaaaaaaaactattaaaaaaaaaataaatttataaattaaaaaaaaaaaaaaaaaattatttttaaaaaaaaaaaaaaaaatttataaaaaatgggcccccccttaaataaaaattcccacacccgatattaacccaaaattttttttaaatttaaaaaatttaaaaaaaaaaaaggcgctccaatctatggggcacaaaaaaaaaaagggggcaaaaaaaaaaaaaaaaatccggttccccccccccaaaaaaaatttaaaatcccccaaaattttttaaaacccatttttt

SEQ ID NO: 37877 - DNA, 193 bp, Glycine max
  Clone ID: LIB3138-015-Q1-N2-D5
aagcgcggtggtttgcaaatcttcgtcaaaacccttactggcaagaccatcacactcgaagtcgaatcatcagacaccatcgacaacgtgaagtcgaagatccaagacaaggagggtattcccccagaccagcagcgtctcatctttgctggtaagcaactcgaggacagcaggactttgtcggactacaaca

SEQ ID NO: 37878 - DNA, 401 bp, Glycine max
  Clone ID: LIB3138-015-Q1-N2-D6
catctctttcgtttcgtccttgccttcaccccaaagcctattttcccattttccccttttcatgataacaactctccatgtagggcaaacttcacttcaattgaactaacttgtctgtggctttttgtagattgattcaattcaatgggttcagtaatgctcagtggaactgaaaagctcactctcagaaccctaaccgggaacggcttaagtttcactggttcggatttgcacggtaagaacttcccaagagtgagtttcgctgctaccactagtgctaaagttcccaactttagaagcatagtagtacccaagtgtagtgtctcggcttccaagccaagctcgcaaccaatgttcattcagcacaaaaaagaggcccttttagttctatattttctctc

SEQ ID NO: 37879 - DNA, 417 bp, Glycine max
  unsure at all n locations
  Clone ID: LIB3138-015-Q1-N2-E2
gacccacgtgccggttcttcaatcttctanagagagagagagagagagagagagagatggcgttgaatcctcaactgtttccaaatggaatgcccgttcctttcgtgaacgagatgtttgtgttggccagagacggcgtcgaattcgaggtcgataagattcctgcctctggcaatcatgggggtaatctcaaaacaaagggaatcgtgtatttgtcgaatattcggatggtcttcgttgctaaaagtccagttggacacttcactgcttttgattttgcctttgctttacatccatggtgaaaagtttaaccagccaatatttcactgcaacaatctctctggacatgttgaacctgtggtcccaaatgaccaacacaaagctctttactcaacacactcattttaaatcttattc

SEQ ID NO: 37880 - DNA, 202 bp, Glycine max
  Clone ID: LIB3138-015-Q1-N2-E4
tatgctctgcctatttagaattttccacacctcttttaattgtcgtaatgatagtgtgaagtgtgtgttattttaaaaaaaaaaaaaaaaaaaaaaaaaaaaaaaaaaaaaaaaaaaaaaaaaaaaaaaaaaaaaaaaaaaaaaaaaaaaaaaaaaaaaaaaaaaaaaaaaaaaaataacaaaaataaaaaatagaaacaaa

SEQ ID NO: 37881 - DNA, 312 bp, Glycine max
  unsure at all n locations
  Clone ID: LIB3138-015-Q1-N2-F1
gaagacgctccagaaagagttctaccagattctatcctccaacagagaacacctggatcccgaaactgtctccacgcgctcctncgttgaccaccgcagcagcgtctccgattacgacgacgaaatctcaatcaccgaggacgagttccgcgtttccgagaccgagcgcgtttccatgctcgccatggaggatttgaaagccatagctgagtgcatgatttcctccggcttcggcaaggagtgcgtcaaggtttacatcgtcatgagaaaaacgatcgtcgacgaaacgctgtatcatcttggagttgaaaa

SEQ ID NO: 37882 - DNA, 81 bp, Glycine max
  Clone ID: LIB3138-015-Q1-N2-F12
aaaaaaaaaaaaaaaaaaaaaaaaaaaaaaaaaaaaaaaaaaaaaaaaaaaaaaaaaaaaaaaaaaaaaaaaaaaaaaaaa

SEQ ID NO: 37883 - DNA, 395 bp, Glycine max
  Clone ID: LIB3138-015-Q1-N2-F2
catgattcaactttttgaaactggagggatccttgcttctgtggactcaagagtactagttttggcaggatcaacagtgggaggtggctctgctgttaattggtcagcatgcattaaaaccccacacaaggtgttaaaagagtggtctgagagccacaagcttcccttcttttcaagccaagaatatctctctgcaatggaaaatgtgtgtgaaaggattggtgtcacagaaaactgttcacaagagggattccaaaaccaagtgctgagaaaagggtgtcaaaatcttggcctcaaagttgactatgtgccaagaaactcttcagggaatcactactgctcatgtggttatggctgtcctaaaggagagaaacaagggactccaagatacgtgg

SEQ ID NO: 37884 - DNA, 69 bp, Glycine max
  Clone ID: LIB3138-015-Q1-N2-F6
cagaaaaatggcagaaacatagttgagctccttcaaagacaaaagatggtcactccatggcatgacagc

SEQ ID NO: 37885 - DNA, 354 bp, Glycine max
  unsure at all n locations
  Clone ID: LIB3138-015-Q1-N2-F7
cttcattttttatgaatataaatagtataattcattgatagataagttgtgagatgcaaatataagttgagtgtcatatcgatggtatcacagtatgtatcacggttaaaagaaatacagaaatacatatcgatggaacatatacttctcatattcggcagcaataggacaacacacgcaagaaccggcaaagagcatattttcaagtttaaggattgtagtaatgtgattatcaattatttgtattggtgagggtttgtaatgtttgtcttaaaccagtcttgcttattatgagtgtgtgatatgtaatactatatatatcatgtttgttgtnaaaaaaaaaaaaaaaaaana

SEQ ID NO: 37886 - DNA, 376 bp, Glycine max
  Clone ID: LIB3138-015-Q1-N2-G1
cagccgtgctctggttaaaccttccggaaaaaaaaacccccccacccttggtgaattcctccaaaaaacccgccattccccccaagtcctgcaaggccagaggcgctgaccttaaattgcttttcaagaacacttgggggactgcctttgccataaggaagttgcccctggttaaagctaaaaaatacctggaggttgttttggcccaaaaacaggccatccctttccgacccttttggggtggtgttgggaggacagcccaggcttaaagcaaacactccaatggtcaaggaccctggcccgccaaatcaactaaattcatcctaaatttgctgaaaaacgctgagagtaatgctgaggtaaaaggtttggatgt

SEQ ID NO: 37887 - DNA, 281 bp, Glycine max
  unsure at all n locations
  Clone ID: LIB3138-015-Q1-N2-G12
gttaggtcctattcatggggattctgtaaatattccattccgannncntnaaaaaaaaaaaaaaaaaaaaaaaaaaaaaaaaaaaaaaaaaaaaaaaaaaaaaaaaaaaaaaaaaaaaaaaaaaaaaaaaaaaaaaaaaaaaaaaaaagggggggggggggactgggggggtggtggaccgggggattaattcgggggggggaccgggggggggaccagctttccctatgggggggggttttagggggggggcggataaggggaatgggggtttcgggggg

SEQ ID NO: 37888 - DNA, 342 bp, Glycine max
  Clone ID: LIB3138-015-Q1-N2-G2
gcaaaaagctgatgtgcctaccatagcacagtttgaagagttccattcgatgcagaggatgatgaatgctcctgattcaaatgataatattgatttactgttgagcattgatttgttgggtttacaaggagcaggttaagcttttccaaacaaaattgtttttgatgataagcttgtgttggctaacacacaagaattctttgatggaaattttccagtggattcttggttaccaatttttgtgaattggctttatcctgtaagtcaattaccttcagaagctgtcgttgtaaatgttacatgtggtaatggaccgtaggtttacccaccactgcttggatt

SEQ ID NO: 37889 - DNA, 292 bp, Glycine max
  unsure at all n locations
  Clone ID: LIB3138-015-Q1-N2-G4
actgattgtaggtgtaacctttacattgttccaaagaaagaacatggggagcctctaagttcagactataaaggaggttattattgttggtatgatcaaacccagtgcatgttgagggaaagctttgatggcccaaagaggagnctctanctaagatacacattgaagtgagctgaatggaacaagttcattgcgcctgtgaagatctatatactagatgtcactgatagcttaaaaatatcagatgattctagaggaatgatccctgagcatgactgcaagaccgcatatg

SEQ ID NO: 37890 - DNA, 291 bp, Glycine max
  Clone ID: LIB3138-015-Q1-N2-G8
aaaaaaataaaaaaaaaaaaaaaaaaaaaaaaaaaaaaaaaaaaaaaaaaaaaaaaaaaaaaaaaaaaaaaaaaaaaaaaaaaaaaaaaaaaagggcggccgccatcttttggggcggccccccccttttattctcttcgccccggtattttattccgtcccggttcctcctggcgtcccagctttcccttttgggagtctttttagaccttggcgtttccttggtcatagctttttcctgtgaaaatttgttttcccttcccatttccacacatctttcgacccggctgc

SEQ ID NO: 37891 - DNA, 397 bp, Glycine max
  Clone ID: LIB3138-015-Q1-N2-H12
ccttcaccatcccggattctccctgccactacaaattcccaacttcgcaaaccctaggcagcagcagcagcagcaacaacaacagcaacgaagaattcgaagagaaatcaaatcgaatctcatttgatctgtgtgtggttgcggcggcggcaatggcggagcacttggcatcgatattcgggacggagaaggacagggtgaactgcccgttctacttcaagatcggcgcgtgcaggcacggcgaccggtgctcgcgtctccacacgaagccgagcataagccccactattctcctctccaacatgtaccaacgccctgacatgatcacccccggcgtcgacgcccacggtcaccccatcgaccctcgcaaaatccaggaccacttcgaggagttcta

SEQ ID NO: 37892 - DNA, 322 bp, Glycine max
  Clone ID: LIB3138-015-Q1-N2-H3
aaagaaaataaaaaaaaaagggcggccaggtcgcgatctagaactcgacaatgccaggtgattttgtcattggggtcatgttgacaaccatgaacaatgtgtgtgcatatgggctcaatcctgatatttcagagtgcttgtcttgtgggcaccattcctaaacccatttcacaacaaaactgctggaatcaaatggccacagtgagaacaccattgaattttgattctagcaaacagaacttttgtcagttctctattgaccttctggggggatgaatcttattggacaaaactggagattggatcacacttattcaaaatt

SEQ ID NO: 37893 - DNA, 72 bp, Glycine max
  Clone ID: LIB3138-016-Q1-N1-A2
attaaggtttctctcaaaaaatggtgcagagtctctgtttgatggcttctcatggttaccctcctggccttg

SEQ ID NO: 37894 - DNA, 363 bp, Glycine max
  Clone ID: LIB3138-016-Q1-N1-A7
cgctaaaggaggaaacttttgactgcgctaagtagtttctttagtcgggtttctttcaaaaaatggtgcagagtctctgtttgatggcttctcatggttaccctcctggccttgtcttgcatccacaagtactgggcttgccctgcagtaccatgaagggctaccaaacattctttccttctccagtagcaaaagcagacctgatcagatatcagtctccttgtcttgatccaagtccatgtgaggagtcaacgaaatctccaaatgatgggttgatttataagaagttgtcaatgttgacttctcagttgaaaggcccatgcttattaatgaccaaactaactgctcaaatgcaattctttt

SEQ ID NO: 37895 - DNA, 337 bp, Glycine max
  Clone ID: LIB3138-016-Q1-N1-C1
ttctagatcgcgagcggccgctcgcgatctagctcgagccgctgttggcttgttgttcaaggatggcaatttgtaagaaagatgtttggagagttgaatgtggaatcccttctggatttccgctcacagttatttgcaatagcatttttaatgagatgctcattagatatagctatgaaaaattactgcgccaggctaaagctccaagtatgtttttacaatccttcaaaaattttgtttctttgtgtgtgtatggtgatgataacttaattagtgttcatgaatatgtcaagccttactttaatggttctaaattgaaaagctttctagctagtca

SEQ ID NO: 37896 - DNA, 403 bp, Glycine max
  Clone ID: LIB3138-016-Q1-N1-C8
gaaaaatctgatgcgtgaaaacgtcgcacctgactgtggcttgtcgttcaaggatggcaatttgtaagaaagatgtttggagagttgaatgtggaatcccttctggatttccgctcacagttatttgcaatagcatttttaatcagatgctcattagatatagctatgaaaaattactgcgccaggctaaagctccaagtatgtttttacaatccttcaaaaattttgtttctttgtgtgcgtatggcgatgataacttaattagtgtacatgaatatgtcaagccttactttagtggttctaaattgaaaagctttctagctagtcataacatcaccattactgattgtattgacaaaactagtgcaactttgcaatttaaaaagttagcagaatgtgattt

SEQ ID NO: 37897 - DNA, 191 bp, Glycine max
  unsure at all n locations
  Clone ID: LIB3138-016-Q1-N1-D2
ggcaaggaggataaattctaattccggaacctaatgcccagggggggtatgggaacgctgcattgcatatactcgnaccctcgaagctatcgtcaccgaagttcagctcagaaacctaccatgatatgatatgtcttctataaccatactcatactccaatcagtgttgcttcttctactccatactcact

SEQ ID NO: 37898 - DNA, 350 bp, Glycine max
  unsure at all n locations
  Clone ID: LIB3138-016-Q1-N1-D7
gaactagttggttctgacttctctgtcaaaataaagataggtaacattctctgttgacttgaggaattgatgcatgtccttttcgtatgcctgtgctcaacaagccatgatttttcttcaaatgtgatacagaatgatggaatcatggaagtatgtataattgtatatgcaatgtaagctatcgttgaaataaaaaaaaaaaaaaaaaaaaaaaaaaaaaaaaaaaaaaaaaaaaaaaaaaaaaaaaaaaaaaaaaaaaaaaaaaaaaaaaaaaaaaaaaaaaaaaaaaaaaaaaaaaaaaaaaaaaaaaaataaaaaaaaaaannnnaaagggggggcccccattttgg

SEQ ID NO: 37899 - DNA, 178 bp, Glycine max
  Clone ID: LIB3138-016-Q1-N1-H11
attcgggttgtgccaattgatttcaaagctgcaatggtgagtaaaaatagcaagcctcaagctactgcaatgcatgtgggagctatagaaattatcattgatagtttcgcaagtcctgattgcaacatagttggtgcaatgcttttggttgatacttatcataccaatcctgaaaatg

SEQ ID NO: 37900 - DNA, 241 bp, Glycine max
  Clone ID: LIB3138-016-Q1-N1-H6
ccgctcccgaacctgcctccgccgatcctcccccggaggagaaggaggagaccaaacctgaagccaaggctaagaaaaccaaggagcccaaacctaaaaaggtttccagacctcgcaaccctcccactcatccttcctacgaaaagatggttaaagatgcaattacctcgctgaaagagaaaacccgttccagccaataccccattggcaaattcattgaggagaaacacaagcagctttc

SEQ ID NO: 37901 - DNA, 123 bp, Glycine max
  Clone ID: LIB3138-016-Q1-N1-H7
ctcagggaccttccaccccatcaaggttctctagtgatcttcgtctttggggaatctgttttcatctactttctctaattaagacaagcttcgcagtgaaacctactgctgcttcaccaattt

SEQ ID NO: 37902 - DNA, 140 bp, Glycine max
  unsure at all n locations
  Clone ID: LIB3138-017-Q1-N1-A2
attgcatgtaagcgatacacttttgggccnaaatggaagcccccggcaacaagttgatgcctttcatcaggtacccggtagttgtcatgtagcaatatatgcctccggccaccacggatacctgccatgatcatgttgtt

SEQ ID NO: 37903 - DNA, 93 bp, Glycine max
  Clone ID: LIB3138-017-Q1-N1-B1
cgagaaaaaaagctcgagacaatatttaatgtcacttaatcaatgtggaattgcttgggtgaacgatgacgctccttacttttgttcctgtca

SEQ ID NO: 37904 - DNA, 144 bp, Glycine max
  Clone ID: LIB3138-017-Q1-N1-B9
ttgatggtgatgtatcacagtcccccatgcatacaaagagtttagctgttcttatgaggcggatgatcctaaagatggtggtgaagagcgccaaggaatgtattaagcaacgaaggaccaactctgaattatattgaaagatgc

SEQ ID NO: 37905 - DNA, 321 bp, Glycine max
  unsure at all n locations
  Clone ID: LIB3138-017-Q1-N1-D12
ttnnaangnnagatattttactcttnataataccggagataaaaagcgttttacggtttaccaattatatgcactaagagttatgtctatcatgaataggacctattattgaatgattgtactaggttgcatttttctgccacttattgtgtgagcggtcataaatttgttttagagcgatcttgatttaaggtgaaggggtatttaaagtgaattgatttatgattgtaagtttatatatatgaagtaattattgtgtaaaatattactatcattaattttcaatcttatccaaatttttgttttattataaaattttta

SEQ ID NO: 37906 - DNA, 203 bp, Glycine max
  Clone ID: LIB3138-017-Q1-N1-D9
cagcgccactaattctatgctgacgcgacttcttgagaactgtaagagtctcaaatatctggttgatgagtgtccttttgcatttgtgaactagtatgtagtattttattcacttaaataaagcgcattactatgtgcaatgagtgtgtttaaatttcaaaaaaaaaaaatgaaaaacaatcacacaaaaaaatttaaaatta

SEQ ID NO: 37907 - DNA, 347 bp, Glycine max
  Clone ID: LIB3138-017-Q1-N1-E1
tcaggtgagaacaccattgaattttgttctagcaagcaagctttgtcagttttctattgacctttcggggggaatcttatggcaaaactgggattggatcacacttatacaaaattctcaattagtaacttgttgagagttgctgcttggaagaaaggctgtttaatggtcaagattgtgatgtctgggattcagcagtcaaaaggagtgattgggcctattggtacaagtgtttttaacaaacagcaacagtcagagcattttgatgcatgtagtggacaaaatcagaaccacattcgggaattgatcttccaatagagtatgggtcctaatatggtttgaaatgt

SEQ ID NO: 37908 - DNA, 404 bp, Glycine max
  unsure at all n locations
  Clone ID: LIB3138-017-Q1-N1-F10
gtggaatcccttctggatttccgctcacagttatttgcaatagcatttttaatgagatgctcattagatatagctatgaaaaattactgcgccaggctaaagctccaagtatgtttttacaatccttcaaaaattttgtttctttgtgtgtgtatggtgatgataacttaattagtgttcatgaatatgtcaagccttactttagtggttctaaattgaaaagctttctagctagtcataacatcaccattactgatggtattgacaaaactagtgcaactttgcaatttagaaagttagcagattgtgattttctcaagagaaactttaagcagatgtctaattgtttngtgggtggcttctgaggacaaggcgagtttatggtcacaacttcaatatgtttc

SEQ ID NO: 37909 - DNA, 387 bp, Glycine max
  Clone ID: LIB3138-017-Q1-N1-F11
tcttcttcttttgttgatctgtgtttgtgtttgttttttctctcacctgaaaatgtcttgctgcggtggtaactgtggttgcggaagctcctgcaagtgccgcaacagctgcggagggctgaagaagtacccaaacctggagctcccctgagtcaaccaccaccgagaccttggtcatgggagtggcacctgttaaggctcaatttgagggtgctgaaatgggtgtgcccgctgagaacgatggctgcaaatgtggaccaaactgctcctgcaacccctgcacttgcaagtgaggtgttgggagagcaagcttcaagcagagatagcccttaattaggaataatgataaactattaatgtgtagcttaaaacttatgtattatgtct

SEQ ID NO: 37910 - DNA, 106 bp, Glycine max
  Clone ID: LIB3138-017-Q1-N1-F4
ggaaaaaagccaagccttccctcaactccaaacacaaagacatcatcattgatggctgccgccgtctccactgtcggagctgacaacagagctcttttgaacctgg

SEQ ID NO: 37911 - DNA, 243 bp, Glycine max
  Clone ID: LIB3138-017-Q1-N1-H2
ctcgcattgaagcaaggaagcctgattttgaagcatatattgatccacaaaagcaatacgcagatgcagtgatagaagtgttgccaacgcaactcattccagatgacaacgagggttagattttgagagtgagattgatacagaaagagggggttaagtactttagcccggcttacttgtttgatgatggctctaccatttcatggataccatgtggaagaaagcttacatgctcctaccctg

SEQ ID NO: 37912 - DNA, 360 bp, Glycine max
  Clone ID: LIB3138-017-Q1-N1-H3
acaggaccaaccgaagctcggcaagtgagacagagagcgctctctcgaatagaatggctgcaaaaagctgatgtgcctaccatagcacagatcgaagagagccattcgctgcagcggatgatgaatgctcctgattcaaatgatcatattgatttactgttgagcattgatttgttgggtttacaaggagcaggtcaagcttttccaaacaaaattgtttttgatgataagcttgtgttggctaacacacaagaattctttgatggaaattttccagtggattcttggttaccaatttttgtgaattgtctttatcctgtaagtcaattaccttcaaaagctgtcgttgtaaatgttaca

SEQ ID NO: 37913 - DNA, 295 bp, Glycine max
  Clone ID: LIB3138-017-Q1-N1-H7
cttcaaagaaaggctgtttaatggtcaagattgtgatgtctgggaatgcagcagtcaaaaggagtgattgggcctcattggtacaagtgtttttaacaaacagcaacagtacagagcattttgatgcatgtaagtggacaaaatcagaaccacatttctgggaattgatcttcccaatagaggtatgtggtcctaataatggttttgaaatgtggagttctgagtgggcaaatcaaacttcatggcatttgagtttccttattgacaattccaaacagtctacagtttttgatat

SEQ ID NO: 37914 - DNA, 336 bp, Glycine max
  Clone ID: LIB3138-018-Q1-N1-A3
caggaaatttggtctttggtgtcaaattgacacccttaaacaatatgtgtgcatatgggctcaatcctggtatttcaagttctcgtctcttgggcacacattcctaagtccatttcacagcaaactagatcggaatcaaatggcaacagtgagaacaccattgaatcttgattctagcacgcagagcttttgtcagttttctattgaccttatcggtggaggaatcttagcggacaaaactggagatcgtatcacacttatacaaaattcttcaattagtaacttattgagagttgcttcttggaagaaacgctgtttaatgctcaacattgtgat

SEQ ID NO: 37915 - DNA, 70 bp, Glycine max
  Clone ID: LIB3138-018-Q1-N1-C12
aaaaaaaaaaaaaaaaaaaaaaaaaaaaaaaaaaaaaaaaaaaaaaaaaaaaaaaaaaaaaaaaaaaaaa

SEQ ID NO: 37916 - DNA, 388 bp, Glycine max
  Clone ID: LIB3138-018-Q1-N1-C2
ggcagcaatatccgcccggagcgaattttgcaggaccccataccggcgcctctacaggcctataaagaccgatcatcgacactcactcgtcactacacgtcaccaacgacaaaccgacaacccaaaatgtacgccaagtccatcatcgccgacgccgccctcgcgggtgccgtctttgccgaccctgttggcgagaagcagccccccaagggctggtggaccgagggtctcgagccctacatgacctaccacacccggtacctcgccctcgagtgctacaaccagcacaactcgcagttctttgaccagtgctgcagccccctcttgaagggtgtctcgctcgactcgcgccccgctcagtgcacttcctctgacgaggccactttgt

SEQ ID NO: 37917 - DNA, 428 bp, Glycine max
  unsure at all n locations
  Clone ID: LIB3138-018-Q1-N1-C3
gataaccttaattagtggttcatggaatattgtcaagcgcttacttttagtcggttcttaaattcgaaaaagctctcttagacctagtcataacaatcaccattactcgatggtatntgacanaaactacggtgcaactttgcatatttagaaaagttacgcagattggtgatatttctcaaagaggaacctttaagccagatgtcttaatgttttgtgggtggcttcctgaggacaacggcgagtttatggtcacaacttcattatgtttcgtgtaataatctggaaatgcaagaagcttatcttgtcaacctcgtaaatgtgttacgagaattgtatttgcacagtccagaggaagctcgccaattgagaaggaaagctctctctcgtatcgaatggctgcaaaaagctgatgtgcctaccatagc

SEQ ID NO: 37918 - DNA, 375 bp, Glycine max
  Clone ID: LIB3138-018-Q1-N1-D2
gggcccaattggccattgttagcctagaagtaggcaaagcacatggtgccagtcattaattaccgggcacgtcgagtccgatcgcatatatagcttcaatagcatttacatcgtatctccctcgcagagcatcctatacaacttcaaagatgacggacccttgcgaacagaccaaagagcaactggtcaacctgctggccaagttccatgaccccgcctagctgtactacatcgctccagggacgacaggtacagtggatgataatgaccactcgagctcgagaccccttcaatcgaggccgcattcgaatcagtgcaactcgagcggctgtggcgccaaataccataagagtcttgagcttggacttgaagagt

SEQ ID NO: 37919 - DNA, 422 bp, Glycine max
  Clone ID: LIB3138-018-Q1-N1-D3
cgtagcctccggattccggttcgagggttaatggggggttgccactctcctctcttgttgtacacttggtccttttggtttgcagaaaggaacatggaagctgtgtgtgctttttctgttggcacacttcacatcccaacagcacatgaaacatcaaactcctttaggaaatccatattcttgagcaaccaagtggcttcaccagtttcattggtttttctcacgggcagttcaaaatccaagcttttaactgccttgtcaccccctccattgacagaatccagtaaccaacctgaggctgagccagaatttgaaagtcatgcaaagaaatttgactggtactctcagtggtaccctttgatgccaatttgtgaccttgacaagaggaagccagatgggaagagggtgttgggaattgatgt

SEQ ID NO: 37920 - DNA, 331 bp, Glycine max
  Clone ID: LIB3138-018-Q1-N1-D4
ggcactaactgggtatcttagaattgagaggtaatggaaatgaagaagccgtgttgtgaagagtcagagacaatagttggatcctgggaatgttggttcgacgatgcatgcatcgttgacatggattactttgagaagaccctttcaagcattaaacagaaaggtgttcgtgcagactcgattggtttcatcatcactcattatgcctccatatggcgtcctgacctctgtttctctgctgaaaatggtgtcaccactcacttccaatccctcggaagcgtcacaaattcatggatgaacaagaggttctttgtggaaaccttggtgagtg

SEQ ID NO: 37921 - DNA, 397 bp, Glycine max
  unsure at all n locations
  Clone ID: LIB3138-018-Q1-N1-E2
caccaataagctccataccttctaattctctactctctctcacttctctctatcacatttttcttacaagatggcagcatcatcagcatgccttgtagggaatggtttatctacacggggtaatagaataactcttaagaaggacttcaatggaagaagatatctctactcatcttggagattttcattattgaacaacaataaggcatcaaaagcattttccataaaagcatctttggagcaaaggcaagaagaaaggagaagggggtttctgaaactgttgcttggaaatctgggagttggtttgcctgcactattgggaagtggcaaagcttatgctgatgaacaaggggtntcatcctccagaatgtcttactccaggtttctggagtatttg

SEQ ID NO: 37922 - DNA, 309 bp, Glycine max
  Clone ID: LIB3138-018-Q1-N1-F12
gtccataagtgactgtgtatacagcttcaagactgcctgtgagatagaatagagaacatccaggaggaagtttctacatccgtccacaacgtggcttagactgttcaaccaatctaatcaatcaagatggttattttttatttgtaaataacataaatgctagaatctatacagattatcatatagtcttgactaaatcatatggcattgattaaggcctcaactctcaggaatcatattaaatacaggtgtctaaaaaaaacgagattcatattgtttacaaatgaaaaattaccatcttgattgatt

SEQ ID NO: 37923 - DNA, 286 bp, Glycine max
  Clone ID: LIB3138-018-Q1-N1-F6
cgtttatagcgtttttgttgcttcagagcctttattttgttctgtgattgttttcgcttgtgaaaaaaaaaaaaaaagggctggccgcatctagtgagtgtttttgcgcggaaatttatttcaggccgtaacctgcatgcttaccggtttttgcttttgagagtacaattagcgcttttccctattctggtcatgcccgcttcatggtgtgaatttgctttccttcacaattcccacacaatattcaggtcggatgcattaagcgtatttccttgggtgcctaatt

SEQ ID NO: 37924 - DNA, 295 bp, Glycine max
  Clone ID: LIB3138-018-Q1-N1-G2
cgatcctctcgagaaagccttctttcaatttggcgaaatcgtcgaatcgaaggtcatcaacgatcgtgaaactggaagatccagagggtttggatttgtgaccttcgccacagagcaggcgatgagagacgcaattgaaggaatgaacggccagaacctcgacggtcgtaatataaccgtgaacgaggctcaatcccgtggaaaaggtggcggcggcggcggcggcggctactgaagaggtggtggtggttactgtggcggcggaagttacagccgcggtggaagaagatattgt

SEQ ID NO: 37925 - DNA, 403 bp, Glycine max
  unsure at all n locations
  Clone ID: LIB3138-018-Q1-N1-G3
caagaacacagttggaggaaccattctgcgtagtgatctattggcaaattttttgacagagggcaattttagagcaagtgttgatttgcagcgcactcatcgtattagaggaatgattaaaatggtggccacagttggtattcctgagaatacaggtattatcattggcctgtgctatgaatagttcttttagggggcgcgccagttctgatatttacaccatctgctctcaagactgtgaattgtggaatcctgcttgcacaaaagcaatgactatgtcatttaatccaaacccgtgttctgatgcatggagtttggaatttctgaagcgtactggatttcattgcgatatcatttgtgtcactggatggactgccaccccaatgcangatgttcaagttac

SEQ ID NO: 37926 - DNA, 388 bp, Glycine max
  Clone ID: LIB3138-018-Q1-N1-G4
cgagggacaagagtttatgtgaatacagagacaagattcccagtgaagtggccaaagaaattgaggatgcagtttcggatctgaggaaggcgatgtcagaggataatgttgatgaaatcaagtcaaagcttgatgctgcaaacaaagctgtatccaagattggagagcacatgtcaggaggttctagtggcggttcctcagctcgtggttctcaagggtggggaccaggctctcgaggcagaatacgaggaggtgaagaagtaacgccaggaggggcttgtatccacttttactgatttattttggctagagttagagatgaatcatctatgctcattgagcatatgatataaggttttttgtactaaaaggttggaggtcatttttt

SEQ ID NO: 37927 - DNA, 75 bp, Glycine max
  Clone ID: LIB3138-018-Q1-N1-G8
acaataacaattcatgaacaacagacagaaaaacaaaaactaagagataaatgatgggaaagaaagaaattaatg

SEQ ID NO: 37928 - DNA, 335 bp, Glycine max
  Clone ID: LIB3138-018-Q1-N1-H6
cgaaggaagcgggggtggagcgcgtggtggcgacttcgtcgatctcatccattatgccaagccctaactggccagctgataagattaaggcagaagagtgttggacagaccttgaatactgcaaacagaaggggttgtactatcccattgcaaagactctagcagagaaagcgggttgggaatttgcaaaggagacaggttttgatgttgtcatgataaaccctggtacagctttgggccctctgcttccaccaagaatcaattcaagcatggaaatgcttgttagtgttctcaaagggggcaaagagacgtacgaggacttctttatggggaat

SEQ ID NO: 37929 - DNA, 161 bp, Glycine max
  Clone ID: LIB3138-019-Q1-N1-A10
taggaggattatatttgttagcttgtagaattatttcattaatctatgcaagctctctacctcttcctcttcctcttgtgaactctattttctcatgcaaattagatttcattaagcattaggaaatttaatttcttataaataaaaaagttttgatgcat

SEQ ID NO: 37930 - DNA, 189 bp, Glycine max
  Clone ID: LIB3138-019-Q1-N1-A2
tacaggatcctctcggggaattccaattccacattttcaagaaataaggaggcaaaaatgttcatatatgaattggaattatttgttttcttattaggcctatcctgaagccaaaggaaatgagatcggaattcctcggggaattccaatttcacatatttaagagataaggaggcgcaaatgtgcata

SEQ ID NO: 37931 - DNA, 415 bp, Glycine max
  Clone ID: LIB3138-019-Q1-N1-A5
atccacaacacttcttcatccatgacgcttggttcttcaggatccagtgtcgtggttccaaggaacttcagattgctggaggagcttgagaagggagaaaaaggaataggagatggcacagttagttatggaatggatgatggtgatgacatttacatgcgctcttggactggaaccattattggtccctataatactgtacatgaaggaagaatttatcaattgaagctgttttgtgataaagactaccctgaaaagcccccgagcgtccggtttcattcacggatcaatatgacttgtgttaatcatgaaactggagtggttgaatcaaagaaatttggtcttcttgcaaattggcaacagaggtttaccatggaagatatactgacccagctgaagaaggaaatggcggctt

SEQ ID NO: 37932 - DNA, 403 bp, Glycine max
  Clone ID: LIB3138-019-Q1-N1-B2
gggcacttcccgaagtgttaagagaatgcctctttctatagggggaggagctggtgcaaagaatgctattctcatgaatatgccaaatgctgttctttcaatgtggagatattttgttggagatctcgtctttgaagtttctaagatgacttctccctacattaaatgtacagtctctttcttcatagcatttggaaatttggctgatgataccatcaattttgaggcttttccccacaagctggtgcagtttggagagattcaggaaaaagttgtattgaaattttcacaagaggaatttcttacagcttggtcaactcaggtgcgtcctgcaacaactctgttggctgatgggtgtccatatttgtatgcaatggtgcatgatagttcagtgtctacaata

SEQ ID NO: 37933 - DNA, 412 bp, Glycine max
  unsure at all n locations
  Clone ID: LIB3138-019-Q1-N1-C5
ctcaggtgcgtcctgcaacaactctgttggctgatgggtgtccatatttgtatgcaatggtgcatgatagttcagtgtctacaataccaggtgattttgtcattggtgtcaagttgacaaccataaacaatatgtgtgcatatgggctcaatcctggtatttcaggttctcgtcttttgggcaccattcctcagtccatttcacagcaaactgtttggaatcaaatggcaacagtgagaacaccattgaattttgattctagcaagcagagcttttgtcagttttctattgaccttctcggtggaggaatcttagtggacaaaactggagattggatcacacttatacaaaattctccaattagtaacttgttgagagtngctgcttggaaaaaaggctgtttaatggtcaa

SEQ ID NO: 37934 - DNA, 420 bp, Glycine max
  Clone ID: LIB3138-019-Q1-N1-C6
ggcctggagattctggcatttccatgtaatcaatttggtaggcaggaaccagaaagcaatgataaaattgtggattttgtctgcagtcgcttcaaatctgaattccccatctttgataagattgaagtgaatggggacaattctgctcctttgtacaaattcttgaagttggggaaatggggaatttttggtgatgatattcagtggaacttttccaagtttgtggttgataagaatggacaagtagtgggtcgctattatcccaccacttctcctctcagccttgagcgagacattcaccagcttctgggtatttcttgaaggcaaaaagataatgtcttcctgagctcattatgttcccttatgtggtgaaaatgtaatgcaaatatgcacaaactgatgcaattaatcttatggaca

SEQ ID NO: 37935 - DNA, 399 bp, Glycine max
  Clone ID: LIB3138-019-Q1-N1-E10
gttctagatcgcgagcggccgccctttttttttttttttattaattataccagcgtcttcaatttgtatgttaaaatcacagggaataatataagttatacaatatcatacaggaaaagcaaggaattgaatttacttctggacgtagcattcatccactagttaccctcatcaaaatatttgtgtcatgtcatagcatagcagcatactagaaatagaagacagtgaagactttgcttttcatcgacatcctagttcaactctccattcatcaccaatggtcttatttgtgcatagtttctggagatcaatgtaaccaatgatagtgtcctcgaaaactgcattgtccagcttagcatcatcaaaggtggatcctgacaataccgtgttcttaaatat

SEQ ID NO: 37936 - DNA, 91 bp, Glycine max
  Clone ID: LIB3138-019-Q1-N1-F2
aaaaaaaaaaaaaaaaaaaaaaatataaaaaattaaaagactgaaaaaaacataatgagcataccataccacaaaattaagggaggtccat

SEQ ID NO: 37937 - DNA, 354 bp, Glycine max
  unsure at all n locations
  Clone ID: LIB3138-019-Q1-N1-G1
ggcggcgtggggttatacggcggagctccacgtggcagcgtcgggcctttttttttaagccgccgcaaagtttctctttgcgcctcttcttcttcttactcctccatttctgaccacgtttctttcgtgaaggatgtagctgcgactcagcctcctcagcatctttcacaactcctcagtattctgaagaccagaggtgaatctattatcntcccgggtgccaggcaagggataattcctcttgctataccactgtcaaaaaatagctctggtaatgtgactgcacttgtgcggtggccgacggctccacctgagatggaaatgccaagtgtggaagtcagaaaatatggagta

SEQ ID NO: 37938 - DNA, 308 bp, Glycine max
  unsure at all n locations
  Clone ID: LIB3138-019-Q1-N1-G3
aaaaaaaaaaaaaaattaaaaaaaaaaaaaaaaaaaaaaaaaaaaaaaaaaaaaaaaaaaaaaaaaaaaaaaaaaaaaaaaaaaaaaaaaaaaaaaaaaaaaaaaaaaaaaaanggggccccccccccccttttgacctcttcccccccgtatttttttccgccccgttcccttcagccttcccacttttcctttttgtgagtctttttaaaccttgccctaatcttggccttacctttttcctttttaaaatttttttccgttcccatttccccccaacttccaaccccgaaccttaaattttaaac

SEQ ID NO: 37939 - DNA, 366 bp, Glycine max
  Clone ID: LIB3138-019-Q1-N1-H2
ggcttaaactcttccttactttctcactatcctgtccctgaagaatatgagcacccacctcgtggcttcagtacaaaatttgatggatcttctatccttaagagatgcagttccaatgccaattctaggaatgttgactcggaacgagtcgggttcgattccaactggttaaaccgttggatggaattagataacaagtgtagccaaactggagatgcttcattgaaaaataatggacgccctgatgatgataaaagtgacaagattctcgaagtggatacttggaggccacactttaagtcccaccacaacagtagcagctcctctcaagcagcacattattatcttgatgctgattacaataat

SEQ ID NO: 37940 - DNA, 334 bp, Glycine max
  unsure at all n locations
  Clone ID: LIB3138-019-Q1-N1-H3
ggaaaccaacagatgaacctccacatgttgaaggggatgttgttaaagcagatgctggtcatgttgaagtggagaaatacattgaagaaacttatggaagttgggcagtgttccggccacagtacatgattgggtctggcaacaacaaagactgtgaggagtggttttttgacaggattgttcgggacagacctgtgccaattcctggctcgggactgcaactcagtaacatagctcatgttagggacttatcttcaatgcttactcttgctgttgagaatccagaagctgcanatcagaccattttcaactgtgtgagtgaccgtgcagtgac

SEQ ID NO: 37941 - DNA, 382 bp, Glycine max
  Clone ID: LIB3138-019-Q1-N1-H6
atttgagttcgggtacagaggtcaagcaatggaatggatgactgtgggtacaaggaaagaaaactaatgaaacaaacctaacacaacacaaatccttgaaacgacgacggaaatggccgtttcgagctcgcacatgcgtttcacctttgagtgccgctccgatcccgatttctcgccccccccgccgtccttcgacaacctccgccgccgaaacttccgctcctccgcaggatccggcgcggcgtttcacggcatctcctccctcatcctccgcttccctcccaacttccagcgccagctaagcaccaaggcgcgccgcaactgcagcaacatcggcgtcgcgcaaatcgtcgccgcttcgtggtcgaacaacagcgacaac

SEQ ID NO: 37942 - DNA, 213 bp, Glycine max
  Clone ID: LIB3138-020-Q1-N1-C8
gtgagcaaggaccacactgcctcatagttctccaattaggaactccttgagagttgctgctcggaagaaaggctgtttaatggtcaagattgtgatgtctgggaatgcagcagtcaaaaggagttattgggcctcatcgttacatgtgtttttaacaaacagcatctgtacagatcattttcatgcatgtaattcgacacaatcagaaccaca

SEQ ID NO: 37943 - DNA, 122 bp, Glycine max
  unsure at all n locations
  Clone ID: LIB3138-020-Q1-N1-D1
gagcaatgataaataaaatgaccagtgaatggttttaaagagctgtatgcatacacaattgttacatcagtttttttttttcttttgtcaaantaaaataatattaaatatataaaaattaa

SEQ ID NO: 37944 - DNA, 75 bp, Glycine max
  Clone ID: LIB3138-020-Q1-N1-D11
aaaaaaaaaaaaaaaaaaaaaaaaaaaaaaaaaaaaaaaaaaaaaaaaaaaaaaaaaagatgaaagaaaaaaaaa

SEQ ID NO: 37945 - DNA, 334 bp, Glycine max
  Clone ID: LIB3138-020-Q1-N1-E2
ctagttctagatcgcgagcggccgcccttttttttttttttttagtggtacgcaccatcaccatttgacattaaaattggctcctataacataataactgatatttgtaaaaatatgtaacccaaaaataagcatgttaatcagaagcaaatgcttcttatgctgtatcatacatatgccagaccaccccgaatcagtccccaagtccatttagagtatgcttgtttctccattgtcatactttcttatagacctcaacctgaatgcaatgaacaagttggaggtgttgaagccatggactctctcattctcatttgggcgagcactgcaacaa

SEQ ID NO: 37946 - DNA, 278 bp, Glycine max
  Clone ID: LIB3138-020-Q1-N1-F6
ttcacactgtaaatcgatgttgctgcgttgttgtatatttaattaattaatttatttgtttattttggtgtagtttcgatcttttgctcgttgaaattacctacgtgttacaaaagttgtagtaataataaatttatgttatttagttggacgtgaatttttcgtatattataatgtttttaattcgattgttagttattactcttaaaaaaaaaaaaaaaaaaaaaaaaaaaaaaaaaaaaaaaaaaaaaaaaaaaaaaaaaaataaaaataataaa

SEQ ID NO: 37947 - DNA, 310 bp, Glycine max
  Clone ID: LIB3138-020-Q1-N1-G2
tgaaaaaaaaaaatatttaaaaaaaaaaaaaaaaaaaaaaaaaaaggggggaaattaaaaaaaaaaaaaaataaaaatatataataaattaagggggattaatattaaagttgaattattaacccgaaaatttttttggggggcccccacaaaaaatattaaaaataatttattaaaattggggggggcccccccccttgttgccctttccccccgtgttttttttttggtccgggcccctggggggccccaattttcctttttgggggggttttaaaagcggggggaaaaagggggaaaactttttccc

SEQ ID NO: 37948 - DNA, 255 bp, Glycine max
  Clone ID: LIB3138-020-Q1-N1-G4
gcacttgggaaaggtaagaaaattgtttttcttactagagttgatccttttccagtagctttactggctgttctttttggcgttaagaatgaaattctgagttctaacgccactaatcctatgctgacgcgacttcttgagaactgtaagagtctcaaatatctggttgatgagtgtccttttgcatttgtgaactagtatgtagtattttattcacttaaataaagcgcattactatgtgcaatgagtgtgttt

SEQ ID NO: 37949 - DNA, 339 bp, Glycine max
  Clone ID: LIB3138-020-Q1-N1-H5
tgaaaaaaaaaaaataatataaaaaaaaaataaataaataaaaagaaagagtgaaaataaaataaaaaaagaaaaaaaaaaaaaaaaaaaaaaaaaaaataaacaaaaataaaaaacaaaaaaaaaaaaaaataaaaaatggggggggccccccacttaggtacctcccacccccggaaataatttggggcgggggctttggggggggcaaactttcccttataggggggtttttgaatcctggcgaaaaccagggaaaagcggtttgcgtgttgaaaaatttttcgcttccaaaatcactaacaaaattagcccggaaattaaaatggtgaaagccgg

SEQ ID NO: 37950 - DNA, 243 bp, Glycine max
  Clone ID: LIB3138-021-Q1-N1-A2
gttcaccctccacccaaccccttttacttgtaatttgtggaaaggaaaagggattgactgaactctaccgagaggattcgtaacagagagaagagggaacattcttgtttcacttttgattttggtatatagtatagacacaacagttaagatacttgtttgaaattgtaattaatgagaaacttgttttatttgtccatcatagatttgctttcttagactattcaaattaactactttaac

SEQ ID NO: 37951 - DNA, 125 bp, Glycine max
  Clone ID: LIB3138-021-Q1-N1-A4
gccttacatgacattaataaaataattgggtaagtgtagcttcttcctttcaattatctgcacttaacttatcaaatgtcacttggcatacatgacattaataaaataattgggtaagtgtacgt

SEQ ID NO: 37952 - DNA, 393 bp, Glycine max
  Clone ID: LIB3138-021-Q1-N1-A5
gggttcttcccaatataggtatgtggtcctaataatggttttgaaatgtggagttctgagtgggcaaatcaaacttcatggcatttgagtttccttattgacaatcccaaacagtctacagtttttgatattctcttgggaatctctcaagattttgaaattgctggtaatactcttatgccagctttttctgttccacaggctactgccagatcttctgaaaatgcggaatcctctgcatgatctggaatttgtgttttctttcgcttgttcgtttgtttaattcaataaaggaaattaggcatgaccctcttgttgagtatgctctgcctatttgaaaatttccacacctcttttaattgtcgtaatgatgtgtgaagtgtgtgttatttt

SEQ ID NO: 37953 - DNA, 409 bp, Glycine max
  Clone ID: LIB3138-021-Q1-N1-A6
gtgggaagtcctgtcaactttggaccttaaagcgccatggagggatgagacccagcaacagccaccgccactgccacagacacagacacaggtgtatgaacagcaatatccccagccacagtcacagcagctgccgcaattttttcaaccacatacatcagccccgagctaggcctgaacatgatgaaggacaacttgtacaagtgttattaacaaggcacaagaggtaaaagatctgtaaagcggttaggaagtagtggtactgatttttctgagggtgaaatgactctgtctattttagtttgttgttgtgcaacatttagtttgacccctgaagtgattagcgggtactcatgattctgttgttctttaagtaatatttatttgacttttacagtttactttagtc

SEQ ID NO: 37954 - DNA, 320 bp, Glycine max
  Clone ID: LIB3138-021-Q1-N1-B12
caaagacttgttgtaattaattattgtgaattctatagttagcagtgggcttcaaaaaaagtacttcatgattcttatcttcaatgctgttgcacaccagtgtcttagccggtggtatatctgtactagaggaggcaagatcattttaaacgattgaggtaagtttctttctccaaggatgtcatgtgagaagcacccctttgttaccaattcattgatctgatccggattggatttgtgatcctagaatataaatttacgagttacagatacttactagcttcgattatgaattttaatattttctctctttgcatttt

SEQ ID NO: 37955 - DNA, 464 bp, Glycine max
  Clone ID: LIB3138-021-Q1-N1-C11
ttctagatcgcgagcggccgcccttttttttttttttttttaaacaatcaaacattattacagattgtagcttgggtgccaaactatccaaacaaatacattattcctattcatattaaccttgccaagcaattcaaattattctgcggaccaaccacagtttgcattatttcaaaagcattaatggaagaacaatatgagaaggagaaggaggctgagggaaaataaaatacacaaatcagactcaaagacaacacccattcttatcccattgaaaccttggaagggggattaattattaaccatgaataccccaagttagcattcatctttgagggggatcaactgtgcgaacattagcaactgtcattccctcaattcggtcctttgtgatttccacaaagtgaccaacaatctcatgaaactgcttaagccctgacaggggaagaatgatggaggatcta

SEQ ID NO: 37956 - DNA, 364 bp, Glycine max
  unsure at all n locations
  Clone ID: LIB3138-021-Q1-N1-C6
gttaaccaacaattgttggaataagttctgcagttaacaatcgttcctaaaatatcaacaaaaggattcgcacagcacttgggaaaggtaagaaaattgtttttcttactagagttgatccttttccagtagctttactggctgttctttttggcgttaagaatgaaattctgagttctaacgccactaatcctatgctgacgcgacttcttgagaactgtaagagtctcaaatatctggttgatgagtgtccttttgcatttgtgaactagtatgtagtattttattcacttaaataaagcgcattactatgtgcaatgagtgtgtttaaatttttnnnanannannnnnnnnnnnnnnnnna

SEQ ID NO: 37957 - DNA, 591 bp, Glycine max
  Clone ID: LIB3138-021-Q1-N1-D1
gttggggctgaggccgattcggttcgagacccattctaccttttccaaaaccatccaactctcatgttcgaagaaaacatacacaatctcttcaaactctaattttcttttcctttcatttaatttcctcaatggcggcttccgtcgaccagcgtccgtaccccggcctccacaatggcgtcgttcggcccctcaaaccaggcccggatatcccgcgtcccaagaagctaccccagccgccgccgccactctcggattcctcaagcgacgaagaagaagacaccaccttgaacttgaaggacctgattcgcaagggaacaacggaagttgaatcctccattttcgacccgcgcgacgatggaacctctgaccactggatccaacggaactcttcccttgtccgtttaacgggaaagcacccgtttaactcggagccacccctccctcgcctcatgcaccacggcttcatcaccccggtccccctccactacgtccgcaaccacgggccagtcccccgggcccgctgggaggactggaccgtggaaagtacgggcctggtcaccaggcccacatgcttcaccatggagcaac

SEQ ID NO: 37958 - DNA, 360 bp, Glycine max
  Clone ID: LIB3138-021-Q1-N1-D2
ccagaatactacaatggacgctactggaccatgtggaagctgcctatgtttggttgcactgatgcttctcaggtgttgaaggagcttcaagaggctaagactgcataccccaacggcttcatccgtatcatcggattcgacaacgttcgccaagtgcagtgcatcagcttcatcgcctacaagcccccaggcttctaagtgtgaaaaatttgcaaagcatttgtagccgccaccccactttgtttgtttgtacttaaactacattcccatttgtttttgctttttgagatttcatcatcctgtatttttggtttctgttttcggacttcaatggaaattaatggatgagaactaatgaat

SEQ ID NO: 37959 - DNA, 516 bp, Glycine max
  Clone ID: LIB3138-021-Q1-N1-E10
cgaaaaaaaaaaaaaaaaaaaaaaaaaaaaaaaaaaaaaaaaaggggggaaaaaaaaaaaaaaaaaaaaaaaaaaaaaaaaaaaaaaaaaaaaaaaaaaaaaaaaaaaaaaaaaaaaaaaaaaaaaaaaaaaaaaaaaaaaaaaaaaaaaaaaaaaaaaaaaaaaaggggggggggccccctaagggggcctggaaacccgggaaaaaaagcgggggggggcccggggggggtaacggctttacttaaaggggggtcgtaaaaaaatgggggaaaacaaggaaaaaaggggttccgggggaaaaaaggtttcccctaaaaattcccaaaaaaaaaaagccgggaagcaaaaaggggaaagccgggggggcccaaggggggggcgaacccaaaaaaatgggggggggcccaagggcccgtttaaaaaggggaaaacggggggggccaggggaaaaaaaaaaggggcaaaccccggggagggggggtttgggaaattggccccaggggggtttttttt

SEQ ID NO: 37960 - DNA, 620 bp, Glycine max
  Clone ID: LIB3138-021-Q1-N1-E2
tcggttcaagggaaagtggaatgtggaatcccttctggatttccgctcaaagttatttgcaatagcatttttaatgagatgctcattagatatagctatgaaaaattactgcgccaggctaaagctccaagtatgtttttacaatccttcaaaaattttgtttctttgtgtgtgtatggtgatgataacttaattagtgttcatgaatatgtcaagccttactttagtggttctaaattgaaaagctttctagctagtcataacatcaccattactgatggtattgacaaaactagtgcaactttgcaatttagaaagttagcagattgtgattttctcaagagaaactttaagcagatgtctaatgttttgtgggtggctcctgaggacaaggcgagtttatggtcacaacttcattatgtttcgtgtaataatctggaaatgcaagaagcttatcttgtcaatctcgtaaatgtgttacgagaattgtatttgcacagtccagaggaagctcgccaattgagaaggaaagctctctctcgtattgaatggctgcaaaaagctgatgtgcctaccatagcacagattgaaagagtccattcgatgcagaggatgatgaa

SEQ ID NO: 37961 - DNA, 474 bp, Glycine max
  Clone ID: LIB3138-021-Q1-N1-E4
tgatgataacttaattagtgttcatgaatatgtcaagccttactttagtggttctaaattgaaaagctttctagctagtcataacatcaccattactgatggtattgacaaaactagtgcaactttgcaatttagaaagttagcagattgtgattttctcaagagaaactttaagcagatgtctaatgttttgtgggtggctcctgaggacaaggcgagtttatggtcacaacttcattatgtttcgtgtaataatctggaaatgcaagaagcttatcttgtcaatctcgtaaatgtgttacgagaattgtatttgcacagtccagaggaagctcgccaattgagaaggaaagctctctctcgtattgaatggctgcaaaaagctgatgtgcctaccatagcacagattgaagagttccattcgatgcagaggatgatgaatgctcctgattcaaatgataatattgatttact

SEQ ID NO: 37962 - DNA, 271 bp, Glycine max
  Clone ID: LIB3138-021-Q1-N1-E7
caaaaggattcgcacagcacttgggaaaggtaagaaaattgtttttcttactagagttgatccttttccagtagctttactggctgttctttttggcgttaagaatgaaattctgagttctaacgccactaatcctatgctgacgcgacttcttgagaactgtaagagtctcaaatatctggttgatgagtgtccttttgcatttgtgaactagtatgtagtattttattcacttaaataaagcgcattactatgtgcaatgagtgtgttt

SEQ ID NO: 37963 - DNA, 550 bp, Glycine max
  Clone ID: LIB3138-021-Q1-N1-F1
tcggttcagcctctttaacccaaaaccaaagcttgcagtcaatagctaaaatggtcgtcaaggtcggtatcaacggtttcggtcgtattggccgcattgtcatgcgcaatgccatcgagcacggcgacatcgaggtcaccgcggtcaacgaccccttcatcgacctcgactacatggtctacatgttcaagtacgactcgacccacggccgcttcaagggctcggtcgaggtcaaggacggcaagctctacatcaacgacaaggccgtcaccgtctacaacgagcgcgaccctgccgccatccagtggggcgcggccggtgccgagtacattgtcgagtcgaccggtgtcttcaccaccgtcgacaaggcctcggctcacttgaagggcggcgccaagaaggtcatcatctcggccccttcggccgacgcgcccatgtttgtctgcggtgtcaacctcgacgcgtacaagtccgagtaccaggtcgtttccaacgcctcgtgcaccaccaactgtctcgcccccttggccaaggtcatccacgacaacta

SEQ ID NO: 37964 - DNA, 545 bp, Glycine max
  unsure at all n locations
  Clone ID: LIB3138-021-Q1-N1-F2
gtctacttagttggggatgatgaggcaatgtccatggaggaaagaagaatgtctttgccaaaatatcaggtgcatgatgaaagtagccaggtaagtcatactacctctttaatagatggagttgctttcacatctaaccagatgagtataggctttatgcttcctgttttcagattcagttgtttacacattgtttcctatttaaagaggtacattctgtataaatttttaattcttttttaaaaataaaataaacggaaaagaaaatatgatcattttaatcctcactctggcttccaacctaaatgggtagtgcatgctatttaattttgaatggcctctatggctgcaagctatggctccaatttttgtgggcatctaaagattcaagtaggtactgtattaatttcttttggtagttaattataattaccataccacaacataatttgtgaagcttgctgcaaactaccatcttcgtgatctttcatcccagcatttgtacaccgtaaaagagtatgtatatatgaattntattgggtttg

SEQ ID NO: 37965 - DNA, 557 bp, Glycine max
  Clone ID: LIB3138-021-Q1-N1-F5
attaactgttgagcattgatttgttgggtttacaaggagcaggtaaagcttttccaaacaaaattgtttttgatgataagcttgtgttggctaacacacaagaattctttgatggaaattttccagtggattcttggttaccaatttttgtgaattgtctttatcctgtaagtcaattaccttcagaagctgtcgttgtaaatgttacatgtggtagtggacgtggtggtttacccaccactgcttggattagttctgcagttaacaatcgctcctcagatatcaacaaaaggattcgcacagcacttgggaaaggtaagaaaattgtttttcttactagagttgatccttttccagtagctttactggctgttctttttggcgttaagaatgaaattctgagttctaacgccactaatcctatgctgacgcgacttcttgagaactgtaagagtctcaaatatctggttgatgagtgtccttttgcatttgtgaactagtatgtagtattttattcacttaaataaagcgcattactatgtgcaatgagtgtgttt

SEQ ID NO: 37966 - DNA, 215 bp, Glycine max
  Clone ID: LIB3138-021-Q1-N1-F6
ctcaagccgaaaaaaataatttacctttgtttttgcttttgatgattttttattggattatttgatacaactgcagtgatattacatgataaaatttgtatcttcaaagatttttttgggggaatgttctcctttaaaatactgaattctgttgtagccttgtaggatggtatgacatggcaggaactctaataaatctggaagaatgttagtcc

SEQ ID NO: 37967 - DNA, 428 bp, Glycine max
  Clone ID: LIB3138-021-Q1-N1-G10
gagatttttctctctcagatctcattggtcttcttcttcttctctctcttctttgagcttattgtattttatggacaaaggatggggactcacccttgatacctcttcctctcaatctcttccattattcccttccaacgataataagatgtttcctctcctcggattccccgtcaacctcagccgcgcctccaaggaagacgatgaaaaccgcaaagttgtcggtgaagttgacttcttctctgacagaaacaaacctacacctccaccctctcacgaccacaacgttaaacccaacatcgtcaagaaggaaatcgatgaaacacctcttcacattaatactggtttacaactccttactgctaacaccgggagtgaccaatctaccgtggatgacggggtttcatctgatgcagaaaataagcgag

SEQ ID NO: 37968 - DNA, 509 bp, Glycine max
  Clone ID: LIB3138-021-Q1-N1-G2
ggaccggggctgccacccttgccggcctaatctccgcctccatcgcccatgcattcgccctcttcgtcgccgtctccgtcggcgccaacatctccggcggccacgtcaaccccgccgtcaccttcggcgccttcgtcggcggcaacatcaccttcctccgcggcatcgtctacgtcatcgcccagctcctcggctccatcgtcgcctccctcctcctggccttcgtcaccgcctccactgttccagcattcggactctccgctggagttggagttggcaacgccttggtgttggagatcgtgatgaccttcggtctggtgtacacggtctacgcaactgccattgaccccaagaagggtaatttgggaattattgctcccatcgccattggtttcattgtcggcgctaacattttgttgggtggggccttctctggagcggccatgaaccccgctgtgacatttgggcctgctgtcgtgagctggacctggaccaaccactggatctac

SEQ ID NO: 37969 - DNA, 537 bp, Glycine max
  Clone ID: LIB3138-021-Q1-N1-H2
tcggttcaggatgatgaattggttaaactcacactcaaggcactggctgaacaacctgcccagcctactgatgctcagagacatgacctatcttgggaggcggccacgaaacggtttcttaaggccgccgacttggacaagccattagatagaaaattgttaagaacaagttcaaactttctggctgcctccataaatttgcaagagaaagtagatgaagcatcagcatatgtgcatcatgtagcttctgggtttgaagtatcgagaagaatcttcggtgccattccagatagcctgcagccagatgaagagctacgcaaggaacttgggttgactgaagcttccacgaaataaggttaaagaaaaatgattttggaatgttgtgatgttaattaaaatttctagagattctaacttctattcataatcggttacccgtgcattcacaagggtcgtgcttgtctttacacatgttttaaaataatttatgtatataattatttgtttaaaaataaatagagcatatgtttacatttt

SEQ ID NO: 37970 - DNA, 191 bp, Glycine max
  Clone ID: LIB3138-022-Q1-N1-A2
caaaatcctttttggtttaaaaacataagagatcttgaatttccatatgtcttacacctaaatatcatatattcaagtgtttaagatactaggaatttatggaatcttagtgaacacctcctttatctagggtaggaattatgggtagaggtagtagttgaaaaattcttgtattgtgaaagtagtataat

SEQ ID NO: 37971 - DNA, 431 bp, Glycine max
  Clone ID: LIB3138-022-Q1-N1-A3
ggggtttttaatctttatctttggtattacaacttgattgtctaagtaactgctagttcttttctggattgtattgcgattactataataatagttttaagaactcagtcattttgtttccgttgaatgaaattgattgtcaaaatcacgtccattaagtatttgaattttttaaaaaaaaaaataaaaacttgaaagaaaaaatggaaaaagctgtttcctgtaaaaaaaaaaaaaaaaaaaaaaaaaaaaaaaaaaaaaaaaaaaaaaaaaaaaaaaaaaaaggggggccccccatcttttaaccttgtccccccggaatttaattggggacgggtccctgggggggtccaaattttccaaaaaggggggggcttaaaactttggggaatccaggcaacaccccgggacagggggaaaatgtttttccc

SEQ ID NO: 37972 - DNA, 480 bp, Glycine max
  Clone ID: LIB3138-022-Q1-N1-A4
cttccttagcctcgaattccggttcgagggcttaattgcattacagagatgtttgtagcagtggaagggtagtttccatcagagctcaagtcaccactgaggctccagccaaggttgaaaaagagtccaagaaacaggatgaaggtgtggttgtgaacaagttcaaacccaagaccccttacgttggtagatgcctgctcaacacaaagatcactggggatgatgctccaggagaaacttggcacatggtcttcagcaccgagggagagattccttacagagaaggacaatcaattggggtaattcctgatggtgttgacaagaatggcaaacctcataaactgagattgtattctattgctagcagtgccattggtgattttggagattccaagactgtttctctatgcgtgaaacggctagtgtacacaaatgaaaatggagaaattgtcaagggagtctgctcaaatttcttgtgtg

SEQ ID NO: 37973 - DNA, 94 bp, Glycine max
  Clone ID: LIB3138-022-Q1-N1-A9
aaaaaaaaaaaaaaaaaaaaaaaaaaaaaaaaaaaaaaaaaaaaaaaaaaaaaaaaaaaaaaaaaaaaaaaaaaaaaaaaaaaaaaaaaaaaaa

SEQ ID NO: 37974 - DNA, 581 bp, Glycine max
  Clone ID: LIB3138-022-Q1-N1-C2
ctcgagccgaatcggctcgaggtgcaactttgcaatttagaaagttagcagattgtgattttctcaagagaaactttaagcagatgtctaatgttttgtgggtggctcctgaggacaaggcgagtttatggtcacaacttcattatgtttcgtgtaataatctggaaatgcaagaagcttatcttgtcaatctcgtaaatgtgttacgagaattgtatttgcacagtccagaggaagctcgccaattgagaaggaaagctctctctcgtattgaatggctgcaaaaagctgatgtgcctaccatagcacagattgaagagttccattcgatgcagaggatgatgaatgctcctgattcaaatgataatattgatttactgttgagcattgatttgttgggtttacaaggagcaggtaaagcttttccaaacaaaattgtttttgatgataagcttgtgttggctaacacacaagaattctttgatggaaattttccagtggattcttggttaccaatttttgtgaattgtctttatcctgtaagtcaattaccttcagaagctgtcgttgtaaatgttaca

SEQ ID NO: 37975 - DNA, 356 bp, Glycine max
  Clone ID: LIB3138-022-Q1-N1-D9
tgttgatgataagcttgtgttggctaacacacaagaattctttgatggaaattttccagtggattcttggttaccaatttttgtgaattgtctttatcctgtaagtcaattaccttcaaaagctgtcagtgtaaatgttacatgtggtaatggacatggtggtttacccaccacagcttggatttgttctgcagttaacaatctctccttacatatcaacatatggattcgcacagcacttgtgaaaagttagaaaattagttttattactagagtaaatccttttcgagtgactctactgactattctttttggacgctagaatgaaattctgaattctaacgccactaatacta

SEQ ID NO: 37976 - DNA, 106 bp, Glycine max
  Clone ID: LIB3138-022-Q1-N1-E7
aaaaaaaaaaaaaataaaaaaaaaaaaaaaaaaaaaaaaaataaaaaaaaaaaaaaaaaaaaaccaaaaaaaaaaaaaaaaaaaaaaaaaaaaaaaaaaaaaaagg

SEQ ID NO: 37977 - DNA, 578 bp, Glycine max
  Clone ID: LIB3138-022-Q1-N1-E9
agtatgctgctaggcctttgcgtccttcgttgataaagaacaaggagaagcgatcggagctgcacgcgaaactgaagcaccagaagaagctcgagaagcgcgccaaggccaatgctcgggacgctgctctcaagaaagctctcaagctcggcgaggagcctccagagaagaaggtccctcgcactatcgagaacacgagggaactcgacgagaccgtttgcaagcccgatgacgaagagttatttgctggaaatgatgctgatgaatttggtccaattttgaatcagcaacaaactcccaagatattaatcaccacttgccgcttccattctactaggggacctgcttttatatcagagttgctttcagttataccaaatgcacattacttcaagagaggaacatatgatctgaaaaagattgtagaatatgcaaagaagaaggacttcacttctattatagttgttcacaccaatcgtagggaaccagatgctcttttaatcataggtgtacctgatgggcctactgctcatttcaagctctcgaaacttgttttgcgcaaggatatcaagaatcat

SEQ ID NO: 37978 - DNA, 563 bp, Glycine max
  Clone ID: LIB3138-022-Q1-N1-F1
gaatcaatccttctttgataaagaacaaggagaagcgatcggagctgcacgcgaaactgaagcaccagaagaagctcgagaagcgcgccaaggccaatgctcgggacgctgctctcaagaaagctctcgagctcggcgaggagcctccagagaagaaggtccctcgcactatcgagaacacgagggaactcgacgagaccgtttgcaagcccgatgacgaagagttatttgctggaaatgatgctgatgaatttggtccaattttgaatcagcaacaaactcccaagatattaatcaccacttgccgcttccattctactaggggacctgcttttatatcagagttgctttcagttataccaaatgcacattacttcaagagaggaacatatgatctgaaaaagattgtagaatatgcaaagaagaaggacttcacttctattatagttgttcacaccaatcgtagggaaccagatgctcttttaatcataggtgtacctgatgggcctactgctcatttcaagctctcgaaacttgttttgcgcaaggatatcaagaatcat

SEQ ID NO: 37979 - DNA, 174 bp, Glycine max
  unsure at all n locations
  Clone ID: LIB3138-022-Q1-N1-F3
attatgcatatttttctattggcaaattttttgacagaaggcagcggntttgcaagtgttgagttgcatcccactcattggatttgaagaatgattaaaatggtggccacattttgtattcctgaaaatacaagtataacattggcccgtgctattaaaaattcttttaagggg

SEQ ID NO: 37980 - DNA, 246 bp, Glycine max
  Clone ID: LIB3138-022-Q1-N1-G5
ctatttttgcatatattgctaagtttccttgttcattgtctgtgtggcttattttctaattctgcagctcacgaaacttgtcgtgtaggtctgtgtaccatattaaattactacatacacactttttactttcttggcctgatgttactgcagttaaaaactccgctaaaatagacttagacaagaaacattaagtaccgtttgagcatttgatcatttaagtaatttatgatgcttcattcagtc

SEQ ID NO: 37981 - DNA, 137 bp, Glycine max
  Clone ID: LIB3138-022-Q1-N1-G9
ggaaatgggcttgcctgcaaaggcaaaggtgaagacacaacatggggatgcccctttgggtggttgcgctcacactgagaaagggaacctgagaatgttcccttggaaaaccttctaacatacccatgtgttagaga

SEQ ID NO: 37982 - DNA, 357 bp, Glycine max
  unsure at all n locations
  Clone ID: LIB3138-022-Q1-N1-H6
agtggtttggttattttatccgacgaattttggcatgacaagtagtgggcctaggataagcttttgttctttaccccttttttgggatcaaacagcttacataggaacccttatgtataatttatccacacatgtgcaactcattgacctattgtattagccaatgtaaagtgatctgtacaattattgcacttgcaactttacatcagtgtagcagactatgataagctaagtcgccgccgtcgttgatgatcaattaaatagagcagatggcgccacgattttgcnnannaaaaaataaaaaaatagaaaaaaaaatggaataaaatgttacctgggaaaaaatgtttatgggtg

SEQ ID NO: 37983 - DNA, 403 bp, Glycine max
  Clone ID: LIB3138-023-Q1-N1-A10
ctgatgggtgtccatatttgtatgcaatggtgcatgatagttcagtgtctacaataccaggtgattttgtcattggtgtcaagttgacaaccataaacaatatgtgtgcatatgggctcaatcctggtatttcaggttctcgtcttttgggcaccattcctcagtccatttcacagcaaactgtttggaatcaaatggcaacagtgagaacaccattgaattttgattctagcaagcagagcttttgtcagttttctattgaccttctcggtggaggaatcttagtggacaaaactggagattggatcacacttatacaaaattctccaattagtaacttgttgagagttgctgcttggaagaaaagcttgttaatggtcaaaattgtgatgtctgggaatgc

SEQ ID NO: 37984 - DNA, 329 bp, Glycine max
  Clone ID: LIB3138-023-Q1-N1-B11
ttaacaatcgctcctcagatatcaacaaaaggattcgcacagcacttgggaaaggtaagaaaattgtttttcttactagagtggatccttttccagtagctttactggctgttctttttggcgttaagaatgaaattctgagttctaacgccactaatcctatgctgacgcgacttcttgagaactgtgagagtctcaaatatctggttgatgagtgtccttttgcatttgtgaactagtatgcagtattttattcacttaaataaagcgcattactatgtgcaatgagtgtgtttaaatatcaaagccaccgaaaggtggcaaaccct

SEQ ID NO: 37985 - DNA, 391 bp, Glycine max
  Clone ID: LIB3138-023-Q1-N1-C6
ggaaaaaaaaaaaaaaaaaaaaaaaaaaaaaaaaaaaaaaaaaaaaagaaagaaaaaaaaaaaaaaaaaaaaaaaaaaaaaaaaaaaaaaaaaaaaaaaaaaaaaaaaaagaaaaaaaaaaaaaaaaaaaaagaaaagaaaccaagaaaacagaaaggaacaaaataaaaaaaaaaaaggggggggccccccctttggggccccccccccccggtataaatttgggaccgggcccctgggggacccaaatttttcttattgtggggcatattaaatagtggggttaataagggaaaaggctttttttggggaaaaattttttttcgcaaaaatttcccaaaaaaaaacgaccggaaaataaaaagtgaaacccggggggcccatatggggg

SEQ ID NO: 37986 - DNA, 412 bp, Glycine max
  Clone ID: LIB3138-023-Q1-N1-D5
aagactgtgaattgtggaatcctgcttgcacaaaagcaatgactatgtcatttaatccaaacccgtgttctgatgcatggagtttggaatttctgaagcgtactggatttcattgcgatatcatttgtgtcactggatggactgccaccccaatgcaggatgttcaggttacaattgattggtttatttcctctcaggaatgtgttcccaggacctattgtgttttaaatccacaaaatccttttgtgttaaataggtggatgggaaaattgactttcccccagggcacttcccgaagtgttaagagaatgcctctttctatagggggaggagctggtgcaaagaatgctattctcatgaatatgccaaatgctgttctttcaatgtggagatattttgttggagatctcgt

SEQ ID NO: 37987 - DNA, 408 bp, Glycine max
  Clone ID: LIB3138-023-Q1-N1-D6
gttgaccattgatttgttgggtttacaaggagcaggtaaagcttttccaaacaaaattgtttttgatgataagcttgtgttggctaacacacaagaattctttgatggaaattttccagtggattcttggttaccaatttttgtgaattgtctttatcctgtaagtcaattaccttcagaagctgtcgttgtaaatgttacatgtggtagtggacgtggtggtttacccaccactgcttggattagttctgcagttaacaatcgctcctcagatatcaacaaaaggattcgcacagcacttgggaaaggtaagaaaattgtttttcttactagagttgatccttttccagtagctttactggctgttctttttggcgttaagaatgaaattctgagttctaacgccac

SEQ ID NO: 37988 - DNA, 104 bp, Glycine max
  Clone ID: LIB3138-023-Q1-N1-E7
gccccctcccttacctcagcttgggttcgggtagcgcgcccaagctttctgagcttggagaaatgctctttcaactgtggcgattgcgttaactgcgattggaa

SEQ ID NO: 37989 - DNA, 175 bp, Glycine max
  Clone ID: LIB3138-023-Q1-N1-E9
gaagttgccttgccaaagctggctatggactttggatcacttgaactttctccagtcgatggtcgtacactgactgactttatgcatttaagaggattacagatgcgatctttgggtaaagtggttaaacttgcagagaatctgccacacatacaatccctttgtattcatgaga

SEQ ID NO: 37990 - DNA, 83 bp, Glycine max
  Clone ID: LIB3138-023-Q1-N1-F7
aaaaaaaaaaaaaaaaaaaaaaaaaaaaaaaaaaaaaaaaaaaaaaaaaaaaaaaaaaaaaaaaaaaaaaaaaaaaaaaaagg

SEQ ID NO: 37991 - DNA, 425 bp, Glycine max
  unsure at all n locations
  Clone ID: LIB3138-023-Q1-N1-F9
tcgagggctcaaatcctggtatttcaggttncttcgtcttttgggcacccattcctcagtnccatttcacagcaaactggtttggaatcaaatggcaacagtgagaacaccattgaattttgattctagcaagcagagcttttgtcagttttctattgaccttctcggtggaggaatcttagtggacaaaactggagattggatcacacttatacaaaattctccaattagtaacttgttgagagttgctgcttggaaaaaaggctgtttaatggtcaagattgtgatgtctgggaatgcagcagtcaaaaggagtgattgggcctcattggtacaagtgtttttaacaaacagcaacagtacagagcattttgatgcatgtaagtggacaaaatcagaaccacattcctgggaattgatcttcc

SEQ ID NO: 37992 - DNA, 403 bp, Glycine max
  Clone ID: LIB3138-023-Q1-N1-G7
agctgggtcaactaaggtgcgtcctgcaccaactttgttggctgatgggtgtccatatttgtatgcaatggtgcatgatagttcagtgtctacaataccaggtgattttgtcattggtgtcaagttgacaaccataaacaatatgtgtgcatatgggctcaatcctggtatttcaggttctcgtcttttgggcaccattcctcagtccatttcacagcaaactgtttggaatcaaatggcaacagtgagaacaccattgaattttgattctagcaagcagagcttttgtcagttttctattgaccttctcggtggaggaatcttagtggacaaaactggagattggatcacacttatacaaaattctccaattagtaacttattgagagttgctgcttggaag

SEQ ID NO: 37993 - DNA, 361 bp, Glycine max
  Clone ID: LIB3138-023-Q1-N1-G9
aaaaaaaaaaaaatttaaaaaaaaaaaaaaaaaaaaaggaaaaagggagggcggacaacatctaagagccgtgaactaacaggggagttaattcctgaccgcaacctaaaatgcccccaaactttctctatagcgaggcttggcaaaagctatgggaatagcatgttccctgtgtgatatggggggggccctgatatttggtttcttcttccccccgatatattttccggccccctccctgggggcccccattttttctttttgagggcattaattgactttggctgaatgccggctaattgctttttttgcggaaaattatctcttcctccaagatccaaaaaaaaacccgcccccaggc

SEQ ID NO: 37994 - DNA, 434 bp, Glycine max
  Clone ID: LIB3138-023-Q1-N1-H6
atcgaagttcgagtagaagttccactccacctccatggttggaatctggtttgcaaaaagacagagggttaattgtggagtattttggaaggatgtcttacgttgctcataacgttaatcagccccaagagaaagatttgttggagggaaatttttcctttgatattaaatctcgctctagattggaaaaagtttcctctacaaaagcacaatttgttagtggaaaaaccttcaaatatgatataattggtgctggttcacattcttcagaagattttcctgaaaaggaagatcaagaaaaacccaaaaagattgatgccagattgagacaaagaatagatcctcaatacaatgaggttcaggctcagatggaaacaaatttgtttaaattgtctcttgatgatgttgaaactcctaaagggtccatgttggat

SEQ ID NO: 37995 - DNA, 409 bp, Glycine max
  Clone ID: LIB3138-023-Q1-N1-H7
aacgaaaccaaagcatgaagatgaattgctactggtggcatgccctgataatgagtggttgtgtgttgggcttgtgcgtgggcataggaggttgtgtatgtgtggtggagaacgagaatggaagaatcatcattgatattagtcacaggtaccatcctgatatgcctgcctgggaatccaaggatagccttgggcagtttttgtggcttacaagaagcatggccaatggttctctggctaacttctcccaattcaagctccccgctcacagcggcacccatgtcgatgctcccggacatgttttcgatcactatttccattctggctttgatgtcgactctctcgatttactactccttaatggccctgcactattagttgatgttccaagagatacaaacatcagtgc

SEQ ID NO: 37996 - DNA, 373 bp, Glycine max
  Clone ID: LIB3138-023-Q1-N1-H9
ttcgtgtaataatctggaaatgcaagaagcttatcttgtcaatctcgtaaatgtgttacgagaattgtatttgcacagtccagaggaagctcgccaattgagaaggaaagctctctctcgtattgaatggctgcaaaaagctgatgtgcctaccatagcacagattgaagagttccattcgatgcagaggatgatgaatgctcctgattcaaatgataatattgatttactgttgagcattgatttgttgggtttacaaggagcaggtaaagcttttccaaacaaaattgtttttgatgataagcttgtgttggctaacacacaagaattctttgatggaaattttccagtggattcttggttaccaattttt

SEQ ID NO: 37997 - DNA, 272 bp, Glycine max
  Clone ID: LIB3138-024-Q1-N1-A2
cctaaatctggaattcggtttcggaaacaattgaagtttaaaaacttgccctaatatataaaaaatccagacacaagacatcatcatgcatggctgcctccgtctccactgtcggagctgtcaacagagctcttttgaacctgaatgggtctggacctggcgtttcagctacaaaaaaaaaacttctaaaaaaaaaaaaagggggggggccctccttataggctttcgcaacccgggattattattccatccggttttgggggtgttcccca

SEQ ID NO: 37998 - DNA, 538 bp, Glycine max
  Clone ID: LIB3138-024-Q1-N1-A6
gggaggacctggtccaaagaatgctattctcatgaatatgccaaatgctgttctttcaatgtggagatattttgttggagatctcgtctttgaagtttctaagatgacttctccctacattaaatgtacagtctctttcttcatagcatttggaaatttggctgatgataccatcaattttgaggcttttccccacaagctggtgcagtttggagagattcaggaaaaagttgtattgaaattttcacaagaggaatttcttacagcttggtcaactcaggtgcgtcctgcaacaactctgttggctgatgggtgtccatatttgtatgcaatggtgcatgatagttcagtgtctacaataccaggtgattttgtcattggtgtcaagttgacaaccataaacaatatgtgtgcatatgggctcaatcctggtatttcaggttctcgtcttttgggcaccattcctcagtccatttcacagcaaactgtttggaatcaaatggcaacagtgagaacaccattgaattttgattctagc

SEQ ID NO: 37999 - DNA, 376 bp, Glycine max
  Clone ID: LIB3138-024-Q1-N1-C1
gggtttcctttgaaaacctgctaacttacccatttgttagagatggcttggtgaacaaaacattgtcactgaaaggaggatactatgactttgttaaaggatcttttgagctctggggccttcagtttggccttgcatcctctttctccgtatgaacatcaaccattatcaatgacctcatcttggttccctaagttaaagatgtggccaccattctccattggaagctataggggccatgcttagaggtcgtgtgtatctgcaatgaagaggcctagccaccttcatcaccatatgatatttataaagatatatatgaaactatgaactgcgtttatgcatgtcggaaaatcttcttttaataagagttggaaat

SEQ ID NO: 38000 - DNA, 235 bp, Glycine max
  Clone ID: LIB3138-024-Q1-N1-C9
ctaaaacaaatttttcaaacatagctactgtaaatactctatggcccttattccagcttggagcaaacaacacaaactctaataactaatctcactcttacaaaactacaaattttttaacattgtctcttaaaatgctttaaacaactaatggttacttctcatatactaaaatttttcaatttcaaaattcactttccataccacaatcttattgaaacatttttttttaaca

SEQ ID NO: 38001 - DNA, 493 bp, Glycine max
  Clone ID: LIB3138-024-Q1-N1-D5
ggatgagttcatgatagcaggattatatgatggatggctacctcatctatttgttggaaacttgctcaaggggcaaacagttggtgtaattggagctggtcgaattggatctgcttatgcaagaatgatggttgaagggttcaagatgaacctaatttattatgatctctaccagtccacacgactagaaaagtttgtcacagcctatgccgcattcttgaaagcaaatggtgaaaccccagtgacttggaaaagggcagcaaccatggatgaggtcctccaggaggcagatataattagtcttcatcctgtcttggataaaaccacttatcatctagtcaacaaggaaagactagctaagatgaagaaggaagcaattcttataaattgcagtagagggcctgttattgatgaagctgcacttgtggagcatttaaaacataacccaatgtttcgagtaggccttgatgtgtttgaggaagagccctacatg

SEQ ID NO: 38002 - DNA, 505 bp, Glycine max
  Clone ID: LIB3138-024-Q1-N1-D6
ggcaagttcctgccctcactttctagattttctgtcaagcgtccgtacttcctttcccaaacttatccgcgcattgctgtgaacaagccctccatgaacctgttgaacagactcgggtttggcagcgcaagagcaacagagaacatggattcatccattcctcagggtccagatgatgacataccagcaccaggccagcagtttgccgagtttggtgctggctgtttttggggtgttgagttggccttccagagggtgcctggggtgaccaagacagaggttggctacacccaggggcttgtgcataatccaacctatgaggatgtgtgtacagggaccaccaaccactcagaggttgtaaggattcaatatgatccaaaaaattgcagctatgagactctgcttgacatgttctggtctagacatgatcctaccactctgaatagacaggggaatgatgtgggaacacagtacagatctggaatatactactacacgccggaac

SEQ ID NO: 38003 - DNA, 408 bp, Glycine max
  Clone ID: LIB3138-024-Q1-N1-E1
ttctcatgaatatgccaaatgctgttctttcaatgaggagatattttgttggagatctcgtctttgaagtttctaagatgacttctccctacattaaatgtacagtctctttcttcatagcatttggaaatttggctgatgataccatcaattttgaggcttttacccacaagctggtgcagtttggagagattcacgaaaaagttgtattgaaattttcacaagaggaatttcttacagcttggtcaactcaagtgcgtcctgcaacaactctgttggctgatgggtgtccatatttgtatgcaatggtgcatgatagttcagtgtctacaataccaggtgattatgtcattggtgtcaagttgacaaccataaacaatatgtgtgcatatgggctcaatcctggta

SEQ ID NO: 38004 - DNA, 103 bp, Glycine max
  Clone ID: LIB3138-024-Q1-N1-E12
aaaaaaaaaaaaaaaaaaaaaaaaaaaaaaaaaaaaaaaaaaaaaaaaaaaaaaaaaaaaaaaaaaaaaaaaaaaaaaaaaaaaaaaaaaaaaaaaaaaaaaa

SEQ ID NO: 38005 - DNA, 282 bp, Glycine max
  Clone ID: LIB3138-024-Q1-N1-E6
gtccatcctctcttaaaccaaacaaagtccttgccattaagccgggcaaactagtggaagtatcattcacattttattatgtatgtgccaaatcaccaacttcataaataatattggcatcaaaacgggatacgtgctctctaggatcctaatatccgaacaaccctcatttagctatgaagccaattccattaaaataagatgtggagactacatatatagtttatcatgaactattgaacgcgcacattatcatcaacaattatatggccacgaaaaaca

SEQ ID NO: 38006 - DNA, 139 bp, Glycine max
  Clone ID: LIB3138-024-Q1-N1-E9
ctcgagccgaaaatataaataaaaagaaaaataagtaaaatgggagaataaactaaaaaaaaagggcacttacaaaaaaagaaaaaaaaatgccataaaaatataagaaaaggaaacatggggggcggcctgctattat

SEQ ID NO: 38007 - DNA, 314 bp, Glycine max
  Clone ID: LIB3138-024-Q1-N1-F4
atttcaccactttatcatgacattttactataatgatgtggtaataaagtaaattcttgttgaatattttgtataaagatgctttatactcatgggttctgtgtataaattaagcttatatatatttacactatatattgccactttacgtttgtgtgatattaattatacagtcaagtatttattagctatctttgaatatggtgtatacactagtatacatgttgtatccagggaattatggttaaagagctatataaattgagaaataatgatgttctagagtgacatatcctctcttgtcgtttttgacc

SEQ ID NO: 38008 - DNA, 491 bp, Glycine max
  Clone ID: LIB3138-024-Q1-N1-F6
gttttgtgggtggctcctgaggacaaggcgagtttatggtcacaacttcattatgtttcgtgtaataatctggaaatgcaagaagcttatcttgtcaatctcgtaaatgtgttacgagaattgtatttgcacagtccagaggaagctcgccaattgagaaggaaagctctctctcgtattgaatggctgcaaaaagctgatgtgcctaccatagcacagattgaagagttccattcgatgcagaggatgatgaatgctcctgattcaaatgataatattgatttactgttgagcattgatttgttgggtttacaaggagcaggtaaagcttttccaaacaaaattgtttttgatgataagcttgtgttggctaacacacaagaattctttgatggaaattttccagtggattcttggttaccaatttttgtgaattgtctttatcctgtaagtcaattaccttcagaagctgtcgttgtaaatgttacatg

SEQ ID NO: 38009 - DNA, 216 bp, Glycine max
  Clone ID: LIB3138-024-Q1-N1-G3
gctataatatctattaatggctttacacagttaccgtatcacttatgataggttttccagaaatgacaaggttgctaaaccagctgcccagacatcattatctagcacatgctcttgtggagagtgacttatagttttgtaattgaatttttggttttagttatcctgttatcaggaaacggctccaagttgttatgcatgttctttgccagtgtc

SEQ ID NO: 38010 - DNA, 482 bp, Glycine max
  Clone ID: LIB3138-024-Q1-N1-G5
ggaccgattcgctatataaccagatcggactcaattcctgaaccgatgaagttgaagccgcagtgaaccaaaccatcatcatcgcgttaccggaataatcgacccatcatcaattagatcgaaatgaaggatgaggacgggcttccgacgacgaccgcggttacaaagaaggaaaacttggattcgagtctgtttggaaaaggcaggtacaaattctgggcgttagcggccatcttgcttctggcgttctggtccatgttcaccggtaccgtctcgctccgctggtccggcactctcaattccctttccaacgacatcgacactcccatccacgacgacctagatgttcttgaaatggaggagagggagaaggttgtgaggcacatgtgggatgtgtacaccaacagtcgcagtgtgaggttgccgcggttctggcaagaggccttcgaggctgcctatgaggatttgacgagcgatgtcgc

SEQ ID NO: 38011 - DNA, 520 bp, Glycine max
  Clone ID: LIB3138-024-Q1-N1-G6
ttcaggcgattgcagtaggaaacgagaatgaaaaaaggttccaccgaagtcaatttcccacagaatcaaacaaatcgttgtagttggaaaacaaaccaagagaaaatgggtggacgcatgtgtttgttaacgttggtgttgagtttggtgttgatgatgagtatggcacaggcgcaatctggtactagcgcagactgcgcccaggagctaattccatgcctggactaccttaatggcacgatcaacccaccaagctcctgctgcgaccctctgaaacgaacagtccataacgaactcgtctgcctctgtaacatctacttctcccctgtccttcttcaaagcgtcaatgtcactgtcgatgaggctctcggcctcagtcgccgctgcggcgtcactagcgatctcagcagctgcaaaaacgggtcagctccagcttctggttcacggccaccaccaggtaagacgcctgccaacatccccaattttttttttttttttttcttgatgagcttcttttttg

SEQ ID NO: 38012 - DNA, 267 bp, Glycine max
  Clone ID: LIB3138-025-Q1-N1-A1
ggaaacctaaccccaaccggttcttcacgattaggagatggctaagtcgaagaaccacaaccgctcacaaccagtcctacaaggcccacaagaatggcatcaaaaagccaaagaggcaccgccacactttcaccaaagggatggatccaaagtttctgaggaaccaaaggtacgcgaggaagcataacaagaagagcggtgaaacagccacggaagaagagtaaagtgtcactctcaaatggggctattaggatttgatttgctatt

SEQ ID NO: 38013 - DNA, 348 bp, Glycine max
  Clone ID: LIB3138-025-Q1-N1-A3
ggcaagcctatactatactgcttcaccttctgctctagaaaattcagtgctgaaacatggcttcggctactctctctgtagccaaaccagcccttcaggcaaatgggaaaggcttctctgaattctctggcctccgaagctcatcaggcttccttcccttttctagaaaatcttcagaggatttccattctgtcattgccttccagacctatgcagttggaagcagtggacgatacaagaagggtgtgacagaagcaaaactgaaggttgccataaacgggtttggaaggattggaaagaacttcttgaggtgcttgcacggtcgcaaaagactccctcttgatgtca

SEQ ID NO: 38014 - DNA, 62 bp, Glycine max
  Clone ID: LIB3138-025-Q1-N1-A7
aaaaaaaaaaaattaaaaaaaaaaaaaaaaaacaaaaaataaataaaaaaaaaaaaaaaaaa

SEQ ID NO: 38015 - DNA, 378 bp, Glycine max
  unsure at all n locations
  Clone ID: LIB3138-025-Q1-N1-B2
ggaaaccaccaaatcgcctggacctgaacgtaatcgcaggctgtcccatggcaccccacttggaacatccaccagaaaagatgtctttttccaatgcaaacacaggcgacaagccggccgacccctacaccaaggccaatgccgacaccgaggtctcagtcgatcagaagatcagcgacttgaccaagttcatcgacgccagtaagttcggcatgatgaccacacgagacgccagctcgggaaagctcgtctcacgatgcatggccgtcgcggccaatgagtccggcngaatcgacctgctctttcacaccaacaccgagttcaacaagacagacgagctccaggacgactcccacgtgaacatctcgttcctaaatg

SEQ ID NO: 38016 - DNA, 195 bp, Glycine max
  Clone ID: LIB3138-025-Q1-N1-C10
gactagttgtagatcgcgagcggacgaacatgacgaatgctgtgcttttaatgaggcgatatatagttggaaaattcatcctagacgtttatagaaaaacagctctaaagcttaagcgggctttcgttcatgcatgggctttgaaaaaaaaattgtgatacgatctctgaagacgctatcaacaacaataaattg

SEQ ID NO: 38017 - DNA, 155 bp, Glycine max
  Clone ID: LIB3138-025-Q1-N1-C11
gaagtgtgtgttattttaaacaaaaaaacaaaaaaaaagctagtgctaattttaaaaaaataatttctaaaaaaaaaaaaaacaaacaaattaaaaaaaaaaaaaataaaataaacaaaaaaaaaatggggccccccccttctattgggctcttt

SEQ ID NO: 38018 - DNA, 302 bp, Glycine max
  Clone ID: LIB3138-025-Q1-N1-C6
gctgaatgaactaatggcgtctaaaggtgggaaaaagaagtctagtagtagtactagtaaatcatggacctgcgaagctcccatcggatacagcattgaagacgctaggccaaactgtgggatcaagaaattcatatctgctgcttactgcaactgcgctcgccaaccttcctgatatcgatgcagaatgatagggcattgcatgcaaccatagatgtattaggtcttttcttctttggattcaattaaggttttgctgatcttcttcaaactacggctttccgaatactttctttgtgatt

SEQ ID NO: 38019 - DNA, 206 bp, Glycine max
  Clone ID: LIB3138-025-Q1-N1-C8
cgagtgttggtgttgaagtacatgcccattttaagattattaggctgggaaacatagaactgtttttgttgtggtaatcctcaccttacgaggattctgtgttacaaaatcatatcgagaaatttgttaatggggatgaaagaaagctgtgtttgataccaattgccaataatataacttactataacaatatgtccatttaacaa

SEQ ID NO: 38020 - DNA, 266 bp, Glycine max
  Clone ID: LIB3138-025-Q1-N1-D3
gggtggtcctaataatggttttgaaatgtggagttctgagtgggcaaatcaaacttcatggcatttgagtttccttattgacaatcccaaacagtctacagtttttgatattctcttgggaatctctcaagattttgaaattgctggtaatactcttatgccagctttttctgatccacaggctactgccagatcttctgaaaatgcggaatcctctgcatgatctggaatttgtgttttatttcgcttggtcgtttgtttaattc

SEQ ID NO: 38021 - DNA, 77 bp, Glycine max
  Clone ID: LIB3138-025-Q1-N1-E3
aaaaaaaaaaaatttatttttaaaaaaaaaaaaaaaaaaaaagcaaaagggtaaattataaaattaaataaaataaa

SEQ ID NO: 38022 - DNA, 306 bp, Glycine max
  Clone ID: LIB3138-025-Q1-N1-E4
ggtttctaacgacccattttgcatatttcataattagtaacggatcatgtgttgccttagtaaaaggagggactttaatagctctgctggaatagtgaagacttggggtctttgatgagaaaaataaacaagcatgtttagaatatttgatgcttggaaacgtagggaaagttgcccaatctattcttagaacccatataagaagatatttggaagccagtagaaatgaggcttgtaccttacttggaccaaatatcaagcaatgcaagatgtacatgcaatgtaagtattcaattgaaggatgta

SEQ ID NO: 38023 - DNA, 165 bp, Glycine max
  Clone ID: LIB3138-025-Q1-N1-G2
gggggaatcaggaacctttctgctatggctgctttgcaatactgggaatcgctgcgtaattcgcaccctgagctctccgattggtacaattcgctggcggatctgtaccagaaagaagctctggcaccagcttcactcttaaagctttgagcagttttgtgggct

SEQ ID NO: 38024 - DNA, 315 bp, Glycine max
  Clone ID: LIB3138-025-Q1-N1-H1
tgaaatttaaggaaatcaacacacacaaacacaccaccatatggaggtgctaagggtgcaaaccatagcttccaaatccaaagatgctgccatcccagccatgtttgttagggcagagacagagcaaccaggcatcacaaccgttcaaggggtgaaccttgaggtgccaattattgattttagtgacccagatgaagggaaagtggtgcatgagattttggaggcaagtagggactggggcatgttccaaattgtgaaccatgacatacctagtgatgttataagaaagttgcaaagtgttgggaaaatgttctt

SEQ ID NO: 38025 - DNA, 303 bp, Glycine max
  unsure at all n locations
  Clone ID: LIB3138-027-Q1-N1-A11
caacaaaaggattcgcacagcacttgggaaaggtaagaaaattgtttttcttactagagttgatccttttccagtagctttactggctgttctttttggcgttaagaatgaaattctgagttctaacgccactaatcctatgctgacgcgacttcttgagaactgtaagagtctcaaatatctggttgatgagtgtccttttgcatttgtgaactagtatgtagtattttattcacttaaataaagcgcattactatgtgcaatgagtgtgttttaatataaacnaaaaataaaataattttt

SEQ ID NO: 38026 - DNA, 378 bp, Glycine max
  Clone ID: LIB3138-027-Q1-N1-B3
ggaccataccaatcctgaaaatgcagttcggagtattttttgtggggcctttcaaaggcggaaggcccattcggtgggtacatttccgaataccattgtgcagattgaaccagacatgaattcaaagtttcagcttttgagtaccactaccaatggtgattttgttcaagggaaagatctcgcaatggttaaagttaatgtagcatgtgctgctgttggcttgacatcaagttacactccaactccattgttggaatctggtttgcaaaaagacagagggttaattgtggagtattttggaaggatgtcttacgttgctcataacgttaatcagccccaagagaaagatttgttggagggaaaattttcctttgatat

SEQ ID NO: 38027 - DNA, 336 bp, Glycine max
  Clone ID: LIB3138-027-Q1-N1-C3
ctttctccctacacaaaaaatggttgtgccaaataagcaaacgggcgattccccagcttcagcttgttatcgtcggcgacggtgggccaagagaaacaaccttcgtgaagaggcatctcactggtgaattcgagaagaaatatgaaccgagcattggtgtggaggttcatccggtggattttttcacgaactgtgggaagattcgcttctattgttgggatactgctgggcaagagaaggttggtggcctccgagatggatattatatccatgggcaatgtgcgattatcatgtttgatgttactggccgtctaacatacaaaaatgtgcctacct

SEQ ID NO: 38028 - DNA, 306 bp, Glycine max
  Clone ID: LIB3138-027-Q1-N1-E1
ctagcttggagggttgtactgtcaatgcaacacccatcacacaatattagaaatatcaatgaataacataattgctccaatgaaaaaaaatttaaatattagaaatagaatttactcgactgcaagtgcgacaagaacacaggatagaaaatttgaatggagagtggtgaagactattccctgtttgagactaggaaagacaaaggaaggcacattcgaaggatctatgcaatctctttgtttgtggccatatgcttcatctgggcttacagattgagccacatacccgcatatggcaaatgggct

SEQ ID NO: 38029 - DNA, 102 bp, Glycine max
  unsure at all n locations
  Clone ID: LIB3138-027-Q1-N1-F2
ntnnaaaaaaaatttataaattaattaaaattgataaataaaaaagatataaaaaaagaaaaggaatgaaaaaaaaaatcaaaaaaaatatataaaaatttt

SEQ ID NO: 38030 - DNA, 353 bp, Glycine max
  Clone ID: LIB3138-027-Q1-N1-F4
agttctagctcgcgatctagaactaggaagaagaagcgcatgaggaggttgaagaggaagcgccgaaagatgagacaaagatctaagtaggtgcttgagcaggagttgagatgagctttccatctgctaccagcctcatgacattttaggctgttatggctcttatgatcttgaggtctagtcgctaggggagcttcactcttgacttagtttgctttactggtcctggtcctggtccaagactattgagtgtgggttaagttgtgatgtttagtgttttgtggtatctaattatgtactggtttttatactttttggatgaatagctatatattagtgtcgagactttcatg

SEQ ID NO: 38031 - DNA, 366 bp, Glycine max
  Clone ID: LIB3138-027-Q1-N1-G2
gaagcgaggtttcatcatctttcaaagatgacgacagcctacaacaacggtgcattgttggaaaatgatcaccacaacttgttggaagggatgatgataggtaacagcaacggagggatgaacacaactactactactacacctggtcccatgtcatctcacttagggggatccaaggaagagctttcttttgttccaaccatgactcactcttcaaacacttctaagagaacactttcatcactgtattggaacgatgaggatgtggcgggtacctcatcttcgaacaaaaggttcaatttggaattaagtggggacaataataaccatggaagtgttgtgagggatgatcaagagaatggcact

SEQ ID NO: 38032 - DNA, 356 bp, Glycine max
  Clone ID: LIB3138-027-Q1-N1-G3
ggccaaatttgggccggaacccccccaggaaatttgagagaacttcctaacgaggaaaaggatgtccttgaaaagtccactctgagatccaaagtctcgctcaggttcacgctgaagagaccgaatagccattcagaccaatcattaatgacttggatgaccaagctgaacaagagtatcttgaccccgaagagctcgctctattgaagatgaaggagctcggtttccccacggaggctgaagatgaagatcttggtgaacaaagagttttctatatggagaaagaaatgcctgaagagcaacactggaagaagcactacgatccctatgaataagatgtcttcaacatccctgat

SEQ ID NO: 38033 - DNA, 367 bp, Glycine max
  Clone ID: LIB3138-028-Q1-N1-A5
cttccgtaggttgggatttgggttggggctacacttaccggcaaggtcggcttgggccaccggcgacgccggttccggcactggctttgggtccctcactttctggctcttcttcttcttctcaaaaatattccttctcaaaagggtgaaacgggtcattaaaacacagtccatgatgttgcgatgggttattatgggaagaggctggccacggcttcatcagatcacacgattaaaataattggggggggcaacacggcctcttaacattttgcaacattgactggtcaccaaagacctgtttggcaagtggcatgggctcaccctaagtttgggtctctacttgcatcatgttcctatgatgggc

SEQ ID NO: 38034 - DNA, 239 bp, Glycine max
  Clone ID: LIB3138-028-Q1-N1-B2
aatgcccactttttttttttcaacgctcctcctccttcttatagccgtcgccacctttgtattcgggcggcgtgaccttctcggagacttttttccgctgtcctccgaaactgataaccaccaccacttttagggcgccccggggggccccctcctcgccgggttccatgggtactgggatttcacacatcaagctgatgtttgtgacgccccttaaaaatttagggaaagggggcttg

SEQ ID NO: 38035 - DNA, 82 bp, Glycine max
  Clone ID: LIB3138-028-Q1-N1-B8
aaaaaaaattttttaaaaaaaaaaaaaaaaaaaaaaaaaaagggggaaaaaaaaaaaaaggggaaaaaaaaaaaaaaaaaaa

SEQ ID NO: 38036 - DNA, 240 bp, Glycine max
  Clone ID: LIB3138-028-Q1-N1-C6
tgatccttttccagtagctttactggctgttctttttggcgttgagaatgaaattctgagttctaacgccactaatcctatgctgacgcgacttcttgagaactgtaagagtctcaaatatctggttgatgagtgtccttttgcatttgtgaactagtatgtagtattttattcacttaaataaagcgcattactatgtgcaatgagtgtgtttaaatctgaaaccaaaaagcaaacaaa

SEQ ID NO: 38037 - DNA, 296 bp, Glycine max
  Clone ID: LIB3138-028-Q1-N1-D12
taggggaaaatgtatcttacacaccaaaagccacgatattgtccgcgcgatcctcatatgaaagattcaaaacattgcttgcactcctatcttgagaggagacttagacagcttactgcttgctgcttatagaggcgatccctgaatggagagcacggagaaactttccaacttcaaagagtgcttaacactagtagaaaaagctagtgcttagggatatgtctattgaacttcttacccccctggttatattggcccaagaattgtaacaattgccaatgccaaaatgaacttaa

SEQ ID NO: 38038 - DNA, 74 bp, Glycine max
  Clone ID: LIB3138-028-Q1-N1-F5
aaaaaaaaaaatacaattaaagatttgcacaaaacaaaaaaaaagatgaaaataaaaaaagaaaggtaatatat

SEQ ID NO: 38039 - DNA, 117 bp, Glycine max
  Clone ID: LIB3138-028-Q1-N1-G3
cgtaacttcgaatttcgcttcgggaaagcatgactatgtcatttaatccaaacccccggtctgaagcatggaggttggaatttctgaagcggacaggattttattgggaaaatattt

SEQ ID NO: 38040 - DNA, 79 bp, Glycine max
  Clone ID: LIB3138-028-Q1-N1-G5
tcggttgaggggtcttggaaggggaaaaggatatttaagagagggacttaaaaaggtggccactctattcatggtcttt

SEQ ID NO: 38041 - DNA, 319 bp, Glycine max
  Clone ID: LIB3138-028-Q1-N1-H2
tttaaggcccttttctttttttttgaatttgaagtatctatcaccaattaattccactctttttgccatcaaacaacaaaaaatcaatctgggtatcaaaaacataatgccgtcattagaggaggaactctttccatcaacctcaggaaagtgcaagatcgagcggacccaccacatgatccggcgactctatcgctgtttcgtctcaccagcaccatgtacctgtgggccctcttattaatcggccttaccgcttactatctcaactttcaaggcttcgtcgattgcggcagcctataacttatcagcctctggggcg

SEQ ID NO: 38042 - DNA, 359 bp, Glycine max
  Clone ID: LIB3138-028-Q1-N1-H4
ggaaggagaaggcatcattggtgcgattgccatatctgacactgtgcgtgaagatgctgaatctactataacaaggctcaagcagaaggggattaaaacagtcctcttgtcaggagacagggaagaggcagttgcaactgtagcagatacagttggaattgaaaatgattttgtcaaagcatctttgtctccacaacagaaatctggatttatttcctctctgaaagctgctggacatcatgttgcaatggtaggtgatgggataaatgatgcaccctctttggctgtggctgatgttgggattgctctgcagaatgaagctcaagagaatgctgcctcggatgcagcatctatcatac

SEQ ID NO: 38043 - DNA, 149 bp, Glycine max
  Clone ID: LIB3138-028-Q1-N1-H6
ctcagatttttagtacaggggtactgcctagctgaatgaggagtcattatgtttgatgaaacccggactgttatatatatgcaataattcatcagtgcttgtgtctaaaatgttcgctgcttgaggcttttacagaactggctagatct

SEQ ID NO: 38044 - DNA, 388 bp, Glycine max
  Clone ID: LIB3138-028-Q1-N1-H7
tagctcgagccgttttacaagaggaatttcttacagcttgggcgactcaggtgcgtcctgcaacaactctgttggctgatgggtgtccatatttgtatgcaatggtgcatgatagttcagtgtctacaataccaggtgattttgtcattggtgtcaagttgacaaccataaacaatatgtgtgcatatgggctcaatcctggtatttcaggttctcgtcttttgggcaccattcctcagtccatttcacagcaaactgtttggaatcaaatggcaacagtgagaacaccattgaatttttatttttgccagcagagcttttgtcagttttctattgaccttctcgggggaggaatcttaatggacaaaacctggagattggattacac

SEQ ID NO: 38045 - DNA, 124 bp, Glycine max
  Clone ID: LIB3138-029-Q1-N1-A8
cttgggggggcatatgggctcatcctgggattttaaggttttggcttttggggccccatccttaagcccttttacaagaaaacggttggaataaaaagggcaccaggggaacacccttggattt

SEQ ID NO: 38046 - DNA, 325 bp, Glycine max
  Clone ID: LIB3138-029-Q1-N1-B2
gagcaccaacttcaaattcaattttcataccaaaatataattaatttaggcccagaaacatggtggtgaaggtctatggtcctgcaagtgcagcctgccctcaaagggtgttggtttgcctcttagagaaaggggtagagtttgaacttgtgcatgttgatcttgatcaaggagagcataagacacctgaatttctttcagacagccctttggtcaagttccagctgtagaggatggtgatttcaggctctttgaatccagggctattataaggtattttgcatcaaaatatgctgaccgtggccctgacctattgggtaaaacc

SEQ ID NO: 38047 - DNA, 182 bp, Glycine max
  Clone ID: LIB3138-029-Q1-N1-B7
gtaacaacaattaaaatcataacaaaatataaaggggggccaaaacatggggggaatgtctggcgcctgcactcagatgccctcacccgggttaattgcctcccggacaaggggcgaccagtttcgtctaggagatctttataacttggcataataccgtatatttgtttctgcagaatttg

SEQ ID NO: 38048 - DNA, 417 bp, Glycine max
  Clone ID: LIB3138-029-Q1-N1-C1
aatttcgagtcgaggacaccacttctataagttcagagtgtaataagcaacacagtgcgactgtcacggaaatgcatgctagcacaacacattcaatcaaataaaaacattaagctgagtttgggatgctcatgtggtgatgtttgagatggaaattgaacatattataggggggcatttatggccatcacttacaaaaattaataaatttggcagagcatatgtttttcttactcacagatattctctgtagttaaaattttgtgactcttttttccatacagagtaagtcaatgagaagattgatatattcaaccttgcagttatactattggagctgacaattggtaaagaattgatgggctctcatctcttgcagagtgggcatgttgtaaatatagacctttgattcatttt

SEQ ID NO: 38049 - DNA, 254 bp, Glycine max
  Clone ID: LIB3138-029-Q1-N1-C5
catcaggactaatttttccacccttgaagatcttccctgctgggaattctacgagcaaagataggcaaacacacacgtcacaaagaacgtcacacacataggacgcatcaactaccatcgcatatgtctggtgcggagttcaagaaaacggacagtattgcctcgttagagcaactccctctgactgactgaaccctgacaacgctagaatgcaaatattgatggacactaacaaatgctttaatatcaaacct

SEQ ID NO: 38050 - DNA, 284 bp, Glycine max
  Clone ID: LIB3138-029-Q1-N1-D2
ggatctagatacctagaaacagtgtgatgaaaatgacggacctgggtggcttcatggctacaattttgggagcatggcaatgccatccttacaaaatgtaccctctccaaatgaacactggctatggggcccgtactccggaggggaaatgcccaagttggaggctcgctgtgtaatcacacacacatttttggctttgagaccattcctgaagagtgcgttgaagcatcaaaggaatacatccttgtcgaacaatatacatcagactccaaaacatttaacca

SEQ ID NO: 38051 - DNA, 322 bp, Glycine max
  Clone ID: LIB3138-029-Q1-N1-E2
tcggttgaggtcattattggcatgcatgggggcaggaaagttaagggcttccaataccagtggattttgcaatgggggtaaagtggccacccttaaccattatgtggccttatgggctcattcttgtgatttaaggttctcgtcttttggccaccattcctaagtccatttaacagaaaactgtttggaatcaaatgccaccagtgagaacaccttggaattttgattttagcaggcaaagtttttgccagttttttattgaccttctcggggaaggaatcttattggacaaaactggaaatgggatcacactaatacaaaa

SEQ ID NO: 38052 - DNA, 362 bp, Glycine max
  Clone ID: LIB3138-029-Q1-N1-E3
ggcatttgagtttccttattgacaatcccaaacagtctacagttttggatattctcttgggaatctctcaagattttgaaattgctggtaatactcttatgccagctttttctgttccacaggctactgccagatcttctgaaaatgcggaatcctctgcatgatctggaatttgtgtttttttttttcgcttgttcgtttgtttaattcaataaaggaaattaggcatgaccctcttgttgagtatgctctgcctatttgaaaatttccacacctcttttaattgtcgtaatgatgtgtgaagtgtgtgttattttaaaaaaacaaattagtgtagaaaacccaacaaaccattatatatt

SEQ ID NO: 38053 - DNA, 392 bp, Glycine max
  Clone ID: LIB3138-029-Q1-N1-F2
ctcccatgatgcccctagatgaaaaaattctttttaaggtggcccagaatttggttgaggaatggttcaattgtgttgataaggagaattcctttgaggaagtttttttaaggccaccacttaatggggttgagggtttggcctttttggaaagaattccctttgccacatttgagggattacctaatggcctttcacccaaaaatggtgaaaaaggcaaaaggaaattggtctttggggatggggaagagatgacactgattccgggaaccagtgttgaagaggctaacaccaagctaatagttgaacttgaaaaaagtgttcctacattggttggcattgaatgtcccaaggatgagaaacttcctcgtcgcaaaatttttgacaaacct

SEQ ID NO: 38054 - DNA, 365 bp, Glycine max
  Clone ID: LIB3138-029-Q1-N1-G12
ccccggtcgaaaaacttattttaagactttatgcaattgaaatttctaagaaggactgggataaacgtaggaattcaatctattgaaattgaataactaaacaatttaattggattggtcgaatggtatcaaaaaaatggagtactaactcccatttcttatttattattgaattaaccgatcaacttgctttgttatcgaacatttctttttgatttcaaaaattttccggaaaaaatttgaatctatttttatatgcgaatcaatcctactacttttggtcctgaagtttctgcgcttgaaaaaaaaaatctgggacgtatcgcccaaataattggtcccgtactagaagttgctttttcccc

SEQ ID NO: 38055 - DNA, 379 bp, Glycine max
  Clone ID: LIB3138-029-Q1-N1-G2
caaaaagggaaagatgtgcgctctcttcatcaacgatcttgatgcaggagctggccgtcttggaggaaccacacaatacactgtgaacaaccatatggtgaacgccactctcatgaacattggtgataacccgaccaatgtgcgccttccaggtatgtccatcacggaagagaccccccgggtttccatcattgtgaccggtgacgatttctcaacactctatgcaccattgatacgtgatgggcgtatgtggaagttctgctgcgcaccagcaaggtaagaccgcatcggtggatgcaccgaaattctccgaactgatggtattcctgaacaagacattgtcaagctcgctgacaccttccgtggccaatacattgat

SEQ ID NO: 38056 - DNA, 241 bp, Glycine max
  Clone ID: LIB3138-029-Q1-N1-H2
gggtttcaacatatttttttagcaccttctaaaaccctttatttgggggttatatgaggagctggtgctggtggcctaatgactgttttgtctgcggccccaatcttttttaaggctaatggcccaaagttgactccgttggaggagatgcaggactacaagaaattgggacctaaacaattggaacctactacagcttggtcaaaaattgtggaacctgccacaacgagtggggatgttt

SEQ ID NO: 38057 - DNA, 204 bp, Glycine max
  Clone ID: LIB3138-029-Q1-N1-H8
tgtaaaaaaaaatttttaaaaaaaaaaaaaaaaaacaaaaaaaaggggataaaaaaaggggtggtgcggttggcctaatgactgatatggttgctgaccccaacaaatttaaggcttatagccccatgttggctcccttggaagagatgcaggaaaccatgaaatattaactttcacaatttgaacctactacagcttggtcta

SEQ ID NO: 38058 - DNA, 371 bp, Glycine max
  Clone ID: LIB3138-030-Q1-N1-A2
tttaggttgggcggccgatctttaagggttggcttcttttaaggtaagctgggaggaggtccacatcagggaggaaaatccacagggttaaggttgctgaaccaactgaatttgaaaagtcagttggacaggctttgtttgatctggaaaataccaatcaggagcttaaaagtgatctgaaggattaatccttaaactcagccgtgcaagttgatgtttttggaaaccgcagggctgttgttattcatgtcccttacagattaaggaaaggtttccgtaaaattcatgttaggcttgtcagggagcttgagaagaagtttagtggcaaggatgtaatcttggttgccacccggaggattttgaggccaccg

SEQ ID NO: 38059 - DNA, 412 bp, Glycine max
  unsure at all n locations
  Clone ID: LIB3138-030-Q1-N1-A5
tcggctcgagcttggtaacaaacaaaatgacttccaggggacacaagtaaggaatggcttgccaaaagggtatagacataactcagctccaagcagattcgtgaactatgacacactaggctctagtggctgttccggaatgcgttcggagaagccatgaggatgatgtcttgctgaatggaaaggaagactttgcaagtgttgaagtttgtacatgtttttttctggatatgagaaagatgagataatcgtgtcattttgctttgcttatctgtgattgatatatctattacaattttgaaggaagtgcttangcaaggtgaaaatgttagtattcttttcctgttgtgtatagctcaatgcctgactcattgaccaaacatgagaaacagagaagatatttttgttttta

SEQ ID NO: 38060 - DNA, 104 bp, Glycine max
  Clone ID: LIB3138-030-Q1-N1-A6
aaaaaaaaaaaaaaataaaaaaaaaaaaaaaaaaaaaaaaaaaaaaagaaaaaaaaaaaaaaaaaaaaaaaaaaaaaaaaaaaaaaaaaaaaaaaaaaaaaaaa

SEQ ID NO: 38061 - DNA, 412 bp, Glycine max
  Clone ID: LIB3138-030-Q1-N1-A7
cgagatttttgtgaattgtctttatcctgtaagtcaattaccttcagaagctgtcgttgtaaatgttacatgtggtagtggacgtggtggtttacccaccactgcttggattagttctgcagttaacaatcgctcctcagatatcaacaaaaggattcgcacagcacttgggaaaggtaagaaaattgtttttcttactagagttgatccttttccagtagctttactggctgttctttttggcgttaagaatgaaattctgagttctaacgccactaatcctatgctgacgcgacttcttgagaactgtaagagtctcaaatatctggttgatgagtgtccttttgcatttgtgaactagtatgtagtattttattcacttaaataaagcgcattactatgtgcaatgagt

SEQ ID NO: 38062 - DNA, 388 bp, Glycine max
  Clone ID: LIB3138-030-Q1-N1-B12
attcctcggtcgacgaacttattagtctagtacaattaattattgtggggggataataccaacggtggggtcgacaactttatcgtccgcgctttactcggaccctgtcatagtttcactaaccatccttatactatacttcttatgaccaccattaaaacacaacactcctcgtatgaaaaatttacactgtatcctacgtttccaatttctctcaataatacttatcctctatattaactacctttgtctacattcattcaagatttcccttattcaacaaaactattgagctctcctcatcacccacagtattattggctttcttgatcatcacctttccttttatttttaaaactttttttcatatattccaaattttccaccc

SEQ ID NO: 38063 - DNA, 414 bp, Glycine max
  Clone ID: LIB3138-030-Q1-N1-B4
caggtagtaaggctggtgctgctgcctcctccaaaatcaccattctggaagacccttttgttcctgtgcagcactagtctcctcctccctgatgctgatgcggttcagccaatcatcccaaacccctcctcatcttcaacaacaggaacaatccctgctttcccagaacaagctgaagctgcaggctgccctctcaacctctcagatgaccactatgaagccataaagagtgcatgtggctccaacaaacctgatgatgatgacctccaccgtagcagatgctgtcctgtgctcgcagcgtggctctattctgcatactcagccactgctcttagtgcctcacagggccataccacatcctatgacatgcccttgttgcctgatgactcagaaacatgtgtgagtgacttgggg

SEQ ID NO: 38064 - DNA, 387 bp, Glycine max
  Clone ID: LIB3138-030-Q1-N1-C4
gcaatcacaacaataacttccatttgatgttggggtcccctggtgatttggcatcctttgatttcaaggaggatatgcaaggaggaggagggatggatgctcttcaaaaacaggcagatatctctatttggtatcagtgaaaatgacagcttaaagctggaaacctcatcatcattatcatctatcatggactctttattttccttccaaaagggttggcacccctgatcatgtgaagttcctttggccaaaaaaggtttcactgcaattttcttcacatgtaatcctgtaggcctagtagaactaaatattttaagcttggcaggtctagtatgtgttatatacataacaatatataataaaaacttgcatgttaccattatatgt

SEQ ID NO: 38065 - DNA, 93 bp, Glycine max
  Clone ID: LIB3138-030-Q1-N1-D1
aaaaaaaaaaaaaaaaaaaaaaaaaaaaaaaaaaaaaaaaaaagaaagaaaaaaaaaaaaaagaaagaaaaaaaaaaaaaaaaaaaaaaaaaa

SEQ ID NO: 38066 - DNA, 273 bp, Glycine max
  Clone ID: LIB3138-030-Q1-N1-D7
ctcgagccgattctcttgggaatctctcaagattttgaaattgctggtaatactcttatgccagctttttctgttccacaggctactgccagatcttctgaaaatgcggaatcctctgcatgatctggaatttgtgttttctttcgcttgttcgtttgtttaattcaataaaggaaattaggcatgaccctcttgttgagtatgctctgcctatttaaaaatttccacacctcttttaattgtcgtaatgatgtgtgaagtgtgtgttatttt

SEQ ID NO: 38067 - DNA, 400 bp, Glycine max
  Clone ID: LIB3138-030-Q1-N1-E12
ttgctctcggagcaggtattgctagctcacttgttacaaagttgaacagaagaagacatcgcaaaacacttagaagacaagttatagttgagactgaaccttctaaagccgccgctttgaaagctaagttggcggaatatagagctcgttcttcatcttcttcaagcagttcttctgatgatgaaggtcgtaagagaaagacagctttccttgctgcagctaccgcagttgccagcaagcttggtcaacagagagttcatcaaagattcccaaatcttactgaacaagaactagcaattaaaaatgctaaagtccataagagacttgctagaagccttagtggctccagcagtgatgaagaagttaaagtagcaggaaagaacaaagctcttcttacaac

SEQ ID NO: 38068 - DNA, 400 bp, Glycine max
  Clone ID: LIB3138-030-Q1-N1-E3
acagggccaagtacttgggaaccaaaatcgatcccaaccggaggttgggaaggacccggagcacccgttaccccccacgtgtcggcgacaaattgcctgattccgttgattggaggaaggaaggtgctgttcctcctgccaaagaccaaggaggctgtggaagctgttgggcattctcagcaatcggtgcagtagaaggaataaataagatagtaacaggcgaactgatttcggtatcagaacaagaattggtggattgtgatactggatataaccaaagatgcaatggaggacttatggactatgcatttgagttcataatcaacaatggccggattgattctgatgaggattacccataccgtggtgttgatggttgatgcgacacatataggaaaaa

SEQ ID NO: 38069 - DNA, 355 bp, Glycine max
  Clone ID: LIB3138-030-Q1-N1-E8
aaaatgagctgtttccctgcattatcatgttgcagctgcttctggcttgggtagcttgctattgtactttggttgttttgaacgaacatgtcaagaaagcaataaacaaataccctgtcattacattacactcaaaagtctagacgtgtccacgggaagcttctgtatggtcaattctttcattgagcaaattggcttttgagggatctatggattcgtcagtctctcccttgtccctagcaagtctatatttggaacaggtggaacaagtggatcggtcaaccactcaacctgacaaatctctagtatatccaatacaattttattaataaaattaattattttttttagcttt

SEQ ID NO: 38070 - DNA, 403 bp, Glycine max
  Clone ID: LIB3138-030-Q1-N1-F5
gaaggattaaaatggtggccacagttggtattcctgagaatacaggtatatcattggcctgtgctatgaatagttcttttagggggcgcgccagttctgatatttacaccatctgctctcaagactgtgaattgtggaatcctgcttgcacaaaagcaatgactatgtcatttaatccaaacccgtgttctgatgcatggagtttggaatttctgaagcgtactggatttcattgcgatatcatttgtgtcactggatggactgccaccccaatgcaggatgttcaggttacaattgattggtttatttcctctcaggaatgtgttcccaggacctattgtgttttaaatccacaaaatccttttgtgttaaataggtggatgggaaaattgactttccccca

SEQ ID NO: 38071 - DNA, 429 bp, Glycine max
  Clone ID: LIB3138-030-Q1-N1-G4
cgcgtcgtaagcaggtaattagtctgctcgagctcccgtgaattcttaaaaaactgtcttttcttatagggggaggagctggtgcaaagaatgctattctcatgaatatgccaaatgctgatctttcaatgtggatatattcaagtggacaaccataaacaatatgtgtgcaagatgacttctccctacattaaatgtacagtctctttcttgatagcatttgtaaatcatgctgcagataccatgaatgaagaagctgttacccacgagctcacgcatgtagtatagattcaggaaaaagttgtattgaaattttcacaagaggaatttcttacagcttggtcaactcaggtgcgtcctgcaacaactcttgtggctgatgggtgttcatatttgtatgcaatggtgcatgatagttcaatgtctaca

SEQ ID NO: 38072 - DNA, 362 bp, Glycine max
  Clone ID: LIB3138-030-Q1-N1-G6
gacccctaacgctagcaactggaattcggcgtgcgaaaaaccttagccttccttacaactgcaaacacaaagacatgacaatctatggatgcctccgcctccactgtcgagactaacaacagacctctttagaacctgacagactctcaatgatcagcacaagctcccagttcagacttctttgggaccagctagaagaatgttatcgcctcaagggtacccaacagcaaggtttccggtggaagcttcaagattgttgctgtataacagaataaagagattgaagagacacatcgaaccgacacaacaaacagagagggtcttgcctatgatatctcagacgaccaacaagacatcacaag

SEQ ID NO: 38073 - DNA, 66 bp, Glycine max
  Clone ID: LIB3138-030-Q1-N1-G8
aaaaaaaaaaaaaaaaaaaaaaaaaaaaaaaaaaaaaaaaaaaaaaaaaaaaaaaaaaaaaaaaaa

SEQ ID NO: 38074 - DNA, 315 bp, Glycine max
  unsure at all n locations
  Clone ID: LIB3138-030-Q1-N1-H4
tccagggcatatttgttgacctagggcaatntttggacatgctgggagcttctcttgtcaatccggcacagacagtaaacgagaattgtattcgctcaggccacagtgaactagcctctcgtgaaggaaagctctctctcgtattgaatggctgcaaatagctgatgtgcctaccatagcacaaattgaaaagttccattcgaggctgcgataatgcatgctccttactcgaatgataatattgatttactggtgagcattgatttgttgggtttacacggagccngtaaagcttttccaaacaaaattggtttt

SEQ ID NO: 38075 - DNA, 103 bp, Glycine max
  Clone ID: LIB3138-030-Q1-N1-H9
cagccagactggtaaagaagggtgggtttctcttggaagggatacttctttgtatcactggaactgaaccttgtttgcggatcttggcatttcactgctttgc

SEQ ID NO: 38076 - DNA, 261 bp, Glycine max
  Clone ID: LIB3138-031-Q1-N1-A2
agcttggcaatctctcaagattttgaaattgctggtaatactcttatgccagctttttctgttccacaggctactgccagatcttctgaaaatgcggaatcctctgcatgatctggaatttgtgttttctttcgcttgttcgtttgtttaattcaataaaggaaattaggcatgaccctcttgttgagtatgctctgcctatttgaaaatttccacacctcttttaattgtcgtaatgatgtgtgaagtgtgtgttatttt

SEQ ID NO: 38077 - DNA, 69 bp, Glycine max
  Clone ID: LIB3138-031-Q1-N1-B11
aaaaaaaaaaaaaaaaaaaaaaaaaaaaaaaaaaaaaaaaaaaaaaaaaaaaaaaaaaaaaaaaaaaaa

SEQ ID NO: 38078 - DNA, 394 bp, Glycine max
  Clone ID: LIB3138-031-Q1-N1-D3
ggcaaggctaccagcaacatttgcactgctcaggcactgcttgcaaacatggctgccatgtatgctgtgtatcatggacccgaaggcctgaagaacattgcacaccgtgttcatggtcttgctggggcatttgctcttggattaaagaaacttggaactgtggaagttcaggaccttcccttctttgacactgtgaaggttaagacttctaatgcacatgcaattgctgatgctgctctcaagagtggaataaatttgcgagttgtagatggaaacactatcactgttgcttttgatgaaacaaccacattagaggatgttgataatcttttcaaagtttttgctggtggaaagccggtccccttcactgctgcatctcttgcaccagaagttc

SEQ ID NO: 38079 - DNA, 64 bp, Glycine max
  Clone ID: LIB3138-031-Q1-N1-F9
ccggttgagggcaacttaagggcctcccggaacaacctttgtggctgatgggtggccatatttg

SEQ ID NO: 38080 - DNA, 391 bp, Glycine max
  Clone ID: LIB3138-031-Q1-N1-G4
ctagatcgcgagcggccgcggctcgagctgtagatcacccgacccaaaaaaaaacaaaaaaaaaaaaaaaaaaaaaaaaaaaaaaaaaaaaaaaaaaaaaaaaaaaaaaaaaaaaaaaaaaaaaaaaaaaaaaaaaaaaaaaaaaaaaaaaaaaaaaaaaaaaaaaaaaaaaaaaaaaaaaaaaaaaaaggggggggccgccaattattgagtttttcaaccgggaaattaattcgggacggggccttggggggtaacaaattttccttttagggaggggttttaaagttgggggaaaaaaggggaaaaggtgttccctggggaaaaatgttttccgctaaaaattccaaaaaaaataaaagcggaaagaataaagggtaaagccgggggg

SEQ ID NO: 38081 - DNA, 284 bp, Glycine max
  Clone ID: LIB3138-031-Q1-N1-H11
gattgtgtcaacaaggattagctgtagggtggtgtctgtgtatgtgttgttggaatctgtttatccattaggcaaaagaagagtaggccagtagggagatttatatttggactgccacttacaaatttaggattgcaattatttagtgggtttggtttggattttacctgtgtatatgttttcttggttgaatactaatatgggtctgtaaaaaatcccctctagaacctctggttttgcaattgagtgatctttctttgcattcggcattttagcattgtttt

SEQ ID NO: 38082 - DNA, 397 bp, Glycine max
  Clone ID: LIB3138-032-Q1-N1-A12
caccattcctcattccatttcacagcaaactgagtggaatcagagggcgacagtgagaacaccattgaattttgattctagcaagcagagcttttgtcagatttctatcgaccttctaggcggaggaatattagtggacaaaactggagattggatcacacttatacaaaaatctacaattaggaacttattgagagttgctgattggaagaaaggctggttaatggtcaagattgggatgtctgggaacgcagcaagcaaaaggagtgattgggcctcattgggacaagtgtttttaacaaacagcaacagtacacagcattttgatgcatgtcagcggacaatatcagaaccacattcctgggaattgatctttccaatagaagtatgtggaact

SEQ ID NO: 38083 - DNA, 387 bp, Glycine max
  Clone ID: LIB3138-032-Q1-N1-A6
cagcaccattcctcattccatttcacagcatactgactgaaatcaggggggcgtaatgggaacgccatagcctttcgaaaccttcaaacccaacttttttctattttctatcaaccaactcaccttgcaccaatagtacggggataaccatgcagattgcatcataatccaacatcaccccttttgtggaaaactcacttccaggattcccacagaagaaaaaccagcgttttttgggaacccccttgttacaactcccgcccgaaaaaggagtgattgtgcctcattggtacaagtgtttttaacacacagcgacagtacacagcattttgatgcatgcaactggaccctgtcagaaccacattcctgggaatagatctttctaat

SEQ ID NO: 38084 - DNA, 399 bp, Glycine max
  Clone ID: LIB3138-032-Q1-N1-D10
ggctctcagaaaagccgtgttctttgtaatcgctcaatgcttcaccttttccgcatatgctgcaaggtttgaaatcacaaaccgatgcacatacactgtctgggctgcgtctgtgcctgttggcggtggcgtgcaattaaacccgggccagtcatggtccgtggacgtgcctgcaggaacgaaaggggcccgcgtttgggcccgaaccggctgcaacttcgacggttcgggccgcggtggatgccagaccggtgactgcgggggtgtcctcgactgcaaagcttacggtgcgcctcccaacaccctggctgaatacggcctgaacgggttcaacaatttggacttcttcgacatctccctcgtcgacggttttaacgtgcccatggactttagtccaac

SEQ ID NO: 38085 - DNA, 253 bp, Glycine max
  Clone ID: LIB3138-032-Q1-N1-D2
cttaacgtttatatttatgaacatcctcagacatcgttgtaattgtatttagtggtttgcgtgttgtttgctgaataaagctatgatgacataacattatcaacttctggtggaattacattatgttcctccccgctatgttgttaaatgttctgtgtacggatttctcattcctatttggccaaaataaattgaataaacatgtaatggatgcaatcaatatacaatgttttggtatggctttacgtctttt

SEQ ID NO: 38086 - DNA, 116 bp, Glycine max
  Clone ID: LIB3138-032-Q1-N1-D6
ctcgagccggctcgtgtaaaaaaaaaaaaatggcgtaagactgggggataaccggaaacaaaggtcgctgatacaaaaatctggatggatataaaaaaagtgcatgtatagataac

SEQ ID NO: 38087 - DNA, 221 bp, Glycine max
  Clone ID: LIB3138-032-Q1-N1-E6
acggtcgggctcaacccgttggcttggacaaaaacactttcatatactttggggtggggtggccaacttaaaaaagtgggagagagaaaaagagaaagagagagaggacaacatcccaacatttgggggtggcctttattttaagccctaaccttaattatgccattaagggctaaaaaaaaggaagctggtcataaaaagaaaggaaaaggaactggaaa

SEQ ID NO: 38088 - DNA, 418 bp, Glycine max
  Clone ID: LIB3138-032-Q1-N1-F2
cttcgggcgaaaaaaaaaagaacgcagaagccacgatgagtgggagagccattatctcctgtttctctccttctttaacaactccatgctctgcccccattccagtactctcgggccgaaaccacctgctccatgcaacttcaccttcggcacaccttctctcgcgggggagccacctcgttgttgccggcgggggcggccggaaaacatgggcaaatgtgaaatccgagaagaacgtgtccgagtcccccaagtacgaagatgaatgccgggttcaaaaaggacgtgatttggataacgtggaagaggaaaccaggtggtggcaagtgttccccaagagatgggtcattgtggatctctgcttctcagcttttcttctatgtaacatggatagggtaaatatgagcattgctatact

SEQ ID NO: 38089 - DNA, 396 bp, Glycine max
  Clone ID: LIB3138-032-Q1-N1-F4
cgcaaaaaaaaaaaacaatgaaagaaagaaagataaaaaccaaacataaaaatacaaagaaaaataaaataagaattaaaaaaaaaaatgaacttaaaaaaaaaagaataaaactataataaaaaaaaggggggggcccccacttgggggactatcaccccgggtaataaatttgggcccggtctttgtggggaccccagttttgcttatgaaggggagattaaaaggtgggggtaaaaatggaaaaatctgtttccggggtgaaatggttttccgttaacaattccaaaaaaaatacaacccgaaaaaataaagggaaaacctgggggggcctaaaggggaagcaaactcaatttaatggggtgcgcctaactgcccgttttccatgcggaaaac

SEQ ID NO: 38090 - DNA, 396 bp, Glycine max
  Clone ID: LIB3138-032-Q1-N1-G3
ctagctattaagttcgagtcgaggaggatacccagatcgcttactcacttatataaaaactttatggactcaagacagagcaagatgacatctttgtacattcctgacgaggtgtacactgaagatgtacattctgaaatttcacattcaagggtgctgccttctgtgactgagcttgcttcttctttagaaaaattgccacacattatctaaactgaacgtcctatctatcgctcatgaggtgcatctgagaaaccaccttgctcaacaaacatatctaatattcaatccgcatattctttcgtttgaaaggatgtgttacatattaagctaaaaagtcagtgtgcttttaataatgtgctggaatcactggaccgtgaaactgttgagctgaca

SEQ ID NO: 38091 - DNA, 81 bp, Glycine max
  Clone ID: LIB3138-032-Q1-N1-H6
ctcgcatttcggctcgggcgcaacgatattatatttctgcaccatgctaaatttgcaaggttggtttcacaacccgttaaa

SEQ ID NO: 38092 - DNA, 286 bp, Glycine max
  unsure at all n locations
  Clone ID: LIB3138-033-Q1-N1-B2
aagtatttcgctagaaaagatactgataattataaaacaacagagaaagataggggcgtgctgcaacaactatgttggctgatgggtgtccatatttgtatgcaatagaggagaaaggttacaaccatggcttatccaccactcagatgcatgtcatggatgccatatgtgatgcccatatgtgtgcatatgggctcaatcctggtatttcaaggactaggctttttggcaccattacaatacctctgnttctgagctaccttttcctgatgagggtgcagagctg

SEQ ID NO: 38093 - DNA, 290 bp, Glycine max
  Clone ID: LIB3138-033-Q1-N1-F3
ccccaatgaaaaattcaatggcggaggttttaaccaaggcgagtttggtttcatcttcttggcatggggctagtcaaccgcatcatcatcgaagggtttcaacggttctttcaaataatacatgtagcttccgttccggcgtgggaaagttctcttctttgaagatgaattctcaggttctcagatcttggtcctcttcttctgagtttcaaggtaaaaagcttgtctttcatgtaaatataggattaccccatagggtcaattcgcggttgagagcttctactgggact

SEQ ID NO: 38094 - DNA, 252 bp, Glycine max
  Clone ID: LIB3138-033-Q1-N1-G8
gggcaactgaagggtttaattcacctaaaaaactttttatcatggatttctttgaagaaagattcaataatcaaattgagcttgaaccatctctgcatgataaagatcattctagcagttcaagtgtatgtgggggattgcctgagcaatcttttcaacagacagcattttcatgcgatcagcctaattaccagcttcaagatctaccgagattcgaaccgatgaatgacactttcttggattctgtacctg

SEQ ID NO: 38095 - DNA, 243 bp, Glycine max
  Clone ID: LIB3138-033-Q1-N1-H4
tagaacgcgagcggtcacccttgttttttttttttaaatgaaagcgtaaaattaatatttgaaccatcatattaactacaacagtttctgtatctcaaagtaaatgcaaagcatagatcatctcctgtactttttcgagaaactaaaagtgatctgaaagtaaaggcaattagtatgtatctctgcttaggagggcgtgctatatacagaaattatggatcaaacattagagaaaaccactag

SEQ ID NO: 38096 - DNA, 61 bp, Glycine max
  Clone ID: LIB3138-033-Q1-N1-H5
ctggaaccgctgaatccgacttgcacaaaagcaatgactatgtcgttaaatacaaacccag

SEQ ID NO: 38097 - DNA, 225 bp, Glycine max
  Clone ID: LIB3138-034-Q1-N1-B1
ggactgccgttgctcggaggaatgttactcgggggcgccttgttctaggctcctcgtctcatcaagcctgacaacccgtcatattgatatcggaagttgaactcgaacccgttgagatccgcgaccgggtcgtctgtcggggaacgctttaatatgctcttaaaaaattcgaaactgtgaaaagaagaacaaaatgtggatgtagtgatttatgagatgtacagt

SEQ ID NO: 38098 - DNA, 92 bp, Glycine max
  Clone ID: LIB3138-034-Q1-N1-C10
aaaaaaaaaaaaaaaaaaaaaaaaaaaaaaaaaaaaaaaaaaaaaaaaaaaaaaaaaaaaaaaaaaaaaaaaaaaaaaaaaaaaaaaaaaaa

SEQ ID NO: 38099 - DNA, 71 bp, Glycine max
  Clone ID: LIB3138-034-Q1-N1-C4
aaaaaaaaaaaaaaaataaaaaaaaaaaaaaaaaaaaaaaaaaaaaaaaaaaaaaaaaaaaaaaaaaaaaa

SEQ ID NO: 38100 - DNA, 69 bp, Glycine max
  Clone ID: LIB3138-034-Q1-N1-C5
ggtaaagttagaaatttgtaaaattaaaagcgagagagattaaagaggggagttgttggtgtaacaggc

SEQ ID NO: 38101 - DNA, 305 bp, Glycine max
  unsure at all n locations
  Clone ID: LIB3138-034-Q1-N1-F3
tcgcgattgtaacaagcttagtctttgctagggattatgattcacccggggggggacctaagttatgcgctccaactttagattggttctcacttttacaaaaatctcccattacttacttattgagagttgctgcttggaagaaaggctgtttaatggtcaagattgtgatgtctgggaatgcagcagtcaaaaggagtgattgggcctcattggtacaagtgtttttaacaaacagcaacagtacagancgttttggtgcctgtcagtggacaaaatcagaaccacattcctgggaattgatc

SEQ ID NO: 38102 - DNA, 341 bp, Glycine max
  Clone ID: LIB3138-034-Q1-N1-G2
tcgtcttttgggccccattcctcagtccatttcacagcaaactgtttggaatcaaatggcaacagtgagaacaccattgaattttgattctagcaagcagagcttttgtcagttttctattgaccttctcggtggaggaatcttagtggacaaaactggagattggatcacacttatacaaaattctccaattagtaacttattgagagttgctgcttggaagaaaggctgtttaatggtcaagattgtgatgtctgggaatgcagcagtcaaaaggagtgattgggccctcattggtacaaggggtttttaacaaaacagcaccggttccagagcctttt

SEQ ID NO: 38103 - DNA, 245 bp, Glycine max
  Clone ID: LIB3138-034-Q1-N1-G3
gttctagatcgcgagcgggcgcccttttttttttttttttttggtgggggttttttgtgtgggagattaaaaatacattttaaataaaatacagactaaaatactaattatacgtatattagaactgggggggctcaaggtattttattttcccaaaaaaaaaaaaaataaaaaaaaaaaaaaaaaatataataattaataaatatttattgggggggggggggggggttgaagaaccttggggg

SEQ ID NO: 38104 - DNA, 316 bp, Glycine max
  Clone ID: LIB3138-034-Q1-N1-G5
tgtttcccagagttctatactttcaacctgatcatcgaacagcccgtggaccgcgtcgactcgcgccctacccccgacgtcacacccgtcgttacccctgccggctcttgcatgaactcgttctctggtggcgagcgtccagcggtcaagaacaactttggcaaggcctcggatgagctcacgggttacgactcggtcgtcggctcgcctgtgccttcttgacctggcagcccgggcaatgagaagcgcaccgaggacggtgtgccctagcagaacacgggtgtcactctggatgcgttcaagcgggccctaggtg

SEQ ID NO: 38105 - DNA, 668 bp, Glycine max
  unsure at all n locations
  Clone ID: LIB3138-035-A7-F2A
ggatactgcatactcgctggatctcccaatctggcttcaaactcaacaatggcatacgccgcacctccgctggacccgccaggaataggcacgaactcgccttcgtctcagaagaagagagtggcttatttctatgacagcgacgtcgggaactatgcctaccagtcgggacatctgatgaaaccccatcgaattcggatggcgcattcgcttgttatgaactatggactgtacaacaagatggagatttaccgggccaaaccagcgtcaaaatacgagatgacacagttccatacggacgaatacgtggactttttgcagcgtgtcactcccgacaatgaacatcttctggctaaagagtgcgccaagcacaatgttggggaagattgtcctccgttcgacggcgtctttgagttctgcgcgattagtgccggtggcagtatggaaagagcggcaagactcaatcgtggccaatgtgatatggcgatcaattgngcgggcggactgcatcatgcgaagaaaaacgaggcatctggcttctgctatattaatgatatngtcctcgcaatccttgagctgctccgcttccatgcacgagtatngtatatcgacatcgatgtgcatcatggcgacggtgtcgaagaagcctctatacactgacaggtaat

SEQ ID NO: 38106 - DNA, 635 bp, Glycine max
  Clone ID: LIB3138-035-A7-R1A
caaaaatgcttcaagtgtatatttgtacctctatgaaagaccgatattctcgtttccgcctttgtgattgttctccatagcttccacagcttctgcagcgtcactaagcccaagcgtgtgactgtctactctgttcatacattggacgataggcggctcgggctgcattggcgctgattccagaacgattgacggctgtgcgatgatctcgacatgttccgcaggggcgtccctctggactactgtttgttcaacgttcgtgggctgggaaacttcgttgctctcgtcacgaatcgcttcctgcagcatcattgtcgttctgtcaggttcaggatcgttgcctgggtcaatcgatgggaccggctcagttatctggtctgtatcatgatcgcttgacaaaaccttacacccgctgccaccctcacccactatggacgggcttccgtgatcagcatctgctcccgagtccactcctctcgcgtcttccaagccagacatatccatatcatcctcaatcatccgatcttccacccgttccgtgagccgttgatctttggaggtctcctcgtcagcatcttcatcatccagtctgtcgtccatatcgtcaatatgttcgctcatgccgactggatacc

SEQ ID NO: 38107 - DNA, 406 bp, Glycine max
  Clone ID: LIB3138-035-A7-R2A
caaaaatgcttcaagtgtatatttgtacctctatgaaagaccgatattctcgtttccgcctttgtgattgttctccatagcttccacagcttctgcagcgtcactaagcccaagcgtgtgactgtctactctgttcatacattggacgataggcggctcgggctgcattggcgctgattccagaacgattgacggctgtgcgatgatctcgacatgttccgcaggggcgtccctctggactactgtttgttcaacgttcgtgggctgggaaacttcgttgctctcgtcacgaatcgcttcctgcagcatcattgtcgttctgtcaggttcaggatcgttgcctgggtcaatcgatgggaccggctcagttatctggtctgtatcatgatcgcttgacaaaacctta

SEQ ID NO: 38108 - DNA, 282 bp, Glycine max
  Clone ID: LIB3138-035-Q1-N1-B1
ctccccagctttgcttacaggtcctataattttttttctccattagaataccaagctctgcaactttgcttctcaacatggagtatcggctcctacccatttttactttactcaatattgcactggtggcaacccatgctgctttaccccctgaagtttactggaagtcggtgcttcctactacgccaatgccaaaagccatcactgatatcctttactctgattgggtggaagagaaaagcagctcagtgcatgttggaggtggaggcgtgaacgtgcata

SEQ ID NO: 38109 - DNA, 396 bp, Glycine max
  Clone ID: LIB3138-035-Q1-N1-B9
cgaaatatattaaaaaaaaaaaattataaaaaaaaaaaaaaaaaaggggaaaaaatgaaaaaaatatataaaaaaaaaaaatataaatattataataaaaaaaaaaaaagaaaaataaaatatattcaaaaaaaaaaaaagggggcgccccccctttaggggccccccccccccgaaattatttgcggaccgggtccatgggggttttccattttttcttttttggggccctataaactttgggctattccagggcaattgttttccctggggaaaaatttttttccacacaaatttctacaaaatttagaacggggagcttttaggggtaaaccctggggcccctaagggggggaatacttcactttaatggctgggccttcattcccctttttc

SEQ ID NO: 38110 - DNA, 106 bp, Glycine max
  Clone ID: LIB3138-035-Q1-N1-C12
ctattcttcacaaacttaacttggtcgacgccaccgatgccccccaatcctggggtgggattagcaaaacacttcaaggacttaaattccccttcaacttaaccca

SEQ ID NO: 38111 - DNA, 191 bp, Glycine max
  Clone ID: LIB3138-035-Q1-N1-C4
ttggtattatcctttacaaccttctccccgaccacccacaccagccttaccaaatactctcagaaactattttcctccctacaatgacaccaactcccacaaccaaccaatatcaacaaatcataattaaataaaataaaattcttaaccaaaggaaaataagactaatatttctgggaacattttgtaat

SEQ ID NO: 38112 - DNA, 422 bp, Glycine max
  Clone ID: LIB3138-035-Q1-N1-E7
ccctgccccccttcctaaacttcggattcgggttcaggggaccttttgggggaggaatcttaatggacaaaactggagattggatcacacttattcaaaattcttcaatttgtaacttggtgagagatgctgcttggaagaaaggctgtttaatggtcaagattgtgatgtctgggaatgcagcagtcaaaaggagtgattgggcctcattggtacaagtgtttttaacaaacagcaacagtacagagcattttgatgcatgttagtggacaaaatcagaaccacatttctgggaattgatctttccaatagaggtatgtggtcctaataatggttttgaaatgtggagatctgagtgggcaaatcaaacttcatggcatttgagtttccttattgacaatcccaaacagtctacagttttt

SEQ ID NO: 38113 - DNA, 276 bp, Glycine max
  Clone ID: LIB3138-035-Q1-N1-F1
gagatccgcagtgtctggatatcatactggtctcaggctgaccgttctctaggccaaaagatagcttctcatctcagcacgaggccaaatatttaatgttgttgccaactccagaatgattgttagagttgcagacgtgcaaagagtacgataaggatgtgattttggattacctgaaagaactaatccttttcttgcaatattatgttgtgtgtacccataactccatgaatgcaactcgttgacctatctcaataaatgccgtttgtatttgtt

SEQ ID NO: 38114 - DNA, 343 bp, Glycine max
  unsure at all n locations
  Clone ID: LIB3138-035-Q1-N1-F2
ggtggtttacccaccactgcttggattagttctgcagttaacaatcgctcctcagatatcaacaaaaggattcgcacagcacttgggaaaggtaagaaaattgtttttcttactagagttgatccttttccagtagctttactggctgttctttttggcgttaagaatgaaattctgagttctaacgccactaatcctatgctgacgcgacttcttgagaactgtaagagtctcaaatatctggttgatgagtgtccttttgcatttgtgaactagtatgtagtattttattcacttaaataaagcgcattactatgtgcaatgagtgtgtttaaatgttnna

SEQ ID NO: 38115 - DNA, 369 bp, Glycine max
  Clone ID: LIB3138-035-Q1-N1-G5
ctcgagccgctcagggctagagtatatgacgatgaagtgaggaagtggatttctggtgttggtgttgacttgattgggaagaagcttgtgaactccaaggaaggacctccaacctttgaccaaccgaagatgactttgagcaagctcttggagtatggtaacatgcttgtccaagaacaagagaatgtgaagagagtacaactggcagacaagtacttgaacgaggctgctcttggtgatgctaatcaggatgccatcaaaagaggaactttctatggcaaagcagcccagcaagtaaaaattcccgtttcctgaggttgtactgatccaaatgccttaaacttcgacccaactgcaagaagtgatgat

SEQ ID NO: 38116 - DNA, 408 bp, Glycine max
  Clone ID: LIB3138-035-Q1-N1-H2
ttaggttcgagggcgctcattctctggccactggtgagctcgcgagccttagggagcaaccacttgaggattgcgatcacttttgtgatccataacaatatggtgcgtgagacgtcaagctgctacgccggcttgattaacaacgcattttcatgcatacttcatgctggggcagtacacaaagatactgactatccatacaccgggagagatggctcctgcaaatgctgccagaaccaaaggagcggatcctggctctaagaacagagggagatccctcctttattgacgtgttgctagacacctaccttagaacgtacctaatgcatgcgctatgcacgcagctttattgagacatactgtggaggcgattcatgcacatacatatgtggccatcacttggatcat

SEQ ID NO: 38117 - DNA, 77 bp, Glycine max
  Clone ID: LIB3138-036-Q1-N1-A4
tctaattagattggttgatcctaacttgttgccttttgtgagttccatttcagccttactgtactattcttatctgc

SEQ ID NO: 38118 - DNA, 391 bp, Glycine max
  Clone ID: LIB3138-036-Q1-N1-B10
tcctctagagcggccgcccttttttttttttttttcatatatacagattttattgtcaataaggaaataagatatcattattcagtgcatataaagcaaagacagggatagacatggtccaacctcatctctgctggaacaggacagtggatcagggaagagaacatcaggtcagggtggggagggacagcagtgggcatgggtgggccagtctccctaactcctatgttatgcaaataagagcacagacacattcacatgcagctgcagaaagaggggtccggggatctgatgtcacatagcgggatgaagcatcactcagtcctcataaggcaggtatctcacactttaggaaccgcgagaaacacatcataaccctgggcactgtcac

SEQ ID NO: 38119 - DNA, 392 bp, Glycine max
  Clone ID: LIB3138-036-Q1-N1-B11
gcttggatcctgtatagcggtcgcgcttttttttttttttttcctatttacaagaaaatattgtcaggggggaaataagatatgattgttcagtgcatataaagcaaagacaggtttacacttggtccaggctaatatttgccggaacaggacagtggatcatgtaagaaaacatcatgtcaggggggggcgggacagcaatgttgatgggtcggccaatcaaaataactcctgtgttatgcaaataacagcacagactcattcacatgattttgaagaaagaggggtccggagagctgatgtcacatacttggatgaagtaattcttatgcctaattaagcaggtatctcacactttaggaaccaagaaagactcttctgacccctgggca

SEQ ID NO: 38120 - DNA, 210 bp, Glycine max
  Clone ID: LIB3138-036-Q1-N1-B3
gggaaaaaaaaaaataaaaaaaaaaaaagacaataacaaaaaaaagaaaatatgggcggccgcaaactgtttgcctttttaccccgaaataaatttcggaccggttcctgtaggcgtaccaaatggggcgtcctccgaatttttttttttcctgcccggaaattaattcatagccggttcctgggggggatcggttttcccttatagtgg

SEQ ID NO: 38121 - DNA, 338 bp, Glycine max
  Clone ID: LIB3138-036-Q1-N1-C12
tcctgtatagcggtcggcctttttttttttttttctataactcatgggaataaatgggcggccttgataaggcacagttttacaatattaagatcctacattgaagctgagaactttcagacgtgtcggggggggaacgtacagatgaaaaaactgcacatggactggagcttatccaagttggaaaattagatcaatgatagaacttgctacctgtgagaaacatatgggtactgttcaaccccgtaaagaaggacatcccgacataaatacagagaagttgtgcgcctgtgttatacgtgttgaaaaacatgcaggacattgattcacacacaaaa

SEQ ID NO: 38122 - DNA, 405 bp, Glycine max
  Clone ID: LIB3138-036-Q1-N1-C3
atactacgaagattctcgttcgacaacatatgcaaattctcgttcgggctcgacccgggttgtctcctaccgaatctcccagtctcggacctcgccgtcgcgtttgacctggcctcaaagctctccgccgaacgcgccatgaacgcgtcgccgtttatttggaaactaaaacgactcctcaacataggatccgagaagaaactgagagaaacaattaacgtcgtaaacgacgtcgcaaaagagatgataaagcaaagaagagaaatggggttcaagacgcggaacgaccttctctcgcggttcatgggatcaatagacgacgacgtttatttaagagacattgtggtgagttttctattagcgggtcgtgacaccatcgctgccgggttaacgggcttttttatg

SEQ ID NO: 38123 - DNA, 107 bp, Glycine max
  Clone ID: LIB3138-036-Q1-N1-C5
ggcactaaacactttcgcagagaaatatcataaatttattttaaatgaaacataaactcataaactatctaatataaacataacatctctcattacttaacaacggg

SEQ ID NO: 38124 - DNA, 225 bp, Glycine max
  Clone ID: LIB3138-036-Q1-N1-C7
gaatgaccctcttgttgcgtatgctaagcctatctgggggttggacacctatctcaatatgtgggctcacgagtgcactgtgtgtgccatttacgaagctatgacgtatgatcggtgaagcgagcctgcaacttggaattccttgactcccgagctggcgatcccgatcattcattaactaaacacgtttaagatggagatacctttgcgtatagactgtcgcat

SEQ ID NO: 38125 - DNA, 333 bp, Glycine max
  unsure at all n locations
  Clone ID: LIB3138-036-Q1-N1-C9
ctcgagccgctcgagccgctcgagcggctcgagaagggagcggcagcaatggtgtacgtcaaggctcataaatcaaaagcctacttcaagagatatcaagtcaagttcaagagaagaagagagggaaaaaccgattaccgtgccaggattcggttgattaatcaggacaagaacaaatataacactcccgaataccgatttgtggttcgctntaacaacaaggacattgttgcacaaataatatctgcttgcattgccggcgaattagttcttgctacagcatatttcacatgagctggcacgatatggtcttgaagtaggacttacaaaata

SEQ ID NO: 38126 - DNA, 309 bp, Glycine max
  Clone ID: LIB3138-036-Q1-N1-D10
tcctctatagcggtcgcccttttttttttttttttagtttgccaagtgaactgctgtatggagaacatccagccaggggtgttactgttcacttaaacatgactttcgtcttgctgaacagtggaaaatgaggggaaatcctgctgtccaaagaagcagaggaaaggggccggttcacacacccagacgttgagcttttcattctggatataagctgtctgtctggggagagaaaggctcctggctggactctaaggtgggagcgggtcattccttcatagcccacgtaagtatggaaggaaagatcat

SEQ ID NO: 38127 - DNA, 247 bp, Glycine max
  Clone ID: LIB3138-036-Q1-N1-D6
gttctagatcgcgagccggccgcccttttttttttttttttgttcagggatgtcatactcttgataaaaaaaatggaaatatgacttcatattatacacgcttttcgaaatccaaagaatatgaaacaaaatcaatgttacataaaacaagggcaccctcctcagctgaaaattaaggatgattaatcaaatttttttatgcagatatatatatttctgtacatcatgatggaacatttactcagct

SEQ ID NO: 38128 - DNA, 406 bp, Glycine max
  Clone ID: LIB3138-036-Q1-N1-D9
tgaattctgtatagcgggcgcccttttttttttttagtcatcttctaattttctcttggacccggtaattaatataatacagggacctggttcctttcaacaatatcccttggaggagggatcaaaaccccactcaaaatttcaagacctgatatttccatggaaaaaggatcctgttgggctaccccacatcataggaaacagctggaccaagattgaaaaactttgaacactcaccagcgaataatctcacaataattttgttttaattacaggccggcctccaaacggggccgctttacatccacctgtatttaataatttgccaaccccacaacgggaaaatctttacctgttggggaaacaattttatctctcttttatccaacccaaggggttatatttt

SEQ ID NO: 38129 - DNA, 337 bp, Glycine max
  Clone ID: LIB3138-036-Q1-N1-E10
cttcactgtttgttattaaaggtgaacacaccacaactccattgaatacagagtctagcgagcggcgcttttgacaggtggctattgaccttgtccgtggaggaataataagggacaaaactcgagagtggatcacacttatacaaaagtctccaattacaacttattgagagttactgctcgaaagaacggctagtgaatgagaaacattgtgatgcctgggactgcagctctcaaaaagagtgattgggcctaagtgctacaagtgattgtaacgaacatcgactggacagaagatgttgatgcatgtcacttgactacatcaaaacgacattgc

SEQ ID NO: 38130 - DNA, 143 bp, Glycine max
  Clone ID: LIB3138-036-Q1-N1-E11
gcctatttttatttcaacaaacattataaactttacgggtctggtcttacctgaaggggtgggcgcgattcgaccccggccgaacaaaacctatcatgaccacctcttaaacggaagcaccgttgacgaattatgtgagtgga

SEQ ID NO: 38131 - DNA, 376 bp, Glycine max
  Clone ID: LIB3138-036-Q1-N1-F11
gaaagataaaaaaaaaagatgaatcagtgtggttatcagcagaagaatgctttgacaagctgtggggagatgaagatggaatcagtggtgtgccctaaaccacgaagattgggcctgttgaaccactcaacctttgatgaccacatcagacccttgaggccaccctttatcaactaccaatcagaaattgaagattcaggagttggggctgagcttctggacatcattctccccaagagatctggagggcaagtggcttcatcacccccatttttctgtggatctccacctagcagggcttcaaaccctgtgatccaagatgagcaatttggtagtaatggtaatgagaattttggtgcatttttctttggcaccc

SEQ ID NO: 38132 - DNA, 373 bp, Glycine max
  Clone ID: LIB3138-036-Q1-N1-F2
gggagatttgctctgggatgggaagagatgcactgactccggaacccatgtgagatgcttacacaagctaatagttgaacttgagaaaagtgtttctacattggctggcattgaatgtgccaaggatgagaaacgttctcgtcgcaaaatgcttgactaacctaagacgcgctgcttcactattctccctatggaggataatcttgtggaccgtcaaaagtttttaaattttgtgaggttcattatgaagaaaagggacaaacttagttgtcaagttggaatcaacccatactccatggaatggactggtttggtcaatacattactgagtaagggcaatgatattctgtgttgcgattatgctagttttgat

SEQ ID NO: 38133 - DNA, 339 bp, Glycine max
  unsure at all n locations
  Clone ID: LIB3138-036-Q1-N1-F9
ttctgtatagcggtcgccctttttttttttttcaacatacattcatttttttttttttcagtttttattttagggaacgggcgatagaactccccgaccatttaaagggctcccaaccactaataaaatgatggtagggactattctgtaggggactatctggccaatctttttccaccccaggacatacttttttttacaaatgggtcttctgaaggcattgccgtgccactcacaggagggctaacatatataacttcgaatatacgggaaaggttattgaaaccgcatgggaaggaccattnccctgccatgatcaaatcacccaagacatttggg

SEQ ID NO: 38134 - DNA, 409 bp, Glycine max
  Clone ID: LIB3138-036-Q1-N1-G10
tcctctatagcggtcgccctttttttttttttttttgaagcaatccaaaatctgggttgatttaattgcgggggctaatggaaaatagaacttgaacagcagttcaactcgataccccatccagctccaggactgtaccatcgctggagccaaagacaggtctttctccatcaacgacctcgttttcacacatagactgctttcacagggcatcagcacgtacctgtcacccaagaacttagttcaagccctgtggatccttctacacttttggccaatactgtcacctttcgcagtcaaggactttaggtctgctacgcgattggcagaggaaagctccctctccacttcaagaaatgtggctacagaagtatggaattggggagcatgattctagggacttcaacta

SEQ ID NO: 38135 - DNA, 401 bp, Glycine max
  Clone ID: LIB3138-036-Q1-N1-G5
actagttctagatcgcgagctagaactagcagaagaacaagtcgttgagaactaagaaggagaagcaaatggcttcctcaatgatctcttccccagctgttaccactgtcaaccgtgccggtgccggcatggttgctccattcactggcctcaagtccatggctggcttccccaccaggaagaccaacaatgacattacctccattgctagcaacggtggaagagtgcaatgcatgcaggtgtggccaccagttggcaagaagaagtttgagactctttcctacctgccagaccttgatgatgcacaattggcaaaggaagtagaataccttcttaggaagggatggattccttgcttggaattcgagttggagcacggtttcgtgtaccgtgagcacaac

SEQ ID NO: 38136 - DNA, 362 bp, Glycine max
  Clone ID: LIB3138-036-Q1-N1-G9
ttctgtatagcgcacgagctcaatttttttttttcttttgactgttaacctcccgtgggggttaatatcgagccaaacatttataccaaacttagcaaagacgtgaacttttgcccagggcggataaacataaaactccccaaggatgccttgtaaccaaggatagcggacattattattgggtaaagtttgttcaacaaaaattctttttagttgttgatctttttcccaaaggagtgaattggacctgaaacatcacggatgatccccaagtgccaccccacgaatggccacacctgcactggacattggccttgcaaacaattccactggatggtacatctattaattaccctgggctt

SEQ ID NO: 38137 - DNA, 421 bp, Glycine max
  Clone ID: LIB3138-036-Q1-N1-H12
tcctctagagcggccgcccttttttttttttttttttatgttgagtcatttattgtaagataatttacaaatatcttgctgtctttagtaatctgaacaatggaccaataaattcttctgacaaggacagcagtaagctaaaaacaaaatcagcttgctgaattcttctttacctcttgtctgaggatgaaacttgattttcattagtccagagccgcagcaccagagatgatttctatcagctccttggtgatgacagcttggcgggtgcgattgaatgtcagagtcaacttgtcaatcatttcagaagcattcttgctggcgttgtccatggccgtcatcctggcgctctgttcactcgtggtagactccttcagggagtagtagatgatgttggccaggctgtattcctggtagttcc

SEQ ID NO: 38138 - DNA, 325 bp, Glycine max
  Clone ID: LIB3138-036-Q1-N1-H9
ctgtatagagctcgagcttttttatcctttttagccgtattttaaagcctctagtacgtgtttaatttgcgctggaccatcttttactgattagcaggttgaactcgatgaatatacatggacagcggaaatgctattcgtttattatagggaaacaataaccaatctttgttcaagtgggcatcaagacaagagtccacgtgcttgagtgataagcacagttaactactccatctcacataacactgtttggaataagaaaggatctctgataccacgattcagaggtaaaatcattaagctaacctcaaagaatggtagctat

SEQ ID NO: 38139 - DNA, 65 bp, Glycine max
  Clone ID: LIB3138-037-Q1-N1-A2
ctagagccccctttccgaactggttggccaatttgccagccttgttgacctattttccgtggggg

SEQ ID NO: 38140 - DNA, 180 bp, Glycine max
  Clone ID: LIB3138-037-Q1-N1-B3
ttcagcgccactttcacttttttttttttacaaaatacaatgtgctcccataactacaatctctcaattccccatttatttaaatcaaaatcaaaatcttatctggggttctcccatcagaggacaaagctttcgacttttcgggattcgctcgtatttgtttcacagctctgatatgga

SEQ ID NO: 38141 - DNA, 307 bp, Glycine max
  Clone ID: LIB3138-037-Q1-N1-B4
gccaaatcatcaatagtatcttgcccatctcccacaaaaccatcactgccttcaacttcattatcagcatctcctttatcatctcaatgtcacatacctccatcaagttcgacccctttgaggtggccctgccattccccaggacaccagctatcacagcaagcttattatagccgtatcccagcagttaagtcacccagcagcttctctttgtctgacgaaaggcctgtgttttcttcatggagcaatgaagtgggtatgcactcccatggtggatcttcaaattgttggtctatacctggctttt

SEQ ID NO: 38142 - DNA, 201 bp, Glycine max
  unsure at all n locations
  Clone ID: LIB3138-037-Q1-N1-B9
cgaacttaaacttggaatttggtctagaggggaaagtttgcctatataacattgacactaagttacttggcgcgtaattatgttattattaaaatttgcaaaatgacctgttttgcagtcaaannaaaaaaaaanaaaaaaaaannnccccntnaaaaaaaaagaaagnnnnnnanattgttagggagagaattgaacaaa

SEQ ID NO: 38143 - DNA, 387 bp, Glycine max
  Clone ID: LIB3138-037-Q1-N1-C2
attatctatcacaataagtcattattattatttgaaatcatgcttattcagattgttgccagattgagacatagaataggtcctcaatacaacgaggttcaggctcagatggaaacaaattgtgttagatcgtctctcggtgatgttgaaactcctataggggccatgttggatctgagaatttctcaatctaaaattgcactctccaaggacacagttggaggaaccatcctgcgtagtgatctattggcaaattttttgacagaaggcgattttagagcatgtgttgatttgcagcgcactcatcgtgtaagtggaatgatttatatggcggccacatgtggtattccttggaattcaggtctctcattggcctgtgctatgaat

SEQ ID NO: 38144 - DNA, 102 bp, Glycine max
  Clone ID: LIB3138-037-Q1-N1-E1
ccctattacactttccccaattaccaaacccaaccctctttcttcccgggttgtcagggggggggcacccgcgatttccccctccaggttccctttcacccc

SEQ ID NO: 38145 - DNA, 82 bp, Glycine max
  Clone ID: LIB3138-037-Q1-N1-E2
ggccataatcactttttcctactttcttctccatccatcccttgactaattaattatccctcacaactaccaatggccgaag

SEQ ID NO: 38146 - DNA, 142 bp, Glycine max
  Clone ID: LIB3138-037-Q1-N1-G3
ttcaggccagaccctttggggttttaaatcccaaaatccctttggggttaataggggggttgggaaaatggccttcccccaagggcctttcccgaatggtaaaaaaatggctctttctttatgggggggggctggggccaaa

SEQ ID NO: 38147 - DNA, 136 bp, Glycine max
  Clone ID: LIB3138-037-Q1-N1-G6
ttcaggaggaacctatcctggccaacccggtaatggggttccagaattggttttgccccatcccaaaggagcccgcccatttggaaaggaagccctctctcggattggatgggcgccaaaagccgatgtgccctcc

SEQ ID NO: 38148 - DNA, 264 bp, Glycine max
  Clone ID: LIB3138-037-Q1-N1-H1
ttcaggctaaaaaagggttggggttggggtttggccttaaaccccgaccgccacaaccgtaattgtttaaatcctggaacggggtctttttggctttctggccttttaattaggtttggttaatggatccatggccaaaaatgccttccagtaacttgtttttgaaggaaccaattaggatgtgctccatccttgagccatccaagcctagttttttttttgcaatgacaaaaattgttggtaccctgggacctaaatttaaat

SEQ ID NO: 38149 - DNA, 157 bp, Glycine max
  Clone ID: LIB3138-037-Q1-N1-H5
ttcggattcggctccagggggaaattgacttttccccaaggcacctccccaaaagttaaaaaaatgcccctttctttatgggggggagctggtgcaaaaaaagctattttcatgaatattcccaatgctgttctttcaatgtggggatattttgttg

SEQ ID NO: 38150 - DNA, 158 bp, Glycine max
  Clone ID: LIB3138-037-Q1-N1-H8
tgaaaatttccacacctcttttaattgtcgtaatgatgtgtgaagtgtgtgttattttaaaaaaaaaaaaaaaaaaaaaaaaaaaaaaaaaaaaaaaaaaaaaaaaaaaaaaaaaaaaaaaaaaaaaaaaaaaaaaaaaaaaaaaaggccgccccccc

SEQ ID NO: 38151 - DNA, 396 bp, Glycine max
  Clone ID: LIB3138-038-Q1-N1-A5
tcaaggggaatatggatgggtttcgtaggcctgtgtcttctgtctgtatcagaatcaggtctgctccaacgcctagagcaccctgtcaaagctgatggctcacttagccttatggtcattggagactggggaaggaaaggaacatacaaccaatctcaagttgccactcagatgggaagggttgctgcaaagttaaatatcgactttgtgatatccactggagacaatttctacgatgatggattgactggtatagatgaccctgcatttgaaatttccttctcaaaaatctacactgccaagagcctccaaaagcaatggtatagtgtgttgggcaaccatgactacaggggtgatgttgaagctcaattgaatccaatccttcagaaaattgat

SEQ ID NO: 38152 - DNA, 414 bp, Glycine max
  Clone ID: LIB3138-038-Q1-N1-A6
tgttgatcgagataactagaaacagtgtgatgaaaatgaaggtccttgttttcttcgttgctacaattttggtagcatggcaatgccatgcgtacgatatgttccctctccgaatgaacactggctatggtgcccgtactccggaggtgaaatgcgcaagttggaggcttgctgtggaagcacacaacatctttggctttgagaccattcctgaagagtgcgttgaagcaacaaaggaatacatccatggcgaacaatatagatcagactccaaaacagttaaccaacaagcttacttttatgccagagacctcgaagtccatcccaaggacacatttgtgttcagtatagatggcaccgtactctctaatattccatactacaaaaaacatggatattgggtggagaaattta

SEQ ID NO: 38153 - DNA, 92 bp, Glycine max
  Clone ID: LIB3138-038-Q1-N1-B11
aaaaaaaaaaataaaaaaaaaaaaaacaaaaaacaaaaaaaaaaaaaaaaaaaaaaaaaaaaaaaaaaacaaaaaaaaaaaaaaaaaaaaaa

SEQ ID NO: 38154 - DNA, 214 bp, Glycine max
  Clone ID: LIB3138-038-Q1-N1-B8
tgggaaaaaataaaaatcaaagagcataatgtctgggatcattcacaagattggggagacccttcatgtgggagggcacaagaaggaggaggagcataagggtgagcaccatgctggagaatacaaaggggagcaccatggtgaacacagtagtgagtacaaaggagagcatcatggtgaacacaaaactggagagtaccatggtgagcacaag

SEQ ID NO: 38155 - DNA, 353 bp, Glycine max
  Clone ID: LIB3138-038-Q1-N1-D3
ggctacactaacacaatccccttccctcttctttttctatccaaattctccaccagccatggcagtttcttcagcaacagcttcctccaaactcatactattcccccatgcatcatcatcctcttcccttaattccacacccttccgctccttcaccaccaacacccacaaactaacccctctcttcttctcctttctccaccccaccaccgttcttcgccgcaccccttctttcaccaccaccccgcgtcgcaccttcaccgtccgcgccgcccgcggcaaattcgagcgcaagaagccccacgtgaacatcggcaccatcggccacgtcgaccacggcaagaccaccctta

SEQ ID NO: 38156 - DNA, 410 bp, Glycine max
  Clone ID: LIB3138-038-Q1-N1-D7
cggttcagaaccctttttcggggaaccaatttccaatctcccccttccaaataagaatgaatgcataaagtttggtggcatctgatcctttttcgatcccaaataacagaagagaatgagagtatcactggtaggtttgattatttaacagaaaaacggttggaaaatgggaggttgctgttgttctgccaggaaacctcacctgcatggaacgccagtgtattactattgcccaccaactttagaagagcatgagtctttaacgtctaatgatggtacggctacgtcactcactactggattgctggtaggcttgaacctggaaacttccacacctgatacataccatccccctcctgcacctctaccttatgatatggtcctgggaggtccagcatcaacagattctg

SEQ ID NO: 38157 - DNA, 304 bp, Glycine max
  unsure at all n locations
  Clone ID: LIB3138-038-Q1-N1-F2
ttcaagaaaaaataactaagcttagtgtattatttaaagaatgcaataaggtgagactaaaaagaaaaagaaaaaaaacanannanaaaaaaaaaaaaaaaaaaaaaaaaaaaaaaaaaaaaaaataaaaaaaaaaaaaaaaaaaaaaaaaaaaaaaaaaaaaaaaaaaaaaaaaaaaaaaaaaaaaaaaaaaaaaaaaaaaaaataaaaaaaaaaaaaaaaaaaaaaggggggccccccaattaagagattttccaacccgaaaaaaaattcggaacgggatcttggggggaaacaaattttt

SEQ ID NO: 38158 - DNA, 402 bp, Glycine max
  Clone ID: LIB3138-038-Q1-N1-G2
ggtttcctaactttttttacctaaaacccgcctggatgtccacttccggggtttttccttcattccaatactcgactactaattataacaaatcttctgctcaggaggcccgtgatgaccaattctttgataaagaaaattgcaatgtacatcaacccaaaacttcacagagactgccatttcaacctaaaattatgaacaccagcgctctgtcagagagaatggaagagctttcatatcaatccactatcgattgttctgttgattttgaccaaatctcacgatttagtgaagatttcgcccttccatcaaacttccttgaaccaactggcttgaaagtgtgtcttcatacgaacacaaccacaagaagatgcacctattgcaaagactgtggaatcttta

SEQ ID NO: 38159 - DNA, 124 bp, Glycine max
  Clone ID: LIB3138-038-Q1-N1-H1
aaaaaaaaaataaaacaaactagaaaaaaaaagaataaggtgagaggaggaaaggaaccaccaccaccaacaaagcaaatggctgctaccatagacaaaagacaccaaaaaaaccaaataaggg

SEQ ID NO: 38160 - DNA, 396 bp, Glycine max
  Clone ID: LIB3138-038-Q1-N1-H5
gcctctgaaattaatggtaaatatgcccatgaggaaactgtaccacctgcttcttttgctggcaagtatataattgtgaagaatatgaaggaggctgaatatgtttgcgactacattcttggtggtgaattgaatggatccagttcaaccaaggaagcctttttagagaaatttaaatttgcagtttctgagggctttgatccagacagagacctgataaaagctggcattgcaaatcagacaacaatgctcaagggagagacagaagacattgggaaactattggagaggactatgatgcacaaatatggtgtggagaacatcaatgagcacttcatgagcttcaatacaatttgtgatgctactcaggagagacaagatgctatgtataaattg

SEQ ID NO: 38161 - DNA, 344 bp, Glycine max
  Clone ID: LIB3138-039-Q1-N1-A5
ttacaggatcaacaagtccatggtgccttgtatgtgctgcggattctttctagaaaaaatgagttcaagtcagacgaggaaagggtaccagtttatcgcgttgttgatgagacatttcctcacctgctcaatatatttaacaggcttgtccagattgttaatccatcacttgaagtagctgatttaatcaagcttatctgtaaaatattctggtcctccatatatgtgcgctttctctcctcatatgtattgcttaaatcaagtgaattattttatgcattatgctgttgatcaaaccttgttcaagatgcatgttacatttatcaatattcattctgtttact

SEQ ID NO: 38162 - DNA, 256 bp, Glycine max
  Clone ID: LIB3138-039-Q1-N1-A8
cagtatgtagcacattcagatgatgggagctgctgttcaggtttctattgaacttgtcatctacatacatattttgagtcatagatccatgctttaatagcatgtcattggtttgaaaatcaaaaaaaaaaaaaaaaaaaaaaaaaaaaaaaaaaaaaaaaaaaaaaaaaaaaaaaaaaaacaaaaaaaaaaaaaaaacaaaaaagcaaaaaaaaaaaaaaaaaaaaaaaaaaaaaaaaaaaaaggggggggcccc

SEQ ID NO: 38163 - DNA, 89 bp, Glycine max
  Clone ID: LIB3138-039-Q1-N1-C5
tgaccctcttgttgagtatgctctgcctatttgaaaatttccacacctcttttaattgtcgtaatgatgtgtgaagtgtgtgttatttt

SEQ ID NO: 38164 - DNA, 102 bp, Glycine max
  Clone ID: LIB3138-039-Q1-N1-E9
ctcgagccgaatcggctcgtgaaaaaacataacatgaaaacacaaaaaagctaaaaacaaaaacaaaaaaaaaaactagggcggtcgctgattactgcctta

SEQ ID NO: 38165 - DNA, 249 bp, Glycine max
  Clone ID: LIB3138-039-Q1-N1-F1
ggaaaaattgatgcgtgaaaggacgcacctgctgttggcttgttgttcaaggatggcaatttgtaagaaagatgtttggagagttgaatgtggaatcccttctggatttccgctcacagttatttgcaatagcatttttaatggatgctcattagatatagctatgaaaaattactgcgccaggctaaagctccaagtatgttttcatagctatatctaatgagcatctcatctagttctagatcgcga

SEQ ID NO: 38166 - DNA, 279 bp, Glycine max
  unsure at all n locations
  Clone ID: LIB3138-039-Q1-N1-G2
ggggaagcaanagaaaatcccagaagtgatactaaactcagggaaaaagatgccagtgataggcctaggaaccgcatcaattcctcttccatcacatgaagctctcacctccatccttattgatgcctttgaggttggctacagacactttgatactgcttctctgtatgaaagtgaggagtctctaggcaaagctgtggcaaaggccttagagctaggcctcataaatagcagagaggaattattcatcacatcaaaactatggtccactgatgctca

SEQ ID NO: 38167 - DNA, 345 bp, Glycine max
  Clone ID: LIB3138-039-Q1-N1-H7
ggaaaaaaaaaaaaaaaaaaaaaaaaaaaaaaaaaaaaaaaaaaaaaaaaaaaaaaaaaaaaaaaaaaaaaaaaaaaaaaaaaaaaaaaaaaaaaaaaaaaaaaaaaaaaaaaaaaaaaaaaaaaaaaaaaaaaaaaaaaaaaaaaaaaaaaaaaaaaaaaaaaagaaaaaaaaaaaggaaaaaaaaagaaaagaagaaaaaaattataataaaaataaaaaaaaaagggggggtgcgaatccaaaagcttaaagcctaaagaatttaaatgcataaaaagcgggcaaacataaatgaattttcttattgggaattatttaatttccaatccgggatcctaaaaa

SEQ ID NO: 38168 - DNA, 76 bp, Glycine max
  unsure at all n locations
  Clone ID: LIB3138-040-Q1-N1-A3
aaaaaaaaaaaatttattatagaaggcttgaaaaaaatttatttaaggttttttattattcagggagaaaattntg

SEQ ID NO: 38169 - DNA, 286 bp, Glycine max
  Clone ID: LIB3138-040-Q1-N1-A4
gggttcccaggacctattgtgttttaaatccacaaaatccttttgtgttaaataggtggatgggaaaattgactttcccccagggcactttccgaagtgttaagagaatgcctctttctatagggggaggagctggtgcaaagaatgctattctcatgaatatgccaaatgctgttctttcaatgtggagatattttgttggagatctcgtctttgaagtttctaagatgacttctccctacattaaatgtacagtctctttcttcatagcatttggaaatttggc

SEQ ID NO: 38170 - DNA, 363 bp, Glycine max
  unsure at all n locations
  Clone ID: LIB3138-040-Q1-N1-A5
ctgctctctgggcctttgttgagtcaatacctacaactcctgcatcagctgctgaaagtgctttggtgaaccgagcattgaatcgaatgtctagcttcagcaggttgaagatcaagcacacaaacattgctgcagcaggtaaagacactgcaactatgaagagagcaggcagaaagggacttccattccttttcttccctattattattgctttatgtgctttttgttgggtttttgttggaaacttaagactattggggagatgtgtctctccttgaatatatatatatatatatatatatatatntgaaaaaaaaaacaaacaaaaaaaaaaagaaaaagaaaaaagaaaaaaaanacaaa

SEQ ID NO: 38171 - DNA, 364 bp, Glycine max
  unsure at all n locations
  Clone ID: LIB3138-040-Q1-N1-C3
ggagaggccaaggagaaaaaaggttttttaaaaaagataaaagagaagcttcctggttatcactccaagacagaggaggaaaaggaaaaggaaaaggagagtggtgctcattgatatttaagattgagacaaggcttttttgttggttggagatgcatgattgtggtgtgctttgttttcatttcatcatatgacagccttgtgggtttctttggtgtttcttgatgcatacttaatttactttattattgngtatttatctcttccatttacaaaaaaaaaagtttgtgtaggtttccttctttgaagtaaaaagaaattaaatatgtactgaaaatggaataatagtgtgtttaattgtgtt

SEQ ID NO: 38172 - DNA, 72 bp, Glycine max
  Clone ID: LIB3138-040-Q1-N1-C4
ttgggggctttgaaaaattactgggccgggctaaagctccaagtaggtttttaaaatccttcaaaaatttgg

SEQ ID NO: 38173 - DNA, 329 bp, Glycine max
  Clone ID: LIB3138-040-Q1-N1-F4
ggggccagaatacagcttccagcccataatctcaatcttccattccagatgcttaagaccgttttgcattcgttgcccgctcgtcccggtgcatgggtgcgtaagtgcgctgtataacttggctcactcggggcgcgagttgtccctagactacaagtccaactaatctcaaagataactattggcagctcaattagtatcttttaaggctacatacttgagctaggcaatcacatttccttggataatgttgggaggcaacaatggaaatcgcttgcttcctgttttcttggacgaaactcaatttcggcatcaaactaatgtgtcaa

SEQ ID NO: 38174 - DNA, 347 bp, Glycine max
  Clone ID: LIB3138-040-Q1-N1-F5
tggagggagaagctctcttctcgttattgaatgggctgcaaaaagcttgatgtggcctaccatagcacacgattgaagagcttccatatcgatgccagaggagatgaaatgctcctgattcaaatgataatattgatttactgttgagcattgatttgttgggtttacaaggagcaggtaaagcttttccaaacaaaattgtttttgatgataagcttgtgttggctaacacacaaaaattctttgatggaaattttccagtggattcttggttaccaaatttttgggaattgtctttatcctgtaagtcaattaccttcagaagctgtcgttgtaaatagtacatg

SEQ ID NO: 38175 - DNA, 146 bp, Glycine max
  Clone ID: LIB3138-040-Q1-N1-H1
tcggttgggggggaaccaaattcaaccgggacctaaaaaggggctaataactgttccgggaaaaggaaatatccccacctacgtggttggtgtcaatgagtatgactacagccctgatgaacccatcatcagcaatgcctcttgca

SEQ ID NO: 38176 - DNA, 232 bp, Glycine max
  Clone ID: LIB3138-040-Q1-N1-H11
cgccaattgagaaggaaagctctctctcgtattgaatggctgcaaaaagctgatgtgcctaccatagcacagattgaagagttccattcgatgcagaggatgatgaatgctcctgattcaaatgataatattgatttactgttgagcattgatttgttgggtttacaaggagcaggtaaagcttttccaaacaaaattgtttttgatgataagcttgtgttggctaacacac

SEQ ID NO: 38177 - DNA, 218 bp, Glycine max
  unsure at all n locations
  Clone ID: LIB3138-040-Q1-N1-H12
tcgggtctaggaaaatgcggaatgctttgcatgatctggaattggtgttttcttacgctagttcgtttgttaaattcaatcaaggaagtagcgcatgaccctgatgttgagtatgctctgcctatttgaaaatttccacacctctattaattgtcgtaatgatgtgtgaagtgtgtgttattttaaaaaaaannnnnnnnaaaaatnntnnnnnnaat

SEQ ID NO: 38178 - DNA, 249 bp, Glycine max
  Clone ID: LIB3138-041-Q1-N1-A5
ctagagtgatacgaatgcatctgcagacactacgaacgctcctctggctctccaaaatggtaactcccaggtaaaagacatcccaatcgggatcgggagggatattcaccgcgaagcagttcaacactccaagctctatctaacgaaattcacgggtggcaaacaggaagggcccaaaaccagggtgtgctaactgctgaagaaactgatagacggtacaaaaagcatcggcctggtgctgaaaatgat

SEQ ID NO: 38179 - DNA, 377 bp, Glycine max
  Clone ID: LIB3138-041-Q1-N1-A7
ctcagaaaacggtcttgtatgatctcttaccctcactatgagaatctcacggtactaatcgccgagatcttgctatcaattagccttttgaatgctattggacaaattaaatgttgtttaagagaacgatgtcaagcggcgcaccacactggcgttatgcatgcaaacagccaattgtgcttgatgggagagatcccgcttgcccttactgagattgacgagcagtgcaagagctagacgagtagcgaggaattgcacccaaccataaccataccctgtcgtggcagacgggacacactcatccaaagcctgacatttacaatgctgtacatgcttttatggggcagagagggtctgaccatagatatgagcttatg

SEQ ID NO: 38180 - DNA, 327 bp, Glycine max
  Clone ID: LIB3138-041-Q1-N1-B1
gtccagattagaatgcagtggtgcatgatatttcagcgtctacaataccaggtgattttgtcatcggtgtcaagttgacaaccataaacaatatgtgtgcatatgggctcaatcctggtatttcaggatctcgacttttgggcaccattcataatgccattatacaggcaactgttcggaatcaaatggcaacagagagaacaccattgaatactgatactagcgagcagagctttagctagtcttgtattgacctactgcgcggaggaatcttaatggacaaaactggagattggacacacttatacaaagatttacaattagtaa

SEQ ID NO: 38181 - DNA, 303 bp, Glycine max
  unsure at all n locations
  Clone ID: LIB3138-041-Q1-N1-C1
cgggtgctgcatagatctggtgcgtagaggctcatatctacggggccgcggtgtgtgattcatgttcgacttgcttgtggaatctgaaacggagaaagtcggaaggccatgcatatggcatggttctagaggtattttttggcaggtacatcataaaatcgatgacaggagcagcatatccgacagaagatccagaccgtatcagcttgatccatcgatactagacccctgtatctggatcattaatcatcgtgtgtaagagcaggctacacaatgttgcacgatctgngatgtctgtaaaat

SEQ ID NO: 38182 - DNA, 374 bp, Glycine max
  Clone ID: LIB3138-041-Q1-N1-C5
ctgcagccgaatcggctcgagcgggttctcgtctttggggcagcgtttctcagtccatttcacagcagactgtggggaatcaaatggcaacagtgagaacaccattgaattgggatgctagcaagcacagcttttggcagttttctattgaccttctcggcggaggaatcttaccggacaaagctggagattggatcacacttatacaaaattctccaattagtaacttgttgagagtcgctgcttgtaagaaaggctgcttaatggtcaagactgtgatgtctgcgaatgcagcagtcaaaaggagcgattgggcctcattggtacaagtgttgttaacaaacagcaacagtacagagcatttcgatgcatgt

SEQ ID NO: 38183 - DNA, 373 bp, Glycine max
  Clone ID: LIB3138-041-Q1-N1-E5
gggcagaattgattccagtggaaagagcagacatgagcagcgcataccattatctggccaagcttctcccaatcggagactcttacgccggaaaatccggcttgcttctcaaagtctgtgatgactcctacggcgacagctacataagtaccattggagctgattacacaatcagagccgtggagctggaaggagaaaccgccaagctgcagacatgggatgcagctggacaggagcgattcaagactatagcaagcagttactatacaggagcgcatggaattattagtgcctatgatgctactgagatggaaagctataacaatgtcaagcactggatgaatgagatggatagatatgcaaatgacactgt

SEQ ID NO: 38184 - DNA, 79 bp, Glycine max
  Clone ID: LIB3138-041-Q1-N1-E7
aaaaaataaaaaataaaaaaaaaaaaaaaaaaaaaaagaagaaagggaaaaaaaataaagaaaaaaaaaaaaaaaaaaa

SEQ ID NO: 38185 - DNA, 315 bp, Glycine max
  Clone ID: LIB3138-041-Q1-N1-G4
ctcgagccgttaaaaacatgaatgagaaacttatacaaaaaatgtttgagtatgtatcaacaacactaatcttttgatggcaatctatacaatatgtacttggataccaaatccatgcccatggcctttatcctactagacgcacttgccttccactctctgtcagggcgaatgccacaatggtgaccacgccctggctgttcaacaagcctgggtatgctggggcatcttgtacccattacctgctcatatatagaaggccgccttggctggcacttctgatgcagtgagagagaaggacaacttcttttctat

SEQ ID NO: 38186 - DNA, 345 bp, Glycine max
  Clone ID: LIB3138-041-Q1-N1-G5
tgaaaagctttctagctgtataacatcaccattactgatggtgttgacaaaactcgtgccactttgcaatttataaagttagcagattgtgattttctcaagagaaactttaagcagatgtctaatgctttgtgggtggctcctgaggacaaggcgagtttatggtcacaacttcattatgtttcgtgtaataatctggaaatgcaagaagcttatcttgtcaacctcgtaaatgtgttacgagaattgtgtttgcacagtccataggaagctcgccaattgagaaggaaagctctctctcgtattgaatggctgcaaaaagctgatgtgcctaccatagcacag

SEQ ID NO: 38187 - DNA, 311 bp, Glycine max
  Clone ID: LIB3138-042-Q1-N1-A4
gtccccagcagtgtttgtatatctggcacagatggttcaagatgggacactgtcatcatggatgaaagactcgcagtaaaacttgaagtcactatgagaatagcaaataaccaaggtgctagcacagctcgagccaagttgctcttcacaggttctcctacatataagaaaatattcaagagtttaattttgataaactgaaacaattagaattggttcttgatatggcttaattactacaaaagttaacaactttcaattatatgataattcataaaaaaaaaaaaaaaaaaaaaaattataattaatat

SEQ ID NO: 38188 - DNA, 359 bp, Glycine max
  Clone ID: LIB3138-042-Q1-N1-A8
gaggacaaataaagcaaaaggcctttttattccaaagcaagggagggagaaataaaccgaatgagagcattaacctcttcttcttccactttcattccaaagcgttattccttcttcttcttcctctccattctcttcgctcttcgatcctcgttccggggctgcttcgaataccaccaccaccacgcgcctattgccactataggaggcttacgcgactcccaaggctcttaaaacagcgttcaaaccgaggccctcgctcggttcgccgtcgattaacacaacaagaagcagaattcacttctggagttttctagggtggtgaggacacaagaacacgttgttgcgggaaccctgca

SEQ ID NO: 38189 - DNA, 251 bp, Glycine max
  Clone ID: LIB3138-042-Q1-N1-B8
caaaaacaaggacatcattacttgtttgaggctgggacttacggatttgttggaagaattggaagcggaagatgatgacagtgttagggtgacgctggttccgagatatgggaaagggcgtgttaaaatcagaggcatcaaaatagagcttctttcggattgaaaattatctatatgcttcaactacttatatatgtgtgtgtggtaatacatatatggttactagtttccaatcaaaataaatttttaaa

SEQ ID NO: 38190 - DNA, 186 bp, Glycine max
  Clone ID: LIB3138-042-Q1-N1-C3
gccagatcttctgaaaatgcggaatcctctgcatgatctggaatttgtgttttctttcgcttgttcgtttgtttaattcaataaaggaaattaggcatgaccctcttgttgagtatgctctgcctatttgaaaatttccacacctcttttaattgtcgtaatgatgtgtgaagtgtgtgttatttt

SEQ ID NO: 38191 - DNA, 325 bp, Glycine max
  Clone ID: LIB3138-042-Q1-N1-D1
tctctgtgtatttgtctacctctccctataagatgcagatcttcgtcaagaccctcaccggcatgaccatcacccttgaggtggaaagctcttacaccatcgacaacgtcaaggccatgatccaggacatggaatgaattcctccggaccagcaacgtctcattttcgccggaaagcaacttgaggaccgccgttcccttgctgactacaacatccagatggagagtactcttcaccatgtctctcgtcttcgcggtggcatgcatatctttgtttagacacttaccttgctgaccattatcctattggttgttagctcctactc

SEQ ID NO: 38192 - DNA, 250 bp, Glycine max
  Clone ID: LIB3138-042-Q1-N1-E2
tgaagaacctctttttattcgatctaaattgcaacactttctggggtgtcgtaacattaccattactcatggcattaacaaaactagttcaactttctattaataacgtaaacaaacttgttttttctcaagagaaactttaatcaaatttcttatgctatgtttgttgctcctcgagacatagctagtttattagtacaacctcacttatgttttgtgtaataaatctctatatgcactaagcttattt

SEQ ID NO: 38193 - DNA, 302 bp, Glycine max
  Clone ID: LIB3138-042-Q1-N1-F11
gggaaatgttggagtaaaccagaaaaatttaggtagagccggttctaattgttggctaggtaagcgccctgtagtaagaggagttttttttaacccctaatacaatccttatgggggtggtgaagggagggcttattttggcgctaaaacatgtgactgcttgtttttctttttttctcgggcctgaatatatcattttatttcttcctttagtactcatctcctcaatttttataataacatacacacatctttatatatatatatatatttatatatttgtctctttctatatatatttt

SEQ ID NO: 38194 - DNA, 287 bp, Glycine max
  Clone ID: LIB3138-042-Q1-N1-G1
tgctgataaccccacccatgtgcagcttccatgtatgtacaacaaggaagggaacccccgtgcacccatcatcgtcacccgtcaccatttcttaacactctatgcacctctcatcccagatgggcgtatggagaacttctacatgggcaccaacaaaggaagaccgcatcggtgcttgcaccgtaattttccgcactgatggtattcctgaacaggacattgtcaagcatgttgacaccttccctggccaatccattgatttctttggtgcactttgggccagagta

SEQ ID NO: 38195 - DNA, 391 bp, Glycine max
  Clone ID: LIB3138-042-Q1-N1-H11
ccaggtggagctcacactcacacacactcattcacaatcgttacgggaaacatgccctcgcttgcatctgtctcggttgtcttaattctgtgccacctatgctgcaagaaggagccagactttaacaaacatgaatacttataatgtccagacagtgacttctgctaaacgccagagcacatagctacaaggtctgtgacttgatgaagcccaaaggggcgtttcagaatccttcctagttgataacacgaatggctcctccattgctggaaggacacttgagatcaaagcaagaactgctgcggcctcacagacaattgatgtggaggttgacaggccacttggcctcaccttacgccaaaagtctggtggtggtgtcgtcatcactgct

SEQ ID NO: 38196 - DNA, 311 bp, Glycine max
  Clone ID: LIB3138-042-Q1-N1-H12
catacatttaatgttcagcctaaaagttaataacagctggagatttggctgctgatcccatcaaccaatgaagcttttccccacaagcctgaagccgaatggagagattcacgaaagagtcaagttggaaagttcacacgaggaatttattaagacttggtcaactcacgtgcgtaccgcaacaactatgttagctgatgagtggacctatttttatgcaaaggagcatgatagttcaccgaatacaataccatgtgattttgtcattggtgtcaaggtgacaacactaaacaatatgcgtgcatatgggc

SEQ ID NO: 38197 - DNA, 104 bp, Glycine max
  Clone ID: LIB3138-043-Q1-N1-A11
aaaaaaaaaaaaaaaaaaaaaaaaaaaaaaaaataaaaaaaaggtaaaaaaaaaaaaaaactgtagattataaaagaggaaaaaaataagtaaggagggctgga

SEQ ID NO: 38198 - DNA, 277 bp, Glycine max
  Clone ID: LIB3138-043-Q1-N1-A3
tcgagcttcaaagaccacgtatgcctctctctcttggctaattgggggccccctctcgcaaaaaataactcccggggggggtgcattttcgccgcaatggggcaataaaaaacaccgtacacactttgactggttacaaacaaaagcggcgtgtacggataccagctttttaaatttccacattggccctaattcctgtggataatggtttttaattattggataccatttctaatacattttacaggaaggttggttcaatcctaatgccaaaagc

SEQ ID NO: 38199 - DNA, 104 bp, Glycine max
  Clone ID: LIB3138-043-Q1-N1-A5
gcctttttctatagggggaggagctggtgcaaaaaatgctttctcattaatattcccaatgcctgtctttcaaaggggggatattttggtggggatctcgtctt

SEQ ID NO: 38200 - DNA, 259 bp, Glycine max
  Clone ID: LIB3138-043-Q1-N1-B5
ggttcctctcaggaatgtgttcccaggacctattgtgttttaaatccacaaaatccttttgtgttaaataggtggatgggaaaattgactttcccccagggcactttccgaagtgttaagagaatgcctctttctatagggggaggagctggtgcaaagaatgctattctcatgaatatgccaaatgctgttctttcaatgtggagatattttgttggagatctcgtctttgaagtttctaagatgacttctccctaca

SEQ ID NO: 38201 - DNA, 173 bp, Glycine max
  Clone ID: LIB3138-043-Q1-N1-C5
ggtttttatttttgctgcgattttgaagtcaaaactgcatgagtacaggttcgtcgtgtcttggttggttaatttatgggttttatctaccttttgttctgattcccttactttgaatagaaccctttacctacattttctttttgctttccaaaacgtctatgattatatat

SEQ ID NO: 38202 - DNA, 312 bp, Glycine max
  unsure at all n locations
  Clone ID: LIB3138-043-Q1-N1-D4
ctcgagccgctcgagccgattcggctcgagcgccttccagtaccagctccgtgaagcgcaagtctgacgattcatcctcgtccaacaccccctttaccgcgcccaaggtccgcagggttgccaacatcgacaccggccttgcttcgcgctatcatcacaataaccctcgcgcatctncaggcgcttcatcaacctcgactacctcaccctcgatgcccagcttgagtttccgccaaactgtcgagctttcgcagaagttccagaagtactacaagagatacgaagagctgtactggaagctgactgaagcgg

SEQ ID NO: 38203 - DNA, 301 bp, Glycine max
  Clone ID: LIB3138-043-Q1-N1-E7
ctcgagccgctccagcggctcaagctctagcccaatgcggggcgatgaatttccgagcgggaaactctatatgaatactgagtctaacacgaactggctttcgagtgtacttctatttaaccgataccggggttgcaaggactttgacatagctgtggattgtatcagactaattcaaaattagaaacattatatctgatcgagggtagctgcatcgctaacacgacgagaaatggtctagaatgaaaggtcttggaaaatagcttctaagaggagtgattgtggaatattagaacaggag

SEQ ID NO: 38204 - DNA, 66 bp, Glycine max
  Clone ID: LIB3138-043-Q1-N1-F4
ggaaaaaaaaaaaaaaaattaaaaaaaaaaaaaaaagaaaaaaaaaaaaggaaaaaaaactaaaca

SEQ ID NO: 38205 - DNA, 85 bp, Glycine max
  Clone ID: LIB3138-043-Q1-N1-F5
ggaaagaccaaattttttttttccaaaacaaacccaagatcaatgggtggcacatacaactaaagatcgtaacaaatttcttcac

SEQ ID NO: 38206 - DNA, 104 bp, Glycine max
  Clone ID: LIB3138-043-Q1-N1-F9
aaaacacaatagaaatacagttagatgatccaaggttatggaccgatgtaaatactttggttaaaaaatatttgcagtttgatttgtctcctaatgattagatt

SEQ ID NO: 38207 - DNA, 69 bp, Glycine max
  Clone ID: LIB3138-043-Q1-N1-G4
caagctgggaagcaaggaattatggtgacgtctcagagtcagaaccctatagagcaaatccaagcgcgc

SEQ ID NO: 38208 - DNA, 139 bp, Glycine max
  unsure at all n locations
  Clone ID: LIB3138-043-Q1-N1-H2
ggatcataacaacaggttcttcactacatttaccaacacttctctcttctncaaccagaaaccactatcaacatggctgaccagtacaagcccactgagcacggcggattgaagcaggacggcacccccgacaagcgcg

SEQ ID NO: 38209 - DNA, 392 bp, Glycine max
  Clone ID: LIB3138-043-Q1-N1-H3
ggggatccttctggaaataagctttttcaagatgttggcctatggatatcccaaaagattagggatcattttgctgcacagaagaccctgcccataactctcaaatacatagatccaacttatatgattcgagctattccaagcaatgcttctgacaacgtgtactgcacacttcttgctcaaagtgcagttcatggagcaatggcaggttacactggctatacaagtggacttgtcaatggaagacaaacttatatacccttctatagaatcaccgagagacaaaaccacgtagtgataactgatagaatgtgggctaggcttttatcttcaacaaatcaacccagctttttggattcccagggttgacaatgagagaagaaggaagaaga

SEQ ID NO: 38210 - DNA, 107 bp, Glycine max
  Clone ID: LIB3138-043-Q1-N1-H6
attgaagttgaagtcttgcccttctctcttcaactcccaacacaagacatcatcattcatgggtggctccgtctccaccgtcggagctgtcaacaaagctcttttta

SEQ ID NO: 38211 - DNA, 153 bp, Glycine max
  Clone ID: LIB3138-043-Q1-N1-H9
gtttactcacatttgattttgcaatgattgcttatatgaaacagtagaagatttcatatatgaaaaaacaaaaagctgatatttcaatgaggaagaaaaaaaagatggagaaatagacatatgaagtatataagatgacttctgcaatacatt

SEQ ID NO: 38212 - DNA, 375 bp, Glycine max
  Clone ID: LIB3138-044-Q1-N1-B2
cggttcggggtccagaattttatcctggaccggtttttccaaccaatcaattattttggtcccaccggccggcctttgaacttgccgatctggattggctagataataatacctttggggggataatccgtgtaaaagtgaggcattccaggttcttaaggggattcctgccagacctgaagttgggctaattaaattaagagagatcaattgcaggatcgataagaaattaactgtgcaggataggtttaagaatccagtttcgtcaaaggatgttgtgcggatcgttgatggcccctgcaaaggaaaacaaggtcctgtggagcacatatataggggaatcttgttcatctttgatcgccatcatcttgaaca

SEQ ID NO: 38213 - DNA, 112 bp, Glycine max
  Clone ID: LIB3138-044-Q1-N1-D3
aaaaaaaaaaaaaaaaaaaaaaaaaaaaaaaaaaaaaaaaaaaaaaaaaaaaaaaaaaaaaaaaaaaaaaaaaaaaaaaaaaaaaaaaaaaaaaaaaaaaaaaaaaaaaagg

SEQ ID NO: 38214 - DNA, 287 bp, Glycine max
  unsure at all n locations
  Clone ID: LIB3138-044-Q1-N1-E11
cttgaacccgaacgggtccggggccctaagggaatggttccaatattaacccggggcatccaaggggggtccggaagccccaaccgggcccgaaacaattttcggcgggggcctcaacaataaatggaccaaatcccttaaacatcctcttccaaattccaaatccatggttggtttttttttcaacccgctctcaacaatttttttctactacgcttggtggtatctncttccacacacgcccctaaactccctttcgagtcaacgatgttctccccgtctcccca

SEQ ID NO: 38215 - DNA, 397 bp, Glycine max
  Clone ID: LIB3138-044-Q1-N1-F9
gtctaaatcgcgagcgggcgccctttgacttttttctgacatgggagaatgtggaagctactggtacaaatggaaagaaccgaaaactaattcttaatgggcttacaggttatgcccagccagggagactttgggctataatgggtccttctggcagtggcaaatccacacttcttgatgctttagcaggaagatcgacatcaaacataaagcaaacagggaagattctaatcaatggccacaaacaagaactggcttatggaacatcacgctatgtaacacaagatgatgctatgctgtcatgtttaaccgctggggaaactttatactactcagctatgctccaatttccaaacaccatgtctgtagaagagaagaaggaacgagcagatatgac

SEQ ID NO: 38216 - DNA, 303 bp, Glycine max
  Clone ID: LIB3138-044-Q1-N1-G9
tggagctggttcgaggaggaagaggatatctggtattcttgattacagagatgggaagaagcttgtgaactgaatatatagacctataactcttctagcagggcacgatgactttggagaatctcttgctgaattgggacaggcttgcataaggacaaccgaatgtcaagagagttcattaggatgacaagtgctcggaccaggctgcttttggaacttctgaccattatgttgttaacaggggtactatcttacaggctagtattgaaggcactacagatttgacactgctatacttttcgt

SEQ ID NO: 38217 - DNA, 256 bp, Glycine max
  Clone ID: LIB3138-044-Q1-N1-H10
gcatcttatttgtagatataaaacaacttctctggggtatatttgattggtccaaaaacagccccaactatcccggatttatattctggatcggttgcacgtatatttaaaatataaaaatcgtagagaggaaaggctcgttacataaaaaaaatgtcgatttcccatactttattgcgtgtgagagccgaatgcatctgcagattcttatttgtttcgggtcgagggactctacaatgttaaatgtatggaaagt

SEQ ID NO: 38218 - DNA, 246 bp, Glycine max
  Clone ID: LIB3138-045-Q1-N1-A4
caagattttgaaattgctggtaatactcttatgccagctttttctgttccacaggctactgccagatcttctgaaaatgcggaatcctctgcatgatctggaatttgtgttttctttcgcttgttcgtttgtttaattcaataaaggaaattaggcatgaccctcttgttgagtatgctctgcctatttgaaaatttccacacctcttttaattgtcgtaatgatgtgtgaagtgtgtgttatttt

SEQ ID NO: 38219 - DNA, 315 bp, Glycine max
  Clone ID: LIB3138-045-Q1-N1-A8
tggcatttgagtttccttattgacaatcccaaacagtctacaggttttgatattctcttgggaatctctcaagattttgaaattgctggtaatactcttatgccagctttttctgttccacaggctactgccagatcttctgaaaatgcggaatcctctgcatgatctggaatttgtgttttctttcgcttgttcgtttgtttaattcaataaaggaaattatgcatgaccctcttgttgagtatgctctgcctatttgaaaatttccacacctcttttaattgtcgcaatgatgtgtgaagtgtgtgctatttt

SEQ ID NO: 38220 - DNA, 80 bp, Glycine max
  Clone ID: LIB3138-045-Q1-N1-B7
agaaaaaaaaattataaaaggatgaagagcaaaaaaataaattggcaaaaaatatgataaaaaaagaaaataaaaaataa

SEQ ID NO: 38221 - DNA, 386 bp, Glycine max
  Clone ID: LIB3138-045-Q1-N1-B8
gtcaattaccttcagaagctgtcgttgtaaatgtcacatgtggtagtggacgtggtagaccacccaccacagattggattaggtgtgcagctaacaatcgctcctcagatatcaataaaaggattcgcacagcacttgggaaaggtaagaaaattgtttttcttactagagttgatccttttccagtagctttactggctgttctttttggcgttaagaatgaaattctgagttctaacgccactaatcctatgctgacgcgacttcttgagaactgttagagtctcaaatatctggttgatgagtgtccttttgcatttgtgaactagtatgtagtattttattcacttaaataaagcgcattactatgtgcaatgagtgtgttt

SEQ ID NO: 38222 - DNA, 509 bp, Glycine max
  Clone ID: LIB3138-045-Q1-N1-C3
ggaaaccttttccaaacaaaattgtttttgatgataagcttgtgttggctaacacacaagaattctttgatggaaattttccagtggattcttggttaccaatttttgtgaattgtctttatcctgtaagtcaattaccttcagaagctgtcgttgtaaatgttacatgtggtagtggacgtggtggtttacccaccactgcttggattagttctgcagttaacaatcgctcctcagatatcaacaaaaggattcgcacagcacttgggaaaggtaagaaaattgtttttcttactagagttgatccttttccagtagctttactggctgttctttttggcgttaagaatgaaattctgagttctaacgccactaatcctatgctgacgcgacttcttgagaactgtaagagtctcaaatatctggttgatgagtgtccttttgcatttgtgaactagtatgtagtattttattcacttaaataaagcgcattactatgtgcaatgagt

SEQ ID NO: 38223 - DNA, 488 bp, Glycine max
  Clone ID: LIB3138-045-Q1-N1-D2
ctagttctagatcgcgagcggccgccctttttttttttttttttgaaaaagtgatagttgcacactgttttatttatttatttatacatgcaaaagtagtcaaaataattgacatacttgtctacatcaaaagttgacgaggaaaagtaaacctgcgtagctagctagctgtcccatgtacacttttatttaaaaattgaaacataaaaaaatcttgaaacgaagcagctaatagaatccattatttatatataacaataaactactatatacacatacaatgtattctagtttagtcccctaaaacacgagcaagttattctgggtgtcgtagcccaacttctccaaattcggctggactgcaaattgaatcataggtggtggtccacaagtcaatgccaaggtatcaggagatgcatttggaatatgctccgtcaggatactttcagtgatgaatcccacactgtattcccacccttctcttatgc

SEQ ID NO: 38224 - DNA, 131 bp, Glycine max
  Clone ID: LIB3138-045-Q1-N1-E2
gccaggatttaatattaccttcgtgccttggattttttttttacttaattcaaatcgttggagaaagttggttatttaagttaataacattaaatgttaacaatttgtattattttttcaaaattatttgt

SEQ ID NO: 38225 - DNA, 465 bp, Glycine max
  Clone ID: LIB3138-045-Q1-N1-F2
ggaaaaccttcaaatatgatataattggtgctggttcacattcttaagaagattttcctgaaaaggaagatcaagaaaaacccaaaaagattgatgccagattgagacaaagaatagatcctcaatacaatgaggttcaggctcagatggaaacaaatttgtttaaattgtctcttgatgatgttgaaactcctaaaggttccatgttggatctgaaaatttctcaatctaaaattgcacttcccaagaacacagttggaggaaccattctgcgtagtgatctattggcaaattttttgacagagggcaattttagagcaagtgttgatttgcagcgcactcatcgtattagaggaatgattaaaatggtggccacagttggtattcctgagaatacaggtatatcattggcctgtgctatgaatagttcttttagggggcgcgccagttctgatatttacacca

SEQ ID NO: 38226 - DNA, 551 bp, Glycine max
  Clone ID: LIB3138-045-Q1-N1-F6
cccgaagtcacatctgtttgaaataagcttcttttccatacagttgaatttttagaattatggctcagttattgtcaccagtatgcatggaggctctgaaaatccacaatccatcattgaatctttgttcaagaagctcatggcggatgctggtgaagggtgcaagtccttgcacctttctgacacacagtggtagtaagcgaagagggtttggcaaagtaagagttactgctgaagactcagtttctccctctgagaccattgcagatgactattatgaagttcttggactgcttccagatgcgacaccagagcagatcaagaaggcatactacaattgcatgaaatcttgccacccggatttgagtggaaatgatcctgagaccacaaatttctgcatgttcatcaatgaagtctacacggtgctcagcgatcccgtccaacgcatgatttatgatgaaattcatggctactctttgacttcaatcaatccctttcttgggatgatcaagcccaagggatcatgccttttgtgatgaattcagctgcat

SEQ ID NO: 38227 - DNA, 407 bp, Glycine max
  Clone ID: LIB3138-045-Q1-N1-G4
gaacggtgggggcccttctttccatttccccagccaaaacctctctcaagaaggccacattaggcccttctgtcttcgcaaccgttagcactccttcttcttcttcttcttcttcttcttcttccttcccttctctcattcaagacaggcctgtctttgctgcccctgcccccatcatcaccccaactgtgagagaggatatggcaaaggaatacgagcaagctattgaagaactccagaaattgttgagggagaagagtgaactcaaagccacagctgctgagaaagtggagcacataacagcttctctgggaacatcatcatctgatggcatcccatcatcagaagcctcagacaggatcaaagctggtttcattcacttcaagaaggagaaatatgacaagaat

SEQ ID NO: 38228 - DNA, 236 bp, Glycine max
  Clone ID: LIB3138-045-Q1-N1-H12
gaagcattggtggctagctaagcgaagctaaaaccaaactcttcagcagtttgttttggtttagcttcttcttctgcttttgctttctccaccaccacaaccaccatgtattctgccactgcctccaacactttcttccttctctctggtttccttctcttctgtctcctctcagctccttcctgtgtttccatgttctctggtattgagacaggagatttagaaaaaagagatga

SEQ ID NO: 38229 - DNA, 383 bp, Glycine max
  unsure at all n locations
  Clone ID: LIB3138-045-Q1-N1-H2
tcgggaggacctaactcttaccataaaataattaaacgccaatgtttcaagtacagttcacaaacagtttcagataggggcaggatttacagtgcagtgcagagggtaatgtaggggtcagacaattgcaaaagacatagtaataaacatgacatgaacacactatttattggactacaatttcagaacacttcataaatcagacatcatcacaactatttttgaggcttcttccacaagactccaatcttcttcagcatgttgccatttttcttcctctggaaatcatcatccatgtcttcagcataggcttgcactatatatgttgtgagttctgtgcttgatggaaaataaacatatcatgccgtaaataaatcnnncna

SEQ ID NO: 38230 - DNA, 387 bp, Glycine max
  Clone ID: LIB3138-046-Q1-N1-A2
aggttcggattcagatggcaacagcgagaacaccattgaatttggattctagcaagcactgctttggatagtcttctattgaccttctcggtggaggaatcttagtggacaaaactggagattggatcacacttatacaaaattctccaattagtaacttgttgagagttgctgcttggaagaaaggctgtttaatggtcaagattgtgatgtctgggaatgcagcagtcaaaaggagtgattgggcctcattggtacaagtgtttttaacaaacagcaacagtacagagcattttgatgcatgtaagtggacaaaatcagaaccacattcctgggaattgatcttcccaatagaagtatgtggtcctaataatggttttgaaatgt

SEQ ID NO: 38231 - DNA, 388 bp, Glycine max
  Clone ID: LIB3138-046-Q1-N1-A3
tttttcggctttactcttttcttcaccgaagcgaaaaagaaaaggcttgacttgagagaaatagagcttcgaatcgaaactcagaattagaaaaaaacacaaatcacaatcacaatggcaaggtacgaccgagcaatcaccgttttctcccccgacggccacctcttccaggtcgagtatgccctcgaagccgtccgcaagggcaacgccgccgtcggcgtccgcggcaccgacaacgtcgtcctcggcgtcgagaagaaatccaccgccaagctccaagactccaggtcggtgaggaagattgtgaatctggacaaccacattgcgctggcatgcgcggggctgaaagccgacgcacgtgtgctcataaacagggcacgtgtggagt

SEQ ID NO: 38232 - DNA, 195 bp, Glycine max
  Clone ID: LIB3138-046-Q1-N1-A7
gtttggattcagatggcaacatcgagaacacctttgcattggcatgctgccaggcactgaagaggatgtcccctgatgggatacaatggctctggttggtcttgaccacataactgcacagaaggccacactgacacatgagatgtgagtgcgtgcccacgctatcctacctatgaagcagactgtctcacctgc

SEQ ID NO: 38233 - DNA, 400 bp, Glycine max
  unsure at all n locations
  Clone ID: LIB3138-046-Q1-N1-A8
ggaagacgaagtttgtttgtaccagtctttgctgtttgaggtccccttccaagagggagtttctaaccctgccgaagcagacgtcactcttgcacattttgtgaaacccaaaacttcaaccagcaacttcctgcagtcagttgccccttaagtccgtgggaccgtggcaccttaaaccaggttcttccagtgctgctttttcttgctcatcttttgtttatttttctgtatatactagtagtattcaaatgcttgagagtcatgatctttcttctgatacaacccatcgtaagttcattactaacaaaaattaaggtttttgtctacccttcctcgcttctttgaagatgtggtcatcaatcatcattgtgtaatcatgtngtataatttattttattgg

SEQ ID NO: 38234 - DNA, 220 bp, Glycine max
  unsure at all n locations
  Clone ID: LIB3138-046-Q1-N1-C1
ctcagaaccttctgaggttaaagcaaaaaacaaagagagagagagagagaaaatgatgaanccatcgatgctcatatctctacactccgccgacacccgcggagcctcttatctattccgccgtgggtacgcctccgagccggtgccggagcgcaaggtagccgttctcggcgccgtcggcgggatcgggcagcctctctcccttctcatgaagctcaat

SEQ ID NO: 38235 - DNA, 410 bp, Glycine max
  Clone ID: LIB3138-046-Q1-N1-C8
gagctggtcgagacacaacctggtcaaaataccgaccccagtgccgcacaattttgcttgactctcagcggaggatgactttggatctaatacctgctatccctatgtataagcatggacttatagcatactattgcttgattaaccaagttctttcatattggatgaggaagcctcgagtcaatatttagtttttgctgccatctgtgggtttctgatggatgatgccgggcatcgtgaaaatggaaggcacaaaccagcaaaacaatataaatgtgctcacggacagaggttgatgcaacatcagcctttcatgaagcagattatggcaattatggctgaaagagatgtagccattcaagaaagaaatctggccatttccgagaaaaaagcagcatatgctgagcgcg

SEQ ID NO: 38236 - DNA, 143 bp, Glycine max
  Clone ID: LIB3138-046-Q1-N1-E1
gagcccaattctgccccttccacccacccagcatatctctttattcctattgattagcacccctcacattaccttgtgtcaccaactactttgcctcctttaccataccattccaataattatcaaacctaaccagtaaaaat

SEQ ID NO: 38237 - DNA, 277 bp, Glycine max
  Clone ID: LIB3138-046-Q1-N1-E10
ggatatcactcgtgatcacattgtcactgattgggaccaaccacgcactatcccccgcgccttgccaagattatgaagaacaggttcatgaaacatatatagaagtgtttcatgaacctgttcttctcatcctttcttttcctttttggacaactcatttaaacttgtatttggataactctatgcttaatttctaagcattaatatgatgatacttctgtggctactctgctgctgcattcactcattgtatattattaattttgagtcctttatc

SEQ ID NO: 38238 - DNA, 200 bp, Glycine max
  Clone ID: LIB3138-046-Q1-N1-E11
ggtaaaaggcgtggtgtcatagattcacaaataaaggtgaccctgatttcaagatatgttggttttacttttcattgatattcatttcacattttcaagatttagaaaatgggattattttctatttttcaaaaataaaaacgttgaaaatgtgtttgatttaatcgcagcctggaacagtgaccagctttctatctatg

SEQ ID NO: 38239 - DNA, 377 bp, Glycine max
  Clone ID: LIB3138-046-Q1-N1-E7
gagccgaatcgtgctccagtccaccagacgggcaaatcaaacttcatggcatttgagtttccttattgacaatcccaaacagtctacagtttttgatattctcttgggaatctcttacgattttgaaattgctggtaatactcttatgccagctttttctgttccacaggctactgccagatcttctgaaaatgcggaatcctctgcatgatctggaatttgtgttttctttcgcttgttcgtttgtttaattcaataaaggaaattaggcattacccacatggagcgcatgctctgactatatgaaaatttccacacctcttttaattgtcgtaatgatgtgtgaagtgtgtgttatctttactaaaaattttttt

SEQ ID NO: 38240 - DNA, 361 bp, Glycine max
  unsure at all n locations
  Clone ID: LIB3138-046-Q1-N1-G9
gcgagggtcgagacatgatgttgctgacacgggcctaccaacagtctagaaatcaccactgtctgctcttcggcagatgccagcaacgctcttcagcggtggtgtcgttgtcgtttcccacgacttccgtctcctcgacaagattgccaaggacatcatggtctgcgagcacaagactgtccgcaggtgggacggttctatcggcgagtacaagaaccacctccgcaagaagatgtcgtcgaccggtgtcctttcttaagcgttgtttgattgtttcttgcaaattgcatgcgttttccgagctgcggaacgcgggttcgaagcaaaagtggccttagagcanggttcatgatacccctgc

SEQ ID NO: 38241 - DNA, 292 bp, Glycine max
  unsure at all n locations
  Clone ID: LIB3138-046-Q1-N1-H12
gctcaggatcgagtgtccggagccgtcaaactgtgacgagtcanaaaatggatggatgactgactgtagtcaacagaagtctcaggacattcgtcatcagaagttatcaactgctgccaactttgtgaaaagattgcatgatcttgcagttcagaagaggggttatgttgacttgcaagagatggtcagggaggacagtatcacatgctcatatggatccactcttncacaagatcctacttgtacattaccatgtagtttgacagaaacagatccttatactttcctgata

SEQ ID NO: 38242 - DNA, 256 bp, Glycine max
  unsure at all n locations
  Clone ID: LIB3138-046-Q1-N1-H5
gaggtntgttatagtaaatgtattattgttgcacaaattgaccagattcgtggagcgagccttgttcataaaaagggacctgaaagtgtcggatgtgcaaatcgagatcctgctcggaatcatcaacctctactctctgataggctcatgcctcgccggcggggcctccgactggataggtctgcgttacacgattgttttcgccggcgccatcttttttgtcggagcacttctcatgggggggttccccaactat

SEQ ID NO: 38243 - DNA, 209 bp, Glycine max
  Clone ID: LIB3138-047-Q1-N1-A9
gcattaaaggattttgaaaggtatcgaggtgaaagtattctagttcaagaacaacaaagatagcatgtatgatattgtattttagatatctcttaattaagaataaaccacctgatactaggtgatgcatatatgataatgaataaatgtgacaaatttacctgaatttatctaatctatatagtgtggtagcatttacattaacaagt

SEQ ID NO: 38244 - DNA, 52 bp, Glycine max
  Clone ID: LIB3138-047-Q1-N1-B7
aaaaaaaaaaaaaaaaaaaaaaaaaaaaaaaaaaaaaaaaaaaaaaaaaaaa

SEQ ID NO: 38245 - DNA, 260 bp, Glycine max
  Clone ID: LIB3138-047-Q1-N1-C7
actagttctagatcgcgcggccccctcttgattttttagtgtgtataatatttggtgattttgtaattggtgttttgatgagaacgataaacattgtgtgtgcatatggacaaataataataaaaaagggtgttttctttagaaaactatacctcaaggcaaaaatggaaaaatttttgaaattttttgagggcaaggggaaaaaaataaaatttggattcttgccagtttagctctaaaaagctattttttgaaaataa

SEQ ID NO: 38246 - DNA, 85 bp, Glycine max
  Clone ID: LIB3138-047-Q1-N1-E6
ctcgagccgctcgagccgctcgagccgctcgagccgattcggctcgagtgaattcactggatttggattaatatagcttcattac

SEQ ID NO: 38247 - DNA, 283 bp, Glycine max
  Clone ID: LIB3138-047-Q1-N1-H10
ggtttggatttgaagaaaaaaaacaacttcgctgacatatatttgtttggtcagaggagttctccgaatattcctgacttatattgctcattgttttcaagcctttcaaaatagaaatagcgaagagaggataggctcattacataaaaaattggtatattgaccatacttgattgagtgtgggagcccaatgaatcgaaagattcctgtttggttcgggtcgagaaaccagacattttgaaatggatggaaagagagggtactttcattgagtgatctatta

SEQ ID NO: 38248 - DNA, 350 bp, Glycine max
  Clone ID: LIB3138-047-Q1-N1-H3
gggtggaaattattatgcaaaaagtccaaagggaaacctgtgtagtgttttgaaaggtggaatagatctctgattactgaaatcttgcccgagaggaacaattatctggggcaaaaattgccatccaaaaacattaccggctagagcggtaaaaaagccctctctaaagcgccaatacagtgtggtcacacccttgaaagaaattaaactggggccaggcacattatttttaaaatactcctgaaagagactatcatgtgtgaaccttcacgactggagccttattggggcaacaaataaaccctccatacagcttggtttgtgctctcatggatacaaaactgtttaaa

SEQ ID NO: 38249 - DNA, 231 bp, Glycine max
  Clone ID: LIB3138-047-Q1-N1-H6
gctgatcctgtcaacctagtagaagtgttacctgaattgtatctgcgcagttcacacgaagctcgccgactgagaacgagagctctctctcgtattgaatggctgccaagagctgatgtgccgaccatatcacagattgaagagctccattcgatgcagatgactgtgcatgctcctgattcacacgatgatattgagtgactgcttagcattgagttgttgcgtttacaa

SEQ ID NO: 38250 - DNA, 413 bp, Glycine max
  Clone ID: LIB3138-048-G11-F2A
ctcgtattttggccaccattcctcagtccatttcacagcaaactgtttggaatcaaatggcaacagtgagaacaccatcgaattttgattctagcaagcagagctttagtcagcactgtatagaccttatcggcggaggaatcttaatggacaaaactggagatgggatcacacttatacaaaattctccaattagtaacttgttgagagttgctgcttggaagaaaggctgtttaatggccaagattgcgatgtctggtaatgcaacagccaaatggagtgattgcgcctcattggtacaagtgtttttaacaaacagcaacagtacagagcattttgatgcatgtaagtggacaaaatcagaaccacattcctgggaattgatcttgccaatagaggtatgtgcgcctaat

SEQ ID NO: 38251 - DNA, 411 bp, Glycine max
  Clone ID: LIB3138-048-G11-R2A
acatgacagggagcttattcctaaaaatacacacatttgacacatacttacgccaattaaaagaggtgcgtaaattttcaaatgggctaaacatactcaataagagggtcttgcctaatttcctttattggatataaacaaacgaacacgcgcaagaaaacacatgttccactatcatgcagaggattccgaatttttagaatatctgatctttatccgaggaacataaaaagctggtataagaatatgtaccagcattataaaaagcttgagagattgccagaagaatatcaaaaactgctgactgtttggtaatgtctataaagaaactcatatgccatgaagtttgatttgcccactcctaacttcacattgtaaaacctttattagggccacatacctttatttgga

SEQ ID NO: 38252 - DNA, 311 bp, Glycine max
  Clone ID: LIB3138-048-Q1-N1-A10
cagtgttagattgtgtccatgtccaacccagacccctcgtcacacaaggccacaactttactattgaggtgaaaaagaaaaggataaaagaaaagaaaaaaaaaagaagagaaaatccaaattgggaacttactactggtctggggtcagtcaaactaacaaacggacgaaatctttaactagatattctgggctctgactaaaattttaggatcttatataactctgattttattgcttttctgcggttgtggtatatttatgacagcacctattcgtttcttgatttgggatgtattgctatcacatat

SEQ ID NO: 38253 - DNA, 417 bp, Glycine max
  Clone ID: LIB3138-048-Q1-N1-A5
gcgcgtgttctgcgtctccaatccaatctctcacctctccgcaggtgctttcttgagggccccgcccttcttcttcaactctccggcgcttcgcatccacaccggcggccgggaacggcggggctcggcggtggcgactcgtgcgggtcccagcactagcagcatcctctttgccattgcgctcccgtcctctcttctcggcgttaccattttagctgcacttcgaatgggcgataagctcgaccgaaactggcttgaagagatggcaagaaatgaagctttaatggaacttgaaacatatgatgacgatgacaatgatgataacgatgatgtcagccgcgaagaggatagtatggaaactaatgtgcaagaaaagcctgcccttacacaagctcgcaatagacccaaaagggaagc

SEQ ID NO: 38254 - DNA, 420 bp, Glycine max
  unsure at all n locations
  Clone ID: LIB3138-048-Q1-N1-B1
gagacaaaatcagaaccacattcctgggaattgatcttcccaatagaggtatgtggtcctaataatggttttgaaatgtggagttctgagtgggcaaatcaaacttcatggcatttgagtttccttattgacaatcccaaacagtctacagtttttgatattctcttgggaatctctcaagattttgaaattgctggttatactcttatgccagctttttctgttccacaggctactgccagatcttctgaaaatgcggaatcctctgcatgatctggaatttgagttttctttcgcttgttcgtttgtttaattcaataaaggaaattaggcatgaccctctttgtgagtatgctctgcctatatgaaaaattcacacctcttttaatgtcgtantgatgtgtgaagtgtgtgtatttt

SEQ ID NO: 38255 - DNA, 388 bp, Glycine max
  Clone ID: LIB3138-048-Q1-N1-B5
agcgaagctaaaaccaaacatcaaagcatggctgagtagctcagcttgttcgtctgggtgtgcgccatccaccacctcgaccgcatataattcaccgcatacgcgctccaacttcctatatggaaatcatacaaccattctcatgatacactgaggctgtatcaggggcatcattgctgccactgttcgtgcatacttatacacagctcttaatggttacgatcccacagcatcttaatcccattattttgaagtggcttcatgaactagtactggtgagctcatcacttctatgtttggagagcccaactcatagaactgcaatcatgccctctttacttcctatgaagtcctgcaattatacaagaactatttgcctcaaatattt

SEQ ID NO: 38256 - DNA, 415 bp, Glycine max
  unsure at all n locations
  Clone ID: LIB3138-048-Q1-N1-B9
cccggcatttataatcagcttgatgattagtacccaagattctggatcaagggtgcgaaagttttcagttcaaggtcttttggggaaagaaatgtgttccagtgcttttgttgatggaccaatggtgattttccgtttggcaccacaggattatcaccgnttccattttccagtatcaggaattattgagcaatctgtagatatccctggatgctggtatactgtcaatcccattgctgtaaatagcaagtactgcaatgtctttacggagaacaagagagttgtttcaatagtttcaactgtagatttttgaaaggtggcatttgttgcaattgtagctacaatggttggtttcattacttttacaaagaaaaagggcgactttgttaagaagggagatcagtctggatatttc

SEQ ID NO: 38257 - DNA, 59 bp, Glycine max
  Clone ID: LIB3138-048-Q1-N1-E2
aaaaaaaaaaaaaaaaaaaaaaaaaaaaaaaaaaaaaaaaaaaaaaaaaaaaaaaaaaa

SEQ ID NO: 38258 - DNA, 410 bp, Glycine max
  Clone ID: LIB3138-048-Q1-N1-E7
gtggaaatttgcctttatttcattagggcgccctgaatatcgcgaggcttctgacattggatcgatgtcatttgagagtacagatgatcaccgcgcgatgggagcatacacgggccatgttgcctacaaccaactcttccttaaggaactatgcttattgacagacgacccacacgtttataattcgattggaccagtacttgttaagcacgattttggctaggcccttgcaaatgtccgcaagagaatcgcatacatctgatctgaattgaagcgtctggatgccactgttcaagatttggaagagaagcaaaatatcgcgatagatacgatgctaaaattgccacagaggattcaatcatttcaagctgggaaaggcaaagcgtattttttcctcacatattgttcca

SEQ ID NO: 38259 - DNA, 196 bp, Glycine max
  Clone ID: LIB3138-048-Q1-N1-F6
gggaaatgagaaaatgacggaagtgagagaggagcactgagcatccaaaatggccttgttctctgctaccgcaaccgttcttcctcggaacctcgcattcgctttcttcaccaaactcttcctctctcacagtcactctcttctacatcacttcctttcattccccactcccaaatcattaaaccctcgcaacccg

SEQ ID NO: 38260 - DNA, 61 bp, Glycine max
  Clone ID: LIB3138-048-Q1-N1-G10
cggatcaaaaaaatatactaaactcaacaacaaaaaaaaaaaagaggcggggtaagaatac

SEQ ID NO: 38261 - DNA, 138 bp, Glycine max
  Clone ID: LIB3138-048-Q1-N1-H8
gcaacaactctgatggctgatgggtgtccatatatgtatgcaatggtgcatgatagttcagtgtctacaataccaagtgattttgtcattggtgtcaagctgacaaccataaacaatatttgtgcatatgggctcaat

SEQ ID NO: 38262 - DNA, 122 bp, Glycine max
  Clone ID: LIB3138-049-Q1-N1-A2
agggaattactcttttatatagattgaaaaaaaaaaccaactaatgtgtcgaaaactacttttctatgcacaataaatatgtatttagattattttatttttaaaaaaaaaaacatttttat

SEQ ID NO: 38263 - DNA, 226 bp, Glycine max
  Clone ID: LIB3138-049-Q1-N1-A7
ctttaccttaccaacgccatcttcttcacgctcttcttctgcggcgcctactttcttctccaccgctggcgcgacaagatccgcatccacacccctgttcacgttgttactctgtccgagatcgccgccattttctccctcattggctccttcatctacctcctcggcttcttcggcatcgactttcgttcagacctttaatttacgcgccctccacaactcctgg

SEQ ID NO: 38264 - DNA, 291 bp, Glycine max
  Clone ID: LIB3138-049-Q1-N1-B2
gggaaaaattctcttgtacagaaacttctgtcctaaagttgctgaggttggtttggccaatctttgcaacagggacaatactcatataagcatgactgggggcagggggactcccggttatgccgcacctgagctttggttgccatttcctgtaactcacaagtgtgacgtttacagcttcggcatgctgctatttgaaatcattggcaggagaagaaaccataacattaaccttccagaaagtcaggtgtggtttccaatgtgggtttgggaaaaatttgatgccgaaaa

SEQ ID NO: 38265 - DNA, 165 bp, Glycine max
  Clone ID: LIB3138-049-Q1-N1-B3
ctcaatggtagcagcttagcccccgaatccttgccagagacgctggctgtataatgcggttaatttgctaatactatgtacttaatttgtttaaaccatagtcatagtatgttttacttgtcaatgtacctaaagtttttaatggaatacctggtaggcctcatc

SEQ ID NO: 38266 - DNA, 183 bp, Glycine max
  Clone ID: LIB3138-049-Q1-N1-B7
ggtcgggtttcaaatgaggttttctcaaactgcttgaggtcaagtgggaggacagggataatagcatcagaggtaggaagatgtgccagtggcagttgaagagagtattctggaaactacattgtggtgtttgacccacttgatgggtatccaatattgatgctgcatgcaactgttccattt

SEQ ID NO: 38267 - DNA, 380 bp, Glycine max
  Clone ID: LIB3138-049-Q1-N1-D8
gttgtatgtgtaccattcccagcacaaggccatgtaaacccctttatgcaactagccaaactccttcattgtgtgggtttccacataacctttgtgaacactgagttcaaccacaaccgttttgttaagtcccatggaccagactttgttaagggtctccctgatttcaaatttgagaccatacccgatggcttgccgccttcggataaggatgcaactcaagatgttccagcactgtgcgattctactaggaaaacttgttatggtccattgaaagagttggtgatgaagttgaactcttcttcccctgaaatgcctccggttagttgcatcattgctgatgggactattggatttgcttgaagagtcgcaagggattt

SEQ ID NO: 38268 - DNA, 206 bp, Glycine max
  Clone ID: LIB3138-049-Q1-N1-G9
aaaaaaaaaaaattattttaaaaaaaaaaaaaaaaaaaaaaaaaaagagagaaaaaaaaaaatatgggcggccgccccctaattttttttcttacccaccaattaattaattcccggcccctgcctgcataccaaccttccttatatatagtgagtcttataactgcctgtatcattgtcatacactgtttccttcctgaataaaa

SEQ ID NO: 38269 - DNA, 144 bp, Glycine max
  Clone ID: LIB3138-049-Q1-N1-H1
cttgaaaactgttcgagtctcaaatatctggctgatgagtgggcttctgcatttgggaactagtatgttgcattgtattcacttaaataaagcgcatcactatgtgcaatgagtgtgtttaaatataaacaaacaaccataaac

SEQ ID NO: 38270 - DNA, 380 bp, Glycine max
  Clone ID: LIB3138-049-Q1-N1-H11
ggctgtttaatggtcaagattgtgatgtctgggaatgcaccaggcaacacgagtgattgggcctcattggtacacgtgtttttaacaaacagcatcagtacagagcattttgatgcatgtaagtggacaaaatcagaaccacattcctgggaattgatcttgccaatagaggtatgtggtcctaataatggttgtgaaatgtggagttctgagtgggcaaatcaaacttcatggcatttgagtttccttattgacaatcccaaacagtctacagtttttgatattctcttgggaatctctcaagattttgaaattgctggtaatactcttatgccagctttttctgttccacaggctactgccagatcttctgaaaatgc

SEQ ID NO: 38271 - DNA, 393 bp, Glycine max
  Clone ID: LIB3138-049-Q1-N1-H5
aaaaaaaaaaaaaaaaaaaaaaaaaaaaaaaaaaaaaaaaagggaaaaaaaaaaaaaaaaaaaaaaaaaaaaaaaaaaaaaaaaaaaaaaaaaaaaaaaaaaaaaaaaaaaaaaaaaaaaaaaaaaaaaaaaaaaaagggggggggcccccccttttgggcctttcccccccggaatttaattcgggcccggcccctgggggggccccaatttcccttttgggggggcttttaaaacctgggggaaaaaagggaaaaagcttttcccgggggaaaatgttttccccttaaaatttccaaaaaaaatacaacccgaaaaaataaaggtaaaacccggggggccctaagggggggcccacccccatttattgggggggccccaactgcccctttt

SEQ ID NO: 38272 - DNA, 382 bp, Glycine max
  Clone ID: LIB3138-049-Q1-N1-H6
gcctgcgcaagggctggggccacgagcctcaccttctgtggaacgccttcgacatgcacaagcacctcaacgagcacggcaccatgaagatccccaagtgggatgccaccaggtctactggcagcccttagaggaattttatccttgtgacaacacggtctgactattttgaatcattttccttgggtttgtgagcgttatttacttgtaattgtttcgctgggcgctaggacatgtgcgcacattttgtgcagttgtgacaaggagacgcatgagcgattttccggaggcctaaagcatggtggaaatagaagatactgagacgtcgtacgcggcgtgatatacatgtatagaagtagagagacgattttgttgatacgtc

SEQ ID NO: 38273 - DNA, 141 bp, Glycine max
  Clone ID: LIB3138-050-Q1-N1-C3
caacagcgaaatcactctcatcccaaaaaaaaaaaaaaaattaatagaggggtggggccactaatagggggttctgaaactacaaatctttcacacgcccagtattattttatgcccgtaccatgggggctgactaatatg

SEQ ID NO: 38274 - DNA, 152 bp, Glycine max
  Clone ID: LIB3138-050-Q1-N1-D7
gtttaattcaataaaggaaattaggcctgaccctcttgttgagtatgctctgcctatttgaaaatttccacacctcttttaattgtcctaatgatgtgtgaagtgtgtgttattttcaaaaaaaccaaaaaaaaaaaaaggagaacataaag

SEQ ID NO: 38275 - DNA, 71 bp, Glycine max
  Clone ID: LIB3138-050-Q1-N1-E2
cgataaaacaatttttaatgcaccaaatgcaaccaagaataagaggggcgggcgcagacaaaggggctctg

SEQ ID NO: 38276 - DNA, 411 bp, Glycine max
  Clone ID: LIB3138-050-Q1-N1-G12
ttgcgactcctgaggtcatttcacagcaaactgtttggaatcaaatggcggcagtgagaacaccattgaattttggttctagcaagcagagcttttgtcagttttctattgaccttctcggtggaggaatcttagtggacaaaactggagattggatcacacttatacaaaattctccaattagtaacttgttgagagttgctgcttggaagaaaggctgtttaatggtcaagattgtgatgtctgggaatgcagcactcaaaaggagtgattgggcctcattggtacaagtgtttttaacaaacagcaacagtacagagcattttgatgcatgtaagtggacaaaatcagaaccacattcctgggaattgatcttcccaatagaggtatgtggtcctaataatggttttg

SEQ ID NO: 38277 - DNA, 258 bp, Glycine max
  Clone ID: LIB3138-051-Q1-N1-A11
ccaaggtgtcagcgtggagtctaagtccaaagggttcatgtcctcagatgcagaactgtggaatgggagatttgctatgttgggtttgattgctctggcttttactgagtatgttaagggtagtactttggtataattcagtcatgaaggcacaccacaatggacttaatctcctttgtgattagagagaccaatgtttatttgtacttcgtgtgtttatttaatctacatatcaaaattatttcgttaatcataacc

SEQ ID NO: 38278 - DNA, 79 bp, Glycine max
  Clone ID: LIB3138-051-Q1-N1-A7
ggcaaaaaaaatttttctgaatagtaaacctatatgactggcgggtgctataaatagagctgctagcattcccacaaaa

SEQ ID NO: 38279 - DNA, 117 bp, Glycine max
  Clone ID: LIB3138-051-Q1-N1-C1
aacaagtttttttttgaaacctaaattactttctgattttctccggcacttttatttctctctttctggatgattctctctgagtagattgcggcgtgttctctatgatgatgatga

SEQ ID NO: 38280 - DNA, 259 bp, Glycine max
  Clone ID: LIB3138-051-Q1-N1-C2
cttttatgtttctaggcatattatgtatttagttagaagtgctaggaaaacattttctaagatactttttttaacacattttattattggttaaaatatatgggaaattacaaagagtgagatgacttcatcaaatagtgagaagaaagaagtgagaaaaaaaattgtaattttcaataaattttaatcaataatagagtgtgtttaaaagaaaaaaaaaaaaaaaaaaaaaaaaaaagggcgtacgacaaaataaaga

SEQ ID NO: 38281 - DNA, 155 bp, Glycine max
  unsure at all n locations
  Clone ID: LIB3138-051-Q1-N1-C4
cggtnattaaaaattaaattaaataaaaaaaaaaaaaaaaaaaaagagcggataatttaaataaaataaaatacatactaaaaacaactatattaaataaataaataaacatattaggggccccccccccccttttaacctcttcccccccgaat

SEQ ID NO: 38282 - DNA, 276 bp, Glycine max
  Clone ID: LIB3138-051-Q1-N1-C6
gagaaaggaggaattctacttctacatgaaatcatatccccccggagataacgtgaaggcacagaattatccacacattcttgttacagcaggattaaatgacccacgggttttgcattcagaacctgcgaagtttgtggcaaaactgatggatatgaagactgatgataacatactgctgtttaaatgcgagcctggggctggacattttttcaagtcgggaagatttgataagcttccagaagatgccttcaattattcatacattatgaacac

SEQ ID NO: 38283 - DNA, 120 bp, Glycine max
  Clone ID: LIB3138-051-Q1-N1-E1
cttgcgggaaaattgtttatattttaaaacacactcccatctcttgggggtggccgcctgaagatacctcgggatgattctcttgttttctggacagacaaaaaacatggtctgggactg

SEQ ID NO: 38284 - DNA, 374 bp, Glycine max
  Clone ID: LIB3138-051-Q1-N1-E2
gttctagatcgcgagcggacgccctatacacatttttctctatgtggcgatatacgcgagttgaaactacgattctatcaaatcgttttatggacttactttttgctttaacagaaactaacggtctaatcattaattaaacatatcgctgtttatatatatacggaccgatattctatatcgtgtatcctaattaagattagacccctgcctataacgtgttatagacttctttattttttggaacttatccattccttttctaatgagcccgacaatccgaaataattgtgggggaggggtcattgcgtttgtgatctaccatacctagagctctgcgtggtgagctgatttgcacttcccacgtgcaacac

SEQ ID NO: 38285 - DNA, 391 bp, Glycine max
  unsure at all n locations
  Clone ID: LIB3138-051-Q1-N1-G2
ggcacaagatctcgtagtttgacgggccggaagccctcggtggcgattggacctggggcaacggccaggctacgtttggccacttgattggcgggtacgatgctggatactacggctacctctcctcacaggtctactccaccgacatgttctactcggtcttcaaggacgacccgatgaacggcaaggagggcaggcggtataggcatacggtgctggagcggngtgggagcatggaggagatggatatcttggaggagttcttggggaggaagccgagtactgaggcgttttacaaggagttggggattgcgaagtangtggttgatgagatgatggggcgcatggatagcggggaggctcgtctgattgcatttgaaatggcttcgtg

SEQ ID NO: 38286 - DNA, 385 bp, Glycine max
  Clone ID: LIB3138-051-Q1-N1-G3
gggggaaagacctgcatattgataaagctctatgagaggtatcgtttcggttagagctcactacaccagcatgtccaatcaaagacgtgtttgagcagaaagcaaatgaaatgggggcaatgctcccttgggtcaagaatgtaaaagttacaatgtctgcacaaccagctagacccatatatgccgagcaactttcagcaggtctacagacaatttcaaatattgtggctgtgtccaattgcaaggggggcgtgggaaaatcaactgtagcagtaaaccttgcttacactttggctgatatgggtgctagagttggtatatttgatgctgatgtttatggtccaagcttaccaactatggtctctcctgaaaaccgactgttagt

SEQ ID NO: 38287 - DNA, 405 bp, Glycine max
  Clone ID: LIB3138-051-Q1-N1-H6
tcgagaaatgccctggctaaaccaattgatggtcgaggagaaatttcagctgcggaatctcgattaatcgaatctcctgctcccggtattatttcgagacgttccgtatatgagcctcttcaaacaggacttattgctattgattcgatgatccccataggacgtggccaacgagaattaattattggagacagacaaacgggtaaaacagcagtagccacagatactattctcaatcaacagggacaaaatgtaataatgtgtttatgtagctattggtcaaaaagcatcttctgtggctcaagtggtgaataccttacaagaaagaggagcaatggaatacactattgtagtagctgaaacagcggattctccagctacattacaatacctcgccccttatac

SEQ ID NO: 38288 - DNA, 400 bp, Glycine max
  Clone ID: LIB3138-051-Q1-N1-H8
gagggaaatgctgaccaacacaacaacagtgaactttctgtagaagcctttagacaatctagtcaaaagagatcacttcaaagatctattagtagggggtcatccttagggaatagtagccgccactccttttcagtttcctttggtttacccacaggagttaacgttgctgatcctgaacatgaaagctcacaacccaaagaagaagcaccagaggttccactcagccgccttgcttccctcaacaagccagagattccagttcttgtgattggatctgtagctgccatagcaaatggggttatatttccaatatttggcgtgctgatttccagtgtcatcaagacattttatgaaccatttgatgagatgaaaaaggactccaagttttgggcactga

SEQ ID NO: 38289 - DNA, 51 bp, Glycine max
  Clone ID: LIB3138-051-Q1-N1-H9
ggtaaaacaaaatttattagactgacactcaatttatgtggaaggggttag

SEQ ID NO: 38290 - DNA, 139 bp, Glycine max
  Clone ID: LIB3138-052-Q1-N1-G5
tgaccctgcccaacatccaaaggccttcaatggttggtatctggggaggcaagggacaaggaaaatctttccaatgtgagcttgtctttgccaagatgggaatcaaccccatcatgatgagtgctggaaagttggaaag

SEQ ID NO: 38291 - DNA, 388 bp, Glycine max
  Clone ID: LIB3138-052-Q1-N1-G6
actagctccagatcgcgagcggccggcctatggtctcattcctgggggaacaggaactaggctattgggcaccattcctcattccatttcacagcaaactgtttgtaatcaaatggcaacagtgagaacaccattgaattttgattctagcaagcagagctattgtcaatttactatagaccttgtctgtggaagaatcttagtggacaaaactggagattggatcacacttattcaaaatttctccaatctagtaactttattgaaaagttgctgtttgtataaaaaggctgtttaatggtcaattattgttattgcctggggattgcattcattcaaaaatgtatggatttgggccttatttggttccaagttgttttttaacaaa

SEQ ID NO: 38292 - DNA, 269 bp, Glycine max
  Clone ID: LIB3138-053-Q1-N1-E8
cttacctctctgccactccagcaaatgaagaattgctagctaatgcctctgtggtgaagactggaagaaatttgactgtggttgcagttgagtttaaactgaagaaaactgggaatttgctctatattactcatgctaccttctataacatgccagtttccagtttatgaatatttagctttctggtggacattgttcagcagtttatgaatatttttaaaaaataaataaagatagaggcacaaattgtccctttttcaactagtatc

SEQ ID NO: 38293 - DNA, 284 bp, Glycine max
  Clone ID: LIB3138-053-Q1-N1-F3
cgaaaaaaaaaaaaaaaatttaaaaaaaaaaaaaaaaaaaaaaaaaaaaagaaaaaaataaaaaaaaaaaaaaaaaaaaaaaaaaaaaaaaattaaaaaaaaaaaaaaaaaaaaaaaaaaaaaaaaaaaaaaaaataaaaaaaaaaaaaaaaaaaaaaaaaagggggggggccctcaatttgggctttgtccccccgggaattaatttgggtccggttttctgggggtttccatttttctcttttgggggggttttttaaatttggcgataaattgggaaaaac

SEQ ID NO: 38294 - DNA, 105 bp, Glycine max
  Clone ID: LIB3138-054-Q1-N1-A10
aaaaaaaaaaaaaaaaaaaaaaaaaaaaattaaaaaaaaaaaaaggaaaaaaaaaaaaaaaaaaaaaaaaaaaaaaaaaaaaaaaaaaaaaaaaaaaaaaaaaaa

SEQ ID NO: 38295 - DNA, 70 bp, Glycine max; identical to SEQ ID NO: 37915
  Clone ID: LIB3138-054-Q1-N1-A5

SEQ ID NO: 38296 - DNA, 332 bp, Glycine max
  Clone ID: LIB3138-054-Q1-N1-B4
caataagagtatcaacagaaactagggcatccacaatagtaagcgtaattcgcagtttctgttgatactcttattgaggaacatctgacagttgagcccatcaatgaatatgtccagagttgtgacattgtggccttcaataaaatataaactacaattgtgggacttggagatcatggcaacgggaggaatcgcaagttttaaaaactatgatattgggaaactaccctgaattgagaatctctgtctttagaaacccgcttgttattagttgttatatatcagactttgtgatgtcatcggctatttggataataatcatctttcctttg

SEQ ID NO: 38297 - DNA, 259 bp, Glycine max
  unsure at all n locations
  Clone ID: LIB3138-054-Q1-N1-B8
ctcggtatagccctagagacgtttnngaatcttngtggacaaaactggagaatgcgtcacacgcatacaaagttctccatttagtaactggtcgagagtcgctgcttggaagaaaggctgatgttgatcaagattgagatgtctgggaatgcagcagtcaaactgcatgagtgggcctcatagatacaagtgtttttgacgaacagcaagctgtacaaactatgatgatgcatgtacgtcgacaaaaatcagaaccaca

SEQ ID NO: 38298 - DNA, 405 bp, Glycine max
  Clone ID: LIB3138-054-Q1-N1-C2
tagtgttaatggaacaggccgatctgtgcagaagcagaatgtgcattcactcggggcactgaccaatgtgggtatatattcatgatcttgatgagctcttcaattgttttatgcgacaacttaatcctctttaatcagaagctgcttttgaagtctttcgtctcgcgtggttcatccaactttgtgattcagttaagcagcaaaacgaggcgtcttaacgggttcatttcaaaagcggaaaagcatagtggccattcaaggaaaagcagttggtggcagaaattctttttcgaagatgatgggaattggcttggtttgagagacgatgatatggtagaggctgaggctgaggctgagggcgagggtgatagcacacactagttatctgagggcgacaagtttgag

SEQ ID NO: 38299 - DNA, 374 bp, Glycine max
  unsure at all n locations
  Clone ID: LIB3138-054-Q1-N1-C4
gtaacataaaaaccaccgaagaaaacatcactgcgccgcgctggcacaccaaataaacacaaacatggacgcatcaaaactcaatcaattgaagcatttcatcgaacagtgcaagtccaacccttccctcctcgctgatccttcactctccttcttccgcgactatcttcaaagtctcggcgcgaaacttcctgagtctgcttattccgaatcgacgggcgtggagagggatgaggacatagaggatcttacggaggagcacgagaaggtagaagaagaagaagaagaagaggacgatgtaattattgaatccgatgttcagcttgagggtgaaacctgtgagcctgatgatgatcctncacagaagatgggag

SEQ ID NO: 38300 - DNA, 374 bp, Glycine max
  Clone ID: LIB3138-054-Q1-N1-E1
atgtagagcccttaatccttcatctgcagctgaaaaatatggggattgagttgaatttcggttttgtttgtcactgctatagtgctggaagcatggccatgcattcgcgcaagctaccgtatgccccctctccgaatgaaaacgggctatggtgagcgtcctccggaggtaaaatgcgcaagttttaggcttgcagcgatttcattttcaagatgaaagcctacagccattatgatagagtcaggttctctcactatttaaatcctgaaagaattcagaaggtaatctgcaaagggaccgatttatttgatatgctgccggaggagtacactttcagggatatcattggtaaaatgggaccaataccccattcc

SEQ ID NO: 38301 - DNA, 452 bp, Glycine max
  unsure at all n locations
  Clone ID: LIB3138-054-Q1-N1-F9
cccttgattacggcgtttgttgagggcctcggccggttacgataaggcaacgttactcggtggatacgaacctcgatgttntgtccggcagagttaaaaatctcttcagggtgctattcnttagaggaaaacgacgctttgcaaagggattgtttgattttgaaaaaatttgctaggagaaacccctggattcaacttggggctgatcttgcagaatttgatgnaatgaggcggcttattctttgcagccaggcgttgacctcaaggggaaataagtgaaagaatgagaatatctgatgnccgcttgaaaggggatcatagnnctggacccganngaagaaaaatgcgtgtanngtctcagaatgagannagaagaaatnntagtagccctattcatnngaggctggcncanntgctcnntagtgggtgccctttaatgcnnctgaatatga

SEQ ID NO: 38302 - DNA, 108 bp, Glycine max
  Clone ID: LIB3138-054-Q1-N1-G6
tatataagtatataaattattattactaggggaaagagatccacgtctttctaaaaagaacttctttttttaaataaaacacaaaatgaaaaaggaaaagaacgagag

SEQ ID NO: 38303 - DNA, 302 bp, Glycine max
  unsure at all n locations
  Clone ID: LIB3138-054-Q1-N1-G7
gcggaacaaaaaatttgtgtccatggagaaaaactctgttgatgtatagtcctttgctttctcctcgaggtgatgaaactgcaatcaagacaacatcttttcttgtgtcagctactaaatggactctcaagactttgatcttggtgatctttgttctatggacaactttcattttttctctccctgcaaagcctgtgaatgagttgttctcaaaatggaatgatctcaaccgtgacactccttttggagtcacaggaagcatttntctggtcttcactgncccaattctcataatagcattt

SEQ ID NO: 38304 - DNA, 401 bp, Glycine max
  Clone ID: LIB3138-054-Q1-N1-H12
cgaaaaaaaaaaaaaaataaaaaaaaaaaaaaaaaaaaaaaaaaaagggaaaaaaaaaaaaaaaaaaaaaaaaaaaaaaaaaaaaaaaaaaaaaaaaaaaaaaaaaaaaaaaaaacaaaaaaaaaaaaaaaacaaaaaattaaaaaaaaaaaaaaaaaaaaaaaaatgggagaaaaaaataaaaaaaaaaatggggcgggccgaaatttatatctcctccccccccaaaattaaattacaacccgaactcttaaggggaaaaatttttttttttataatgaggtatcaaatttgcatttatcggggtacactcctttcctgtgtaaaaattgaaatacgtttacatttcacaaaaataaacaaatccgaaaattaaagggtaaagccggggggcttttatg

SEQ ID NO: 38305 - DNA, 164 bp, Glycine max
  Clone ID: LIB3138-054-Q1-N1-H4
gtgtccttctgcatttgtgaactagtatgtagtattttattcacttaaataaagcgcattactatgtgcaatgagtgtgtttaattcttacaaaaacaagaaaaaaagcaaccgaactacgataacaaaaaaaacatgaaaaatcactaaaaaaacaaatcaaa

SEQ ID NO: 38306 - DNA, 333 bp, Glycine max
  Clone ID: LIB3138-054-Q1-N1-H5
tagtgtacgcggatagaacagctaaaggtaatgtccttgagccagagggaatgatcgagatcaaatttataacaagagaattgttggagtctatgggtagacttgatcagcaattgataactttgaaggtaaaacttcaggaagccaagagtaacagggacatcgcggcctttgaatccctacagcagcagattaaatcacgcgagagacagcttttgcctgtgtatacccagatagctaccaagtttgctgaactgcacgatacttccttaagaatggctgccaagggtgtcgttagagaagttcttgactagtgtaactcccgtgctgtct

SEQ ID NO: 38307 - DNA, 241 bp, Glycine max
  Clone ID: LIB3138-055-Q1-N1-C5
cgaaaaaaaaaaaaaaaaaaaaaaaaaaaaaaaaaaaaaaaaaaaaaaaaaaaaaaaaaaaaaaaaaaaaaaaaaaaaaaaaaaaaaaaaaaaaaaaaaaaaaataaaaaaaaaaaaaaaaaaaaaaaaaaaaaaaaaaaaaataaataaataatgggggggggcccccatttgggggctttttccccccggaatttatttcgggccggtgccttgggggggtcccatttttttttttagg

SEQ ID NO: 38308 - DNA, 296 bp, Glycine max
  unsure at all n locations
  Clone ID: LIB3138-055-Q1-N1-E12
cagctcanattgcattctcatcctagagttttaaaaatggcagcaggctccttcatggctctctcttccccatccttggctggcaaggccgtgaagctgggcccatcaacccccgaattttgcaccatcaccatgacgaagaccgttacccagcaggcacccatcctgagcccaacgtaccgcccaaacccacgcaagttcttggccctcattcttggcgaacccccctcctacctcaactgcgagtttctggctatgaacgtggttacaacaaaacatcttattctagtgatgag

SEQ ID NO: 38309 - DNA, 231 bp, Glycine max
  Clone ID: LIB3138-055-Q1-N1-E8
cgaaaaaaaaaaaattaaaaaaaaaaaaaaaaaaaaaaaaaaaacaaaaagaaaaaaaaaaaagacaaacctgaaaccgaaaaaaggcgcctcccaaaaatgaatacgggggcaccgtcaaataacttcacgaccggagccctacaaggactccctttatccctttagcgggcgggtcctcacagatggcgtttctctccccctgcgtttatattttctgctacatgtgca

SEQ ID NO: 38310 - DNA, 117 bp, Glycine max
  Clone ID: LIB3138-055-Q1-N1-H6
aaaaaaacataaaatgatgaaagggctgttcctcgttgcttctctctccttggcttctaagtgccatgggctggtccctttggaaaggtacttggactcgttggaagcttaacccta

SEQ ID NO: 38311 - DNA, 237 bp, Glycine max
  Clone ID: LIB3138-055-Q1-N1-H8
tgaaactataaagcaaagggtgtcgaaattaaaagcaatgggatgggtcaaatgcccccgttctgggcttttactccccctggttttctttcttgctttcttcatcttctttccccggaagggacaaaattatgttacccacttggctcctccttcgttccttttcactatcaaactcaaccacacaaatataaccactttttcttccttttccttaccacaaccaccaccaccacc

SEQ ID NO: 38312 - DNA, 213 bp, Glycine max
  Clone ID: LIB3138-056-Q1-N1-A12
ggtgaggagcgagatctaaacatatttcggcccgagagctttggtgggtggggtcttgataaatgtttttcaagctgtttcctttttatttgtattgcacgagggggaagaaaatgatcattagataaaattgaattaatgataattctttttatttgcttattttttttttacatgtatgaatagtggaaagaaagaataggtattggctat

SEQ ID NO: 38313 - DNA, 270 bp, Glycine max
  Clone ID: LIB3138-056-Q1-N1-A3
gatgaatgctcctgattcaaatgataatattgatttactgcggagcattgatttgttgggtttacaaggagcaggtaaagcttttccaaacaaaattatttttgatgataagcttgtgttggctaacacacaagaattctttgatggaaattttccagtggattcttggttaccaatttttgtgaattgactttatcctgtaagtcaattaccttcagaagctgtcgttgtaaatgttacatgtggtagtggacgtggtggtttacccac

SEQ ID NO: 38314 - DNA, 407 bp, Glycine max
  Clone ID: LIB3138-056-Q1-N1-B1
cagctccttggttcttacaaacactacttatgatccaacaacaatgcagttgctcaccctcatggccggcgtacgcactctcgctggcttctctgccgccggtccagctgaacctgttcacatacgagcaccttcagatctgcccatcgatgcaagatcagcccaagaaggagctggggacgccaacacctggatcaaagacaggttctgcgcttcaagcttcgcttcttgcggcaaagcaggaactaacggtgacccgggcaaccgatgcgctctggcatgcgaaaatattgctggaggtgttgctctgggccattgccagtgcagcaagggatggtaccctgacgagtgcatcactcttggaaatatgcgggtcgccacaagtgctgagtgaatgagatgcaact

SEQ ID NO: 38315 - DNA, 391 bp, Glycine max
  unsure at all n locations
  Clone ID: LIB3138-056-Q1-N1-B11
tcgagaaattctccaattagtatctttctgagagttgctgctcggaagaaaggctgtttaatggtcaagattgagatgtctgggaatgcagcagtcaaaaggagtgattgggcctcattggtacaagtgtttttaacaaacagcaacagtacagagcattttgatgcatgtaagtggacaaaatcagaaccacattcctgggaattgatcttcccaatagaggtatgtggtcctaataatggttttgaaatgtggagttctgagtgggcaaatcaaacttcatggcatttgagtttccttattgacaatcccaaacagtctacagtttttgatattctcttgngaatctctcaagattttgaaattgctggtaatactcttatgccagctt

SEQ ID NO: 38316 - DNA, 184 bp, Glycine max
  Clone ID: LIB3138-056-Q1-N1-B3
aaaaaaaaatacaacaaataacaaaaaaaaaaaaaaaaaatagaaaagagaaaaaaaaaaaaaaaaaaaaaaaaaaaaaaataaaaatacaaaaaaaaaaaaaaaaaaaaaaggggcggccccccccttgtgatcttttccccccggtatttttttccgcaccgttccctgtgggcttccccct

SEQ ID NO: 38317 - DNA, 209 bp, Glycine max
  Clone ID: LIB3138-056-Q1-N1-B8
cttccagccttcaccaaccctaccacaccttgattatttcatggtgctaagtgatttggtgcggttgatggtggggaggccccatgacatgcgttacgtgcgcggacaatgctgacatgctcgtcctcaacggacccgcgtcgatctgacgatgaagctaatgcgcgcagacacgcacgcaacggtcatgctagtcgcgcaacaattcg

SEQ ID NO: 38318 - DNA, 329 bp, Glycine max
  Clone ID: LIB3138-056-Q1-N1-H1
cgtgctcgagattcggatccaggtgtagggaatatcttctcgtacacatctgcatatagtgacggtagaggcttctatgagatactcatttgatctaactttcaatgcttgccgcgccaggctgagactccgacgcttcttctcacatcatcatatatcatgggttatctactgtcgttcgatgcgagtactccatcagggctcgtaaatggagaacacactactggatgggagtccaactgctcagttgaagatctgggaatatgcatatccaaactgctgtgatctacattcacaaccgaaatctactgttgatacccgtgcctaca

SEQ ID NO: 38319 - DNA, 196 bp, Glycine max
  Clone ID: LIB3138-056-Q1-N1-H4
gttgagggcttaccatggaacctgtggaaaccgctttggttgggtacaagaacggggaactggccttacatgccaagggttccaaaagctccggaaaggtggttttttgcccccttaccatgaccatccccatggcgaaatctatctcaaattcaaaggtgtgcaaggcggaaaccagggccttaaaggccctaat

SEQ ID NO: 38320 - DNA, 243 bp, Glycine max
  Clone ID: LIB3138-057-Q1-N1-A10
ttataggcttgaacatagagatggtgctctttatcttggctggatgaacagacatatggccacctcttctgcttggagatgaaactgactggttcgagcgtttgcctcctttttgacttttaattgagcaagtagtctctccataggacttgagatttacctctgttctataatgcattttgtagaatctcaaagctcgttgtaaatgctaatacataaatgaaagaaaaagaaacgtctggt

SEQ ID NO: 38321 - DNA, 269 bp, Glycine max
  Clone ID: LIB3138-057-Q1-N1-A3
cgccccaacgtttccaaggacaagctccgtggcaagctcggggagctctacaaggccaagaaggacgatgtctccgtcttcggcttcaagacacacttcggtggtggcaagagcaccggctttgccctcatctacgactccgccgaggccatgaagaagttcgagccccgctacaggctcgtcagatacggcatggccaccaaagtcgagaaggcctctatgcagcagcgcaagcagcgcaagaacaagatgaaggagttccggggcac

SEQ ID NO: 38322 - DNA, 217 bp, Glycine max
  Clone ID: LIB3138-057-Q1-N1-A6
ctagttctagatcgcgagcggccgccctttttttttttttggccccatgtaatatattgttctttattaacccggagagcactttattttggagattgattgtacatggataagatcttatcttgtggaatctgtctttgtatttggaatgatcttttgttggttgtaacttgtaagttgtaacgcctgcattagcattagattaatattggtcgat

SEQ ID NO: 38323 - DNA, 299 bp, Glycine max
  unsure at all n locations
  Clone ID: LIB3138-057-Q1-N1-B12
ggctgatgataccatcaattttgaggcttttccccacaagctggtgcagtttggagagattcangaaaaagttgtattgaaattttcacaagaagaatttcttacagcttggtcaactcaagtgcgtcctgcaacaactctgttggttgatgggtgtccatatttgtatgcaatggtgcatgatagttcagtgtctacaataccaagtgattttgtcattggtgtcaagtngacaaccataaacaatatgtgtgcatantggctcaatcctggtattttaaggtctcgtcttttgggca

SEQ ID NO: 38324 - DNA, 360 bp, Glycine max
  Clone ID: LIB3138-057-Q1-N1-B3
ggagaatctggagtaattattgaacaaaatattgcagaatcaaaagtagctctagtatatggtcaaatgaatgaaccgcccggagctcgtatgagagttggtttaactgccctgactatggcggaatattttcgagatgtcaatgaacaagatgtacttctatttatcgacaatatctttcgcttcgtccaagcaggatctgaagtatctgccttattgggtcgaatgccttctgctgtgggttatcaacccactcttagtactgaaatgggttctttacaagaaagaatcacttctaccaaagaggggtccataacttctattcaagcagtttatgtacccgcagacgatttaaccgat

SEQ ID NO: 38325 - DNA, 298 bp, Glycine max
  Clone ID: LIB3138-057-Q1-N1-B4
aaaaaaaaaatttatattttaaaaaaaaaaaaaaaaaaaaaagggggggggaaattaaaaaatgaaactaataaaactcaaaaattaattccaaaaacttaatttaaaaccgtacacaactatacctataataataaaaaaatagggggggcccccattttttgaattttttccccccagaattaatttcttacccgatccctaaggcataccaatttttttttttaaagaattattttaaaatttggggaataaaagccaaaattttttctttgataaaattttttttcctttaaaa

SEQ ID NO: 38326 - DNA, 139 bp, Glycine max
  unsure at all n locations
  Clone ID: LIB3138-057-Q1-N1-D11
cttgaattataatgtatatatgatgattgagctggaacgcaggtcacagaattatgtttgtactataaaatacgctctgacttgtacactgtaagaatcaataattattttatcaaattcaaggagaaaaaacaattna

SEQ ID NO: 38327 - DNA, 357 bp, Glycine max
  Clone ID: LIB3138-057-Q1-N1-D5
gtgatagggcattgccggcgcgcgctgaagtttgctaggttcatgagcaggttcgggaagagttaccgaagcgaggaagagatgagggagaggtacgagatattctcgcaaaacctcaggttcatccgctcccacaacaagaaccgcttgccctacactctctctgttaatcattttgctgattggacttgggaggagttcaaaagacacagactaggcgctgcccaaaattgctctgccactcttaacggcaaccacaagctcactgatgctgttcttcctcccacgaaagactggaggaaagaaggaatagtgagtgatgttaaagatcaaggcagctgcggatcatgctggaca

SEQ ID NO: 38328 - DNA, 364 bp, Glycine max
  unsure at all n locations
  Clone ID: LIB3138-057-Q1-N1-D6
atcacaatctgttttgatttcggagctgtgggttttattgaaagaaaaaaaattagaagcaaaaatgatgcagtcgttgatgagcatgaaggcttacgtgggtacgaggttaccgattttaacgaattccgagacgagtacgaggaagcagcgcgtgaattgtccgaaccgtangaatgtgatggtttcgtgcggttcggagaggaatgggaacgaaggaataggttcgaactcaagttcgtttatgtctccgagccataattacgcgatcttgaagcaccggatggagaaagcggccaagtccgaggttagtggttttgtttttttttttttttaaggaaggaaaatgnnnnttttttctttt

SEQ ID NO: 38329 - DNA, 326 bp, Glycine max
  unsure at all n locations
  Clone ID: LIB3138-057-Q1-N1-F12
gcctaactttagtgggtcgaaattgaaaagttttctagctagtcataacattatcattactgatggtgtngacaaaacgagagcaacgaagcaatttataaagatagcggnaagggggtacgagaagagaaactgcacacaccagacgaagcgtcgcgagggagaaagagagcactctgtcagattgaagggacgaaaaaagcagatgtgcctaccatagcacagattgaagagttccattcgatgcagaggatgatgaatgctcctgattcaaatgataatattgatttactgttgagcattganttggtgggtttacaaggagc

SEQ ID NO: 38330 - DNA, 396 bp, Glycine max
  Clone ID: LIB3138-057-Q1-N1-F3
aaagggacaaacttagttgtcaagttggaatcaacccatactccatggaatggactggtttggccaatagattactgagtaagggcaatgatattctgtgttgcgattatgctagttttgatggtttgattaccaagcaagttatgagcaagatggcagaaatgataaacagtctttgtggtggtgatgaaaaattgatgcgtgaaaggacgcacctgctgttggcttgttgttcaaggatggcaatttgtaagaaagatgtttggagagttgaatgtggaatcccttctggatttccgctcacagttatttgcaatagcatttttaatgagatgctcattagatatagctatgaaaaattactgcgccaggcttaagcttcaagtatgtttttac

SEQ ID NO: 38331 - DNA, 392 bp, Glycine max
  Clone ID: LIB3138-057-Q1-N1-F4
aagctgatgtgcctaccatagcacagattgaagagttccattcgatgcagaggatgatgaatgctcctgattcaaatgataatattgatttactgttgagcattgatttgttgggtttacaaggagcaggtaaagcttttccaaacaaaattgtttttgatgataagcttgtgttggctaacacacaagaattctttgatggaaattttccagtggattcttggttaccaatttttgtgaattgtctttatcctgtaagtcaattaccttcagaagctgtcgttgtaaatgttacatgtggtagtggacgtggtggtttacccaccactgcttggattagttctgcagttaacaatcgctccttagatatcaacaaaaagattcgcacagca

SEQ ID NO: 38332 - DNA, 148 bp, Glycine max
  Clone ID: LIB3138-057-Q1-N1-G12
tggaatttgtgttttctttcgcttgttcgtttgtttaattgaataaaggaaattaggcatgaccctcttgttgagtatgctctgcctatttgaaaatttccacacctcttttaattgtcgtaatgatgtgtgaagtgtgtgttatttt

SEQ ID NO: 38333 - DNA, 158 bp, Glycine max
  Clone ID: LIB3138-057-Q1-N1-G2
ggattcctcagtccatttcacagcaaactgtttggaatcaaatggcaacagtgagaacaccattgaattttgattctagcaagcagagcttttgtcagttttctattgaccttctcggtggaggaatcttagtggacaaaactggagattgggtcaca

SEQ ID NO: 38334 - DNA, 343 bp, Glycine max
  Clone ID: LIB3138-057-Q1-N1-H4
aacccgtgttctgatgcatgaatttggtaattcctgaagcgtactggatttcattgcgatttcatttgcgtcactggatggactgccaccccaatgcaggatgttcaagatacaattgattggtttatttcctctcaggaatgtgttcccaggacctattgtgttttaaatacacaaaattcttttgtgttaaataggtggatgggaaaattgacttttccccacggcacttgccgaagtggtaagagaatgcctctttctattcggggaggagctggagcaaagaatgcttttcttatggatatggccaatgctggtacttcaatggggaaattttttggtg

SEQ ID NO: 38335 - DNA, 226 bp, Glycine max
  Clone ID: LIB3138-057-Q1-N1-H5
ggcttaacaagtagattaacagagcatcaaactggcaagtcgactactaagtcaaaggctggtgatatggttgagtttcgtgtgatcaggctttctaatgagggtcctgaaattaaattaagtgagcaacaacaacaaaaggataactcagctactaaagatgattctgtcaccaatgacgttatatgccattcaaggtctggagttctgtgtagatcaaatgaac

SEQ ID NO: 38336 - DNA, 314 bp, Glycine max
  Clone ID: LIB3138-057-Q1-N1-H6
gtagtgcactgaaatgctttgtctgcaatttctatggtaattgcggcttttgtggagatgaaaagactcaaaatggctcgtgactgtgggctaattgacatgcctaatgtgacaatttcaatgagcatctggaggatagttcctcaatatgccttgtttggaattgctgatgtctttgcgatggtgggtctgcaagagcttttttatgatcaagtcccacaggaattaagaaatgtgggtctttctctctatctaagtatttttggggtcaggagctttctgagtggctttctcatatctgctattgaaaatgt

SEQ ID NO: 38337 - DNA, 223 bp, Glycine max
  Clone ID: LIB3138-059-Q1-N1-A2
ggcgcgagccgatctagccgagcgtcttaataaacgctaacctctgcaccactgttggtcttgacaatgcgagagcgcctttgcatccacattggccaggccggcgttcatgtctgaaatgcttgctgggagctttattgcctggagcatgccatgcacgctgaggcacagatgcctaatggtcacaccatcagtgggggtgacgatgctttcaacaacttct

SEQ ID NO: 38338 - DNA, 178 bp, Glycine max
  Clone ID: LIB3138-059-Q1-N1-B1
attcgcttggatctgcgtagtgattattggcaattcttgacagaggcaattttagagcaagtgttgatttgcagcgcactcatcgtattagacgaatgattaaaatggtggccacagttgggattaccgggaatacaggtatatcattggcctgtgctattaataggtcttttaaggg

SEQ ID NO: 38339 - DNA, 196 bp, Glycine max
  Clone ID: LIB3138-059-Q1-N1-B10
gagactggctgttctttttggcgttaagaatgaaattctgagttctaacgccactaatcctatgctgacgcgacttcttgagaactgtaagagtctcaaatatctggttgatgagtgtccttttgcatttgtgaactagtatgtagtattttattcacttaaataaagcgcattactatgtgcaatgagtgtgttt

SEQ ID NO: 38340 - DNA, 278 bp, Glycine max
  Clone ID: LIB3138-059-Q1-N1-C5
ttcgctcggctttgcaccacttttttcccatcactttggggaaagatattcattctaagggaaaaatgacagaggagcaatccaaaaaggtggctgagactgagagttttccctctaatcctgcacctgaacctgttgttgttccaaaggaggatgtggcagaggagaaatctgtaattccacaaccctcttcctctgctgctgatgagtccaaaactcttgtcatagttgagaagactagtgaagtttcttgaaagaaaccgattgaggggtctgtg

SEQ ID NO: 38341 - DNA, 308 bp, Glycine max
  Clone ID: LIB3138-059-Q1-N1-C7
ctcgcactgcatctcgagcctggatttgttgggtttacaaggagcaggtaaagcttttccaaacaaaattgtttttgatgataagcttgtgttggctaacacacaagaattctttgatggaaattttccagtggattcttggttaccaatttttgtgaattgtctttatcctgtaagtcaattaccttcagaagctgtcgttgtaaatgttacatgtggtagtggacgttgtggtttacccaccactgcttggattagttctgcagttaacaatcgctcctcagatatcaacaaaaaggattcgcaca

SEQ ID NO: 38342 - DNA, 289 bp, Glycine max
  Clone ID: LIB3138-059-Q1-N1-D11
ccaccttcatgatgaacgagttggccattgactgttcgttaataacaatgtgctttttttttttgcaggtttatttaagcttcattgttcattttctcattttattttcaaattaatgtgtattgtgtattgtgtattttgataatttccttaattttcgatcaaggatgctgtccccaatttggtgaataagggttttgatttggaatccatgttaacatgattgccatatcaccaaaatggatggaacttaatatgaacacaaaatggatgatcaaatgcccccttt

SEQ ID NO: 38343 - DNA, 57 bp, Glycine max
  Clone ID: LIB3138-059-Q1-N1-D12
gcggaaaaaaattttttttaaaaaattataaaaaaaaaaaaagggggaaaataaaaa

SEQ ID NO: 38344 - DNA, 206 bp, Glycine max
  Clone ID: LIB3138-059-Q1-N1-D2
gggttgggttaaaggggaaaaaaccgtgggtcgggaaacattcccggaagggaatctttgttgattccagaaatgtctagcatcgcttcctcacaccaaagcttcctcaccaacgcccttattccactaacgcacaacccaaagttcaagaccactgttactttcccttcttcactcaaaacttgctcttgcagttccccacaaca

SEQ ID NO: 38345 - DNA, 371 bp, Glycine max
  Clone ID: LIB3138-059-Q1-N1-D7
cacaaaccatgcttatgtggctacctcaaaaacgctagcttgaagcagtatgttaactctcctaatgcccgaaaaaccgctgcttcttgtgggattccctttccaacttgttaattaattaagccttcttataattaaagtgtgcgatatatatatatatatagataaacagtttaatctatacacactttgatcctacaaagcatcttgacacaagcattcaataggatttcaccactttatcccaacattttaacatgatgcggtaattaaagtaattcttgttgcatatctggataacgatggcatatactcataattcgcgtgtataaataaaactatattctatacttactctatatatgtcactc

SEQ ID NO: 38346 - DNA, 198 bp, Glycine max
  Clone ID: LIB3138-059-Q1-N1-E5
ggaggaccccagttgggggaaccatcctgcgaagggaccaatgggcaaatttttggccagagggcaatttaaaagcaggtgttattttgcacccccctaatcgattaaaaggaatgtttaaaatgggggcccaagttggttttcctgaaaatccaggattttaattgggcctgtgctattaaataagtcttttaaggg

SEQ ID NO: 38347 - DNA, 152 bp, Glycine max
  Clone ID: LIB3138-059-Q1-N1-E6
cgtccgaagggagttgtttgcgctaagactgcagtgttgcttagggctcacacctgcagtggacgatggccatagcagcagcatctctgctcaagtcttcacttgtgctagaccagtctgaaaggggggagggacagcactcattggtcaca

SEQ ID NO: 38348 - DNA, 52 bp, Glycine max
  Clone ID: LIB3138-059-Q1-N1-F5
agtagtgtctgatcgagcacacatatttgtctacgtggctcgtctggttgag

SEQ ID NO: 38349 - DNA, 319 bp, Glycine max
  Clone ID: LIB3138-059-Q1-N1-F6
gggggattgcttctatttacaacacgtttaaaaaagaattatcggatatcatagataatctctgtatcaagaatgatatatcggaagatgcgattctagatatggaaaaaaatatgtatagaaagtattatgattggatgggaatcaatagagaaatactaaatcgttgcatatcgaatccagaattttggttcttttcaaaatttgcgatattttatgacgcatataggggtaactcgcacgttataccaatcaaattactgtttttttcttctaatgtaaatcaaaatgttagtgaaaataaaaagaacattgctag

SEQ ID NO: 38350 - DNA, 134 bp, Glycine max
  Clone ID: LIB3138-059-Q1-N1-G5
ggtgattggtggggtttccaaggggcaggtaaggctttcccaaccaaaatggtttttgtggttaacctggggtggcctaccccccaaaattttttggttggaaattttccaggggttcttgggttcccaatttt

SEQ ID NO: 38351 - DNA, 304 bp, Glycine max
  unsure at all n locations
  Clone ID: LIB3138-059-Q1-N1-H10
gctcgagccggacaccttctggccaatccattgatttctttggtgcactgagggccagagtatatgatgacgaagtgaggaagtggatttctggtgttggtgttgacggcattgggaagaagcttgtgaactcaaaagatggacctncaacctttgagcagcccaagatgactcttgagaagctcttgacgtatggtaacatgcttgtccaagaacaagagaatgtcaagagagtccaattggctgacatgtactngaacgaggctgcacttggaaatgctaacgaggatgctattaacagggg

SEQ ID NO: 38352 - DNA, 339 bp, Glycine max
  Clone ID: LIB3138-059-Q1-N1-H12
gggctggacaaagatggttaatgctgctgactcggccgtggctcacaaatgtgagcaagatatagaaaaggtgcttgatgtgtatgaaactaggctctctcaaagcacatatcttgctggagataatttcactttggctgatcttagccaccttccaaggcttgaacatctcattgaggaagctaaattgggacacttggtcactgagaggaagaatgtgaatgcttggtgggagaaaatttcaagtagaccagcttggaagaagttaagggatttgattcactaataaagagggtgaccaaataataattaaggaatggaggggtttaataattaaaa

SEQ ID NO: 38353 - DNA, 233 bp, Glycine max
  Clone ID: LIB3138-059-Q1-N1-H4
ggaaaaaaaaaacttgttcaattcaatgcaaaaggatgataaatgctcctggtgcacagaggtgacattggattacttgacaacattagatttgttgtgtttacaaagagcaagtgaagctttttcaaacaaaattgtgttttgatgataagcttgtgttggctaacacacaaaaattttttgatggaaattgttcaagggattcttggctaccacattttgggaattggctt

SEQ ID NO: 38354 - DNA, 644 bp, Glycine max
  unsure at all n locations
  Clone ID: LIB3138-060-C7-F2A
ccgaggagggcggcgatcggcgatgagcagcggcggcggatcgtcagaggcggcggcggcggcgaaggagaaggagaaggagaaggcgcgtgtgagtcgaacgtcgctgattctgtggcacgcgcaccaagacgacgccgcagcggtgaggaagcttctggaggaggatccatcgctggtgaaggcgagggattacgacagccggacgccgctacatgtggcgtcgctccatggatgggttgaggttgcgaattgcttgatcgaattcggtgctgacgtcaacgctcaggatcgttggaaaaacactcctctggctgatgcagaaggagctaaaagaactgccatgattgagcttttgaagtcacatggtggcttgtcgtatggccagaatggaagccattttgaaccgagtcctgttcttcccccattgcctaacaaatgtgattgggaagtggacctttctgagctggacttnctcaattcagtttgcattggaaagggatcttttggtgagattttgaaagcccattggcgtggaacacctgttgctgtcaaacgtattcttncatctctgtcagatgatagaatggtcattcaggacttcaggcaggagggtaatttacttgtgaagcttcgacacccta

SEQ ID NO: 38355 - DNA, 612 bp, Glycine max
  Clone ID: LIB3138-060-C7-R1A
gaaatgaaaaccgctattaatttttaatcataagataaaatattaaacactagattgcatgatgtgttatatttttcctcaatgggttttgtaccctacatattacactcaagcaacaactagtatctgctcacttaaatagctgaatagaattcgccaagaattttaatgagacaaaaaacagtaattgaatgtaaacaccagataaaggcaatcagcataaacctgttatgctcatttgaatctaacagttcaaagcaatgctcatgaccttagctaggttttccaagtcggctctgttcaaaaacccgcgacagtagataaggcaacccgctggaatggtaatagcagataatcatctgaatttcacggcaccaatgctcctaaaaatcatgaagtgaacaagtgccagtgatgatctgaaggcaaattttccttgatcttttcaaggtgtttaatgatctctatgaatgaaggtctttgcttcatgtcagcatcccaacactgctcagttaactctcgcagttcagggatataaccctttcccctaaaagaaagtctgtgtccttctggcacatatttggctccatcataagggtcgtaatttgaaaa

SEQ ID NO: 38356 - DNA, 395 bp, Glycine max
  Clone ID: LIB3138-060-C7-R2A
gaaatgaaaaccgctattaatttttaatcataagataaaatattaaacactagattgcatgatgtgttatatttttcctcaatgggttttgtaccctacatattacactcaagcaacaactagtatctgctcacttaaatagctgaatagaattcgccaagaattttaatgagacaaaaaacagtaattgaatgtaaacaccagataaaggcaatcagcataaacctgttatgctcatttgaatctaacagttcaaagcaatgctcatgaccttagctaggttttccaagtcggctctgttcaaaaacccgcgacagtagataaggcaacccgctggaatggtaatagcagataatcatctgaatttcacggcaccaatgctcctaaaaatcatg

SEQ ID NO: 38357 - DNA, 51 bp, Glycine max
  Clone ID: LIB3138-060-Q1-N1-A3
ttcggattcggctccggggtgaaccaaaattaaaaccccaaccccaaaacc

SEQ ID NO: 38358 - DNA, 133 bp, Glycine max
  Clone ID: LIB3138-060-Q1-N1-A4
gggttttgggggtggctcctgaggacaaggcgagtttatggtcacaacttcattatgtttcgtgtaataatctggaaatgcaagaagcttatcttgtcaatctcgtaaatgtgttacgagaattgtatttgca

SEQ ID NO: 38359 - DNA, 117 bp, Glycine max
  Clone ID: LIB3138-060-Q1-N1-B3
ggccccctcaaaatcagtcaagatgggaatcgacctggaccgccaccatgttcgagacgggcaccgcaaggtccctaagtccaccaacccctacggtaggctgttggtgcccctgta

SEQ ID NO: 38360 - DNA, 79 bp, Glycine max
  Clone ID: LIB3138-060-Q1-N1-C4
tcgggggctgggccaagaatggttttcttatggattttcccaatgccggtttttccatggggggattttttggtgggga

SEQ ID NO: 38361 - DNA, 187 bp, Glycine max
  Clone ID: LIB3138-060-Q1-N1-C6
gcaaagaaatgctattctcatgaatatgccaaatgctgttctttcaatgtggagatattttgttggagatctcgtctctgaagtttctaagatgacttctccctacattaaatgtacagtctctttcttcatagcatttggaaatttggctgatgacaccatcaattttgaggcttttccccacaag

SEQ ID NO: 38362 - DNA, 179 bp, Glycine max
  Clone ID: LIB3138-060-Q1-N1-E3
gtttgcaaaaagacagagggttaattgtggagtattttggaaggatgtcttacgttgctcataacgttaatcagccccaagagaaagatttgttggagggaaatttttcctttggtattaaatcttgctcttaattggaaaaagttttctttaccaaaacacaatttgttagtggaaaa

SEQ ID NO: 38363 - DNA, 255 bp, Glycine max
  Clone ID: LIB3138-060-Q1-N1-E6
ccttctccctacattaaatgtacagtctctttcttcatagcatttggaaatttggctgatgataccatcaattttgaggcttttccccacaagctggtgcagtttggagagattcaggaaaaagttgtattgaaattttcacaagaggaatttcttacagcttggtcaactcaggtgcgttctgcaacaactctgttggctgatgggtgtccatatttgtatgcaatggtgcatgatagttcaatgtctacaata

SEQ ID NO: 38364 - DNA, 86 bp, Glycine max
  Clone ID: LIB3138-060-Q1-N1-F4
cttaaagacgtggttgatcctgaacaatattactgaattaagtattgtacctttcactttggcttcaagaaaacaaaattgaataa

SEQ ID NO: 38365 - DNA, 69 bp, Glycine max
  Clone ID: LIB3138-060-Q1-N1-G2
cgctcgggaaaaaaattttaattttatacacgctgtttactattctacctattgaataggggcgccgtc

SEQ ID NO: 38366 - DNA, 75 bp, Glycine max
  unsure at all n locations
  Clone ID: LIB3138-060-Q1-N1-H3
ggaaaatggnacaggcatagttgttaagccttaaaaaaaaaagaaaggataaaaaaaaaaaaaaaaagggaggat

SEQ ID NO: 38367 - DNA, 269 bp, Glycine max
  Clone ID: LIB3138-060-Q1-N1-H6
cataaagctattttttctttctcttttgcacttgtttcataaaatgccggaccaagatattttcagttgcattagtgaacctcgtcttgtagccagaaagttcttggccagacctcatcatgagggtgttggagccgttgttagaagaagcatagcgagatttgaactcaagtacttcgatcctttgcttggcttggatgaattctcaatgactgctcctgctggggttactgagcatacacataaaggaattgagacgtgcacataca

SEQ ID NO: 38368 - DNA, 289 bp, Glycine max
  unsure at all n locations
  Clone ID: LIB3138-060-Q1-N1-H9
tctagatcgcgagcggccgcccttttttttttttttctgcagttgtttgtaatttgattttgccttttaccaataagatttagagctagttgtttgattggctatatcctgtgtatgtacattatgtgattgaggtgtccatcgtatgtaagatctttaagtggaagagcttcatatgtgttcataaaataaatagggtgttgctaggtgcacccagcatttttttaaaaaannaaaattaaaaaaaaaaatttttaaaaaatanaaaaaaaaaaaatatttatttttt

SEQ ID NO: 38369 - DNA, 98 bp, Glycine max
  Clone ID: LIB3138-061-Q1-N1-A2
aaaaaaaaaaaaaaataaaaaaaaaaaaaaaaaaaaaaaaaaaaaaaaaaaaaaaaaaaaaaaaaaaaaaaaaaaaaaaaaaaaaaaaaaaaaaaagg

SEQ ID NO: 38370 - DNA, 248 bp, Glycine max
  Clone ID: LIB3138-061-Q1-N1-A4
ctggtatttctaaggatggacagacccgtgagcatgctcttcttgctttcaccctaggtgtgaagcagatgatctgttgctgtaacaagatggatgccactacccccaagtactctaaggctaggtatgatgaaatcgtgaaagaagtctcttcttacttgaagaaagttggttacaacccagacaagattccctttgttcccatctctggttttgagggtgacaacatgattgagaggtccaccaac

SEQ ID NO: 38371 - DNA, 68 bp, Glycine max
  Clone ID: LIB3138-061-Q1-N1-B10
tgaaaaaaaaaaaattttaaaaaaaaaaaaaaaaaaaaaaaaggggggaaaaaaaaaaaagggggggg

SEQ ID NO: 38372 - DNA, 374 bp, Glycine max
  unsure at all n locations
  Clone ID: LIB3138-061-Q1-N1-C3
cttgcctatgatatctcatacgaccaacaggacatcacaagaggaaagggtttggttgactcccttttccaagctccacaagatgctggaactcactatgctggcatgagctcctacgagtaccttagcactggacttcgccagtacttggacaacaacatggatggattttacattgctccaacttttatggacaaactngttgttcacattaccaagaacttcatgaccctgcccaacatcaaggttcctctcattcttggtatcntgggaagcaagggacaaggaaaatctntccaatgtgagcttgtctttgccaaaatgggaatcaaccccatcatgatgagtgctggaaagttggaaaagtggaatgc

SEQ ID NO: 38373 - DNA, 345 bp, Glycine max
  Clone ID: LIB3138-061-Q1-N1-C5
gcacgaggaacgatgttcttgaatctgtgcttcaatctacaccttcttctagatggggtgatttggtgttcttccagaacggaatgctggagccgtggcttgagagcaaaggtttggaagatgcaaaccaggtgttggcttattttgctgtgtccaaaattggagaaacccctattgatggtaaggactgatatcaatcctgaaggactcactgctgcatatggcaagtgggcttctattgtagctgctagattaaatgctggaagcctctcttgcaaggttcttgacaaggaggtgtttcaaaagcagatgttggagaagcttatatggatttgttcccgtatg

SEQ ID NO: 38374 - DNA, 136 bp, Glycine max
  Clone ID: LIB3138-061-Q1-N1-D1
tcgggttccttaatgtcaaaatttcaccatttgaccgaattctgatcgcccaaatgacatggtgcgtttaatggctgtattttgtgaatatttgacattaaggaactgaacttgggttttaaaagggtacactggt

SEQ ID NO: 38375 - DNA, 82 bp, Glycine max
  Clone ID: LIB3138-061-Q1-N1-D11
aaacgaaaaaaatcataaaaaaaaaaaaaaaaaaaaaaaaaggggagggctgacaaaaacgtggagagaaaaacaacccaaa

SEQ ID NO: 38376 - DNA, 435 bp, Glycine max
  unsure at all n locations
  Clone ID: LIB3138-061-Q1-N1-E1
cacaaactgcaagatgacggtcgtccacatagtctcgttctcggtcaaggacggctccaagctgcagcctctgaccgacgctctgcgggcactgcaatccagctgcaagaggcccgatggaacatcctacattcgatcgctgaagggcgggaggcagaggagtaacgaaggcaaggacaaaggcatgcaggtcacgttcgtcatggaaatggagaacgacgaggacttgcagtactatctctggaaagaccccgctcatgaagagttcaagaaagccgccggtggcgagtttggcgtgtcggacgtggtcgcgcttgatttcacggacggtgaattcaactttgcgtagccatcctgcgatgcgagacatcggtttgcgcgcttggtcangtatacgagccgcttgatgtangtatgcattaatgtacgtgtatt

SEQ ID NO: 38377 - DNA, 180 bp, Glycine max
  Clone ID: LIB3138-061-Q1-N1-E4
cattgctccaattaactgtcagctttttgtcactcatctggcagaagcagttcgaaacttgacttcatctgcaatggatgagttacgcacttttagtgaagcaatgaaagctcttatcagtacaacatcttctgatggcgctgcaattttaaaagttttgcaagctttgaattccttggc

SEQ ID NO: 38378 - DNA, 139 bp, Glycine max
  Clone ID: LIB3138-061-Q1-N1-E5
ggggagtttttgggaaggttgtcttacgtggctcataacgttaatcagccccaaaaaaaggtttggtgggagggaatttttcctttggttttaaaatttgcttttaaatgggaaaaagtttcctttccaaaaccccatt

SEQ ID NO: 38379 - DNA, 252 bp, Glycine max
  Clone ID: LIB3138-061-Q1-N1-F7
cgaaaaaaaaaaaaaaatataaaaaaaaaaaaaaaaaaaaaaaaaggggaaaaaaaaaaaaaagggggaaaaaaaaaaaaaaaaaaaaaaaaaaaaaaaaaaaaaaaaaaaaaaaaaaaaaaaaaaaaaaaaaaaaaaaataaataaaaaaaaaaaaaaaaaaaaaaaaaaaaaaaataaataaaaaggggggggccatgccctttctatgcttaaaccccggaataaaattttaaatgcttactcttattg

SEQ ID NO: 38380 - DNA, 295 bp, Glycine max
  Clone ID: LIB3138-061-Q1-N1-G4
gagtttgtgctgggccctacattaaattaccacgaaatgtcttgatccattcggtggattcaactgataagccgattaatcttgacgcgcgaatcgacaggttggcgtcaatggatgagactcagcgcaaagagaggtggaaagcgtaacaagaggtatttcttacacttggtgaaagacacgttcggcttggaacaactgttgtggctaacgggatgacataactgaatggaagggatcctgatatttacatgattacaagatcacgtgagtaagaacatgttagcaaaatgac

SEQ ID NO: 38381 - DNA, 166 bp, Glycine max
  unsure at all n locations
  Clone ID: LIB3138-061-Q1-N1-H1
catcccaatacttggctggggacgcctnaaaacgtttccagaactgggggcttatacatgaccgggagctcttgtgcactcatagacgaagtgcggctgagacttatatctacagacgcaaatcacttggctaaagactggtggaacgtttcagcaggaccacgaa

SEQ ID NO: 38382 - DNA, 284 bp, Glycine max
  unsure at all n locations
  Clone ID: LIB3138-062-Q1-N1-B7
cccctccatacccaccattgaggcccgcccgaggagaagccgaacttgttttcttctccgccatggattctttgttcaacaaaacaggtctcaagcctaaggacatagatattcttattgtcaatagcagtctttnttctcccactccttctttgtctgctatgggcatcaacaagtacaagctcatgagcaacattaagagctttaacctttccggcatgggttgcagagctggcttgatattcgttgacttggctcgtgaccttttccaagttcaccctatc

SEQ ID NO: 38383 - DNA, 198 bp, Glycine max
  Clone ID: LIB3138-062-Q1-N1-C5
atcatattctgtctatatccccgtctgtcgctcgatagaccgagattttgtgcatggctgaagttggagaggaacatagcatgttcaagcccactgttcctgaggactagcccaatgttgctgctgcgaaagactccaaaaaactgattgtggaagattgtactgcttacaggtgtgggccatgccgttttatagccc

SEQ ID NO: 38384 - DNA, 242 bp, Glycine max
  Clone ID: LIB3138-062-Q1-N1-D2
aacgaaaggatgtcaactaaaatattaatgacataagctgctgggaagtgtaataaactgatcaagataaaagctaccccatgaaagtcctaatagcagcgtgaattatagtcacaatttcttggtagcaacagcagattttgtaatttttctttctgttctttttattttctcgttatgctatggaatgacgtatatgaaagaatttgtgcttcaaaaaaaaaaaaattaattataaaatt

SEQ ID NO: 38385 - DNA, 246 bp, Glycine max
  Clone ID: LIB3138-062-Q1-N1-E1
attacagcgtctaacattgggctgcccttgttagagattagagagtggttcatcattcagaacctgcctccctcttttagcgtggggagtctaattattaatccatagcataagttcttgtttcgcattgtccttcattcttgtgtacagttttcttgacctttgatttgtaattcatttggttgtagggcattagtttactcttatctaatgtcaaaagaaatgaagggaaaataggtttatttc

SEQ ID NO: 38386 - DNA, 382 bp, Glycine max
  Clone ID: LIB3138-062-Q1-N1-G8
gaaattttcacaagaggaatttcttacagcttggtcaactcaagtgcgtcctgcaacaactctgttggctgatgggtgtccatatttgtatgcaatggtgcatgatagttcagtgtctacaataccaggtgattttgtcattggtgtcaagttgacaaccataaacaatatgtgtgcatatgggctcaatcctggtatttcaggttctcgtcttttgggcaccattcctcagtccatttcacagcaaactgtttggaatcaaatggcaacagtgagaacaccattgaattttgattctagcaagcagaacttttgtcagttttctattgaccttctcggtggaggaatcttagtggacaaaaactggagattggatcaacac

SEQ ID NO: 38387 - DNA, 186 bp, Glycine max
  Clone ID: LIB3138-063-Q1-N1-B7
cgggtttcccttggtttttaaactccctctaaaatggaaaaaggtttcttttccaaaaccccatttggttgtggaaaaaccctccaaatttgttttattgggggctggtcacaatcttcaaaaaaattttcttgaaagggaggtccaggaaaaccccaaaaggttggttcccggttgggaccaaaa

SEQ ID NO: 38388 - DNA, 172 bp, Glycine max
  Clone ID: LIB3138-063-Q1-N1-C1
ctcgagccggttggcggagacagggtggagaaaaaaatattactctcggtcctcaactgagagggaggggtatattctttgccggggacagggtggggaaaatattactctcgatcagatcaagaaccagatggttgccgacgtgaaaaaaatagggcgcgtttttttgatt

SEQ ID NO: 38389 - DNA, 90 bp, Glycine max
  Clone ID: LIB3138-063-Q1-N1-D1
aaaaaaaaaaaaattaaataaaaaaaaaaaaaaaaaaaaaaaaaaaaaaaaaaaaaaaaaaagggcgggcccccactaaagaactctgct

SEQ ID NO: 38390 - DNA, 467 bp, Glycine max
  unsure at all n locations
  Clone ID: LIB3138-063-Q1-N1-D8
ggaaaaaaaaataattttttaaaaaaaaaaaaaaaaaaaaaaaaaaagggatatttataaaagaggggggtttttttaattttttattttttttgntatttataaataaattatanggggccccccccccccttttgaccccttccccccccgatttatttcccgccccttccctccaggcttcccccctttccctttttggggccctttttaaccctgccctaaccctggccctaccctttccccttttgaaatttttttccccttccctttcccccccccctccccccccgaacctcttaattttaaccccccggtccccttttggggcccctccccccttttttttcctttcccccccttcccccttttccatttgggaaacctttcttcccacctccttttttttatcccccccccccccggaagagcccgtttccttttttcccccccccgttttttttttt

SEQ ID NO: 38391 - DNA, 320 bp, Glycine max
  Clone ID: LIB3138-063-Q1-N1-E10
ggagatattttgttggagatctcgtctttgaagtttctaagatgacttctccctacattaaatgtacagtctctttcttcatagcatttggaaatttggctgatgataccatcaattttgaggcttttccccacaagctggtgcagtttggagagattcaggaaaaagttgtattgaaattttcacaagaggaatttcttacagcttggtcaactcaagtgcgtcctgcaacaactctgttggctgatgggtgtccatatttgtatgcaatggtgcatgatagttcagtgtctacaataccaggtgattttgtcattggt

SEQ ID NO: 38392 - DNA, 69 bp, Glycine max
  Clone ID: LIB3138-063-Q1-N1-E5
caaaaaccaaaaccttattggcaaaccgcggaggtggcgaccgtggcagcgaccgtggcggtttcggac

SEQ ID NO: 38393 - DNA, 221 bp, Glycine max
  Clone ID: LIB3138-063-Q1-N1-E7
cgggttacaatctagcattttacccccctttttggggctttaaaagggttgcacaataaacgcctggctgcctcaacccgggtatccaaaaccattatttacttcttagggaaggcctgaaggccaaaccctgggaccaccccacggcaagagggaccttgcattttccaaaaaagcttcctctttgtgtaaggcagtaactccccccctggccagccagg

SEQ ID NO: 38394 - DNA, 157 bp, Glycine max
  Clone ID: LIB3138-063-Q1-N1-G3
ggaaaaaaaaaaaaaattttttttaaaaaaaaaaaaaaaaaaaaaaggaagggggtattaaaaggggggggggggtaataaatataataaatttaatgataaaatttattaatatttaaaaaaaaaaaaataaaaaaaaaaaaaaaaaggggggccc

SEQ ID NO: 38395 - DNA, 241 bp, Glycine max
  Clone ID: LIB3138-063-Q1-N1-G9
ggaaaccttcattttccccattctcaccttttttgttggaggcattgtttttgcagttgggtttttgggttttcaggtgccataaaaatgtgaatgcttaacataattgtaatactgcttgggattaaactaaacatgtaaccgcccaaatagggggcaccggccaaatagtaatatggaaccgggtaatcaaagggattttcgtgtaagtggtaatgtcagggttttggatgattttagt

SEQ ID NO: 38396 - DNA, 143 bp, Glycine max
  Clone ID: LIB3138-063-Q1-N1-H8
cttcaaggttaaaagttgctgtttggaaaaaaggctgtttaatggtcaaaattgtgatgtctgggaatgcaccagtcaaaaggagtgattgggcctaattggtacaagtgtttttaacaaacagcaacagtccagagcatttt

SEQ ID NO: 38397 - DNA, 445 bp, Glycine max
  Clone ID: LIB3138-064-Q1-N1-A5
ttgagaagggtttcaatttccttagttccattccagcttttaccaattccttggaacaaaaaaagggttgccggccaaaaaacccacctttggtgggtttgcaaatccatccgttttgccaccaggtgaatggaaggaaatggcggtggcggggcttaaccgtttgcaccggtgaagcaatatttgcacgatttctcgaagctgtttcagtactatctggataaatccactccacattccacgtacaagatgatggggactttcgtgatagcatccatctacgttttgcgcgttgtttatgtgcagggtttttacattgtctcttatggactcggaatctaccttctgaatctcttgattggttttctctcccctttggttgatcctgagctcgatccctccgactcccctttgcttccaaccaaaggctccgatgagttcaaac

SEQ ID NO: 38398 - DNA, 155 bp, Glycine max
  Clone ID: LIB3138-064-Q1-N1-A6
ttgaggcaatttttttcttcttccgtggcaatccttttatttcatgggttgcaaggcttttaaattcaatgggggtgttcttgagccactttaaaatgggactgtggaaattgagggtggttctttccccggttccttaagtggtggttcttctt

SEQ ID NO: 38399 - DNA, 336 bp, Glycine max
  unsure at all n locations
  Clone ID: LIB3138-064-Q1-N1-B2
caaaacttcattatgtttcgtgtaataatctggaaatgcaagaagcttatcttgtcaacctcgtaaatgtgttacgagaattgtatttgcacagtccagaggaagctcgccaattgagaaagaaagctctctctcgtattgaatggctgcaaaaagctgatgtgcctaccatagcacaaattggagaagtccattcgatgcaaaagatgatgaatgcttctgattcaaatgataatattgatttactggtgaacattgatttggtggggttacaaagagcangtaaagcttttcaaacaaaaattgttttgatgataagctgtgttgcttacacac

SEQ ID NO: 38400 - DNA, 260 bp, Glycine max
  unsure at all n locations
  Clone ID: LIB3138-064-Q1-N1-B4
cttgggaatctttcaagattttgaaattgctggtaatactcttatgccagctttttctgttccacaggctactgccagatcttctgaaaatgcggaatcctctgcatgatctggaatttgggttttctttcgcttgttcgtttgtttaattcaataaaggaaattaggcatgaccctcttgttgagtatgctctgcctatttgaaaatttccacacctcttttaattgtcgtaatgatgtgtgaagtgtgtgttatttnt

SEQ ID NO: 38401 - DNA, 322 bp, Glycine max
  Clone ID: LIB3138-064-Q1-N1-B5
ggcaaattggtttgtttggggtcctgtggctgcacatattcaaccttaacttcggccgtcgaatctttctggtcattggttgtttttaattctttcaaaaattcaaacccaacccaaaatctcttgggaattgctagattcactgcttcttctaacagcaaattttgggttcttctgacccaattattcatttttcccaacttggtcttggtggatttttattgggggtgtgaattccttggtggtgaagttgaaaggtatttccttttttcccttctggattcaaagtccaaatatttgcttaaattggggtatttttttt

SEQ ID NO: 38402 - DNA, 132 bp, Glycine max
  Clone ID: LIB3138-064-Q1-N1-B6
ccctaactgggggcttttttccatgggttcttcatctgcatgcacacacttgcatagttttgggaaccaaaaatttttgaagggtagcattaacaagaagttctgggaatggagatcaccaatgtcagcgag

SEQ ID NO: 38403 - DNA, 109 bp, Glycine max
  Clone ID: LIB3138-064-Q1-N1-C1
tgccattgaaagttaaaagcttaagctttccttcaacttccaacacaaaaaccttattattcctgggttgcttccggttcactgggggggctttgaaaaaaactttttt

SEQ ID NO: 38404 - DNA, 327 bp, Glycine max
  Clone ID: LIB3138-064-Q1-N1-C2
acttcggattccggttgagatgaaccttttttaccaaggtaccaaaatttgaccagccttttagccttttaacactttggaaaggcaccatgggcttttttattaaccgggattccatggaaggccaggtaatggattactccaagcgtggttgcctttcccaattaaaacaaatggggttctccatgaatgggaaaggtgctccagggtcggccggttttggtggctccttctatcagcacttttggaacatcatccaatataatattttcaactttgtctcccagtttttcttatagtcttggctttcccctacttttaactcca

SEQ ID NO: 38405 - DNA, 397 bp, Glycine max
  unsure at all n locations
  Clone ID: LIB3138-064-Q1-N1-C5
actacccaaggttttgatttatttcgaaatcgagaaatttcaagtggagcgggtggctatccgagaacaattggtcgatctggatttgagaattcttatggattcttcgntgatagaatggaaagaattaggggaagagggatccccggacaatgaaaacgaatgggaagatcgaaaagttggaagaagaaagaattttttgtttcgacgcatagaattagctaagcattttctccgaacaaatatagaaccagaatggatggttttatgtcttttaccagttcttcctcccgaatcgagaccgattattcaaatcgatgggggtaaactaatgagctctgatattaatgaactatatagaagagttatctatcggaataatactcttatcgattta

SEQ ID NO: 38406 - DNA, 362 bp, Glycine max
  Clone ID: LIB3138-064-Q1-N1-D1
ccttgctactggtatccgggtggctttgggttctaattgcaccaaaggcaatgaaaaaggtcacgtggaaccatctaaaccaaaagcacaagaagttcctgcgaaaattccttctcagcaagtgcctagcttcacatcctcttgggcagttgatgacttgttggaattaacagactttgaatcaccagacaaagttcagaagcaatcccttgagtttggagaacttgaatggctagcagatgtaggccttcttggtgaacagtttcctcatgaagctttagcggcggctgaagttcctcagcttccaatgactagcaatgttggctcacacaaagcccccaaatccttgttgtcttacaaaa

SEQ ID NO: 38407 - DNA, 482 bp, Glycine max
  unsure at all n locations
  Clone ID: LIB3138-064-Q1-N1-E1
gggattttcttatgtgccttcaacccaaaaatggggaaaaaggcaaaaggggatttgtttttggggatggtgaagagataacacttgatccgggaaccaagtgtgaaaaggcttacaacaagctaatatgtgaacttgaaaaaagtgttctacattgggtggcattgaatgtcccaaggatgagaaacttnctcgtcgcaaaaattttgacaaacctaagacgcgctgcttcactattctccctatggagtttaatcttgtggtccgtcaaaaatttttaaatttngtgaaggtcattatgaagaaaagggacaaacttagtngtcaagttggaatcaacccatactccatggaatggactggtttggccaatagattactgagtaagggcaatgatattctgtgttgcgattatgctagttttgatggtttgattaccaagcaagttatgagcaagatggcagaaatgataaacagtcttt

SEQ ID NO: 38408 - DNA, 136 bp, Glycine max
  Clone ID: LIB3138-064-Q1-N1-E10
aaaaaaaaattttaaaaaaaaaaaaaaaaaaaaaaaaaaaagagaaaaaaaaaaaaaaaagaaaaaaaaaaaaaaaaaaaaaaaaaaaaaaaaaaaaaaaaaaaaaaaggggcggccccccattattgagtttttc

SEQ ID NO: 38409 - DNA, 373 bp, Glycine max
  Clone ID: LIB3138-064-Q1-N1-F6
cggttgaggggttggggtaagttgcaccccatttttgggtaccttaattaagttggacctaagttgagggggccttaacggcattttccttccaaccggtccccttttccatttttttaattttaattaattcaaccttgttggcaatgatttaaataattctaattggcaattttttttgggggggttgggaggcctaactaatttaaacttggttggttcgaccttggaaggggatatttcttcccaaatttctcacctttccaaataagtctcacttgatctctcatataatgggttaaaagtgaaggaagacacttggaagagatggctccaaaatgcaacagttttaagggtgcttgttttggatcaa

SEQ ID NO: 38410 - DNA, 164 bp, Glycine max
  Clone ID: LIB3138-064-Q1-N1-G2
gggcgcaacgcccggataccgtcgtcaagacagctacggtgctccctcagtatccgtcaagaacggtgccatctctggtgtccactcctcaacctacaacgaagactacttcttgggcattccttacgcccggcccccactcaatggacttctattcaccgggg

SEQ ID NO: 38411 - DNA, 397 bp, Glycine max
  Clone ID: LIB3138-064-Q1-N1-G4
gtttttaacaaacagcaacagtccagagcattttgatgcatgtaagtggacaaaatcagaaccacattcctgggaattgatcttcccaatagaggtatgtggtcctaataatggttttgaaatgtggagttctgagtgggcaaatcaaacttcatggcatttgagtttccttattgacaatcccaaacagtctacagtttttgatattctcttgggaatctctcaagattttgaaattgctggtaatactcttatgccagctttttctgttccacaggctactgccagatcttctgaaaatgcggaatcctctgcatgatctggaatttgtgttttctttcgcttgttcgtttgtttaattcaataaaagaaattaggcatgacccttcttgtgagt

SEQ ID NO: 38412 - DNA, 268 bp, Glycine max
  Clone ID: LIB3138-064-Q1-N1-G5
ggcggaaccaaagagggaacatgatctgctggatgtgggaggtcaggttaatgaagaggctgagggcattgagaatgctaaatggatttccatcaaagcagttctgcttctgctattgggtactattattgctgctgcgtttgctgatcctctggttgatgcagtggataacttttctgaggctacaagtattcctgctttcttcatttccttcatttttctgcccttagcaaccaattcaagtgaagcaatgtcagctattattttt

SEQ ID NO: 38413 - DNA, 97 bp, Glycine max
  Clone ID: LIB3138-064-Q1-N1-H2
cttccttagcttcgaatttcggttcaggcctggtttttcaggttctcgtctttggggcaccattcctaagtccatttaacagcaaactgttgggaat

SEQ ID NO: 38414 - DNA, 288 bp, Glycine max
  unsure at all n locations
  Clone ID: LIB3138-065-Q1-N1-H4
ggaacaaaaaaaggcaagtatctttttccggaaaaccgggtgtggattggatatttccaatttcaatgcaaaaatccggttatgggtccaacggaatatacaggtaactcagcctttcatcgttttccaaaaactcaaactctactcgttccatctttcacagagcgagcttcataaacagcttatgtcaacttcaaacattttccgactaatgtacttngcgtacgctctcgtcgatacaaaacactgtcttctcgtccacacatcgtcatgctgttccgcgcgctt

SEQ ID NO: 38415 - DNA, 51 bp, Glycine max
  Clone ID: LIB3138-066-Q1-N1-B6
aaaaaaaaaaatttataaaaaaaaaaaaaaaaaacaaaggggggagatact

SEQ ID NO: 38416 - DNA, 340 bp, Glycine max
  Clone ID: LIB3138-066-Q1-N1-E7
tgtaaaaaaaattttttttatacagaaaaaaaaaataaaagggggggaggaattaaaataaaaaaatgaaaaaaattaaaaaaaaatttaaaaaaaaaaaaaattttataaacaaaaaaaaacttataaaaaaaaaaaaaaaggggcggcccccgactatggacctctccaccccgggatttaattccggcccggtccctgagggcgacccacctttccttattgggagtcaatttaaaccttggcgaaaacatggccatatctgttcccgggttaaaatgtttttccgttacaatttccacacattttacaatcccgaaacctaaaattgaaaaccctg

SEQ ID NO: 38417 - DNA, 336 bp, Glycine max
  Clone ID: LIB3138-066-Q1-N1-F4
gttctagatcgcgagcggccgctgcgcggctcgagtgcagttggcggtcgctcctcagatatcaacaaaaggattcgcacagcacttgggaaaggtaagaaaattgtttttcttactagagttgatccttttccagtagctttactggctgttctttttggcgttaagaatgaaattctgagttctaacgccactaatcctatgctgacgcgacttcttgagaactgtaagagtctcaaatatctggttgatgagtgtccttttgcatttgtgaactagtatgtagtattttattcacttaaataaagcgcattactatgtgcaatgagtgtgttt

SEQ ID NO: 38418 - DNA, 88 bp, Glycine max
  Clone ID: LIB3138-066-Q1-N1-F8
aaaaaaaaaattttaaaaaaaaaaaaaaaaaaaaaaaaggagagaaaaaaaaaaaaaaaaaaaaaaaaaaaaaaaaaaaaaaaaaaaa

SEQ ID NO: 38419 - DNA, 160 bp, Glycine max
  Clone ID: LIB3138-066-Q1-N1-G6
cccaacgatgttacaactaccaataggttgttttgaaagtagggaattacatggggtattgtatttattgtttcttttcttcactattgattcgggccattttgatgtatgataagattgggaaaatgaatgctaggattgtgaatgtactgtatcaagt

SEQ ID NO: 38420 - DNA, 328 bp, Glycine max
  Clone ID: LIB3138-066-Q1-N1-H12
attgaggttgggcggccatatctgcatgcaatggaggatgatagctctggggttgcaatgccaggtagagctgtcattggtagcaaattgacaaccataaacaatatgtgtgcatatgggctcaatcctggtatttcaggttctcgtcttttgggcaccattcctcagtccatttcacagcaaactgtttggatcaaatgggcacagtgagaacaccattgaattttgattctagcaagcagagcttctgtcagttttctatagaccttctcggtggaagaatcttagtggacaaaactggagattggatcacacttatacaaaattc

SEQ ID NO: 38421 - DNA, 517 bp, Glycine max
  unsure at all n locations
  Clone ID: LIB3138-069-G10-F2A
tcaaccgcaaacctcaccgttctggtcgtaggaagaaaaacaaaagaaggtgggaccccaattatccaaagccgaataggagtggctataacttcttctttgctgaaaagcattacactctcaaaactctctacccaaacagagaaagggagtttaccaaaatgattggccagtcatggaacagtcttagcccagaagaaagaatggtttatcagaacattggcttaagagacaaagaaaggtacaagagagaattgacggagtacaaagagaagatgaagcttaggcagacctcagaagttggacgtccatagaatctcattggtacccgtttgtggaggcgaaagaatggcttagaaaatttttataatctgttgacttttacgtgcatattgttgtggataatggtccactggactgtggtctacaaaactatngtttttttcttttcaaaagaagaaactagtggctattgtagtcagagacccttcatttcgttaatcaataatatcctccc

SEQ ID NO: 38422 - DNA, 522 bp, Glycine max
  Clone ID: LIB3138-069-G10-R2A
gggaggataattaattgattaaacgaaatgaaagggtctctgactaacaatagacactagttttctcttttgaaaagaaaaaaacaatagttctgtagaccacagtccagtggaccattatccacaacaatatgcacgtaaaagtcaacagattataaaaattttctaagccattctttcgcctccacaaacgggtaccaatgagattctatggacgtccaacttctgaggtctgcctaagcttcatcttctctttgtactccgtcaattctctcttgtacctttctttgtctcttaagccaatgttctgataaaccattctttcttctgggctaagactgttccatgactggccaatcattttggtaaactccctttctctgtttgggtagagagttttgagagtgtaatgcttttcagcaaagaagaaagtattggccattcctattcggcttggataattggggtcccaccttcttttgtttttcttcctacgaccagaacggtgaggtttgcggttga

SEQ ID NO: 38423 - DNA, 176 bp, Glycine max
  Clone ID: LIB3138-069-P1-N1-A5
cggtcgagctgactgtcgtgtcttcttggctttcttgctcaggaacaacatggatattgtatcacgagcgttggcatatatcgtggctatacgtgggcccaaatttaacacaccttggtcaagtgctttttggaaaaggcggaccaatgtggaaaccgctctttgtctgtaccccc

SEQ ID NO: 38424 - DNA, 199 bp, Glycine max
  Clone ID: LIB3138-069-P1-N1-A6
caaaaaaaatacaataaaaaaaaaataaaaaaaaaaaaaaaaaatggatgaatattatattaagagcaaaaacaatattcataatataatactaaatcaaacaattataaacaccttacacaaattaatattattatatttaaaaactaataaaaaatactaaatttataataattctcgcgttcctttctttttccat

SEQ ID NO: 38425 - DNA, 310 bp, Glycine max
  Clone ID: LIB3138-069-P1-N1-B1
gggtgcattggtccattatctatcgttaatggaaagggaagtagcacttccattttccattttgcatttcccagtagagtaggcaaagccaaatccaaagggaacacgttcattcaattgcaattatttatattaattaataataattcacaaattgtgtgtggccaggacttcaatacccttccttaactacccgacaaatttttcatttccggcattttcttccaggcttgtaccccagataccttaaattcgcttcataacacaatttcggttctttctttggcgacccacttgggtcttttttttt

SEQ ID NO: 38426 - DNA, 83 bp, Glycine max
  Clone ID: LIB3138-069-P1-N1-B12
tgaaaaaaaaatttaataaaaaaaaaaaatataaaaaaaagaaaaaaataaaaaaattggggtaaaataaaaaaataaataag

SEQ ID NO: 38427 - DNA, 73 bp, Glycine max
  Clone ID: LIB3138-069-P1-N1-C1
ctctagccgctttttcatttgatatatatatatatatatatgagagttaattaatatatattattggaggagg

SEQ ID NO: 38428 - DNA, 128 bp, Glycine max
  Clone ID: LIB3138-069-P1-N1-F9
atttcaccatcttttcttaagacagagaattgtgggatccggcttgcacaaaagcgatggctttgtcatataatccaaacctttgatttgattcatggagattggtatctttgatgccccctggatat

SEQ ID NO: 38429 - DNA, 304 bp, Glycine max
  Clone ID: LIB3138-069-P1-N1-G3
cggaaagtgagcgtcaaagaacgaaatgacttttcggggacgaagttggtggcataggcccaggcgttgttgttgacagggtcagcaaggtgatcggcgaggttctccaatggaccctttccggtgacaatggcctgaacaaagaagccaaacatagagaacatggccaatcgttcccggaaagtgagcgtcaaagaacgaaatgacttttgagagtttttagatttgtgtttggtgaagtactttagataatgtgaataattttgggtttcccgaattcaacttaatgttacttgctttttac

SEQ ID NO: 38430 - DNA, 183 bp, Glycine max
  unsure at all n locations
  Clone ID: LIB3138-070-P1-N1-A2
gtggagcggtagttggttttggaattggatccttttttttttctggaataataacaatggatgggggaaaacaccaaattaaaaagattgggccttgtgaatagttgttgggtcccctcgatataaatctaaaaggccgttgtgggnagaaggaataataaatatcagtctttacatattatt

SEQ ID NO: 38431 - DNA, 190 bp, Glycine max
  Clone ID: LIB3138-070-P1-N1-A3
gggccaaacttgggattgggtcacacttattccaaaatcttccattagtaacttggtgagaggtgctgcttggaagaaaagctgttttatgggcaaaaatgggatgtctggggatgccgcagtcaaaaaggggggttgggccttattggtaccaggggtttttacaaacagcaacaggaccaagcatttt

SEQ ID NO: 38432 - DNA, 397 bp, Glycine max
  Clone ID: LIB3138-070-P1-N1-A4
ggatcatccacaagattgaggagaccttccatgtgggagggcacaagaaagaggagcacaaaggagaacaccatggtgagcacaaaggtgaacacaaaggagaacaccatggtgagcacaaaggtgaacacaaaggagaacaacaccatggggagcacaaggagggacttgtggataagatcaaggacaagatccatggtgatggccatgacaagggtgagaaaaagaagaagaaggacaagaagaagaaggagcatggacatgaccatcatggtcatagcagcagcagtgacagtgattagatcttatatgttaagcaggtgtacggtacgatggtagtgaggagccagaatccctcttcctgctttatgatataatacaaataaaatagcgattc

SEQ ID NO: 38433 - DNA, 393 bp, Glycine max
  Clone ID: LIB3138-070-P1-N1-A5
cgtctttgaagtttttaagatgacttctccctacattaaatgtccagtctctttcttcatagcatttggaaatttggctgatgacaccatcaattttgaggcttttccccacaagctggtgcagtttggagagattcaggaaaaagttgtattgaaattttcacaagaggaatttcttacagcttggtcaactcaggtgcgtcctgcaacaactctgttggctgatgggtgtccatatttgtatgctatggtgcatgatagttcagtgtctacaataccaggtgattttgtcattggtgttaagttgacaaccataaacaatatgtgtgcatatgggctcaatcctggtatttcaggttctcgtcttttgggcaccattcctcagtctatttc

SEQ ID NO: 38434 - DNA, 391 bp, Glycine max
  Clone ID: LIB3138-070-P1-N1-A6
attgaccttttcggggggggattttaaggggccaaacctgggaatgggtcccacctaatccaaaatttccaaattggtaactggtgagagttgctgcttggaagaaaggctggttaatgggtcaagattgtgatgtctgggaatgcagcagtcaaaaggagtgattgggcctcattggtacaagtgtttttaacaaacagcaacaggtcagagcattttgatgcatgtaagtggacaaaatcagaaccacattcctgggaattgatcttcccaatagaggtatgtggtcctaataatggttttgaaatgtggagttctgagtgggcaaatcaaacttcatggcatttgagtttccttattgacaatcccaaacagtctacagtttttgata

SEQ ID NO: 38435 - DNA, 157 bp, Glycine max
  Clone ID: LIB3138-070-P1-N1-B2
caatggacaacccacgacgggtttttgctttctacaaaggatcaccttcacaacacaagggttcccaatacaaggcgctttcacatctttcctcaacccaatgcgccactaaaagagaacttgagagtgacaagagattcttctgaggcttaagatc

SEQ ID NO: 38436 - DNA, 394 bp, Glycine max
  Clone ID: LIB3138-070-P1-N1-B3
ttcaggttttcggcttttgggcaccattccctaatccattttacagcaaactgtttggaatcaaatgggaacagggggaacaccattggattttgattctagcaagcagagcttttggtaggtttctattgaccttttcgggggggggatcttagtgggcaaaactggggattgggtcacacttatacaaaattctccaattagtaacttgttgagaagtgctgcttggaagaaaggctgtttaatggtcaagattgtgatgtctgggaatgcagcagtcaaaaagagtgattgggcctcattggtacaagtgtttttaacaaacagcaacagtacagagcattttgatgcatgtaagtggacaaaatcagaaccacattcctgggaattgatc

SEQ ID NO: 38437 - DNA, 385 bp, Glycine max
  Clone ID: LIB3138-070-P1-N1-B5
caagagaaactttaaccaaatgtttaatgttttgggggtggctcctgaggacaaggcgagtttattggtcacaacttcattatgtttcgtgtaataatctggaaatgcaagaagcttatcttgtcaacctcgtaaatgtgttacgagaattgtatttgcacagtccaaaggaagctcgccaattgagaaagaaagctctctctcgtattgaatggctgcaaaaagctgatgtgcctaccatagcacagattgaagagttccattcgatgcagaggatgatgaatgctcctgattcaaatgataatattgatttactgttgagcattgatttgttgggtttacaaggagcaggtaaagcttttccaaacaaaattgtttttgatga

SEQ ID NO: 38438 - DNA, 387 bp, Glycine max
  Clone ID: LIB3138-070-P1-N1-D2
ggaaacacaatgtcatgagagggaatggcatggtatttattatattatatatctggcaacaatatatattatatattggaactatttgataggtacccttaatagagagattaaacagactcactatacagctccaaaagatttgtattttggttaataaacttagtaaaggaccatatgatcagcagttattagtaatttgggttagttattgtgctaatatgcatcttgcattttatggggaaagatagaggtaaggcttaagaatttgatatacctttatatgggggggtttttgtcataggcattggctttcattataatatgcattaattttaaaaaattactagtcattttgatgtttcttgttgaagaaaccacatattt

SEQ ID NO: 38439 - DNA, 395 bp, Glycine max
  Clone ID: LIB3138-070-P1-N1-D4
ggagctagggaagtgtatgcatgctgcactcatgccgttttcagtcctcatgtaatggtggatgatatgattgacactgctgggaccattgctaagggtgcagcactattacatgaggagggagctagggaagtgtatgcatgctgcactcatgccgttttcagtcctcccgcaattgagaggttgtccggtggcttgtttcatgaggtgattatcacaaacaccattccagttgcagagaagaactatttcccccagttaactattcttactgtagcaaacctattgggtgaaacgatttggcgtgttcatgatgacagttctgttagtagtatttttcagtaaacaatcccaatgaccttttgcagttaatttaatcaataaatgtttttttt

SEQ ID NO: 38440 - DNA, 395 bp, Glycine max
  Clone ID: LIB3138-070-P1-N1-D5
aggaaagtgaaagaaagtggacacagccaactgccccagttcctagttgttttagctcacattttacggcgtttaaatttagagagtttgggggctccaaatccgagttggaacttacaaagtatattctaaagaatgcaaaggtcctcaagacagtgacagtaaagatggcgaagtggttggagccaaataaaacaagtcatgctatgacaaaattggattcgttactatcatcctcaaagtattgtcgtttggcaaattatcaaattctgtgccaagattttccttgatgtatgcaattcgttcaggttgatgacaagcgatgatcactatgcggtgacaatttgaatggtaaaagagtgtttgacatcaatgatgttagtagtagtttctgt

SEQ ID NO: 38441 - DNA, 394 bp, Glycine max
  Clone ID: LIB3138-070-P1-N1-E5
gaaaatggaagggggggttgtggttgtgaccaccaccatcaccacctttgaatccaaggcaccttccaccataaccattaaggccattttcagccttctaatggaaagcattgataatgagaaattgtgatgggggtggaagcaagaagagagttatttctcttggtatgggtgacccaactctcaccacattgttccacacaccaaaggttgttgaagaggctgtcgctgatgctcttcaatctcgcaagtttcatggctatgctcccactgctggacttctccaggctagaattgcaattgctgaatatctatctcgtgaccttccttatcaattatcacgagatgatgtcttcatcacttgtggatgcacacaagccattgatgtttcggt

SEQ ID NO: 38442 - DNA, 400 bp, Glycine max
  Clone ID: LIB3138-070-P1-N1-E6
ttcaaggggaatggccgcgcccccttgaagttggttaggttaataaccaggttcggaaaaagttcccgaaccagggaaaaaataaggaaaaggtccaagattttttccaaaaacctaaggttatccgcttccacaacaagaaccgcttgccctacactctctctgttaatcattttgctgattggacttgggaggagttcaaaagacacagactaggcgctgcccaaaattgctctgccactcttaacggcaaccacaagctcactgatgctgttcttcctcccacgaaagactggaggaaagaaggaatagtgagtgatgttaaagatcaaggcagctgcggatcatgctggacattcagcacaactggggctttagaagcagcctatgcacaagcatt

SEQ ID NO: 38443 - DNA, 80 bp, Glycine max
  Clone ID: LIB3138-070-P1-N1-F4
ggggtgttggtccttaagttaagcagccctacttaactgccaaaaattggtttgtttggggcttttttcaatttcttggg

SEQ ID NO: 38444 - DNA, 390 bp, Glycine max
  Clone ID: LIB3138-070-P1-N1-F6
gaagaaccctgggtgcacttgctttgactggtaaagtgcattacagaatgccttttgaacctgttatgcctggagtgacctttttagagtttggaactgctcaggctgcagttgaattaattaagcagggcaagattgctgcagtttttgttgagcccatccaaggagaaggtggaatttacagtgctacaaaagaatttctacagtctctacgtaatgcttgtgatgaaactggggcacttcttgtgtttgatgaggttcaatgtggtttaggtagatcagggtttctctgggcccatgaagcatatggtgtcttcccggatatgatgacccttgcgaagcctcttgctggaggcctacctattggagcactcttagtgactgagagag

SEQ ID NO: 38445 - DNA, 349 bp, Glycine max
  Clone ID: LIB3138-070-P1-N1-G2
gggaaaaaaaaaactacttctttaaaaaacaaactaaattcattctgccgtcaaacctccatggcagtattccctaggtgctgtcttcaatgttccaacacatgaagaaactggggcgggtactcaccaactcttttcacgaactggaaaaagaggtaatggactccatggctgaattatgcctcataacaacagggggaacactagttcctccatcgctactcagacaagacgaaaacatcgaaagagacgtcggaatcgaaatgtggaagccacaagactcgtgcatggagtggctaaaccagcaaccttcctattcgggtaactacgttacctttgggagcattat

SEQ ID NO: 38446 - DNA, 405 bp, Glycine max
  Clone ID: LIB3138-070-P1-N1-G3
ctaggaattcggttcgaggtcaagttgacaaccatatttaatttgtgtgcatatgggctcaatcggtggtatttcaggttctcgtcttttgggcaccattcctcagtccatttcacagcaaactgtttggaatcaaatggcaacagtgagaacaccattgaattttgattctagcaagcagagcttttgtcagttttctattgaccttctcggtggaggaatcttagtggacaaaactggagattggatcacacttatacaaaattctccaattagtaacttgttgagagttgctgcttggaagaaaggctgtttaatggtcaagattgtgatgtctgggaatgcagcactcaaaaggagtgattgggccttattggtacaagtgtttttaacaaacagcaacag

SEQ ID NO: 38447 - DNA, 336 bp, Glycine max
  Clone ID: LIB3138-070-P1-N1-G4
gggcgtttaccagtttgtaaacaaatacggggctaatgtcgatggttacagtcctatttacgacaccaaggactggtttccaaccggtgatgtctacgctggcggtacgactggcttggctatctgggctgtgactctacttggtcttcttgctggtggtgcacttcttgtctacaacacaagtgctttggcgcaataaactttgcaaatcgatgttttaagctcaaacttagtccatgtaactatctaaaaatgaagaattattcatgaagtactttgtggatacgtgttccttctgttctataaatgtgtggatgtgaaaaatcttgtgttgtt

SEQ ID NO: 38448 - DNA, 317 bp, Glycine max
  Clone ID: LIB3138-070-P1-N1-G5
gtggtggtgtttgtttggaaaaaacaggtgggggtctttggtgggggatactcactcaacccgttggaggtgcagggtctaatcagatcccaaatgatcaactttgggcttctcattagtcgccaagggaaggggagattgacaaaatggtactcaccttattctcagaaagaaaggggtaaggggattcgtgagctcaatggaatgattcttttccgtgcgcccaagcaatgtaattttgtggaatggcgaggacataaagttgtttataaaaagtatgctagtctctatttctgcatgtgcattgatcaaagatg

SEQ ID NO: 38449 - DNA, 270 bp, Glycine max
  Clone ID: LIB3138-070-P1-N1-G6
atgccggggaaattttctttcatactgagactccccctcatgctgagagaatggctactgtcatatctggaggagctggtgcaaagaatgcatgatctggaatttgcgccaattttcgcttgttcgtttcgagaattttcgtggagatcttcgccatgaccctcttgatgagtatgctctccctatttaaaaatccccacacttctttatatcattgtgaaaattggtgaagtgtgtgtctattttaaaaaacataattacatcaatact

SEQ ID NO: 38450 - DNA, 388 bp, Glycine max
  Clone ID: LIB3138-070-P1-N1-H1
caacagtgagaacaccattgaattttgattctagcaagcagagcttttgtcagttttctattgaccttctcggtggaggaatcttagtggacaaaactggagattggatcacacttatacaaaattctccaattagtaacttattgagagttgctgcttggaagaaaggctgtttaatggtcaagattgtgatgtctgggaatgcagcagtcaaaaggagtgattgggcctcattggtacaagtgtttttaacaaacagcaacagtacagagcattttgatgcatgtaagtggacaaaatcagaaccacattcctgggaattgatcttcccaatagaggtatgtggtcctaataatggttttgaaatgtggagttctgagtgggcaaa

SEQ ID NO: 38451 - DNA, 135 bp, Glycine max
  Clone ID: LIB3138-071-P1-N1-A11
ttccttatccgaattcaaaccctcataaacatcaaaaacctgccgtgccttcatactacgcgggggtggcacaaactatatccttttgcactatatctataccatatcacaatcattgtattctaagctcaatgt

SEQ ID NO: 38452 - DNA, 143 bp, Glycine max
  Clone ID: LIB3138-071-P1-N1-A7
ttttcgagcaccatgtgcacgttagcacaaactatcatggccacggaaacggcaggggcctcctcgggcgtgggggggacgcgtctccttgaggcttactcctgagcggtgcgagtgcactccccattcagcttctgcaagaa

SEQ ID NO: 38453 - DNA, 432 bp, Glycine max
  unsure at all n locations
  Clone ID: LIB3138-071-P1-N1-B1
ttattcgagattggccttcttggtggaggaatctcagcggacaaaactggagatgggatcacacttatacaaaattggtgcaattagtaacttgttgagagttgctgcttggaagaaaggctgtttaatggtcaagattgtgatgtctgggaatgcagcattcaaaaggagtgattgtgcctcattggtacaagtgtntttaacaaacagcaacagtccacagcattttgatgcatgtaagtggacaaaatcagaaccacatttctgggaattgatcttcccaatagaggtgtgtggtcctaataatggttttgaaatgtggagttcttagtggggcaaataaaactttatggtcatctgagttttctttattgacaatcccaaacagttttacaagttttgatattttttttggtaatttcttaaaaattt

SEQ ID NO: 38454 - DNA, 165 bp, Glycine max
  Clone ID: LIB3138-071-P1-N1-C10
tttattttatcttttctatttgctcttattcatacccctttggggcatccttaaaatatgtggactttcccaccaactttttctctcacctaaaattattttattcttacaaaaaatttttttttattcttacaaataataaattttcccctaaacccatatttt

SEQ ID NO: 38455 - DNA, 391 bp, Glycine max
  Clone ID: LIB3138-071-P1-N1-C8
tagggtttgttgttcaataatggcaatttgtaagaaagatggttggagagttgaatgtggaagcccttctggatttccgctcacagttatttgtaatagcatttttaatgagatgctcattagatatagctatgaaaaattactgcgccaggctaaagctccaagtatgtttttacaatccttcaaaaattttgtttctttgtgttcgtatggcgatgttaacttaattagtgttcatgaatattccaagccttactttagtggttctaaaatttaaaagctttctagctggttattattttaaccattcctgattgtttttaccaaaactattttttttttaccactctaaaatagctatctttttaaaattttttttacaataaacctt

SEQ ID NO: 38456 - DNA, 91 bp, Glycine max
  Clone ID: LIB3138-071-P1-N1-D10
tagatcataaccacattcctgggaattgattttcccaattgaggcgtgtgcacctaatgagggagctgtaaaaattatcatctgatatgtt

SEQ ID NO: 38457 - DNA, 214 bp, Glycine max
  unsure at all n locations
  Clone ID: LIB3138-071-P1-N1-D9
gtgttcagaaccttgcaattggtgagttnaaaaatagcaagcnnctcaagctgactgtcaatgcattgtnngggagcgtatagannaattatcaattgnnatagtttcgcaaggtccctgattggcaacccatagttggtgccaatgctttttggtgtgataccttaatcataccaatcctgaaaatgcagttctgtagtattttntgttgcgc

SEQ ID NO: 38458 - DNA, 405 bp, Glycine max
  Clone ID: LIB3138-071-P1-N1-F11
gttgccattctcatcctcctctgtctctctctctccaccattggcatggatccttacaagctccggccatccagcgccttcaattctcccttctggactacaaattctggtgctcctgtttggaacaacaactcctctttaaccgttggagctagaggtccaattctgcttgaggattatcatcttgtggagaagcttgcaaactttgacagggaacgtatcccagaacgtgttgtccatgccaggggagctagtgcaaagggtttctttgaggtcacacatgacatttctcacctgacatgtgcagatttccttcgagcccctggagttcagacgcctgtaattgttcgtttctcaactgtcattcatgagcgtggtagccctgaaaccttgagggaccctcga

SEQ ID NO: 38459 - DNA, 166 bp, Glycine max
  Clone ID: LIB3138-071-P1-N1-F2
aattacttataacacatagcacaaagcaaagctcatcccttgaggggagagaatgtcaacaggtggggggtggctctctaatccccatccttggctggcaaggccgtgaagctgggcccatcatccccagaagtgggaagggtgagcatgaggaagaccgtcacca

SEQ ID NO: 38460 - DNA, 76 bp, Glycine max
  Clone ID: LIB3138-071-P1-N1-G10
catgatgcatgcaggctttatgttttatctgctattacgctggcaagcaaatatgtttggactgtgtttgatgctc

SEQ ID NO: 38461 - DNA, 413 bp, Glycine max
  Clone ID: LIB3138-071-P1-N1-G11
tagcgagaaaagacaagtctctatagaggaaggggaagcagaagcacgtgagctcaatgtacgataaattcgataacacctatcaggctacaattggtattgattttctatcaaaaactatgtatctcgaagatcgaactgttcgactgcagttgtgggatacagctggccaggaaagatttagaagtcttattccaagctacattagggactcatctgtagctgttattgtatatgatgttgcaagccggcagactttcctaaatactgcaaagtggattgaagaggtgcgaacagagagaggcagtgatgtcattattggtcttgttgggaacaaaactgatcttgtcgagaaaagacaagtctctatagaggaaggggaagcaaaagcacgtgagctcaatgtcatgttc

SEQ ID NO: 38462 - DNA, 135 bp, Glycine max
  Clone ID: LIB3138-071-P1-N1-G12
tatgagcaagcagatcttttgtcagttttctattgaccttctggggggaggaatcttagtggacaaaactgcacattggatcacacttatacataattctccaattagtaacttgttcatagtttctgcttggaa

SEQ ID NO: 38463 - DNA, 175 bp, Glycine max
  Clone ID: LIB3138-071-P1-N1-G9
ctttatgtgaaggcttaatgcccgtcaatagttcattcaaatgttaaacattacatggtgatggattcattccatcctctctcttcttccttcccacactttttttattttcctctcataatttattttccttctcattttatttctttcttcccctttctacttttttttcacc

SEQ ID NO: 38464 - DNA, 103 bp, Glycine max
  Clone ID: LIB3138-071-P1-N1-H3
cactatttttttgcaatactttcatcacagacatattcattagatagggctctcaaaaatgagtgcgcggcgctaaagctccaattttctttttacactactt

SEQ ID NO: 38465 - DNA, 74 bp, Glycine max
  Clone ID: LIB3138-071-P1-N1-H6
ttattaaaaaaagaattatattgaaatttttcctaacaactataaaagacaaaaaggggtatgtttttaaaaat

SEQ ID NO: 38466 - DNA, 272 bp, Glycine max
  unsure at all n locations
  Clone ID: LIB3138-072-P1-N1-A1
agttcaagaaaacccaaaagaagaggggtattgagacaaaggagggatccttaatacaatgaggttcaggctcagatggaaacaaattcgtttaaattgtctcttgatgatgttgaaacttctaaaggtttcatgttggatctgtaaatttctcaatctaaaattgcgctgtccnngttttcagtttgaggaaccattctgcgtattgatctattggcaaattttatgacagggttcatttttagagcatgatttcgatttgcagagcactt

SEQ ID NO: 38467 - DNA, 403 bp, Glycine max
  Clone ID: LIB3138-072-P1-N1-A2
atattcggctcgaggaagaagtatccgatggcgtcagtggcgaagaacgtactcaaggcggtcagagaaaagggggtcggcgctttcctcatggagctcaaggatgaaggctacctgagatgccttccggatggaaatctcttgcaaaccaagatccacaatattggggcaacacttgttggtgttgataaatttggtaacaagtattatgagaagcttggagacacacagtttggaaggcacaggtgggttgaatatgcagagaagactagatataatgcctctcaggttccagctgaatggcatgggtggttccaatttatcactgatcacacaagagattggctctttttacttgaacccgaaaggtatggatttgaacacaaagaaatatttgtcttgg

SEQ ID NO: 38468 - DNA, 263 bp, Glycine max
  Clone ID: LIB3138-072-P1-N1-B10
tgattaaaaaaataatttaaaaaaaaaaaaaaaaaaaaaagagaaggaaaaataaaaaaaaggagggaaaaaaaaataataaaataatatataaaaaataaaaaaaaaaaataaaatttaaaattttttttttttttttggggcgcccccctttatttagtctttcccccccgaattttttttctttcccgttctttgtagggaatcattttttctttttattgggtcttttaagattttgggatattaattgaatatttttt

SEQ ID NO: 38469 - DNA, 402 bp, Glycine max
  Clone ID: LIB3138-072-P1-N1-B11
tggtaaaagctaggtgagagaattacggcccttcatcagggcgtgtccccatttgggaagacgtgacacggcctctgtcttgttagaagctattgggtatatcagattccttcagagtcaaattgaggctcttagcttaccatacttgagcggtggatcagggaacacgaggcagcaacattctgttcaaggagagaagagttgtatattccctgaagaccccggtcagctgctggatgaaaactgcttgaagaggaaagcagctggagagccggatactcaagaagaaccaaagaaggggctgaggagtagagggttgtgtctggtgccagtggtatgcacacttgcagttggaagtgacaatggagcacattattgggctccagccctaggagggggctt

SEQ ID NO: 38470 - DNA, 137 bp, Glycine max
  Clone ID: LIB3138-072-P1-N1-C10
tatattaaaaaaatatattaaaaaacaaaaaaaaaaaaatataaattgtgcgttttacaaaatagggggctgctcctacccaaaaattaattccttaccttaaccttcattcctcctctcttttcctatatttattt

SEQ ID NO: 38471 - DNA, 365 bp, Glycine max
  Clone ID: LIB3138-072-P1-N1-C11
ttagctcgagccgaatcggctcgaggttctgagtgggcaaatcaagcttcatggcatttgaggtggcttattgacaatcccaaacagtctacagtttttgatattctcttgggaatctctcaagattttgaaattgctggtaatactcttatgccagctttttctgttccacaggctactgccagatcttctgaaaatgcggaatcctctgcatgatctggaatttgtgttttctttcgcttgttcgtttgtttaattcaataaaggaaattaggcatgaccctctttgtgagtatgctctgcctatttgaaaatttccacaccttttttaattgtcgtaatgatgtgtgaagtgtgtgttattt

SEQ ID NO: 38472 - DNA, 371 bp, Glycine max
  Clone ID: LIB3138-072-P1-N1-C12
tgtgtacaatggaaattcaactgcagaacaatcataattatgtttgttggtaggagtaaacctttgggaagaaaacatgagatgagttcttgaacagatgtttcttagaattaaagcatctcatgtaagcataaatcaaaaacaaacttctaatctttcatgtcatgaaacgaacaaaggcatttggctcctctagagtaagtaatctcagctgttgataaaaaaaaaaatcaacggttaatatttcaattaatccacaattggttatgcacttatgcatgcacatgtaatatttactgttgattttctcattgacaactgagatttgttactttgtcctttaaagtgaaaattcaaacaaaggggttggt

SEQ ID NO: 38473 - DNA, 97 bp, Glycine max
  Clone ID: LIB3138-072-P1-N1-C8
tttctttagcctattcttctccacaaaaaaaaaaaaatcacgtaggtgtttaaaaaaaaaaagggaggaaataaaaaatttatattcatataccaaa

SEQ ID NO: 38474 - DNA, 411 bp, Glycine max
  Clone ID: LIB3138-072-P1-N1-C9
tagaaattgaaaagctttctagctagtcataacatcaccatggagctgatggtattgacaaaactggtgcaactttgcaatttagaaagttagcagattgtgattttctcaagagaaactttaagcagatgtctaatgttttgtgggtggctcctgaggacaaggcgagtttatggtcacaacttcattatgtttcgtgtaataatctggaaatgcaagaagcttatcttgtcaatctttgaaatgtgttacgagaattgtatttgcacagaccataggtagcttgccaatttagaatgaaagctttctcttgtatttgatggctgcataaagctgatgtgcctaccatagcacatattgaagagttccattcgttgcataagttgacaaatgcttcttgattcaaatgat

SEQ ID NO: 38475 - DNA, 313 bp, Glycine max
  Clone ID: LIB3138-072-P1-N1-E10
tagaaaaaaaaaaaattataaaaacaaaaaaaaaaaaaaaagggggggaataaaaaaaaggggggagaaaaaaaaaaaaaaaaaaaaaaaaaaaaaaaaaaaaaaaaaaaaaaaaaaaaaaaaaataaaaaaaaaaaaaataaaaaaaaaaaaaataaaaaagcggcccccccctccttattaacctttatccccccccaaaaaaaatttcaccctctccctctaggaccacaatttttctttaaaataataattataaaaaatcggctaaataatgccaaatcgtttcccttttgaaaaatttttttctctt

SEQ ID NO: 38476 - DNA, 386 bp, Glycine max
  Clone ID: LIB3138-072-P1-N1-E4
aagcggttctagaatgaacactggctatggtgcccgtactccggaggtggaatgctcaagttgggggggtgttgtggaagcacacaacatctttggctttgagaccattcctgaagagtgcgttgaagcaacaaaggaatacatccatggcgaacaatatagatcagactccaaaacagttaaccaacaagcttacttttatgccagagaccttgaagtccataccaaggtcacatttgtgttcagtatacatggcaccgtactttcttatattctattctacatataacatttatctttggttggagcaatttacttttccctttttgaggcaaggtttatcttggtaatatacatttattattcccattgaatttattctatat

SEQ ID NO: 38477 - DNA, 116 bp, Glycine max
  Clone ID: LIB3138-072-P1-N1-F12
ttgctaattcttctattttttcactcgatgacacttccagggtggggtaaaaactgcatgatgggcaggatacttatctctataaccaataaacccatctctatacatttttccca

SEQ ID NO: 38478 - DNA, 61 bp, Glycine max
  unsure at all n locations
  Clone ID: LIB3138-072-P1-N1-G12
tngatttaaaaaaaaaataaaaaaccaaaaaaaaaaaaaaaataggggaaaaattaaaaat

SEQ ID NO: 38479 - DNA, 235 bp, Glycine max
  unsure at all n locations
  Clone ID: LIB3138-072-P1-N1-G5
aaagtttttaaattttgtgaggttcattatgaagaaaagggacaaacttagttgtcaagttggaatcaacccatactccatggaatggactggtttggccaatagattactgagtaagggcaatgatattctgtgttgcgattatgctagttttgatggtttgattaccaagcangttatgagcaagatggcagaattgataaacagtctgtgggggggagaagaaaaatagatg

SEQ ID NO: 38480 - DNA, 276 bp, Glycine max
  Clone ID: LIB3138-072-P1-N1-H2
gagcttcccctgtttcaagctccaaacaaaatcaatctaacttggggtataatgtaacagcgacgcgagatttggatggtggaccagatactccttcatttggtcactcaggcatggacaaaaattccttggagaaactgagggaagcatcagctgctgaagctgaggcagcggttgctgtctggcaagctgtgcagtctatatcaagtaatccagctgaagaaacatctctgtcagttgaaaactcacacgctgtcaaaacagtttcagatggaa

SEQ ID NO: 38481 - DNA, 281 bp, Glycine max
  unsure at all n locations
  Clone ID: LIB3138-072-P1-N1-H5
gtctttgtcttcaacctatagctgtgcttannatctaagcnnaattgttccgtctttgtggaagattttgaagcttaganngtgtgccgagattgaccccagtctnnattccttnncagtcttgncaacaaattaannngaggaagctnnngttgaggcttgcttatantnncaaaatgcactttatgctgnnngagactcnnttgatnngttcgctttttctgtccannaagagtaagnnctcaatgaagcnnatgggaaggaaattgggggtgcaagca

SEQ ID NO: 38482 - DNA, 209 bp, Glycine max
  Clone ID: LIB3138-072-P1-N1-H8
tagcttgagccgaatcggctcgaggagaacaccattgaattttgatgctagcaagcagagctttggtcagttttctattgaccttctcggtggaggaatcttagtggacaaaactggagattggatcacacttatacaaaattctacagttagtaacttattgagagctgctggttggaagaaagggtgtttaatgggcaagattggga

SEQ ID NO: 38483 - DNA, 239 bp, Glycine max
  Clone ID: LIB3138-072-P1-N1-H9
taggtaaacttgagcagcttcactcagatgaagcatatgaggtgaggcaaaaccacttgagtgtgattctcggtaacaaagctggagatttaacatcagtagctgaaatcagcaaattcagggtagggcaggtctatgcagcatcagtgatgtatggttattttcttaagcgagttgaccaaagggtccagttggagaagacattgaaagttctttctaatgcaccagatgaagagaat

SEQ ID NO: 38484 - DNA, 223 bp, Glycine max
  Clone ID: LIB3138-073-P1-N1-A2
cacagattatcactttgcagttttgggattggtctacatgttgataatggagttatagactaagccgattgaatcattcactggtcacgcgaatgttaagaactttgtggggcaatcagtctctgatggttacattgccactggttcagagacaaatgaggtgcttatataccacatgggcttccccatgccagccatgcctaccaagtctcagaacacagac

SEQ ID NO: 38485 - DNA, 112 bp, Glycine max
  Clone ID: LIB3138-073-P1-N1-A6
aaagacccagaatgtatttcccccacctcaggagggtgacaggaacctgctctgcttagaagtgtttttggaagcacattttaagaggggcgcactcgagatcgctatggaa

SEQ ID NO: 38486 - DNA, 412 bp, Glycine max
  Clone ID: LIB3138-073-P1-N1-B10
tatcaagagtgaagggcatgatatgattatcttggctggtgctgagtatgggagtggaagctgtggagattggactgcaaaggggccaatgctactgggcgtgaaagctgtcatagcaaaaagttttgaaaggattcaccgaagtaatttggtgggaatgggtatcattcctttgcgttttaagcccggggaggaaggctgattctcttggattaactggtcaagaacgatacaccatcgatctaccaagcaatgtgaatgaaatacgacccgctcaagatgtcacagtggtgacagacaccgggaaatcattagtatctacattgagatttgatactgaggttgaactagcttactataaccatggaggtatcttacaatatgtcatgagaaacttgttcaatgctaaaca

SEQ ID NO: 38487 - DNA, 274 bp, Glycine max
  Clone ID: LIB3138-073-P1-N1-B7
ctcgagccgtttcgtctcgaggcaaaagctgtcatggtgcaggtactaaatgttggtgtagttgtgtcatctacagggcgcggtacaccgagatcttaagccagcgaatcttttgcatgctaaagaggatgaatgggctgagttgaaagctatagacttagggttatcacattatgtcagaccagatgaaaggcttaatgatattgaaggaagtgcatattatgtggcccctgaagttctgcatagatcttatagcacaccagctgatgtgtgg

SEQ ID NO: 38488 - DNA, 407 bp, Glycine max
  Clone ID: LIB3138-073-P1-N1-B9
gatagttctagcgcacagagagagcacgaggatgataagagaggcatctattaccacagggcacgccagaataagcggaggtcgatttgtctcaccaagaccgccgccaggtcgatgtcacaagactccggaccagggaccgattcagaccactccactgacttgtcgagtagtggtgctgctttgtccaccgatgagttgagtgggagcacatctggccgcgcgacgaccagattgaagctgtcatcggcctatcgacaggatacgactgacgacaacgttccgatatcgtcggcaggcagacctgccaccaagcgtgctggaccattgcgaatgacagctcgggacaagaaagagctcaagaaacaagcgcagaaagcggccagaaagcagcggcaacaggagtc

SEQ ID NO: 38489 - DNA, 75 bp, Glycine max
  Clone ID: LIB3138-073-P1-N1-C4
ggagtggctaatctccaagattctagggggggatccctcgaagaggaccgctatttccgccatagctcgcgtgtc

SEQ ID NO: 38490 - DNA, 178 bp, Glycine max
  Clone ID: LIB3138-073-P1-N1-D12
tttcttaaaagttttcttttcacacaccacaatatattactggagagaccttcaaatatgatgtggggaggtcctaaattcacattctatcaaaatattttcactgaaaaggaatatcataatcatactccaaaaagattgattccatcttgatacaaattatagatcctcaatacaa

SEQ ID NO: 38491 - DNA, 307 bp, Glycine max
  Clone ID: LIB3138-073-P1-N1-D5
gtttccttattgacaatcccaaacagtctacagtttttgatattctcttgggaatctctcaagagtttgaaattgctggtaatactcttatgccagctttttctgttccacaggctactgccagatcttctgaaaatgcggaatcctctgcatgatctggaatttggggttctcttttcgcttgttcgtttgtttaattcaataaaggaaattaggcatgaccctcttgttgagtatgctctgcctatttgaaaatttccacacctcttttaattgtcgtaatgatgtgtgaagtgtgtgttatttt

SEQ ID NO: 38492 - DNA, 223 bp, Glycine max
  Clone ID: LIB3138-073-P1-N1-E10
ttgcttctccatttttttttcatctgcatgcacacacttgggtaggtttggaaaccaagaatgggtggagggtagcatcaacaagaagttctggtaatggagatcaccaatgtcagcgagttttaagctattgcaaagcagaatttgccaaagattgagttcgtctactattcatcctgttcaagtgacaagtggtctttattttataacaaaatactctttt

SEQ ID NO: 38493 - DNA, 273 bp, Glycine max
  Clone ID: LIB3138-073-P1-N1-E11
tagtgtatttgcacagttcacagcaagctcgccaattgagaaggagagctctctctcggattgaatggctgcaaaaagctgatgtgcctaccatagcacagattgaagagttccattcgatgcagaggatgatgaatgctcctgattcaaatgataatattgatttactgttgagcattgatttgttgggtttacacggagcatgtaaagcttttccaaacaaaagtgttttctgtactaatccctgccctggctaacacacataaattcttt

SEQ ID NO: 38494 - DNA, 201 bp, Glycine max
  Clone ID: LIB3138-073-P1-N1-E12
gttccacaggctactgccagatcttctgaaaatgcggaatcctctgcatgatctggaatttgtgttttctttcgcttgttcgtttgtttaattcaataaaggaaattaggcatgaccctcttgttgagtatgctctgcctatttgaaaatttccacacctcttttaattgtcgtaatgatgtgtgaagtgtgtgttatttt

SEQ ID NO: 38495 - DNA, 116 bp, Glycine max
  Clone ID: LIB3138-073-P1-N1-E3
gaccctcttaacacattgttcaaagccaaggtcattctttaggtaaaagaagggcacaagttcttgcatgggttttttaatcccaatctttggtgggaagggccgggaaattgggc

SEQ ID NO: 38496 - DNA, 55 bp, Glycine max
  Clone ID: LIB3138-073-P1-N1-E7
aaatttccacacctcttttaattgtcgtaatgatgtgtgaagggtgtgttatttt

SEQ ID NO: 38497 - DNA, 63 bp, Glycine max
  Clone ID: LIB3138-073-P1-N1-F12
aaaaaaaaaaaaaaaaaaaaaaaaaaaaaaaaaaaaaaaaaaagaaaaaaaaaaaaaaaaaaa

SEQ ID NO: 38498 - DNA, 125 bp, Glycine max
  Clone ID: LIB3138-073-P1-N1-G9
attttcaaacttcattataacaaatacacacaacacaacacaggcaaataaatatgcaaccagggttctttttaattacttatttatctaaaaagaatggggggtcctgtactaatgaatttgta

SEQ ID NO: 38499 - DNA, 99 bp, Glycine max
  Clone ID: LIB3138-073-P1-N1-H1
gccccaatcccttaattttttggaaatcctatgaaaagctaatgtgtgggtccatcacaactggggaaaccttctttcgggggtccaaaagggggccgg

SEQ ID NO: 38500 - DNA, 180 bp, Glycine max
  unsure at all n locations
  Clone ID: LIB3138-073-P1-N1-H9
tagttctagatcgctagcgggcccttttttttttttttttttgggttttataaaagggggggggggtnngggaacctaataaaaaccggagtattaccactataatacaaaaatggacattggaactgaaacatcaccggcaaaactggaaaccctaatcgaagctgaattgccaacaaa

SEQ ID NO: 38501 - DNA, 322 bp, Glycine max
  Clone ID: LIB3138-074-P1-N1-A1
atcgctcctcagatatcaacaaaaggattcgcacagcacttgggaaaggtaagaaaattgtttttcttactagagttgatccttttccagtagctttactggctgttctttttggcgttaagaatgaaattctgagttctaacgccactaatcctatgctgacgcgacttcttgagaactgtaagagtctcaaatatctggttgatgagtgtccttttgcatttgtgaactagtatgtagtattttattcacttaaataaagcgcattactatgtgcaatgagtgtgtttaaatttttaaactaaaagcaaaccaactttac

SEQ ID NO: 38502 - DNA, 407 bp, Glycine max
  Clone ID: LIB3138-074-P1-N1-A11
tgccgaagtgttaagagaatgcctctttctatagggggaggagctggtgcaaagaatgctattctcatgaatatgccaaatgctgttctttcaatgtggagatattttgttggagatctcgtctttgaagtttctaagaagacttctccctacattaaatgtacagtctctttcttcatagcatttggaaatttggctgatgataccatcaattttgaggcttttccccacaagctggtgcagtttggagagattcatgaaaaagttgtattgaaattttcacatgaggaatttcttacagcttggtcaactcaggtgcgttctgcaacaactctgttggctgatgggtgtacatatttgtatgcaatggtgcatgatagttcagtgtctacaataccaggtgattt

SEQ ID NO: 38503 - DNA, 375 bp, Glycine max
  Clone ID: LIB3138-074-P1-N1-A3
agtcgggaattttagaatgtgtgtgcagaccataatttaccgaaagagatggaatctataaccactcgggcgtgttttgactcatataaaaaaaaaaaattatcaaaaataattccaatattatactaaataaaaaagtggccccccccacctagtgaacccgctccccccgatactaatccttacccttatcctttatgctcccattttttcctttttatgagtcttataaaatcttgacatattcttggctatgctttttccctttttaaaaatttttcccttttaaaattttccccattattcatactctgttgcttattggtaaaaccctttggtccctatatttccccccttacaattttttttcttttt

SEQ ID NO: 38504 - DNA, 431 bp, Glycine max
  unsure at all n locations
  Clone ID: LIB3138-074-P1-N1-A6
tcgagcttttatgctcgaatcggcttcgagaaggcaaactgtnnttggaatcaaatggcgaacagtgagaaccaccattgagatttntgattcttagcaagcagagcttttttgtcagttttctattggaccttctcggtggaggaatcttagtggacaaaactggagattggatcacacttatacaaaattctccaattagtaacttgttgagagttgctgcttggaagaaaggctgtttaatggtcaagattgtgatgtctgggaatgcagcagtcaaaaggagtgattgggcctcattggtacaagtgtttttaacaaacagcaacagtacagagcattttgatgcatgtaagtggacaaaatcagaaccacattcctgggaattgatcttcccaatagaggtatgtggtcctaataatggttttgaa

SEQ ID NO: 38505 - DNA, 224 bp, Glycine max
  Clone ID: LIB3138-074-P1-N1-A7
ggttttagtctgttagggaaaattgtaatcgctggcagatagtgagtacgataaggaataatgatgaatgtgtaacatatcataaagcgggtaagcttgttggggcccctgtagtcttcagagatcagatcaccctattattgttgcaactgcacttccccatactagacttattatttatgtcatatcaccaaatcatataacattaagtttaatttagtgtc

SEQ ID NO: 38506 - DNA, 397 bp, Glycine max
  Clone ID: LIB3138-074-P1-N1-B1
ctcgagcctaatcggctcgtggtactctccaatgtggagatatttgggtggagatctcgtctggggagtggctaagataacttctccctacattaaatgtacagcctctttcttcatagcatttggaaatttggctgatgataccatcaattttgaggcttttccccacaagctggtgcacattggagagattcaggaaaaagttgtattgaaattttcacaagaggaatttcttacagcttggtcaactcatgtgcgtcctgcaacaactctgttggctgatgggtgtccatatttgtatgcaatggcacatgatagatcattgcctacaataccagttgattttgttcattggtttcaactgtcaaccaaaaacaatatgtttgcatatgggctc

SEQ ID NO: 38507 - DNA, 102 bp, Glycine max
  Clone ID: LIB3138-074-P1-N1-B12
aaaaaaaaaaaaaaaaaaaaaaaaaaaaaaaaaaaaaaaaagaaaggaaaaaaaaaaaaaaaaaaaaaaaaaaaaaaaaaaaaaaaaaaaaaaaaaaaaaaa

SEQ ID NO: 38508 - DNA, 403 bp, Glycine max
  Clone ID: LIB3138-074-P1-N1-B2
ttggtgctttctcctgagtcattaattcccgctgttactggactgtccggcgataaggagagtgcgcaagagtatgcttccactggagttggtttgttggctggatcatccattatgcttctgacagtagtttgggggacctgtgttttcattggcagacaaaaagttgaaaaatgactctaactatggtggcacaaattcatcaagtggaggaataaaagaatcactaactcggtatggtatcactatggctgtagatactacaaagatggcacgaatcatggttttcccagttataccactccccataatgcagattcccagtatattcaacttctcttctattccacgcaacgtgaccttgatggttgctcttacagtcgctgttgctcttcttatctca

SEQ ID NO: 38509 - DNA, 327 bp, Glycine max
  Clone ID: LIB3138-074-P1-N1-B9
ttgctgtcaaggacaacatcaaccacgttggagctctctgaggggggagtgtcttaaacgagtgtgaatcaaatgttactactactatggccgaatatgagagagggttcacttttgagaaattgactcctccttctacttttcacaggtcttttttgttgtcttttggaccatcttacaatacttttcaagttgatttttttaaacttattgtgctccttgtggcctgagatggatgatccttctgatgtttagctgatcatacgttttttttttgtgtatttatccttttttctagcctttgtggtttctctttggatttttttg

SEQ ID NO: 38510 - DNA, 401 bp, Glycine max
  unsure at all n locations
  Clone ID: LIB3138-074-P1-N1-C1
ccggttctctttcttcaatttcaaaaaattaatagaatttcgattttgaaatgaaagaaaaggggggggataaatataaatgacanaaagatattggaacataatcttggaagagatgatggaagcaggagttcattttggccacggtactagaaaatggaatcctaaaatgtcaccttatatatctgcaaagcgtaagggtattcatattataaatcttattagaactgctcggtttttatcagaagcttgtgatttagtttttgatgcagcaagtgagggaaaacaattcttaattgttggtacaaaaaaaaaagcagcggatttagtagcacgggctgcaataagagctcggtgtcattatgttaataaaaagtggttcggcggtatgttaacgaatt

SEQ ID NO: 38511 - DNA, 362 bp, Glycine max
  Clone ID: LIB3138-074-P1-N1-C3
caaaaactgtagactgtttgggatattatcttgagagattcccaagagaatatcaaaaactgtagactgtttgggaatctctcaagattttgaaattgctggtaatactcttatgccagctttttctgttccacaggctactgccagatcttctgaaaatgcggaatcctctgcatgatctggaatttgtgttttctttcgcttgttcgtttgtttaattcaataaaggaaattaggcatgaccctcttgttgagtatgctctgcctatttaaaaatttccacacctcttttaattgtcgtaatgatgtgtgaagtgtgtgttattttaaaaaaaaaaataaaaaaatattttaaatatata

SEQ ID NO: 38512 - DNA, 370 bp, Glycine max
  Clone ID: LIB3138-074-P1-N1-C7
ttgaatacactcataacacacagcacaaagcaaagctcatccgggaggtaaaaaaatgggagcggcttcttccatggctctctcatccccatccttggctggcaaggccgtgaagctgggcccatcagccccagaagtgggaagggtgagcatgaggaagaccgtcaccaagcaggtctcctcaggaagcccatggtacggcccagaccgagtcaagtacttgtgcccattctctggcgagcccccgtcctacctaaccggtgagttcccaggctactactgctgggacactgctgggctttccgcagacccagaaacctttccctagaacccgtaactccaagtgatccactctaggagggccatgctc

SEQ ID NO: 38513 - DNA, 367 bp, Glycine max
  Clone ID: LIB3138-074-P1-N1-D10
tggcagtttggagagattcaggaaaaagttgtattgaaattttcacaagaggaatttcttacagcttggtcaactcaggtgcgtcctgcaacaactctgttggctgatgggtgtccatatttgtatgcaatggtgcatgatagttcagtgtctacaataccaggtgattttgtcattggtgtcaagttgacaaccataaacaatatgtgtgcatatgggctcaatcctggtatttcaggttctcgtcttttgggcaccattcctcagtccatttcacagcaaactgtttggaatcaaatggcaacagtgagaacaccattgaattttgattctagcaagcagagcttttgtcagttttctattgacc

SEQ ID NO: 38514 - DNA, 409 bp, Glycine max
  Clone ID: LIB3138-074-P1-N1-D4
ctccctacattaaatgtacagtctttttcttcatagcatttggaaatgttgctgatgataccatcaattttgaggtttttccccacaagctggtgcagtttggagagattcaggaaaaagttgtattgaaattttcacaagaggaatttcttacagcttggtcaactcaggtgcgtcctgcaacaactctgttggctgatgggtgtccatatttgtatgcaatggtgcatgatagttcagtgtctacaataccaggtgattttgtcattggtgtcaagttgacaaccataaacaatatgtgtgcatatgggctcaatcctggtatttcaggttctcgtcttttgggcaccattccctagtccatttcacagcaaactgtttggaatcaaatggctacagtgagaacacc

SEQ ID NO: 38515 - DNA, 248 bp, Glycine max
  Clone ID: LIB3138-074-P1-N1-D7
cgctagcgaccgccctttttttttttttttttctatatgcctggggcgaaaaaaaaaagccgggctctccaaaaaaacaactactactaaagatacacattttccccctaacacacaatacattttacttctaactttatctcactatctcacacatccactaataataaattaccacatatcatcacatctaccacctttcattattttcattataactctcacttcctctttaacctttttatcct

SEQ ID NO: 38516 - DNA, 128 bp, Glycine max
  Clone ID: LIB3138-074-P1-N1-D9
tatctctataacacattttataaacccaagctcatcctttagttgagggagatcaaagaatggtgggtggctctctcatacccatccttcgctgccaagaccacgaatctgtgcccatcatccccaca

SEQ ID NO: 38517 - DNA, 263 bp, Glycine max
  Clone ID: LIB3138-074-P1-N1-E1
ccgcttcagcctcagcccgttaaccccacccccattttagcgctttccaaaagggtgggccgcgccttggttttcctttcattgttcaatgctttctttcttggttcaacccacctgccttgccggattttagttttcccggcggattaaaaaggggggcctttacccctcaccaatcaatgggtattccgaatggacctttaggaggatttacctattggggccctcttaggggaccttaagagcttgtttaatgatggtgg

SEQ ID NO: 38518 - DNA, 298 bp, Glycine max
  Clone ID: LIB3138-074-P1-N1-E10
caggagaaagccgtgctcaagcatgacgaagcttcaaaattacaggacaacatgtgagatgcgcagggggaagggctattacgatgccttcaaggtgcaaaatgaggaaaacgacttccaagcaaatgtgaagaggcttgtgttagcaggggtatgggatgaagtgattgatatgctaaagaggtttgaactttctgtaatttttgaatggtatcctatttgattgttcatggtatcttttcctttttacatatctactactttctacatttttttcacttttttacatcttttcttt

SEQ ID NO: 38519 - DNA, 420 bp, Glycine max
  unsure at all n locations
  Clone ID: LIB3138-074-P1-N1-E12
ggaactaaaccataccatataaagagagcanngcagatgaagccgtttctcatnncgtgtgagggggtgccctatgcatcatcctttangatgcaatnagagagtttaaatacacacnagagtagtacancgaacctcaggcattttcttctttcagagaacgcctataccacttgcagagaaccgaaaatgatcgggtttgctttggtagatcaggcatacacggatggggcctctttgcacgtagaaatattcaagaaggagacatggttcttgaatatcgtggtgaacaagtgaggcgcagcattgcagatttgagggaggcacgctatagattagaagggaaagactgctacctgtttaagataagtgaagaagtggtggtagatgccactgataaagggaatttagctcggctga

SEQ ID NO: 38520 - DNA, 167 bp, Glycine max
  Clone ID: LIB3138-074-P1-N1-E9
gggagatattcaacgtggatacttgtagtgcttaatttgagtcggtactattgaccttagtggggcatggcgcttttggggttaaaaattccgaacttacgattcttctccccattgtagtctacctgagcggtttaaaattttgggagacgatagcttttgtcttt

SEQ ID NO: 38521 - DNA, 277 bp, Glycine max
  unsure at all n locations
  Clone ID: LIB3138-074-P1-N1-F1
ggaggtttctcccagaatttggtaaaggtaagaaaatggtttttttaacgggggttaacccttttccggaggtttaactgcttgttttttttgccgttaaaaatgaaattttgggttctacccccactaatcctatgctgccgcaactcttggggaactgtagaagtctcaaatatctggttgataagtgtccttttgcaattgggacctagaatgtagtattttattcactttaaaaaaaaccgcattactatgtgcaatgagtgtgtttaatntt

SEQ ID NO: 38522 - DNA, 119 bp, Glycine max
  Clone ID: LIB3138-074-P1-N1-F2
tcgagggaatgttctaggttccaattttttggttaatttcctttcagaaaggggggcccagaacctattggggttgaaatccacaaaatccttttgtgttaaatagggggatggaaaaa

SEQ ID NO: 38523 - DNA, 162 bp, Glycine max
  Clone ID: LIB3138-074-P1-N1-F4
ggggttaatttaaaaatttttcaaaacaactgaaatctccaaaaactggggataaaaggcgggccgcggctaagtaaccttttttccacaagaattaattttcgacccgttcctgacgggattccaacttttccttatagggaggctattaaaacttggcca

SEQ ID NO: 38524 - DNA, 403 bp, Glycine max
  Clone ID: LIB3138-074-P1-N1-G11
tagatcaaatggcaacagtgagaacaccattgaattttgattctagcaagcagagcttttgtcagttttctattgaccttctcggtggaggaatcttagtggacaaaactggagattggatcacacttatacaaaattctccaattagtaacttgttgagagttgctgcttggaagaaaggctgtttaatggtcaagattgtgatgtctgggaatgcagcagtcaaaaggagtgattgggcctcattggtacaagtgtttttaacaaacagcaacagtacagagcattttgatgcatgtaagtggacaaaatcagaaccacattcctgggaattgatctttccaatagaggtatgtggtcctaataatgggattgaaatgtggagttctgagtgttcaaatta

SEQ ID NO: 38525 - DNA, 486 bp, Glycine max
  unsure at all n locations
  Clone ID: LIB3138-074-P1-N1-H10
cctctggcaaactattcataaagnnagtttcttctccttttctttccgatcgtnngccacggcgaacgatgagaggagtagcgtggctttttctgctgctttcctnnnctggtatnncagtgtccccgttcaagggtttggnnngccctgnataatcgcnncgtttcnnacccgcgaggacgtacccttcctctnggcttcccaaaccagnnttgtcgtggcccccatccttcaatcgcnnctccacagcnngcggtggagtctcctcnncccgtcttcnngtcggcgccgcctttcttctccggacccgacaatctcaagtggagaaggtgccatgcccttctacgagaacccaaagcctggatggtggtttcacnaacaaggagcggcacttcannatttggcggtggaaccccttctacctaaagggttagcaatgcttcacagttggacatgcatnggatcttttatatnttttgccacccc

SEQ ID NO: 38526 - DNA, 387 bp, Glycine max
  Clone ID: LIB3138-074-P1-N1-H6
tcagagacatccgacttcggctctcgacaaggtcgacagcctgattgtgtgcggcgggatggccttcaccttcaaaaagacgatcgagggcgtgtcgattggcaactcgctgttcgacgagccgggctcgcagaaggtgcagggcatcatgggcaaggcaaagaagaacggcgtcaagctcgtctttcccgtcgactacgtcaccgccgacaagtttgacaaggacgccaccgtcggagccgccacggacgcagagggcatcaaggacggcctcatgggcctcgacgccgggccagagtcgtgcaagctctttgcagagaccatcaaggcgagccagaccattcttctggaacggtcccgcgggcgtgatcgagtttgagaactttg

SEQ ID NO: 38527 - DNA, 109 bp, Glycine max
  Clone ID: LIB3138-075-P1-N1-B12
aaaaaaaaaaaaaaaaaaaaaaaaaaaaaaaaaaaaaaaaaaaaggaaaaaaaaaaaaaaaaaaaaaaaaaaaaaaaaaaaaaaaaaaaaaaaaaaaaaaaaaaaaagg

SEQ ID NO: 38528 - DNA, 410 bp, Glycine max
  Clone ID: LIB3138-075-P1-N1-B3
ggctcgagccgaatcggttcgagaaaatcagaaccacattcctgggaattgatcttcccaatagaggtatgtggtcctaataatggttttgaaatgtggagttctgagtgggcaaatcaaacttcatggcatttgagtttccttattgacaatcccaaacagtctacagtttttgatattctcttgggaatctctcaagattttgaaattgctggtaatactcttatgccagctttttctgttcctcaggctactgccagatcttctgaaaatgcggaatcctctgcatgatctggaatttgtgttttctttcgcttgttcgtttgtttaattcaataaaggaaattaggcatgaccctcttgttgagtatgctctgcctatttgaaaatttccacacctcttttaattg

SEQ ID NO: 38529 - DNA, 417 bp, Glycine max
  Clone ID: LIB3138-075-P1-N1-B4
gggttcgggtcttcacttagttaggaaccgaaccatggctataacgttcggtttagtgactcctaactccaacactttgtgtctcactctcaccacaccacccctcatcgccaatcatcgtactactaatgttgtgttctctggtcaaagtgtcttcagctatggacacactaatctttcttattcacaccaaagggcttcttcctttgccactattgtctgttctgctgctaataaaccatcctcttcttctgaaattagctctacagccaagataaggagcgaggttctctctccctttcgttcagttaggatgttcttttatattgcttttgttgcaagtggtgctcttgggggattcatagcaaccacacaactaattggtgcactggctaactcatcaagagcatctgaagt

SEQ ID NO: 38530 - DNA, 175 bp, Glycine max
  Clone ID: LIB3138-075-P1-N1-B5
caaatggcaacagtgataacaccattgaaatttgattctagcatggggagctattgacagtgggctatcgaccccctcggtggaggaatcttagtggacaacactggagactggttcacacttctacaaaattctccaattagtaacctgttgcgagttgttgcttgtatgaaag

SEQ ID NO: 38531 - DNA, 399 bp, Glycine max
  Clone ID: LIB3138-075-P1-N1-C1
gaaaccaactttcgacccaagtattaaatcctccaaaacctgttgttaccgtatttggagcgtcacaccatgaccgtaccaaccacctaatgcctttatgcacctactctccacaagaaatcgactctggtttctacaatttctcgcattgacaaaacttagacaaagtatacgcaatacggttatgcaaaagagatgttagccaaacgaatgtcgtagctgcctcaacaattctagagtgaagtctacacagttgtgtccaaagcagttcaaggcaatcaagtgggaagagaagagcatgttgagctacttcaaccgcgcaatttttcacaccatggatgcttatttttcgtatcctatgagcaacataaacaacgcaacggaagcggaagagttcaa

SEQ ID NO: 38532 - DNA, 402 bp, Glycine max
  Clone ID: LIB3138-075-P1-N1-C3
aaggctctgcctatttgaaaatttccacacctcttttaattgtcgtaatgatgtgtgaagtgtgtgttattttaaaaaaaaaaaaataaaaaaaaaaaaaaaaaaaaaaaaaaaaaaaaaaaaaaaaaaaaataaaaaaaataaaaaactaaaaaaataaaaaaaaaccaaaaataaaaaatttaaaaaaatggaaaaaaaaaaataaaaaaaaaaaaaaataaataaaaaaaaaaaaaaaaaaaaaaaatttgggcgccccccccaataattaatctcccccccaccaaaaaaaaaggggaaccattcccttaaaaaaaaaaatttttcaaaaaaaaggatgataaaaagattgtgcaaaaaatgggaaaaattttatcagggaaaaaaaatttaattccc

SEQ ID NO: 38533 - DNA, 97 bp, Glycine max
  Clone ID: LIB3138-075-P1-N1-C4
ggtacacttactgtaaaatgtgcataccaagcttaccttttaagggggcctaaaaactgagtgggaaacaaaagaccccatcatgattttatggaat

SEQ ID NO: 38534 - DNA, 417 bp, Glycine max
  Clone ID: LIB3138-075-P1-N1-D1
cggttcgggctttggccaaggcataggatgggtgaggtaaacttgaattgaagtgaagaaggagatggctgcaacctcttccttgtgctcatcgaccctccaatcccagatcaatggattcttccttcacaaaacctctctttcccatactccttccctcactttctccaggaggaaaatttcaaccacagtgaaagctacatctcgagtcgacaagttttcaaaaagcgatatcattgtctctccgtccattctttctgcaaacttttcaaaattgggagagcaggtgaaagcagtggaattggctggttgtgattggattcacgttgatgtaatggatggtcgctttgttccaaatattacaattggacctcttggtggtgatgcattgcgccctgtgacagatcttcctttgga

SEQ ID NO: 38535 - DNA, 73 bp, Glycine max
  unsure at all n locations
  Clone ID: LIB3138-075-P1-N1-D3
cggctcgagctcgagccgaatcggctcgngaaaaaaaaaaaattgggtaatattaaaaaaaattaaccattat

SEQ ID NO: 38536 - DNA, 129 bp, Glycine max
  Clone ID: LIB3138-075-P1-N1-D9
ctcacaattcctgttttgaataaaggcttaataatgttcacgagtttttttttatggtgatgcagcattcacaatttacttcattgtgcctcattctttcaatccatctataacatacattatccttta

SEQ ID NO: 38537 - DNA, 412 bp, Glycine max
  Clone ID: LIB3138-075-P1-N1-F4
ggggtgatgataacttaattagtgttcatgaatatgtcaagccttactttagtggttctaaattgaaaagctttctagctagtcataacatcaccattactgatggtattgacaaaactagtgcaactttgcaatttagaaagttagcagattgtgattttctcaagagaaactttaagcagatgtctaatgttttgtgggtggctcctgaggacaaggcgagtttatggtcacaacttcattatgtttcgtgtaataatctggaaatgcaagaagcttatcttgtcaatctcgtaaatgtgttacgagaattgtatttgcacagtccagaggaagctcgccaattgagaaggaaagctctctctcgtattgaatggctgcaaaaagctgatgtacctaccatagcacagaa

SEQ ID NO: 38538 - DNA, 251 bp, Glycine max
  Clone ID: LIB3138-075-P1-N1-H2
gattaaggccacagggtctccgactgtgaaaccaaaccgggcgtccatcgtcgcttcttgaacacattatagcctcaagccaaagcctaaactcaaagccacatttagcttctctgacaatgtgactctgggacaccacatacgcatggttatttacacgacaccattgcccgttttaccgaccgggctatatggatgtatgaatagggagctggattattgaacagggagtgggttaagcttatccgggt

SEQ ID NO: 38539 - DNA, 360 bp, Glycine max
  Clone ID: LIB3138-079-P1-N1-A12
caacttcattatgtttcgcgtaataatctggaaatgcgagaagcttatcttgtcaatctcgtaaatatgttacgagaattgtatttgcacagtccagaggaagctcgccaattgagaaggaaagctctctctcgtattgaatggctgcaaaaagctgatgtgcctaccatagcacagattgaagagttccattcgatgcagaggatgatgaatgctcctgattcaaatgataatattgatttactgttgagcattgatttgttgggtttacaaggagcaagtaaagcttttccaaacaaaattgtttttgatgataagcttgtgttggctaacacacaagaattctttgatggaaatttt

SEQ ID NO: 38540 - DNA, 313 bp, Glycine max
  unsure at all n locations
  Clone ID: LIB3138-079-P1-N1-A6
cgttaatattgaaatnctgagttctaacgccactaagcctattttgacgcgacttcttgagaactgtaagagtctcaaatatctggttgatgagtgtccttttgcatttgtgaactagtatgtagtattttattcacttaaataaagcgcattactatgtgcaatgagtgtgtttaaatttaaaaaaaaaaaaaaaaaaaaaactttaaaaaaaaaaaaaaattaaaactaaaaccaacattttttaaaacaccgcgcgctaaaacccggggggggggccaaaccggatcttaaacgcgtatcaactttccca

SEQ ID NO: 38541 - DNA, 138 bp, Glycine max
  Clone ID: LIB3138-079-P1-N1-B1
aaaaaatttttatatttaaaaaaaaaaaaaaaaaaaccgaccgatttattaaaaaatctaaaaaaactaaaaaacccaaaaattaattaaaaaaccaatacctacaaacataccaaaatttccctattaataaaatca

SEQ ID NO: 38542 - DNA, 208 bp, Glycine max
  Clone ID: LIB3138-079-P1-N1-B10
aaaaaatatatatattcttgaaagaaagatagaagcgagggtttcctttatcttgcaacagtttaagtattgcatctctctgctagacgagaggaatgagaattacaagaagacatgcgtggagttagacaagcctaactgtgtatttagtgtgtttggaaacacatcacaaactattaaacgtgaatccccaacacgcttttgcatc

SEQ ID NO: 38543 - DNA, 381 bp, Glycine max
  Clone ID: LIB3138-079-P1-N1-B2
ctgggaattaatttcgagtccaaccacatttttaaaaagacatggcctcattgggggggttacaaaatgtgagcggcatcaattttcttatcaaagagggtccaaaagtcaatgcaaagttcgagctgaagccgccaccatatccactgaatggtttggagccggtgatgagccagcagacacttgagtttcactgggggaagcaccacaagacttatgtggaaaatctgaaaaaacaagttgttgggacagagcttgatgggaagtcactagaagagattattgtcacatcatacaataagggtgacattcttccagctttcaacaatgcagcacaggtatggaaccatgacttcttctgggagtgcatgaaaccaggtg

SEQ ID NO: 38544 - DNA, 350 bp, Glycine max
  Clone ID: LIB3138-079-P1-N1-B3
aaaaaattttattttaaaaaaaaaaaaaaaaaaaaagcgacggataaataaaaaaaaaaaaaaaaaaaaaaaaaaaaaaaaaaaaaaaaaaacgggcggcccttcccaatctaaaacaaatttggctgataatcccataaattttgaggcttttccccacaacctggtccattttggaaagattcaggaaaaagtttttttgaaattttcacaaaaggaattttttacaacttggtaaactcaggtgcgtcctgcaacaacttttttggctgatgggtgtccatatttgtatccaatggtccatgatagttcaatgtctacaataccaggtgattttgtcattggtgtca

SEQ ID NO: 38545 - DNA, 336 bp, Glycine max
  Clone ID: LIB3138-079-P1-N1-C4
ggtggctatgtaaatttaacggggccaggctaaagctccgggggggtttttacaatccttaaaaaattttgtttctttgtgtgtgtatggtgatgataacttaattagtgttcatgaatatgtcaagccttactttagtggttctaaattgaaaagctttctagctagtcataacatcaccattactgatggtattgacaaaactagtgcaactttgcaatttagaaagttagcagattgtgattttctcaagagaaactttaaacagatgtctaatggtttgtgggtggcttctgaagacaaggcgagtttatggtcacaacttcattatgtttc

SEQ ID NO: 38546 - DNA, 217 bp, Glycine max
  Clone ID: LIB3138-079-P1-N1-E1
aattcctcgaggggtttttttggcaagtgcaaccatagcgtgttcttgctaaccggattcagtctcgcttggcccatctagccattacagcaactgtggatcaaatgcacgggacaccattgatttgtttgcagcagcttgcagttcatgaccttggggggatttgggcaaatgggatgacacactatcaaaattcaatgaactgtaagtctcttgg

SEQ ID NO: 38547 - DNA, 364 bp, Glycine max
  Clone ID: LIB3138-079-P1-N1-E2
ataaaatttttttcattctaatcatacactatagggcggtggagataaaatatttgaaacacactaaatgaaattttgtaaaaggtactatagggggggttacagaagtttctataaaaatcggaaatgccctacctttgagtgcggctagaactattgatttacgtaattggaagtaaccaactaggtttaccgcgaaacctaaaaatcgaacactgaaccaattggagtacctatacaagattgaccttaacagataactgaagagtgacggtagcacgtgattgacttcagtaatgcctgatataaaattattgactctcgagatatagtaatatggagaggacacaattgtttcaagcac

SEQ ID NO: 38548 - DNA, 353 bp, Glycine max
  Clone ID: LIB3138-079-P1-N1-E3
ctacatcacttttactcaacccgccttttattaactgtagagacacctcaagatagcaatgacaaagctgcaccatgtcattgagctgtaccataattacagagataaagagagaaaagagaggaaaagcttatcacacgaacacgataggcggtgaacttgacttgagtttgaagcaaatgtaaagcgcggcaacacgagatatcactatactgcatgggagaacaagggaaggaggtagaacttttggttctgggggggggggctgtttttgctccattccttttttgctgtcttaaaatattaactgtaacaccctgggaaactcattttaaattttaattttggctctt

SEQ ID NO: 38549 - DNA, 360 bp, Glycine max
  Clone ID: LIB3138-079-P1-N1-E4
ctcaagcctttttcggcaatggtatggaatatggccccgcacaagatttctgggagcgacagttccaacttcgattcgacttgaagagagggaggaaggtggaaattggcaaattataagaatacgctgaaatgtcagcgcttttcaatttccattcatttctaactgtgatacttctgggaatatgtgcctgcacttatttcaagatgcagtttccggcgatccttgaccagaaaactgggtttcgtggtttcttctggaaggcgggaagaggggggtgaacgtttaagcctctgggtagctgccggttgctttatgatgggcgtttcaataatttttttctaagtcttgttttactta

SEQ ID NO: 38550 - DNA, 359 bp, Glycine max
  Clone ID: LIB3138-079-P1-N1-E9
cagctcagtaagaataaatgagatatttgaggtcggggagttgtttgatttaagcatccaactaatatacttggtattgctattaggtttgctagggactggaactttctttgtgattcgtcaagttcttgtccgcagagaacttgacctatctgccaaagagttgcaggagcaagtaagaagtggtgatgctggtgcaactgagctttttgaacttggtgcagtgatgctgcgcaggaaattttaccctgctgctaccaagttcttgcttcaagcaattgagaaatgggatggggataatccggatcttgcccaggttagatgacttgtttgattgctaacaaagtaaattaaatttg

SEQ ID NO: 38551 - DNA, 117 bp, Glycine max
  Clone ID: LIB3138-079-P1-N1-F2
tcgcttcaagaccacacttttttttgcctctgttctgggtgtccgggggggggcattgccaatggcccttctcaacctttaattttaaattgacaagccttttgcccccttttttaa

SEQ ID NO: 38552 - DNA, 325 bp, Glycine max
  unsure at all n locations
  Clone ID: LIB3138-079-P1-N1-G2
tcgcttcagcctctttttttttttttggttctttaaacaactcctcggcgaaggattttaattcaatattttggttgggttgaatcccggggttgaagcgttgcaaacatcacggctattctaagagtgtctcgctccctcattcatgtccgatctgtacgacggaggacgggtagttgcgtaactgccgttaacccttcgccgcacggtgggcgtggtgctttgccttctgaaggtggtagcccttcagacttgctcttcctcgctngtggtggtttcttctagtgtcttcactcttttcattacttttagcctgcatagtttt

SEQ ID NO: 38553 - DNA, 368 bp, Glycine max
  Clone ID: LIB3138-079-P1-N1-H2
tgggaattgtttttcccaataaaggtatgtggtcctaggagtggttttgaaatgtggagttctaagtggccaaatcaaacttaatggcatttgagtttccttattgaaaatcccaaacagtctacagtttttgatattctcttgggaatctctcaagattttgaaattgctggtaatactcttatgccagctttttctgttccacaggctactgccagatcttctgaaaatgcggaatcctctgcatgatctggaatttgtgttttctttcgcttgggtcgttgtttaattcaataaaggaaattaggcatgaccctcttgttgagtatgctctgcctatttgaaaatttccacacctcttttaattg

SEQ ID NO: 38554 - DNA, 385 bp, Glycine max
  unsure at all n locations
  Clone ID: LIB3138-079-P1-N1-H6
attcatctcgatctcgctcctttttctactaccctcaacatantaaagcagccggtgcaagtgaagcaatggctcaaaccatgttgctcatgtctagtgtctctagcagttattccgtggatttgaagaaagaccttttcctccaattgcagagtcaaagtttaaggcctaagttctctcaactctcattcaacccacttccaccatcaacttcttccttttcttcaccccgtacattcacaaccctggctctcttcaaatctaagacaaaagccgctcctgctaagactaaggttacaaagccaaagcaaaaggttgaagatggtatctttggcacttctggaggatttggttttactaagcagaacgagctctttgtgggtcg

SEQ ID NO: 38555 - DNA, 355 bp, Glycine max
  unsure at all n locations
  Clone ID: LIB3138-080-P1-N1-A2
gtgataaccttaatttaagtgttcaatgaatattgtcaacgccgttacgtgttaagtgtgttctaaaaattgaaaacagctttctaagctaggtcataaacatcaccacttacctgatgtgtatttgaccacaaactacgtgcaactttgcaatttaagaaacgttagcaagattggtgatttttctcaaagagaaacctttaaagcaagattgtctatatgtnntttgtgggtgtgctccttgaggacaaaggcgaagtttattggtcacacacttcattattgtttcgtgtaataaatctggaaatgcaagaagcttatcttgtcaatctccgaaatgtgttacgagaattgt

SEQ ID NO: 38556 - DNA, 358 bp, Glycine max
  Clone ID: LIB3138-080-P1-N1-B4
gaaacattttctaactaagtttggttttggaacctggtcggttacattacattagattggggggcaaacaatggcatcgtcactacaagcagcagctacttttatgcaacccaccaagtttttgcagctaaagtctactcaagccatatctaaagcttttggtttggaacctgctggagttaataaggtcacatgctcccttcaggctgatcttaaggacttggctcacaagtgtgttgatgctaccaaaattgcaagctttgcccttgccacctctgctctcgttgtttctggggcaagtgctgaaggagtaccaaagcggctaacctttgacgaaatccagagcaagacctacttg

SEQ ID NO: 38557 - DNA, 133 bp, Glycine max
  unsure at all n locations
  Clone ID: LIB3138-080-P1-N1-B6
ctcttagttcggtctaaaaccctgaactgctgaagaacagcaggcataaagaggcacagaatttacatattatgaagtgagaaaatcctaagagatgtttgttacatnccttgcttgctcttacttcacttat

SEQ ID NO: 38558 - DNA, 312 bp, Glycine max
  unsure at all n locations
  Clone ID: LIB3138-080-P1-N1-D4
aagttgattttccttattgccaatcccaaacagtctagggtgtttgatattctcttgggaatctctcaagattttgaaattgctggtaatactcttatgccagctntttctgttccacaggctactgccagatcttctgaaaatgcggaatcctctgcatgatctggaatttgtgttttctttcgcttgttcgtttgtttaattcaataaaggaaattaggcatgaccctcttgttgagtatgctctgcctatttgaaaatttccacacctcttttaattgtcgtaatgatgtgtgaagtgtgtgttatttt

SEQ ID NO: 38559 - DNA, 366 bp, Glycine max
  unsure at all n locations
  Clone ID: LIB3138-080-P1-N1-F4
ctttgcgttttcgagtctccaagtcctctgttttgcactgctgcgcgagacttcatttcattttgtgattataaatacgcaactcaattacccaacccaactttcttttctttaacagcaacaacatcaaaattcccacttcctttttcttttttttctttaataagaaacctcgagaagaaagtaaaaggttcgtttttacccttctttcttcccagaagcgatctctaaagccgacccatttcggaattcggaaaacccagtgctgatcgctctctgggtgttcccaaaatgaagcttcggagatcttcgctgtgcgtctntctagggtttctggcgctgttcctttcgccgccgccgtcaatg

SEQ ID NO: 38560 - DNA, 154 bp, Glycine max
  Clone ID: LIB3138-080-P1-N1-H11
atgtgctagaagttgtgatggaacttgcgtgtaggagttcttagcattctcaatgtcttaggtgcaaagagaagatgctaagtttgagatgatcttactatatttttcatattggaccgtcttcctctataattttgagttacagtgtccactt

SEQ ID NO: 38561 - DNA, 361 bp, Glycine max
  Clone ID: LIB3138-080-P1-N1-H7
ctagttctagatcgcgagcggccgcccttgggttggttttttttttttatatttaaacacactcattgcacatagtaatgcgctttatttaagtgaataaaatactacatactagttcacaaatgcaaaaggacactcatcaaccagatatttgagactcttacagttctcaagaagtcgcgtcagcataggattagtggcgttagaactcagaatttcattcttaacgccaaaaagaacagccagtaaagctactggaaaaggatcaactctagtaagaaaaacaattttcttacctttcccaagtgctgtgcgaatccttttgttgatatctgaggagcgattgttaactgcagaacta

SEQ ID NO: 38562 - DNA, 287 bp, Glycine max
  Clone ID: LIB3138-081-P1-N1-A1
cgctcgagagcgttggggaattggagggagaagagagaggggattagcacatcagcagcataagaagaatgcgttggatggaaccgtgcgagggctatgggactcgccggtccacgagaagagaggggaaatagggaagcagtgaatgcctcaagccatatccaagcgacgcgtcgtttttccaatcgtcgggcaagactcgtcttcgattgccacgcttctcttcaccattctacaacgtaaccacgccaagtcacacctcgacgttctaattgcttctgagtcta

SEQ ID NO: 38563 - DNA, 378 bp, Glycine max
  Clone ID: LIB3138-081-P1-N1-A4
tcgggctcaactctaatcggctcgaggatgtcttacgtggctgataacgttaatcagccccaagagaaagatttgttggagggaaatttttcctttgatattaaatctcgctctagattggaaaaagtttcctctacaaaagcacaatttgttagtggaaaaaccttcaaatatgatataattggtgctggttcacattcttcagaagattttcctgaaaaggaagatcaagaaaaacccaaaaagattgatgccagattgagacaaagaatagatcctcaatacaatgaggttcaggctcagatggaaacaaatttgtttaaattgtctcttgatgatgttgaaactcctaaaggttccatgttggatctgaaaatt

SEQ ID NO: 38564 - DNA, 80 bp, Glycine max
  Clone ID: LIB3138-081-P1-N1-A5
caggaaaaatataattaaaaaaaaaaaaaaacaaacacaaggagaatattaaaaaatgtggaggaagggccccccccccc

SEQ ID NO: 38565 - DNA, 375 bp, Glycine max
  Clone ID: LIB3138-081-P1-N1-A6
ctcgatttttaagaattggtgatgtctgggaatgcaggaggcaaaatgagtgattgggcctcattggtacaagtgtttttaacaaacagcaacagtacagagcattttgatgcatgtaagtggacaaaatcagaaccacattcctgggaattgatcttcccaatagaggtatgtggtcctaataatggttttgaaatgtggagttctgagtgggcaaatcaaacttcatggcatttgagtttccttattgacaatcccaaacagtctacagtttttgatattctcttgggaatctctcaagattttgaaattgctggtaatactcttatgccagctttttctgttccacaggctactgccagatcttctgaaaat

SEQ ID NO: 38566 - DNA, 374 bp, Glycine max
  Clone ID: LIB3138-081-P1-N1-B1
gtcaagctttactttagtggttctaaattgaaaagctgtctagctagtcataacatcaccattactgatggtattgacaaaactagtgcaactttgcaatttagaaagttagcagattgtgattttctcaagagaaactttaagcagatgtctaatgttttgtgggtggctcctgaggacaaggcgagtttatggtcacaacttcattatgtttcgtgtaataatctggaaatgcaagaagcttatcttgtcaatctcgtaaatgtgttacgagaattgtatttgcacagtccagaggaagctcgccaattgagaaggaaagctctctctcgtattgaatggctgcaaaaagctgatgtgcctaccatagcaca

SEQ ID NO: 38567 - DNA, 373 bp, Glycine max
  Clone ID: LIB3138-081-P1-N1-B2
ggtccatttccaaagcagggtagttttccgttgtcacggccatggctttcaaaaaagtactattccaatatttcactctggctttgtgtcttgtcttcgcattttgtgcttttgagggcaatgctcgcactctcgaagatgctccaatgcgtgagaggcatgagcagtggatggctatacatggaaaagtctacacgcactcttatgagaaagagcagaaataccagacattcaaagaaaacgtgcaacgtatagaagcctttaaccatgcgggaaacaaaccttacaagctaggcatcaaccattttgctgatctcacaaacgaggaattcaaagccataaatagattcaagggtcatgtgtgctccaaaat

SEQ ID NO: 38568 - DNA, 377 bp, Glycine max
  Clone ID: LIB3138-081-P1-N1-B4
cagccaggaattgtttcccaggacctattgggttttaaggcgacaaaatccttttgtgttaaataggtggatgggaaaattgactttcccccagggcacttcccgaagtgttaagagaatgcctctttctatagggggaggagctggtgcaaagaatgctattctcatgaatatgccaaatgctgttctttcaatgtggagatattttgttggagatctcgtctttgaagtttctaagatgacttctccctacattaaatgtacagtctctttgttcatagcatttggaaatttggctgatgataccatcaattttgaggcttttccccacaagctggtgcagtttggagagattcaggaaaaagttgtattgaaat

SEQ ID NO: 38569 - DNA, 368 bp, Glycine max
  Clone ID: LIB3138-081-P1-N1-C2
ccccacttttgcacaagcaattgcaacaaaccaacggtgaatagtgtctctctctttttctttttcttatttttctctcatagtgtctctctttttctttctcttatttttctctcatagtgtctctcttgttcttcaatcaagagaagaaagaatacaccctgaagccatggaaggtggtgtgccagaagctgatatgtctgccttcagagaatgtttgtctctatcatggaagaatccttatgttcttcgccttgctttctctgctggaattggaggccttctctttggttatgacactggagttatttctggggctcttttgtatatcaaagatgaattcaaagcagttgataggaagacttggc

SEQ ID NO: 38570 - DNA, 375 bp, Glycine max
  Clone ID: LIB3138-081-P1-N1-C3
tcggggcatctatttgagatccacagtagttaggtagcaggggtaagtgtctaaccttagaaacatatctgctacatatcgtgtgcattttggaattgtgccactaaaattctattcatctatggctgcctcatcttatgctatgcaatcaatccttgcaaaccctatgatccgcatttccagcgggtctagggagaaccattttggtgttcctgcttatcacatgagaaggaatgttggcctgagagttaggtccatggctgaggaagagcaaccaagtcagcctgcgaccccagttacaccaccaccagcagaacccaaaccacagccagtctctactccttcaccaaaggtgagcaccaagttttctgatgt

SEQ ID NO: 38571 - DNA, 342 bp, Glycine max
  Clone ID: LIB3138-081-P1-N1-C4
tcaggtggaattgcaagaagctaatcttgtcaatctcgtaggtgtgttacgagaattgtatttgcacagtccagaggaagctcgccaattgagaaggaaagctctctctcgtattgaatggctgcaaaaagctgatgtgcctaccatagcacagattgaagagttccattcgatgcagaggatgatgaatgctcctgattcaaatgataatattgatttactgttgagcattgatttgttgggtttacaaggagcaggtaaagcttttccaaacaaaattgtttttgatgataagcttgtgttggctaacacacaagaattctttgatggaaattttccagt

SEQ ID NO: 38572 - DNA, 377 bp, Glycine max
  Clone ID: LIB3138-081-P1-N1-D4
tcaaggagcattttgttgcatgtaagtggacaaaatcagggggacattcctgggaattgatcttcccaatagaggtatgtggtcctaataatggttttgaaatgtggagttctgagtgggcaaatcaaacttcatggcatttgagtttccttattgacaatcccaaacagtctacagtttttgatattctcttgggaatctctcaagattttgaaattgctggtaatactcttatgtcagctttttctgttccacaggctactgccagatcttctgaaaatgcggaatcctctgcatgatctggaatttgtgttttctttcgcttgttcgtttgtttaattcaataaaggaaattaggcatgaccctcttgttgagt

SEQ ID NO: 38573 - DNA, 344 bp, Glycine max
  Clone ID: LIB3138-081-P1-N1-E2
aattctttctaaattggagttaccactagtgccatggggggtagcacttcccaggatgtgaaccatgccgtccttgctgtggggtatggagttgaaaatggcgtcccatattggctcataaaaaattcatggggagaaagttggggtgagaatggctacttcaaaatggaattggggaagaacatgtgtggtgttgcaacttgtgcgtcttatccagttgtggcataaattgcataagaatatggtccctggtgactaccaccttgtcatgcttcagagtttaaagataagtgtcattgtataatgaaaattgctcctagttgggttggtatgatgtattaaat

SEQ ID NO: 38574 - DNA, 379 bp, Glycine max
  Clone ID: LIB3138-081-P1-N1-E3
tcagggctggtccaaaaaatgctattctcatgaatatgccagatgctgttctttcaatgtggagatattttgttggagatctcgtctttgaagtttctaagatgacttctccctacattaaatgtacagtctctttcttcatagcatttggaaatttggctgatgataccatcaattttgaggcttttccccacaagctggtgcagtttggagagattcaggaaaaagttgtattgaaattttcacaagaggaatttcttacagcttggtcaactcaggtgcgtcctgcaacaactctgttggctgatgggtgtccatatttgtatgcaatggtgcatgatagttcagtgtctacaataccaggtgattttgtcattgg

SEQ ID NO: 38575 - DNA, 398 bp, Glycine max
  Clone ID: LIB3138-081-P1-N1-F3
cgtagcttcgaattccggttcgggctctaataaacctatggcccctctgtctactgtgcggggaaaccagaatgggaatcacttccccctgaaaaccaagcccggctcaatgcaagacaaggtgttaggtacattggcttggaaggcctggctgttgtgaacacaaaaaccatggaacctgttcctgctgatggtaaaactgttggtgagattgtgatgcggggtaattctgtgatgaaaggctacttaaagaaccctaaggctaacgaggagacctttgcaaatggatggtttcattctggggatcttgctgtgaagcacccagatggatatatagaaattaaagacagatcaaaggacatcataatctctggtgctgaaaatatcagcagtgtaga

SEQ ID NO: 38576 - DNA, 376 bp, Glycine max
  Clone ID: LIB3138-081-P1-N1-G1
gcagaatgctagctcatcctagagttttaaaaatggcggggcctcctccatggctctctcttccccatccttggctggcaaggccgtgaagctgggcccatcagcccccgaagtcgggagggtcagcatgaggaagaccgtcaccaagcaggcctcctccggaagcccatggtacggcccagaccgcgtcaagtacttgggcccattctctggcgagcccccgtcctacctcactggcgagttcccaggtgactacggctgggacactgctgggctttcggccgacccagaaaccttcgccagaaaccgtgagctcgaagtgatccactccaggtgggccatgctcggggccttgggctgcgtcttccccgaactg

SEQ ID NO: 38577 - DNA, 203 bp, Glycine max
  Clone ID: LIB3138-081-P1-N1-G10
gttcttttagggggcgcgccacttctgatatcgacggcatctgctgtcaagagtgcgaattggggaatactgcttgcacaaaagcaatgactatcacatttaatccaaacccgcgttctgatgcatggagcatggaatttctgaagcgcactggatgtcattgcgatatcatttgtgtgactggatggactggccacccaatg

SEQ ID NO: 38578 - DNA, 269 bp, Glycine max
  unsure at all n locations
  Clone ID: LIB3138-081-P1-N1-G12
aattcccanctttattatctcacaacccactaacanctgcaagctttacattacaagtatggtggaaaacacaaaccnnaacacacagactatcaagagtaaagaagacggtgaacctcctcaaattatcaagattgaaggtcctatccacagctcaaatgtgatgctctactccaaagatcagaatgtagcaagacgactggctcataaagtcctaaataatggtaaaaaagtccgctaccttataaaaactgtagaaataattcata

SEQ ID NO: 38579 - DNA, 376 bp, Glycine max
  Clone ID: LIB3138-081-P1-N1-G3
tagcgctttttttttagagccaaccaaccagaaaaggggggaggttttccatccaaccccgaatggctcaatacccaaaaaacctttgggaattactgaagaaggataacacttttgtgtacatgtgtggactaaaaggaatggaaaagggaattgatgacattatggtgtcattggctgccaaagatggcattgattggactgagtacaagaggcaattgaagaaagcagagcaatggaatgtcgaagtctattaatctctgttcacttgcacaaatatcatctcctactttatgctgcagcaagtctatcaaccctcctgcgttgtgtagatatatgacgaccctgtaatttttctttgacgatttttatactg

SEQ ID NO: 38580 - DNA, 388 bp, Glycine max
  Clone ID: LIB3138-081-P1-N1-G6
ctaatacttctcgacgcactttactgattcgcctaccatagcacagagtcagctatcttattcgaaacaggggaataacaaccctcctcatccaaaaaaacttattcctcaacaatacaacacattaaaaacgtttctcccagctaactaccattttgtgtaagaccggaacaatgctattcgtgctaacttcctttggaccaacacaatgtgtcattaattgaccatatatgtagtcacatcttctgaatttcaaaattgcttgatgcaaatatgaagctatggagattcaattgcatcccccacttaattattacacactttatataaagccacaggttaatcaagtagcaagattctttccatgcaaatcaatataccttataca

SEQ ID NO: 38581 - DNA, 231 bp, Glycine max
  Clone ID: LIB3138-081-P1-N1-H10
ttttgttaactcttgattcatataaatgtatgtgggatagagcactgagctggtgtgaagatttaaattcgaacttgctgattacaagtctactcaatttttgagctttgcaaaactgcctattgagttgtgacatgaaaaaattggaaataatgttatattcttgttacttcagtggcataatattagaagttaaagcaaagccctagataatgttaaaaaagtacagta

SEQ ID NO: 38582 - DNA, 373 bp, Glycine max
  Clone ID: LIB3138-081-P1-N1-H2
ggctcgagtcgctcgagccgctcgagcggctcgagatggttgtcttctaaaaaaataaaattaagaaattttcatggtaaccattcgtgcagatgaaattagtaaaattatccgtgaacgcattgagcaatataatacggaagtaaaaattgtaaatacgggtaccgtacttcaagtaggcgacggtattgctcgtatttatggtcttgatgaagtaatggcgggtgaattagtggaatttggagagggtactataggcattggtttggatttgggattcaaaaatggtggtggtggaattaatgggtgatggtttgatgatacaagagggaagttcagtaaaagcaacaggaagaattgctcagatacctgt

SEQ ID NO: 38583 - DNA, 197 bp, Glycine max
  unsure at all n locations
  Clone ID: LIB3138-081-P1-N1-H3
acctccgaaatccgcctcnacaaaaaaataaatataaacaaaaaaaaaaaaaaaaaactgacaatttataaaaaacaaaaaaaccaaccaaccccaaaccacaaacttaaaataatccaaaaataatacaaaaacacttcaccaaatcttcccatatactcattacccaattaacacaaaaaacattttctcaaact

SEQ ID NO: 38584 - DNA, 227 bp, Glycine max
  Clone ID: LIB3138-081-P1-N1-H4
atatttccagttttattttctctcgaatcacataaatctatgagggttacatcactcatctggtgtgaaaattaaaattcaaaccaactcatttcaagtgtactcaattttttagctctgcacaacttcctattaattaatgacatgtacacatctcaaataatgttctatacttcatacatcagaagcatactattagaatgttgcgcaaagtcctagataatggt

SEQ ID NO: 38585 - DNA, 227 bp, Glycine max
  Clone ID: LIB3138-081-P1-N1-H5
tttggataactcttgattcatataaatgtatggaggatagagcactcagcagatgtgaagatttaaattcgaacttgctgattacaagtctactcaatttttgagctttgcaaaactgcctattgagttgtaacaagaaaaaattggaaataatgttatatttttgttacttttgtggcataatattagaagttaaagcaaataacaagatgatcttgaacaaaata

SEQ ID NO: 38586 - DNA, 357 bp, Glycine max
  Clone ID: LIB3138-082-P1-N1-A12
agagagtaatagaaaaagtgattgaaattccagcagatgtaatacttacaggttgtcaactcaggtgcgtcctgcaacaactctgttggctgatgggtgtccatatttgtatgcaatggtgcatgatagttcagtgtctacaataccaggtgattttgtcattggtgtcaagttgacaaccataaacaatatgtgtgcatatgggctcaatcctggtatttcaggttctcgtcttttgggcaccattcctcagtccatttcacagcaaactgtttggaatcaaatggcaacagtgagaacaccattgaattttgattctagcaagcagagcttttgtcagttttctattgaccttct

SEQ ID NO: 38587 - DNA, 196 bp, Glycine max
  Clone ID: LIB3138-082-P1-N1-B2
gagagatgttgcttggaagaaaggctgtttaatgggcaagattgtgatgtctgggaatgcaccagtcaaaaggagtgattgggcctcattggtacaagtgtttttaacaaacagcaacagtacagagcattttgatgcatgtaagtggacaaaatcagaaccacattcctgggaattgatctttccaatagaggta

SEQ ID NO: 38588 - DNA, 357 bp, Glycine max
  Clone ID: LIB3138-082-P1-N1-C1
aattggtgttggttcacattcttcagaagattttcgtggaaaggaagatcaagaaaaacccaaaaagattgatgccagattgagacaaagaatagatcctcaatacaatgaggttcaggctcagatggaaacaaatttgtttaaattgtctcttgatgatgttgaaactcctaaaggttccatgttggatctgaaaatttctcaatctaaaattgcacttcccaagaacacagttggaggaaccattctgcgtagtgatctattggcaaattttttgacagagggcaattttagagcaagtgttgatttgcagcgcactcatcgtattagaggaatgattaaaatggtggccacagt

SEQ ID NO: 38589 - DNA, 365 bp, Glycine max
  Clone ID: LIB3138-082-P1-N1-D2
attttatttaattgaaattttaaaaatgactgggatggacttaagaattcaattattgaaattgaataagtaaacaatttaattggattggtcgaatggtatcaaaaaaatggagtactaactcccatttcttatttattattgaattaaccgatcaacttgctttgttatcgaacatttctttttgatttcaaaaattttccggaaaaaatttgaatctatttttatatgcgaatcaatcctactacttctggtcctgaggtttctgcgcttgaaaaaaaaaatctgggacgtatcgcccaaataattggtccggtactagatgtagcttttcccccaggtaagatgcctaatatttacaacgc

SEQ ID NO: 38590 - DNA, 372 bp, Glycine max
  Clone ID: LIB3138-082-P1-N1-D4
gggctctttttttctcttcttcttcttcttctaccctgcgatattaatattccgtgcaaaaaccaccaacaacaacatcaccaccaacaagaagaacaagattggcgttatgggtctcttcctttctaggaatttggcttgcaaattcatatacccttttcttttctccaagaaggtttccaaggatttgtttcccaagcagttggagaacatgatgtctctgatctctcctcgtactggcaggcatttgcagcgctatgacaatggctgtcgccaagttgtgggatgcattccttatagatacaagaacaatggtacacaggataaggaattggaggttcttgtgattagtgctcagaagggtcatggaat

SEQ ID NO: 38591 - DNA, 364 bp, Glycine max
  Clone ID: LIB3138-082-P1-N1-E1
gtttgtttttaaggaagacaggcccaggcacaggcgcatcatgttattgttattggtggcttcttcactcagcaaccaccaaaccacaccgtcgcacccattccatcgctgattcccccaatggcttccactgccaccaatttctctctttctctctgcgccaaccaacaaactccaatccccaaaccctctttcttctccaataacaaccatttgcacttcaactctaataataattgggcctgggcctctgtttccacctctcgcaagtcaaggatatgcgccacctcctctcaagttatggatccctccgcagcaaaatccgaacccgctcttcccaccatcgtcgaagtcgatttgggta

SEQ ID NO: 38592 - DNA, 366 bp, Glycine max
  Clone ID: LIB3138-082-P1-N1-E2
ggccagattatgacatacttggaagtgaagggaactgggggtgctaaccagtgcccaaccattgaaggtggagtggactcattcgccttcaagccagggaaatacaacgcccagaagttgtgcctggaaccaacttccttcacggtgaaggcagagggcgtggccaagaacgccccacccgaattccagaacaccaagctcatgactcgtctcacctacaccctggacgagattgagggtcccttcgaggttacatccgatggaaccgtgaaattcgaggagaaagacggaattgactatgctgctgtcactgttcagcttcccgggggagagcgtgtgccattcctctttaccattaagcagttg

SEQ ID NO: 38593 - DNA, 371 bp, Glycine max
  Clone ID: LIB3138-082-P1-N1-E6
tcagggtggaaccttgttctcctcctttggtggtcctgggggggtgtttgttttttctctcacctgaaaatgtcttgctgcggtggtaactgtggttgcggaagctcctgcaagtgcggcaacggctgcggaggctgcaagatgtacccagacttgagctacactgagtcaaccaccaccgagaccttggtcatgggagtggcacctgttaaggctcaatttgagggtgctgaaatgggtgtgcccgctgagaacgatggctgcaaatgtggaccaaactgctcctgcaacccctgcacttgcaagtgaggtgttgggagagcaagcttcaagcagagatagcccttaattaggaataatgattaactatt

SEQ ID NO: 38594 - DNA, 371 bp, Glycine max
  Clone ID: LIB3138-082-P1-N1-F1
ggctcttttttttctctctctctctctctctgaattcggaggacagcccctttgctccgcagattcgattcaatcgccgatctttatcactcactgctcctcgggaatccctcgtctcccccctttcaatctctgtctcttctccctcaatataatgttccagattttcaagggctggttctgactcgatcaagcttttgactccttaaaaaagaaaaaaaaaatatggagggtgacacattctctggtcttggcaacggtacccagattgatagcaagatcttgcagacatttaagaaaagctttgttcaagtccagaacatcttggatcagaaccgggtactcatcaatgagataaaccagaatcatga

SEQ ID NO: 38595 - DNA, 371 bp, Glycine max
  Clone ID: LIB3138-082-P1-N1-F2
ggattttatttaattaatgtgaatattaagagaactaggtgaatggttgttattacatgcactcagagtagattgtacgtacgtgttgaatttggaagcaggtttcgaattggtttattaacgcgagggtgaggctatggaagccgatggtggaggaaatgtatctggaagaagagaaggagcaagaaaacgacgtagcatcatcggatattaatgttcccgaagaggatgagaagccaacgcaggaggctccactccttcgaattgactcagagtgcatgtcgtctatcgtcaacgacgtcacaaagagcggcaaaaccattcaaaacgacaaccaaatggacgcattcgggtcggtggagcttgacttt

SEQ ID NO: 38596 - DNA, 250 bp, Glycine max
  Clone ID: LIB3138-082-P1-N1-F4
tcagggggtttattaataaaaatgggtttcatgtgtaaagtgcgtcaacttaaattgtcgtttcagttacccctacccacccacccacaaaaaaataataataatatcttctgctcattttagtataggttagattttaatcaccacttttttttttaataatttcgggttaggattgttttaggcgtgtttcatttgtaaaattttctcatcttcacgagtgtttcaataaaggcagcaaatcaccttg

SEQ ID NO: 38597 - DNA, 371 bp, Glycine max
  Clone ID: LIB3138-082-P1-N1-G1
ttaggcttaatttttttttaaaacctgctaaattcctagagggggttgctgcatgtctaagccataatacagtgttttctggtttgctcggcataatcactaaaacagatcgatcatcaactctgggatatcttccctccattgctgagttgaaatctggagctaatttcttcaattatggcccccttcttataaattctgctttatctgaagtccctaagtgcaggcttattgaggaaaaaagtatagatgaacctgtgaaaactgctcaaaacaactatgagcttcctcgcatgcccccttggtttagttatgttggtagtattaaattataccagcctcttgcagggattctccgatttgtgggttta

SEQ ID NO: 38598 - DNA, 369 bp, Glycine max
  Clone ID: LIB3138-082-P1-N1-G2
ggtgagttttgtaattgaagttgaagtcttgcccttcgcggttcaactccaaacacaagacatcatcatccatggctgcctccgtctccactgtcggagctgtcaacagagctcttttgaacctgaatgggtctggacctggggtttcagctcccagttcatccttctttgggagcagcttgaagaaggttattggctcaagggtccccaacacaaagatttcctctggaagcttcaagattgttgctgtagaagagaagaaagagattgaagagacccagcagaccgacaaggacagatggaagggtcttgcctatgatatctcagacgaccaacaggacatcacaagaggaaagggtttggttgact

SEQ ID NO: 38599 - DNA, 377 bp, Glycine max
  Clone ID: LIB3138-082-P1-N1-G4
aaaacaatttataaaaaaaaaacccttagccaacacagcgcggatggccacctctgctattcagcaatcagcattcactggtcaaactgctctgaagcagctcaatgagttcgtccgcaagaccggtggcgccggcaaaggtcgcactaacatgcgccgcaccgtcaagagtgctcctcagagcatttggtatggccctgaccgtcccaagtacttgggtccattctcggagcagattccatcatacctgaccggagaattccctggtgactacggatgggacactgctggattatcagctgacccggaaaccttcgccaggaaccgggagctggaggtgattcacagcagatgggcaatgcttggtgcccttggct

SEQ ID NO: 38600 - DNA, 260 bp, Glycine max
  Clone ID: LIB3138-082-P1-N1-H1
tcgcttcgggatgttttcttggttaccaagattatataggatcatgtgtagattttagatggcagaaatcttggtttatgaattttgtcttgtcccttgcaatattttcatgccgataataattaacaagctgacatggctcctgttaatgcagttgagacatttttcaagaagtagtaaagctccttctacaatattttttgacttggtgctttccttttggatcttacaatgggaaacagtgaggaagagaaatctac

SEQ ID NO: 38601 - DNA, 331 bp, Glycine max
  unsure at all n locations
  Clone ID: LIB3138-082-P1-N1-H5
tcgagggggaggaactcattttcttgcgtagtganntctattggcaaagttttgttgacatgtagggcaattttaggaggcacagtgttgnnatttgcagcgcacctctatcgtatttagaggagatgatnntaaaatggtggccacacgttggtatttcctgagaatacacggtatatcnattggcctgtgctatgaatagttcttttagggggcgcgccagttctgatatttacaccatctgctctcaagactgtgaattgtggaatcctgcttgcacaaaagcaatgactatgtcatttaatccaaacccgtgttctgatgcatggag

SEQ ID NO: 38602 - DNA, 365 bp, Glycine max
  Clone ID: LIB3138-082-P1-N1-H6
gctcgtgtggtgagtaaaaatagcaagcctcaagctactgcaatgcatgtgggagctatagaaattatcattgatagtttcgcaagtcctgattgcaacatagttggtgcaatgcttttggttgatacttatcataccaatcctgaaaatgcagttcgtagtatttttgttgcgcctttcagaggcggaaggcccattcgggtggttacatttccgaataccattgtgcagattgaaccagacatgaattcaaggtttcagcttttgagtaccactaccaatggtgattttgttcaagggaaagatctcgcaatggttaaagttaatgtagcatgtgctgctgttggcttgacatcaagttacac

SEQ ID NO: 38603 - DNA, 344 bp, Glycine max
  Clone ID: LIB3138-083-P1-N1-A10
gagcacttgtctccactgttctttgtccttcaggacggggggatatattatcttttcatacaataagtgtagctgtgaaaatggcacattagcattcaagtcaaatggggtgccagatatcatcaacattatttcttgcatgatttattattgtatctatgcctactctatatccccttccctgttaggatagcaattaaccacttatccgttagctagttagttagaaaggattggttagatcaataaggtaagagggattcattctgtgaattggatggctagtgtgtgaaaggagaaacactttgtgaaggagaaacctttagaggagagacctctcctgt

SEQ ID NO: 38604 - DNA, 339 bp, Glycine max
  unsure at all n locations
  Clone ID: LIB3138-083-P1-N1-A2
tcgagtctcgatttttttttaatcnacgaaccacattcctgggaagggggggcttcccaatacgaggtattgtggtccataataatcggtttatgaaatgtcggagtctctgagtagggcgaaatcaaacgttcattggcattttgcagtttcccttattcgaccaatcaccaaacacgtctacacgtcttttgatattcatcttgtggaattctctcacagatttatgaacattggctggtatatacctcttactgccagcattttctctgtttccacagggctacttgccagaatctatctggaaatgcgtgaatcactctgcatgtatctggaatt

SEQ ID NO: 38605 - DNA, 148 bp, Glycine max
  Clone ID: LIB3138-083-P1-N1-A7
attaatttcgatcgagcgtattttcatccaccaatcgcttccaccgtgggcgctctcaaatacatgaatatagtccccatcagcgacaccgaaaccgacaaactaattcgtcaccaaacaagaagaaacctccaccttgagcgcgcga

SEQ ID NO: 38606 - DNA, 290 bp, Glycine max
  unsure at all n locations
  Clone ID: LIB3138-083-P1-N1-B1
gcgtgttgtctaagtccaaagggttcatgtcctcagatggagaactgtggaatgggagatttgctatgttgggtttgattgctctggcttttactgagtatgttaagggtagtactttggtataattcagtcatgaaggcacaccacaatggacttaatctcctttgtgattagagagaccaatgtttatttgtacttcgtgtgtttatttaatctacatatcaaaattatttcgttaatcataaccaaacttcttcacattgnaaagagggaaaaaaaannntattaat

SEQ ID NO: 38607 - DNA, 332 bp, Glycine max
  Clone ID: LIB3138-083-P1-N1-B12
gggttttgtttggccctaatgggtccaagtgtgggaagcagacatcaacagtacaaagcattttgatgcatgtaagtggacaaaatcagaaccacattcctgggaattgatcttcccaatagaggtatgtggtcctaataatggttttgaaatgtggaggactgagtgggcaaattaaacttcatggcatttgagtttccttattgacaatcccaaacagtctacagtttttgatattctcttgggaatctctcaagatattgaagaggctggtaatactcttatgccagctttatttgtatcacaggctactgccagatcttctgaaaatg

SEQ ID NO: 38608 - DNA, 309 bp, Glycine max
  unsure at all n locations
  Clone ID: LIB3138-083-P1-N1-C12
ttatctcntactattctgagagcaatggcttcccgcctatatataaaaatctgttggtccctaatacatgcttttcttgacatgcatatgtcgtgcctcgtcacgcactctctctgagtcttccattgccacacagcatgaagagtggatggccatgcacgaccgtgtttacgctgacagtccacataaggacaggcgccagcagatattcaaggagaatttggagttcatagagaaacacaacaacgaaagaaaaaagaggtacaatttaagcctaaacagttttgctgatttgactaacgaagaatt

SEQ ID NO: 38609 - DNA, 364 bp, Glycine max
  unsure at all n locations
  Clone ID: LIB3138-083-P1-N1-D1
cgtagcttcgaatttcggttcgggtttttattttcaaaaggagaaaagggtttgtttcgggggtttggaaatttcagcccccatcaaaaaaaaagccccataatcttcgaatcgaaggcatttgattgaaaggtcgaaactttagcatctgggatcgcgcaattggngttttttttggttaaaagggtatcttcggaattcatggcaaaactgtacgtgaaggcggtgccaccggcggatctgaacaggaacacggagtggttcacgtaccctggcgtttggaccacttacatgctcatccttttcttttcttggatcctcgttctctccgtcttcggttgctcccccggcatcggttggacca

SEQ ID NO: 38610 - DNA, 60 bp, Glycine max
  Clone ID: LIB3138-083-P1-N1-D2
tcggcttcgaggaaaaatttattttaaaaaaaaaaaaaaaaaaaaaaagggggggttatt

SEQ ID NO: 38611 - DNA, 346 bp, Glycine max
  unsure at all n locations
  Clone ID: LIB3138-083-P1-N1-D9
aatactggatgccacatctnangnatnnacaccccgcccttcttaaaaaacacggcgcccccaacaaaaaaaaantnnattttttcaacactagaatttgaacgctcttctcagggataatatgctctcagacaaagtacatcaaacattaaaatttccagcaaaaatttccagtaaaagaagagtgtcccaccaacattttcagctaaaagaatatttataaacactctactgacaaaatgctccaactatataatctgcgggcgagggccgggcttaatccatattcaactatctaattccatctcaatcacaaaaacctttactccactgacagtcaataact

SEQ ID NO: 38612 - DNA, 347 bp, Glycine max
  Clone ID: LIB3138-083-P1-N1-E3
ctttaaagctccagggtttttttaaacgcataacccgcgccgaaaaacacgtacgccgtaaagttcgcagttccactcagccaagggatgcgacttggtagtgtcaggttgggtcgggtgatgaggatccgacccgttcgcgcagcttcagagcgcatttcggagaaggtggaggagagcataaagaacgcgcaggaggcgtgcgccggcgacccgacgagcggcgagtgcgtggcggcgtgggacgaggtggaggagctgagcgcggcggcgagccacgccaaatacaagcaaaaggaaaaggactccgacccgctcgagacctactgcaaggacaatccggagac

SEQ ID NO: 38613 - DNA, 215 bp, Glycine max
  Clone ID: LIB3138-083-P1-N1-E4
agagctaagacggcgcaggcacgcggacgttaggttcgaatttcggttcaggatcctttgttggttctggaattggggttttctttggggggttcgtttgtttaattcaataaaggaaattaggcatgacccttttgttgagtatgctctgcctatttgaaaatttccacacctcttttaattgtcgtaatgatgtgtgaagtgtgtgttatttt

SEQ ID NO: 38614 - DNA, 346 bp, Glycine max
  Clone ID: LIB3138-083-P1-N1-G1
gtcaaatttttgatgtctgggaatgcaccagtcaaggggggtgattgggcctcattggtacaagtgtttttaacaaacagcaacagtacagagcattttgatgcatgtaagtggacaaaatcagaaccacattcctgggaattgatcttcccaatagaggtatgtggtcctaataatggttttgaaatgtggagttctgagtgggcaaatcaaacttcatggcatttgagtttccttattgacaatcccaaacagtctacagtttttgatattctcttgggaatctctcaagattttgaaattgctggtaatactcttatgccagctttttctgttccacaggcta

SEQ ID NO: 38615 - DNA, 376 bp, Glycine max
  unsure at all n locations
  Clone ID: LIB3138-083-P1-N1-G6
ngttcgagggctggttgttactcctctgcacaattacttgaagcccgttggtgatgcatgcaaacattttttaccacanncaactcatnnccacnntgttattaccttcttccatgannagtttggaaattgcagtntggatcntgtctcgtgcctgttgtgaagtgaagggatctctttcatctagcaaccttacttaaacccatgcaacaaaaagattgataagtactggaaagattgcagtttggttttggctattgcagtagttatggatcctcgtttcaagatgaagcttgttgagtttagtttcactaaaatctatggcgaggatgcccatgaatatgttaagattgttgatgatggaattcatgagctg

SEQ ID NO: 38616 - DNA, 346 bp, Glycine max
  Clone ID: LIB3138-083-P1-N1-H3
caaatggtatcagtgagaacaccattgaattttgagccgagcaagcagagcttttgtcagttttctattgaccttctcggtggaggaatcttagtggacaaaactggagattggatcacacttatacaaaattctccaattagtaacttattgagagttgctgcttggaagaaaggctgtttaatggctaagattgtgatgtctgggaatgcagcagtcaaaaggagtgattgggccttattggtacaagtgtttttaacaaacagcaacagtacagagcattttgatgcatgtaagtggacaaaatcagaaccacatttctgggaattgatcttcccaatagagg

SEQ ID NO: 38617 - DNA, 349 bp, Glycine max
  Clone ID: LIB3138-083-P1-N1-H4
ggattcattttttggaatgggttttttttacaagagcgagtgctaggtaccgaacttagtcaatgagctagaatgggttataaagatatctatagatatatatagatatatttatctatagatatctttagaaaaaaaaaaagaaaattaacaaataagacgtatcattttatgtatagtagtggggaattatgggacaaaaaataaatccgcttggtttcagacttggtacaactcaaagtcatgattctatttggtttgctcaaccaacaaattattccgcgaatatacaagaagataaaaaaatacgagattgtatcaaaaattatatacaaaaaaatataagaat

SEQ ID NO: 38618 - DNA, 417 bp, Glycine max
  Clone ID: LIB3138-084-P1-N1-A6
agaagttttgttaggagatcttgtcttttgaagttcctaaaaggcctcctgccgactttaattgtccagcctctttcttcataccattggaaaattgggctgatgataccatcaattttgaggcttttccccacaagctggtgcagttaggagagattcaagaaaaagtcgtattgaaattttcacaagaagaatttcttacagcttagtcaactcaagtgcgtcctgcaacaactctgttagctgatgggtgtccatatttgtatgcaatggtgcatgatagttcagtgtctacaataccaggtgattttgtcattggtgtcaaagtgacaaccataaacaatatgtgtgcatatgggctcaatcctggtatttcaagttctcgtcttttgggcaccattcctcagtccatttcac

SEQ ID NO: 38619 - DNA, 411 bp, Glycine max
  Clone ID: LIB3138-084-P1-N1-B6
ctggtttttcaggttttggtttttgggccaccttccctaagtcggtggaacagctaactgtttggattcaattggcaccagtgagaacaccatggatttttgattctagcaagcagagcttttgtcagttttctatagaccttctcggtggaggaatcttagtggacataactggagattggatcacacttatacataattctccaattagtgacttgttgagagttgctgcttggaagaaaggctgtttaatggtcaagattgtgatgtctgggaatgcagcagtcaaaaggagtgattgggcctcataggtacaagtgtttttaacatacagcaacagtacagagcattttgatgcatgtaagtggacaaaatcagaaccacattccctgggattgatcttcccaatag

SEQ ID NO: 38620 - DNA, 419 bp, Glycine max
  unsure at all n locations
  Clone ID: LIB3138-084-P1-N1-C11
gtttcctctcaagctcccacccgttctcttctcacncccanaccacangcgaaaggaaaggccttccatagcgagcaaagcccccccnncnccaanaccgcnaccgcaatcgcccactgcaacgccggaaagggactgcgcaagagccaccgacaagccccaccccaggaccaacccaacaccctgcgatccaagaggctaccagcccatcccaatccgatgagacaacaacaccagagaattcaacacccactcacgcagctccaaacgcagaaacaccccccaaaactaccccagcgggcaggccaggggcagatccaccaaagaccactaccaaaagcaccgcaacaagcactcaaagaaccaacaaaagcaccgctctgaaccaatacgaccacacacctcccataaccgacaac

SEQ ID NO: 38621 - DNA, 384 bp, Glycine max
  Clone ID: LIB3138-084-P1-N1-C2
ggcttttccccacaatcttttcattttggagagattcaggaagaaagtgtttttaaattttcacaagaggaatttcttaaacctaggtcaactcaagtgcgtcctgcaacaactctgttggctgataggtgtccatatttgtatgcaatggtgcatgatagttcagtgtctacaataccaggtgattttgtcattggtgtcaagttgacaaccataaacaatatgtgtgcatatgggctcaatcctggtatttcaagttctcgtcctttgagcaccattcctcagtccatttcacagcaaactgtttggaatcaaatggctacagtgagaacaccattgaattttgattctagcaagcagagcttttgtcaattttctattgac

SEQ ID NO: 38622 - DNA, 412 bp, Glycine max
  Clone ID: LIB3138-084-P1-N1-C3
agaacaaatagtggatatctttaaaggaaaaccaatggcttaggtaaggaatcttttcccaactggtaccactgtcaaccgtgccgttgccgcatggttgctccattcactggcctcaagtccatggctggcttccccaccaggaagaccaacaatgacattacctccattgctagcaacggtggaagagtgcaatgcatgcaagtgtggccaccagttggcaagaagaagtttgagactctttcctacctgccaaaccttgatgatgcacaattggcatatgaagttgaataccttcttaagaagggatggattccttgcttggaattcgagttggagcacgagttcgtgtaccgtgagcacaacatgtcaccaggatactacgattgacgctactggaccatgtggaaac

SEQ ID NO: 38623 - DNA, 412 bp, Glycine max
  Clone ID: LIB3138-084-P1-N1-D1
agctttagtcagtttttttttgcccttctcggtggaggaatctgagaggccaaacctggagttgggtccacacctataaaaaatcctccatttagtaacttgtggagagttgctgctagaaaaaaaggctgtttaatggtcaagatagtgatgtctgggaatgcaccagtcaaaaggagtgattggacctcattggtacaagtgtttttacatacagcaacagtacagagcattttgatgcatgtaagtggacataatcagaaccacattcctaggaattgatcttcccaatagaggtatgtagtcctaataatgagtttgaaatgtggagttctgagtgggcaaatcaaacttcatggcatttgagtttccttatagacaatcccaaacagtctacagtttttgatattct

SEQ ID NO: 38624 - DNA, 88 bp, Glycine max
  Clone ID: LIB3138-084-P1-N1-D10
agactcaagagaaagcgtgtgtttttttaaaaaaaaaaaaaaaaaaaaaaaagagaaaatataaaaaaaaaaaaaaaaaaacaaacca

SEQ ID NO: 38625 - DNA, 343 bp, Glycine max
  Clone ID: LIB3138-084-P1-N1-D12
gtcagacagcgaccttttctggatgaatgtcttccacgggagacattgccatccgggaagactgaagacggggatgactccaatcggagtagcagaactgtgaagcgatggttggggtcgggatggggaacttggccacgggagcatatgcgcgggaggaagctgagccggcgagtactcgcgcgtggcggcgggatgagatgggaagagaggggacacgtgcgagtgtggaccggaagagtgagaggtggggaatgagtgtacaaaaggggaactttgttgatgcttgagtctttgatcgcgcgattgcgatgtcgccgcgagtgccgttaccggacaaccg

SEQ ID NO: 38626 - DNA, 121 bp, Glycine max
  Clone ID: LIB3138-084-P1-N1-E5
ctagatcgcgagcggtctctctttttttttttaagctagttaaggcaacaaattttgttcttctatttaaaactctaattcttattttattttttatccaaatatttgagactttatgatg

SEQ ID NO: 38627 - DNA, 418 bp, Glycine max
  Clone ID: LIB3138-084-P1-N1-E6
ttaagattttccaagtatatttctggtcacatattattaaaatggctgactttgataggaataggctaataaataatgataataataataatccatcacatgggaaaggtgtattgaaaagatgctgttgaatttaccgatgaagttcctagttgggccaccttgtacaactaaatataatgcactatgtttctataaagattttgatatatggagatcctatctaatttcgtatgatattaaactatcatcatctgatgcgatattacctgatatatctctggagacgatgggggcttattgtatactgagttactttacaagtgatgaatgaaggacctggacacatcccaatgcacaagattcctgaaaacatgcagaaacagttagaatggtgtagtgaagcgcctttttacac

SEQ ID NO: 38628 - DNA, 359 bp, Glycine max
  unsure at all n locations
  Clone ID: LIB3138-084-P1-N1-E9
ctccaatcgattttttatctcccnctaanatagaaagaacagaaatagcttatatgcctaccatagcacaccctgnnncgttccattcgatgcagaagatgatgaatgctcctgattcaaatgataatattagatttactgacgagcatggacttgctgggtttacaaagagcatgtaaagctattccaaacaaatatattcttgatgataagcttgcgttggctcacacacatgaatactcacatagaaattttccggtagactcttagttaccaatttttagtgaatggggctttatcctgtaaagtcaattatcctatataagcctttcatttataatatgttaccattttggtac

SEQ ID NO: 38629 - DNA, 268 bp, Glycine max
  unsure at all n locations
  Clone ID: LIB3138-084-P1-N1-F12
ataaaatactttttctaattatggaatatnnctattaggaaagacatatccaatgactatacattcattctatnnccgngcaaatagaggaaaaactcgatcgaaaaatggtggtttaattctatgttgtttaataggaagttagaatacacgtatcaattaagtaaatcaatggatagtcttggtcctatcgaaaataccagtctaaggaaagaccctaaaattctaaccgatatagaaataaaaattcacagggatttggattatt

SEQ ID NO: 38630 - DNA, 249 bp, Glycine max
  unsure at all n locations
  Clone ID: LIB3138-084-P1-N1-G3
agcagaattcatccctggtcatttcctatnctctctaattttagagaaaataattaaattcttttcataattagttttgaagttagagatcaaattgagtagctctctcaagaacttagctactactaacgttggagcaatttattagttattagtattaaagtggagtgatcttaatttgcgtgattgtacaaatttcatcttgtattcgttttttcgaaattgtatctcgaaattttgaaagcattg

SEQ ID NO: 38631 - DNA, 278 bp, Glycine max
  unsure at all n locations
  Clone ID: LIB3138-084-P1-N1-G7
cttcaatcactttttctttacaccacaaaagnncccgcaaaagataaaatttatataatcacggagacccccccccccccctaagaagcaaccacagcaagaaccccttccaacctcccacacacagcttgaacagacacaatcaaagcaaaccattaagacccccccaacttcacaaaataagctccacttaccaccaaacattcattaccaagggggacaccctacaccaacaaccgcttcaaccacaatagttctgaaagatcaattcatcacct

SEQ ID NO: 38632 - DNA, 200 bp, Glycine max
  unsure at all n locations
  Clone ID: LIB3138-084-P1-N1-G8
aaaaaaaaaatttacataaacacaaaaaaaaaaaccaaaaaaagaaaaaaattaaaaaaaagaaaccgcccccccccannccnacaacaaaaacaaaaaaaaaccaacaaaacacagataaaacaaatacaaaaacgaacacaccaaaaacaccaaaaagaaccaacaacaaaaaatgcacgcagaaccaccccatatca

SEQ ID NO: 38633 - DNA, 234 bp, Glycine max
  Clone ID: LIB3138-084-P1-N1-H10
agagcatccaccattcttttccctacaaccccttctcagctgtgagcaggaattagtgggattttcagtccctcacaagcacttcttgtgaagccagtgaagaagcagatgatggggaagagcaagggaatgagaattgcatgccaagccaccagcattcctgctgatagaatccctgacatgggcaaaaaacagctcatgaatctacttcttcttagtgccatttcacttccc

SEQ ID NO: 38634 - DNA, 224 bp, Glycine max
  unsure at all n locations
  Clone ID: LIB3138-084-P1-N1-H12
acaaaaaaccatatttttttcaacccaaaaaaaaacaaaaggaaagttaattttctattgttggtgcggcccactcctaaaaagnnccacctgggatcttgtatatttctcaatctaaaattgcacttcccaattacacacccttgaggaaccttctctcccctcctgttccatttggcaattcttttgacataatgcaatttttataacccatcccatatttc

SEQ ID NO: 38635 - DNA, 340 bp, Glycine max
  unsure at all n locations
  Clone ID: LIB3138-085-P1-N1-A1
ntnnntttttttnnttttttttntttttttttttttaacccaataatcacaaagttcattcattatgtcaaattatcaattccttttacagagccagggggaatgagggattcagttgtgaaatctgcattagcaataccataatgcaactacaaaccttatattttaggctttcagcgcgtatacaattaagatttaagtttttgggaatgaagccccaacaaaagggctttcacccggggtcctcttaaattggaggggattttcttaacttttgcttggcctaaaaatacacaagtaagcccccgggtaaattttaaaaatgcattttttttttttt

SEQ ID NO: 38636 - DNA, 379 bp, Glycine max
  Clone ID: LIB3138-085-P1-N1-A10
tttttttttttttttttttttttttttttattttttttgtttggtttttttttttggttttttttttttttttttttttttttaattttttttttttttttttttatttttaatttttttaatttttttttttggagaaaaaaaaaaaaaggccccaaaaaaaaataaaggggccccccccccaaaaaaatttaggaggaaacccccccaaaaaaaaaaaaatggggagatatttaaaaacttcctttttttttttcccccaaaaaaattaaaaatgcgaaaaggggtacccccaaattcaaaaaaaaatttaaaatcttggaaaaaaaaaaaaaccccccaaaaaaaaaaaaattctcccccaaggtgtgttcccccc

SEQ ID NO: 38637 - DNA, 86 bp, Glycine max
  Clone ID: LIB3138-085-P1-N1-A2
attttttttttttattatttttatatttttttccatctgtccaaattttttacaatttatataatttataaatcatttcgatttat

SEQ ID NO: 38638 - DNA, 376 bp, Glycine max
  Clone ID: LIB3138-085-P1-N1-A6
atattgttaatgttacgtttgatctatgtttcttctccatctatttctggctttggctttgctttgaatgacttaaaacaattttctcaactaatagaatatggccttgggccagagtctccacaaattgcaaactgcttttactaaatgaaattgactacatatgctgcctcttttttatcctttatttgagcagatcttcccatttgcagtactgccctcctgctaatgctcgataatacctatccctacagtagacaggtcttccatcagcagcctcagcagcagcagctgctagatcatcatcagttatcacctcgactggtaatttaagcagctcctcttttcttaagagctttgtgttaacctggggagc

SEQ ID NO: 38639 - DNA, 244 bp, Glycine max
  Clone ID: LIB3138-085-P1-N1-A7
gttaaatcgaccaggccaattaggtatcattttacattttttcttcaacagatcgtgtgataaaaaaaaaacccaccttttgtgctatgttatggcctttattttagtgtataaaaaattgcttacttttttacaagttctaatgggccttttttatccgtattttttgggactttttcaattcttaaaaaggtcccttatcataatttttgtggtttttaaactcttaattttttttttttta

SEQ ID NO: 38640 - DNA, 127 bp, Glycine max
  Clone ID: LIB3138-085-P1-N1-A9
ggttggtctaaaaaaacgcacacttcacacattatttcgacaattaaaaggggtgcggaaattttaaaataggcagagcttactttacaagggggtcatgcctaatttccttttatgaattaaacaa

SEQ ID NO: 38641 - DNA, 201 bp, Glycine max
  Clone ID: LIB3138-085-P1-N1-B2
tttttttttttttttttttttaaatatattttttttttgtgaattttcaaattttatttttattttattaacacctataaatttttattttttattttttttttttttttatttttttttcgcccccccaaattttttaaataaaaaaaatatatttttaaaaaaaaaaatttttcactaaaaaaagtttttccctttatt

SEQ ID NO: 38642 - DNA, 252 bp, Glycine max
  Clone ID: LIB3138-085-P1-N1-B9
ccgacctttttttttttttttttttaaagaacaagcccagatggatattctttaacaattaacaggaggtgcttggttattttcagttataggaactcccaacatgagggtggcccctaaacattttacatgaacatgacaggccctttccatggtcttgtacacggaacagagggatcacattgggctcatgacttattacctagccttcagaaggatctagaacataaaaagttgcgctaaaaatgttta

SEQ ID NO: 38643 - DNA, 367 bp, Glycine max
  Clone ID: LIB3138-085-P1-N1-C10
aacaaaaatatggatgaatgaaataaagagtcctttagttacatcacaaattacctctatttatttacattattgtgagccatcgttagccattaaattacagtatacaacaatcttcttctctttacgccgagcctgccacccattccgtaagatttattaggttgctcaaagaaaaatttgcaaaaataattttagaaaaacataccttgatcaacaacttttttggataggatgcttttttcattcaagcgcctttgacaatgtttacatttgacaaatggtacatgcccagctcaaaatggccattttcatgttatgggaaaacatattgcgggatcgttgtactttgcttgaactcttttgt

SEQ ID NO: 38644 - DNA, 195 bp, Glycine max
  Clone ID: LIB3138-085-P1-N1-C11
caaggtataaatcttattggggagtttgtatgcaagagaaacattatcgctctgtttctcagaacatgtatataagaaaaatgaagcaacaagtgtgtgagtggtagtagtagatgtaagcaatcaaaattacaatggtatggttcatacataataatgtatttaccaatggagaatttgtttggctctaacttt

SEQ ID NO: 38645 - DNA, 385 bp, Glycine max
  Clone ID: LIB3138-085-P1-N1-C5
gttggaaccaaaccaaacctttattatgtttccagataaaataaatacataaagcgacattttataagtgcagataataaaattacaggaagaagaagaagaaaaataaaagctagccactagtacagatggtggttttgttggtccacttgagaaccaaattggagatattggtggttgtgggaccaatttgagagagaggcttaaccccatccttcttgaaattcttgaattggtaacgaaacttatttccttcatggcctttcatgaggcacttgacaacgcttggtttttctgggttttgacaaggtcaatgttctttgcaactttggggcttaaagccaccttgactttattgcatttacataaaatccgtgggttcttt

SEQ ID NO: 38646 - DNA, 377 bp, Glycine max
  Clone ID: LIB3138-085-P1-N1-C6
aaataagaaaaaaaatatgatatcaatcaggctaacaaaattaaacatgaaatcaaagacaaagaaacttcaaacttttgaattgaaacaccatggcgataaaccctatcactcccaggaaaggaagacacatatttcctttttctccatttctgcactttgtgtcgaacttgagtgacacaatttagtagaaagtggtatggttgaacctaatccttgtacttcatttcagataccaggaagccaggcatgtcaaacaaggcagagaacttctcaacatcagctttgagatcttcaatagccttgttgttgacgagacccttgttgaaatccttgagaagtttgccatgctccttttggatcttcagtgtgagagt

SEQ ID NO: 38647 - DNA, 157 bp, Glycine max
  Clone ID: LIB3138-085-P1-N1-C7
acttcctttttttttttttttaaaaggaaaacgcaccaaattggggatgatgtgcaccctttaactgaaatttataaaggaagacagttcaatatcaaacttatcatgagggcaattccaacttggcattattgtttttgaacatacgaccatgcga

SEQ ID NO: 38648 - DNA, 93 bp, Glycine max
  Clone ID: LIB3138-085-P1-N1-C8
ttttattttttttttatttttttttttgcccacgaagcggtgtattataaggtaaattgaaacattaataaaatcatgacggcactaatcttc

SEQ ID NO: 38649 - DNA, 144 bp, Glycine max
  Clone ID: LIB3138-085-P1-N1-C9
cttcctattatattttatttttttcctattttattctcccgtgcggcgtttttttatcgggggggacgatcccatcccaaaaccaaggaaatatcgaaatttcccgtataaagggaccgcaccccaatgggggccacaatttac

SEQ ID NO: 38650 - DNA, 218 bp, Glycine max
  Clone ID: LIB3138-085-P1-N1-D2
attatttttttttttttttttttttattttttttttttttgggtttaaacacacttattgtacatagtaatgcgctttatttaagtgaataaaataccacatactagttcacaaatgcaaaagggcacttatcaaccagatatttgagactctttacagttcttaagaagttgtttctgcataggattagtggcgttagaacttataaatttcatttt

SEQ ID NO: 38651 - DNA, 143 bp, Glycine max
  Clone ID: LIB3138-085-P1-N1-D7
tatttttttttttttcttttaatttatataggggagtttaaacaattgggggatgtttaatattcagggaaaaccaattttttttgtgttttcaggatattttttaactcttacaaaatttaaaacaatttaatactttttaa

SEQ ID NO: 38652 - DNA, 80 bp, Glycine max
  Clone ID: LIB3138-085-P1-N1-D8
ctaggctaatagtaacaacagagaaagtataaagcgaaggttacattaattctcgttcgtgtccaatgatgcttactttt

SEQ ID NO: 38653 - DNA, 376 bp, Glycine max
  Clone ID: LIB3138-085-P1-N1-E4
aattaatcaatcaacgtgttagtgaagtgatatattattaaccatgtataactttcatgcaataaacctttgttgacagacacttgagatataacacaactacacaagtaggataaattataggataaattacaccatattgatcagtgatcacaaactggtacataaacattattattacatcaaacaaaacaagctgaaaaatgaacatgattatgacttcaaactatcctacgactctagcagataaacacaacttctatttgactgtagatgcatcccatccattgaatgaaaggacgctttattggctcagtctacatcttagaggaagcctgcagcaatacaacgtttcactgttgagacaggaaacgtt

SEQ ID NO: 38654 - DNA, 198 bp, Glycine max
  unsure at all n locations
  Clone ID: LIB3138-085-P1-N1-F10
tttatttttttttttttttttttgnaatatttaaacacactcagggcacatagtaatgcgctttatttaagtgaataaaatacttcatactagttcacaaatgcaaaaggacactcatcaaccagatttttgagactcttacagttctcaagaagtcgcgtcagcataggattagtgacgttagaactcaaaatttca

SEQ ID NO: 38655 - DNA, 372 bp, Glycine max
  Clone ID: LIB3138-085-P1-N1-F11
accatcatcagtactgccatgtgtagaatttaaaattacgggcataatgcaaactgtacaaagaagttttacaatttgataatgtatattacatgggcgagatttggcataagtgattagaaagacacgatttcatttgcagctaccatacctacaggcatcctagcattttggccagcaaaagaccccattcttgagtctagtatttccagttgagacttgacccatggcggactgtatctgccttctatccacagagctttccttgtatctttgtgtttgaaatcaggagcttttggattcctcttgttgttcctgttgtcccaccactcccctggtttagcaaagaacgcgttttacgattccaccaca

SEQ ID NO: 38656 - DNA, 207 bp, Glycine max
  Clone ID: LIB3138-085-P1-N1-F2
ttcggtgtcgatatcaagtgtctcgacatccatggcttgtgctgttgcgttatatgcgctgcggtcggtgctgcgatattggtcgttggcgacaaaaccacctacaccgagacgcgcatagacctctttgatgtttgctaattggcggtgctgtattacacgcgcagtgacgggtgctggcttagtttgggggccaaggatggggtg

SEQ ID NO: 38657 - DNA, 382 bp, Glycine max
  Clone ID: LIB3138-085-P1-N1-F6
ccaaggctcgcgtaattgagatcgaagccggaaacaaatttattgacattaagcagtttttcttgttcaactttttcaaaagcattttgttttcttaatattatagggatgtttaaatatatacacacattttgatttattttatactatagtagttatttatccttcgaatccttaggcaaagtagatactttgcagattggacataatttcctcaaagatataccattttttaatgcagtttacatggttgtcatgcccatatgttttaagtgtttcaacatctttcatgtttttgtactctttcagacatattacacatttttccttctttgtgactttgtttatatgaacaatattttgtttattgttaaaaattttt

SEQ ID NO: 38658 - DNA, 285 bp, Glycine max
  Clone ID: LIB3138-085-P1-N1-G3
gaaaatcaagaacacatcgatttactggtatttatggaactaaccaatgttttaaaatacatggtggaacaggcaatgatccattagcatgacatactaactatcaatgcaattatgtaaagaaaaaagaagttggtgttaacaaacgcctgaaaccatatttgatatgaaggaggtaatatcagttttgtataggaacattggttcaatcgatgattgacaagatcaaaagctgtggaaggcttgtattacacgggcgaccaattcatgctattgtcttggggc

SEQ ID NO: 38659 - DNA, 285 bp, Glycine max
  Clone ID: LIB3138-085-P1-N1-G7
gcatagtgcaaagtagcaaagacaatgctatcttataactgatatttgaagcgggagcatcaatacaatacaatatgtaactatgaactatcaatatatgatcgttattatgtctgtgatacacacaattaaggccataatatacttatgtgatttacaacaacttctagcttattttttacatcatgccaacctaactaggagcaatttttattatacaattacactttatcttgaatcattatttattaatacttggcattagcaatacgttttaaacttttg

SEQ ID NO: 38660 - DNA, 408 bp, Glycine max
  Clone ID: LIB3138-085-P1-N1-G8
atatttttttttatttttttttttttttttattttgggttgcaatagagatattataagctgcatcattgcatgaacataaacacaatgataacttatatgtttaaaatataacaaccacttccaacggaaacttatttttgcttaactaagcaacaaatttaagagcagaaaatcaatgaactatcacagtactttttggcggggaaaaaatagcactttaatctaattttttttaagcagcactttccaaatcactttcttcaagttaatgtgtgaaagaccacctagtttggtgcccttccttgctcttcttttaaatttcatgaccttttgccctaatttttttttctattctctcccctccatcaattcataggacctgtgttctccaaccttctcttttttt

SEQ ID NO: 38661 - DNA, 317 bp, Glycine max
  Clone ID: LIB3138-085-P1-N1-H1
catagcaaagaactaaatttcataaaaggtagctttacaaattcacgaaccaaacagaatttataaaaagacccgaacaaacaacagttttttaaaggccactattgaccatggaaacaatttaacaagagtaaacctttcaggaacattaaaaaaaaaaacccaaagatcttcggaacttccacatgcttagacttcaagacacctacagaacattctcagacttttaaaacccaccacgaagacgcaacacaaggtgaagagtagactctttctgaatgttgaagtcagcaagagtccttccattcttcaattgc

SEQ ID NO: 38662 - DNA, 273 bp, Glycine max
  Clone ID: LIB3138-085-P1-N1-H3
aaaataacacacacaaacaccctcgttgcacctagtaatgcagcgtgtatttaagttgaataaagtgctacatacttgaacacgaaggcaaagcgacactcattaaccagattttagcgactctaacagctatcaagaagacacgtcagcattcgtgcagtggcgttcgaactcacagattaattgtcaacggccagaggaacagccagtgcagccactggagaaggaccagctctagtaagaaatacagtgatcttaccttgactatgagct

SEQ ID NO: 38663 - DNA, 289 bp, Glycine max
  Clone ID: LIB3138-085-P1-N1-H5
ttttttttttttttctgctagatatctaaaatggggggggttctattttatttttttctttcccatttttatattttttctcttttccaaaaaaacccccccctttacactcttttaccccattaaaatagggctttgaatattttaaaaatgtccattcatacccaacaagggggtcccccccatatttccttttgtaataaaacaacccccccccccaatataaaccccatattcactttcttcctcgatatccttttttctaaaaaaattccatctcttccctttt

SEQ ID NO: 38664 - DNA, 262 bp, Glycine max
  Clone ID: LIB3138-085-P1-N1-H7
actaataattattttcatccttctgggcagacatcttgaaaaacaaaataaaaattaaaaatagaaaataaaatgaaaaacggttttcttcaatcaaccatgtccatttctcttctatttttcatcatctacttctactatttttttctcccgtgtttctctaatgtaattagagatacttgttcttatacgtaacattgaattctaggatcttatgtgatttttaatcaacaaatttataggatgttatctaccttcctat

SEQ ID NO: 38665 - DNA, 169 bp, Glycine max
  unsure at all n locations
  Clone ID: LIB3138-085-P1-N1-H9
aaacnnaangcatattaacgacagtggtgtcatactattatttgtttaaacacaaacaaacaaaaggtttagattttaaacatccctccccttatttataacttattttccagtttcatgattttaatcaccaatttatatgaaattatcatttatcaacacttatatc

SEQ ID NO: 38666 - DNA, 372 bp, Glycine max
  Clone ID: LIB3138-086-P1-N1-A2
aaaataacacacacttcacacatcattgggacagttaaaagaggtgtggaaattttcaaataggcagagcatactcaacaagagggtcatgcctaatttcctttattgaattaaacaaacgaacaagcgaaagaaaacacaaattccagatcatgcagaggattccgcattttcagaagatctggcagtagcctgtggaacagaaaaagctggcataagagtattaccagcaatttcaaaatcttgagagattcccaagagaatatcaaaaactgtagactgtttgggattgtcaataaggaaactcaaatgccatgaagtttgatttgcccactcagaactccacatttcaaaaccattattaggaccaca

SEQ ID NO: 38667 - DNA, 370 bp, Glycine max
  Clone ID: LIB3138-086-P1-N1-A4
acatcaaaatagtgtgatcattttaacgcgttagcaaaactataaatacattgtttttctcgttacaaagggcataataaccaatctcaccccaactatgaaaaaaaaatagcatataaaaggaattacaaaactagaacagactttgttacaataacaccaagaatagttatcatacctcccacactaagaatagaacaggcttggaaggtatagtcaatatatctatatactcagatccacatccatgcaattgccaacttcagcttccacaaaaattgatcaaccagccttgcttaaccagttttgaacagttacgagatcttttcatgttatatctatttgcttcatctcaaatctgaaaattgac

SEQ ID NO: 38668 - DNA, 135 bp, Glycine max
  unsure at all n locations
  Clone ID: LIB3138-086-P1-N1-A6
ggattngngcacaagaagggatagtcacttttcgaggattacataaattaccactacctccgagctctgctgcacttccttgttcacaatcccaacaagtttctcgcccggcgcgagttttccattaccaacccc

SEQ ID NO: 38669 - DNA, 331 bp, Glycine max
  Clone ID: LIB3138-086-P1-N1-A8
tcaccaacctttttcttttttttcttttaacttccttcctcaaaagatatgtgtcctatcctctaaactcgaccaatctatcttcatctttataacaaaaaactgaacctcaaataaactttctttataataattataaaccaacctttacgcttcttattttttaatatctaccattttttcagtcttactatttctagctttcaatactatataatttctaaatgctatacttatttttcttgatattttatagagcaaactcccctatcatatttcttacaccttatatctgtttcaacagctttttcatgagaataatttacattta

SEQ ID NO: 38670 - DNA, 378 bp, Glycine max
  unsure at all n locations
  Clone ID: LIB3138-086-P1-N1-B11
ttcagagcagagccagccctttttttttttttttttttttttttttttntnnntttaaaaaagaattttttttttttttttttttttttttttttttttttttttttttttttttttttttttttaaaaaaaccccaaattcccccccaaaaaccttttaaaaaaaaaaattaaaaacccctaccccttccccaaccctttaaaaaaccaaaattccccaaaatttttgccctttcccccccccccaaaaaaaaaaaacccccccaattaaaaaaaattcctcccccttttaaaaaaaaaaaaaacaacccttttcccctttatttaaaaaaaaaaagaccccaatatttttttttttaaaaaaaccccccataaaaa

SEQ ID NO: 38671 - DNA, 343 bp, Glycine max
  Clone ID: LIB3138-086-P1-N1-B2
gaatatgatggggacatgtgtctaaattattctgaactacatatcctcagtagtgcacaatgtattcctcaaatttgcagaacaccccagttgcatcaatcacagtgatgctttggctgttagctcctcaaaaattacatggcaaaaaaataataaactccgccccattgctacccaagcataaattcactatacatgagggcaaaaactcattgaaaaggagagagatgacccacggtagaaccttttattcttcattatttggaagagtttgctaccacacggtggtaagatattcaaaggacaaagttctgaattatggcaaagtaactctcacttcttt

SEQ ID NO: 38672 - DNA, 363 bp, Glycine max
  Clone ID: LIB3138-086-P1-N1-B4
ctcgaaaatgcttgaaggggagttgagaaaagacttcacagcatcatctcaattctgtaagtaaataatattacagtggcctgaacaaaaagggatgtgttctcattgccaataaagagcacaccacagaataatgtgagcaactgtgatctgcattttttaaatttacaattctcaattcatacacaattgtgaataccaattaccgtaagattgaaaccccccattgttgccctgtaaactaacaagcaaagagtacatcctgaaccactttgaacctctaaatatgtacaaggtattcaaatgacaaatgtgtttatgcccccaaaattgcttggatcataggtcgaaaaccaaattctg

SEQ ID NO: 38673 - DNA, 284 bp, Glycine max
  unsure at all n locations
  Clone ID: LIB3138-086-P1-N1-B5
cgtccttttttttttttttttttatatnnaaacacactcattggacatgataatgcgctttatttaagtgaataaaatactacatactagttcacaaatgcaaaaggacactcatcaaccagatatttgagactcttacagttctcaagaagtcgcgtcagcataggattagtggcgttagaactcagaatttcattcttaacgccaaaaagaacagccagtaaagctactggaaaaggatcaactctagtaagaaaaacaattttcttacctttcccaagtgc

SEQ ID NO: 38674 - DNA, 139 bp, Glycine max
  Clone ID: LIB3138-086-P1-N1-B9
aaaaaaaactttaacccaaagaaatgtgatcacctaattacgacattttcattaaacaaagaaaattcttaataaacttttaactcttaaacctattaaaactccaaatgctccttataaaatcaaacatcttatacaa

SEQ ID NO: 38675 - DNA, 357 bp, Glycine max
  Clone ID: LIB3138-086-P1-N1-C10
aaattaacacacactgcacacatcattacgacaattaaaagaggtgtggaaattttcaaataggcagagcatactcaacaagagggtcatgcctaatttcctttattgaattaaacaaacgaacaagcgaaagaaaacacaaattccatatcatgcagaggattccgcattttcagaagatctggcagtagcctgtggaacagaaaaagctggcttaagagtattaccagcaatttcaaaatcttgagagattcccaagagaatatcaaaaactgttgactgtttgggattgtcaataaggaaactcaaatgccatgaagtttgatttgcccactcagaactccacattttaaaacc

SEQ ID NO: 38676 - DNA, 166 bp, Glycine max
  Clone ID: LIB3138-086-P1-N1-C11
ttttatttttttttaaactgaacattttccttaaagatagcttcatatatgtttcttatcctctctcttaactaaaattttaaatcgctccatattaatgaactccttctggtatgactctttataataaaatacctactatttacattttttattcacttttacc

SEQ ID NO: 38677 - DNA, 247 bp, Glycine max
  Clone ID: LIB3138-086-P1-N1-C3
ctttctttttttttttttttttcaatggatcaactctactatgtagaggtattttatatgaatgttaggtcttttatctttttacaatctttttttttattcttccatcgaaaatcatttagacatatacccatgcgtacgcactgtttaccgtttttttttaatatttaatacacttgttacatttttgtgtcctaaggcttttaagtatgattatttctcttacaaaaatgtgtcacgaattaat

SEQ ID NO: 38678 - DNA, 377 bp, Glycine max
  Clone ID: LIB3138-086-P1-N1-C5
aaaattaaaatttataaaaattttattgggccacgagacctagtacaatatatagtaacacaataaatacaagagattctgcaaactgaaaaagggattcttactaaagcaaactcaaacaagaacaacttccactcatttggcatctaccgtagtaacacaagatcaaaagcagcttctctgatagaacacacgtacgtatgattcaacatctttcacagtagtggttcatttctaacagctagctattgcaacttaaaataattgcaatgcttctgcaaagtgctaactttttttcccccccttctttatggatatgacaatgtgatcagaatgaaacaataaccaatccattgaatttgaatctagatttgggt

SEQ ID NO: 38679 - DNA, 305 bp, Glycine max
  unsure at all n locations
  Clone ID: LIB3138-086-P1-N1-C8
aggcccgccccctttttttttttttgtttttttttttttttaaaacacacaagagactaaggtnttcttacattatatattgaaaccattccatcaatacataatactatattcttggaccgaaaataccaggatacattaaaaattaaaaaccaagaccaaaaggaataataatatcagaaattaaaataatagctggaatctcaatttcacatccatttataggggcttgatctaacatccaaccattttcccacatattctatcatttgtttcccttcatttcttttcagctcaagctctaa

SEQ ID NO: 38680 - DNA, 145 bp, Glycine max
  Clone ID: LIB3138-086-P1-N1-C9
atctgaataaagattttttatcaatttatttacacccctccatacaaatctaaaaatttcattttaataccaaatatttcattaattttactatatatattaaaccacatatcaaattcttcctttccaaacttattctttaaca

SEQ ID NO: 38681 - DNA, 276 bp, Glycine max
  Clone ID: LIB3138-086-P1-N1-D11
aaaataaaacacactttacacattattactacaattaaaaaatgtttgacaatttttaaattagcctatctttcccaacaaaatggccatccctaattttcttttttgttttaaacaaaccaaccatccttaaaaaccacaatttccatatctttcaatttattccattttttcaaaatatcttgcaatatccttttcaacataaaaaacttgccttacaattttccctactttttaaataatttttatattattccctcattaattttaaaaact

SEQ ID NO: 38682 - DNA, 151 bp, Glycine max
  Clone ID: LIB3138-086-P1-N1-D12
aaaaaaaaaggtggtttttcctaaaattcgtgttgcataatcattagtgactggtcaacgatcactacgtgtcactgtacttggcatttgctttctgtcagtgtgttcctcaaggaagagattcatttggatgtgaaaaacttatttataa

SEQ ID NO: 38683 - DNA, 369 bp, Glycine max
  Clone ID: LIB3138-086-P1-N1-D3
aacatagagtaacaacactatagattaaaggttagaaaatggaagttacaattgtaaggttctcctttaataaattcaccaacctaaactacataactctaaagcgaagtaaatatattaaattattttctctctctcatttttttcctctcaatatctatatctacacaagctcccctatatgtatctgagacagcagcggcagtttcagatagatccctcccaatctctgaaattttggaacccacatgttctttgaattttgagacggaatcaaccagctgaaagagttccctggcatgcatttgaattttttcttcactttgtttaatcacttcctgcaacttcaattcggatgtcttgagaacc

SEQ ID NO: 38684 - DNA, 370 bp, Glycine max
  Clone ID: LIB3138-086-P1-N1-D6
aaacacactcattgcacataggggtgggctttatttaagtgaataaaatactacatactagttcacaaatgcaaaaggacactcatcaaccagatatttgagactcttacagttctcaagaagtcgcgtcagcataggattagtggcgttagaactcagaatttcattcttaacgccaaaaagaacagccagtaaagctactggaaaaggatcaactctagtaagaaaaacaattttcttacctttcccaagtgctgtgcgaatccttttgttgatatctgaagagcgattgttaactgcagaactaatccaagcagtggtgggtaaaccaccacgtccactaccacatgttacatttacaacgacagct

SEQ ID NO: 38685 - DNA, 368 bp, Glycine max
  Clone ID: LIB3138-086-P1-N1-F11
gaacactacaaatagaaagttgacagttaataaaccaaagcaacacaacgcagcaaagtcctgaaactcgctgcgcttaacaaaaatgtaatcaggggttccgacaaacacaacacattaaaacacagataaataaaagcaattttgccaccgtcgatcaagaacccagttctgggaacaacagttgcgagatgatggtggagacttcaaactttgtccgaaaaacaagctacctagaaaagaagacacatgtgttcagaaaagaaaccaacatttattgtaaccaacatcccctgatgaaccagcccgcacgattcacttcttcttctgggcagccttggtgaccttggctccggtaggatccttct

SEQ ID NO: 38686 - DNA, 260 bp, Glycine max
  unsure at all n locations
  Clone ID: LIB3138-086-P1-N1-G1
gnctaattgaactttcatggtacaacaaattacaaatgcatgaacatcacatggtccatgaattacattgtgaattggtcaaaattccatttgtcagcttcatcagtaaggtttaccctgtttgttaacccttttaagttgtacctttaattttttaccttctaatttgctttcattcatcatacttgttgcatgatgagcatcctttagggtatcaattcttacaatcccaatacattttgctatcaccggtttgcttt

SEQ ID NO: 38687 - DNA, 306 bp, Glycine max
  Clone ID: LIB3138-086-P1-N1-G10
acacaactcattacaaaaggttaagtatcctcttatatttcaaatcaaccttcaacttccctatatttcactactattaatacatttcatcatttaaaaatcctatttccacctatctcttctacacccccttacttttacccaatttcctactttctaccattgataatatatattcttaacatttaatcatttttctattctttccctagaactaattcttttttttaattcttaatatattctttactttatttctttcattctattcctaaatacatatattactccattctcttcctttct

SEQ ID NO: 38688 - DNA, 305 bp, Glycine max
  Clone ID: LIB3138-086-P1-N1-G12
tttttttttttttttttttttttttttttttttttttttagttttttttggaaaaagcaagtaacattaagttggattgggatacacaagataattcacattttctgaagtacattgcaataacatatacttcaccaaacacaaatctaaaaactctcaaaagtccacaagtcatccttttctttcatgctcacttgccggggacaaatttggtggcgtaggcccaggctttgttgttgactgggtccgcaaggtgatcaacaaggttcttcaatggacccttaccggggaccatttgccttaac

SEQ ID NO: 38689 - DNA, 362 bp, Glycine max
  Clone ID: LIB3138-086-P1-N1-G3
accattcagacacgattgcaaccctcgtcaagagcttcgttcacaagtaatcaaaggtattttctgtggcatctactggtctatctactgcttataatacaataaataaataaaagtttttgcaatagacatcgatccatgcatagatcaacaaagtaacttgctttaaaagtaaaaggccattttaatttaaccccgtaaagaatacttcttccctgaaaaaggttgaaatttcggctcttctttctctttaggtggctctggttttgactctttcgcctttcctgtctctttagtacggttagcatttgacccaaacacaagcttgccctgagatttgacgagcattactttgtgaacta

SEQ ID NO: 38690 - DNA, 168 bp, Glycine max
  unsure at all n locations
  Clone ID: LIB3138-086-P1-N1-G4
tgtttntttttttaagacttttttaatatcacaatgtattataaacgtaattcttcttcactcatgcagactcaaattatcaatgaaaagcatcattatcaaaccaaatcatgttttgagaatcattcttgtaaagttctttaatcttcctctttttattatacttta

SEQ ID NO: 38691 - DNA, 354 bp, Glycine max
  Clone ID: LIB3138-086-P1-N1-H10
acgcaatggtaaacatagatatcaatgagaacatgtcctacataagcctccttataaactaaataagaacatggaagtttagtacccaaaaaagtaaaaacatggaagttagaagccaaattcgtacacaacaatacaaagaggaggctttactaaactaaattcacttctttcttttctttgggggctgcaatgcttcctcatcttcctcgtcctcttcattctcctcatcctcagcaccatcttcatcctcttcttcacctgcctcgtcctcttcgtcatcatcatcgtcatcctcatcggcgtcatcttgatcatcaccatcttcatcttcatcctctttcccattctctt

SEQ ID NO: 38692 - DNA, 359 bp, Glycine max
  Clone ID: LIB3138-086-P1-N1-H11
gagtccaacattatgtttatagtaaaaatgataacgaagaggtgtccatctgatacagccatagaagtttgacaacaaacatttgagttaccccaccggaaatatatggaatgtctccaaaggcaagactaaaatagtgcatgtaacaaagtacttccatagtgtatgtacatcacatccctctccctatctcaaattggtccttcactgcatgttttctctgcgccggacataccttgttctatcattgtatcgtggtctgtcctgatgcctttgtggctgaggttccacccttctctgtctttcaggtgatctctggacgatctttccattcacaaataattcaacaccatagtcct

SEQ ID NO: 38693 - DNA, 214 bp, Glycine max
  Clone ID: LIB3138-086-P1-N1-H2
gacagaatagagatctatggcatttggaactccatattactccatcattcacattatgcatcaactagcaataacaaattctgaaattggcattcccatttaacaatattttaccagcggaattggttttctaatcacatttaaattcaaatccccccttatctttcataaacacaaaaacttctcaaaagtctccgtggatttctacagaacc

SEQ ID NO: 38694 - DNA, 158 bp, Glycine max
  Clone ID: LIB3138-086-P1-N1-H4
aagcaagagtttgttcttttaacaaaaatataccaaaatctcacaagaaaatatttaattgttgttctgcataaaaaaaaactacccatacatttttcaaaatacatttcctgtatttttggcccttgtataaatatcccaaacaatattcattattc

SEQ ID NO: 38695 - DNA, 160 bp, Glycine max
  unsure at all n locations
  Clone ID: LIB3138-086-P1-N1-H9
attataacntaaatttttggggtgggattagaattttcaaattcgtcatttattatctcttttctttcttccaatcatattttgtatattcaccttcatttattttttctattatttattttcactattaaattcctaactcatattttccgaattaaaa

SEQ ID NO: 38696 - DNA, 415 bp, Glycine max
  Clone ID: LIB3138-087-P1-N1-E1
gttctagatcgcgatctagaacctagatcagaaccacattcctgggaattgatcttcccaatagaggtatgtggtcctaataatggttttgaaatgtggagttctgagtgggcaaatcaaacttcatggcatttgagtttccttattgacaatcccaaacagtctacagtttttgatattctcttgggaatctctcaagattttgaaattgctggtaatactcttatgccagctttttctgttccacaggctactgtcagatcttttgaaaatgctggatcctctgcatgatctggaatttgtgcttttctattgcttgttcgtttggttaattcaaataaaaggaaaataggcctgaccccttttgttgagaaatgcctctgcctaatttgaaaaatttccacacccttttttt

SEQ ID NO: 38697 - DNA, 312 bp, Glycine max
  unsure at all n locations
  Clone ID: LIB3138-087-P1-N1-F2
aacagctccatatcctgttcccctttttattgatgaaggacagtagagaggtaatagttggacacggataaccactttgacatttcatnttatttaatgcttcttcatgccaacgaagagacaaaattagcttctgaggctatgtttagtgcattctcttctacccctgatccacttgattatcatatgatttggcatcaacgagcagtcttggagctgggggtgttatcaattttaaagatcctcatattctagacatgtcatttgtgtctcagctgttgtgtgtagggaaatgtcattgggccctatatg

SEQ ID NO: 38698 - DNA, 70 bp, Glycine max
  unsure at all n locations
  Clone ID: LIB3138-087-P1-N1-G12
aattcccggaccggnatggtgttgtcttgggcctcttttaatttctggggggggttcattttttgggggg

SEQ ID NO: 38699 - DNA, 112 bp, Glycine max
  Clone ID: LIB3138-087-P1-N1-G8
cagatactataatatgaaatctatgtggactaaatattcaaagggggggggtaaatcactatggggtgagtcctattttctttatataaaacattcatttgaaagagacaac

SEQ ID NO: 38700 - DNA, 180 bp, Glycine max
  unsure at all n locations
  Clone ID: LIB3138-087-P1-N1-H6
ggttccttcttcttcttccaataatgtcttctacattctctgtgcgggggctatgctccacttgctgcatcatcatcatcatgcctccccaccagctctctgtcgaagacatggctctgcgccgccgccaccccaacggtggcttcgtcaaccaccacctncttcttggaggtggaggct

SEQ ID NO: 38701 - DNA, 263 bp, Glycine max
  Clone ID: LIB3138-088-P1-N1-A3
tggagtgagctaattaggaattactagcttagaggggagatcaatagagggcgattttgatcgatgtcacattgataccacccactcttcacccaaccctacaggtgcaagctcatatgcaaacaaatttgtttaaactgcatcttgctgaagtggcaactgatcaaagccacatgatggatctgcaaatttctcaatctaaaattgcacttaccaagaacacagttggaggaaccactttgcgtatcgatctattggcaaat

SEQ ID NO: 38702 - DNA, 157 bp, Glycine max
  Clone ID: LIB3138-088-P1-N1-A6
tgtttcgagattacacaacacactttgtgaaaaagggggagttccttattcctggtagacgcttccattgagtggggatctctgatacatggctggatcattacgaacactaggaagtcaagggcgagttcttgttggtgaagatctctgggtaaga

SEQ ID NO: 38703 - DNA, 159 bp, Glycine max
  Clone ID: LIB3138-088-P1-N1-A7
gattccgcatacagagagtagaaaagatggcgcggatgagcacagtggtgtggtgcgcggtggcggtgctactgtgcgccgtggcgggcgcgtagtgggtggaggaggcggtgaacccgatactaatggtggcggtggtggaggcggatgttgatattt

SEQ ID NO: 38704 - DNA, 302 bp, Glycine max
  Clone ID: LIB3138-088-P1-N1-B10
atggctgttttcttgaaatgtggcaacttgtttgtctatttggattctcttgctgcaacacccatcttctcagattcctgcttcagctcaaatgctatagccaccaccaatatccttgatttatccaaggatcctcgggtttttgaatggctggttggtatcaggaggaagattcatgagaattcagaactggggtatgaggaatttgtcaccagtctgctgattagagttgaattggttgaactgggtatcttatataaacaccccgttgcactcacggttgtagttggctttatagggac

SEQ ID NO: 38705 - DNA, 100 bp, Glycine max
  Clone ID: LIB3138-088-P1-N1-B7
caaatgttataaaacattccttagtccatacatatacatatgtggcatgtattggaatatatgatacactgggcaatgatgatgtgatattccttggcct

SEQ ID NO: 38706 - DNA, 217 bp, Glycine max
  unsure at all n locations
  Clone ID: LIB3138-088-P1-N1-B8
cggctcgagttgatttgcaccntacttatcgtattataggagtgattaaaatggtggccgcagctgttatttcctgataatacaggcatatcattggcctgtgctatgaatagtactttttgggggcgcgctagttctgatattcacaccatctgctctcatgactgccaattcgcggaatcctgctcgcacaatactaatgacttattgccattta

SEQ ID NO: 38707 - DNA, 242 bp, Glycine max
  Clone ID: LIB3138-088-P1-N1-B9
attgactacttatttatgggggtgaactaggagtgtttgggctcttcataaattgctgtattgctgtttttttatgaatgaattcctaattttaaactaccctttcagtatggtgctcacttgcaactggacattaattttccggttaacaccctcagttcctatattcattaatttgcatgacaatgcacttggttaagcaaccaatccttttctcactgggcgaggttgttttcttggat

SEQ ID NO: 38708 - DNA, 253 bp, Glycine max
  Clone ID: LIB3138-088-P1-N1-D4
ggctgcacaagctagtgtttcatcatcatctcttaccttctcaggcgaggctacaagacaaagtctcggaccaagatcactccaatctccatttggctttttaagaaaagcctacttttcttgttaaggctgctgttactccccctgtcaagcaaggatcagacagacctttgaggtttgcatcaaagctaactttctcctacttgcatgggacacttcccggtgactatggacttcgaccctctcgtgactt

SEQ ID NO: 38709 - DNA, 146 bp, Glycine max
  Clone ID: LIB3138-088-P1-N1-E9
ctcgagccttttaattttcagtatttcacttatatgtagaaaagctgttcggatttcctacattatgaagttgtgtaatatttcatgagctcttcgttcatcatttttaaaatatatatataataaattgtcttaaaaaataaaaa

SEQ ID NO: 38710 - DNA, 274 bp, Glycine max
  Clone ID: LIB3138-088-P1-N1-F9
ttctaggggacaggttggtttagaactttcattgcagactatgtagcggggcttatgaaagtcggggggacagctttattattcatagtaccaagtaaagtgccttttggagttccaagaaagcccaacttctcctcttgcttgcggaaactacatcctttcactaattggacagtaatcaaagatattgtggaggtttctctcgcatatatacttgctgcttcttatctcccgtcctaatgatagcggtgctttactcttttactcataatgt

SEQ ID NO: 38711 - DNA, 385 bp, Glycine max
  Clone ID: LIB3138-088-P1-N1-G11
gtcttgcaattgaagttgaagtcttgcccttcttttttcaactccaaacacaagacatcatcatccatggctgcctccgtctccactgtcggagctgtcaacagagctcttttgaacctgaatgggtctggacctggggtttcagctcccagttcatccttctttgggagcagcttgaagaaggttattggctcaagggtccccaacacaaagatttcctctggaagcttcaagattgttgctgtagaagagaagaaagagattgaagagacccagcagaccgacaaggacagatggaagggtcttgcctatgatatctcagacgaccaacaggacatcacaagaggaaaggggttggttgactcccttttccaagctccacagg

SEQ ID NO: 38712 - DNA, 102 bp, Glycine max
  Clone ID: LIB3138-088-P1-N1-G2
tgcggattgaagagtgtaccttttgcattcgagaaactagtattgtaggggtttactcacttaaataaagcgcattactatgcgcattgagtgtgcttaaat

SEQ ID NO: 38713 - DNA, 211 bp, Glycine max
  Clone ID: LIB3138-088-P1-N1-H4
acttccaagcatatgtcaccggagaaggtcctgttgagaacctagcaaaacatctcagtgacccttttggcaacaacttgctcactgtcattgccgggtctgctgagagagctccaactctctaaatcattcatcttcatgtttttctccaatcttaatgtacaatacatatcactgagatattattaaggcattttgctttgttccttgg

SEQ ID NO: 38714 - DNA, 393 bp, Glycine max
  Clone ID: LIB3138-090-P1-N1-B10
attcataactgccactgcagatggacccaaacatattgagggcaccattacaagggctaaatttgaggaattgtgttcagatcttcttgacaggctcaggacaccagttgaaaattcattgagggatgcgaaactctcgtttaaggatcttgacgaagtcatccttgttggtggatcaacacgtatcccagctgttcaggagcttgtaaagaagttgactggcaaggacccaaatgtcactgtcaatccagatgaagtggttgcccttggagctgcagttcaggctggtgtcttggctggagatgtcagtgatattgtgctgttggatgtcactccattatctttgggtctggaaactctaagtggtgtgatgacaaaaattattccaagaaa

SEQ ID NO: 38715 - DNA, 260 bp, Glycine max
  Clone ID: LIB3138-090-P1-N1-D12
ttctcgcgaaaaaaaaaaaatttttaaaaaaaaaaaaaaaaaaaaaaaattgtaaaatatataaaaataaaaaaaaaaaaaaaaaaaaaaaaaaaaaaaaaaaaaaatatataatatcccccatttaattattaacattttactctctttatttatttacttttctttttctttatttcttccttaatttttcctattttttttcctttaaaaacttaccttttttttttttttctcctctttttatcctttttctctcc

SEQ ID NO: 38716 - DNA, 380 bp, Glycine max
  Clone ID: LIB3138-090-P1-N1-D2
tggcacgatgggagatgtttcgaatgaccttgcaactgggactgggggaggggcagcacagtggatatgtggacacccatttgacaccatcaagggcaagctccaaagccagcctgcaccactccctggtcagcttcccaagtactcaggtgcatttgatgctgttaagcagacaatagcagctgaaggagcaaggggtttatacaaaggtatgggtgctccgcttgctacggtagcagccttcaatgctgtcctgtttacagtgaggggacaaatggaaacattagcgaggtgcaatcctggttcccccctcacagtggatcagcagtttggttgtggagctggagccggacttgctgtttccattcttgcctgcccaa

SEQ ID NO: 38717 - DNA, 407 bp, Glycine max
  Clone ID: LIB3138-090-P1-N1-D5
ggacaaattggagtattaccaaatcatgcgcctattgccacagccgtagatataggtattttgagaatacgtcttcttaaagaccaatggttaacgatggctctgatgggcggttttgctagaataaacaataatgagatcactgttttagtaaatgatgcggaaaagggtagtgacattgatccacaagaagcacagcaaactcttgaaatagcagaagctaatttgaataaggcggaaggcaagagacaaacaattgaggcaaatctagctcttagacgagctaggacacgagtagaggctatcaatgtgatttcataacaagttgatgcgtccgaatatcggaataactaaaaaatggaaaatgaaacagtaagaaaaaaaaaaaaaaaaaaaaagggcggccg

SEQ ID NO: 38718 - DNA, 102 bp, Glycine max
  Clone ID: LIB3138-090-P1-N1-E8
aatctaactaaattttttaactaagcccacaggcctatgggggtgatttaagcgaggatgctagcgatactgtggctctatcccagtccatgcgaccacctt

SEQ ID NO: 38719 - DNA, 343 bp, Glycine max
  Clone ID: LIB3138-090-P1-N1-G4
tagctttactggctgttctttttggcgttaagaatgaaattctgagttctaacgccactaatcctatgctgacgcgacttcttgagaactgtaagagtctcaaatatctggttgatgagtgtccttttgcatttgtgaactagtatgtagtattttattcacttaaataaagcgcattactatgtgcaatgagtgtgtttaaatattaaaaaataaaaaataataaaaaaatttaaaaaaaaaataaaattaaataatatataaacataaaaataaaaataatataataaatatataaaaaatctacatatttcgggggggccccccattatggagctttgta

SEQ ID NO: 38720 - DNA, 400 bp, Glycine max
  Clone ID: LIB3138-090-P1-N1-G5
cgcaaaaacaaagaaatatattaacccttcttcaacacaaccatgtcggtgctcttctgctattcagcaatcaccattcactggtcaaactgctctgaagcagctcaatgagttcgttcgcaagaccgttggcgccggcaaaggtcgcacttacattctccgcaccttcaatagtgctccttatagcatttggtatggccctgaccgtcccaagtacttgggtccattctcggagcatattccatcatacctgaccggagaattccctggtgactacggatgggacactgctggattatcacctgacccggaaaccttctccaggaaccggtatctggatgtgattcacatcatattggcaatgcttggtgcccttggcttcacctttcccagagatcct

SEQ ID NO: 38721 - DNA, 197 bp, Glycine max
  Clone ID: LIB3138-090-P1-N1-H10
tcttagaatacagaatgccctctgcagcctgctccatatttgtgaatgattaaagattctaccttactttttcattttttgtagtgttgacaaatgacaacagagagtatgtataaaagagaaactgtttttagtgtaaaaatttgtagtttctttacgtctataatacagtgtaactttaataaacctttattttt

SEQ ID NO: 38722 - DNA, 334 bp, Glycine max
  Clone ID: LIB3138-090-P1-N1-H3
atctctagcaaaaacttatcatctagatctgagttatatcctgtcgaatgtagggttacctaaatggagcaacacataaattatgaattaggagcctcataccaatggttctgttctggatgtatgttttgctaagcagacctcatagatttgtctttcgacattcgaaaatggaaaagcgtggtttaataaggaccatattaaattttacatccatttgattcgagcgtgcactgtgtgaccgtatagcctggtgttacattgtcaaagaaagtacgcgttgacacttggttttcgctcggatcagtatgaatataaacattgtactggaaag

SEQ ID NO: 38723 - DNA, 372 bp, Glycine max
  Clone ID: LIB3138-090-P1-N1-H4
gttggcgcaaaaccattttgctaacggagttctttcacggtgagggctcgttggagctatggtaaatgctgatttcaattacccgaaaagccctccgctgcaagtcgagcgccgagagcctcatcacctacgttcgcgagctccttccgacgatcgaagagatcaaatattccggcgtggagctgtcggcgccgcgccagtctcagatcgaccgtctctcggagatcctccgtttcggcgtcgagctctcgcaccaggccctcttctactaccgctggaacgtgtaccgcaacttccagcttgccaaaataatgtgaaagctcgagaagcacttgacatggtttttgtaggttccatgcatgcacatatatt

SEQ ID NO: 38724 - DNA, 419 bp, Glycine max
  unsure at all n locations
  Clone ID: LIB3138-091-Q1-N1-C3
ggccgcccgctatctagaactagnaaaaaaaaaaaaaaaaaaagaagggaaaaaaaaaaaaaaaaaaaaaaaaaaaaaaaaaaaaaaaaaaaaaaaanaaaaaaaaaaaaaaaaaaaaaaaaaaaaaaaaaaaaaaaaaaaaaaaaaaaaaaaaaaaaaaaaaaaaaaaaaaaaaaaaggggggggcccccccttagtgacccnnnnccccgggaaaaaatttcgggccgggaccctgggggggtccaaattttccttaaaggggggggtttaaaacctgggggaaataagggaaaaaggtgttcccggggaaaaattttttccccctaaaaatcccaaaaaaaaaaaaacccgaaaacaaaaagttaaaacccgggggccccaaaggggggagcaaccccactttattgggggggccc

SEQ ID NO: 38725 - DNA, 165 bp, Glycine max
  unsure at all n locations
  Clone ID: LIB3138-091-Q1-N1-C5
caaagatgaattatcacaataaaactttgcaacaattaaactacaagtcaatttgcttttcaattgttgcaaagatgaattatcacaataaaacnttgcaacaattgaaaagcaaattgacttgtagtttaaaaaaaacaaagtaaaattgagataaatattaaa

SEQ ID NO: 38726 - DNA, 404 bp, Glycine max
  Clone ID: LIB3138-091-Q1-N1-C6
taactagaaacagtgtgttgaaaatgaaggtccttgttttcttcgttgctacaattttggtagcatggcaatgccatgcgtacgatatgttctttctccgaatgaacactggctatggtgcccgtactccggaggtgaaatgcgcaagttggaggcttgctgtggaagcacacaacatctttggctttgagaccattcctgaagagtgcgttgaagcaacaaaggaatacatccatggcgaacaatatagatcagactccaaaacagttaaccaacaagcttacttttatgccagagacctcgaagtccatcccaaagacacatttgtgttcagtatagatggcaccgtactctctaatattccatactacaaaaaacatggatatggggtggagaaatttaac

SEQ ID NO: 38727 - DNA, 338 bp, Glycine max
  unsure at all n locations
  Clone ID: LIB3138-091-Q1-N1-D4
gaaacaaactggcagaatttgagggaaaaatcacacagaggaacagggatccaagtctgaaaagccgacatgggccagttcagcttccatacacnttgctccatcgttcaagtgaggaagggatgagtttcaaaggaattcccaacagtatctccatctaaaatgtgtgtgtggtttgcttatctattgtgctnnngaatnaaatnnacaatacttgtctatggttattattggctgtatgtctgtatttggatgctctcgaacggtatgcaagtaataagagtgttttcactgtcactttgtnnaaaaaaatttttattaaaaataatttttnataa

SEQ ID NO: 38728 - DNA, 398 bp, Glycine max
  unsure at all n locations
  Clone ID: LIB3138-091-Q1-N1-E6
gagatttctcaagaaagacattgccgaccttcttgggagttcccttgattacaatgcatatggaatgctttatgtgattctgtagcaagaanacttatagaggatggagaagtatttccacaaatgtttgtgcttgctcaatgtctattgagatcccaagcgaattgtttaaaagtggttggtttgtgtggngaagctcttgntgatgcaataatttgtgggatgaaagaaactgggctgagttctaaataaattgggaacaaccatgggtctttgtcaggggaagcatgccagtcggctctaattactcgctgggcgggtcatatcaagttttggaaacaaggaattgatagaattctccttaatcttcctgattgaaaatattcaagaccaattgt

SEQ ID NO: 38729 - DNA, 137 bp, Glycine max
  unsure at all n locations
  Clone ID: LIB3138-091-Q1-N1-E9
cggctcgagtctagatcgcgagcggccgccctttttttttttttttttgaatcacgagaaagaatttatggattagttgatagtaataatantcaagcacatgccaggcatacatagaaagaggaagagcacagccg

SEQ ID NO: 38730 - DNA, 355 bp, Glycine max
  unsure at all n locations
  Clone ID: LIB3138-092-Q1-N1-A2
gtcaagctgataaacaagtatatgagaggttccaagcttgtttgggcacaatcctgacatctgggttgcctcaagccaatttgtcacctgctcagcttgaagaccttcctcttttctctattggtcatagcaatggggcacttcttcaagtactcacaggaagcttattttctgagaaaatacctaaggctaatgccataatcgcatacaacaacaggccagcaacggaggcagtcccttactgtgaacagttgggtcctgcagtcagccaaatgatgccagttgtggaggcaactcctttttactcgatagctagaaatgcatcangagatgtgtggaaaatgatgttggatgc

SEQ ID NO: 38731 - DNA, 223 bp, Glycine max
  Clone ID: LIB3138-092-Q1-N1-A7
gggaagtcctggagggattatgcaggtggggaatctattctcaatttccaaattagcttgtgctttcctagttaagaacttatgatcatagccagatgaagtcattattttttattatagaaggccaatagtcatggtgtagtaatcttctgttgctttaaattagttaatttagtctacttttttatgccacacctttgtatttgaagttcgttaataagac

SEQ ID NO: 38732 - DNA, 390 bp, Glycine max
  Clone ID: LIB3138-092-Q1-N1-H12
tgtggcttccaaaatgtgttcgatctggaatcgcgagtgctgtcacgcgccggaaccttgtcctccctccctcacctccgcaagccgacgcgggaggccgtctacagcgcctccctcgacgccgtgaaggccgtgggctccgtcgcggacagcggaaacctgatttgggggaggcagctgcgcccggagctctgctcgccggtgctgaagaaggaagctgtcctcctccggccatgcctcgccaacgtctactcaccggccgagggtagtgattccgccggagaagcaaaggttgctacggcggagttcatcgacaagtacccggctatggtcaccggatttttcttcttcacgtggtacttcttgaacgagattttcaacatcctcaac

SEQ ID NO: 38733 - DNA, 390 bp, Glycine max
  Clone ID: LIB3138-092-Q1-N1-H3
tggggaaaggggtcgttgagtcgaagtgagccacaatggctggtgggtgagaagaagaagagaggtattgaggccggcaagacaagtgctgaggtgacgcagaaccgaagagaggagaggaagcagttcaagctcgaaagagcgagggcgcaacgggaagcaatcgagcagcagttgaaggaggaagggaagttggaccctgacggaagcatcgaagagctggtcgatgagggtcaggctaccgaaagtccaagaggaacgatatacacaccggacgcggaacatgtggtcaccgtgcatggtgactcgatcacgtctgagctcaacaagactctcgcacaagatacacctccatggggtagaagtgctacaccggctcctgccatggat

SEQ ID NO: 38734 - DNA, 382 bp, Glycine max
  Clone ID: LIB3138-093-Q1-N1-A6
gggttccagagaactggaatactacccaccaagtctgacatctactccttcgggctcatcattttacaacttctcactggtaggactccagttggattagcagttttagtacgcaatgcagtttcatgtggaaagttgtcttcaattcttgattcttcagctggagaatggccctcagctgtggcaatgcaattggttgaactgggactgcaatgctgtcaacaataccatagagacagaccagagttaacacctacacttgtgagagaattggagcagttgcatgcttcagaagagcgacctgtaccatcttttttctcatgtccaatccttcaggaaataatgcatgatcctcaagttgcggcagacggatttacctatg

SEQ ID NO: 38735 - DNA, 268 bp, Glycine max
  Clone ID: LIB3138-093-Q1-N1-B2
aaggattcgcacagcacttgggaaaggtaagaaaattgtttttcttgctagagttgatccttttccagtagctttactggctgttctttttggcgttaagaatgaaattctgagttctaacgccactaatcctatgctgacgcgacttcttgagaactgtaagagtctcaaatatctggttgatgagtgtccttttgcatttgtgaactagtatgtagtattttattcacttaaataaagcgcattactatgtgcaatgagtgtgttt

SEQ ID NO: 38736 - DNA, 363 bp, Glycine max
  Clone ID: LIB3138-093-Q1-N1-E1
gcatcaagtaatgactattgtgccgcgctatgaccagtccaaagatgcatgggatacaagtgttgtaattgaggtgaaagtaggagatagaacagaaaaggttcgcttcttccattgttataagaggggagttgatcgtgtctttgtggatcacccttggtttcttgaaaaggtatgggggaaaactggacaaaaactttatggaccaactactggaaatgattacgaagacaaccaactgcgttttagcctcttttgccaggctgctttggaagccccaagggttctgagtcttaattccagtaaatatttctctggaccatatggtgaagatgtcatttttgttgccaatgattggcacac

SEQ ID NO: 38737 - DNA, 371 bp, Glycine max
  Clone ID: LIB3138-093-Q1-N1-F1
aaaaaggggaacttgttgggaggaagcacagaccacaggggcatatctcaaatttttttacaaagtggttaatataatataaatggaataactgagggtttggtactaaagtttaatttagttaaagttgtttgtgtctggaattggtgtttgaaaatggctctctttgctgcattttccatttgtaaagttgccaaggatgcagctggagttgcaggaaatgtctttgcttttgggttgtttgtgtctcccatacccacatttaggaggattatcagaaatgggtcaacagagatgttctcagggttgccatatatttattcccttctaaactgcttgatctgcatgtggtatggcacacctctgatatc

SEQ ID NO: 38738 - DNA, 309 bp, Glycine max
  Clone ID: LIB3138-093-Q1-N1-F2
ggaagatggctctgttactgcgtatgcacgaatttctcgtcaggtgtacaacaaggttgaggactattataagttcaggaatgcggttaatcaacttgtgcaagatgggtttacttgtgctcttctttcggcttgaaattggggtagcctatgctctgctcttagttttaattaactcctcaataacatattcgtccattttatatgtgggatactatttgcaaatgttgagtttgcactttgctgattgcgctattttgcccggtctgttgaaaatttcattgtctatatatccaagtatttgagtgg

SEQ ID NO: 38739 - DNA, 141 bp, Glycine max
  Clone ID: LIB3138-093-Q1-N1-G5
gtgttttctttcgcttgttcgtttgtttaattcaataaaggagagtgaggcatgaccctcttgttgagtatgctctgcctatttgaaaatttccacacctcttttaattgtcgtaatgatgtgtgaagtgtgtgttatttt

SEQ ID NO: 38740 - DNA, 338 bp, Glycine max
  Clone ID: LIB3138-093-Q1-N1-H6
atctagcatccttcaatttttgtttcaggttcgagatccatggtgagggttgaagcagaaggagggaaggggtgtaacggctccttcttccgcgcgtttgacatggacgacaatggggacgagtgcatggatgagtactttcataaacccgagaagaagcgtcgtctctccatgaaccaggttcagtttctggagaagagtttcgaggaggagaacaagcttgaaccggagagaaagaccaagcttgccaaagaccttggtttgcggccacggcaagttgctatttggttccagaaccgtcgagctcgctggaagaccaagacgctggagaaagatta

SEQ ID NO: 38741 - DNA, 217 bp, Glycine max
  Clone ID: LIB3138-094-Q1-N1-B3
gaagaaacaaaagatgcaggcctttcaggcagcaaaacagaagtccaaaggcgtgaaaaatgccaagagatggaattgagtgaaccatttcattgttacactaatttaccgccagaaggtgatgtagctagcatattgggttaagctacacagcctttgtataatcatgtatctattcactaactcatttacggaaatataaaaggatgattacacc

SEQ ID NO: 38742 - DNA, 156 bp, Glycine max
  Clone ID: LIB3138-094-Q1-N1-C3
ctagatcgcgagggccgcccttttttttttttttttaaaataacacacacttcacacattattacgacaattaaatgaggtgtggtaatttttaaattggcagagcatacttcaacaagagggtcatgccttatattctttcttgaattaattata

SEQ ID NO: 38743 - DNA, 397 bp, Glycine max
  Clone ID: LIB3138-094-Q1-N1-C6
gcaaactgtttggaatcaaatggcaacagtgagaacaccattgaattttgattctagcaagcagagcttttgtcagttttctattgaccttctcggtggaggaatcttagtggacaaaactggagattggatcacacttatacaaaattcttcaattagtaacttgttgagagtagctgcttggaagaaaggctgtttaatggtcaagattgtgatgtctgggaatgcagcagtcaaaaggagtgattgggcctcattggtacaagtgtttttaacaaacagcaacagtacagagcattttgatgcatgtaagtggacaaaatcagaaccacattcctgggaattgatcttcccaatagaggtatgtggtcctaataatggttttgaaatgtggagt

SEQ ID NO: 38744 - DNA, 87 bp, Glycine max
  Clone ID: LIB3138-094-Q1-N1-G3
tgaaaaaaaaaataatatatattaaaaaattcctacaaaaatcttgtgatgttattaaaataaaaaatgataatatactaggggcgg

SEQ ID NO: 38745 - DNA, 73 bp, Glycine max
  Clone ID: LIB3138-094-Q1-N1-G8
atgattgatgtgccggtaatgcccgacttatcatattatcaggcagactactaagtgcacatgtgtgctcatg

SEQ ID NO: 38746 - DNA, 379 bp, Glycine max
  unsure at all n locations
  Clone ID: LIB3138-095-Q1-N1-A6
ggttctggctgaggtgtccctttctcaagagaggtttcaagaagtcaatgatcctggttttggaggccatggcctgggtggaatggaaggatgcaaatgttaaaggggtcaaaaaggaagttgatcgcatcagaccagccgacaaccttactgggggggggggggctggtcacaagaatgtgtggtctacagtaacagggctcttgtattttgaacaaattcagaaaatctgcagtgttnttaagaataattgctganatgtgtcaccgtttaagtcatactattgccttgtgcttgagccttatggtcgtgtgtgttgaatgtatatgcttttatctgcctttatgacactttcatgtgaaagtacgatataataact

SEQ ID NO: 38747 - DNA, 397 bp, Glycine max
  Clone ID: LIB3138-095-Q1-N1-B3
tgacaattttgctaaagtggtggttactgcagttgccacaaccggcaaaccaggaccttcatatttgaccatgcaaataatcagttcctccatagtttccttggaaggagggtctgcgagtgcttgtacattttgcctccatatccaggtatggattactactgtagatgtgtgcccctggagaagttgtaatgaattccataagtaggaccagctcactggtaccttcacttccttttcattttgattgctgcagttccatatgatgacaacttagttgatgcctgtgttaattatttcacccaacccccataaaggaaatagaaatcgtgtaaccctagtttcagttaaattgtagtttgattgtcgtcttcaaaaccatcaagtgaatgggtat

SEQ ID NO: 38748 - DNA, 222 bp, Glycine max
  Clone ID: LIB3138-095-Q1-N1-B7
tcggttcgggaaaaaaaaaaaaatttattaaaaaaaaaaaaaaaaaagggccggccgccacttagtgacttcgtcaccccggaattaaattccggcccgtgccttgaaggcttccaacttttccttatagggggtcgtttaaaacctggccgtaataatggccatagctgttccctgggggaaatggtaatccgttaacatttccacacaaaatacaacccg

SEQ ID NO: 38749 - DNA, 395 bp, Glycine max
  Clone ID: LIB3138-095-Q1-N1-C1
attcaggatttgaggtgctggaaagaagggataaaagtgtttggtttggggccttggtgaccgaggcctcgaaaggaggaaacttttggctacagaaagtagtttctttagtcgggtttctttcaaaaaatggtgcagagtctctgtttgatggcttctcatggttaccctcctggccttgtcttgcatccacaagtactgggcttgccctgcagtaccatgaagggctaccaaacattctttccttctccagtagcaaaagcagacctgatcagatatcagtctccttgtcttgatccaagtccatgtgaggagtcaacgaaatctcaaaatgaatggtttgattataagaagtttgtcaatgttgacttctcagttgaaaggcccatgcttat

SEQ ID NO: 38750 - DNA, 394 bp, Glycine max
  Clone ID: LIB3138-095-Q1-N1-D1
ggaatcctgttggcacaaaagcaatgactatgtcatttaatccaaacccgggttttgatgcatggggttgggaatttttgaagcgtcctggatttaatggggatttaattggggtaactggatggactgccaccccaatgcaggaggttcaggtaacaatggatgggttaatttcctctcaggaatgtgttccccaggacctattgtgttttaaaatccaacaaaatccttattgtgttaaaatagggtggatggggaaaaattgactgttcctccgagtgcactttcccgaagtgttaaagagaatgcctctttctatagggggaggagctggtgcaaagaatgctattctcatgaatatgccaaaatgctgtctttcaatgtggagatattt

SEQ ID NO: 38751 - DNA, 101 bp, Glycine max
  Clone ID: LIB3138-095-Q1-N1-D10
gtgaactagatagtagtattttatgcacttaaataaagcgcgtgactatgtgcaatgagcgtgttcaaatataaacaaaaaaaaaaaaaaaaaaaaataaa

SEQ ID NO: 38752 - DNA, 158 bp, Glycine max
  Clone ID: LIB3138-095-Q1-N1-D3
cttacgttgctcataacgttaatcagccccaagagaaagaatttgttggagggaaaatttttcctttgatattaaatctcgctctagatggaaaaagttccttacaagcacattgtagggaaacctcaattgattatgggctggtaatcttaaaattt

SEQ ID NO: 38753 - DNA, 331 bp, Glycine max
  Clone ID: LIB3138-095-Q1-N1-D6
ctcaagccgttcgacccgcgaaaaaaccaactccttaagttcatggcaccccccaacccaaccgaattttcctttgccatggaaagaaccggccaatgggttttttcccaaaaaatcccaaccgttgtaattgttgcagttgaccaaaccaatttttctttccacaggttatttctggcgggaaagagtaactacgtcaaaaaaagtgataatgggaatcagagggagagtgacctaacaagaaatagagatttccgacataccctggaggatcagaaagctttgaaaaaagcggcgaaattctgtttacggcgttaaacttcgagaatca

SEQ ID NO: 38754 - DNA, 373 bp, Glycine max
  Clone ID: LIB3138-095-Q1-N1-D9
cggacgtccttcatttttctttgtatccgggtactactgtgcggcggctgttcttgctctgttcatcgctatcctcgctttaaacatcatggggttgttcatccagaagaattacttggaggtggatggcccgactgacttgctgactggtggctccactgacatggtccgtagcatggccaagatcttatcacacaagggagcacatatcgtgattgtttcgaggaaccacactcatctagctcaaacactctctggtgtcagcgctgcatccaacgatcccgccaaacagcttttcaccaccatctccaacgactaaagcatccctgatgagaatgtacatatcttgacataaacaaccgcttgccacaat

SEQ ID NO: 38755 - DNA, 291 bp, Glycine max
  Clone ID: LIB3138-095-Q1-N1-E11
gcttcaagaggctaagactgcataccccaacggcttcatccgtatcatcggattcgacaacgttcgccaagtgcagtgcatcagcttcatcgcctacaagcccccaggcttctaagtgtgaaaaatttgcaaagcatttgtagccgccaccccactttgtttgtttgtacttaaactacattcccatttgtttttgctttttgagatttcatcatcctgtatttttggtttctgttttcggacttcaatggaaattaatggatgagaactaatgaataagctattgtgttg

SEQ ID NO: 38756 - DNA, 400 bp, Glycine max
  Clone ID: LIB3138-095-Q1-N1-E3
ggatgataacttaattagtgttcatgaatatgtcaagccttactttagtgggtcttaaatggaaaggccttctagcctggtccttaaccatcccctttcctgtgggattggccaaacctaggccacctttccatttaaaaaggtagccgattgtggtttttctcaaagaaaccctaaagcagatgtctaaagttttgtgggtggctcctgaggacaaggcgagtttatggtcacaacttcattatgtttcgtgtaataatctggaaatgcaagaagcttatcttgtcaatctcggtaatgtgttacgagaattgtatttgcacagtccagaggaagctcgccaattgagaaaggaaggctcttcttcgtattgaatggctgcaaaaagcctgatgtgcct

SEQ ID NO: 38757 - DNA, 390 bp, Glycine max
  unsure at all n locations
  Clone ID: LIB3138-095-Q1-N1-E5
tggcttttttccgtttttaattaatggggccagtctttctgcaatccacagttaacttaaattttttcgacatgctaacgtgatcacagcttttcatttgagtgggaaatgaaaaaaactggccgagctttaaaaaaaaaaatggcctggttttttctctgaatttgggtgtgatggagttcccttcccctactatgcaagtttggacccttttctggttcctgctactactgaaaagtgatgttgtccaatcggcttctgattacttgattggtcttggaagctatgacatttaccgtcctgcagctgatgttaacatgatggggtatgccaacactgaccaaattgcatctgggattcacttcangctgcgggcttcggctttcattg

SEQ ID NO: 38758 - DNA, 393 bp, Glycine max
  Clone ID: LIB3138-095-Q1-N1-E6
ggcggttcgagctcgagccggtggattcttggttaccaattttggggaatggcctttatccggtaggtcaattaccttcaaaagctgtcgttgtaaatgttacatgtggtagtggacgtgtggtttaacccaccactgcttggattagttctgcagttaacaatcgctcctcagatatcaacaaaaggattcgcacagcacttgggaaaggtaagaaaattgtttttcttactagagttgatccttttccagtagctttactggctgttctttttggcgttaagaatgaaattctgagttctaacgccactaatcctatgctgacgcgacttcttgagaactgtaagagtctcaaatatctggttgatgagtgtccttttgcatttgtgaact

SEQ ID NO: 38759 - DNA, 355 bp, Glycine max
  Clone ID: LIB3138-095-Q1-N1-E7
gttctagatcgcgagcggccgcccttttttttttttttttttatgattaacgaaataattttgatatgtagattaaataaacacacgaagtacaaataaacattggtctctctaatcacaaaggagattaagtccattgtggtgtgccttcatgactgaattataccaaagtactacccttaacatactcagtaaaagccagagcaatcaaacccaacatagcaaatctcccattccacagttctgcatctgaggacatgaaccctttggacttagactccacgctgacaccttggaagagtggaatcaaggaagcaagggtaaggaccacacttgtccccaagaaccatgggat

SEQ ID NO: 38760 - DNA, 269 bp, Glycine max
  Clone ID: LIB3138-095-Q1-N1-F4
gcatccaccattttatcccttacaaccccttttaagttatgctaaggaaaaagtgggattttaagtccttaacaggcactttttgtgaagccagtgaaaaggcaaatgatggggaaaagcaagggaatgagaattgcatgccaagccaccagcattcctgctgatagagtccctgacatgggcaaaagacagctcatgaatctgcttcttcttggtgccatttcactcccctctgctggaatgcttattccctacacctacttttttgt

SEQ ID NO: 38761 - DNA, 376 bp, Glycine max
  unsure at all n locations
  Clone ID: LIB3138-095-Q1-N1-F5
ggttggagatcttaaccttgttattatatccaaaagaaagatacttcatctgctgcaaggagctaccaggggtgttgaaggccgcctttcacggcaataaaaacctattcaacagttacccaaaattgcaggatgccttggttggggtctactttcactcaaacattccagaattcaacaaggtggaatgttggggccaactgaaggaagcgtcagtaccaacaggtggggtccaggaggaggggtaggcaatttcacagccatgccaaaaagaatgccaatgttgctttccaccgcttacgttgagccctattcagtggtctaaacaagttcccagtcgncattaacgaaccttgtgatgggattgggacccaac

SEQ ID NO: 38762 - DNA, 394 bp, Glycine max
  unsure at all n locations
  Clone ID: LIB3138-095-Q1-N1-G1
gtgagaccaccattgatttttgtttctaccagccaaagctttggtcggttttttattgaccttttcggtggaggaatcttattggccaaaactggagatgggttcacacttatccaaaattctccaattagtaacttgttgagagttgctgcttggaagaaaggttgtttaatggtcaagattgtgatgtctgggaatgcagcagtcaaaaggagtgattgggcctcattggtacaagtgtttttaacaaacagcaacagtacagagcattttgatgcatgtaagtggacaaaatcagaaccacatntcctgggaattgatcttcccaatagaggtatgtgggccctaataatggttttggaaatgtggagtttctgagtgggcaaaatcaaac

SEQ ID NO: 38763 - DNA, 380 bp, Glycine max
  Clone ID: LIB3138-095-Q1-N1-G2
gcccttaacaatgtggggggattaactgatcttgggtggaaaatggttgaatttccactggcccttccgttgctaaaatgcttttgatgggtgaacagttgggtgtcttgaggaggtttaacaattgtttccatgctgtcagtgccatctgttttctttagacccaaagaccgggcagaggagagtgacgctgcacgggaaagattttttgtgccagagtctgatcatttaaccctctacaatgtttatcagcaatggaaacaacatgattacagaagtgattggtgcaacgatcattttttgcatgttaaaggtctaagaaaggctagagaggttagatcccaactgcttgatattctgaagactttaaagatcccctt

SEQ ID NO: 38764 - DNA, 321 bp, Glycine max
  unsure at all n locations
  Clone ID: LIB3138-095-Q1-N1-G3
cagaaccacattcctgggaattgatcttcccaatagaggtatgtggtcctaataatggttttgaaatggggagttctgattgggcaaatcaaacttcatggcttttgagtttccttattgacaatccccaaacagtcttacaggtttttgatatttctctttgggaatctcttcaaaattttgaaaattgctgggtaataactctttatgccaagcttttttcttgttccacaaggcnttactgccagatctttcttgaaaatgcccggaatcctcttgcatgaatctggcgaatttgatcgttttcttttcgctttgttc

SEQ ID NO: 38765 - DNA, 393 bp, Glycine max
  unsure at all n locations
  Clone ID: LIB3138-095-Q1-N1-G5
tagaagtgaagtgtcatctgatactgcaatcaagacatcgtattcagaacccgttaagatggttgatggtttggactttggtgagctttgcaatgagtttgagtgcatcagcagtcccttggtagaatccactgcaggacaacttgcacgagatatacttgagctaagggagggaaatcgagcacttggaatctttgctgtttctgtcgcatacaaggatcctattaggagctttaccggtcgtgaaaagtataaaagacgactatgggcaaccggtgcactagacaacccatctgtgactgtgcangaaatggtgatgctgtcaaaccagtgtttaagtatcaagtggacaataagagggaaaccaaaatctgtgttagggagagatctgat

SEQ ID NO: 38766 - DNA, 94 bp, Glycine max
  Clone ID: LIB3138-095-Q1-N1-H10
aaaaaaaaaaaataatttaaaaaaaaaaaaaaaaaaaaaaaaggataaaaaaaaaaaaaaatgataaaataaaaaaaaaaaaaaaaaataaaaa

SEQ ID NO: 38767 - DNA, 395 bp, Glycine max
  Clone ID: LIB3138-095-Q1-N1-H3
gaaaaaatggccaaatcaatcaaattctttgagttgaacacgggggccaagattccttctttggggttagggccttggcaagctgaacctggtgttgtaactgaagctctcaccacagccattcaggttggatacaggcttattgactgtgctagtgcgtataagaatcaagcagagattggttctgctcttaagaagctatttgatgatggtgtggtgaagcgtgaggacttatggatcacttccaaactctggtgttcagatcatgcaccagaagatgtgccaaaagcattggataaaacattacaggaattgcaacttgactatcttgacctctatctgatccactggccagtccgcatgcaaagtggaacatttggactcaataaagaata

SEQ ID NO: 38768 - DNA, 402 bp, Glycine max
  unsure at all n locations
  Clone ID: LIB3138-095-Q1-N1-H6
gggagagagagaacttcaactgagggtgagagtgacacaaatctagggagcactactctaaaagttctattagattcttcaaaacatgaccatgcatcgcgagtcttgggcttttgtcttcggcgttatgggcaacatcatctnctttggagtgttccttgctccattgccaaccttttaccaaatctacaagaagaaatccactgaagggttccagtcactttcttatgttgttgcactgttcagtgcaatgctttggatttactatgctttcgtcaaaaagggaagctgccctccttctcattaccattaacacnatttggaattgttgtggagtcaatttaccttgcaatcttcctactttatgccccaaggaagcctaggcttacaaccatcaaagct

SEQ ID NO: 38769 - DNA, 383 bp, Glycine max
  Clone ID: LIB3138-096-Q1-N1-A2
agctttgctcgagcctaatttcattaaacattattcactctctttctctgtctctagtttttacaacatggctactgcggtaactgctgcagtgtcctttccagccaccaagtccacttctctttcaagcagaacctctatcactgccccagatagaattgtcttcaagaaggtttcggttgcaatacagagatgtttcaaccagtggaagggttgtttcaatcagagcacaagtgaccacagaggcacctgctaaggttgaaaaggaatcaaagaaacaggaggaaggtgtgatcgtgaacaagttcaaacccaagaacccatatattggtagggtcttctcaacacaaagatcactggggatgatgcacctggagaaactt

SEQ ID NO: 38770 - DNA, 392 bp, Glycine max
  Clone ID: LIB3138-096-Q1-N1-A6
gtatacacggggcttggcgatgtcagcatctatgttgtgggcaaggacgaatatgatgaacttgccttgtcagaagtgatctttgtgataacctcagctgtgaaggatgtatgtgggaagctcccaagtgagcgccttttccttgacaagtatggaagaatttgcctgtgtttggatgaaattgtatggcagggatatttggaaaatacagaaaaggatagaatcaaaagactgataaggttaaagcctccaacagagttttgattgagtagtccagagcaagtcatagttcaatgactggtctgagtcctgtgggtcatagtgtggcatcctgtagttggatatgggcaagcaaccgaagattgtgctggatgtatgcgctttgcaacgat

SEQ ID NO: 38771 - DNA, 294 bp, Glycine max
  Clone ID: LIB3138-096-Q1-N1-B6
ggtctggatggtcttgcctttcgctcggctgcatactaccagcaaggtgcccgtttcgccaaatggcgtactgttgtgagccatccccaacggtccctctgctctggcagttaaggaagctgcctggggtctggctcgctatgcagcaattgctcaggacaatggattggtcccaattgtggaaccagagatcttgcttgatggggagcatggtattgacagaacttttgaagtagcaaaaaaagtctgggcagaggttttcttctaccttgctgagaacaatgtcctttttga

SEQ ID NO: 38772 - DNA, 370 bp, Glycine max
  Clone ID: LIB3138-096-Q1-N1-B7
atcgcgagcggccgcccttttttttttttttttttttttttttttttttttttaagggcaagtggttgcattaattgctacaaactacccgtgactgcttcctgcattctttcttacttatttatactatatacaaagtcgggtccgtcgaagagtgagttataaacccgtttacttggatccgcccttctggccctcaacgtgagggtctggtccatcagatccaccgaagccatgctcagacgacttcctcttgtcgggggtaccgtcctgcttgaggccgtcgtgctcggaaggcttgtacttctcgccaccagcctgaccacccttcttgccctcgacgtgggggtcaaggccgtcagagccaccg

SEQ ID NO: 38773 - DNA, 378 bp, Glycine max
  Clone ID: LIB3138-096-Q1-N1-C11
aaatgtacagtctctttcttcatagcatttggaaatttggctgatgataccatcaattttgaggcttttccccacaagctggtgcagtttggagagattcaggaaaaagttgtattgaaattttcacaagaggaatttcttacagcttggtcaactcaggtgcgtcctgcaacaactctgttggctgatgggtgtccatatttgtatgcaatggtgcatgatagttcagtgtctacaataccaggtgattttgtcattggtgtcaagttgacaaccataaacaatatgtgtgcatatgggctcaatcctggtatttcaggttctcgtcttttgggcaccattgctcaggtcatttcacagcaaactgtttggaataaa

SEQ ID NO: 38774 - DNA, 384 bp, Glycine max
  Clone ID: LIB3138-096-Q1-N1-C12
gttccattcgatgcagaggatgatgaatgctcctgattcaaatgataatattgatttactgttgagcattgatttgttgggtttacaaggagcaggtaaagcttttccaaacaaaattgtttttgatgataagcttgtgttggctaacacacaagaattctttgatggaaattttccagtggattcttggttaccaatttttgtgaattgtctttatcctgtaagtcaattaccttcagaagctgtcgttataaatgttacatgtggtagtggacgttgtggtttacccaccactgcttggattagttctgcagttaacaatcgctcctcagatatcaacaaaaggattcgcacagcacttgggaaaagtaagaaaattgtttt

SEQ ID NO: 38775 - DNA, 363 bp, Glycine max
  Clone ID: LIB3138-096-Q1-N1-C2
ctcgacccggttttcttaaaatttcttccttgccactgccagggtgtcaccaccatggccaccgtcacaacccaagcctccgtcgcgattgtccggccatgtgcctcgaaatcgagggttctgacccgctctttccggtaaaccaacccggaaagggctatgaagccaatgggggtgccctcctttctgcctttttcaaggtgaaacccaaaaagggagagtggttaccctggcttggcctcccaacttacctcaatggcactcttctggtgcaatggatttgaccctctggactagctgaggcccagagacttgaggtggacgttcaaccgagctgtgaatgacttggccatgttggtgtgc

SEQ ID NO: 38776 - DNA, 227 bp, Glycine max
  Clone ID: LIB3138-096-Q1-N1-C5
gcagaaatgattaactgtctttgcggtggtgataaaaaagtcgacggtactatgaatttctgtgctcattccacccacctaatgcacacagaatagattccacaaaatgctgaattgcatttttcacaacaggaattttttacaactatcacaactcaggtacttcctgcaccaactctatttgatgatgcatgtccatatatcaattccaagcaacatgatacttc

SEQ ID NO: 38777 - DNA, 397 bp, Glycine max
  Clone ID: LIB3138-096-Q1-N1-D1
tttgattttagcaagcaaagcttttgtcagttttctattgaccttttcggtggaggaatcttagtggacaaaactggagattggatcacacttatacaaaattctccaattagtaacttattgagagttgctgcttggaagaaaggctgtttaatggtcaagattgtgatgtctgggaatgcagcaatccaaaaggagtgattgggcctcattggtacaagtgtttttaacaaacagcaacagtacagagcattttgatgcatgtaagtggacaaaatcagaaccacattcctgggaattgatcttcccaatagaggtatgtggtcctaataatggttttgaaatgtggagttctgagtgggcaaatcaaacttcatggcatttgagtttccttatt

SEQ ID NO: 38778 - DNA, 66 bp, Glycine max
  Clone ID: LIB3138-096-Q1-N1-D2
gcaaaacccttttcaagcagggtgtagttattcaattggaaagcacgacttcaaagttaatagaaa

SEQ ID NO: 38779 - DNA, 92 bp, Glycine max
  Clone ID: LIB3138-096-Q1-N1-F12
ataagaacaaaggttctaccttcaatttggaatcattctttgaattcttccaaattgaaggtaggataagaacaaaggttctacatattcac

SEQ ID NO: 38780 - DNA, 99 bp, Glycine max
  Clone ID: LIB3138-096-Q1-N1-G2
gggagttaaggcccattgcctagagaattagtggtcattgggtttaatggtcaatgtcaattaacacccaccatgaagccttatcccattaatggaagt

SEQ ID NO: 38781 - DNA, 106 bp, Glycine max
  Clone ID: LIB3138-096-Q1-N1-H12
cgaaaaaaaaaaaaaatctatctgctctcaaaactgtgagttggggaatccttcttgcaccaaaagcaatgacttctttctttaatccaaaccctccttctgaaaa

SEQ ID NO: 38782 - DNA, 147 bp, Glycine max
  Clone ID: LIB3138-096-Q1-N1-H5
ctcggatttcggttcgggagtagctccatttccagtttatatggaggccaaatggagaaccagggggaaggaaggaggttggcaggaaagaaattcccagttgtgtggttgatttcaggacacaaaatgccagttttaggcttggga

SEQ ID NO: 38783 - DNA, 343 bp, Glycine max
  Clone ID: LIB3138-097-Q1-N1-B1
cttcactactaccactttacccaccaaaccacttatcaatcaacatgtctgacattggacgacaatccctcggtgacaaggccggagccgccctcaagcccgactccgagaagtcttacgttgagcaggccaccgactacgtcaagggcaccctcgactccgttgcctcggccgtgcagccgcaacaagagaagagcacaactcagaaggtcggagacgccctcaccggcgacaacaagaacaaggacatcgcctaaatgtctttggactcgacttgattgatgttgtgattgttagcgaagaagtataagcgacgtgttatgatgcatcgttgtcaactgtg

SEQ ID NO: 38784 - DNA, 423 bp, Glycine max
  Clone ID: LIB3138-097-Q1-N1-B3
agggtttttaacaaacagcaccagtccaaagcattttgatgcatgtaagtggacaaaatcagaaccacattcctgggaattgatcttcccaatagaggtatgtggtcctaataatggttttgaaatgtggagttctgagtgggcaaatcaaacttcatggcatttgagtttccttattgacaatcccaaacagtctacagtttttgatattctcttgggaatctctcaagattttgaaattgctggtaatactcttatgccagctttttctgttccacaggctactgccagatcttctgaaaatgcggaatcctctgcatgatctggaatttgtgttttctttcgcttgttcgtttgtttaattcaataaaggaaattaggcatgaccctctttgtgagtatgctctgcctatttgaaaattt

SEQ ID NO: 38785 - DNA, 76 bp, Glycine max
  Clone ID: LIB3138-097-Q1-N1-C10
aaaaaaaaaaaaaattaaaaaaaaaaaaaaaaaaaaaaaaaaagaaaaaaaaaaaaaaaaaaaaaaaaaaaaaaaa

SEQ ID NO: 38786 - DNA, 400 bp, Glycine max
  Clone ID: LIB3138-097-Q1-N1-D12
agtccagatccgatcctcgatggcggcggcgtcgcggaggctccgggacctgcagtccgaggccgggaacaagatctgcgttgactgctcccagaagaacccgcagtgggcctccgtctcctacggcgtcttcatgtgcctcgaatgctccggcaagcaccgtggcctcggcgtccacatctccttcgtccgatcggtcaccatggactcctggtccgacatccagatcaagaaaatggaagccggcggcaacgacaagctcaacgcattcctcgcacagtactccatccccaaagaaaccgacatcgttacgaagtacaacaccaacgccgcttctgtttaccgcgaccggatccaggccatcgccgagggccgcccctggcgcgatccgccggtgttg

SEQ ID NO: 38787 - DNA, 128 bp, Glycine max
  Clone ID: LIB3138-097-Q1-N1-E5
aggtgggaatgcagcagtcaaaaggggtgatggggcctaattggtccaggtgtttttaacaaacagcaccagtccaaacctttttgatgcttgtaggtggccaaaatcggaaccccattcctgggaat

SEQ ID NO: 38788 - DNA, 337 bp, Glycine max
  Clone ID: LIB3138-097-Q1-N1-F12
gactagttctatatcgcttacaagcccccaggcttctgagtgtgaaaaatttgcatagcatatgtagccgccaccctactttgtttgcttgaacttaaactacattccacatatgatattgctttttgagatttcatcatcctgcttttgtggattctgttcacagacttcaatggaaatctatggttgtgaacttatggtcgataattatttacaaggatggagataataacaccagtaccagctacagcaacaacaaacagccaaaaacgcaaccgcgaaatcgccagaacccgacgtatagactccgacctcgatccaccaaggcccgcacctg

SEQ ID NO: 38789 - DNA, 97 bp, Glycine max
  Clone ID: LIB3138-097-Q1-N1-H11
aaaaaaaaaaaaaaataaaaaaaaaaaaaaaaaaaaaaaaaaaaaaaaaaaaaaaaaaaaaaaaaaaaaaaaaaaaaaaaaaaaaaaaaaaaaaaaa

SEQ ID NO: 38790 - DNA, 212 bp, Glycine max
  unsure at all n locations
  Clone ID: LIB3138-097-Q1-N1-H6
tcttatgtaatatcacctttgtcacgcactatgctctagaactatcacggagtacacgtttgacttcgtaggctaccgctatccaccgtaccgaaccagtggctggncaaccactttcagcaccatgcaaccccgccgtggctaccaacccgcatatcaagaacaaccctgatatctgcaacaaccccatgaagtccgagaccgaaggacgt

SEQ ID NO: 38791 - DNA, 76 bp, Glycine max
  unsure at all n locations
  Clone ID: LIB3138-098-P1-N1-B11
cggaattcccgggtcgacccacgcgtccgnaaaaaaaaaaaaaaaaaaaaaaaaaaagggcggccgctctagagga

SEQ ID NO: 38792 - DNA, 231 bp, Glycine max
  Clone ID: LIB3138-098-P1-N1-C12
ggaattcccgggtcgacccacgcgtccggcaaaatcagccgacttcgtcgggaatgtccttttgatgaatgtggtgctggagttttcatgggtagccactttgacaggcattactgtggcaagtgttgtctgacttactgcttcaacaaaccagaagacaagtagttgtgtatgagttaataaagagaaggaactgaaaaaaaaaaaaaaaagggcggccgctctagagga

SEQ ID NO: 38793 - DNA, 195 bp, Glycine max
  Clone ID: LIB3138-100-Q1-N1-A4
ggaaaaaaaaaaaattattataaaaaaaaaaaaaaaaaaaaaaaataaaagttggaaatataaatggggggaaaaaaaaaaaaaaaaaaaaaaaaaaaaaaaaaaaataaaaaaaatggggccgccccccaattattaacttcttcaccccggaatttaatttcgacccggaccttgaaggcttaccatttttcc

SEQ ID NO: 38794 - DNA, 112 bp, Glycine max
  Clone ID: LIB3138-100-Q1-N1-B6
tcagcccaccgggggggttgggcattggtattggcaaaggcaatattttttttaaaaggggcccctttaatccaataacaaccctttccgtcgtgcgtggattgaaccccca

SEQ ID NO: 38795 - DNA, 62 bp, Glycine max
  unsure at all n locations
  Clone ID: LIB3138-100-Q1-N1-C10
aaaaaaaaaaatttaaaaaaaaaaaaaaaannnnnnggggaaggtaaaaaaaagaaagggga

SEQ ID NO: 38796 - DNA, 343 bp, Glycine max
  Clone ID: LIB3138-100-Q1-N1-D1
ctttgactgcattggtgatcctcctgaggagagatttgacttggcattgtgtggaagcctggttgagaagcaatacgtgagctagcacattgttaagtgatactcaaagattttgtttgattcaagtctccttcaatatttcctatgagtgcccaattcgacttatgtgttcaagcccaccctttcaagtcaatgatgaaaatatcaccatgggttcaataaagaatcttcatttcttgttaagcttaatttcatttcaagtacttttttttttattattcgtataaatagaatgaatgaggcttaaaattttaaattaattctggaaatatcaaagcttcaa

SEQ ID NO: 38797 - DNA, 358 bp, Glycine max
  Clone ID: LIB3138-100-Q1-N1-D4
accagtacaaagttttttgatgcttgtaagtggacaaaatcagaaccgcattcctgggaatggatcttcccaatagaggtatgtggtcctaataatggttttgaaatgtggagttctgagtgggcaaatcaaacttcatggcatttgagtttccttattgacaatcccaaacagtctacagtttttgatattctcttgggaatctcttaagattttgaaattgctggtaatactcttatgccagcttttttctgttccacaagctactgccagatcttctgaaatgcgggaatctctgcatgatctggaatttgggttttctttcccttgtccgtttgttaaattcaataaaaggaaa

SEQ ID NO: 38798 - DNA, 76 bp, Glycine max
  Clone ID: LIB3138-100-Q1-N1-E11
aaaaaaaaaaaaaaaaaaaaaaaaaaaaaaaaaaaagggaaaggaaaaaaaaaaaaaaaaaaaaaaaaaaaaaaaa

SEQ ID NO: 38799 - DNA, 112 bp, Glycine max
  Clone ID: LIB3138-100-Q1-N1-E2
ctgtgcagtttggaaagattcaggaaaaagttgtattgaaattttcacaagaggaatttcttacagcttggtcaactcaggtgcgtcctgcaacaactcttgtggctgatgg

SEQ ID NO: 38800 - DNA, 267 bp, Glycine max
  Clone ID: LIB3138-100-Q1-N1-E5
ggcctggatatgtgggttccactgaaggtggtcaattgaccgaggcagttcggcgtcgtccttacactgttgtactgtttgatgagattgagaaagcccatcctgatgtgttcaacatgatgcttcagatcctggaagatggaagactaacagacagtaagggcagaacagtggatttcaagaacacacttcttataatgacatcaaatgttggagcagtgtgattgagaaggaggccgcaaattggattgatctggatacgatgag

SEQ ID NO: 38801 - DNA, 288 bp, Glycine max
  Clone ID: LIB3138-100-Q1-N1-E6
gcctcccccaaagaaaaagccagaagcttctgaagaggatgaagggacaatggagtctctcagtcggaaaagaaaattgccttctaagaaccctgagcttgcaaagaagttgtccaaaaattcaaaatcgaaagatagtgtttttgctgccttgtgttcaacattgagccaggctgtgctacctggtaagaaaccttcaatcaacgttcataccgatccttgtggagaagacaataaagaaaaggaaccaaatgtttctagaaattgctgtgagaatagcaatgcaac

SEQ ID NO: 38802 - DNA, 383 bp, Glycine max
  Clone ID: LIB3138-100-Q1-N1-F3
catgatagttcagtgtctacaataccaggggattttgtcattggtgtgaagttgacaaccagaaacaatatgtgtgcatatgggctcaatcctggtatttcaggttctcgtcttttgggcaccattcctcagtccatttcacagcaaactgtttggaatcaaatggcaacagtgagaacaccattgaattttgaattctagcaagcagagcttttgtcagttttctattgaccttctcggtggaggaatcttagtggacaaaactggagattggatcacacttatacaaaattctccaattagtaacttgttgagagttgctgcttggaagaaaggctgtttaatggtcaagattgtgatgtctgggaatgcagcagtcaaaa

SEQ ID NO: 38803 - DNA, 268 bp, Glycine max
  unsure at all n locations
  Clone ID: LIB3138-100-Q1-N1-F4
ggaaaattgactttcccccagggcacttcccgaagtgttaagagaatgcctctttctatagggggaggagctggtgcaaagaatgctattctcatgaatatgccaaatgctgttctttcaatgtggagatattttgttggagatctcgtctttgaagtttctaagatgacttctccctacattaaatgtacagtctctttcttcatagcatttggaaatttggctgatgataccatcaattntgaggcttttccccacaagctggtgc

SEQ ID NO: 38804 - DNA, 54 bp, Glycine max
  unsure at all n locations
  Clone ID: LIB3138-100-Q1-N1-F5
aaaaaaaaaaaattaaaaaaaaaaaaaaaaaaaaaaaaaaaaaaaaaaagggng

SEQ ID NO: 38805 - DNA, 347 bp, Glycine max
  Clone ID: LIB3138-100-Q1-N1-G1
ggaaaaggaaaatttttagtgacttaaacatgatgatggatcagaaagtctacacatgcgagcatccccaatgcccttacagcgaagttcgccttggtttccatgataggtctgctagggacaatcatcaattgaattgtgcatatagaaacagttctgcagattatggtggtggtcccaatttccatgctactgaggttaagccagtcatattcccccagtcctttgttcaacccaacactacagctcagtctgcaagtttggttgcaccttcatttgatctaactggtcttggagttcctgaggatggccagaaaatgattagtgaccttatgacaatctatgat

SEQ ID NO: 38806 - DNA, 346 bp, Glycine max
  unsure at all n locations
  Clone ID: LIB3138-100-Q1-N1-G2
caacataactgatttttaacagccagcaagggttgctctaagttcaggatgtgagggagttgctgccataaatacaatcatgagtgtcatgggaatcaacctcgatacactacgtcctgagccttgtgttgaggggtactcaactcctgagggttattctgcaaaggcagtccatcccatagcacttgggaaggtgatgagcattgcaaagatgatgaagtcagagtttgatagtgagaactatacactntctgccattggtggcgttgaaacaagtggtgatgctgctgagtttatccttctncgggcaaacactgttcangtgtgcactggggttatgatgcat

SEQ ID NO: 38807 - DNA, 310 bp, Glycine max
  unsure at all n locations
  Clone ID: LIB3138-100-Q1-N1-G3
ggaaattgggctgatgataccatcaattttgaggcttttccccacaagctggtgcagtttggagagattcaggaaaaagttgtattgaaattttcacaagaggaatttcttacagcttggtcaactcaggtgcgtcctgcaacaactctgttggctgatgggtgtccatatttgtatgcaatggtgcatgatagttcagtgtctacaataccaggtgattntgtcattggtgtcaagttgacaaccataaacaatatgtgtgcatatgggctcaatcctggtatttaaggttctcgtcttttgggcacca

SEQ ID NO: 38808 - DNA, 364 bp, Glycine max
  Clone ID: LIB3138-100-Q1-N1-G4
gtgattgggcctaattggtacaagtgtttttaacaaacagcaacagtgcagagcattttgatgcatgtaagtggacaaaatcagaaccacattcctgggaattgatcttcccaatagaggtatgtggtcctaataatggttttgaaatgtggagttctgagtgggcaaatcaaacttcatggcatttgagtttccttattgacaatcccaaacagtctacagtttttgatattctcttgggaatctctcaagattttgaaattgctggtaatactcttatgccagctttttctgttccacaagctactgccagatcttcttgaaatgcggaatcctctgcatgatcttgaatttgtgttttctt

SEQ ID NO: 38809 - DNA, 284 bp, Glycine max
  Clone ID: LIB3138-100-Q1-N1-H12
cgaaaaaaaaaaaatacaaaaaaaaaaaaaaaaaaaaaaaaaaaggggaaaaaataaaaacaaaaaaaaaaaaaaaaacaaaaaataattattggaaccctaaaaaatatggttattcccacacctgatttccaccctttccggaatgtgatcccagtaattttttttccgccatgccttatgaacctggctcaatcttgataaggggcccccccctttttttggttccctacccccccctttttccaccccccttcccccaccttgccccccctctttttttt

SEQ ID NO: 38810 - DNA, 269 bp, Glycine max
  Clone ID: LIB3138-100-Q1-N1-H2
ggcttttgctgaccttaaggtgaaggaactcaaaaacggacgattggccatgttctttatgttgggcttctttgttcaggccattgtcaccggaaagggtccattggagaacctcgccgatcaccttgctgaccctgtcaacaacaacgcctgggcctatgccaccaacttcgtccccggaaggtgagcgtcaaagaacgaaatgacttttgagagttttaaaatttgtgtttggtgaagtacttcagataatgtgaattatcttgtgt

SEQ ID NO: 38811 - DNA, 268 bp, Glycine max
  Clone ID: LIB3138-100-Q1-N1-H4
cggttgagaattggacctttccatacatagccactttacactcactcttgtgttgttgccttcatggccaagccagtgtccattgaggtatggaacccaagtggcaaatacagagttgttagcaccaaaccaatgcctggaactcgttggatcaatcttctcgttcaaaatgatgttcgccttgaaatatgtaccgagaagaaaacgattctgtcagttgaagacatcattgctttgattggtgataagtgtgatggagttattggac

SEQ ID NO: 38812 - DNA, 90 bp, Glycine max
  Clone ID: LIB3138-100-Q1-N1-H9
gtttcacaaacttgggttttggtctttccaccacccaaatattgaaactcttcctctgtgtctcttgggaatctctttctttctctctct

SEQ ID NO: 38813 - DNA, 182 bp, Glycine max
  Clone ID: LIB3138-101-Q1-N1-A1
gccaaagtgaaatacttgggacccttttaagctcaaaccccttcatacttgaaaggaaaattcccaggggattatggatgggacactgctggcttatctgctgacccggaagcatttgccaagaacagggctcttgaggttatccatgggaagatgggccatgcttggagcactaggatgca

SEQ ID NO: 38814 - DNA, 305 bp, Glycine max
  Clone ID: LIB3138-101-Q1-N1-A10
cgaaaaaaaataaaaattaaaaaaaaaaaaaaaaaaagaggaaagaaaaaaaaaaaaaaaaaaaaaaaaaaaaaaaaaaaaaaaaacaaaaaaaaaaaaataaaaatataaaaaaaaaaaaaaacaactccgcccaaataaaaaaaaaaaaaaagggccgcccccaaattaggaaccccttcccccccggaaataaattccggaccggccctcaaagggaaccaaattttcttttttggaattttttttaaacctggcgaaaatcagggcaaaagcttttcctctctaaaaatttttttcccttc

SEQ ID NO: 38815 - DNA, 271 bp, Glycine max
  Clone ID: LIB3138-101-Q1-N1-A3
ttgagcctcaacccggttttcaaaaggcgggggaaggacccaatggggggttttttattggggcttacaaacttcctttttttacttttcttttttttccacattttccaaaaaccctggactctctcctttggcaaaaaccaatacctttctttttccggtctcccctttcccaaaaaccccttcttccttgtgggtaccgccacccgactctcccaacccgaaactgggggcctgaaaaaatacgtcaagtcgaggcttcccggtggat

SEQ ID NO: 38816 - DNA, 198 bp, Glycine max
  unsure at all n locations
  Clone ID: LIB3138-101-Q1-N1-B1
gagccaaaattgtaagaaaaaatcaaagccaaagaaacaggaaaaatcatggggtgctgggaggccctggtgatgacgacaataggggggncaccgggggtgaagccactgctgaaagagagcttctttgttcaatgcaagttgcatgctgactctcacaagagcgaatgcaacatgtattggctggactgtatgaat

SEQ ID NO: 38817 - DNA, 114 bp, Glycine max
  Clone ID: LIB3138-101-Q1-N1-B11
ctgctgtttccggtgcttcctctgctgccttttcggccacttccggtgcttcctcggtcctttccaagcccacttttgttgttggcggtgtcacttgtgagatcgcctggcccg

SEQ ID NO: 38818 - DNA, 339 bp, Glycine max
  unsure at all n locations
  Clone ID: LIB3138-101-Q1-N1-B6
ggtgcccatggccttggcggtttgggggcattgcttgctggtggggctgttgctgcggcggctgcctttggggctcaccatgtttcccatggccaccatggatatggtggatatggacacatgcctcacgggaaattcaagcaccatggaaagttcaagcatggaaagttcggcaagcatgggaagtttaagcatgggaagtttggcaagggtatgttcaagaagtggaagtgatgatatttttcttgtacataccaaaccgcgaattctagatgcctgctgcggattgcttttattaataaactctacttttngttcgatgtcccatctatactaata

SEQ ID NO: 38819 - DNA, 97 bp, Glycine max
  Clone ID: LIB3138-101-Q1-N1-B7
aaaaaaaaaaaaaaaaaaaaaaaaaaaaaaaaaaaaaaaaaaaggaaaaaaaaaaaaaaaaaaaaaaaaaaaaaaaaaaaaaaaaaaaaaaaaaaaa

SEQ ID NO: 38820 - DNA, 260 bp, Glycine max
  unsure at all n locations
  Clone ID: LIB3138-101-Q1-N1-C4
ggcttttcccacaggaggactggcctgaaaaagttgttgatgcgttcagaatgttcttctgatttcaacaactaattgaccctgcaggcatccaagtgctttatttcattggaagggcattcttgagtttttccttaattaaatggtaaattaagtatgccttaatttttcttttcttttaatgatggtcaacaaataaaataatagctttcttganaaaaaaaaaaaaaaaaaaaaaaaaaaaaaaaaaaaagggcggc

SEQ ID NO: 38821 - DNA, 340 bp, Glycine max
  unsure at all n locations
  Clone ID: LIB3138-101-Q1-N1-C6
ggcttcaccttgacacttcttgtggataaagctctttttttgctgcactctaaaaaaaaaagcgtttctctctcattttctttctgtcgagaaaatttagtgaacccaaaaggagagaactttctttggtttgtgtttcattttgttgtggttttctgtaagattaaatggctgaggttttgaccaaggcgagtttggtttcctcttcttcttcctcatggcatggggttggtcaacggcatcatcgaagggtttcaacggtttccaacacttgtagcttcngttctggcgtgggaaagttctcttctttgaagatgaagtctcaggttctcagatcttg

SEQ ID NO: 38822 - DNA, 247 bp, Glycine max
  Clone ID: LIB3138-101-Q1-N1-D3
ccaaaactaatttggggggaacctcctaaggatgggcactgggtctaccttgggaccaaaatcctaagggcttggcttccactggtgaaaaaatgggtgggcccaaacattgagggttttatcccttttttggggggaatcaaaaatattccccttccctgatggcccttaaagaaaaaaatcttttttaaggtggacaaaatattggtgagggaagggttcaatgggtttattaagaggatttctt

SEQ ID NO: 38823 - DNA, 423 bp, Glycine max
  unsure at all n locations
  Clone ID: LIB3138-101-Q1-N1-D4
ctggtccaaaaaatgctattctcatgaatatgccaaatgcgggtctttcaatgtggagatattttgttggaaatctcgtctttgaagtttctaagatgacttctccctacattaaatgtacagtctctttcttcatagcatttggaaatttggctgatgataccatcaattttgaggctttttccccacaagctggtgcagtttggagagattcaggaaaaagttgtattgaaattttcacaagaggaatttcttacagcttggtcaactcangtgcgtnctgcaacaactctgttggctgatgggtgtccatanttgtatgcaatggtgcatgatangtcagtgtctacaataccangtgattttgtcattggtgtcaagtngacaaccataaacaatatgtgtgcatatgggctcaaatct

SEQ ID NO: 38824 - DNA, 127 bp, Glycine max
  Clone ID: LIB3138-101-Q1-N1-E4
ttgaggtttggctgtacttaaaggaaaatcccttactaaatggtattgttggttggttcattcttgcaaaggaaattttgagccccctcctagtggttcccgtatgggaatcacaggtgggatgggg

SEQ ID NO: 38825 - DNA, 457 bp, Glycine max
  unsure at all n locations
  Clone ID: LIB3138-101-Q1-N1-E9
gggggtagagctngagccgtatacgctcgagacacaacattctagcgggccgggcttttgtcagttttctattgaccttctcggtggaggaatcttagtggacaaaactggagattggatcacacttatacaaaattctccaattagtaacttgttgagagttgctgcttggaagaaaggctgtttaatggtcaagattgtgatgtctgggaatgcagcagtcaaaaggagtgattgggcctcattggtacaagtgtttttaacaaacagcaacagtacagagcattttgatgcatgtaagtggacaaaatcagaaccacattcctgggaattgatcttcccaatagaggtatgtggtcctaataatggttttgaaatgtggagttctgagtgggcaaatcaaacttcatggcatttgagtttccttattgacaatcccaaacagtctacagttttt

SEQ ID NO: 38826 - DNA, 171 bp, Glycine max
  Clone ID: LIB3138-101-Q1-N1-F2
cttcgggaaaaaaaaaaaaaaataaaaaaaaaaaaaaaaaaaaaaaaaaagaaaaaaaaaaaaaaaaaaaaaaaaaaaaaaaaaaaaaaaaaaaaaaaaaaaaaaaaaggggcggcccccaattagaaacctcgtcaacccgaaaataaattccgaaccggtccctgaagg

SEQ ID NO: 38827 - DNA, 89 bp, Glycine max
  Clone ID: LIB3138-101-Q1-N1-F3
ggctgaaaactcgactgtatttttcctggttccatcgtccatgggggacttcatcgaatctggctggcagtactcgatcacacatttca

SEQ ID NO: 38828 - DNA, 312 bp, Glycine max
  Clone ID: LIB3138-101-Q1-N1-G1
ttcaggtttttttttcaacggttcttcttccttttattagccttggcaaccttggcttccggccgccgggacctgtttgaaacctttttccgcttgccttccgaacctgataccaagaccaccttcaaggcccccggtggggccgacttcttggcgggttcaatgggttctgggaataccaaccttcaggcgatggttggcacgcctctataaaatattgaggaaaggtggtctgaaaaaacaaaataatattggtgttatggatgaagacataggattcaatggggaaaacccaaggcctggagtcatcat

SEQ ID NO: 38829 - DNA, 326 bp, Glycine max
  unsure at all n locations
  Clone ID: LIB3138-101-Q1-N1-G5
gttgaagttaacccattgcctaaagcattgtctggccacagggatgaggccttcttctctggtaatgctgctgctctggcttcaaggaagtcttctccaagagtgaccaacgaggctgttcagaangctgctgctgcattgaagggttcagatcatcgccgtgcaacaaatgtcagtgccagactggattctcaacanaagaagctcaaccttccaatcctgccaaccaccactattggatccttccctcagactgtagaactgaggagggtacgccgtgaattcaaggctaacaagatctncgaggaagagtatgtaaagtcaat

SEQ ID NO: 38830 - DNA, 187 bp, Glycine max
  Clone ID: LIB3138-101-Q1-N1-H1
cgtagcttggattccggttggggggccaagggtttttttccaccagtggttccttaaaattcaccctcacctttcctccaccctcgattggtgggggagaaccatattgggccggcccaaggggttaaccaacctttccaccgttccaaaaacctcaagaccttattgcttttcttgggttgggcca

SEQ ID NO: 38831 - DNA, 459 bp, Glycine max
  Clone ID: LIB3138-101-Q1-N1-H10
cgttaattattcccaagagaaagatttgttggagcgcaagggttcctttgatattaaatctccctctacattggaaaaagtttcctctacaaaagcacaatctgttagtggaaaaacctgcaaatatgatataatcggtgctgactcacattcttcagaagattattctgaacaggaagatcatgaaaaacccagaaagattgatgccagattgagacaaagaatagatcctcaatacagatgaggttcaagctcagatgcaaacaaatttgtttaaattgtctctggatgatgttaaaactactaaaggttccatgttggatctgaaaatatctcaatgtaaaattgcacttgccaagaacacagttggacgaaccattctgcgtagagatctatcggcaaatttttcgacagagggcaattttagagcatgtgttgatatgcagcgcactcatcgta

SEQ ID NO: 38832 - DNA, 466 bp, Glycine max
  Clone ID: LIB3138-101-Q1-N1-H11
gattttgttattggtgtcaagttgacaaccataaagaatatgtgtgcatatgggctcaatcctggtatttcaggttctcgtcttttgggcaccattcctcagtccatttcacagcaaactgtttggaatcaaatggcaacagtgagaacaccattgaattttgattctagcaagcagagcttttgtcagttttctattgaccttctcggtggaggaatcttagtggacaaaactggagattggatcacacttatacaaaattctccaattagtaacttattgagagttgctgcttggaagaaaggctgtttaatggtcaagattgtgatgtctgggaatgcagcagtcaaaaggagtgattgggcctcattggtacaagtgtttttaacaaacagcaacagtacagagcattttgatgcatgtaagtggacaaatcagaccacattcctgggaatgatcttcccat

SEQ ID NO: 38833 - DNA, 352 bp, Glycine max
  Clone ID: LIB3138-101-Q1-N1-H2
caaaaagctgatgtgcctaccatagcacaaattgaagagttccattcgatgcagaggatgatgaatgctcctgattcaaatgataatattgatttactgttgagcattgatttgttgggtttacaaggagcaggtaaagcttttccaaacaaaattgtttttgatgataagcttgtgttggctaacacacaagaattctttgatggaaattttccagtggattcttggttaccaatttttgtgaattgtctttatcctgtaagtcaattaccttcaaaaagctgtcgttgtaaatgttacatgtggtggaaggacacgttgggttacccaccactgcttggattagttctgc

SEQ ID NO: 38834 - DNA, 283 bp, Glycine max
  Clone ID: LIB3138-101-Q1-N1-H3
cctcgggaaaaaaaaaaaaaaaaaaaattttaaaaaaaaaaaaaaaaaaaaaaaaccgcaatttttaaacaccaccaaccccccctactaaacccaaaaatttattctcaacccatatcctgcccccccccccccttattgaccttctccccccgaaaattaattcccgcccggtccctcaaacctacccatttttcctatatacaatcccattaaaaccttcccctaacatacgacatacttttttctcttgtaaaatttttatcccctcacaattccccac

SEQ ID NO: 38835 - DNA, 262 bp, Glycine max
  Clone ID: LIB3138-101-Q1-N1-H4
ttggaggttgaccaaaaatttttggaagcgtttatggtttatgtgtcgggaaaaccaatcttgaccgacaaaaagtttgatgagttgaaactcaggctaaagatggaagggagtgaaatggtggctgaaggtccacggtgtagtcttcgtagtaaaaaggtttacagtgacctgtctgttgactatttaaagatgttcttgctgaatgtcccagcaactgtggttgcactaggattgttcttcttccttgatgatgtgactg

SEQ ID NO: 38836 - DNA, 442 bp, Glycine max
  unsure at all n locations
  Clone ID: LIB3138-101-Q1-N1-H6
tttgcttctcgctgatcaaagcctgtttattaggtaacttggtgtgggagttgtgactgtttctagctcggctgctcggactccattgggattgaatacaaagttttgcaataatcgtctgaagagacctttaattgtagcatttaagggggataagcacaatgactcagctttggttgcaacacaagagaaaattcctgtgccggttgaaacggcgaagaagacgcagaaaaagaggatagganaaactaacanactacctaagagagagaagtctccatcttccatggatgtggactacaatgaagctgctgccatgcttgaaaatctatacaaacttagccctgcttctgataatgcagaatgcatagatgggaaaatcaaaagagtctctcggagagggaaaaaagttgttgattaaagtgaagaaaaggagttaaag

SEQ ID NO: 38837 - DNA, 196 bp, Glycine max
  unsure at all n locations
  Clone ID: LIB3138-101-Q1-N1-H7
aatacttttttctttttaaagctgagcattanctcacgcggcgtgttatttgtgacgtgctctacctaccatactcacactacattatcattgaatacaaagttcagcaataatatcctcaatacacctataattagtccatttaaggaacataaccacatataacttatctttggtttcaacacaatataaaatt

SEQ ID NO: 38838 - DNA, 109 bp, Glycine max
  Clone ID: LIB3138-102-Q1-N1-A10
aaaaaaaaaaaaaatataaaaaaaaaaaaaaaaaaaaaaagggggaaaaaaaaaaaaaaaaaaaaaaaaaaaaaaaaaaaaaaaaaaaaaaaaaaaaaaaaaaaaaaaa

SEQ ID NO: 38839 - DNA, 72 bp, Glycine max
  Clone ID: LIB3138-102-Q1-N1-A12
aaaaaaaaaaaaaaaaaaaaaaaaaaaaaaaaaaaaaaaaaaagaaaaaaaaaaaaaaaaaaaaaaaaaaaa

SEQ ID NO: 38840 - DNA, 441 bp, Glycine max
  Clone ID: LIB3138-102-Q1-N1-A2
gcttttccaaacaaaattgtttttgatgataagcttgtgttgggtaacacacaagaattctttgatggaaattttccagtggattcttggttaccaatttttgtgaattgtctttatcctgtgagtcaattaccttcagaagctgtcgttgtaaatgttacatgtggtagtggacgtggtggtttacccaccactgcttggattagttctgcagataacaatcgctcctcagatatcaacaaaaggattcgcacagcacttgggaaaggtaagaaaattgtttttcttactagagttgatccttttccagtagctttactggctgttctttttggcgttaagaatgaaattctgagttctaacgccactaatcctatgctgacgcgacttcttgagaacttgtagagtctcaaatatctgcgtgatgagtgtccttttgca

SEQ ID NO: 38841 - DNA, 337 bp, Glycine max
  Clone ID: LIB3138-102-Q1-N1-A3
cgtagcttcgaattccggttcagggttaaataattatgtttcgatggaatcaatgactattcatgagtccataattgaatcaattacatactggatccaagctaaaggaatgttatggtaaaacttcgtttgaaacgatgtggtaaaaagcaacgtgcgacttgaaagacatgattagattagctgtggattcttacatccgccattttttctagtatatagaaatgaacatgctcttgactcgacatcgttgttctgtccactaaacttattgtttgggacggaaagcagtgatatgtagtgatgatgaatgacatgaggactcagttatcattat

SEQ ID NO: 38842 - DNA, 96 bp, Glycine max
  Clone ID: LIB3138-102-Q1-N1-B7
aaaaaaaaaaaaaattaaaaaaaaaaaaaaaaaaaaaaaaaggggaaaaaaaaaaaaaaaaaaaaaaaaaaaaaaaaaaaaaaaaaaaaaaaaaaa

SEQ ID NO: 38843 - DNA, 441 bp, Glycine max
  Clone ID: LIB3138-102-Q1-N1-D1
cgaaaaaaaaaaaaaatttttttaataaaaaaaaaaaaaaaaaaaggggggatttttaaaaaagaggaaaacaaaaataaattcaataatttattaacttgcctccccccaactaaataacctcattaactcctaaattaatttcaaaaaagggccccccccccttaaaaaatttccctaccccgaatttaattctcaccccgttccttagaggcttccaatttttccttttatgaattcttttaaaatttcccctaaataaagccaaaccctttttctttataaaaattttatccctttaaaatttcaccaaaaaataaaccccaaaactttaaattgaaaaccttggcccccttaaaaggggcctcacctcctattattggggtgacctcaactccccctttcccaaggaaaaaccctttccccccactccattaaaaa

SEQ ID NO: 38844 - DNA, 498 bp, Glycine max
  unsure at all n locations
  Clone ID: LIB3138-102-Q1-N1-D2
cgtcctaaacctccgaatttcggttcaggcacttcccgaagtgttaaaagaatgcctctttctataggggggggagctggtgcaaagaatgctattctcatgaatatgccaaatgctgttctttcaatgtggagatattttgttggagatctcgtctntgaagtttctaagatgacttctccctacattaaatgtacagtctctntcttcatagcatttggaaatttggctgatgataccatcaattttgaggcttttccccacaagctggtgcagtttggagagattcaggaaaaagttgtattgaaattttcacaagaggaatttcttacagcttggtcaactcaggtgcgtcctgcaacaactctgttggctgatgggtgtccatatttgtatgcaatggtgcatgatagttcagtgtctacaataccaggtgattttgtcattggtgtcaagttgacaaccataaacaatatgtgtgcatatgggctcaatcct

SEQ ID NO: 38845 - DNA, 416 bp, Glycine max
  Clone ID: LIB3138-102-Q1-N1-D3
ggagaaaatagttcaacttctctgtctcaatcatttcattataggtttctctcccttccaatcacagcgatctccagaattagggtttcgtgatttctgtctcactgatcaagaagaagaattgtttatctacatctgaatccatgaagccgcaatcatcctctttgaatccatatgcagcctcatatgttcctctctctaaaaggggggcagatggtagaatacctttgacagaaaaagattccaagacttgtgatgggacaatgtggtttcagatgactcatcagggtgctacaaatgacccgcaacttatcaacactagcttggaatggctctcgaaacccgaagcttttccggcaaaaagccagcctgcttttagttcctacacaggctacacttcatcatcacaaaatggg

SEQ ID NO: 38846 - DNA, 477 bp, Glycine max
  Clone ID: LIB3138-102-Q1-N1-E1
tcaacacccaacctgaaaagctcatttggaatgttatgggcatgatgaacaactgctggttcagagtgaaaaccaatgtgtgcaggccccacaagggtgagataggtatagtgtttgaacaccccacccaaccaggcaaccaatccggcggatggatggcaaaagaaaaacacctagagaaatcatctgagtccaacccaaccctcaagaagagtgtctcctccccattcatgaacaccacctcaaaaacctataccatgtctgaagtcagaaggcacaacaacgccgattcggcttggatcatagtccacggtcatgtctatgattgcacccgcttcctcaaagaccatcccggtggcacagacagcatcctcatcaacgccggcaccgactgcaccgaggagttcgaagccatccactccgacaaagccaagcaaatgcttgaagactaccgaatcggcgagctcaccaccacct

SEQ ID NO: 38847 - DNA, 396 bp, Glycine max
  Clone ID: LIB3138-102-Q1-N1-E5
aaaaacttaagttcattccttgtgttttgctttcttcctcaaggcgaaacatgtcgaacacatgcggcaactgcgactgcgctgacaagactagctgcaccaagggaaacagctatggtgttattgtagagactgagaagagttacatcgagactgttgtcatggatgttccagcagctgagcatgatgggaagtgcaagtgtggcactaactgcacttgcacggactgcacctgtggccattaaggaatatgtatgaaaatgtaattgccatgtgtttggcaatacaaatatccaaataatgtaatcttcgtatgaataaatgtgtgtgctgttatccaaaagaaaaaaaattaataaaaaaaatttttacaaatttaaaaaaaaaaaaaaatag

SEQ ID NO: 38848 - DNA, 454 bp, Glycine max
  Clone ID: LIB3138-102-Q1-N1-E6
gccttcctctttgcatagtgcagagctttctctccccgttgcggcattcattctcaacaacaaaccaatctttcttagaaaatgagggggggcttgtggcaacttgggcaatcgatcactcgccgtcttgcccatggagataagaaggctgttgctcgtcgatgttttgcctcagaagctgagctgaaaaagacagtgtttcatgacttccatgttgctcatggtgggaagatggttccatttgctgggtggagcatgccaatccaatacaaggactcaatcatggactctaccatcaactgtagggagaatggtagcctctttgatgtttcccatatgtgtgggctgagcctcaaagggaaggacgctgccccattccttgaaaagctggtcattgccgatgttgctgggcttgcccctggaacttggacgttgactgttttcacaaatgaaa

SEQ ID NO: 38849 - DNA, 389 bp, Glycine max
  Clone ID: LIB3138-102-Q1-N1-F6
gccatcaactttggtaatttacatgcctaaataaatcaatggggcaagatcttgaaatccataaataataatgtgacgtacaaattaaaataagagcttcacagtttgagtgtggatccaatattttcagctttttattatatataaatatatgacttcttaaaaaaaaattgactaacaacaacaaaaagaaaaaaaaaaaaaaaaaagaaaaaaaaaaaaaaaaaatataaagataaaaaaaaaacacaaaaaaaattataaaaaaaaagaaaaaaatatatggggcggccgccgcttatggatcttctcaacccggaattaaattcgggccgggtccttggagggggaccattttttcttatagagagtcgtttaaaacttggggg

SEQ ID NO: 38850 - DNA, 450 bp, Glycine max
  unsure at all n locations
  Clone ID: LIB3138-102-Q1-N1-G6
ttggagagcattttgatgcttgtaagtggacaaaatcagaaccacattggtgggaattgatcttcccaatagaggtatgtggtcctaataatggttttgaaatgtggagttctgagtgggcaaatcaaacttcatggcatttgagtttccttattgacaatcccaaacagtctacagtttttgatattctcttgggaatctctcaagattttgaaattgctggtaatactcttatgccagctttttctgttccacaggctactgccagatcttctgaaaatgcggaatcctctgcatgatctggaatttgtgttttctttcgcttgttcgtttgtttaattcaataaaggaaaattaggcatgaccctctcgttgagtatgctctgcctatttgaaaatttccacacctcttttaattgtcgtaatgatgtggggngtgtgtgtattttt

SEQ ID NO: 38851 - DNA, 341 bp, Glycine max
  Clone ID: LIB3138-102-Q1-N1-H10
gttctgagtgggcaaatcaaacttcatggcatttgagtttgcttattgacaatcccaaacagtctacagtttttgatattctcttgggaatctctcaagattttgaaattgctggtaatactcttatgccagctttttctgttccacaggctactgccagatcttctgaaaatgcggaatcctctgcatgatctggaatttgtgttttctttcgcttgttcgtttgtttaattcaataaaggaaattaggcatgaccctcttgttgagtatgctctgcctatttgaaaatttccacacctcttttaattgtcgtaatgatgtgtgaagtgtgtgttatttt

SEQ ID NO: 38852 - DNA, 295 bp, Glycine max
  Clone ID: LIB3138-102-Q1-N1-H11
gggaaaggtaagaaaattgtttttcttactagagttgatcctgttccagtagctttactggctgttctttttggcgttaagaatgaaattctgagttctaacgccactaatcctatgctgacgcgacttcttgagaactgtaagagtctcaaatatctggttgatgagtgtccttttgcatttgtgaactagtatgtagtattttattcacttaaataaagcgcattactatgtgcaatgagtgtgtttaaatataaaaaaaaaaaaaaatgcaaaaaaataatgaaaaaaatag

SEQ ID NO: 38853 - DNA, 377 bp, Glycine max
  Clone ID: LIB3138-102-Q1-N1-H4
aagagtttaatactaagggctgtaagtgtaattgtgatgtgaaggtagtgaatagagctttatttttaacgttagggtctactataagaagtcaataacaaccaaaatcttgtatgtgttatgattgttcttttgttgcttgctttttcctgtaagatgattcacaaatcatatactgtatttcgttgcagttcatcccaaagaaagctggtaccccaaagaaaaacgagattgtgttcacttcaccaacaggagaggaaatcaatagcaggaagcagctggaaaaatatttgaaagcacaccctggtggtccagctgtatcagaatttgactggggcactggtgagaccccaagaagatctacaagaatcagcgag

SEQ ID NO: 38854 - DNA, 328 bp, Glycine max
  Clone ID: LIB3138-102-Q1-N1-H5
gcttttccaaacaaaattgtttttgatgataaccttgtgtgggcgcacacacaacaattctgtgatggaaattttccagtggattcttggttaccaatcatagtgaatagtctgtatcctgtcagtcaatcaccctcagtcgctgccacaggaaatgttacatgtggtcttggacgtggaggtttacccacgactgttaggattagttctgcacttaacaatcgctcctcatatatcaacaaaaggattcgcactgcactttggaaaggtgaaaaaattgtttttcttactagaattgatcctcttccagtatctttactggctgttc

SEQ ID NO: 38855 - DNA, 445 bp, Glycine max
  Clone ID: LIB3138-102-Q1-N1-H6
tttccaatgtgagcttgtctttgccaagatgggaatcaaccccagcatgatgagtgctggagagttggaaagtggaaatgcaggagagccagcaaaactgatcaggcagagataccgtgaagccgcagacttgatcaagaagggaaagatgtgtgctctcttcatcaacgatcttgatgcaggagctggtcgtcttggtggaaccacccaatacactgtcaacaaccagatggtgaatgccaccctcatgaacattgctgataaccccaccaatgtgcagcttcctggtatgtataacaaggaagagaatccccgtgtgcccatcatcgtcaccggtaacgatttctccacactctatgcgcctctcatccgtgatgggcgtatggagaagttctactgggcaccaacaagggatgaccgcattggtgtctgcactggaattttt

SEQ ID NO: 38856 - DNA, 402 bp, Glycine max
  Clone ID: LIB3138-103-Q1-N1-A8
gttctagatcgcgagcggctgccctttttttttttggttttagtttttttattttttttttttttttttttttttttttttttttttttttttttttttttttttttttttttcccaaaacccttttttttttccggggggttttttttaatttaattccccccccgggggggggggcccttgggttttttttggggtacccgggaacccttttcccggggccggggggccaccggggggggggccccttggggggggggctggccccaaccccccaaaaagggaatccccggcggggttgggaaaaattcccccgccctggggcccgggccggcgcggaaaaccccctggcgttccccccgggctgggggggggggccccttcccgggcgtgggccccccc

SEQ ID NO: 38857 - DNA, 396 bp, Glycine max
  unsure at all n locations
  Clone ID: LIB3138-103-Q1-N1-C10
ggaaaaaancataagaggaatnncttacagctnggggcagactggaggtgcgtcctgcaacaaactctgttggctgatgggtgtccatatttgtatgcaagggtgcatgatagttcagtgtctacaataccaggtgattttgtcattggtgtcaagttgacaaccataaacaatatgtgtgcatatgggctcaatcctggtatttcaggttctcgtcttttgggcaccattcctcagtccatttcacagcaaactgtttggaatcaaatggcaacagtgagaacaccattgaattttgattctagcaagcagagcttttgtcagttttctattgaccttctcggtggaggaatcttagtggacaaaactggagattggatcacacttatacaaaat

SEQ ID NO: 38858 - DNA, 146 bp, Glycine max
  unsure at all n locations
  Clone ID: LIB3138-103-Q1-N1-E3
anaaaaaaaaaataaaaaataaaaaaaaaaaaaaaaaaaaaaaaaaaaaaaaaaaaaaaaaaaaaaaaaaaaaaaaaaaaaaaaaaaaaaaaaaaaaaaaaaaaaaaaaaaaaaaaaggccgccccccccctattaacctcttccc

SEQ ID NO: 38859 - DNA, 259 bp, Glycine max
  Clone ID: LIB3138-103-Q1-N1-E6
cttgggaatttctcaagattttgaaattgctggtaatactcttatgccagctttttctgttccacaggctactgccagatcttctgaaaatgcggaatcctctgcatgatctggaatttgtgttttctttcgtttgttcgtttgtttaattcaataaaggaaattagacatgaccctcttgttgagtatgctctgtctatttgaaaatttccacacctcttttaattgtcgtaatgatgtgtgaagtgtgtgttatttt

SEQ ID NO: 38860 - DNA, 169 bp, Glycine max
  Clone ID: LIB3138-103-Q1-N1-F3
tttggggacttaaatggatgctaagccggggattatgtcaatttgatctcaactgaaactttttagcatttctgatggactcgaaaactagttctagatctctcccgaaacaccactagaaaacagctgggattccaacccctgagaccaaaaaagcagggtctttttt

SEQ ID NO: 38861 - DNA, 405 bp, Glycine max
  Clone ID: LIB3138-103-Q1-N1-F6
ggcaatatgtgtccttatggcctcaatcctggtatttcaggttctcgtcttttgggcaccattcctcagtccatttcaaagcaaactgtttggaatcaaatggcaacagtgagaacaccattgaattttgattctagcaagcagagcttttgtcagttttctattgaccttctcggtggaggaatcttagtggacaaaactggagattggatcacacttatacaaaattctccaattagtaacttattgagagttgctgcttggaagaaaggctgtttaatggtcaagattgtgatgtctgggaatgcagcagtcaaaaggagtgattgggcctcattggtacaagtgtttttaacaaacagcaacagtacagagcattttgatgcatgtaagtggacaaaatca

SEQ ID NO: 38862 - DNA, 54 bp, Glycine max
  Clone ID: LIB3138-103-Q1-N1-G11
attactatgtgcaatgagtgtgtttaaatataagaaggagaaaataaaaaaata

SEQ ID NO: 38863 - DNA, 266 bp, Glycine max
  Clone ID: LIB3138-103-Q1-N1-G3
ctaaattgaaaagctttctagctagtcataacatcaccattactgatggtattgacaaaactagtgcaactttgcaatttagaaagttagcagattgtgattttctcaagagaaactttaagcagatgtctaatgttttgtgggtggctcctgaggacaaggcgagtttatggtcacaacttcattatgtttcgtgtaataatctggaaatgcaagaagcttatcttgtcaatctcgtaaatgtgttacgagaattgtatttgcac

SEQ ID NO: 38864 - DNA, 243 bp, Glycine max
  Clone ID: LIB3138-103-Q1-N1-G4
ctgcaaaaagctgatgtgcctaccatagcacaaattgaagagttccattcgatgcagaggatgatgaatgctcctgattcaaatgataatattgatttactgttgagcattgatttgttgggtttacaaggagcaggtaaagcttttccaaacaaaattgtttttgatgataagcttgtgttggctaacacacaagaattctttgatggaaattttccagtggattcttggttaccaattttt

SEQ ID NO: 38865 - DNA, 146 bp, Glycine max
  Clone ID: LIB3138-103-Q1-N1-H6
gaatcatgtcccggcaagctcgccatgtccggcgtcatgggcttcggcctcggcggcgtcttcggcctcttcatgtgctccatgcgctacgacacccccatggccaccaccgccggggggaacgccttcttcttccttcccgtcaa

SEQ ID NO: 38866 - DNA, 374 bp, Glycine max
  Clone ID: LIB3138-104-Q1-N1-A2
acttgggatcgagcaggcgttacattgagagctggtgtcctatgctgatgagctcgttaagaccgcgaaaacagtggcttcaccagggaggggtattttggccatggatgagtccaacgctacctgtgggaagcgtttggcttcaattgggctagagaacactgaagctaaccgccaggcgtaccgtaccctccttgtgacagttccaggacttggtcagtacatctctggtgccattctctttgaggaaactctctacctatccacaactgatggcaggaagattgttgacgtgctcctcgagcaaaacattgttcccggtattaaagtcgacaagggtttggtaccccttgctggttccaacgatgagtcat

SEQ ID NO: 38867 - DNA, 379 bp, Glycine max
  Clone ID: LIB3138-104-Q1-N1-A3
atcaccattactgatggtattgacaaaactagtgcaactttgcaatttagaaagttagcagattgtgattttctcaagagaaactttaagcagatgtctaatgttttgtgggtggctcctgaggacaaggcgagtttatggtcacaacttcattatgtttcgtgtaataatctggaaatgcaagaagcttatcttgtcaatctcgtaaatgtgttacgagaattgtatttgcacagtccagaggaagctcgccaattgagaaggaaagctctctctcgtattgaatggctgcaaaaagctgatgtgcctaccatagcacagattgaagagttccattcgatgcagaggatgatgaatgctcctgattcaaatgataata

SEQ ID NO: 38868 - DNA, 166 bp, Glycine max
  Clone ID: LIB3138-104-Q1-N1-B2
gtgaatttagggttgaaaacaccatttatttttcaaattagcgagcagaactgtggagagttgtctattgaccttatacgtggtggaatcttagtggacatatctggagatcggatcagactaatgcaaaagagttccattagtgactcgctgaaaattgctgcat

SEQ ID NO: 38869 - DNA, 85 bp, Glycine max
  Clone ID: LIB3138-104-Q1-N1-C12
aaaaaaaaaaaaaaaaaaaaaaaaaaaaaaaaaaaaaaaaaaaaaaaaaaaaaaaaaaaaaaaaaaaaaaaaaaaaaaaaaaaaa

SEQ ID NO: 38870 - DNA, 243 bp, Glycine max
  unsure at all n locations
  Clone ID: LIB3138-104-Q1-N1-C4
ctcgagccgnaaaaaaaaatttaaaaaaaaaataaaaaaaatagggggggaaaattttaaaaaatttttgtaaaaaaataataaaaataataaataataaaaataaataataaaatataaattataatttttatattatgggtgtgttgtgtttttgggtgtataaaatcatgtattaatttttgtttttgttgttgtaagtgttacaaatttggggtggtgccgttttttttttcttttttc

SEQ ID NO: 38871 - DNA, 100 bp, Glycine max
  Clone ID: LIB3138-104-Q1-N1-C5
cactgttccacggacctatcgtgtttgtaaaccacataatgcggttgactccaatacgggggcaggcaaaatgacttttcaccgacgcaccttactcaac

SEQ ID NO: 38872 - DNA, 449 bp, Glycine max
  Clone ID: LIB3138-104-Q1-N1-C6
cccttcttagtctcactatcaagcaatgcaataacatcagtacatagcataacataacatccttaaccctttgaacatcgttttgcagccatggaaacaggcatagcatgctacactcgcgggcctttcttgcctagtgtttcttccaagcactctccaccttccatttctccatcttttggcttgaggagtctgaaatcaagctctttatttggagaatcgctaagagtggcctccaaatcaacaataaaggtttcaaagacaaagaatacttcactcgtgaccagatgtgaaattggtgacagtctcgaagaattcctcacaaaagcaacaccagataaggggttgatcagggttgtggtgtccatgggagaagcattgagaacaatttccttcaaagtgaagacggcttcatgtggtggaacacaatgtgttaatacttttgggga

SEQ ID NO: 38873 - DNA, 231 bp, Glycine max
  Clone ID: LIB3138-104-Q1-N1-D1
ttcttccagtcttgaattggaggcaaagcaaacttggcaagtaaatatttctgttcgtgaaggttgttgtactaatccaagtgctagaagttgtgatggaacttgcgtgtaacattcttagcattctcaatgtcttaggtgcaaagagaagatgctaagtttgagatgatcttactatatttttcatattggaccgtcttcctctataattttgagttacagtgtccactt

SEQ ID NO: 38874 - DNA, 484 bp, Glycine max
  unsure at all n locations
  Clone ID: LIB3138-104-Q1-N1-D3
cagcagtcaaaaggagtgattgggcctcattggtacaagtgtttttaacaaacagcaacagtacagagcattttgatgcatgtaagtggacaaaatcagaaccacattcctgggaattgatcttcccaatagaggtatgtggtcctaataatggttttgaaatgtggagttcttaagtgggcaaatcaaacttcatggcatttgagtttccttattgacaatcccaaacagtctacagtttttgatattctcttgggaatctctcaagattttgaaattgctggtaatactcttatgccagctttttctgttccacaggctactgccagatcttctgaaaatgcggaatcctctgcatgatctggaatttgtgttntctttcgcttgttcgtttgtttaattcaataaaggaaaataggcatgaccctcttngtgagtatgctctgcctatttgaaaattccacacctcttttaatgtcgtaat

SEQ ID NO: 38875 - DNA, 393 bp, Glycine max
  Clone ID: LIB3138-104-Q1-N1-D4
ttgggggggaccttcaaccaaaaaaaattagtatggacctcttttgggcggggccagtttcatgctgtattgcactgtttgcaaagttgaaccccgttccagttttttggcagcattaacctttagccctggcaaaagctttaaagaactcgggggggttggttgggttaaaaaaggcccatattcgggatggtccaccagtggtccaatatctggtctggctggataaaaagatgcaggattttaatggagcttctgttactttttggagaaggattctgtgaaaaaggagaaacatttgcaatctttgaaattgactgaggtgactgtaagtgaccagcttgaaggttttcgagcatcaaaagagcatttcaaaggattgggtttccccac

SEQ ID NO: 38876 - DNA, 227 bp, Glycine max
  unsure at all n locations
  Clone ID: LIB3138-104-Q1-N1-D6
catctcctaactattgaaatagatgttgagggaaaccccatcctgggtacctaggttaattgtttgatagaccactgctgtttttttcagttctttgagataatttgaatggctattcagcattaattagtggcatcatcagtggagtggtcaatgaatgtgtgctatttcccttgaaatttatagagaatattttcattcnctaaaaattnatttatttttaatat

SEQ ID NO: 38877 - DNA, 397 bp, Glycine max
  Clone ID: LIB3138-104-Q1-N1-E10
ctagttctagatcgcgagcggccgccctttttttttttttttggtatcaattacagttataaacattgaatccaagcccaataaaaaaactcaaaagtattagacatcccatgaaacaaattcctgctataattttagccatcaagatgtcctaaaccagaaaacatgaacataaagccaatgtgtctcagaagagaaccaaaaaacaaaaccagataatattcacccctgcatccacaagacacccaaaaagcatcaagccttattggctatgttgttggaaagccagtccaaaccctcatagagaccctccccagaggttgcacaggtgctctggatgtaccagtggcgctgtctgagagagtggagtcccagcttgtcagtaatttcagcagca

SEQ ID NO: 38878 - DNA, 347 bp, Glycine max
  Clone ID: LIB3138-104-Q1-N1-E2
tctatccaaagattttgataatgtctagctgtgggtgtggaagcaggtgctactgtggcagcaactgcagttgcaacaagtactcttttgactacgttgagaagatcacaaatgaagactctagttttgggtgttgggccggtgaaggcccaattcgagggtgctgaaatgggtgttgtagctgagaacggtggctgcaactgtggatcaaactgcacttgcgacccatgcagctgcaagtgagatcaacatgcataaccttcaagcagagatagcttgtatacatgtatcaataaataataaagattgtgttggggtttgaagttttaaaataaagtggtcatggc

SEQ ID NO: 38879 - DNA, 171 bp, Glycine max
  Clone ID: LIB3138-104-Q1-N1-E3
cttcaaggtgtgaagtgtgtgtttttttaaaaaaaaaaaaaaaaaaaaagagaaaaaaaaagaaaaaaaaaaataaaaaaaaaaaaaaaaacaaaaaaaaaaaaaaaaaaaaaaaaaaagaagggggccggccgccaccttttgacctttcaaccccgaaaataaattccg

SEQ ID NO: 38880 - DNA, 426 bp, Glycine max
  Clone ID: LIB3138-104-Q1-N1-F3
ggattcctaagcccatttaacagcaaactgttgggaatcaaatggcaccagtgagaacaccattgaattttgattctagcaggcagagcttttgtcagttttctattgaccttctcggtggaggaatcttagtggacaaaactggagattggatcccacttatcaaaattctccattagtaacttattgagagttgctgcttggaagaaggctgtttaatggtcaagattgtgatgtctgggaatgcagcagtcaaaaggagtgattgggcctcattggtacaagtgtttttaacaaacagcaacagtacagagcattttgatgcatgtaagtggacaaaatcagaaccacattcctgggaattgatctttccaatagaggtatgtggtcctaataatggttttgaaatgtggagttctgagtggg

SEQ ID NO: 38881 - DNA, 199 bp, Glycine max
  Clone ID: LIB3138-104-Q1-N1-F4
ttcaggaaaaagttgttttgaaattttcacatgaggaattttttacagctgggtcaactcaggtgcgtcctgcaacaactctgttggctgatgggtgtccatattcgtatgcaatggggcatgatagttcagtgtctccaataccaggtgattctgtcattggtgtcaagttgactaccataaacaatatgtgtgcata

SEQ ID NO: 38882 - DNA, 57 bp, Glycine max
  Clone ID: LIB3138-104-Q1-N1-G1
tcgggccgaggaccaccaccaccaccagttaggtcaaagccggaccatgcagcggtt

SEQ ID NO: 38883 - DNA, 146 bp, Glycine max
  Clone ID: LIB3138-104-Q1-N1-G3
ggggaaatattgtcaaaaagcaggatgtcagcattgattttgatgcatgtccaattccaaatgattgtggttcattggttgttgccaaggttggaaatcacaaacaaattgttggtttccatgttgctggaaccaaaggaagactg

SEQ ID NO: 38884 - DNA, 216 bp, Glycine max
  unsure at all n locations
  Clone ID: LIB3138-104-Q1-N1-G5
ggccatactccactcctagtagaagaaaagaaactacatatgtctgtcaactttttagtgcttaatagtagaaattttttgttatgcaactgagggcttcaaatcatggttgttggacacatggtgtgagttctgcttgcttcatatgtacttatttacataatattaatttatttatatgatgcttaattatatgtacttatgataattagtnaa

SEQ ID NO: 38885 - DNA, 435 bp, Glycine max
  Clone ID: LIB3138-104-Q1-N1-H2
agttggttaccaatttttgtgaattgtctttatcctgtaagtcaattaccttcagaagctgtcgttgtaaatgttacatgtggtagtggacgtggtggtttacccaccactgcttggattagttctgcagttaacaatcgctcctcagatatcaacaaaaggattcgcacagcacttgggaaaggtaagaaaattgtttttcttactagagttgatccttttccagtagctttactggctgttctttttggcgttaagaatgaaattctgagttctaacgccactaatcctatgctgacgcgacttcttgagaactgtaagagtctcaaatatctggttgatgagtgtccttttgcatttgtgaactagtatgtagtattttattcacttaaataaagcgcattactatgtgcaatgagtgtgtttaaatttaaa

SEQ ID NO: 38886 - DNA, 87 bp, Glycine max
  Clone ID: LIB3138-104-Q1-N1-H7
aaaaaaaaaaaaaaaaaaaaaaaaaaaaaaaaaaaaaaaaaaaaaaaaaaaaaaaaaaaaaaaaaaaaaaaaaaaaaaaaaaaaagg

SEQ ID NO: 38887 - DNA, 337 bp, Glycine max
  Clone ID: LIB3138-105-Q1-N1-A2
atggttctaaagaggaagaaggattatgatgaggcatctgaaggcaatgcttggaggcttcttgcagaggtgtccctctctcaagagaggtttcaagaagtcaatgatcttatttttgaagccattggctgtggtgaattggaggatgtcaacgttgaaagtgtcaaagaagttgatgcagtcagcacaagcgaacaccctactgtggtggtagctggttcacaagaatgtgtgattctacactaacaaggctctaaaattatgaacaaattcagcaaatccgtagtgctttaagaataattgctgaattgtgtcaccgtttaagtcacatagtatt

SEQ ID NO: 38888 - DNA, 467 bp, Glycine max
  Clone ID: LIB3138-105-Q1-N1-A4
aggttcgcacatacggttggaggttggagatctcgtctttgaagttcctaagatgacttctccctacattaaatgtccagtctctttcttcatagcatttggaaatttgggctgatgataccatcaattttgaggcttttccccacaagctggtgcagtttggagagattcaggaaaaagttgtattgaaattttcacaagaggaatttcttacagcttggtcaactcaggtgcgtcctgcaacaactctgttggctgatgggtgtccatatttgtatgcaatggtgcatgatagttcagtgtctacaataccaggtgattttgtcattggtgtcaagttgacaaccataaacaatatgtgtgcatatgggctcaatcctggtatttaggttctcgtcttttgggcacccattctcagtccattttacagcaaactgtttggaatcaaatggcaacagtgagaacac

SEQ ID NO: 38889 - DNA, 55 bp, Glycine max
  Clone ID: LIB3138-105-Q1-N1-A7
aaaaaaaaaaaaaaaaaaaaaaaaaaaaaaaaaaaaaaaaaaaaaaaaaaaaaaa

SEQ ID NO: 38890 - DNA, 300 bp, Glycine max
  Clone ID: LIB3138-105-Q1-N1-C3
gataaatctgaaaattaacacactcttttttctctttttctatcatgtctagtgtttgttgatgttggatttggttgttctccttattactgatcaataattcaactattggacagtggtaataattagaataagctgaggagctgggattagtggttgttgttgctacttgctggcaagatgatggttttactatgggaatagcaacaccgtcacattcaagaacagtactagaactaaacaccattggttttctcttggatcttgtatcaattcttgcaattctatgtcccaagattt

SEQ ID NO: 38891 - DNA, 155 bp, Glycine max
  Clone ID: LIB3138-105-Q1-N1-E5
ggaaaaaaaaaaaaaaaaaaaaaaaaaaaaaaaaaaaaaaaaaaagggaaaaaaaaaaaggaaaaaaaaaaaaaaaaaaaaaaaaaaaaaaaaaaaaaaaaaaaaaaaaaaaaaaaaaaaaaaaggggggggccgcccctttggggccttgtccc

SEQ ID NO: 38892 - DNA, 311 bp, Glycine max
  Clone ID: LIB3138-105-Q1-N1-E6
atttgagtttccttattgacaatcccaaacagtctacagtttttgatattctcttgggaatctctcaagattttgaaattgctggtaatactcttatgccagctttttctgttccacaggctactgccagatcttctgaaaatgcggaatcctctgcatgatctggaatttgtgttttctttcgcttgttcgtttgtttaattcaataaaggaaattaggcatgaccctcttgttgagtatgctctgcctatttgaaaatttccacacctcttttaattgtcgtaatgatgtgtgaagtgtgtgttatttt

SEQ ID NO: 38893 - DNA, 410 bp, Glycine max
  Clone ID: LIB3138-105-Q1-N1-F11
catgctcgcgcggctccagagtcaaaagccttatccttccgtacaactgcaaacacaaagacatcatcatccatggctgcctccgtctccactgtcggagctgtcaacagagctcttttgaacctgaatggttctggagctggagcttcagctcccagttcagccttctttgggaccagcttgaagaaagttattgcctcaagggtccccaacagcaaggtttccggtggaagcttcaagattgttgctgtagaagagaagaaagagattgaagagacccaacagaccgacaaggacagatggaagggtcttgcctatgatatctcagacgaccaacaagacatcacaagaggaaagggtttggttgactccctttttcaagctccacaggatgctggaactcactatgc

SEQ ID NO: 38894 - DNA, 162 bp, Glycine max
  Clone ID: LIB3138-105-Q1-N1-F3
cgcattcctgaactagtatgtctaatttgattcacttaaatacagcgcattactatgggcactgagtgtgtatggatataactaaaacaaccacacgctataaacagtatcctgtcaagcgattaaatgaagaacaacaataggctgatcacaaaccatatg

SEQ ID NO: 38895 - DNA, 366 bp, Glycine max
  Clone ID: LIB3138-105-Q1-N1-F4
tcgagcaaaaacaaagaaaaaaaaaaacccttagccaacacaaccatcatggccacctctgcgattcagcaatcagcatgcactggtcaaactgctctgaagcagctcaatgagttcgtccgcaagaccggtggcgccggcaaaggtcgcactaacatgcgccgcaccgtcaagagtgctcctcagagcatttggtatggccctgaccgtcccaagtacttgggtccattctcggagcagattccatcatacctgaccggagaattccctggtgactacggatgggacactgctggattatcagctgacccggaaaccttcgccaggaaccgggagctggaggtgattcacagcagatgggcaatg

SEQ ID NO: 38896 - DNA, 296 bp, Glycine max
  Clone ID: LIB3138-105-Q1-N1-G1
cacagattgaagagttccattcgatgcagaggatgatgaatgctcctgattcaaatgataatattgatttactgttgagcattgatttgttgggtttacaaggagcaggtaaagcttttccaaacaaaattgtttttgatgataagcttgtgttggctaacacacaagaattctttgatggaaattttccagtggattcttggttaccaatttttgtgaattgtctttatcctgtaagtcaattaccttcagaagctgtcgttgtaaatgttacatgtggtagtggacgtggtggt

SEQ ID NO: 38897 - DNA, 378 bp, Glycine max
  Clone ID: LIB3138-105-Q1-N1-G5
gagactccaattccacattttgaataaataaggatgcaaaaatgttcatatatgaatcggaaggatttgttttcttattaggcctatcctgaagccaaaggaaatgagatcggaattcctcggggaattccaattccacattttcaagaaataaggaggcaaaaatgttcatatatgaatcggaattatttgttttcttattaggcctatcctgaagccaaaggaaatgagatcggaattcctcggggaattccaattccacattttcaagaaataaggaggcaaaaatgttcatatatgaattggaattatttgttttcttattaggcctatcctgaagccaaaggaaatgagatcggaattcctcgggggtaccga

SEQ ID NO: 38898 - DNA, 153 bp, Glycine max
  Clone ID: LIB3138-105-Q1-N1-G7
ctcgagccgattcgtttgaaaaaagaagatagtaatgaaatggggagaaaaggaaagccaagactctaatgtgtacttggtcggtactgacgacaaggggcgtctgtagtcagaactacctgctgtaaaatggaataatcgggtaatgtataa

SEQ ID NO: 38899 - DNA, 263 bp, Glycine max
  Clone ID: LIB3138-105-Q1-N1-H1
cgccaactacaacactgcctgtaaccgcttagttgatgtccagtcattggcctcaagtccatggctggttaccgaaccagcaagaccaacaatgacattacctccattgctagcaccggtggaagagtgcaatgcatgcatgcgtggtcaccagttggcaagaagaagtttgagactctttcctacctgccagaccttgatgatgcacaattggcaaaggaagtagaataccttcttaggaagggatggattccttgcttgga

SEQ ID NO: 38900 - DNA, 347 bp, Glycine max
  Clone ID: LIB3138-106-Q1-N1-B8
gtggtagtggacgtggtggtttacccaccactgcttggattagttctgcagttaacaatcgctcctcagatatcaacaaaaggattcgcacagcacttgggaaaggtaagaaaattgtttttcttactagagttgatccttttccagtagctttactggctgttctttttggcgttaagaatgaaattctgagttctaacgccactaatcctatgctgacgcgacttcttgagaactgtaagagtctcaaatatctggttgatgagtgtccttttgcatttgtgaactagtatgtagtattttattcacttaaataaagcgcattactatgtgcaatgagtgtgttt

SEQ ID NO: 38901 - DNA, 76 bp, Glycine max
  Clone ID: LIB3138-106-Q1-N1-C4
aaagcctaacccttccttacacctccaaacacaaaaacataatcatccatggttgcctccgtctccactgtcggac

SEQ ID NO: 38902 - DNA, 195 bp, Glycine max
  Clone ID: LIB3138-106-Q1-N1-F10
gttgcctatcatgaggctggtcatgctttagagggggctcaaatgccacaatatgaccctggacccaagaggtgaattattccttggggccgagcgggaggtctgacatgctttggtcccaacgaagagaggctcaagtatggattgtacaggccaagccaccatgcaaatcatacggcagatgccctcggtgga

SEQ ID NO: 38903 - DNA, 473 bp, Glycine max
  Clone ID: LIB3138-106-Q1-N1-F2
ctgggacacaactttttcttttaaccaaacgtgctgccacacctgcggttcctgtgggtggatgctacaggcttataaacatccctatgagcaactgcctcaacagtggcatcaacaaaatatttgtgctgacaaagttcaactctgcatccctcaaccgtcacattgcccgcacctattttggaaatggcatcaactttggggatgggattgtggaggttctggcggctactcaaacaccaggagaggctggaaagaattggttccaaggaactgcagatgctgtgaggcaattcacttgggtatttgaggatgccaagaatacaaatgttgagaatgtattgatcttggctggagatcatctatatcgtatggattacatggaccttgtgcagagtcacgttgatagaaatgctgatattacagtttcatgtgctgctgtgggtgacagccgtgcatcagattatggattg

SEQ ID NO: 38904 - DNA, 431 bp, Glycine max
  Clone ID: LIB3138-106-Q1-N1-F3
gagatgattgaagacaacatgtatctgcatggtcatatcatatggctgtggagaaggctgcttcttttcccatcttaccaactacactgggttggagaggctacatatacactattaactctcacactacaagtgcccttcagagagcttttagagaaaggatccagaagtggctgttttcaaattactggataggcaggagaccttattttgttactggaaaggcagcatctctctcctttttttttttcctcttctcctttcaatcctaatattctttccctctatttctgtatcttcttctgaaagagaacgtgcaatcaatgtttcaaattgtgtttggcttgcaagtgaagaagaaaatgtgattgtagctctcctacaacaagatactaaaaggatgttcaatatctgccactaggattcagatt

SEQ ID NO: 38905 - DNA, 248 bp, Glycine max
  Clone ID: LIB3138-106-Q1-N1-F5
tcgggtatctatcatgaggctggtcatgctctgagggggctaaatgccacaatatgaccctggacccaagatgtgaattattccttggggccgagcgggaggtctcacatgctttgctcccaacgaagagaggctcaagtatggattgtacagaccaagctaccatgcaaatcatacgggtgatgccctcggcggaagggttgtcgaatagggtataaatggccaggaaaatggcacgcaccggatca

SEQ ID NO: 38906 - DNA, 462 bp, Glycine max
  unsure at all n locations
  Clone ID: LIB3138-106-Q1-N1-G1
tcgagccggcctcgagccggcttcgagatatttttgacccaaggaacggttctttcgaaccttctttaatttaagcaattccaattgttaggaatgaggaattcttagtcgtacccagtacaagattaatgggggctacaacntnncaaatcnnataagnntgagggattggaaccctaggacangnntatcttacnncaaatacctacncaccnnncaaaattctnnatgttagtgccgtacccatctccnnnatatgaattgtttaattttaacctgtacccaaaataataaaaagaaagggtaccaattctaagttcttaagtttgtttttaaacaaatagtgctgaaagtgcattatttgcaaggtagccctaaagaatgtcaagcatatcccctctgttattaatttggcccattntgtttcacttnggaaataganaattcattctttcgattgtt

SEQ ID NO: 38907 - DNA, 457 bp, Glycine max
  Clone ID: LIB3138-106-Q1-N1-G3
ggaaagaaaagacgaacggagactctcctctttgttcaaagcaatgcagacgctacttctgccggcaacatgcgccggcagcttcacggcggttccgctctcagcctctgccgtcgccgcccctcgtctcccgcaaccatttctccgcccgaattccttgccctcattccctctcaatttgactctttcttcttcctcatttagtaactctatcgctcgtcaaccatggacgaagcttcccttcaccgcaagcgcttcttcgcaagtatctccggctttcactccctccaacgacgaatcagaaaaggccaaactcgagctggtggcgaagaggttggagaagacggcaaggtacttccagcgtttgggtaacttaaggttttggggccaactagtgtgcaccgtcgtggctgccgtcatactctcattctccgtcatcgtcaccgggaaagtgaca

SEQ ID NO: 38908 - DNA, 156 bp, Glycine max
  Clone ID: LIB3138-106-Q1-N1-H1
ggaaaataattctagaatccacctacagttttttaattcaaaaataagggtgggaactctaacaaattacataagtaaactggatatcatatcttaaagttccaacacttatgtaattggttgggtgacctatggtgaaaaatttctctattattt

SEQ ID NO: 38909 - DNA, 330 bp, Glycine max
  Clone ID: LIB3138-106-Q1-N1-H7
gcaaatcaaacttcatggcatttgagtttccttattgacaatcccaaacagtctacagtttttgatattctcttgggaatctctcaagattttgaaattgctggtaatactcttatgccagctttttctgttccacaggctactgccagatcttctgaaaatgcggaatcctctgcatgatctggaatttgtgttttctttcgcttgttcgtttgtttaattcaataaaggaaattaggcatgaccctcttgttgagtatgctctgcctatttgaaaatttccacacctcttttaattgtcgtaatgatgtgtgaagtgtgtgttatttt

SEQ ID NO: 38910 - DNA, 419 bp, Glycine max
  unsure at all n locations
  Clone ID: LIB3138-119-Q1-N1-B11
tattggcaaattttttgacagagggcaattttagagcaagtgttgatttgcagcgcactcatcgtattagaggaatgattaaaatggtggccacagttggtattcctgagaatacaggtatatcattggcctgtgctatgaatagttcttttagggggcgcgccagttctgatatttacaccatctgctctcaagactgtgaattgtggaatcctgcttgcacaaaagcaatgactatgtcatttaatccaaacccgtgttctgatgcatggagtttggaatttctgaagcgtactggatttcattgcgatatcatttgtgtcactggatggactgccaccccaatgcangatgttcaggttacaattgattggtttatttcctctcaagaatgtgttcccaggaacctatgtgtttta

SEQ ID NO: 38911 - DNA, 311 bp, Glycine max
  unsure at all n locations
  Clone ID: LIB3138-119-Q1-N1-C3
gttaacaatcgctcttcaaatatcaacaaaaggattcgcacagcccttgggaaaggtaagaaaattgtttttcttactagagttgatccttttccagtagctttactggctgttctttttggcgttaagaatgaaattctgagttctaacgccactaatcctatgctgacgcgacttcttgagaactgtaagagtctcaaatatctggttgatgagtgtccttttgcatttgtgaactagtatgtagtattttattcacttaaataaagcgcattactatgtgcaatgagtgtgtttaaattttannnnaa

SEQ ID NO: 38912 - DNA, 393 bp, Glycine max
  Clone ID: LIB3138-119-Q1-N1-C4
cgaaaaaaaaaaaatttttaaatttttaaaaaaaaaaaaaaaaggtggaactgtgaatttttaaaattttaaatccccaattttttatttttccttttcctccttttctttctttatctttcttcttcctttcttatttattctctccattttctcccccccccccttttcccccctcccccccctattttatttcctccccctcccctcatcccatcccctttttccctttttaaacccttttttacccttccctaatttctacccttcctttttcccctttaaaatattttctcctttccaattcccccccccattcttccccttacccttaaaatttaaaccccctcttccccttaatgtgggccccccccccctttatatttttttccc

SEQ ID NO: 38913 - DNA, 297 bp, Glycine max
  Clone ID: LIB3138-119-Q1-N1-C7
cattgccccctcctaaaccccggaatccggttggggtccacattttacaacacacacaccccacacgctttaagcactttttttttaggggaaaccaaattgaaggccccatgggaacctcttccacacttaacaactttgttcggcaccgtggcggccaaattcccttccggcggggccttttcggtggttgcaaaatttaacttaaccaatttcggctttaacggctgggtgaaatcccccgcgcttaaataagtttcggccgcgggaaaacccgcgaccgtgttggccttaact

SEQ ID NO: 38914 - DNA, 389 bp, Glycine max
  unsure at all n locations
  Clone ID: LIB3138-119-Q1-N1-C9
ggagttctgagtgggcaaatcaaacttcatggcatttgagttgccttattgacaatcccaaacagtctacagtttttgatattctcttgggaatctctcaagattttgaaattgctggtaatactcttatgccagctttttctgttccacaggctactgccagatcttctgaaaatgcggaatcctctgcatgatctggaatttgtgttttctttcgcttgttcgtttgtttaattcaataaaggaaattaggcatgaccctcttgttgagtatgctctgcctatttaaaaatttccacacctcttttaattgtcgtaatgatgtgtgaagtgtgtgttattttnaaaaaaaaaaatataaattatatttataatacttttatttaaat

SEQ ID NO: 38915 - DNA, 256 bp, Glycine max
  Clone ID: LIB3138-119-Q1-N1-D2
gcgtctactcccttacgtcaaaggcaacgtcggtttcgttttgaccaacgacgacctcaagaccatccgtgacatgatcgtctccaaccgagtcgccgctcccgctcgtgctggtgccatcgccttgaacgatgtgtccgtccctgctggtaacactggtatggagcccggaaagacctctttcttccaggctttgggtatccccaccaaaattgcccgtggtaccattgaaatcaccgctgaggtcaagctgatc

SEQ ID NO: 38916 - DNA, 266 bp, Glycine max
  Clone ID: LIB3138-119-Q1-N1-E12
cgaaaaaaaaaaaaaaaaaaaaaaaaaaaaaaaaaaaaaaaaagggaaaaaaaaaaaaaaaaaaaaaaaaaaaaaaaaaaaaaaaaaaaaaaaaaaaaaaaaaaaaaaaaaaaaaaaaaaaaaaaaaaaaaaaaaaaaaaaaaaaaaaaaaaaaaaaaaaaaaaaaaaaaacaaaatggcggaaaaaaaaaaaaaagggggggggggtgccataaatgaaaccacattcaccccgaaaaaaaataccaccaacaaccgggggggcc

SEQ ID NO: 38917 - DNA, 477 bp, Glycine max
  Clone ID: LIB3138-119-Q1-N1-E5
agccgaatcggctcgagctaacacagcactagcggttactgcctgttcaagctgcgcatttgggtgtttctctctaagtgccctcttgccaggctctgccactctttattactgtattttcattcttctgggggcgatgtgcggtgagcgttgctctacgcaagatctaccaggccaagggtgaccgcggcctctactccggtcttgaggccgaagtccttaaaggcttcctcaatcacagcttgacgatggagatgaaggatcgggtgcacgttgcggacatccagctatactatgctttgctgaaggtcacgaacaaatggacggttgagcttgaaatggtacatgccgaagcgactcactgtgtttaccctgcgaaggacaaggtacaggcttctgcggttcatgctttcgaggaggttaaagaacacgcttagagtgtttgcatttttgtagtggacagcggctaacaggttg

SEQ ID NO: 38918 - DNA, 479 bp, Glycine max
  unsure at all n locations
  Clone ID: LIB3138-119-Q1-N1-G1
cggttcggccagcctggaccttgacctatcgtgtctcctgggctttctctgttcaggatcaacaatggatattggatcacgaggctttgctatttccgttggctatacttgtgctcatattaagcacaccttgctcangtgcttttgngaagagtggaactaatgtgaaaacagctatttttctgtcccccaagtttgaacttggaccaggatcggtagccaataaatatgattatgacgctgattttccaagaggtcatatagcacttaagagtttcaatgctgaagtagttgatgaagcanggaaccctgtgcctcttcatgaaacttatctccaccactgggttgttgtaagatactatcaacctaaatatgtgacgacacacacaaactatgatggacataagatacttcacaactctgaccatatatttgtgaggaacagcggcttatgccagagagatactctaggacaatac

SEQ ID NO: 38919 - DNA, 354 bp, Glycine max
  Clone ID: LIB3138-119-Q1-N1-H1
ctcggcttattgcaagtggaatcaaaccatactccatggaatggactggtttggccaatagattacttgagtagggcaatgatattctgtgttgcgattatgctagttttgatggtttgattaccaagcaagttatgagcaagatggcagaaatgataaacagtctttgtggtggtgatgaaaaattgatgcgtgaaaagacgcacctgctgttggcttgttgttcaaagatggcaatttgtaagaaagatgtttggagagttgaatgtggaattccttctggatttccgctcacagttatttgcaatagcatttttaatgagatgctcattagatatagctatgaaaaattac

SEQ ID NO: 38920 - DNA, 368 bp, Glycine max
  Clone ID: LIB3138-119-Q1-N1-H10
gtaggatttgattttgaattcggagacaataacggggtatggaacttttgcatttggtgagaatatgcaaacaagcggagatcttaatctgattgggcagttaggaggcggcttctactctgttaatctggcggctgactatgtcgaagtcattagcaagaataatgatgataaacagtctgtatgggaatcaaaagatgatagatcattagtaattgcagaaaatacatggaatgaacctctacggcgtggcactgaaattagattacacctcaaggaagaggctagggaatgcttgcaagagtctaaactggaagaattggtgaagagatactctgaattcattaacttacctatctatatttggg

SEQ ID NO: 38921 - DNA, 224 bp, Glycine max
  Clone ID: LIB3138-119-Q1-N1-H3
gggtgggctctttaaacttgggccctccctcaatttctcttcttctctggcggctaccgtcggaattacaattcggggccaaggtttaaggcacaacccctttaacaacttaattttttttaaaccgacaccaaagccgggaaaccctgagaaagccgaggtcgggagaaaccaaggtattgattgggggatatttggttgacccctgagccttaaaaagggga

SEQ ID NO: 38922 - DNA, 259 bp, Glycine max
  Clone ID: LIB3138-120-Q1-N1-A2
gtaatactcttatgccagctttttccgttccacaggctactgccagatcttctgaaaatgcggaatcctctgcatgatctggaatttgtgttttctttcgcttgttcgtttgtttaattcaataaaggaaattaggcatgaccctcttgttgagtatgctctgcctatttgaaaatttccacacctcttttaattgtcgtaatgatgtgtgaagtgtgtgttttttttaaaaaaaaatatataattattataaataatt

SEQ ID NO: 38923 - DNA, 462 bp, Glycine max
  unsure at all n locations
  Clone ID: LIB3138-120-Q1-N1-A4
tcacattcagttacagacgtgaatatatgggaagggttcacggatccctcgctcgtgccggaaaggtcaagtctcaaacccccaaggttgagccccaggagaagaagaagacccccaagggccgcgccaagaagaggctcacatacacccgccgtttcgtaaacgtcaccatgaccggtggcaagcgcaagatgaaccccaaccctacctcataagccaaccatgagaggacgggcgaacgaaacgagcacgatgagctagagaacacggtcatgaattcggtttcctcaggatggctatgactctggatcagagggagtgggaatcacggacgtcgctacggcacgttcctcagcagcagcatgatcccacactttgggatgatgggggcatattcatggcgtacatgtacattctgctttttgcacagctgcatcacgaantctagcttcttgtgttccc

SEQ ID NO: 38924 - DNA, 275 bp, Glycine max
  Clone ID: LIB3138-120-Q1-N1-C4
cagtttttgatattctcttgggaatctctcaagattttgaaattgctggtaatactcttatgccagctttttctgttccacaggctactgccagatcttctgaaaatgcggaatcctctgcatgatctggaatttgtgttttctttcgcttgttcgtttgtttaattcaataaaggaaattaggcatgaccctcttgttgagtatgctctgcctatttgaaaatttccacacctcttttaattgtcgtaatgatgtgtgaagtgtgtgttatttt

SEQ ID NO: 38925 - DNA, 76 bp, Glycine max
  Clone ID: LIB3138-120-Q1-N1-C9
tgtgcaactttgcatatttataaagttagcgcagtgtgtttttcgggagagagaaactttcaaacactatgtctaa

SEQ ID NO: 38926 - DNA, 336 bp, Glycine max
  Clone ID: LIB3138-120-Q1-N1-E10
tagcaatttttgtgaattgtctttatcctgtaagtcaattaccttcagaagctgtcgttgtaaatgttacatgtggtagtggacgtggtggtttacccaccactgcttggattagttctgcagttaacaatcgctcctcagatatcaacaaaaggattcgcacagcacttgggaaaggtaagaaaattgtttttcttactagagttgatccttttccagtagctttactggctgtttcttttggcgttaagaatgaaattctgagttctaacgccactaatcctatgctgacgcgactttttgagaactgtaagagtctcaaatatctggttgatg

SEQ ID NO: 38927 - DNA, 137 bp, Glycine max
  Clone ID: LIB3138-121-Q1-N1-B5
ctcaagggtggctgtttttttcctcgggacatgattggatttccaccttcactcaagtttcaatggggaatctgatgtaggcttgggaggttcttctacttccaaggatgctttcaattaatcaattttcccacacc

SEQ ID NO: 38928 - DNA, 117 bp, Glycine max
  Clone ID: LIB3138-121-Q1-N1-D5
gccaaacctggggcaccttggcatttaaaaaggttgccaaatggggatttcttcagaagaacctttagccgaaggcttaaggtttggggggtggctccgggggccagggcaggtttt

SEQ ID NO: 38929 - DNA, 373 bp, Glycine max
  Clone ID: LIB3138-121-Q1-N1-E10
tttagagcaagtgttgatttgcagcgcactcatcgtattagaggaatgattaaaatggtggccacagttggtattcctgagaatacaggtatatcattggcctgtgctatgaatagttcttttagggggcgcgccagttctgatatttacaccatctgctctcaagactgtgaattgtggaatcctgcttgcacaaaagcaatgactatgtcatttaatccaaacccgtgttctgatgcatggagtttggaatttctgaagcgtactggatttcattgcgatatcatttgtgtcactggatggactgccaccccaatgcaggatgttcaggttacaattgattggtttatttcctctcaggaatgtgttccca

SEQ ID NO: 38930 - DNA, 134 bp, Glycine max
  Clone ID: LIB3138-121-Q1-N1-F1
aaaaaaaaaaataaaaaaaaaaaaaaaaaaaaaaaaaaaaaaaaaaaaaaaaaaaaaaaaaaaaaaaaaaaaaaaaaaaaaaaaaaaaaaaaaaaaaaaaaaaaaaaaaaaaaaaaaagggggcggcccccttt

SEQ ID NO: 38931 - DNA, 126 bp, Glycine max
  Clone ID: LIB3138-121-Q1-N1-F2
cggctcgagcttaaatcaaaattaactaatttatcagtgtgggtactttgcatatatagccaaatactattctaatttggtcttttcaaatatgaacaaagtgttttctaattgactctttaaatt

SEQ ID NO: 38932 - DNA, 403 bp, Glycine max
  unsure at all n locations
  Clone ID: LIB3138-121-Q1-N1-F3
ggtgctctggtaataaatgttgtggcagcaataacttctggtgatgttcctttaaatgcagtgcagcttttgggggttaaccttatcatggatccactgggggcgctggcactggctactgaaccaccaacagaccgcctaatgcacagatcaccagttggccgaagagaacctcttataacaaatatcatgtggagaaacttgatcgtacaggctgcctatcaaatcgcagttcttctcgtccttaacttttggggtgaaagtattctaccaaaacaaaataccagagctgatgcctttcaagtgaagaatactttaatattcaacgcgttcgtcctgtgccaaatattcaatgaattcaatgctcggnaacccgatgaaatgaatgttttccgtggagtga

SEQ ID NO: 38933 - DNA, 331 bp, Glycine max; identical to SEQ ID NO: 33339
  Clone ID: LIB3138-121-Q1-N1-F8

SEQ ID NO: 38934 - DNA, 335 bp, Glycine max
  unsure at all n locations
  Clone ID: LIB3138-121-Q1-N1-G12
aaaagatgttggttctttggatgattctggctcaagatggagttggattagtgaacctatcggtatttcaaaggctgattcattctcaacatttggattgctggagcaaataaatacaactgctgatagaagtgattacttgtggtactcattaagcattgatcttgatgctggtgctcaaactttccttcatattaaatcccttgggcatgctcttcatgctttcataaatgggaagcttgcagggagtggaaccggcaaccatgagaaagctaatgtcgaagtagacatccncatcacactagtttctgggaagaacacaatgatctnctgag

SEQ ID NO: 38935 - DNA, 298 bp, Glycine max
  Clone ID: LIB3138-121-Q1-N1-G9
caagggtgagaaaaagaagaagaaggacaagaagaagaaggagcatggacatgaccatcatggtcatagcagcagcagtgacagtgattagatcttatatgttaagcaggtgtacggtacgatggtagtgaggagccagaatccctcttcctgctttatgatataatacaaataaaatagcgattccggaaatcatgtctgtagctgctctttttatttatgtgataaatgtaaaacgctttggtttggcttggccgttgtgcattaggttgaaaaaataaatgttataattactcag

SEQ ID NO: 38936 - DNA, 409 bp, Glycine max
  Clone ID: LIB3138-122-Q1-N1-A5
gttctaatgccacgtgctgcaaagttcaacatattggaaatgatgggagggagaggactatgcaacggggaaaagggtcttcagcaagagctgaaaaggcaagttgttgttccacaatcatcaatatcatcacaagaagaagaagcaccaagtggtgaaaaagaggagcaagaaggtgaaggtggtgatgatgatgaaggaagtgttgaggtaccagaagatggttttgagaaggaaatgatggggctaacagggggttttcctgggggtgagaaagggttgaaaaagtttattgagaaaaaacaaccctcctacaaaagcaactaataatgttgtctccctctcattttgaaagaggccattgtgaagaatattcaaaggaaattaatgttcatttttatttgatgtt

SEQ ID NO: 38937 - DNA, 134 bp, Glycine max
  Clone ID: LIB3138-122-Q1-N1-C1
caccaagtaaggaacacaacttacttggtgcattttcaactgtgtagaatttaatatgatgtaatttgcttgtttgtacatccatattttgttatgcccttggttctatgaaatcttgcattaacttctttttt

SEQ ID NO: 38938 - DNA, 363 bp, Glycine max
  Clone ID: LIB3138-122-Q1-N1-C6
tggcatttgagtttccttattgacaatcccaaacagtctacagtttttgatattctcttgggaatctctcaagattttgaaattgctggtaatactcttatgccagctttttctgttccacaggctactgccagatcttctgaaaatgcggaatcctctgcatgatctggaatttgtgttttctttcgcttgttcgtttgtttaattcaataaaggaaattaggcatgaccctcttgttgagtatgctctgcctatttgaaaatttccacacctcttttaattgtcgtaatgatgtgtgaagtgtgtgttattttaaaaaaaaaaaaaaaaaaaaaaagggcggccgcttcgcgatctagaaa

SEQ ID NO: 38939 - DNA, 81 bp, Glycine max; identical to SEQ ID NO: 37882
  Clone ID: LIB3138-122-Q1-N1-G8

SEQ ID NO: 38940 - DNA, 368 bp, Glycine max
  Clone ID: LIB3138-123-Q1-N1-A7
aaacgagaggaaatacagcattgcacattgccacagagaagggccgtactcagaatgtacactgcttgttatcaatggagggtatcaacatcaatgctacaaacaaggctggagagactccttttgatgttgcagaaaaatctcgaagtccagaacttgtctccatatagagggaggctttggatgccgattctactgatcaaaggaaaccttcaaatgcataaaagcaacttaagcagactgtcagtgtctttctatatcatacacaattcccactcctagagacacgtcttactgttatgacgctccattatattgtaaagaagctgaataagctccacattagtggcctgaacaatgcgataacc

SEQ ID NO: 38941 - DNA, 345 bp, Glycine max
  Clone ID: LIB3138-123-Q1-N1-B5
ggggggttcaagttccaagtcattccttttttggagccagtttgaaaaaggtaattgcttcaggggtccccaccacaaaaatttcttctggaagcttcaaaattgttgctgtaaaagagaaaaaagagattgaggagacccaccaaaccgacaaggacagatggaagggtcttgcctatgatatctcagacgaccaacaggacatcacaagaggaaagggtttggttgactcccttttccaagcttcacaggatgctggaactcactatgctgtcatgagctcctacgagtaccttagcactggacttcgccagtacttggacaacaacatggatggattttaca

SEQ ID NO: 38942 - DNA, 318 bp, Glycine max
  Clone ID: LIB3138-123-Q1-N1-B6
ggcttggattagttctgcagttaacaatcgctcctcagatatcaacaaaaggattcgcacagcacttgggaaaggtaagaaaattgtttttcttactagagttgatccttttccagtagctttactggctgttctttttggcgttaagaatgaaattctgagttctaacgccactaatcctatgctgacgcgacttcttgagaactgtaagagtctcaaatatctggttgatgagtgtccttttgcatttgtgaactagtatgtagtattttattcacttaaataaagcgcattactatgtgcaatgagtgtgtttaa

SEQ ID NO: 38943 - DNA, 377 bp, Glycine max
  Clone ID: LIB3138-123-Q1-N1-C1
attcgggtgttttcagtggtagcttcaagattaaagaaatatgcgatgcaacaagctttcaagaccatgatgggccagatgaattcacaaaatagaccaatttggcaatgctgccttttctccgggatctacttttccctttccaatgcctacagaagcagggcccactgcacctgctagttctgcaactactcaatctcgagcaccttcagcatctagtgcatctcaatccactatcacagtagatatacctgcagcaaaagtagaagttgctccaactactaatgttaaagatgaagtcgaagtaaagaatgaacccaaaaaaattgcttttgtagatgtttctccagaagaaactgtgcaggagagtccttttg

SEQ ID NO: 38944 - DNA, 339 bp, Glycine max
  unsure at all n locations
  Clone ID: LIB3138-123-Q1-N1-C11
ggtggaaattgatcttcccaatagaggtttgtggtcctaataatggtttcgaaatgtggagttctgagtgggcaaatcaaacttcatggcatttgagtttccttattgacaatcccaaacagtctacagtttttgatattctcttgggaatctctcaagattttgaaattgctggtaatactcttatgccagctttttctgttccacaggctactgccagatcttctgaaaatgcggaatcctctgcatgatctggaattngtgttttctttcgcttgttcgtttgtttaattcaataaaggaaaattaggcattgacccctcttgttgagtattgctc

SEQ ID NO: 38945 - DNA, 140 bp, Glycine max
  Clone ID: LIB3138-123-Q1-N1-C4
cggaattgggttcggggggagaccaaaaggaccaaatttatggtctgggaaccccatgttggtattgcgctgtggaaaccctcctttttcgagggaaaacccgaggcttgcctctgccttttgggaacatttttatccct

SEQ ID NO: 38946 - DNA, 358 bp, Glycine max
  Clone ID: LIB3138-123-Q1-N1-D11
atggctctgttattcaaggatccgtcgaagatttcagcgtatcgagatagaaggttccccggaacgcaagaggagtttgagcacgcgcttgtgacctcaaccaccgtttacgtggggaacatgtctttttacacgacggaggagcaagtttacgagctcttctcgcgtactggggaaataaaaaagatcatcatgggcttggacaagaacaccaaaacgccctgcggcttctgtttcgttttatattattctcgtgaagatactgaggatgcttgcaaatacataagtgggacgatacttgatgatcgtcccattcgagttgattttgattggggatttcaggaaagaagacattggg

SEQ ID NO: 38947 - DNA, 330 bp, Glycine max
  Clone ID: LIB3138-123-Q1-N1-D7
gtctggttatgcagcagtcaaaaggagtgattgggggtcattggtacaagtgtctttcatgaatgtggtcccacggactattgtgtttttaatgcctaaagctccttgtgtgttaatacggtggttgggaaaatggactttcccccagggcccttcccgaggggttaaaagatggcctttttttttaggggggggagctggtccaaggaatgcttttttaatgattatgccaaatgctgttctttcaatgtggagatattttgttggagatctcgtctttgaagtttctaagatgacttctccctacattaaatgtacaggctctttctt

SEQ ID NO: 38948 - DNA, 372 bp, Glycine max
  Clone ID: LIB3138-123-Q1-N1-G3
ggctcgtctttgaagtttctaagatgacttctccctacattaaatgtacagtctctttcttcatagcatttggaaatttggctgatgataccatcaattttgaggcttttccccacaagctggtgcagtttggagagattcaggaaaaagttgtattgaaattttcacaagaggaatttcttacagcttggtcaactcaggtgcgtcctgcaacaactctgttggctgatgggtgtccatatttgtatgcaatggtgcatgatagttcagtgtctacaataccaggtgattttgtcattggtgtcaagttgacaaccataaacaatatgtgtgcatatgggctcaatcctggtatttcaggttctcgtcttt

SEQ ID NO: 38949 - DNA, 156 bp, Glycine max
  Clone ID: LIB3138-123-Q1-N1-G7
aaaaaaaaaaaaaaaaaaaaaaaaaaaaaaaaaaaaaaaaaaaaaaaaaaaaaaaaaaaaaaaaaaaaaaaaaaaaaaaaaaaaaaaaaaaaaaaaaaaaaaaaaaaaaaaaaaaaaaaaaaaaaagggggggcccccacttaggggcctcttcac

SEQ ID NO: 38950 - DNA, 106 bp, Glycine max
  Clone ID: LIB3138-123-Q1-N1-G8
aaaaaaaaaaaaaaaaaaaaaaaaaaaaaaaggaaaaaaaaaaaaaaaaaaaaaaaaaaaaaaaaaaaaaaaaaaaaaaaaaaaaaaaaaaaaaaaaaaaaaaaaa

SEQ ID NO: 38951 - DNA, 324 bp, Glycine max
  Clone ID: LIB3138-123-Q1-N1-H1
gggtatgaatgaaagaaataaaatagattattggctggccaagtatggtgcctcatccaacgatgcgcccaagacttgacattcttgccgtactcatttttaccaggctcttttaggaactatatgatttgttgatgatgaaaaatgcttccttgatacttaaagctttgttctttgtgattttttttttgtctctgtaaaatgtgttttagggtggtatcttgcctattttgatgtgctcaaatgatatatattgatatgtgttgaaatgatgatgttccattattgttttgaatcaaaagcttcaagctttgaacttgccat

SEQ ID NO: 38952 - DNA, 290 bp, Glycine max
  Clone ID: LIB3138-123-Q1-N1-H11
ttgtggttatcgactagggtcagaacctagggctcatattcttctgttttgctcaatccttgcaatctcgcgttacgcatgcgatgcttctacgctcagttaattcaattggagctagccctgatctatcgaaaactcaaggcctctgaggtctgagggtttactgatctaaattttgataaatgaaggcagagacgatgactatgaatacgaatgccctggtgattatggatgtgcagatcgatggagatcccgatctaaggattgctgtagagctaccctatgatgat

SEQ ID NO: 38953 - DNA, 116 bp, Glycine max
  Clone ID: LIB3138-123-Q1-N1-H8
aaaaaaaaaaaaaaaaaaaaaaaaaaaaaaaaaaaaaaaaaaaaaaaaaaaaaaaaaaaaaaaaaaaaaaaaaaaaaaaaaaaaaaaaaaaaaaaaaaaaaaaaaaaaaaaaaagg

SEQ ID NO: 38954 - DNA, 366 bp, Glycine max
  Clone ID: LIB3138-124-Q1-N1-D12
actagttctagatctcgagcggccaccctctttttttttttttttattcaaccaaaaatcaaactaacaaaatgaacacaaacaaggcacgcacaagagggtccaagagttccaattatagctaaaagtattagctaatttaagcaatcatacaaacccaagttacacaaaagaagagaatacttctagcaagcattctgctattacaacattgacaagaaaggataagcatctttcttcaagaaccgccatactcagcaggaaatcaccagacaagaccaaaaattttcaaatgtctcatgccttgctggcaatgttgttagaaagccaatccaaaccctcatagagaccctctccagaagttgc

SEQ ID NO: 38955 - DNA, 364 bp, Glycine max
  Clone ID: LIB3138-124-Q1-N1-D6
cgaaaaaataaaaaaaaaaaaaaaaaaaaaaaaaaaaggggaaaaaaaaaaaaaaagggggaaaaaaaaaaaaaaaaaaaaaaaaaaaaaaaaaaataaaaaaaaaaaaaaaaaaaaaaggggggggccccccctttgtgggctcgtccccccgggatttttttcgggcccggtcctggggggggtcccatttttcctttttgggggccgttttagggctgggggtaatcagggtcttggctgtttcctgggggaaattgttttccgctcccatttccccccaccttccggcccgggggctttaggtgtaaaccctggggggcctattgggtggcctacctcactttatttgggtggcgctccc

SEQ ID NO: 38956 - DNA, 67 bp, Glycine max
  Clone ID: LIB3138-124-Q1-N1-G3
aaaaaaaaaaaaaaaaaaaaaaaaaaaaaaaaaaaaaaaaaaaaaaaaaaaaaaaaaaaaaaaaaaa

SEQ ID NO: 38957 - DNA, 262 bp, Glycine max
  unsure at all n locations
  Clone ID: LIB3138-124-Q1-N1-G6
ctttttggcgttaagaatgaaattctgagttctaacgccactaatcctatgctgacgcgacttcttgagaactgtaagagtctcaaatatctggttgatgagtgtccttttgcatttgtgaactagtatgtagtattttattcacttaaataaagcgcattactatgtgcaatgagtgggtttaattntnnnnnaaaaaaacaaaaaaaaaaatcaatataataaaattaaaaaaaataaaaaaataaaaagtcataataat

SEQ ID NO: 38958 - DNA, 253 bp, Glycine max
  Clone ID: LIB3138-124-Q1-N1-H10
tgcggaaattttcttgctctgtgggtctaaatatgtggggccttactttagtggttctaaattgaaaagctttctatattttgctttcaattccatggctgttggggttgtcataactggtgcaactttgccctttggtaaggttgcagattgtgattttctcaagagaaactttaagcagatgtctaatgttttgtgggtggctcctgaggacaaggcgagtttatggtcactacttgagtcaaagccatgt

SEQ ID NO: 38959 - DNA, 66 bp, Glycine max
  Clone ID: LIB3138-125-Q1-N1-A2
tatagaagagcatgacgacgcacgcacgcgtacgcatagctattaatctcgcgaaagattgcctat

SEQ ID NO: 38960 - DNA, 446 bp, Glycine max
  unsure at all n locations
  Clone ID: LIB3138-125-Q1-N1-A5
cctcattttttaaacgattcnncttttgagnnttgagttcagaataccccagaaannaccgaagtgaagggggagggggagagatgaccagtaccctgtctcncttctctttttctctgcccaaagttnnngcattcttcnnttttctttgtntgcccnnntctaaaanntccaagcctnnatcatcantnncagctaccaannatagannattcaacannaaaaccccacntnntcttaaatccacgcccattaganngctttggaccctnntgatcaaaanncacggttgtggcttatannagtgtaggccccttgttagtgtgnngctgttgggaattgggcattcccagtgttctaaatgaaacccaannatcgataatgcttgcttaagcgaagacaaccacgcagcnncctgtttcccatgccaatggatcntggctctc

SEQ ID NO: 38961 - DNA, 363 bp, Glycine max
  Clone ID: LIB3138-125-Q1-N1-C6
gcaaaaagctgatgtgcctaccatagcacagattgaagagttccattcgatgcagaggatgatgaatgctcctgattcaaatgataatattgatttactgttgagcattgatttgttgggtttacaaggagcaggtaaagcttttccaaacaaaattgtttttgatgataagcttgtgttggctaacacacaagaattctttgatggaaattttccagtggattcttggttaccaatttttgtgaattgtctttatcctgtaagtcaattaccttcagaagctgtcgttgtaaatgttacatgtggtagtggacgtggtgtttacccaccactgcttggattagttctgcagttaacaatcgc

SEQ ID NO: 38962 - DNA, 362 bp, Glycine max
  Clone ID: LIB3138-125-Q1-N1-D4
attcctaagtccatttaacagcaaactgtttggaatcaaatggcaacagtgagaacaccattgaattttgattctagcaagcagagctttttgtcagttttctattgaccttctcggtggaggaatcttagtggacaaaactggagattggatcacacttatacaaaattctccaattagtaacttattgagagttgctgcttggaagaaaggctgtttaatggtcaagattgtgatgtctgggaatgcagcagtcaaaaggagtgattgggcctcattggtacaagtgtttttaacaaacagcaacagtacagagcattttgatgcatgtaagtggacaaaatcagaaccacattcctggg

SEQ ID NO: 38963 - DNA, 329 bp, Glycine max
  Clone ID: LIB3138-125-Q1-N1-D5
ggaaaaaatttttaaaaaaaaaaaaaaaaaaaaaaaaaaaaggaaaaataaaaaaaaaaaaaaatataaaaaaaaaaaaaaaaaaaaaaatttaataaaaaaaaaaaaaaattaaaaaaaaaaaaaaaaaggggcggcccccccttattgaccccttccccccggaatttatttccggcccggtccctgagggcttcccacttttccttttatggggccgttttaaaccttggcgaaaacatggacataccttttccctggggaaaaatttaatccctataaaatcccacaaaaaaaacaacccggaactttaaagttaaaaccctggg

SEQ ID NO: 38964 - DNA, 376 bp, Glycine max
  Clone ID: LIB3138-125-Q1-N1-D6
ctcatggcgtctgttattcctcgatgccttcctcccccaattccaattgcacaccgacgaaaggcgcaggtggtgaaatcgtgtcaccaaaacgagagctctgcttcggctcacacagaccactcctcaaatccaaaggaactccgagtaacagtttccaggcgtaattgtctctcatgtttgtgttctactatagttttgattagtgattgcgccatgcctatttttttaccaaaggcatccgctgctgatggaaatggaatcatggaaaaacctgtgtgcagaaattgcttgggaagcggtgctgtgctttgtgatatgtgtggtggcacaggaaaatggaaagctcttaaccggaagcgagctaaagatgttt

SEQ ID NO: 38965 - DNA, 100 bp, Glycine max
  Clone ID: LIB3138-125-Q1-N1-D7
caaatatctggttgatgagtgtccttttgcatttgtgaactagtatgtagtattttattcacttaaataaagcgcattactatgtgcaatgagtgtgttt

SEQ ID NO: 38966 - DNA, 123 bp, Glycine max
  Clone ID: LIB3138-125-Q1-N1-E12
ctcgagccgttaattcaataaaggaaattaggcatgaccctcttgttgagtatgctctgcctatttgaaaatttccacacctcttttaattgtcgtaatgatgtgtgaagtgtgtgttatttt

SEQ ID NO: 38967 - DNA, 372 bp, Glycine max
  Clone ID: LIB3138-125-Q1-N1-E6
gacaaaatcagaaccacattcctgggaattgatcttcccaatagaggtatgtggtcctaataatggttttgaaatgtggagttctgagtgggcaaatcaaacttcatggcatttgagtttccttattgacaatcccaaacagtctacagtttttgatattctcttgggaatctctcaagattttgaaattgctggtaatactcttatgccagctttttctgttccacaggctactgccagatcttctgaaaatgcggaatcctctgcatgatctggaatttgtgttttctttcgcttgttcgtttgtttaattcaataaaggaaattaggcatgaccctcttgttgagtatgctctgcctatttgaaaattt

SEQ ID NO: 38968 - DNA, 93 bp, Glycine max
  Clone ID: LIB3138-125-Q1-N1-F9
aaaaaaaaaaaaaaaaaaaaaaaaaaaaaaaaaaagggaaaaaaagaaagaaagaagaaaaaaaaaaaaaaaaaaacagaaaataaattaaaa

SEQ ID NO: 38969 - DNA, 295 bp, Glycine max
  Clone ID: LIB3138-125-Q1-N1-H12
aacttaattagtgttcatgaatatgtcaagccttactttagtggttctaaattgaaaagctttctagctagtcataacatcaccattactgatggtattgacaaaactagtgcaactttgcaatttagaaagttagcagattgtgattttctcaagagaaactttaagcagatgtctaatgttttgtgggtggctcctgaggacaaggcgagtttatggtcacaacttcattatgtttcgtgtaataatctggaaatgcaagaagcttatcttgtcaatctcgtaaatgtgttac

SEQ ID NO: 38970 - DNA, 178 bp, Glycine max
  Clone ID: LIB3138-125-Q1-N1-H7
gtacattttttccaccttaacggcaatagagcctccgtggcacataaacctggcgctgtcgcatacatcttcaacttccaccatgatgtcatcttgttcacctctgggttagacatcatttctcaagaggttatcctctctagaaccccccctcgttgtgctttattcaccactgtgc

SEQ ID NO: 38971 - DNA, 280 bp, Glycine max
  unsure at all n locations
  Clone ID: LIB3138-126-A8-F1A
tacgctagtggattcaaagaaataatctggtgagcttgaaatgaattcgacacagatttcctatttgtaactgaagtagggcctgaaacattatgcctaataagcgcaagtggtacatttgatttctcatggtctccatcatatcttgtaccctccagacaatcagaaaaggggagcatcttgtgtctattagagtgagcgattcgcntcatagaagcaacaataaatcttcgtctatgcactgcaatagcttcaactccccggccactagcattaatag

SEQ ID NO: 38972 - DNA, 672 bp, Glycine max
  Clone ID: LIB3138-126-A8-F2A
taggtagtggattcaaagaaataatctggtgagcttgaaatgaattcgacacagatttcctatttgtaactgaagtagggcctgaaacattatgcttaataagagcaagtggtagatttgattttccatggtctccatcatatcttgtaccctcagacaatccagaaaaggggagaatcttgtgtctattagagtgagggattggcctcatagaagcaacaataaatttctgtctatgactgccaatagcttcaactccccggccactagcattaatagactttgaactagagcatggttcagatctttttcgactgggtggtggaggcttcagccaacttggaataccagagaaaacatgatccttaggacagttttctttctcctgcctagtacaaaagaaaagaaggcgctcggcatcatctttactaaaagatgcaactggcaatgccttgatactaagcaattccaacataacaaggctgcggtatgccaaattgggtgcaagctgtctcagaacctgtgcacaaatatcaaaaaccattaatcaaaagataaggtttcattattcaaaaagaaaaaaggaactaacaagggtcatgtcattacagcatgaaaatgctaaaagatcaagccaatacaatgtggaggctattttcatatgttccgtca

SEQ ID NO: 38973 - DNA, 369 bp, Glycine max
  Clone ID: LIB3138-126-A8-R2A
atcagcatcttattctgtttattaatttcttttgctggtgtatattttatagggcaacaccaccaccttttcaggcaggaacattttcacgtggtgtagtgactatgcgttgtgatatatcaacatgtagttctgctcatatatcacttttggtgtctggtagtgcaaacacttgttttaatgatcaggcatgggtgaatttgctgccagtgtttgacattttacatatatgatcttttaaactttttacttacctatcacttattttgggtatatcctcagcttttggagaatcatattaaaaaagagctgattgagaagagtcaacttgtccaggcattttctaatcattaacaaagtaaagcacct

SEQ ID NO: 38974 - DNA, 374 bp, Glycine max
  Clone ID: LIB3138-126-Q1-N1-C4
ggcagcacaccacaccatttcactaagctaaaatcacttcatgatggcttcctcgtgtgcttcctctgccattgcagctgttgccatctccacaccaagttcccagaagaatggatcactcttgggaagcacaaaagcttcttttcttagtgggaggaaactgaaggtgaacaactttacagcaccagttggagcacgatccagcactacagtttgcgcagttgctgagcctgataggcctctgtggttcccaggcagcacccctcctccatggctagatggcagtttgccaggagattttggctttgatcctctaggtcttgcatctgatcctgagagcctgagatggaatgtccaagcagagcttgtgcact

SEQ ID NO: 38975 - DNA, 325 bp, Glycine max
  Clone ID: LIB3138-126-Q1-N1-C5
gtttattggtcaaaattgtgatgtctgggaatgcagcagtcaaaaggagtgattgggcctcattggtacaagtgtttttaacaaacagcaacagtacagagcattttgatgcatgtaagtggacaaaatcagaaccacattcctgggaattgatcttcccaatagaggtatgtggtcctaataatggttttgaaatgtggagttctgagtgggcaaatcaaacttcatggcatttgagtttccttattgacaatcccaaacagtctacagtttttgatattctcttgggaatctctcaagattttgaaattgctggtaatactct

SEQ ID NO: 38976 - DNA, 372 bp, Glycine max
  Clone ID: LIB3138-126-Q1-N1-D11
caggtgcgtcctgcaacaactctgttggctgatgggtgtccatatttgtatgcaatggtgcatgatagttcagtgtctacaataccaggtgattttgtcattggtgtcaagttgacaaccataaacaatatgtgtgcatatgggctcaatcctggtatttcaggttctcgtcttttgggcaccattcctcagtccatttcacagcaaactgtttggaatcaaatggcaacagtgagaacaccattgaattttgattctagcaagcagagcttttgtcagttttctattgaccttctcggtggaggaatcttagtggacaaaactggagattggatcacacttatacaaaattctccaattagtaacttattg

SEQ ID NO: 38977 - DNA, 118 bp, Glycine max
  Clone ID: LIB3138-126-Q1-N1-D8
aaaaatttaaaaaaaaaaaaaaaaaaaaaaagaaaaaaaaaataaaaaaaaaaaaaaaaaaaaaaaaaaaaaaaaaaaaaaaaaaaaaaaaaaaaaaaaaaaaaaaaaggaagagggg

SEQ ID NO: 38978 - DNA, 374 bp, Glycine max
  Clone ID: LIB3138-126-Q1-N1-G3
cttcgggggaacccaaccaggactttatggaggtggtggagtttttaaagaagcctgagaggtttactgctgttggggctcgcattcctaaaggagttcttcttgttggtcctccaggaactgggaagaccttgttagccaaggctattgctggtgaagctggtgttccatttttctctatatcaggttctgagtttgttgagatgtttgttggtgttggtgcttctcgtgttcgtgatttgttcaagaaggcgaaagagaatgccccttgcattgtctttgttgatgaaattgatgctgttggaagacaaagagggactggaattggtggagggaatgatgaaagagagcagaccctcaaccaacttttgaca

SEQ ID NO: 38979 - DNA, 335 bp, Glycine max
  Clone ID: LIB3138-126-Q1-N1-G8
attctgttcagtttcacccactaaaccaccactactgctaagatctccttcaaaacacaaccaaaatcttaactttcttggaacctttttaattgtttgttccttaaaaaacaatttcctttacggctataactctaatattagagaactttctctttcattcatccttggtaatggcttgtgcattgcaagcaaccttagcagccaacacctatgccttttcttccaggagattctccttgaagcacccaaagaacagtaagagaaggttttctttgttcactgttagagctgattctgatgactctgactgcaatgaggaagagtgtgccccg

SEQ ID NO: 38980 - DNA, 164 bp, Glycine max
  Clone ID: LIB3138-126-Q1-N1-H2
aaaaaaaaaaaaaaaaaaaaaaaaaaaaaaaaaaaaaaaaaaaaaaaaaaaaaaaaaaaaaaaaaaaaaaaaaaaaaaaaaaaaaaaaaaaaaaaaaaaaaaaataaaaaaaaaaaaaaaaaaaaaaaaaaaaagggggggcccccccttaggggccttttccc

SEQ ID NO: 38981 - DNA, 368 bp, Glycine max
  Clone ID: LIB3138-127-Q1-N1-A2
aggtcgagcctgacagtgttacatgcggcatgcaaaggcggaaggcccattcgggtggttacatttccgaataccattgtgcagattgaaccagacatgaattcaaggtttcagcttttgagtaccactaccaatggtgattttgttcaagggaaagatctcgcaatggttaaagttaatgtagcatgtgctgctgttggcttgacatcaagttacactccaactccattgttggaatctggtttgcaaaaagacagagggttaattgtggagtattttggaaggatgtcttacgttgctcataacgttaatcagccccaagagaaagatttgttggagggaaatttttcctttgatattaaatctcg

SEQ ID NO: 38982 - DNA, 343 bp, Glycine max
  Clone ID: LIB3138-127-Q1-N1-B1
actagttctagatcgcgagcgggcgcccttttttttgttgttttttttttgttttttttttttttttttttttatgtttttttttttttggaaccaaattttttattaatttatggcgtaaggggctgggcaaattggtttttctccttgaatttggtaaaaaaattattgatttttacagggaacaagtcagaggggtttttattgtacaaacataattctgggactggggggtttgattatgcaacatataattcgggttttccatcaaaggataaacccatgaacttttcaccatccacagtgtttttttctattaaaagtttatcaagctttggaagga

SEQ ID NO: 38983 - DNA, 235 bp, Glycine max
  Clone ID: LIB3138-127-Q1-N1-C5
ctgattgcccccaaatactacaccatggggacaaagtgaaccatgctaccctccacatatcacttatcagtccgtcccatcgctgattgtgtattactccttatatggacatgtaaacaccatggctagagaagtgcaccaaatggctgctgcaaaaacaactctcctagcatcactttgcttcatgagtggtgtgctgtggacttttaaaataaaaatcattcggtgactattc

SEQ ID NO: 38984 - DNA, 132 bp, Glycine max
  Clone ID: LIB3138-127-Q1-N1-D6
aaaaaaaaaaataaaaaaaaaaaaaaaaaaaaaaaaaaaaaggaaaaaaaaaaaaaagaaaaaaaaaaaaaaaaaaaaaaaaaaaaaaaaaaaaaaaaaaaaaaaaaaaaatagggggcggcctcgtcttgt

SEQ ID NO: 38985 - DNA, 311 bp, Glycine max
  Clone ID: LIB3138-127-Q1-N1-E2
cagcgtgtcttctgctactctttgtgtagccaaaccagcgtttcaggcaaatgggaaaggcttttcacaattataaggcctcacaagctgatcaagctaccttccttcttctacaaaatctgtagaggattgccattcagtcattgcctcccagacccatgcagttggaagcagtgcaagatacaagaagggtgtgacagatgccaaactgacggccgccatcaacaggtttgcatggattcgtaagaacttcttgaggtgctggcacggtcgcaaaaactcccctcttgatgtcattgccatcaacgaca

SEQ ID NO: 38986 - DNA, 320 bp, Glycine max
  unsure at all n locations
  Clone ID: LIB3138-127-Q1-N1-F1
ggaagtattcaacatctcgggagataagtatgtcacatttgatggattagcaagagcatgtgctaaggctggtgggttcccagagccagagatcattcactacaaccctaaagattttgattttgggaaaaagaaatcatttccattccgtgaccagcatttctttgcatcagttgagaaagcaaagagcgtgcttggattggaacctgaatttggacttgtagagggtctagcagactcgtacaacctggactttggtagaggaacatatncgaaagaggctgatttctcaacagatgacataattcttggcaagagtc

SEQ ID NO: 38987 - DNA, 299 bp, Glycine max
  Clone ID: LIB3138-127-Q1-N1-G4
aaaaaaaaaaaaaaaaaaaaaaaaaaaaaaaaaaaaaaaaggaaaaaaaaaaaaaaaaaaaaaaaaaaaaaaaaaaaaataaaaaaaaaaaaaaaaaaaaaaaaaaaaaaaaaaaaaaaaaaaaaaaaaaaaaaaaaaaaaaagggggggccccccccttaggggctttttccccccggaatttatttcgggcccggtccctggggggttcccattttcccttttagggggtcttttaaaacctgggcttatacaagggcaaaaatttttcccgggggaaaatttttttcccttaaaat

SEQ ID NO: 38988 - DNA, 308 bp, Glycine max
  unsure at all n locations
  Clone ID: LIB3138-127-Q1-N1-G9
gtttttgatattctcttgggaatctctcaagattttgaaattgctggtaatactcttatgccagctttttctgttccacaggctactgccagatcttctgaaaatgcggaatcctctgcatgatctggaatttgtgttttctttcgcttgttcgtttgtttaattcaataaaggaaattaggcatgaccctcttgttgagtatgctctgcctatttgaaaatttccacacctcttttaattgtcgtaatgatgtgtgaagtgtgtgttattttaaaaaaaaaaatanaaaatatttattaaataaaaa

SEQ ID NO: 38989 - DNA, 133 bp, Glycine max
  Clone ID: LIB3138-127-Q1-N1-H6
gtagcgtttttctcgatgcaagaaagcaacaacaacgctcaggaatcgaaacacagtttctgttaacactaaacacttctgtgactgaggatacaacgggatattcaagcatctctcaataacatcactgacc

SEQ ID NO: 38990 - DNA, 92 bp, Glycine max
  Clone ID: LIB3138-128-Q1-N1-A1
atactttagagttacctgcagattgaaatcctcggcgctgcaaagtcacataacatggggggcgtgatcatgtgcatacctcccaatacccg

SEQ ID NO: 38991 - DNA, 130 bp, Glycine max
  Clone ID: LIB3138-128-Q1-N1-D8
cgaaaaattataaaaaaaaaaaaaaaaaaaaaaggggggggaaaataaaaaaaacaggcgtccttctttaaaaaacataataaaaaaatttgggctaaatgcattgtggcataatttttaatacaactct

SEQ ID NO: 38992 - DNA, 123 bp, Glycine max
  Clone ID: LIB3138-128-Q1-N1-G12
aaaaaaaaaaaaaaaaaaaaaaaaaaaaaaaaaaaaaaaaaaaaaaaaaaaaaaaaaaaaaaaaaaaaaaaaaaaaaaaaaaaaaaaaaaaaaaaaaaaaaaaaaaaaaaaaaaaaagggggg

SEQ ID NO: 38993 - DNA, 105 bp, Glycine max
  Clone ID: LIB3138-128-Q1-N1-G8
aaaaaaaaaaaaaaaaagagaaaaaaaaaaaaaaaaaaaaaaaaaaaaaaaaaaaaaaaaaaaaaaaaaaaaaaaaaaaaaaaaaaaaaaaaaaaaaaaaaaacg

SEQ ID NO: 38994 - DNA, 376 bp, Glycine max
  Clone ID: LIB3138-129-Q1-N1-A2
attcggttcgggtcacaacttcattatgtttcgtgtaataatctggaaatgcaagaagcttatcttgtcaatctcgtaaatgtgttacgagaattgtatttgcacagtccagaggaagctcgccaattgagaaggaaagctctctctcgtattgaatggctgcaaaaagctgatgtgcctaccatagcacagattgaagagttccattcgatgcagaggatgatgaatgctcctgattcaaatgataatattgatttactgttgagcattgatttgttgggtttacaaggagcaggtaaagcttttccaaacaaaattgtttttgatgataagcttgtgttggctaacacacaagaattctttgatggaaattttc

SEQ ID NO: 38995 - DNA, 111 bp, Glycine max
  Clone ID: LIB3138-129-Q1-N1-B6
aaaaaaaaaaaaaaaaaaaaaaaaaaaaaaaaaaaaaaaaaaaaaaaaaaaaaaaaaaaaaaaaaaaaaaaaaaaaaaaaaaaaaaaaaaaaaaaaaaaaaaaaaaaaagg

SEQ ID NO: 38996 - DNA, 250 bp, Glycine max
  unsure at all n locations
  Clone ID: LIB3138-129-Q1-N1-C11.F3
agtcctacaccgcctgcgacgaagnacaggttctagggtagatatagagtgggaagcgtgagaacgggctgaatacgaagggcgttttggtgttatacatgctcgcacagtttgggacatgttggttgatacctcgatatccgtagcgggcatggcgttgcaaattggcatttgtaaattagctttggtaaaatagtgaagtgtggataataggctagactaggctacgcaaaagcgatcatgtcagttc

SEQ ID NO: 38997 - DNA, 556 bp, Glycine max
  Clone ID: LIB3138-129-Q1-N1-C11.R1
tttgttttttttttttttttgaactgacatgatcgcgtttggtacctaggtctagcctagtatgcagacttcactattgtaccaaagctaatttacaaatgccagtttgcgacgccatgcccgctgacggtatcgagggaggaaccgacgtgtgccgagctgggggagcaggtatgggcgcagagcgcgcgtcgtagggggggcggggcggagctggcccgggggatggcgggggtatggccgtgtgcggggggcggggcggggggggaggggggtggggggggggggcggggcgggggggtgggggggagcgggggcgcggggaggcgtggggggggcgggggaggtggggggggggggcgggtggggtggatagagggtgggggagctgggggggcggggggggggggggcggtggtggaggggacgagagggggggtgggaggcggggaggggggtggaggggggggtgggtggggggggtcggggaggggtgggggtggaggggggggggggggggggggtggggggtgtggggggggggggcgtggggggg

SEQ ID NO: 38998 - DNA, 344 bp, Glycine max
  Clone ID: LIB3138-129-Q1-N1-E10
tgattcactactttattcttccattgcttttatgctaattctaaattctaaattctaaatttcgcattggaaatggcattcacacagcttatcccttcaccttcttcctccttaaaccctatcacactctccctaaaccctaaatccccaacatctccgccgcagcatttcaatctcgactttctccggcaccggcgccggaggcctgcttccactctgcggtgctccgcctcctcattctcggagaagcaccacacgaactcctcgaactccgacgacgtgttggagctccctctgttccctctccctctggttctcttgcccggcgccatccttaccttgca

SEQ ID NO: 38999 - DNA, 324 bp, Glycine max
  Clone ID: LIB3138-129-Q1-N1-H4
ggcgcctagattgcaataacgcgtaccctttcaaccgcgcaatgcatctacaaaccacaattctcaattctgccactttgttcattctacctgatcatatctttcaccattctcttattttctaaccatatttttggtgtctcaatttccaagggacatggggaggcttaggtgtcacttttataccatatttcttcgaaaccttgtgttaaaaagtgtgtccttctgaacttgaataacaatttggacttttttgtagattcatacgcacatactccgtgctggattggcactggttttacttgctccatcgctcttcacata

SEQ ID NO: 39000 - DNA, 186 bp, Glycine max
  Clone ID: LIB3138-129-Q1-N1-H5
gctctgcctatttaaaaatttccacacctcttttaattgtcgtaatgatgtgtgaagtgtgtgttattttaaaaaaaaaaaaaaaaaaaaaaaaaaaaaaaaaaaaaaaaaaaaaaaaaagaaaaaaaaaactaaaagaaggggaaatatagtgaatgcaaaagaaaaacaaaagctcccgatttc

SEQ ID NO: 39001 - DNA, 318 bp, Glycine max
  Clone ID: LIB3138-130-Q1-N1-A7
agtgcaattgaagttgaagtcttgcccttctctcttcaactccaaacacaagacatcatcatccatggctgcctccgtctccactgtcggagctgtcaacagagctcttttgaacctgaatgggtctggacctggggtttcagctcccagttcatccttctttgggagcagcttgaagaaggttattggctcaagggtccccaacacaaagatttcctctggaagcttcaagattgttgctgtagaagagaagaaagagattgaagagacccagcagaccgacaaggacagatggaagggtcttgcctatgatatctc

SEQ ID NO: 39002 - DNA, 347 bp, Glycine max
  Clone ID: LIB3138-130-Q1-N1-B10
aaaaaaaaaaaaaaaaaaagggcggccgctcgcgatctagaacgataccatcaattttgaggcttttccccacaagctggtgcagtttggagagattcaggaaaaagttgtattgaaattttcacaagaggaatttcttacagcttggtcaactcaggtgcgtcctgcaacaactctgttggctgatgggtgtccatatttgtatgcaatggtgcatgatagttcagtgtctacaataccaggtgattttgtcattggtgtcaagttgacaaccataaacaatatgtgtgcatatgggctcaatcctggtatttcaggttctcgtcttttgggcaccattcctcagt

SEQ ID NO: 39003 - DNA, 78 bp, Glycine max
  Clone ID: LIB3138-130-Q1-N1-C10
aaaaaaaaaaaaaaaaaaaaaaaaaaaaaaaaagaaaaaaaaaaaaaaaaaaaaaaaaaaaaaaaaaaaaaaaaaaaa

SEQ ID NO: 39004 - DNA, 341 bp, Glycine max
  unsure at all n locations
  Clone ID: LIB3138-130-Q1-N1-E8
gccaagatgggaatcaaccccatcatgatgagtgctggagagttggaaagtggaaatgcangagagccagcaaaactgatcaggcagagataccgtgaagccgcagacttgatcaagaagggaaagatgtgtgctctcttcatcaacgatcttgatgcaggagctggtcgtcttggtggaaccacccaatacactgtcaacaaccagatggtgaatgccaccctcatgaacattgctgataaccccaccaatgtgcagcttcctggtatgtataacaaggaagagaatccccgtgtgcccatcatcgtcaccggtaacgatttctccacactctatgcgcc

SEQ ID NO: 39005 - DNA, 358 bp, Glycine max
  Clone ID: LIB3138-130-Q1-N1-F12
gtcgagaacattatgagactgcgcaaagagttaaacagggggtacaacgttacaaagaacttcaagacattatagctatccttggcttggacgaattatccgaagaagatcgcttaaccgtagcaagagcacgaaaaattgagcgtttcttatcacaaccttttttcgtagcagaagtttttaccggttcgccggggaaatatgttagtctagcagaaacaattagagggtttaaattgattctttctggagaattagatggtcttcctgaacaagccttttatttggtaggtaatatcgatgaagctactgcgaaagctacgaacttagaaatggagagcaatttgaaaaaatgact

SEQ ID NO: 39006 - DNA, 194 bp, Glycine max
  Clone ID: LIB3138-130-Q1-N1-G7
ggatcttgacacacatcaagactttactggctgttggagttctttctcataggcttctttgcggcttcttattggtgagagcaggtggtacagtcaaatagccaaaaacccctctctagaaattttgccgctgtgcttacatttgggtaacacctgtaattttcaacctgctccatcaggctcgggagcttccc

SEQ ID NO: 39007 - DNA, 255 bp, Glycine max
  Clone ID: LIB3138-130-Q1-N1-H6
gttaggtcttttttacttcttctaggttaagtgacagctgctggaataagaagtggcgactttcaaatggtagatcctatgtcacgttttgtgggtggctcctcacgacaaggccagggtatggtcacaactcctttatttttccgctcataatctgggaaagcaagaagctgaacctgtcgatctccctcatgaggggccgtgcttgtcttaatctcatattggttggagcaatctgcttgagcagtttttatg

SEQ ID NO: 39008 - DNA, 627 bp, Glycine max
  Clone ID: LIB3138-035-A7-F1B
ggatactgcatactcgctggatctcccaatctggcttcaaactcaacaatggcatacgccgcacctccgctggacccgccaggaataggcacgaactcgccttcgtctcagaagaagagagtggcttatttctatgacagcgacgtcgggaactatgcctaccagtcgggacatctgatgacaccccatcgaattcggatggcgcattcgcttgtcatgaactatggactgtacaacaagatggagatttaccgggccaaaccagcgtcaaaatacgagatgacacagttccatacggacgaatacgtggactttttgcagcgtgtcactcccgacaatgaacatcttctggctaaagagtgcgccaagcacaatgttggggaagattgtcctccgttcgacggcgtctttcagttctgcgcgattagtgccggtggcagtatggaaggagcggcaagactcaatcgtgccaaatgtgatatggcgatcaattgggcgggcggactgcatcatgcgaagaaaaacgaggcatctggcttctgctatattcatgatattgtcctcgcaatccttgagctgctccgcttccatgcacgagtattgtatatcgacatcgatgtgcatcat

SEQ ID NO: 39009 - DNA, 703 bp, Glycine max
  Clone ID: LIB3138-035-A7-F3A
cggcaagactcaatcgtgccaaatgtgatatggcgatcaattgggcgggcggactgcatcatgcgaagaaaaacgaggcatctggcttctgctatattaatgatattgtcctcgcaatccttgagctgctccgcttccatgcacgagtattgtatatcgacatcgatgtgcatcatggcgacggtgtcgaagaagccttctataccactgacagggtaatgtgtgtctcgttgcataaatacggcgaattctttccaggaactggcgaccttcgcgatattggaatcgggcaagggaaacattactcagtcaacgtaccactgcgagatggtatcgacgacgccagctataaagacgtcttcgaatcggtgacgacgtgggctgtggagttctttcaacctggggcgatcgtcttacaatgcggagctgactctctgtctggggatcgccttggtgcgttcaacttgagcctggctgggcatgcgaactgcgtcaacttcgtgaagaaattcaacctgccgacgcttttcctgggaggtggtggctatacaatacgaaatgtcgctcgagcatgggcatatgagactggacagatagttggtgttgagctgtctcgctcgatgccatttacagactattacgagtactactcgccagactttgaactagacgtcaagccgagcaatatggacaacccgaacag

SEQ ID NO: 39010 - DNA, 689 bp, Glycine max
  Clone ID: LIB3138-035-A7-R3A
tccgtgagccgttgatctttggaggtctcctcgtcagcatcttcatcatccagtctgtcgcccatatcgtcaatatgttcgctcatgccgactggataccgcggcacgtgttgaagctgcacagaggggaccggttgtgcttgacgaagattggtataaacaaatgacttgatcttcgccaggtattcagcactgttccggttgtccatattgctcggcttgacgtctagttcgaagtctggcgagtagtactcgtaatagtctgtaaatggcatcgagcgagacagctcaacaccaactatctgtccagtctcatatgcccatgctcgagcgacatttcgtattgtatagccaccacctcccaggaaaagcgtcagcaggttgaatttcttcacgaagttgacgcagttcgcatgcccagccaggctcaagttgaacgcaccaaggcgatccccagacagagagtcagctccgcattgtaagacaatcgccccaggttgaaagaactccacagcccacgtagtcaccgattcgaagacgtctttatagctggcgtcgtcgataccatctcgcagtggtacgttgactgagtaatgtttcccttgcccgattccaatatcgcgaaagtcgccagttcctggaaagaaatcgccgtatttatgcaacgagacacacatttccctgtcagt

SEQ ID NO: 39011 - DNA, 739 bp, Glycine max
  Clone ID: LIB3138-060-C7-F3A
atggattgggaagttgacccttctgagctggacttctccaattcagtttgcattggaaagggatcttttggtgagattttgaaagcccattggcgtggaacacctgttgctgtcaaacgtattcttccatctctgtcagatgatagattggtcattcaggacttcaggcaggaggttaatttacttgtgaagcttcgacaccctaatgttgttcaatttcttggagctgttactgacagaaagcctcttatgttaattactgagtatctgagaggaggtgatcttcataagtacctcaaggacaaaggtgcacttagtccttcaacagccatcaattttggcttggatattgctagagggatggcttatcttcacaatgaaccaaatgttatcattcatcgagacctaaagccaaggaatgttcttttagtcaactccagtgctgaccatttaaaagttggtgattttggacttagtaagctcattaaggtccaaagtgctcatgacgtatacaagatgacgggtgaaactggaagctaccgctacatggctcctgaagttctcaaacaccggagatatgataagaaggttgatgtgttctcctttgcaatgattctgtatgagatgcttgaaggtgaaccccctttttcaaattacgaaccttatgatggagccaaatatgtggcagaaggacacagaccttcttttaagggaaagggttatatccctgaactgcgag

SEQ ID NO: 39012 - DNA, 513 bp, Glycine max
  Clone ID: LIB3138-060-C7-R3A
cactgctcagtactcttcaggcaggcattaaccctttgccctaatagaaggggtgtgcccttctgccacatatgaagagctccatcataagggtacacctttggatgaggggggtcaccttccatcatttcatacagaatcattgcacatgcaagcacatcagcctgatgatcatatattcggggagcgagaactccatgagccatgtcacggtagcttacatgttaaccccacatcgtgtatacttgatgagccctatggaccttaatgagctgactaagatcagaaccaccaactcttaagtggtctgaactggagttgactcatagaacattccttggctataggtctagatgaatgatatcattagaatgatcgagaagataagacatacctctacctatatccaagccatgatcgatggctgatgtaggactgagagcaccttagagcttgaggtactgatcaaaatcagctcctctcagatcctcaggcttttacataagacgctat

SEQ ID NO: 39013 - DNA, 746 bp, Glycine max
  Clone ID: LIB3138-126-A8-F3A
gcgctcggcatcatctttactaaaagatgcaactggcaatgcctgaatactagcaattcccaacataacaaggctgcggtatgccaaattgggtgcaagctgtctcagaacctgtgcacaaatatcaaaaaccattaatcaaaagataaggtttcattattcaaaaagaaaaaaggaactaacaagggtcatgtcattacagcatgaaattgctaaaagatcaagccaatacaatgtggaggctattttcatatgttccgtcacttccgtgaaaaacagaacaattggaacaataacaaagtaaacaaactactgttataggcctaacaattggactaaaatacataaaccagtcaactggaaaatataatggcaaagcagaagtcacaaatatctttagcaaaagcctccatctaggccctttcattgattaaaaataatttttaagatccattaaattatattttagaaagctatatccgacagacgaaaccttgagaaacaacaattaacctgtgaagcccatgcaggaactcgcatacaaacttcaaacacactagatccacacgctactgaggctgatcttcgaggctcggatgaaggtgctttactttgttgatgattaggaaatgcctggacaagttgactcttctcaatcagctcttttttaatatgattctccaaaagctgaggatatacccaaaataagtgataggtaagtaaaaagtttaaaagatcatatatgt

SEQ ID NO: 39014 - DNA, 555 bp, Glycine max
  unsure at all n locations
  Clone ID: LIB3139-034-P1-N1-E11.F5
agtagtcatcatattctagcagcacatgcagtagcgagtgatgatatgatgatcaaaagttccaattccaaaggaatgattggtgagaaaaggatcatcatcatcatgatcagcttcaattaattgttcgtaaccctcaaaaggagtagaatacaataactcacctgaatctgagtgcatcttgtgtagctcagaattatagagatcattatagtcggatccaacagcaggaagcaccacctcattggagaaatcaaagacgttcaagaatgtccaatccatcatgtccccacggtccacttgctccgttccatcacattaggacatagtagcagaacatgacgaggcagtggtggtgggggtacaattagtagtagtactagtagtactactctctgctatgctgtctgatttacataacaactttgatccaaacgatgaagaattagcaccaccgccaccaccatcactactacgttgaggttgaggttgttcttgaggctttngcagaccgttatctcttgcttagcaaacttaacagtatcccttgctata

SEQ ID NO: 39015 - DNA, 450 bp, Glycine max
  Clone ID: LIB3139-034-P1-N1-E11.R6
tactactactaattgtacccccccaccactgcctcgtcatgttctgctactatgtcctaatgtgatggaacggagcaagtggaccgtggggacatgatggattggacattcttgaacgtctttgatttctccaatgaggtggtgcttcctgctgttggatccgactataatgatctctataattctgagctacacaagatgcactcagattcaggtgagttattgtattctactccttttgagggttacgaacaattaattgaagctgatcatgatgatgatgatcctttttctcaccaatcattcctttggaattggaacttttgatcatcatatcatcactcgctactgcatgtgctgctagaatatgatgactactagttaaaattacttgccccagcctaaatatataataaagcatccttgatcttttgtatatatgatatgata

SEQ ID NO: 39016 - DNA, 531 bp, Glycine max
  unsure at all n locations
  Clone ID: LIB3139-037-P1-N1-B3.F5
tgcatagntgtttggcttcagagcaatgccaattgccctctttgtagaacaagcatttccttgacaagcagattccacattgatcagcttctcaccctaaggccttcttcttcttcttaccctcatgatcaaaccccacctagggaaaacctcattggtggtgatgaagattttgttgtgattgaattgggtagtgatcatgatagaagccagaatttgcaagaaagaggcaatgctttggagttaccaacatgtcctattagtccttcttcaccaaggaagctattggaacatagaaatgtgcagaagaagaaagcaatgaaactgcagaaagtgacaagcatgggggatgagtgtattgatattagagccaaagatgaccagtttttctcagtgcaaccaatcagaaggtctttctccatggactcatcaggggatagacggttctatttagcagttcaagaagctctgaggaatcagaactggcaagtcaatgaggtcaactccattgaaggttgcagtgggaattgg

SEQ ID NO: 39017 - DNA, 608 bp, Glycine max
  Clone ID: LIB3139-040-P1-N1-D1.F5
tggcaagtttctgggtcgacccgtttcttctctaacaagctcaattgggcctccaatgccaaactcaagtttggagcttggtgttgggagcaatggttttggacaaggtttaagcactgtgccttcaacaatgcctgattttggggttggaatatcaagccctttagccatggtgtcaccttcaagtactagaccaaccacaacagcattggtgactccttctggctttgacaacagatcaattgagaggtctattgttcttgaacttgctttggctgcaatggatgagttggtgaagatggcacaaactggtgagcctctttggatcagaagcttggaagggggaagagaaattctcaaccatgaggagtacacaaggactatcactccttgcattggcttgagacccaatggctttgtcactgaggcttctagacaaactggaatggtcatcataaacagcttggcccttgttgaaacattaatggactcaaatcgttggtcagagatgttcccttgtatgattgctagaacctcaaccgctgaagttatatctaatggaataaatggaactagaaatggtgcccttcagctaatgcatgctgagc

SEQ ID NO: 39018 - DNA, 176 bp, Glycine max
  unsure at all n locations
  Clone ID: LIB3139-059-P1-N1-A2.F6
ctggtggggcgggcggggaggggcttttgtgagatttcagctggtggggatgcctgtaatgtngtcggtcgcacgtcctcttgttgaatcgactgcggacttttctagctcggtctcttattcgagcttcgtcgcgtgcatgctagtggagctctttattggtccctagatcattc

SEQ ID NO: 39019 - DNA, 284 bp, Glycine max
  Clone ID: LIB3139-059-P1-N1-A2.R5
tccatccagtgtttgtgaattattaagtacacttcttattgcactgtgaattcgttgtaatccattgattaaaactggcttacgctgcttactagtctcacaattgcaaaaaatattggtgtgctaatcacagacattgtgatgacatgatagagccacatactattgatgtatcatgattgctctttatgaagatataagaaacactgaatctgactttcttttatcaaatggaggatgagatgtgtcctatggaatggggaaaaatggataaaatacccagc

SEQ ID NO: 39020 - DNA, 632 bp, Glycine max
  unsure at all n locations
  Clone ID: LIB3139-072-P1-N1-D11.F5
acatgctaaaccatggacagggtgttggagcgatgtggcaagaaagctggcctccaaggtgtggcaaaagttgtcgccttcgatggatcaattacttgaggcctgatcttaagagaggtgcattctcaccccaagaagaggaactcatcatccacttccattcccttcttggaaacagatggtctcaaatagcggcgcgtttgcctgggcgaaccgacaatgaaataaaaaacttttggaattcaacgataaagaaaagactcaagaacatgtcgtccacgacgaccacaacctcaacctcaccaaatgcaagcgagacctcaatatccgagcctagtaataaggacctcaacacatggngaggggtttatttccacactacataataaacatgcagngttttgttcctaatgttcggttcatctccatcaccatcaatgatgcaaaccagtacagttttcaataacatgattgaaaggtttcctatgctggagcaaggactgattaacatgccagcttctggagggtacttcgaaggcacaggtagtactccttgcttttcgcatgttgaagttcacacaataaagtttcttgttatttagaaaacgaagtgtttgagagtgtaatatcgg

SEQ ID NO: 39021 - DNA, 549 bp, Glycine max
  Clone ID: LIB3139-076-P1-N1-C2.F5
ctgcgagcatgttttctggcacacagaaagtgtgccacatgtggcaaaactgcttatccattagagaaggtaacagtggaagggcaggcctatcacaaatcatgtttcaagtgttcacatggtggatgtcccataacgccatcgaattatgcagcccttgagggcattttgtattgcaagcaccacttctcccagctttttaaggagaaagggagctataatcatcttactaagtctgcatcagtcaaacgggcagccgcagccacagcagcagcaacaacagctgcctctgttccagaatcttgaatgttggttccttcaattgccttttctttttcaaatacattttggtttgtgaagcaggtgtttgtatgtgtggcctttttggtttttgattgttctctcgtgactttgatcatttctgatatttttacttacacatgcgtggcgtgcaaatcttgtgtggtttattcatataatggacatttagtaaagacgagactaatgagagcgtgatttgcaagatatatcattccagggtgatgaaaa

SEQ ID NO: 39022 - DNA, 331 bp, Glycine max
  Clone ID: LIB3139-100-P1-N1-C9.F5
tttggggagaatgtctgcatggttcaatgctattcctgctgcttggggtcctggtagtcccatgtgggatgatttggatgccaccaataatcttctttgccaatcacacattcctttttccaatcccaatcaacaagaactcaatgatgctgagagacaagaacaaaacactggaccaggttacttggggagaggagcaggattgaaatgatagtgatggcatcctaatcattccgtttgggacttccatgaccccacagcggtggaatagcattgatccatgcagacatttttgcccaaaccattgtcctggctgactggtggcgaactg

SEQ ID NO: 39023 - DNA, 345 bp, Glycine max
  Clone ID: LIB3139-100-P1-N1-C9.F6
ttaattcttttctgaaacttatgctgaactaaggctccgtgtatttcaaggccttgcagcattttttttcttttacttgactattttacactatttttgcttttgtttttttttaatattttaatgtagtaagtaaaggtagattggcatgaccatgggaagaaggagacggttttgtgatttccttctcggttgctccatccgttatgagctatgtttttcagctccaaggatggttcatatatatatatatatataatcatattacttcatttgtagtttgtacgctatcatgttatgtatcattttttttgttgttatattacatatccagcactttacagt

SEQ ID NO: 39024 - DNA, 215 bp, Glycine max
  unsure at all n locations
  Clone ID: LIB3139-100-P1-N1-C9.R5
ttcatgctgctttgcaatagctgatagtactggcgaagaagcttcttgttcttgttgtctaggtggnatgatttttaggccaccaagagtaacatttgccagacacacagtccttttttcaatcccagtcaacaagaactcaatgaggctgagagacattttcttaacactggaccaggttacttgtggagggggcgcggatggtaacgtgacgg

SEQ ID NO: 39025 - DNA, 640 bp, Glycine max
  unsure at all n locations
  Clone ID: LIB3139-100-P1-N1-C9.R6
atcaagtgtcctaaatgtaatgaaggagtggatgatggataaatgataatcatggatatgcaaccaggaagagaaagaagcaaggtatatagaaaattaacttcaaatttcaatcctgatccttccacaagtaacctggtccagtgttttgttcttgtctctcagcatcattgagttcttgttgattgggattggaaaaaggaatgtgtgattggcaaagaagattattggtggcatccaaatcatcccacatgggactaccaggaccccaagcagcaggaatagcattgaaccatgcagacatttctccccaaaccatttcctgagaaactccttcggaactctcagtagtagcatgaacctggtcatcgctcaccgtggcgtcacccgaatcattctcattagactcttctatggggacgtcacggtgttcactagaaggttcatgctgctttgcaatagctgaaagaactggcgaagaagcttcttgttcttgttgnntgntgttcttcttttttgtccttgttgaggaacaattctgggaaattgagtctagcattctctcctcgtagcttgaagggcttctcggtcgtaggccatggcngggcgtcttcngcccgtgtcaaatgtgcctagccag

SEQ ID NO: 39026 - DNA, 747 bp, Glycine max
  unsure at all n locations
  Clone ID: LIB3139-117-G9-F4A
ttccactgcaaggtcgaagaanacgccgatgcatattgatgacaaaggttgcggcatccgcatgtgtatcagattgatggagctgtgacccgtaatatacctatgatgattgtgcgtgagtaccattctaagggtgacctggcaagctatcttcaaaagaaagggcgtttgtctccatcaaaagttctacgctttgctcttgatattgccaggggcatgaactatcttcacgaatgcaaaccagatccggttattcactgtgatttaaagccaaaaaatattttgctggataatggagggcaattgaagatagctggatttggcactgtgagattttcgctaatctcacctgatgaagcaaagctggtacagccagagcctaacattgatctttcaagcttgtacgtggcaccggagatttacaaagatgaagtttttgatagaagtgtggatgcatattcttttggtctcattatatatgagatgatagagggtacacatcccttccatcccaagtcctcggaggaggcagttagactgatgtgcttggaagggaaaagaccagcattcaagatcaaaacaaaacattatcctccagagttgaaagagttgatcgaggaatgttgggatccaacacctgttgtgaggccaacattttctcaggtcattgcacggttggacaaaatcgttgcaaattgctcaaaacaaggatggtggaaagatacttttaaactccctttggaataa

SEQ ID NO: 39027 - DNA, 364 bp, Glycine max
  Clone ID: LIB3139-085-P4-N4-A1
gaaagattttatccaattgaaattttaaaaatgactgggataaacttaagaattcaattattgaaattgaataagtaaacaatttaattggattggtcgaatggtatcaaaaaaatggagtactaactcccatttcttatttattattgaattaaccgatcaacttgctttgttatcgaacatttctttttgatttcaaaaattttccggaaaaaatttgaatctatttttatatgcgaatcaatcctactacttctggtcctgaggtttctgcgcttgaaaaaaaaaatctgggacgtatcgcccaaataattggtccggtactagatgtagcttttcccccaagtaagatgcctaatattta

SEQ ID NO: 39028 - DNA, 366 bp, Glycine max
  unsure at all n locations
  Clone ID: LIB3139-085-P4-N4-A10
aaaaagttgtttccgatcacaacctcaatcgtattaagctgttgttgggcctcgtcgncaatgtcgggagttgaaaggtttttgttttcttttctcttctttttctttttttttcttttctttttctttctcttttctgttgcttttatttccttccttttttctgctttttttttctttttttttctcattttttatcttttttctgttttaaatgtattcttctttttttttttttctcttttttcttttcctttttccttttttttttttttccatctttcttcttcttcttttaatttttttgtcttttttctccttttttttttctttcctttttttatttttttttttttttttttttta

SEQ ID NO: 39029 - DNA, 287 bp, Glycine max
  Clone ID: LIB3139-085-P4-N4-A11
ccggctctttcagttaatggcagatcgagtcacgaacatggtcgaagttcacctcgagaggcttcagattagcgacgttggattgcaagcgatcgcgaatttttcgagtttggagattttgcatctcgttaagactcctgaatgttctgatattggacttgttgctattgcagacaggtgcaagcttttgcggaagcttcacattgatggatggaaggcaaatcgaattggcgacgaaaggttgatagctgttgcaaaaggttgccctaatttgcttgaattagtgc

SEQ ID NO: 39030 - DNA, 362 bp, Glycine max
  Clone ID: LIB3139-085-P4-N4-A12
taaatttgtactctttccaatttaagaggaaagataacattaccaaccttgggagctggcgaacaagcatacgatgttaattttgaatgggacagtgacttcggaattcccggtgcattttatattaagaacttcatgcaaaatgagttctacctcaagtctctaattctcgaagacattccaaaccacggaaccattcacttcgtatgcaactcctgggtttacaattcaaaaaactacaagactgatcgcattttctttgccaacaatacataatctttcaagcgagacaccagctccacttttgaagtacagagaagaagaattggagaatggtaggaggggatggaactggagagcgc

SEQ ID NO: 39031 - DNA, 303 bp, Glycine max
  Clone ID: LIB3139-085-P4-N4-A2
ggaagtgctacactatacttgtcaacccttcgagagttagaatggctgcggctattgaaatccccacaatggtgtgtccaaactcctctgcccaacagaggatgccagtggttggaatgggatctgcccctgacttcacatgcaagaaagacacaaaggaggctatcattgaggccgtgaaacagggttacagacacttcgacactgctgctgcttatggctctgaacaggctctcggtgaagctctcaaggaagctatccatcttgggctcgtcttccggcaagacctttttgttactttca

SEQ ID NO: 39032 - DNA, 219 bp, Glycine max
  Clone ID: LIB3139-085-P4-N4-A4
acgctcacgcaaccaaaattaaatccagatcaataaccatcatctcatttttttctattccctatcaaaacctctcttggtttttatataaatagtggtgcgcccatcccaactttttctcttccacaatctactttcatatctttttaaatttcctaatttcttttcttcatacttaattatttctttctttttcttcttctttttcttaacttatat

SEQ ID NO: 39033 - DNA, 365 bp, Glycine max
  unsure at all n locations
  Clone ID: LIB3139-085-P4-N4-A5
accaaatatctcaacaaaatagcgaaggttgatgtggaagcaaggacaatgactgtggagagtggtgtgacaatgaagcancttataaatgaggctgcaaaggtagggttggccttgccatatgcaccatattggtggggtttgaccattggagggcttatgggaactggtgctcatggaagcactntgtgggggaagggtagttctgtccatgattatgtggtggagcttaggattgttagggctgctggtcctgaagagggttatgctaaggctgagagcctcaatgaacaacatgaagatctcaatgctgccaaagtgtcacttggtgtgcttggagttatttacaggctactctgaaacta

SEQ ID NO: 39034 - DNA, 159 bp, Glycine max
  Clone ID: LIB3139-085-P4-N4-B1
tggtgatgataacttaattagtgttcatgaatatgtcaagccttactttagtggttctatattgaaaagctttctagctggtcataatatcaccactactgatgggattgacaaaactagtgcaacttttcaatttaaaaaggtagcagattgtgattt

SEQ ID NO: 39035 - DNA, 331 bp, Glycine max
  Clone ID: LIB3139-085-P4-N4-B10
ttgctgctttacgtatccaataccacacaactctgttcaggtgcaaccgcagcctccatgtcagccctcccacgggcatgcttaattatacaaaatgccccgactacgatctctactacaagcacatcatcacggctgatgatgtgtctcggagttctttggtggcatgtacagaggtccagcttccaattaaagacgtgcctgacgctataaacccatttacctttgtaactgcagatatcatcattcgagtagacttaactgatgaatgtgcagattgcaactatcgccatggagggcagtgcaaacttgacagcacagagaaattttt

SEQ ID NO: 39036 - DNA, 363 bp, Glycine max
  Clone ID: LIB3139-085-P4-N4-B11
tgaaaatttctcaatctaaaattgcacttcccaagaacacagggggaggaaccattctgcgtagtggtctattggcaaattttttgacagagggcaattttagagcaagtgttgatttgcagcgcactcatcgtattagaggaatgattaaaatggtggccacagttggtattcctgagaatacaggtatatcattggcctgtgctatgaatagttcttttagggggcgcgccagttctgatatttacaccatctgctctcaagactgtgaactgtggaatcctgcttgcacaaaagcaatgactatgtcatttaatccaaacccgtgttctgatgcatggagttttggaatttctgaagcgt

SEQ ID NO: 39037 - DNA, 278 bp, Glycine max
  Clone ID: LIB3139-085-P4-N4-B12
cgctccgcaccagtttcaccgcacgaatatcttgttgtttggagcgatccgagaaaaactctgtagacatgttggtttaccaggacctccttacaggtgatgagcttctctctgactccttccgttacaaggaaattgagaatggaatgctgtgggaagttgaggggaagtgggttgttaaaggagcagttgatgtagacattggtgcaaacccttctgctgagggtggaggagaagatgagggagttgatgatgcagctgttaaggttgttgacatt

SEQ ID NO: 39038 - DNA, 390 bp, Glycine max
  Clone ID: LIB3139-085-P4-N4-B4
gcaaaatgtaatttccttttcacttatgagatcaattattctattgagaaaggtaccaatacatgaagtgaacattctccacgtgctttatattcttgaaatgcaataaatgtagcaccttaaaacattgtttttggcaaattataattcccaatatactaattaccatacagagtgtacgaggtgaataacccaataaaccaccattacccattatccgtgattatagcaattttcttcttcttttgcttcttgtgtatatttctgctttgcccgccaaatttcctatctgaatttttcaaccgagttaacttaattgaggattggacccaaatgaccaagtcaaatttattagcaaaaaacaaaatttctaagttaagacgtgtaact

SEQ ID NO: 39039 - DNA, 465 bp, Glycine max
  Clone ID: LIB3139-085-P4-N4-B5
ggaatcttccaggatttgacttgaacatattggagctagctgaaattctcttagcaaaaatggactagaatatatgatgtatatcatattataaggatcatgcattgtgctatttggggttggttttcatgacaatcctagtggaagggaacttctatcagagctataatgtgttcatcggttaacttgctaccaagtctactctttaaaccagattactaaatactaataggagaggttatctagttgttccattgtacatgattagtttgattctggcactagttactcactcagatttccaactgcagttgctagcaattgaaattttggatttgttgtgtagtagacacatcttattacaaagggtcagcaacatctcagtaattgattgttaaaagttgtgacaggttgacacttttggtcatatgagaaatgctgtaaacgattttttaggcctgggac

SEQ ID NO: 39040 - DNA, 269 bp, Glycine max
  Clone ID: LIB3139-085-P4-N4-B7
caccagccgaaagccaagaaaaagctttcgatccctgtaactgcgttcgactatttagggttgtgtgggagacaatggcggatgaatcggagcacacggcggcgccggctgccggcgaatcgctgctcgacaagatcgccgagaagattcacggccacgacgactcttcctcttcctccgattccgattcggataaaaaggaatcttcgtcgattaaggagaaggttttccgcctctttggaagggagaagccagttcactccgtcctc

SEQ ID NO: 39041 - DNA, 349 bp, Glycine max
  Clone ID: LIB3139-085-P4-N4-B8
tataattggtgctggttcacattcttcaggagattttcctgaaaaggaagatcaagaaaaacccaaaaagattgataccagattgagacaaagaatagatcctcaatacaatgaggttcaggctcagatggaaacaaatttgtttaaattgtctcttgatgatgttgaaactcctaaaggttctatgttggatcttaaaatttctcaatctaaaattgcacttcccaagaacacagttggaggaaccattctgcgtagtgatctattggcaaattttttgacagagggcaattttagagcaagtgttgatttgcagcgcactcatcgtattaaaggaatgattaaaatg

SEQ ID NO: 39042 - DNA, 315 bp, Glycine max
  Clone ID: LIB3139-085-P4-N4-B9
gttgtagtatagttagagatatcactactacaccaccctgcatagttggttcagctataatactacttgagcttctttacctacttttcaaacctacattgcacacaaaatggcaacatcttggtcatgttatctacttgcattgcttctttttatgtcaactattgtatcagagagtagagtggcaaggaaggacttgggcctggaccttggtgggtttggggtggacttggactgggtttgggcctggggataggaggtggcagtggttttggagctgttgcctgagcagggtctgggtctggttctggttct

SEQ ID NO: 39043 - DNA, 344 bp, Glycine max
  Clone ID: LIB3139-085-P4-N4-C1
aaggaattggaaagcatctgcaatcctatcattgccaagatgtaccaaggtggtgctggtcctgacatgggtggtgctggtgctggggcagccgaggatgattatgctgctccttctggtggaagtggtgctggccccaagattgaggaagtggactaaatgtgtagttgctttcatccatttatctgtttaaaacttatttgatgcttttttattgaattttaacttttatgatttttgttggatgggatactaattgttttgcccgtgtgatatgaacgttgctttacgcattatgtcatttgctttatttcattaaatgagaatactcattgtttttacac

SEQ ID NO: 39044 - DNA, 288 bp, Glycine max
  Clone ID: LIB3139-085-P4-N4-C10
aaaaagagcaatcctctattcgaggcacccgtccaaggccagagaatgattttactaccacatttaggtatcggcttcggcaacttaactgcaactgctgaaaatactcctccaggatttgaatcgaaattgcctgaagtgcccgaaatcttcaaggcagccacaaattgttttgaaaccttgtgcagttactgctgttgcatgtgctgcatccagtgctgtacccggataaacagccaatgtgcaaccgcattggcacaactctgcattggtctaggatgcttcggc

SEQ ID NO: 39045 - DNA, 159 bp, Glycine max
  Clone ID: LIB3139-085-P4-N4-C12
gagctgccaggaaatttagaccttattagacaatgtttttggcgtacaaggttcacagtagtttttttggtggatttggcgtacaaggtacttatgtagtcttgaacttgagttatgccattgctcttaaattcaaaacgaaagttcatttatcattcc

SEQ ID NO: 39046 - DNA, 332 bp, Glycine max
  Clone ID: LIB3139-085-P4-N4-C2
tttgtatataagagaagtggaagagggagagtgagggaaggtaacaataagggaaatgaagaggagcagagatatggagaagagatcagagattaaatctgcaattgaagagttgtctatgctggttatagtcaaacctgaaggaaatcatgtcatgattgctcacatccccaccaagcctttcctgtctctatgtcacttggttctacaagttcttgataagataggaccaacgatggccgttttgagacaagacgtttcccagaatattaagaagtttggaagtgatgcatgaattgaatccctcaatgaattcaaatttggttgaaata

SEQ ID NO: 39047 - DNA, 353 bp, Glycine max
  Clone ID: LIB3139-085-P4-N4-C3
gctgtgactacctcttccagttccaccagcggcttcttcagtctccggtcaccgaattcggtcgattccagcagggtctcctccacccacggctcttcctccgcttgcggaaagttcgatggggtggccatgtggttcatcaacggcgtcacaaccgctttcttcgcctccttgaaccgttgctcttgcattcgcatcgccaccgaagaagacggcgacgatgccaacgacttgccgttgatgctcaacgacggaaacctccgccaggatggcgtcgtcgttgcgtgcaccaccagcaggagaaggacgggtaaagggaagaagagtgaagctgttctcgtcgacgacgactg

SEQ ID NO: 39048 - DNA, 420 bp, Glycine max
  Clone ID: LIB3139-085-P4-N4-C4
accgcgatcacaggttgccgcaccttaaaaccggaaacaaaagcaatcgttacttgatttcaagaatttctcaatttcttcctacttctttgtgtacgatttcttaagggaaagaaaatcactctctgtgctggtcacagacttcgtgaatcattttcttttccactcctagtttatttgctgaacactctcctatttgatataggacttcgtgtcagatttaaactttttctgtttctttctcagatctctgtttaatttcaagttcaagctggtgaaattttggattagtgctcccactctcctatctggtataggacttcaggggtagacttttctacttctctcctttctttcactctcttcttctcactgatcccgattggccggtaaaggggtcttaattgaaaaacacttggg

SEQ ID NO: 39049 - DNA, 440 bp, Glycine max
  Clone ID: LIB3139-085-P4-N4-C5
aaaaaaacaaaaaaaaatataacacactaaaatatataaaaaaaaaactgggatcaatatcacaagaggctgggaagtgaagaaaacaacaaaaaaaccaaaaacacctaaataaaacaaaaaaaaaaattacttggggccccccccatttacatactcaccacacctccaattattttaccccacaccccttgatgtttcccaatttttccttaattaggcccctttaaaacctgggctaaaacacggtacaagtgtttccaggagaaaaatatttcccccctaaaattccccacaaaattccatgcccgaagccaaaagggaaaaacccgggggccccaaaaagggaggctacccaacattaatgggtgggccccacctcccccctttcaaaacggaaaaccttttggcccccttttttaaattaaccccccaacccc

SEQ ID NO: 39050 - DNA, 343 bp, Glycine max
  Clone ID: LIB3139-085-P4-N4-C6
gagaatcccccagtgtacaagcctcccactgagaaaccaccagtttatgagccgccagttgagaagcctggtgtttacaaacctccagttgaaaaccccccaatttataagcctccagtagagaagccaccagtgtacaagcccccagttgagaaacccccagtgtacaagcccccagttgaaaaaccaccagtgtacaagcccccagttgagaaaccaccagtgtacaagcccccagttgaaaaacccccagtttacaagcccccagttgaaaaacccccagtgtacaagcccccagttgaaaaaccaccagtgtacaagcccccagttgagaagcccccag

SEQ ID NO: 39051 - DNA, 420 bp, Glycine max
  Clone ID: LIB3139-085-P4-N4-C7
cacatttgtgttcagtatagatggcaccgtactctctaatattccatactacaaaaaacatggatatggggtggagaaatttaactcgaccttgtatgatgaatgggttaacaagggcaatgcaccggcactgcccgagactcttaagaattacaacaagctggtgtctcttggcttcaagattatattcttgtcaggaagaacactggacaaacaggccgtaacagaagcaaacttaaagaaggctggctaccacacatgggaaaaattaattctcaaggatccacaagatccttccactccaaatgcagtttcatacaaaacagcagcgagagagaaactgataaggcagggatacaacattgttgggatcattggagaccaatggggcgatcttcttggaggccacaaaggcgaaag

SEQ ID NO: 39052 - DNA, 353 bp, Glycine max
  Clone ID: LIB3139-085-P4-N4-C8
aaaaaaaaaaaaaaaaaaaaaaaaaaaaaaaaaaaaaaaaaaaagaaaaaagaaaaaaaaaaaaggggggggggggaaaaaaaaaaaaaaaaaaaaaaaaaaaaaaaaaaaaaaaaaaaaaaaaaaaaaaaaaaaaaaaaaaaaaaaaaaaaaaaaagggggggcccccccctattagtttttctccccccccaataaaaattctcgcccaaccctggggggacaaaatatttttttaattaagggtcttttaaaaatgttgccataaaatggaaatattttttttctggaaaaaattattatcctccaaaaaaaccgcaaaaaataactttctaaataaaaatttgtataat

SEQ ID NO: 39053 - DNA, 476 bp, Glycine max
  Clone ID: LIB3139-085-P4-N4-C9
gaatttcttacagcttggtcaactcaggtgcgtcccgcaacgactctggtggctgatgggtgccgatatgggtatgctatggtgcatgatagttcagtgtctacaataccaggtgattttgtcattggtgttaagttgacaaccataaacaatatgtgtgcatatgggctcaatcctggtatttcaggttctcgtcttttgggcaccattcctcagtccatttcacagcaaactgtttggaatcaaatggcaacagtgagaacaccattgaattttgattctagcaagcagagcttttgtcaattttctattgaccttctcggtggaggaattttagtggacaaaactggagattggatcacacttatacaaaattctccaattagtaacttggtgagagttgctgcttggaagaaaggttgtttaatggtcaagattgtgatgtctgggaatgcagcagtcaaaaggagtgattg

SEQ ID NO: 39054 - DNA, 370 bp, Glycine max
  Clone ID: LIB3139-085-P4-N4-D10
ctcacctatggcaaatccaattctctcctttctcttgttggccctcctctgcatcctcgccttggctcacgccgattcccatttcgaaggctttgaagccgaagacgatgacgacctcgaagactcttccatcgatcccgcctctctccgatcaccgcccctctccgaccctactcccctcaccaccgatcccaccccccaacctcctgcttcagatctccccaaatccccttcccgccaccaccttcgatttctgggacgacgaagaattcgaaggcgtccccgtcgaacaccccgcccccgagcctccctccgatcccaaatcccccgaaaactccaccaccactcaaaccccttcaaccctaacccc

SEQ ID NO: 39055 - DNA, 263 bp, Glycine max
  Clone ID: LIB3139-085-P4-N4-D11
tgaaattgaattagctggggcatgtgggtatggctctttggcactagagataagtggtggacaccgggcggctggttttgattctctcttcaaaaatggagcaggttgtggtgcctgctttcaagtgggtgtgtgtacaattatcaagaccacgttcaaccaatttttatttcattaattattattgtcatgagagtagtctaatggacattttttttaatgtaattaatggatgatatgctgcaaataagatgcaagaaccc

SEQ ID NO: 39056 - DNA, 458 bp, Glycine max
  Clone ID: LIB3139-085-P4-N4-D3
ctcttcttcttcccccacaccggaggagagaaaaccaaaatcactcttgactgttagggttagggtttcgagtttccccttatccaatctcgcagcagcgagatgggcgccaattcgttgccatcggcggaatcaaacttcgatctcgacgagcagatctcgcagctcatgcaatgcaagccactttccgagcaccaggttagagttttatgtgagaaggctaaggagattttgatggaagaaagtaatgtccagcctgtgaaaagccctgtgacaatttgtggtgatattcatgggcagtttcatgaccttgctgaactatttcgaattggaagggaagtgtccagatactaattacttgtttaatgggggatatgtggacccgggttatttatcagttgaaacttgaacactttctgtgtcacttgaagtgcgatatccctaacgaattactattc

SEQ ID NO: 39057 - DNA, 290 bp, Glycine max
  Clone ID: LIB3139-085-P4-N4-D5
ggctcgagaaacctagctccatctccctccactcaccataacatggcatcagaagcaaatgctgccaacagcgaacgtctgtgtaaatgttagcaacaatggctacattagtgctaatgaccccttgaactggggtgcggcggcggaggctatggctgggagccacctcgacgaggtcaagcgcatgctagaggagtaccggaggcccgtcgtcaagctcggtggagagaccctgaccatctcgcaggtcgcggcgatcgcggcccacgaccagggggtgaaagtggagc

SEQ ID NO: 39058 - DNA, 391 bp, Glycine max
  Clone ID: LIB3139-085-P4-N4-D6
aaattccagcattcttcgtctctgatccatggcttacgttgagcgaggtgttgtcaaatcaaagcgagtcggtatggcgacttaaaacaatcactgattttttctgggccattgttaacttcataggcgtgtttttcgcaactatgttctctatggaaaagtcagatgcgtacagaaaacgttctgagggtaatgaaattggatagccttactcctagagtaggttctggcattactgtgttccaccagtatctaaccacccatacatgttcctatgagcttcaacaccattacacccttcttacacttcccaaccactttatcactgtccttcaccagcttctaccaacaagtcttacatatatgccgcacctccccctccttaccacta

SEQ ID NO: 39059 - DNA, 300 bp, Glycine max
  Clone ID: LIB3139-085-P4-N4-D7
ctcgagccgaatcggctcgagcggctcgagattgaatgtcccaagggtgagaaacttcctcgtcggaagtgtttgacaaacctaagacgcgctgcttcactattctccctatggagtttaatcttgtggtccgtcaaaagtttttaaattttgtgaggttcattatgaagaaaagggacaagcttagttgtcaagttggaatcaacccatactccatggaatggactggtttggccaatagattactgagtaagggcaatgatattctgtgttgcgattatgctagttttgatggtttga

SEQ ID NO: 39060 - DNA, 433 bp, Glycine max
  Clone ID: LIB3139-085-P4-N4-D8
actcgatcaactcaacacaaaccaaaactcaagctaaaattctcactgtctctctcatctcgagagcatgggatcatattcaatatcatttcataccaaacacatggctttggaagctctcaactcaccaacaacaaccgctccatcttttccctttgacgacccaactattccatgggcgaaacgaaaacgttcaaagcgttctcgcgaccatccttctgaagaagagtacctcgccctctgcctcatcatgctcgctcgcggcggcaccaccaccgtcaacaaccgccacgtcagccctccaccgccacagccacagccacagccgacaccagatccttccaccaagctcagttacaaatgctccgtttgcgacaagagcttcccctcttaccaagcgctcggtggacacaaggccagtcaccggaaactc

SEQ ID NO: 39061 - DNA, 399 bp, Glycine max
  unsure at all n locations
  Clone ID: LIB3139-085-P4-N4-D9
ccccttcatattcttcactctttcttcccttttccccctctgtgcatgttttncttccttggtaganggagaagagagcaacaagtaatgatggatgcgctgataaaggtgcagttcaacgcaccaaaaccataaaaagcgcttctttcgtcttatggcatgtctgaggaggaagaagcactgcgtcaaaggccaacatcgttgatttctttcccaccccatgacaattcttcgcttcttctgccccttctttatactcttcttcactccaatagcttttgttcaagcgttcaccggaacctatggtataaattatggtaccattgcaaataatattccttcaccctaataagttgtaactcttcttatagcaccaaaaataacgaatgttacaatcta

SEQ ID NO: 39062 - DNA, 372 bp, Glycine max
  Clone ID: LIB3139-085-P4-N4-E10
gctctttctcctttctcctttcaacaaacaacaaccaccaccgccctgtgtcgccacatatttagcgagacaattactacaacttgactaaacaaaactgtttttctttttttcttttttttttaccatggaactggctttgagtttgggagacacgtccaagtcttttacctttctcgacaaggccgcggtgaatttacccaccaacaaggacccacctgggttgttcagcttggcgccgagtttcgccgccaccgccgccgccgccgataaaagaagcgatgctgctgagagggagggtttttcttcaaatccaccggttcagctcgaccttcttcctttcttttccggttctcagaccccaacaacaac

SEQ ID NO: 39063 - DNA, 302 bp, Glycine max
  Clone ID: LIB3139-085-P4-N4-E11
ctcgagccgaatcggctcgagcggctcgaggattggaaaaagtttcctgtacaaaagcacaattgggtagtggaaaaaccttcaaatatgatataattggtgctggttcacattcttcaggagattttcctgaaaaggaagatcaagaaaaacccaaaaagattgataccagattgagacaaagaatagatcctcaatacaatgaggttcaggctcagatggaaacaaatttgtttaaattgtctcttgatgatgttgaaactcctaaaggttctatgttggatcttaaaaatttctcaatc

SEQ ID NO: 39064 - DNA, 396 bp, Glycine max
  Clone ID: LIB3139-085-P4-N4-E2
gggaatgataccctaactggacacatcatatctacaactattggaggcaaaagtgggtaacccaaacaggctatgagttacatggcagaacgggttgtaggaactggatcatttggaattgttttccaggcaaaatgcttggaaactggggaggcagtggcaattaaaaaggttttacaagacagaagatacaagaatcgtgaactacagttaatgcgtgtgatggatcatccaaatgtgatctctttgaagcattgtttctttttcactacaagtactgatgaacttttttcttaatttggtgatggagtatgtttcaaaggccatgtatagagtcttaaagcacttccagtaatgctaattaaagaatgcctatcatctaccttaaactttata

SEQ ID NO: 39065 - DNA, 454 bp, Glycine max
  unsure at all n locations
  Clone ID: LIB3139-085-P4-N4-E3
ctcgagccggagagagagagggagtcagagaaaccctaggtaagaagaaaagatgccggctggtcatggggtgagatcccncaccagagattccttctctcgtcctttcaggaagaagggaaccatcgccctcaccacatacctgagaacctaccacgtcggcgactatgttgacgtcaaggttaacggtgccgttcacaagggaatgccccacaaattctaccatggccgcaccggacgcgtctggaatgtcaccaaacgtgctgttggcgtcgaagtcaacaagcaggttggcaacagaattataaggaagaggattcatgtgcgggtagagcatgttatgccttcaaggtgcactgaggagttccgcctcaggaagattaagaatgatcagctaaaggccgaagccaaggtcaagggtgagaagatcagcaccaagagacagcctcagggt

SEQ ID NO: 39066 - DNA, 476 bp, Glycine max
  Clone ID: LIB3139-085-P4-N4-E4
cttgctttgacagaagaggaaaagatggaagtgattagaaatagagggattcctgctgatgttcttgcagagcgagctcatgaatttgaaaaacatgttgctcatgaaagcctcaaggatcaaattcctgctgttgacaagttgtattctactaaggttaataagtttgcaaaaattatgaaccttagacaaagtgttgttggtgatcttaaacttcttactgatgggaagttgtatgagggtaagcatattcctgtatctaatattagtgcaggggaaaatcatgtagttcaaatacccttaatggcacaggaggaaattctgtcttctagtgcaagtgaacttcagaactgcaatggtgagtaaaaatagcaagcctcaagctactgcaatgcatgtgggagctatagaaattatcattgatagtttcgcaagtcctgactgcaacatagttggtgcaatgcttttggttgata

SEQ ID NO: 39067 - DNA, 333 bp, Glycine max
  unsure at all n locations
  Clone ID: LIB3139-085-P4-N4-E6
ctcacccgcagggtttagagaaaatttaacaattagggttgcttctggtttgccgacccatggctcccagagctgatagttcaaagaaggctgatccaaaggcacaggccttgaaaactgccaaggcagttaagtccggtgctaactttaagaagaagaccaagaagatccgaacatctgttaccttccatcgaccaaggactttgaaaaaggataggaaccccaaatatccacgcattagtgctccacccaggaacaagcttgatcactatcagataatgaagtttcctctcacgactgagtctgcaatgaagaagatngaagacaacaaca

SEQ ID NO: 39068 - DNA, 421 bp, Glycine max
  Clone ID: LIB3139-085-P4-N4-E8
aagacattgtttggtttggttacttgctcgaatttcctcgaatcgctgtaatttgtatttgagtaggtagagccgcaacgcggaatctcttttctcgaactggctaactctcaggcaagtggttcggacgctgattccagcaacaagcggctggtgctcgcactgtatgacgccctaaactccggcgactccgacgccgtcgtcaagatcgtcgccgccgacctcgagtggtggttccatggtccgccctcacaccagtttttgatgcgcatgctcaccggcgactccgctgccgacaactccttccgcttccttccgcagtccatcgccgccttcggctccaccgtcatcgtcgagggctgcgacaccggcccgaacattgcctgggtccacgcctgcaccgtcacggatggggatatta

SEQ ID NO: 39069 - DNA, 447 bp, Glycine max
  unsure at all n locations
  Clone ID: LIB3139-085-P4-N4-E9
gaaatgttcaaatccatggacacagataacagtggaacaatcacattcgaagagttgaaagctggtctcccaaaattgggtactaaactttccgaatctgaagttaggcagttgatggaagcggctgatgtagatggaaatggaaccattgattacattgaatttataactgctaccatgcacatgaatagaatggaaagagaggatcacctatataaagcctttgaatattttgacaatgataagagcgggtacatcacaatggaagagttggaatctgcccttaagaaantataatatgggtgatgagaaaacaataaaggagatcattgctgaagttgatacagacaatgatggaagaattaactattatgagttgtagccatgatgaggaaagcaacccagacataacgcacataacccaaagacgtcgcaaataagctatgc

SEQ ID NO: 39070 - DNA, 357 bp, Glycine max
  Clone ID: LIB3139-085-P4-N4-F10
cacggtcccgctccctctccatcccatcacaaagaaaacagagattcggattattagcagatcggactcaaccgatgaagttgaagccgcagtgaaacaaaccagaataattgacgcatcatcaattagatcgagctgctagaaatgaaggatgaggacgggcttccgacgaccgccgccacgaagaaggaaagcatggattcgagtctgtttgggaaagggaggtacaaattctgggcgttagcggccatcttgcttctggcgttctggtccatgttcaccggcaccgtctcgctccgctggtccggcactctcaattccctttccagcgacatcgacacttccatccacgacgac

SEQ ID NO: 39071 - DNA, 358 bp, Glycine max
  Clone ID: LIB3139-085-P4-N4-F11
ggttgctccatcacctaatcacttccccacttcccctgtaaatgcacgtttagttcgcacaagggtgtaaaaaatggctgatgctgaggacattcaacctcttgttgttgataatggaactggaatggtcaaggcgggttttgcaggtgatgacgctcctagggccgtgttccccagtattattgggcgaccacgccataccggtgtaatggttgggatgggtcagaaggatgcttacgtgggtgatgaagctcaatcaaaaaggggtatactcaccttgaagtatcctatagagcatggcatagtcagcaactgggatgaatatggagagaattggcatcacacattttacaatgag

SEQ ID NO: 39072 - DNA, 349 bp, Glycine max
  Clone ID: LIB3139-085-P4-N4-F12
ctcgagccgaatcggctcgagtcacttttcttcatagcactcgaaaaacaacaactcatctcatggtattccctttctcactcagcacattctaaacagtagcaccatcaccaataataatggcatcatcctcatcaaccgttgctttgagaaccatctcctctttctctctgaaacctgccaccacaacaagatcattactcaacactagtacttcatccaccataaccctcttaccctttacatcagcaaactcatttctctccaaaaccctcaaactcaacacctcttccccacactctcacctttcactacccctcaacaagtctttcacttgtagaagccaggc

SEQ ID NO: 39073 - DNA, 302 bp, Glycine max
  Clone ID: LIB3139-085-P4-N4-F2
gcgcactcatcgtattaaaggaatgattaaaatggtggccacagttggtattcgtgagaatacaggtatagcattggcctgtgctatgaatagttcttttagggggcgcgccagttctgatatttacaccatctgctctcaagactgtgaattatggaatcctgcttgcacaaaagcaatgactatgtcatttaatccaaacccgtgttctgatgcatggagtttggaatttctgaagcgtaccggatttcattgtgatatcatttgtgtcactggatggactgccaccccaatgcaagatg

SEQ ID NO: 39074 - DNA, 410 bp, Glycine max
  unsure at all n locations
  Clone ID: LIB3139-085-P4-N4-F3
gccgaggtcaggaggagcactagctaagttcacaatttcaaaatggctaggggactaaagaagcatttgaaaagggtcaatgctcctaagcattggatgcttgacaaactgggtggtgcatttgcgcctaaaccctcatctggaccacacaaatcgagggagtgcctccccctcattcttattctgcgaaaccggctgaagtatgctctgacataccgtgaagtcattgctattctgatgcagcgccatgttcttgttgatggcaaagtcaggactgacaagacttaccctgctggtttcanatgtgttgtttcaatcccaaaaacaaatgagaacttccgcctgctctatgacactaaaggcccgatccgtcttcattccatcaaggatgatgaggcaaagttcaagct

SEQ ID NO: 39075 - DNA, 215 bp, Glycine max
  Clone ID: LIB3139-085-P4-N4-F4
ctcgaacttaatgaacctcatgacccactgaatatatatctctatctagaactggtcaaagccgcgaccaggaacgctctaatttccaagagcataccctaatacgctctctctgaacgatactagagcttcactacttaaaggcgtatattagagtcgatttcacaatacattcagtagataacgttagaagctttgggtgaaggttttaagga

SEQ ID NO: 39076 - DNA, 330 bp, Glycine max
  Clone ID: LIB3139-085-P4-N4-F6
aaattgcagcaatcttcgtctctgatccatggcttacgttgagcgaggtgttgtcaaatcaaagcgatcagatatggcgacttaaaacaatcactgattttttctgggccattgttaacttcataggcgtgtttttcgcaactatgttctcgatggaaaagtcagatgcgtacagaaaacgttctgtgggtaagaaatgggatggcggtgctcctggaggaggtcctggcggcggtggtggcggtggtagcggtccacgaggcccttctcgtggggtctcgacaatgttcgtgggctagatagtataaggggacgtgatcatagttcact

SEQ ID NO: 39077 - DNA, 412 bp, Glycine max
  Clone ID: LIB3139-085-P4-N4-F7
gcgctgcttcactattctccctatggagtttaatcttgtggtccgtcagaagtttttaaattttgtgagggtcattatgaagaaaagggacaagcttagttgtcaagttggaatcaacccatactccatggaatggactggtttggccaataggttactgagtaagggcaacgatattctgtgttgcgattatgctagttttgatggtttgattaccaagcaagttatgagcaagatggcagaaatgataaacagtctttgtggtggtgatgaaaaattgatgcgtgaaaggacacacctgctgttggcctgttgttcaaggatggcaatttgtaagaaagaagtttggagagttgaatgtggaatcccttctggatttccgctcacagttatttgtaatagcatttttaat

SEQ ID NO: 39078 - DNA, 482 bp, Glycine max
  unsure at all n locations
  Clone ID: LIB3139-085-P4-N4-F8
gggaatccacactctctgacccctccaaggcacaactcatccacaatggtgaggctttgggcgttgatggggtccgcggagatctgtacgatcatgagaagttggtgaaagctatcaagcaagtagatgtcgtcatatccacgctgggtcacctgcagcttgccgatcagctcaagatcatcgctgccattaaggaagccggtaatgttaagaggtttttcccttcggaattcggtaacgacgtggatcgtgtccatgccgtggaaccagcaaaatctgcattagctatcaaagcccaaattcgacgcagcattgaagccgaaagcatcccctatacgtacgtttccagcaactactttgcttgctattttcttcccacattagcacaaccaggtgcttttgctccacctncacccaaagacaaagtcattatcttgggcgatggaaatcctaaagcaaatttcaaacaaggaagagacatt

SEQ ID NO: 39079 - DNA, 364 bp, Glycine max
  Clone ID: LIB3139-085-P4-N4-F9
cttgaatcttcgttatccttcttttttctccttgaactcgaatattcagctatggcagatgaggtggttctgctagatttctggccaagtccatttgggatgagggtcaggattgcacttgctgaaaagggtatcaaatatgagtccaaagaagaggacttgcagaacaagagccctttgctcctcaaaatgaacccggttcacaagaaaatcccggttctcatccacaatggcaaacccatttgtgaatctctcgttgctgttcagtacattggagaggtctggaatgacagaaatcccttgttgccttctgacccttaccagagagctcaggctagattctgggctgactttgttgacaata

SEQ ID NO: 39080 - DNA, 411 bp, Glycine max
  Clone ID: LIB3139-085-P4-N4-G10
ccatcagtgggcgagttggtgaagcaaagtcaactcactggaaactggttgaactcgggtgtgggagggggcgaaacttgaagccaagctagggatgatcttggactcggtgggtcagttcttctccggcaaggaccatcttccttattgtgactctgacgtcgtagctggatgtgaaagagaggtcttggaggcagaaaaacaatcatctcaagagtatatgcaagactgtctcctgcgtttatcatgggctcttgttcactccaaacacccacaagatgtgcaccgtgggatagccatgcttgaatcatctttgcctgctacagaggacccactgcaacaaagggagaagctttatcttctggctggtggatactatagaaatgctgaattattcaaggagtagggatc

SEQ ID NO: 39081 - DNA, 404 bp, Glycine max
  Clone ID: LIB3139-085-P4-N4-G11
ccgcaccagtttcaccgcacgaatatcttgttgtttggagcgatccgagaaaaactctgtaaacatgtgggtttaccaggacctccttacaggtgatgagcttctctctgactccttccgttacaaggaaattgagaatggaatgctgtgggaagttgaggggaagtgggttgttaaaggagcagttgatgtagacattggtgcaaacccttctgctgagggtggaggagaagatgagggagttgatgatgcagctgttaaggttgttgacattgttgacacattcagacttcaggagcaacccggattcgataagaagcagtttgttaccttcatgaagaggtttattaagaatttgactcccaagctcgatgcagaacaacaggagttgtttaagaagcaca

SEQ ID NO: 39082 - DNA, 350 bp, Glycine max
  Clone ID: LIB3139-085-P4-N4-G12
gaaacatgaatttggaaacgcaaccaggaacggcgtcgtattggtgctacagctgcacccgtgtgggtgcgcctctctgtccaaagcaccatcgcctgcccccactgtcaaagcggtttcgtcgaagagatccgtgccggcgccggagccgaagcctcgccacgccatcgactaagtcctttccccgatgatcctcttttgctccggcgacagggcttccgccgccgtaggagagaagcttccggcaaccgctccccgttcaaccccgttatcgtcctccgcggccccggcgacgactccgccggcgccgaccacgacggcgtcagcacgttcgagctcttctacgacga

SEQ ID NO: 39083 - DNA, 355 bp, Glycine max
  unsure at all n locations
  Clone ID: LIB3139-085-P4-N4-G2
aaaaaattgttgaagttaacgcattggctaaggcattgtctggcaacaaggatgtggccttcttctctgcgtaatggtgcagctcangcttcaaggaagtcctctccaagagtgaccaacgaggctgttcagaaggctgctgctgcattgaagggttcagatcatcgccgtgcaacaaatgtcagtgccagactggatgctcaacaaaagaagctcaaccttccaatccttccaaccaccactattggatccttccctcagactgtagaactgaggagggtacgccgtgagttcaaggctaacaagatctccgaggaagagtattttaagtcaattaatgaggaaattcgcaaag

SEQ ID NO: 39084 - DNA, 239 bp, Glycine max
  Clone ID: LIB3139-085-P4-N4-G3
gcttgttcctagctataaactagtttatcgaaaaacaaatacaaaatagctggtgatcttattggatgcagacggtattttaacaattccaatccatatcaccttactaccagatcttccttaaactaatgacaacctcctatcattacacctatttgcaactctactccacaattagcaggcacactaaacactcacaaatcatccactcctaaactaccattactacaaactatatt

SEQ ID NO: 39085 - DNA, 391 bp, Glycine max
  Clone ID: LIB3139-085-P4-N4-G4
ccaaatgctgttctttcaatgtggagatattttgttggagatctcgtgtgttggagtttctaagatgacgtggtccgtacattaaatgtacagtctctttcttcatagcatttggaaatttggctgatgacaccatcaattttgaggcttttccccacaagctggtgcagtttggagagattcaggaaaaagttgtgttgaaattttcacaagaggaatttcttacagcttggtcaactcaggtgcgtcccgcaacgactctgttggctgatgggtgcccatatttgtatgctatggtgcatgatagttcagtgtctacaataccaggtgattttgtcattggtgttaattgacaaccataaacaatatgtgtgcatatgggctcaatcct

SEQ ID NO: 39086 - DNA, 243 bp, Glycine max
  Clone ID: LIB3139-085-P4-N4-G5
aagatagcagagcagaggcttttaggctctatcagaagactacttccgtatggattccttggttcaagtcgtgctgctttaggactcaaatctaaggatgcttgattttctttttccccttgttcgttagttgattgtaccaccatcttcttaattttgcctagtttgttcgattatgtaagagagccatgtgtgtgctccatgatttttgtataatatagcactttcctatagactatctca

SEQ ID NO: 39087 - DNA, 371 bp, Glycine max
  Clone ID: LIB3139-085-P4-N4-G6
caaggctattcggcggcatggtcatcgtaaagggcaaaccaccccttggtccgtccggctaaaactccggcgtcggctttgtctgcacccaccgcaccctaatggaccccgtcgtcctctcctccgtcctccgccgcaaaatccccgctgtcacgtactccgtctcacgcctctcggagatcctctcccccatccccaccgtgaggctcacaagaacacgcgacatagacgctgaaaagatcaaacgtgagttatccaaaggtgacttagtagtgtgtcccgaaggaacaacatgtcgcgaaccctttcttttaagattcagtggtcttttcgccgaactaactgaccggatagtgcccgtggccatgaac

SEQ ID NO: 39088 - DNA, 383 bp, Glycine max
  Clone ID: LIB3139-085-P4-N4-G7
tccttggtctttgcggaaacaaagtagatgctatcgatcatcacaacagtgaaattgacaaactgtgagaggaaatagcgttagagagggataatgtcagcaatgatcccaagtccatcatgcctgcggcatttgtttcgtttaaaacacgatggcgtgctgcagattgcgcacaaacccaacataccagaaacccaacaatgtggttgacagagtgggcgccagagccacgtgacatctattggtcgaatttggcaattccatatgtttccctcaccgtgagaaggttgaacatggcttgtgcattcctttttctcaccttcttttttatgatcccaattgcaattgtacaaaggcttgcaagtattgagggaatccgcaaa

SEQ ID NO: 39089 - DNA, 368 bp, Glycine max
  Clone ID: LIB3139-085-P4-N4-G9
gacgaacattccgctcccatcgcatctgtaacaatggaagcgcgccaggcaactcttggtcgacgagcgtgggaggaaattcggcaaaagagggccgcggagagattgagtaaaacctcttcgggaccagatctcacgcaggttcccagcacctccgagattgcgggaatgagcaagtccgagagcgcaaataagctctctgagacagatcttagtgctctattgtctcaattgaaaggactgcaaaagaagaacacggagttggaggaagaaaacacaaaaattagtttaaagcttcaaacgatggaaattgataatgagacaatgcacaagcaattaaatgatgtggaacaaaatacagtgccatc

SEQ ID NO: 39090 - DNA, 350 bp, Glycine max
  Clone ID: LIB3139-085-P4-N4-H10
gtggcatttgcccaaatttctaacacgccattctcctccttttcaatgctctgttcatccgtcgagcgggtcggctggaccatccttgccgccgtttgccgcggcatctccggccactctctctcatcgccattcagtgtattttggtttagttgcaaagttttagagttggattggaagattgtgaactaagaaagatggtgaagttgactatgattgcccgtgttactgatggtcttccgctagctgaaggactggatgatggtcgtgatcttaaagatgcagaattttacaaacaacaagtcaaggctttgtttaaaaatctctcaagaggacattatgaagcatca

SEQ ID NO: 39091 - DNA, 375 bp, Glycine max
  Clone ID: LIB3139-085-P4-N4-H11
gcacagccccgtgccgtcaactgtcaaccaccctccgtccacgcgcacgcgcacctcgccaccaggagcagcaactcgcaccagaacagcacctcccatcgttgacgcacaaagtagcaggccgtcgcactcgcgccctcccgtccacagtcgcagtcggaccagccaccagtgatgggaaagatgtgcaagaataagaaacaagctggtgggcatggacctccaagagagcaaactgatacacaggaacaagaaatggacataaggaagattatgaaagatgttgaaaattttagctactcacatatgtcatggaaagaacgcaaaaagattgaaaatagggaatgtgtttctcttggtgggaagccccaaaag

SEQ ID NO: 39092 - DNA, 303 bp, Glycine max
  Clone ID: LIB3139-085-P4-N4-H12
tgttgaagaggcttacaacaagctaatagttgaacttgagaaaagtgttcctacattggttggcgttgaatgtcccaaggatgagaaacttcctcgtcgcaaaatttttgacaaacctaagacgcgctgcttcactattctccctatggagtttaatcttgtggtccgtcaaaagtttttaaattttgtgaggttcattatgaagaaaagggacaaacttagttgtcaagttggaatcaacccatactccatggaatggactggtttggccaatagattactgagtaagggcaatgatattct

SEQ ID NO: 39093 - DNA, 373 bp, Glycine max
  Clone ID: LIB3139-085-P4-N4-H2
gctccaaatgatgaatacatcatgagcgggtctgatcgtggccgtatattcatctggaagaggaaggaagctaagctgctgagattaatcggaggtgatcaacacgttggctagtcacttgaggcccatgcacatatacctattctcgctacttgctgtatagaaaaaaatgtgaaaatctgggctcctctagggaatgatataccttcacttactgcgaatgtgaaagacataatggtgacaaacagacagggcagagaagaccgatcacgggtaacccttactcctgatgttataatgcatgttcttcgcctgcagaggcggcagacattggcgtatattgaaagacgacataatacggcagatatttgta

SEQ ID NO: 39094 - DNA, 68 bp, Glycine max
  unsure at all n locations
  Clone ID: LIB3139-085-P4-N4-H3
tctaccaaaatatccacttttcttttttacacactatctcaaancttaaaaacattgttctttttaaa

SEQ ID NO: 39095 - DNA, 448 bp, Glycine max
  Clone ID: LIB3139-085-P4-N4-H4
aagcaagtgcttctaaaggactatgttaccggttttcccaaagaatccgacatgaatattgtcgaaagtgccatggcattgaagcttccacaaggttccaatgatgtcttgctcaaaaatttgtacttgtcttgtgatccgtatatgaggaatctcatgaacaagcccgaaggccctcccaatagtcgtgcttacactcctggctctccattaataggatatggtgtgtctaaagtcctggaatctgggcacccagattataaggaaggtgatttagtgtggggctttaccaaatgggaagagtatagcttgttaccctcagctcaaatactcttcaaaattgagcacactgatgttccacttacctactacactggaattcttggtatgccaggagtgactgcatatgcaggtctatttgaagtaggatctcttcagaaaggagaaa

SEQ ID NO: 39096 - DNA, 385 bp, Glycine max
  unsure at all n locations
  Clone ID: LIB3139-085-P4-N4-H5
cttaaaattcgaatcgagctccagcccctctttattttctattttaccgactctcccaaanaattctacatggatattttcgaacgggcgatagcatttaaacttacacaatntttcaattatttcttcctcaaaaatttatacttttctatttatcccctcccttccacattcatattcataccatccaccattaataataaaaattcttacactaataaaccatccatttatacctatatacttcttcataaactactttaatcccttcacccaaaatttaattaacnttatattattaaaaatttttaaaattttaactacttacatatttcatctcataaacccataaaattttaaaattnatctcttttttttttactta

SEQ ID NO: 39097 - DNA, 427 bp, Glycine max
  Clone ID: LIB3139-085-P4-N4-H7
cttatctctctctctctctatctctcccgaattattgttcgttcgacccttttacttagtattccctgtttccggtattcgctcccttttttctgcattctggttttacttagatctctgtcccgcaccagatctggtgcagggtgagagggttgggttcattaattttgtatcaatcttccttctgagcggtaggcgtggggataccagagtcttttcgggaagcaagagagggttctctccgttttcaatagatctctcactgtcttcttttgagggggaagccggggcctcggcctcggcggctttcaaagcccccaccttcacagccctatcaacaaaaaaccctaaccctaattttttcttcattttctaattcttttttgatcgtcgccgccgccactagagatgcctgccctggcttgtt

SEQ ID NO: 39098 - DNA, 462 bp, Glycine max
  Clone ID: LIB3139-085-P4-N4-H8
gggcttgaaagcttggagagcatcgtgcggataaaagaggccgaagcgagaatgtaccaaaacaagggagatgaggcaaggagagaggcagaagggttccagaagatgatcaagacaaaggctgcacagatggaagaagagtatgcagaaaggattggcaagatttgcttgaatgaggcagaggaaaggaggaagaacaaatttgatgaactcaatgtcttgcaaaattcccactacgattacttcaacatgaaaagcagaatgcaagatgagatccatggtttgttgaagagaatggaagcaacaaagcaccaacgggtttaatatacatattttcttcttcttcttgattaatgttttactgtctagaacactagtaaaatgtgtgtactttattgatctagtgccgatttgtattttgcttggttttattaattaaaaaatgtaccctttttattgtta

SEQ ID NO: 39099 - DNA, 359 bp, Glycine max
  Clone ID: LIB3139-085-P4-N4-H9
ccgaggagttaccctttcttttcttttttcttttttctctttcctcaggctacttaaaactcccaccagggatggcaggtttggctccagagggaacacaattcgatggtcgccaatatgatgctaagatgagtgaattgctttccactgatgggcaagaattcttcacctcttatgatgaagtgtatgacagctttgatgcaatgggattgcaagagaatcttctgcgaggcatatatgcttatggttttgagaggccttctgctatacagcaaaggggaattgttcctttctgcaaaggacctgatgtgattcaacaggctcagtctggaacaggaaagacagcaacattttggtct

SEQ ID NO: 39100 - DNA, 424 bp, Glycine max
  Clone ID: LIB3139-002-Q1-N1-A10
tgaatatgtcaagccttactttagtggttctaaattgaaaagctttctagctggtcataatatcaccattactgatggtattgacaaaactagtgcaactttgcaatttagaaagttagcagattgtgattttctcaagagaaactttaagcagatgtctaatgttttatgggtggctcctgaggacaaggcgagtttatggtcacaacttcattatgtttcgtgcaataatctggaaatgcaagaagcttatcttgtcaatctcgtaaatgtgttacgagaattgtatttgcacagtccagaggaagctcgccaattgagaaggaaagctctctctcgtattgaatggctgcaaaaagctgatgtgcctaccatagcacagattgaagagttccattcgatgcagaggatgatgaatgctcct

SEQ ID NO: 39101 - DNA, 422 bp, Glycine max
  Clone ID: LIB3139-002-Q1-N1-A11
ctcccctttgccgctgttgttgttgctgcaccaccgaacaacttcccctgtaaatcgcgtttcgtttgtgcaaggttttaaaagatggctgatgctgaggacattcaacctcttgttgttgataatggaactggaatggtcaaggctggttttgcaggtgatgatgctcctagggccgtgttccccagcattattgggagaccacgccatactggtgtaatggttgggatgggtcagaaggatgcttacgtgggtgatgaagcccaatcaaaaaggggtatactcaccttgaagtatcctatagagcatggcatagtcagcaactgggacgatatggagaagatttggcatcacacattttacaatgagctacgtgttgcccctgaagaacaccccgtacttcttaccgaggcaccactcaa

SEQ ID NO: 39102 - DNA, 410 bp, Glycine max
  unsure at all n locations
  Clone ID: LIB3139-002-Q1-N1-A12
ctcttcggtcagatacatgaatttggaaacgcaaccaggaacggcgtcgtattggtgctacagctgcacccgtttcgtgcacctctctgtccaaagcaccatcgcctgcccccactgtcaaagcggtttcgtcgaagagatccgtgccggcgccggagccgaagcctcgccacgccatcgactaagtcctttccccgatgatcctcttttgctccggcgacagggcttccgccgccgtaggagagaagcttccggcaaccgctccccgttcaaccccgttatcgtcctccgcggccccggcgacgactccgccgccgncgaccacgacggcgtcagcacgttcgagctcttctacgacgacggcgacggcaccggcctccgccctcttnctcccaccatgtcggagttgc

SEQ ID NO: 39103 - DNA, 418 bp, Glycine max
  unsure at all n locations
  Clone ID: LIB3139-002-Q1-N1-B10
gttatcctcaattttcaatggctcaatcccattctggaaaaaggtcttccatgacttcaatactcctcctgtttatgcttcttatcagtaatacaggcacaacaggtgcacaatctggtgtatgctatggaagagttggcaacaatctgccatcgccacaagaagtagtttccctttttaaacagtacggcttccaaaggatgagaatctatgatcgaaaccatgaagtcctccaagctctgagagattccaacattgagttgctgctagatcttcctaacatcgacctccaatatgtagcttccagccaagataacgcanacagatgggtgcaagacaatgtcagaaacttttggaatgtcagattcaggtacattactgtgggaaatgaagtgaagccttgggactcatttgcaca

SEQ ID NO: 39104 - DNA, 419 bp, Glycine max
  Clone ID: LIB3139-002-Q1-N1-B11
attcaagaccggcatggctaatgaagaggaacagaaaaaccagctcttcggcatcaaagatctcggtcacaagactctccttcagagtgatgcactctatcagtatatacttgaaaccagtgtctatccaagagagcacgagtgcttgaaagagatacgcaagatgactgcaaaacacccactgaacatcatggcaacaccagcagacgaaggacaacttctgagcatgcttgttaagctcacgaattcaaagaacgccttggaaattggtgtattcactggttactctctgctctccactgccctggctcttccccctgatggaaagatcttggctttggatgtgaatcgcgaatactatgagttaggattgccaataattcaaaaagctggagtggctcacaagattgatttcagag

SEQ ID NO: 39105 - DNA, 424 bp, Glycine max
  Clone ID: LIB3139-002-Q1-N1-B12
caattctcaaatccaagctcgggaacagagaaggagaaagagaatggacgccattgattctgtgttcgatccgttgagagaattcgcaaaggacagcgtgaggctcgtgaagcgctgccacaaacccgatcgcaaagaattctccaaggttgccgtgcgtaccgcaattggtttcgttgtgatgggattcgtgggtttcttcgtgaagcttattttcattccaattaacaacatcatcgtcggatctggttaggatgaagggtactacaatcgcctcaggaattcaggttgtcaagcaaaagtaggcagaaagagttcccacatcaatagatcattctatgccctcaatcttagttctgttttcatttttgtttttttttctcatctcaggaagtgttacttactttagacgtaaaattttatg

SEQ ID NO: 39106 - DNA, 423 bp, Glycine max
  Clone ID: LIB3139-002-Q1-N1-B9
gtttgttgttgtaactcgttcttcttcttttgttgttctgtgtgtgtgtttgttttttctctcacctgaaaatgtcttgctgcggtggtaactgtggttgcggaagctcctgcaagtgcggcaacggctgcggaggctgcaagatgtacccagacttgagctacactgagtcaaccaccaccgagaccttggtcatgggagtggcacctgttaaggctcaatttgagggtgctgaaatgggtgtgcccgctgagaacgatggctgcaaatgtggaccaaactgctcctgcaacccctgcacttgcaagtgaggtgttgggagagcaagcttcaagcagagatagcccttaattaggaataatgataaactattaatgtgtagctaaaaacttatgtattatgtctgtgatggttttcgtgcac

SEQ ID NO: 39107 - DNA, 390 bp, Glycine max
  unsure at all n locations
  Clone ID: LIB3139-002-Q1-N1-C10
atcgaggagggtattttcgaggtgaaggccactgctggtgatgctcacttgggaggtgaagattttgataacagaatggtgaaccattttgttcaggaattcaagaggaagaacaagaaggatattagtggaaatgccagagctctgaggaggttgagaacagcatgtgagcgggcaaagaggactctctcttccactgctcaaaccaccatagagattgattccttgtacgagggtattgacttctacacaaccattacccgtgcccgttttgaagagctaaacaagaacaacatcatggacggtactcttatccatcttggcatcccgcaaacacttctccacggtctccatgcacttnctgaataaatccatgtttaagcttttaaa

SEQ ID NO: 39108 - DNA, 330 bp, Glycine max
  Clone ID: LIB3139-002-Q1-N1-C11
cccatactccatggaatggactggtttggccaataaattactgagtaagggcaacgatattctggttgcgattatgctagttttgatggtttgattaccaagcaagttatgagcaagatggcagaaatgatataacagtctttgtggtggtgatggaaaattgatgcgtgaaaggacacacctgctgttggcttgttgttcaaggatggcaatttgtaagaaagatatttggagagttgaatgtggaatcccttctggatttccgctcacagttatttgcaatatcatttttaatgagatgctcattatatatagctatgaaaaattact

SEQ ID NO: 39109 - DNA, 424 bp, Glycine max
  unsure at all n locations
  Clone ID: LIB3139-002-Q1-N1-C12
aagaggccctaactagctaactattttctttctttcttcttcgccgggaaagatgggagtggctgtttatttggacaccattttcgtccctttgagtcttttcatcacagtgggttaccatgtctatctttgccacaccatcaagaacaaaccttcacgtacaacttatggaatcagtaagaagagaaggacagattggagtctcaacttaaatcaggtaattgcatagatcaattgtgcatgtaatatgtttatacatggaatttattctcagagtaattgtttggtttcatgttttcagatatgatttttcacgtgtcagaacagaacatgattttcagaaattaaaaataataattaactttcacatctcanacatatantaattttctatttccaacgagttttcaaacacacaatatca

SEQ ID NO: 39110 - DNA, 425 bp, Glycine max
  Clone ID: LIB3139-002-Q1-N1-C9
gtgggtatggctctttggcactagacataagtggtggacaccttgcagctggtgtggattctctcttcaaaaatggagcaggttgtggtgcctgctttcagataagatgcaagaacccaactctatgtagcaaagaaggtaccaaagtggtattgactgatcttaatcacaacaatcaaactgattttgtgctaagcagcagagcctttgcgggcatggctcaaaagggtatgggccaacaaatactgaagcttggcattgctgaaattgaatacaagagagtaccttgtgattacaaaaatcagaatttggccgttcgagttgaagaatcaagcaagaagcctgattacttggcaattaaacttttgtatcaagggggacaaacagagattagtagccgtgatgtggctcaagttgggtcttca

SEQ ID NO: 39111 - DNA, 421 bp, Glycine max
  Clone ID: LIB3139-002-Q1-N1-D10
taacacttcacaatctctgtttcagctttctctcttttctacggtggcttgcaccaccgtcgtgttgacgctagtcgccgcattgttggtaacctccgtcgtggctcagtctccggcgtcctcaccagctctgtctccaaagcgcacccccgtcgccacacctcagaagtctccctcgccggcgatttctccctccgccgtgtcgccgtcgtcctctcctcccgctccggtggtgaacactccgtctccgtcaccaaactcagtcgactctccgccatctcctccgcagtctccgtccgtgtcaccagccggtgttccctccgtcactccttcagcaatctccgctcctcccactggagcaccggctccctctcaaaacggtgccgctttgaacagattcactgttgctggatctgctgct

SEQ ID NO: 39112 - DNA, 427 bp, Glycine max
  unsure at all n locations
  Clone ID: LIB3139-002-Q1-N1-D12
agatcaccaaagtacttgtgagtgtatacccaacacaaactaagatcaacatggactactacacccgcgtttcagaagttgagagggaacctatcatggagtattccacaccacgaccaatgatgggcaactaccaccaccctaatgctcaccgtgtcctcaacgagaagattgtttatgaggaggatgtgattggaggatcccgccacaaccacatgcatcaccaccaccctgagactcatgagagagtcaaggtggtggagtatgaacaagttcctgagaggcgcgttgtctatgaagagaaagttgcttatgacaacgatcgttactactctccaaggtattgaaattggacaaatggaagaacacctataacgtgttatcatgtggctntttattaggcaggctacctagtataccaaaagca

SEQ ID NO: 39113 - DNA, 329 bp, Glycine max
  unsure at all n locations
  Clone ID: LIB3139-002-Q1-N1-D9
cacatatcatcatacttagatagtcagatacatcacccaataggtaaattaaatacatgctagcactttaacagtactcctttctctaatatctctctcatattttcctttctgcggatattcagctaattaaactaagtcactaagatgactgagggaaagctagttgaagctgcagaagctcataagacacttcaggatttcgatcctccaaagaagcgcaaaaggaacaagtatgcttttgcttgtgctatgctggcctccatgacttccatctngcttggttatgatattggagtgatgagtggagcagccatatacataaaaag

SEQ ID NO: 39114 - DNA, 430 bp, Glycine max
  Clone ID: LIB3139-002-Q1-N1-E10
ctcttcttcaattcatatcatatcaattagatttagagctaaacataaaattgttttcacataccatggacaacaacaatgacttttggaaattcagtgaccagttgaggcttgaatctggtttggccaatctgtctctgaatgattattccatttggagcaacagctacagctccaagaggcctgatcagaggaggaactttgatgtcaagggcagtgatttcaacaacaacaacaactcatcaaaggcttttgatgatgatttcaatgatgggtggaagatcaccaattccaatggaccccttttctctatgcctcacaacaacaacaacaacactcttgaagttggaggcttcaacaagggaggaggaatctattccaacaccaacaccaccatttcctcctaccatcctaataaccttaacaacaa

SEQ ID NO: 39115 - DNA, 418 bp, Glycine max
  Clone ID: LIB3139-002-Q1-N1-E11
ccccccttctctctctctctctctataaacttctctctcgtcggctctttccttctcactctctctctctctcaccccactcactcactctcttactctctgcatgcttctgcttcttctctcgctctgattccgcggaatcaattcaaatcagcttctgggaatcgaatctcagatctcggagatcagaatggtggatccaactggaaaaggatcggaggttgaagttgaggactcaaactcaaaccctaacgctccttcctcagggaacagtccgagcagcaacaatgagcagaagaaaacctgcgccgattgcggcaccaccaagacccctctctggaggggtggtcctgcaggacctaagtctctgtgcaacgcgtgcgggatcagaagcaggaagaagaagagagcgatcctg

SEQ ID NO: 39116 - DNA, 429 bp, Glycine max
  Clone ID: LIB3139-002-Q1-N1-E12
gcggaatgataaaccggattgctggcgtgttcgcgaggagaggatacaacatcgagtcgctcgccgttggcctcaatgaggacagggcgctcttcaccatcgtcgtgtcagggactgataaggtgctgcgccaagtcatggagcagcttcagaagctcgtcaatgtcttaaaggtagaggatctttcgagggaaccgcaggtggaacgtgaactgatgctcataaaagtgcatgcggatccgaagcaccatgcggagttgaagtggttggtggacatcttcagagctaagattgtggatatctcgcaacattcggtgacaattgaggtcactggagatccagggaagatggctgcggttcaaagaaatttcagcaagtttggaattaaagagatagccagaactggaaagattgcattaagaagggaaa

SEQ ID NO: 39117 - DNA, 398 bp, Glycine max
  Clone ID: LIB3139-002-Q1-N1-E9
ctatcacactaatatcattcgaaaatctatcttcctcacgggtgttctcttacaccctactatattctccaactctcaaaaacatcccttatacataaacaacaccacacgctttcacatacaccatagacattactatgattactcctacatccatcaaacacaagcattatgactagtatatactttgcaactcacacgtatctagaactacacataatcaccaccaccacaaaatcttttctcaacaccatctaccaacaactatcgacaacatcactgcacacatacattaacttcaagcttcacatgaaaaaatgacaactcttctataataaaaccacacaatctatatacacaaatatttggaatcacatactataaacatcacgtactta

SEQ ID NO: 39118 - DNA, 428 bp, Glycine max
  Clone ID: LIB3139-002-Q1-N1-F10
gtccatatttgtatgctatggtgcatgatagttcagtgtgtacaataccaggtgattttgtaattggtgttaagttgacaaccataaacaatatgtgtgcatatgggctcaatcctggtatttcaggttctcgtcttttgggcaccattcctcagtctatttcacagcaaactgtttggaatcaaatggcaacagtgagaacaccattgaattttgattctagcaagcagagcttttgtcaattttctattgaccttctcggtggaggaattttagtggacaaaactggagattggatcacacttatacaaaattctccaattagtaacttgttgagagttgctgcttggaagaaaggctgtttaatggttaagattgtgatgtctgggaatgcagcagtcaaaaggagtgattgggcctcattggta

SEQ ID NO: 39119 - DNA, 416 bp, Glycine max
  Clone ID: LIB3139-002-Q1-N1-F11
cacaactcactaacatcacaacttctctctttctacacaaataactccttctcagtgtgagcagttgataagagagatgatgatcaacgtgaaggaatcgaccatggtgcggccggcggaggaggtggcgcggcgggtggtgtggaactccaacgtggacctggtggtccccaatttccacacgcccagcgtctatttctataggtccaatggcgcccccaactttttcgacggcaaggttatgaaggaggcactgaccaaggtgctggtgcccttctacccaatggctgggcggctcctgcgagatgacgacggtcgcgtcgagattgactgcgacggtcagggggtgcttttcgtggaggccgacactggcgccgtcatcgacgatttcggcgatttcgctcccacccttgagc

SEQ ID NO: 39120 - DNA, 433 bp, Glycine max
  unsure at all n locations
  Clone ID: LIB3139-002-Q1-N1-F12
tcggaacgttgctataaacgttgttgttttcagataaacacgtgactcactatctatctatcaatcgatatctccgagttcagccgaaccaaactccgaagctatggcagagctccaaaccaaggttgaacctgttacggtcccggctccggtggatcccgagccaccgctagctgaggctccgccgctcgagaagaaagcggtggcggtgccaccacctgttccggctgcggcagaggaaaccaaagctcttgttattgtggagaaggagaaggagaatgagaagataccagaacctgtaaaaaagaacgcctcaggtggatcccttgatagagacattgctcttgcagaaatagagaaagagaaacgattgtctaatgtgaaggctngngaagaaagtgaaaaatccaaagcagagaataaagcccaaaag

SEQ ID NO: 39121 - DNA, 53 bp, Glycine max
  Clone ID: LIB3139-002-Q1-N1-F9
gtacttaagaaacccgataaacatgtagctatatattgtgagtgtttctgtgg

SEQ ID NO: 39122 - DNA, 433 bp, Glycine max
  Clone ID: LIB3139-002-Q1-N1-G10
gcttattctctcgcattccgtggagatctagtgcttctgctggaagacctcgctgaaaattagggtttcgattcggaggtagacgaagatgttcggaagggctccgaagaaaagcgacagcaccaggtactacgaaatcctcggcgtttccaagaacgcttcgccggatgacttaaagaaggcttacaagaaagccgccattaagaaccatcctgacaaaggcggggatcccgagaagtttaaagagcttgctcaagcctatgaggttctgagtgaccctgagaagcgcgagatttatgatacatatggagaagatgctcttaaggaaggaatgggtggtggtggcggtggccatgatccatttgatatcttcagttcattctttggtggaagtccgtttgggtcaggtggtagcagtagaggacggaggcag

SEQ ID NO: 39123 - DNA, 422 bp, Glycine max
  Clone ID: LIB3139-002-Q1-N1-G11
tagggccgaagcccatccctatgaagcacgtgggcatgcctccgaagcccacgaagctatacagaggggttcgacagaggcactgggggaagtgggtggctgagattagactcccgaagaaccggaccaggctatggctgggaaccttcgacaccgccgaggaagccgctctggcgtacgacaaggccgcgtacaagctccgaggtgacttcgccaggctcaacttccccaacctccgacaccagggttcctccgtcggtggtgacttcggggagtataagcctcttcattccgccgttgacgccaagcttcaggccatttgcgagggcctggctgagctgcagaaacaggggaagaccgagaagcctccgaggaaaacgcgatccaaactcgcttctccgccagagaacgacaacaacaac

SEQ ID NO: 39124 - DNA, 422 bp, Glycine max
  unsure at all n locations
  Clone ID: LIB3139-002-Q1-N1-G12
gtgactcgttcttcttcgtcgttatcttcttcttttgttgtttgtgtgtttgttttttctctcacctgaaaatgtcttgctgcggtggtaactgtggttgcggaagcgcctgcaagtgcggcaacggctgcggaggctgcaagatgtacccagacttgagctacaccgagtcaaccaccaccgagaccttggtcatgggagtggcaccagttaaggctcaattcgagagtgctgaaatgggtgttcccgctgagaacgatggctgcaaatgtggagctaactgcacctgcaacccctgcacttgcaagtgaggtgttggagagctaaagcttcaagcagaaatggcccttagaaataatgataaacactatatgtagtttcaaaacttcaaaattatgtagtatgtattatgtngcactctg

SEQ ID NO: 39125 - DNA, 417 bp, Glycine max
  Clone ID: LIB3139-002-Q1-N1-G9
gggtgtttgagttggctcgattcacaaccgagtcatagtggggtgtttctgagtttcggaagcatggggagattctcgaggactcagttgagagagattgctattgggttggagaagagtgagcaaaggttcttgtgggtcgtgaggagcgagttcgaagagggtgactcgggggagccaccgagtttggacgagttgttgccagaagggtttttggagaggacaaaggaaaaggggttagtggtgagggactgggccccacaggcggcgatactgagtcatgactcggtgggtgggttcgtgactcactgcgggtggaactcggtgttggaggcggtgtgtgaaggtgtgccaatggtggcgtggcctctctacgcagagcagaagctgaataaggtgatcttggtggaggaaatg

SEQ ID NO: 39126 - DNA, 418 bp, Glycine max
  Clone ID: LIB3139-002-Q1-N1-H9
cgcccgaatatggcaccctcaatctccgacgaaatgccaaggaccaccacctctctcctccgccgcaaccggtggctcccctccagcatcaaactgaaaacaacccttttctcagaactctccggcgcggtgggtgacctaggcacctacatccccatagttctagccttatccttagtgaacaacttggacctcaccaccacactggtcttcactgctctctacaacatcgccaccggtctcctcttcggcctccccatgccggtccagcccatgaagtccatcgccgccgtcgccatctccgcagcgccccccctcaccatcccccaaatctcggccgctggcctctccgtcgccgccgtgctcctcctcctcggtgccaccggcctcatgtccgtcctctaccgctacctccccc

SEQ ID NO: 39127 - DNA, 298 bp, Glycine max
  Clone ID: LIB3139-001-Q1-N1-A1
ctcgtggtcgttgtcgtggtcgcggccgtcactctccatccactgcaccggttgttgttagatatgaggaatctgagcgcggtagtggcagtaaggagaagaattcatcagctgattctgattctgttgaaatgagagtgggaaagttaagtattggcgatgataagccggcagcatcagggttcgatatatgtccccctaaacaagctggaagcgttgttctgaaacctcctttgtttttaaagaacagagaaaagagacagtctagtaatagccgtagcaatgtggtcgtatcatt

SEQ ID NO: 39128 - DNA, 56 bp, Glycine max
  Clone ID: LIB3139-001-Q1-N1-A10
caagaaacttgtacattttatagacttaaatatttcagtagtggttccatttctcc

SEQ ID NO: 39129 - DNA, 199 bp, Glycine max
  Clone ID: LIB3139-001-Q1-N1-A11
gtttgtcgacaacatcttcgacggagcgtactccatcgaggcggcgtgtcacgctcccaagctggaagaagtgtacgccgaaatcttccgagttctgaaaccgggggcgctctacgtttcctacgagtgggtgacgacggataagtacagcggcgatgaccctgaacacgtggaggtcattcaggggattgagaggggt

SEQ ID NO: 39130 - DNA, 412 bp, Glycine max
  Clone ID: LIB3139-001-Q1-N1-A12
gccatttgggagttaggttctgcacgctctgcttccagcgagtgttctttcttcgtttcaacaccttaatttgcacacgctgcttcttcagcttgagaaatggcacaagaaacctttctattcacatctgaatctgtaaacgagggtcaccccgacaagctgtgcgaccagatctctgatgcagtgctcgatgcgtgccttgaacaggaccctgacagcaaggttgcctgtgagacatgcaccaagaccaacatggtcatggtctttggagagatcacaaccaaggccaacgtagactatgagaagattgtccgtgacacatgccgcgaaattggattcatctctgatgatgttggtcttgatgctgacaaatgcaaggtgttggtcaacattgagcagcagagccctgata

SEQ ID NO: 39131 - DNA, 371 bp, Glycine max
  Clone ID: LIB3139-001-Q1-N1-A2
aaaactcccgttttctctctctgtttttccatggccatctgagcgaacttttcttgattctctctctcagtttttgctattctgagtgatgggtatgccctgccgctgttcccacacctcccacatcactgaaatcatcatcaccagcttcttccgccacaagtcttaaattacaacaatttccctcaattattcatcaaccaaccaccttaatagccttttccaatggttccttaaagatccaacttggtcggagtaaacatggcggctagtggaagttccttttccaacatcactagcttccttcgcaaccaacatccctcttccaacctctcgattcttctctctttctctctgctccttcaattttg

SEQ ID NO: 39132 - DNA, 376 bp, Glycine max
  Clone ID: LIB3139-001-Q1-N1-A3
atggggacgaggttttgaggtagtggaaatagagaggctggaggagagtttgttggagaagaacgagcgagaagacgaggaagcggtgctttatgcggcgtcgtttcgggaaatggaagagggtttcgtcaagtaccaaacggtgcagtgggtgctttactcggtgttgctgattttggcgtggggcattgaattctgatgctgctttatcttcctgtgagaaggtttatacttaggaaggatgttcgttccagaacgctctatctcactccgaatgccattgtttacaaggttacgaggccggtatcgtttccgtgctttggagtgctgaagaaggagatacacgttttgctgcactctgtggcagatgttgtga

SEQ ID NO: 39133 - DNA, 368 bp, Glycine max
  Clone ID: LIB3139-001-Q1-N1-A4
gataaatctctcataaccatttctaaatataatattgcgtatatgcatgatatcatacaagaaatgggttgggagattgttcgccaagaatctattgaagaccctggcagtcgcagccgattatgggatgccgatgacatttatgaagtattaaaaaataataagggaactgagtccataagaagcataagagcagacttgtcagtaattagggagctgaagttaagccctgacacatttactaagatgagtaaactacaatttttgcattttcctcatcaaggttgcgttgatcattttcctcacaggcttcaatctttttcagttgagctaaggtattttgtttggaggcatttcccactaaaatc

SEQ ID NO: 39134 - DNA, 421 bp, Glycine max
  Clone ID: LIB3139-001-Q1-N1-A5
tgatagttcagtgtctacaataccaggtgattttgtcattggtgtcaagttgacaaccataaacaatatgtgtgcatatgggctcaatcctggtatttcaggttctcgtcttttgggcaccattcctcagtccatttcacagcaaactgtttggaatcaaatggcaacagtgagaacaccattgaattttgattctagcaagcagagcttttgtcagttttctattgaccttctcggtggaggaatcttagtggacaaaactggagattggatcacacttatacaaaattctccaattagtaacttgttgagagttgctgcttggaagaaaggctgtttaatggtcaagattgtgatgtctgggaatgcagcagtcaaaaggagtgattgggcctcattggtacaagtgtttttaacaaac

SEQ ID NO: 39135 - DNA, 340 bp, Glycine max
  Clone ID: LIB3139-001-Q1-N1-A6
ggcgccggagccttatacgccgcttctccgctcccgcaccgatgccggccgaggtcccgcccccgcgctggcgctccttctcggccgcgccggccgccgtggcccatccatgctggtacgtgagacggcggctcgtgagctcgaggagcgccgcgctgactggggctactccaagccggtggtggcgctcgacatgtcgtggaacatggccttcgtggtcgtctcggcggctatgctcgcatgcaccaccttcgagcacccgaccacgccgatccgcgtgtggatcgttgggtacgcgctgcaatgcctcgtgcacgtgttgctcgtgtggctcgagtac

SEQ ID NO: 39136 - DNA, 119 bp, Glycine max
  Clone ID: LIB3139-001-Q1-N1-A7
ctatagcccattttctacgctaccaagccattccctcatggggggcaatttctgtcccttcatcgctatatctgcattttgtctcaacgctactttatcatgatctcaaattttgatca

SEQ ID NO: 39137 - DNA, 311 bp, Glycine max
  Clone ID: LIB3139-001-Q1-N1-A8
cggctcgagcgcgtcctccgtcttaccggtttcaacgaggcggcggatattggaaaccgccgccgttttctgggcctaacacaacttcttgaaccgcttgcggaacccttcggcggttaattcggcaaaacaatcaaaaggtttatcggttcggtttcgaacaatgcttctgatcccgattgggaccgtgccacaggtcaagcgcttctcgcgaaaatgggaacggatttcactgcgcatacacactgggctgggtgcgctcaagaggaactcgcaagtgccggtgaaggacttgagaagtatgttatgac

SEQ ID NO: 39138 - DNA, 429 bp, Glycine max
  Clone ID: LIB3139-001-Q1-N1-A9
cgccaaccttcatttatctctcacattcagacaccaaaatagtggtgtattaaaaaacaaaaaaatgtcatccactgctagcttgccttatcgggctccaacctgcttcaacatcgttcatcacacaaagaagcaccacgcaatgaggaacagtttcttgagcaataagcacaacaatgtgagagtgatgaaaggttggagaggaagacatggtaacactaacaacacatccaaaagggtaagaattgtgcaccgtatagggttagcggacttcataggtggagacttgataaagtttgatcttggacattggctttcacatgttgaagagcacaaagcacttgcaatataccctcctcatgaaggaggctatgaaggccgctacttgtcgcgtctcaaacgccaagggtactatttcctcaaccttac

SEQ ID NO: 39139 - DNA, 425 bp, Glycine max
  Clone ID: LIB3139-001-Q1-N1-B10
gacgcgctgcttcactattctccctatggagtttaatcttgtggttcgtcagaagtttttaaattttgtgaggttcattatgaagaaaagggacaagcttagttgtcaagttggaatcaacccatactccatggaatggactggtttggccaatagattactgagtaagggcaacgatattctgtgttgcgattatgctagttttgatggtttgattaccaagcaagttatgagcaaaatggcagaaatgataaacagtctttgtggtggtgatgcaaaattgatgcgtgaaaggacacacctgctgttggcttgttgttcaaggatggcaatttgtaagaaagatgtttggagagttgaatgtggaatcccttctggatttccgctcacagttatttgcaatagcatttttaatgagatgctca

SEQ ID NO: 39140 - DNA, 208 bp, Glycine max
  Clone ID: LIB3139-001-Q1-N1-B11
aatacccacactgtcgttgaggtgattcccgtaatccatcaggtggtgcattatccgattatcagctcatgcggccacgtgcacggtacaagaaacttgcttaagaatggacctttgccttgaaaagcctttaaaattttttttggaaggttcaaacttgcttgctttgaaaagttaaaaacaaatcttggtcaagactttgatggtt

SEQ ID NO: 39141 - DNA, 419 bp, Glycine max
  Clone ID: LIB3139-001-Q1-N1-B12
ctcaagagaaactttaagcagatgtctaatgttttgtgggtggctcctgaggacaaggcgagtttatggtcacaacttcattatgtttcgtgtaataatctggaaatgcaagaagcttatcttgtcaatctcgtaaatgtgttacgggaattgtatttgcacagtccagaggaagctcgccaattgagaaggaaagctctctctcgtattgaatggttgcaaaaagctgatgtgcctaccatagcacagattgaagagttccattcgatgcagaggatgatgaatgctcctgattcaaatgataatattgatctactgttgagcattgatttgttgggtttacaaggagcaagtaaagcttttccaaacaagattgtttttgatgataagcttgtgttggctaacacacaagaattctt

SEQ ID NO: 39142 - DNA, 368 bp, Glycine max
  Clone ID: LIB3139-001-Q1-N1-B2
cgtttcgtgtaattttatcttttaaaagaaaagaggaagtataggagtgacgtggcatgcggatagagagccatgaataccaaaacgatgcgtctcccccctcgtcgcgtgttgacacctactggcacttccaataagcgcaaagagagagatgaaacattcgacaggcccaagcccatacccgccccacccctcaataaattacccaagcccgataggcccatctctttgcccctcaccgaggcgaatccgtcgtccaatcaactgctggcgggctacttggcccacgagtttctcacgaaagggactctactgggccagccgtgggccccacccaaaggaaagtcgttgtccacatcgacggagga

SEQ ID NO: 39143 - DNA, 244 bp, Glycine max
  Clone ID: LIB3139-001-Q1-N1-B3
ggcttccttaagtctccttagtgctgctccttgcagctctaatgggatcccctcaagttcttgcaaactatgagaatcccccagtgtacaagccttccactgagataccaccattttatatgcccccacttgagatgcctcctgtttacaaacctccacttgaaaaccccccaatttattagcctccagtagagaagccaccattgtacaagcccacagttgagaaacccccagtgtacaagcc

SEQ ID NO: 39144 - DNA, 359 bp, Glycine max
  Clone ID: LIB3139-001-Q1-N1-B4
cggctcgagctctcttcttcagtggtggaagctactagaacacgagtttgttgagcactgcgatgaggaagtggacggttgcttccgctctccttcttctctctctcctctttctctttgcagatcaaggtcgaaagtttcaggcgaatgccgagggagattccgacgagcttgtacatccacccaaggtggaggacaagatcggtgctgtgcctcatggcctttcaaccgattcagatgtcgtcaagagggaggcggagtcgatctcgaagagatctctccggagcaacgcggagaagtttgagttccaagcggaagtgtcgcggcttatggatatcatcatcaattctctctacagt

SEQ ID NO: 39145 - DNA, 368 bp, Glycine max
  Clone ID: LIB3139-001-Q1-N1-B5
gttcttttgtgtggtggatgatgattacatacaggatgactgggacctctgtggattgagcagtcaagtgccctactttgattatgcccttgatttgattctcgacgttgagtcatcccatggtgacatgttcacggaggaacagaatgagttgattgaatcggcggcggaaatgctttatggtatgattcatgctcgatatgtgttgaccagcaaaggaatggctgccatgcttgacaaatacaagagctatgattttggtagatgcccaagagtttactgctctggacagccctgccttccagttggtcaatcggacattcctaggtcaagtactgtgaaaatatactgccctaggtgtgaagatc

SEQ ID NO: 39146 - DNA, 342 bp, Glycine max
  Clone ID: LIB3139-001-Q1-N1-B6
cctcagtccatttcacagcaaactgtttggaatcaaatggcagcagtgagaacaccattgaattttgattctagcaagcagagcttttgtcaattttctattgaccttctcggtggaggaattttagtggacaaaactggagattggatcacacttatacaaaattctccaattagtaacttgttgagagttgctgcttggaagaaaggctgtttaatggtcaagattgtgatgtctgggaatgcagcagtcaaaaggagtgattgggcctcattggtacaagtgtttttaacaaacagctacagtacagagcattttgatgcatgtaagtggacaaaatca

SEQ ID NO: 39147 - DNA, 148 bp, Glycine max
  Clone ID: LIB3139-001-Q1-N1-B7
ctaaaacagatttacagagcaaaccaatcattctctaaatattcgacaatactgtcaatacaaggttaaaattgtgatttgtgaagtacccatctcgatcttgtattaagattttataaatgaaattcgtaaaacagccattttattc

SEQ ID NO: 39148 - DNA, 326 bp, Glycine max
  Clone ID: LIB3139-001-Q1-N1-B8
tgttactcctctatccactggtttggagactgcaggaggagtgatgactgtgttgattcccagaaacacaaccattcccaccaagaaggagcaggtgttctcaacctactctgacaaccagcccggtgtgttgattcaggtctatgaaggtgaacgaacgaggactcgtgacaacaatttgcttggcaaatttgagttatctggaattcctcctgctcccagaggtgttcctcagatcactgtttgcttcgacattgatgccaacggtatattgaacgtgtctgcggaggacataaccactggacagatgaacaagattacaatta

SEQ ID NO: 39149 - DNA, 423 bp, Glycine max
  Clone ID: LIB3139-001-Q1-N1-B9
cgccgagcttcatgaccgagaagtcggagacggcactacttgggtcgtcattgtcgctgctgagcttctcaaaagggcaaatgaccttgtcaggaacaagattcatcctacctcgattatcagtggatatagacttgctatgcgtgaggcttgtaaatatgtagaagaaaaactagctgtcaaggttgaaaagctgggaaaggattcactaattaactgtgccaagaccagtatgtcctcaaagttgatagctggtgatagtgacttcttcgccggtttggttgtggatgcagtgcaagctgtaaaaatgaccaatgctcgaggtgaagttaaatacccaatcaagggaatcaatatcttgaaagctcatggaaaaagtgctagagacagctttctgatgaatggttatgctctaaatactgg

SEQ ID NO: 39150 - DNA, 420 bp, Glycine max
  Clone ID: LIB3139-001-Q1-N1-C1
cgtgaatcgatatgcaaccaaaccgacgtcgctctgagcatcagaaagctcctgttgtcgaaaaacgctcgggacagtaacctcgtgtactcgccgctgtcgttgcacgttgttctgagcatcatcgcttctggctccaagggccccacactcgatcagcttctctccttcctccgatccaagtccaccgaccatctcaactccttcgcctctcagctcgtcgccgtcgtgctctccgacgccgttcccgtctgcgggcctcgcctctccttcgccgacggcgtgtgggttgagcaatccctctctcttcacccttccttcaaacaacttgtcagtgctcaatacaaggccactttggcttgacgtgatttccagaccatggcggttgaagtgacaaatgaagttaatcatgggctgaaa

SEQ ID NO: 39151 - DNA, 225 bp, Glycine max
  Clone ID: LIB3139-001-Q1-N1-C10
tgatgcccaaatcattgcccatgcatatgacgggacctacgagagtggaatggaatacagaagcgtgtctgcagttgctggtccatcgatcactcatgatatagacaaagctcctacgtctcaagagattgtaaagattccctagtgagatggaactactcgacactgacaactgctatatgatgatggataaaaggctgctgatcacatctctaatgtatcatc

SEQ ID NO: 39152 - DNA, 415 bp, Glycine max
  Clone ID: LIB3139-001-Q1-N1-C12
cgagggtttgggtttctcttcctcccttggagaaaaagaagagccaccgctgcgacgccgttcgtgcatttttgaggtgccgctgtcatgtttgggcgtggtggaccaaggaggagtgataactccaaatattatgatattctcgggatttccaaaaatgccagtgaagatgaaatcaagaaggcctatagaaaggcggctatgaagaaccatccagataagggaggagatcctgaaaagtttaaggagttaggtcaagcatatgaagttttaagtgatcctgagaagaaagaactgtatgaccagtatggtgaagatgcccttaaagaagggatggggggaggaggctcgtttcataatccatttgatatatttgaatcattttttggaagagcaagctttggtggtggtggta

SEQ ID NO: 39153 - DNA, 333 bp, Glycine max
  Clone ID: LIB3139-001-Q1-N1-C2
tagaatggaatttcgatgctcagtcatctcttttaccattctcttctctcttgctcttgcaggagagagccatgtccatgcatcgctacctgaggaagattattgggaagctgtttggccaaacactcccattcccactgcactgcgagagcttctaaagcctctccctgcaggtgttgaaatcgatgaactccctaagcaaattgatgatacacagtacccaaaaacattcttctataaagaagaccttcatccaggcaaaacaatgaaagtacaattcaccaagcgtccctatgcacaaccttatggtgtatatacatggttaacggatat

SEQ ID NO: 39154 - DNA, 411 bp, Glycine max
  Clone ID: LIB3139-001-Q1-N1-C3
atcacctccacctccggtttatatctatgcttccccacctccacctatctacaagtaagctcaaattgtgaaagcaccattcatgatgaatcatgttctagttttcatcgaggaataaaggcaagctctattttgagccaagtgaaacatctatcttcctgtctaagttctttgaataaaagtctgaatgtgtcatctctatgctacaatgtttatgattcagatcaggttgattctatttgtttgatggccatcttgcacgtcctgatcttattgtgttcaagtgacggacaaatccaaacaggaaagagagatttgaaatgtaaatgccaagtaaatgtgaaaagtacagtccatttttagtgatctctttaatttatttgttcatagattaatatggtcgtgtatgat

SEQ ID NO: 39155 - DNA, 299 bp, Glycine max
  Clone ID: LIB3139-001-Q1-N1-C4
actcgttctagatctggcgcggtcgcccaatgcgttattaaagtgtgcgaggtacattatatatacaatgcacaagcttaacgcaccagatggaacgaaccaatactccactgaatggaccactctgaccaacacagtaccgatattaggcacacacattctgtgctgagatcatgccaaaccagaatgctagatcacgcaccaagctataaagcatatgtcgacaagcctataccatctaggtgcaagtgacctatgacagatgccgagacagactcacctgctgctgtcatgattgc

SEQ ID NO: 39156 - DNA, 428 bp, Glycine max
  Clone ID: LIB3139-001-Q1-N1-C5
ggcaagggcgttgagcgtggcagtgaacgtgttgtgtttggccatagtttgcagtgcgatcgagtcaccgcaacacacagtagtacactccgagtccgatttcgagatcaggctctatcgtacctctgtttggatgtccgctcctgccctcgacatttccttcgaaaaagccacctggaatggcttccacaggttgttccagttcacagaaggtgccaacttgaatttctctcgaattccaatgactattcccgtgttgacaaccgcggtccccggagcgggtcctcttcaatcccaaggctattacgttagtttgtacttacccgttaagttccaaggtgatcctccggtgcctcttccagaactcaatatcaagccctatgaattcagcagccactgcgttgcggttaggaagttctctggatttg

SEQ ID NO: 39157 - DNA, 420 bp, Glycine max
  Clone ID: LIB3139-001-Q1-N1-C6
ctaagatgacttctccctacattaaatgtacagtctctttctgcatagcatttggaaatttggctgatgataccatcaattttgaggcttttccccacaagctggtgcagtttggagagattcaggaaaaagttgtattgaaattttcacaagaggaatttcttacagcttggtcaactcaggtgcgtcctgcaacaactctgttggctgatgggtgtccatatttgtatgcaatggtgcatgatagttcagtgtctacaataccaggtgattttgtcattggtgtcaagttgacaaccataaacaatatgtgtgcatatgggctcaatcctggtatttcaggttctcgtcttttgggcaccattcctcagtccatttcacagcatactgtttggaatcaaatggcaacagtgagaacac

SEQ ID NO: 39158 - DNA, 359 bp, Glycine max
  Clone ID: LIB3139-001-Q1-N1-C7
acacatattgctccgctgtggagaaggatttgcgtttggagaggggaatgttaggcaatatgatggtgttcctcttcttaagaattcaaaatgggagagtactttggatgctgttgacaatgatagtgatagtgactagatgatagtcctcatcaacacttataacaaaccaaacatattattggcttcgtagaacgtagaaagtggaatatagcagtataaaagcatggttttgaggcagtgtttgtgatttgtgaggttcattttcctagtttgatatttctcctttttccgcccttttctcaataatattataaatcaaatggtatggtggtactgtagtgtagttccaatatcac

SEQ ID NO: 39159 - DNA, 258 bp, Glycine max
  Clone ID: LIB3139-001-Q1-N1-C8
cagatagattggacaggtctctcacacttggtcacatgcaggggatgatgcaaatggcacttgtatggcatacagggcatgctattcatgaagatgtacctgatgaatttccaactatgattgttaacttcatttctcgtatcctaattggccctcatggtactgagatacctggcctctcctagccagcctctaccaaaccttgaatctggtatctgataaaccaagaacgaccaccactgccagatgaacatgatg

SEQ ID NO: 39160 - DNA, 422 bp, Glycine max
  Clone ID: LIB3139-001-Q1-N1-C9
gggtttacaaggagcaggtaaagcttttccaaacaagattggtgttgatgataagcttgtgttggctaacacacaagaattctttgatggaaattttccagtggattcttggttaccaatttttgtgaattgtctctatcctgtaagtcaattaccttcagaagctgtcgttgtaaatgttacatgtggtagtggacgtggtggtttacccaccactgcttggattagttctgcagttaacaatcgctcctcagacatcaacaaaaggattcgcacagcacttgggaaaggtaagaaaattgtttttcttactagagttgatccttttccagtagctttattggctgttctttttggcgttaagaatgaaattctgagttctaacgccactaaccctatgctgacgcgacttcttgagaact

SEQ ID NO: 39161 - DNA, 427 bp, Glycine max
  Clone ID: LIB3139-001-Q1-N1-D1
cagaaaccttcatgcctcaggtgaaaagaagaagattgtgggggtgttctacaaagggaatgaatatgctaaattgaatccaaattttgttggatgtgttgaaggtgcattgggaatacgtgagtggctggaatcacagggtcatcagtacattgtcactgatgacaaagaaggacctgattctgaacttgagaaacacattccagatgcacatgtcatcatatctactccattccaccccgcctatgtcaccgcagaaagaattaagaaagccaaaaatttggagctgcttttgactgctggcattggttctgatcatgttgatctcaaagctgcagctgctgctggtttaactgtggcagaggtcacatgaagcaacgttgtgtcggttgcggaggacgaactcatgagaatcctcattctaatg

SEQ ID NO: 39162 - DNA, 428 bp, Glycine max
  Clone ID: LIB3139-001-Q1-N1-D10
gtaaatgtgttactagaattgtatttgcacagtccagaggaagctcgccaattgagaaggaaagctctctctcgtattgaatggctgcaaaaagctgatgtgcctaccatagcacagattgaagagttccattcgatgcagaggatgatgaatgctcctgattcaaatgataatatcgatctactgttgagcattgatttgttgggtttacaaggagcaggtaaagcttttccaaacaagattgtttttgatgataagcttgtgttggctaacacacaagaattctttgatggaaattttccagtggattcttggttaccaatttttgtgaattgtctttatcctgtaagtcaattaccttcagaagctgtcgttgtaaatgttacatgtggtagtggacgtggtggtttacccaccactgcttggat

SEQ ID NO: 39163 - DNA, 424 bp, Glycine max
  Clone ID: LIB3139-001-Q1-N1-D12
cctctacaaaagttcaatttgttagtggaaaaaccttcaaatgtgatataattggtgctggttcacattcttcagaagattttcctgaaaaggaagatcaagaaaaacccaaaaagattgatgccagattgagacaaagaatagatcctcaatacaatgaggttcaggctcagatggaaacaaatttgtttaaattgtctcttgatgatgttgaaactcctaaaggttccatgttggatcttaaaatttctcaatctaaaattgcacttcccaagatcacagttggaggaaccattctgctgtatgatttattggcaaattttttgacagagggcaattttagagcatgtgttgatttgcatcgcactcatcgtattaaatgaatgattaaaatggtggccacagttggtattcctgagaatac

SEQ ID NO: 39164 - DNA, 367 bp, Glycine max
  Clone ID: LIB3139-001-Q1-N1-D2
ctctctctcaccaaagccttcctagaacgaaaaaaaaaagaagagcactgttccctcaccaaagaagaagaagcaaacaatggccgatcaacttaccgatgaacagatctccgagttcaaggaagccttcagcttgttcgacaaggacggcgatggttgcatcacaaccaaggagcttggaactgttatgcgttcattggggcaaaacccaactgatgcagagctccaggacatgatcaatgaagtggatgctgatgggaatggtaccattgacttccctgagttcctaaatctcatggccaggaagatgaatgacactgattcttgaggaggagctgaaagaggcattccgggttttcgacaagga

SEQ ID NO: 39165 - DNA, 433 bp, Glycine max
  Clone ID: LIB3139-001-Q1-N1-D3
caccgattgctagaatggaatttcgatgctcagtcatctcttttaccattctcttctctcttgctcttgcaggagagagccatgtccatgcatcgctacctgaggaagattattgggaagctgtttggccaaacactcccattcccactgcactgcgagagcttctaaagcctctccctgcaggtgttgaaatcgatgaactccctaagcaaattgatgatacacagtacccaaaaacattcttctataaagaagaccttcatccaggcaaaacaatgaaagtacaattcaccaagcgtccctatgcacaaccttatggtgtatatacatggttaacggatattaaagacacctctaaagaaggatatagttttgaagagatatgcatcaagaaagaagcgtttgagggagaagagaagttttgtgcaaaatc

SEQ ID NO: 39166 - DNA, 418 bp, Glycine max
  Clone ID: LIB3139-001-Q1-N1-D4
aaaaaaagcgttaaaatcgtctattcgctcatacttcgagaagaatagagaaaatataataaaaaaaaaaaaaaaaaaaaaaaaaaaaaaaaaaaaaaaaaaaaaaaaaaaaaaaaaaaaaaaaaaaaaaaaaaaaaaaaaaaaaaaaaaaaaaaaaaaaaaaaaaaaaaaaaaaaaaaaaaaaaagggggggggggccaattagggggctggtaaaccgggaaataaattggggacgggaacctgggggggaaaaagttttccttaagggaggcggaataaaagttgggcaaaacaagggaaaaaggtgttcccgggggaaaagtgtattcggtaaaaatcaaaaaaaaattagagccggaaagaaaaaagtaaaagggtgggggggctaatgaggggggaaacttaaatttatggg

SEQ ID NO: 39167 - DNA, 413 bp, Glycine max
  Clone ID: LIB3139-001-Q1-N1-D6
ctcgagccgattcggctcgagggaaaaagttgtattgaaattttcctgaatctctccaaactgcaccagcttgtggggaaaagcctcaaaattgatggtgtagtttggagagattcaggaaaaagttgtattgaaattttcacaagaggaatttcttacagcttggtcaactcaggtgcgtcctgcaacaactctgttggctgatgggtgtccatatttgtatgctatggtgcatgatagttcagtgtctacaataccaggtgattttgtcattggtgttaagttgacaaccataaacaatatgtgtgcatatgggcttaatcctggtatttcaggttctcgtcttttgggcaccattcctcattccatttcacagcaaaccggtttggaatcaaatggcaacagtgagaaca

SEQ ID NO: 39168 - DNA, 422 bp, Glycine max
  Clone ID: LIB3139-001-Q1-N1-D7
caccaaacccgtagctctcttcttcctcgcaaactgcaaagggaactctgagaaagaaaaacccaacgaccccttttgccatttcctgcaaaacccgtttctcttcttcaattcgcgcgtccatggcttcaccctccatcacagacgccgaaacaaagccgttttctgttctcttcgtgtgcctcggcaacatctgcagaagccccgctgctgaaggagtcttcactgacttagtcaacaaaagggacctcaattcgaagttcaaaatcgactctgctggcaccatcaattaccacgagggaaatgaagcggattcgagaatgagggcagcttcaaaaaggcgtgggattcagataacttctatttcgaggccaatcaagccctctgatttcgttgactttgacctcattcttgctatggac

SEQ ID NO: 39169 - DNA, 411 bp, Glycine max
  Clone ID: LIB3139-001-Q1-N1-D8
cttgggagaagaggtcgagtttcacagcagcaatggtgtacgtcaaggctcataaatcaaaagcctacttcaagagatatcaagtcaagttcaagagaagaagagagggaaaaaccgattaccgtgccaggattcggttgattaatcaggacaagaacaaatataacactccgaaataccgatttgttgttcgctttagcaacaaggacattgttgcacaaataatatctgctagcattgctggcgatattgttcttgctgcagcatatgcacatgagctgccacgatatggtcttgaagtagggcttacaaattatgctgcagcttattgcactggtctcctgttggcccgaagagtcctcaaaacacttgaaatggatgaggagtatgaaggaaactgtgaggctactg

SEQ ID NO: 39170 - DNA, 428 bp, Glycine max
  Clone ID: LIB3139-001-Q1-N1-E10
tcaagcttcaatttgctttgtgctcactcatctatctattatggaccaaacactcttcttcatattcttcttcttcttcttgttcttgttctatctgtgacgagcatcatggcctcgagagcagtgctattgttggctatgtgtgtgcttccggccatggttgtggccattcgcccagcaaagaaccctttttgcgtgaagggtcgcgtctactgtgacccttgccgtgctggttttgagacctcagcaaccacctacattgccggtgctgagattatgttgcaatgcaagagcagggttagcaacgaggttgtgtacaccaagaaggggtacactgactcaactggagcatacacaatgtacgtggacgaggatcacgcagatcaaatatgcagtgccaagcttgtaagcagccctcaccctcaatg

SEQ ID NO: 39171 - DNA, 397 bp, Glycine max
  Clone ID: LIB3139-001-Q1-N1-E11
cttggttattcatcagaagtataggatttcctatgatgaaatgattaatgatttatgcccaatcatgagtgtccagcagctatacagaatatgtacactttactgggatgctaactacaatactcgaagtgtatctccagatgtcctttcaagcatgagagtacttatggctgaggactctaataatgctcagagtgattctttcttgttggatgacagttccagcatccccttctcagtggatgacttctctacatcactgcaagagaaggatttctctgacatgaaaccagcggatgagctgcttgagaatcccgccttccgatttttaaatgagttggcaagggaagcttagtgtatgtgtttatcatagtcgtcaaggcaagcaaccaaatca

SEQ ID NO: 39172 - DNA, 426 bp, Glycine max
  Clone ID: LIB3139-001-Q1-N1-E12
ggctaatctattacgcgctgttctctcgtcttctacaagatggtctgttcgatctcaaccaaggttgttccttccacctccgccatgagtttcatctttggaaagcgaaaaacccccgcagagcttctgcgggaaaataagaggatgctggacaaatcaatcagagaaattgagcgtgagcggcaaggattgcaaacacaagaaaagaaattgattgcggagataaagaaaagtgccaaacagggccagatgggagctgttagagttatggcaaaagatcttgttagaacaaggcatcaggttgagaagttttataagctaaaatctcagctccaaggtgtatcactcagaattcagactttgaaatctacacaagcaatgggtgaggctatgaaaggcgtgacaaaggccatggggcaaatgaat

SEQ ID NO: 39173 - DNA, 339 bp, Glycine max
  Clone ID: LIB3139-001-Q1-N1-E3
gtgagacatagtttgacatcaatctctctccatctggctaagacggtcaactttgatgctgaccacagaaacacagcgcagcacacctcggcccatttcagccggcaactctggaaaaagccaaatcattctggaattttcattcatttgagagaaaagagaaaaacaacagttctttgtatctgctgaacgtggtgacatgattcgattagaataattgacataaccaattcatctattcattatatgttcaatctttcaacggattctgactgatgaacgtggagtgttgccttacatgatcgccaatacacgctttatcatatcgatacaaactct

SEQ ID NO: 39174 - DNA, 384 bp, Glycine max
  Clone ID: LIB3139-001-Q1-N1-E4
ttatgggtataaatctgatatgtggtctcttggttgctgcatgggtgagattgctgcacatcaaccagcatttcgcgctccagacatggctggacttatcaataaaataaacagatcctccatttctccactgccaattgtttattcttccacactgaaacaacttatcaaaagcatgcttaggaaaaacccagaacataggccaactgcagctgaattgtaaggcatccgcttttacagccttatgttcttcgctgtcataatgcatcatctaatgttcttccagtatatcccttagttaatccaaaggataaaacaagaagatctaataaatctagtggtggcaaggaccataaggacaaagaagctagtttggtaaatcgt

SEQ ID NO: 39175 - DNA, 425 bp, Glycine max
  Clone ID: LIB3139-001-Q1-N1-E5
cgaggcgcgagctagggtttatcgagggtttcgtttctctctgcaacaacgatggcgaaacccgggcgaggtcgtcgctctcactccggctccgtttccggctcctcctctcgctcctcttccccctccgactcccgctcctcctctcgctcgcgctccgtttctcgttcccgctctccctcgcgctccagatcctcctctccctcctcctcgtctccctcccgaagttctcgcagccgcagccctcccccacagcgccgccgaagtcctgctgatgcagctaggcgaggtcggtctcctccacctcaatctaagagagcttcacctcccccaaggaaaccttctcctgtacgtgaatcacttgttcttcatgtagaaaagctcagcagaaatgtcaatgaagggcatttgaaagaaatttcagt

SEQ ID NO: 39176 - DNA, 418 bp, Glycine max
  Clone ID: LIB3139-001-Q1-N1-E6
aatgataaacagtctttgtggtggtgatgaaaaattgatgcgtgaaaggacacatttgctgttggcttgttgttcaaggatggcaatttgtaagaaagatgtttggagagttgaatgtggaatcccttctggatttccgctcacagttatttgcaatagcatttttaatgagatgctcattagatatagctatgaaaaattactgcgccaggctagagctccaagtatgtttttacaatccttcaaaaattttgtttctttgtgtgtgtatggtgatgataactttaattagtgttcatgaatatgtcaagccttactttagtggttctaaattgaaaagctttctagctggtcataatatcaccattactgatggtattgacaaaactagtgcaactttgcaatttagaaagttagc

SEQ ID NO: 39177 - DNA, 420 bp, Glycine max
  Clone ID: LIB3139-001-Q1-N1-E7
gtggtgaagaaaccaaagacatccttctcctggatgtggctggcctcactctcggaattgaaactgttggtggagtcatgacaaagttgattcccagaatcactgttatcccaaccaagaaatctcatgtgttcaccacctatcaggaccagcagactacagtctccattcaagttttcgaaggcgagaggagtctcacaaaggattgccgccttcttgggaaatttgatctgtctggaattcctccagccccaaggggtacgcctcaaattgaagtgaccttcgaagttgatgccaacggcattctaaatgtgaaggcagaagacaagggcactggtaaatcagaaaagatcaccattacaaacgataagggacgtcttagccaggatgaaattgatagaatggttcgcgaagcaaaag

SEQ ID NO: 39178 - DNA, 423 bp, Glycine max
  Clone ID: LIB3139-001-Q1-N1-E9
gaggagacaagaaaagaaagagaaagagtttgcagagttgaatggccgaaagaggaatggcgaagcacgaggagcttcctatcccgattaacaataacctagaacccgtctatggcggaggttccgcactcgaagaagctcagcttcgtttcgataatttgaagtccaaattcgtcgaaatcttcggtcatcatcctcaaatcttcgctcgctcacctggaagagtgaacttgattggggagcacattgattatgaaggttattcggtgctgcctatggcaattcggcaagacacgatcgtggcgattcggaaaaatgaagcggaaaaggttctcaagatagctaacgtgaatggtgaaaaatattcactttgtacttatcccgccgatcctctccaggaaatcgacttgaagaaccacaaat

SEQ ID NO: 39179 - DNA, 336 bp, Glycine max
  Clone ID: LIB3139-001-Q1-N1-F1
cgagctcttcatcgccgccgagggtctctacaccggccagttcatctactgcggcaagaaggccaccctcgttgtcggcaatgtgttgcctcttcgatccattcctgaaggagctgtcatctgcaacgtcgagcaccatgtcggcgaccgcggcgtcttcgctagggcgtctggagactacgccattgttatcagtcacaaccctgataatgacacctctaggattaagctcccatctggttcaaagaagattgttccaagtgactgtagggccatgattggtcaagttgcaggtggagggagaactgagaagcctcttctcaaggctggaaatgc

SEQ ID NO: 39180 - DNA, 426 bp, Glycine max
  Clone ID: LIB3139-001-Q1-N1-F10
caactttgcggtgttcccttcgctgcagggtgggccccacaggcaccagatcggggctcttgccgtggcgctgaagcaggccgcgtcgcccgggtttaaggcctacgccaagcaggttaaggccaacgccgttgcgcttgggaattacttgatggggaaagggtacagtcttgtcactggaggcacggagaaccatcttgtcttgtgggatctcagacctcttggattgactgggaataaggtggagaaactctgtgatctctgcaacattactgttaataagaacgcagtttttggtgatagcagtgccttggcccccggtggagtgcgaattggggcccctgccatgacttctaggggtttggttgaaaaggactttgagcagattggtgagttccttcaccgtgctgtgactctcacactgga

SEQ ID NO: 39181 - DNA, 382 bp, Glycine max
  Clone ID: LIB3139-001-Q1-N1-F11
aacgggacatgcccttggctgagacctgatggcaagacccaagtcactgttgagtactacaatgacaagggtgccatggttccaatccgcgtccacactgtgctcatctccacacagcatgatgagactgtcacaaatgatgagattgcagctgatcttaaagaacacgtgattaagcctgtgattcctgagaagtaccttgatgagaagaccattttccatttgaacccttctggcaggtttgtcattggagggccgcatggcgatgctggtctcaccggccgcaagatcatcatcgacacctatggaagatggggtgcacatggtggtggtgccttctctgggaaggatcctaccaaggttgataggagtggtgcctaca

SEQ ID NO: 39182 - DNA, 428 bp, Glycine max
  Clone ID: LIB3139-001-Q1-N1-F12
attgaaaagctttctagctggtcataatatcaccattactgagggtattgataaaactagtgcaactttgcaatttagaaagttagcagattgtgattttctcaagagaaactttaagcagatgtctaatgttttgtgggtggctcctgaggacaaggcgagtttatggtcacaacttcattatgtttcgtgtaataatctggaaatgcaagaagcttatcttgttaatctcgtaaatgtgttacgagaattgtatttgcacagtccagaggaagctcgccaattgagaaggaaagctctctctcgtattgaatggctgcaaaaagctgatgtgcctaccatagcacagattgaagagttccattcgatgcaaaagatgatgaatgctcctgattcaaatgataatattgatctacttgtgagcattg

SEQ ID NO: 39183 - DNA, 51 bp, Glycine max
  Clone ID: LIB3139-001-Q1-N1-F2
aaaaaaaaaaatataaaaaaaaaaaaaaaaaaaaaaaacaaaggagatact

SEQ ID NO: 39184 - DNA, 325 bp, Glycine max
  Clone ID: LIB3139-001-Q1-N1-F3
gtaaatgtgttacgagaattgtatttgcacagtccagaggaagctcgccaattgagaaggaaagctctctctcgtattgaatggctgcaaaaagctgatgtgcctaccatagcacagattgaagagttccattcgatgcagaggatgatgaatgctcctgattcaaatgataatatcgatctactgttgagcattgatttgttgggtttacaaggagcaggtaaagcttttccaaacaagattgtttttgatgataagcttgtgttggctaacacacaagaattctttgatggaaattttccagtggattcttggtaccaatttt

SEQ ID NO: 39185 - DNA, 376 bp, Glycine max
  unsure at all n locations
  Clone ID: LIB3139-001-Q1-N1-F4
tattgacaaaactagtgcaactttgcaatttagaaagttagcagattgtgattttctcaagagaaactttaagcagatgtctaatgttttgtgggtggctcctgaagacaaggcgagtttatggtcacaacttcattatgtttcgtgcaataatctggaaatgcaagaagcttatcttgtcaatctcgtaaatgtgttacgagaattgtatttgcacagtccagaggaagctcgccaattgagaaggaaagctctctctcgtattgaatggctgcaaaaagctgatgtgcctaccatagcacagattgaagagttccattcgatgcagaggatgatgaatgctcctgattcaaatgataatattgatcntactgtg

SEQ ID NO: 39186 - DNA, 424 bp, Glycine max
  unsure at all n locations
  Clone ID: LIB3139-001-Q1-N1-F5
cggctcgagggggggaacagtatctccaaattgaaagttcctttcatacttaggacgcctgacatgtcatccatgcaccatgacacaagttctgatctgaaagtagttggaaacaaattaaaggatatattagagatctctaacacatccctaaaaatgaggaagattgttgttgaactgtgtgacattgttgctactcgtggggctcggcttgctgctgctggtattttgggcatccttaagaaaataggaagagacacggttaaggttggggagaagcaaaagtcagtgatagctttggatggnggattgtttgaacactacaccaaatttagagaatgcttggagggtaccctgaaggaattgctgggagatgaggctgctgagaccattgtcattgagcatgctaatgatggctctggca

SEQ ID NO: 39187 - DNA, 292 bp, Glycine max
  Clone ID: LIB3139-001-Q1-N1-F6
tatgaaatcgctgagagcactgacaaggccgatatcactgttgatgcaaggagttttagttgggcagtggacagtgcgataaagagtgagactgcgtcattttggtaagtctgaatttgccatcttttcccgtttagaccataggaacttggttgggctggttgggtactgtgaaaacagagatgaaaggctgtcagtttacgagtatatgaagaatgggttgttgcgtgattgcttgcatgataagaacaatgtggacaaggatagcagtgtgttgaattcgtggaaaatg

SEQ ID NO: 39188 - DNA, 401 bp, Glycine max
  unsure at all n locations
  Clone ID: LIB3139-001-Q1-N1-F7
tatgaaatcgctgagagcactgacaaggccgatatcactggggatgcaaggagttttagttgggcagtggacagtgcgataaagagtgagactgcgtcattttggtaagtctgaatttgccatcttttcccgtttagaccataggaacttggttgggctggttgggtactgtgaaaacagagatgaaaggctgtcagtttacgagtatatgaagaatgggttgttgcgtgattgcttgcatgataagaacaatgtggacaaggatagcagtgtgttgaattcgtggaaaatgaggatcaagattgcttgtgatgcttccttgngaatacaatatctgcataattatgcagatccatctattattcacatggatatcaagtcttccaatattcttcttgatg

SEQ ID NO: 39189 - DNA, 415 bp, Glycine max
  Clone ID: LIB3139-001-Q1-N1-F8
atcccaggcgaggagaaagatggaggggaaggagcaggatgtgtcgttgggagcgaacaagttccccgagagacagccgattgggacggcggcgcagagccaagacgacggcaaggactaccaggagccggcgccggcgccgctggttgacccgacggagtttacgtcatggtcgttttacagagcagggatagcagagtttgtggccacttttctgtttctctacatcaccgtcttaaccgttatgggagtcgccggggctaagtctaagtgtagtaccgttgggattcaaggaatcgcttgggccttcggtggcatgatcttcgccctcgtttactgcaccgctggcatctcatgtggacacatatacccggcggtgacatttgggctgtttttggcgaggaagttgtcgttg

SEQ ID NO: 39190 - DNA, 427 bp, Glycine max
  Clone ID: LIB3139-001-Q1-N1-F9
cccgcctcgcgaagcgcgcgttcgtcgtctcttccctggcgaggaggtgcctgagctcctccgtagtcaactgccacgcgccgccgcacgacgccacgtcgttccgcccgtttccgctgcgtgaagattcgagcaagcggtgcgtgcagtgggtgttcctcggctgccccggcgtcggaaaaggaacgtacgctagtcgcctctcgaacctcctcggcgtccctcacatcgccaccggcgatctcgttcgcgacgaactcacctcctctggccccctttcttcccagctatcagaaattgtaaaacaaggtcaattggtgtcagatgaaattattattagtttattgtcaaagagacttgttgccggggaagctaaaggcgatttgggatttattcttgatggttttcctcgaacaattaagcaagc

SEQ ID NO: 39191 - DNA, 381 bp, Glycine max
  Clone ID: LIB3139-001-Q1-N1-G1
gcgttttagagtggaaaatggcaggaagcagcattaacagaggagaaagatggtctctcaatggaatgactgctcttgtcaccggcggcactcgtgggatcgggcactccatagtgagtgacttggctgcgtttggcgctgcagtgcacacctgttccaggacccaaacagagctcaacaaatgcttacaagagtggcagagtcaggggtttcaggtaactgggtcgctctgtgacgtgtcctcaccaccccagagagagaagctcattcaggaagttgcatccaccttcaatggcaagcttaacatctacgtgaacaatgttggaataaacattagaaagccaaccattgagtacactgctgaagaatattcacagatta

SEQ ID NO: 39192 - DNA, 426 bp, Glycine max
  Clone ID: LIB3139-001-Q1-N1-G10
ctttgaagtttctaagatgacttctccctacattaaatgtacagtctctttcttcatagcatttggaaatttggctgatgacaccatcaattttgaggcttttccccacaagctggtgcagtttggagagattcaggaaaaagttgtattgaaattttcacaagaggaatttcttacagcttggtcaactcaggtgcgtcctgcaacaactctgttggctgatgggtgtccatatttgtatgctatggtgcatgatagttcagtgtctacaataccaggtgattttgtcattggtgttaagttgacaaccataaacaatatgtgtgcatatgggcttaatcctggtatttcaggttctcgtcttttgggcaccattcctcagtccatttcacagcaaactgtttggaatcaaatggcaacagtgag

SEQ ID NO: 39193 - DNA, 410 bp, Glycine max
  Clone ID: LIB3139-001-Q1-N1-G11
gtgtttgtcacgagacccatagtgctgccaaattatagtaacgctctttctctatctgaagaagaagaagttctgaagaagcatgtgtggaggtgctatcatctcagacttcattggtgtgaagcgtggccgcaacctcgccgcgcaggaactgtggtccgagcttgaccctttctctgacctccttggcttcgataccaccaccaccaccaccaaccaaccaccccttccagacaaaaaagtggtgtcatcatgtgagaagaagaagaagaaaagtgtgagtgcagaaaagaagagtggtgggcgagctcggaagaacgtgtacagaggaatcaggcaaaggccgtggggcaagtgggccgcggaaataagggacccacataagggcgtccgcgtctggctcggcacct

SEQ ID NO: 39194 - DNA, 241 bp, Glycine max
  Clone ID: LIB3139-001-Q1-N1-G12
taaaccctattaatcaacatcctattccgtcttcttgtctccttcgcgtctacattcaccatcctccttcgctaatcctaaccaaccacctccacccttattcctaattcccattcttttccgcttaatgctatcgctccagtctttccggctaacacaccaccacataatcacgatcacaatcacagctgtaaactgctggtgaacttttgtctttactaattgagatggtacttcttat

SEQ ID NO: 39195 - DNA, 389 bp, Glycine max
  Clone ID: LIB3139-001-Q1-N1-G2
accaaatttggttccattgattggtattgatgtttgggagcatgcgtactacttacagtacaagaatgttagaccagactatcttaagaacatttggaaagttattaattggaaatatgccagtgaagtgtatgagaaagagagctcttagtctgaaggagctacttgatatagcaattgagatgacagatttgcagcacggtaagagatgtggaataaaatgatatgatgtaatagatagcactattttatgtagttgtactgaagaacctcgagcatattatatggctgcatttcttgtaccaagttggtcatgtcttatggattttttgatgccctgttaagatactatacctttccagtgatgtatatcttttgcttctagagtg

SEQ ID NO: 39196 - DNA, 343 bp, Glycine max
  Clone ID: LIB3139-001-Q1-N1-G3
agaatggctcccaagggtttaacctttctggctgtgttaatatgcgtttcagcactgtcactgagtccttctgttgcgggggaagggcaaaataatggccttgttatgaacttctacaaggaatcatgccctcaggctgaagacatcatcacagaacaagtcaagcttctctacaagcgccacaagaacactgctttctcctggctcaggaacatcttccatgactgtgctgttcagagttgtgatgcttcactgttgctggactccacaagaaggagcttgtctgagaaggaaacagatagaagctttgggttgagaaattcaggtacattgagaccatcaa

SEQ ID NO: 39197 - DNA, 414 bp, Glycine max
  unsure at all n locations
  Clone ID: LIB3139-001-Q1-N1-G4
gtcaagccttactttagtggttctaaattgaaaagctttctagctagtcataacatcaccattactgatggtattgacaaaactagtgcaactttgcaatttagaaagttagcagattgtgattttctcaagagaaactttaagcagatgtctaatgttttgtgggtggctcctgaggacaaggcgagtttatggtcacaacttcattatgtttcgtgtaataatctggaaatgcaagaagcttatcttgtcaacctcgtaaatgtgttacgagaattgtatttgcacagtccagaggaagctcgccaattgagaaggaaagctctctctcgtattgaatggctgcaaaanagctgatgtgcctaccatagcacagattgaagagttncattcgatgcanangatgatgaatgc

SEQ ID NO: 39198 - DNA, 430 bp, Glycine max
  Clone ID: LIB3139-001-Q1-N1-G5
ctcgtctttgaagtttctaagatgacttctccctacattaaatgtacagtctctttcttcatagcatttggaaatttggctgatgacaccatcaattttgaggcttttccccacaagctggtgcagtttggagagattcaggaaaaagttgtgttgaaattttcacaagaggaatttcttacagcttggtcaactcaggtgcgtcccgcaacgactctgttggctgatgggtgcccatatttgtatgctatggtgcatgatagttcagtgtctacaataccaggtgattttgtcattggtgttaagttgacaaccattaaacaatatgtgtgcatatgggctcaatcctggtatttcaggttctcgtcttttgggcaccattcctcagtccatttcacagcatactgtttggaatcaaatggcaacagtg

SEQ ID NO: 39199 - DNA, 428 bp, Glycine max
  Clone ID: LIB3139-001-Q1-N1-G6
gcggcctccacattggggaagggaataaagagaattatgcagattggaataacaataatctcaatatcatgaataataataacagcaacaataaggagctgcaggagatttcggaggagagtccaacgagcgtgattgagaataacaacgtggtggaagtggagaggttctcgctccctaagagcatttctgtgaggtccaatggctacttgaagacggctcagtccgctgctctcgcccccaataacatcaatgccactcgcaacaaatgcgccactcgcccacgcgccttcgccactccacctgaacccgttcaaaaggtatatgtgcgtggagggcagatagaggaagagcctcttgaaatgatagtgtataaccaagggatgttcaagactgagctgtgtaataagtggcaggaaactggaaca

SEQ ID NO: 39200 - DNA, 393 bp, Glycine max
  Clone ID: LIB3139-001-Q1-N1-G7
ctcgagccgctcacctaacattcaaccctaccattccaaagctcgaaggtgaacagtgtgtgagtgagttattcataacccaggatttggcgaatgtgaagcgattagctgtgataggaatatcggggttgccttggacttttccaaaggaagcaaaatcgctctcaaatgggctattgacaatcttctccgcatcggtgacatactctacatcgtccacatcaagcctctctgaggaagtgaattccgaaatcttctctggtccaccactggttcacctctgattccgctgtcggagtttcgtgagaaggaggtgatgcatcactatgatgtggatactgatgctgatgtgtcgtacttgcttgacaccgctgttagggagatacaggtgac

SEQ ID NO: 39201 - DNA, 429 bp, Glycine max
  Clone ID: LIB3139-001-Q1-N1-G8
attttgttggagatctcgtctttgaagtttctaagatgactggtccctacattaaatgtacagtctctttcttcatagcatttggaaatttggctgatgacaccatcaattttgaggcttttccccacaagctggtgcagtttggagagattcaggaaaaagttgtgttgaaattttcacaagaggaatttcttacagcttggtcaactcatgtgcgtcccgcaacgactctgttggctgatgggtgcccatatttgtatgctatggtgcatgatagttcagtgtctacaataccaggtgattttgtcattggtgttaagttgacaaccatatacaatatgtgtgcatatgggctcaatcctggtatttcaggttctcgtcttttgggcaccattcctcagtccatttcacagcatactgtttggaatc

SEQ ID NO: 39202 - DNA, 353 bp, Glycine max
  Clone ID: LIB3139-001-Q1-N1-H1
cccatgtgctttcacgcaaaaatggtgaaaaaggcaaaaggagatttgtttctggggatggtgaagagatgacattgattccgggaaccagtgttgaagaggcttacaataagctaatagttgaacttgagaaaagtgttcctacattggttggcattgaatgtcccaaggatgagaaacttcctcgtcgcataatttttgacaaacctaagacgcgctgcttcactattctccctatggagtttaatcttgtggttcgtcagaagtttttaaattttgtgaggttcattatgaagaaaagggacaagcttagttgtcaagttggaataaacccatactccatggaatggact

SEQ ID NO: 39203 - DNA, 421 bp, Glycine max
  Clone ID: LIB3139-001-Q1-N1-H10
gaggttttgtcttaagagaacattgtggagcccatgcgagatattaggagagctctcttagaagctgatgttagtcttcctgttgtcagaaggtttgtgcagtctgtcagtgatcaggctgtgggtgttggtgtcattcgaggagtgagaccggatcagcaattggttaagattgtacatgatgaacttgtacgattgatgggtggagaagtttctgaactggtttttgccaaatctgggcccactgtcattttattggctggacttcagggagttgggaagacaacggtttgcgcaaagttggcaaattatctcaagaaacagggaaaaagttgcatgctagttgctggggatgtttacagacctgctgctattgaccagcttgctattttgggaaaacaggtggatgtgcctgtctata

SEQ ID NO: 39204 - DNA, 427 bp, Glycine max
  Clone ID: LIB3139-001-Q1-N1-H11
gaacagcacacatgcacttgacatgttaccatactcgctaagcacgtgtctagtagcttccattttttcatgcttcaatcctaacttagcctcaacttggtccaaaattgctggtccaccagggtgtgcaatccaaaagatagagttgtaatcatcaatttctaagggtttgaaggcttcaaccaaggccttttcgatgttcttggagatgagtccaggaacatccttgaggagatggaaagtgagtcctacttggcgaaggtggccatcaatagcgccttcgctgtctggaaggattgtttgtgcagtccacacaagctcaaacaaaggcttttcagctggcagaggatctgatccaacaatgacagcagctgcaccatcttcaaacaaggcttgccccacaaggcttgcaagatgtgtgtcactc

SEQ ID NO: 39205 - DNA, 424 bp, Glycine max
  Clone ID: LIB3139-001-Q1-N1-H12
ctcgagccgaatcggctcgagcgtaaatgtgttacgagaattgtatttgcacagtccagaggaagctcgccaattgagaaggaaagctctctctcgtattgaatggctgcaaaaagctgatgtgcctaccatagcacagattgaagagttccattcgatgcagaggatgatgaatgctcctgattcaaatgataatattgatctactgttgagcattgatttgttgggtttacaaggagcaggtaaagcttttccaaacaagattgtttttgatgataagcttgtgttggctaacacacaagaattctttgatggaaattttccagtggattcttggttaccaatttttgtgaattgtctttatcctgtaagtcaattaccttcagaagctgtcgttgtaaatgttacatgtggtagtggacgt

SEQ ID NO: 39206 - DNA, 422 bp, Glycine max
  Clone ID: LIB3139-001-Q1-N1-H2
caattttcaagttgttggacccccacatgaggtacaccttggagatcaatgccttggctagacagagtttgatcaatgctgatggaatcattgaaaattgctttactcctggtcgctatgccatggagattagttctgctgcctacaagaacttttggcgctttgacatggatagcctccctgcagatctcatccgcaggggaatggccgtacctgacccaacacagccacatggtctaaagctcatattggaagactacccttatgcagctgatggaatactaatctggtctgcaatagaagactgggttcgaacctatgtgaaccattactaccctcactcatgccttatatgcaatgacaaagagttacaatcttggtactctgagtcaatcaatgtatgccatgctgatctcaggcat

SEQ ID NO: 39207 - DNA, 319 bp, Glycine max
  Clone ID: LIB3139-001-Q1-N1-H3
tcaacatctaacaccacacacacgcatcacgctttagccactattgttcaagggaaaacaaaatgaaagacacaatggaaactcctacgacactcaccaccttgctccgccacgtcgccgtcaaattccccttccgccgtgccatcttcgtcgctggcaaattcgacctcacccactcccgccttcaccgcctggtcgaatccgccgccgctcagttagtctccgccggcgtcaaacccggcgacgtcgtgtccctcacctttcccaacaccatagagtttgtagtcatgttcctagacgccattctggctctagccac

SEQ ID NO: 39208 - DNA, 372 bp, Glycine max
  Clone ID: LIB3139-001-Q1-N1-H4
ataaaacttcaaagttcacacacagaagaatcagaatggcttggaatcaagagttagaagctgtaacccaagctttctcagggcatggagtggatgagaaatcattggtaacattactgggaaaatgggatcctctggagagagaatctttcaggaagaagacaccacatttgttcagtgaggatcatgaacgccattttcagaggtgggatgaccaatatgttcgtcttctcaagcatgaattcgtgcgttttaagaatgctgtggtgctttggaccatgcacccttgggaaagagatgctcgtttagtaaaagaggccccaaaagaagggtccaaatgaaatatgagtgctgattgaggttgcatgcact

SEQ ID NO: 39209 - DNA, 417 bp, Glycine max
  Clone ID: LIB3139-001-Q1-N1-H5
gaaaaatgtcgaagctgatcttcgtgttcctttcgcttattcgctcttctctgcacctccttctccccagagagaccctcagatcgacgcgtcctcgttttgctcgatgacttcgccatcaaatcctctcattctctcttcttcaactccctcaaatctcgcggcttcgatctccaattccacctcgcagacgacccccaaattgcgctccagagatacggccagtacctctacgacgccctaattctcttttcccccaccattgaacgttttggaggatccattgacgcggctgcaaatttggattttgttgattcgggtcatgatttgatcgttgctgctgatagcaatgcatctgatttaatcagggaaatcgccaccgagtgtggagtggcccttgatgaggatcctgctgct

SEQ ID NO: 39210 - DNA, 364 bp, Glycine max
  Clone ID: LIB3139-001-Q1-N1-H6
atggatgccactaccccgaagtactctaaggctaggtatgatgaaattgtgaaggaagtctcttcctacttgaagaaggttggttacaacccagacaagattccatttgtgcccatctctggtttcgagggtgacaacatgattgagaggtccaccaaccttgactggtacaagggaccaactctccttgaggctcttgaccaaatcaatgagcccaagaggccctcagacaagccactcatgcttccattgcaggatgtctacaaaattggtggtattggtaccgtgccagtgggacgtgttgagactggtgtcgtgaagcccggtatggtggtgacttttggtcccactgggctgacaactg

SEQ ID NO: 39211 - DNA, 274 bp, Glycine max
  Clone ID: LIB3139-001-Q1-N1-H7
ataaattccactacctcaacttactataaggctaactttgagcaaatttttaaaaatctctctgcctacataaacaatgttgtctacaacccatacaatattccatttccacccacctctaattttctcattctctacactattaataggtccagcatacttgactagttcaacacacctactctccttattgctctttacctactctatataaccattagcccctcatacacaccactcaaactctcatttcacaaactctacaacatttttg

SEQ ID NO: 39212 - DNA, 363 bp, Glycine max
  unsure at all n locations
  Clone ID: LIB3139-001-Q1-N1-H8
ctggtttgcaaaaagacagagggttaattgtggagtattttggaaggatgtcttacgttgctcataacgttaatcagccccaagagaaagatttgttggagggaaatttttcctttgatattaaatctcgctctagattggaaaaagtttcctctacaaaagcacaatttgttagtggaaaaaccttcaaatatgatataattggtgctggttcacattcttcagaagattttcctgaaaaggaagatcaagaaaaacccaaaaagattgatgccagattgagacaaagaatagatcctcaatacaatgaggttcatgctcagatggaaacanatttgtttaaattgtctcttgatgatgttg

SEQ ID NO: 39213 - DNA, 432 bp, Glycine max
  Clone ID: LIB3139-002-Q1-N1-A1
caaatgaggcgttaaggatcaatgttttattcagacacatacagaacatgttgtccagtcacaccactgtgattgctgaagctggagacacttggtttacttgccagaagctcaaattgccacaaggctgcgggtatgaatttcaaatgcagtatggatcaataggttggtcggttggtgcaactcttggttatgcacaggctgctccccataagagagtgattgcttgtattggcgatggtagcttccagatgacagtacaggaagtgtcaacaatgttacggtgtgagcagaatggcatcatctttctaattaacaatggtggatacactacagaggtagaaattcatgatggaccttacaatgtcataaaaaattgggactatgctggactcgtggaaagaatagataatggtgaaagcaaatgctgga

SEQ ID NO: 39214 - DNA, 238 bp, Glycine max
  Clone ID: LIB3139-002-Q1-N1-A2
gaagattccgcatcatagagtataaaagatggcgcggttgatggcagttgttttgtgcgcgttggcggagctactatgctcctagtttgtccctattactttgaagtttcgttggaccgtacccgacccagttctttggttgaagttgtactttcacaacattggcagatttgcaattgaatttaatttatttgcttacaaaaaaaaaaataaaaaaaagggcggctcgctactattt

SEQ ID NO: 39215 - DNA, 453 bp, Glycine max
  unsure at all n locations
  Clone ID: LIB3139-002-Q1-N1-A3
cccacaagctggtgcagtttggagagattcaggaaaaagttgtgttgaaattttcacaagaggaatttcttacagcttggtcaactcaggtgcgtcccgcaacgactctgttggctgatgggtgcccatatttgtatgctatggtgcatgatagttcagtgtctacaataccaggtgattttgtcattggtgttaagttgacaaccataaacaatatgtgtgcatatgggctcaatcctggtatttcaggttctcgtcttttgggcaccattcctcagtccatttcacagcaaactgtttggaatcaaatggcaacagtgagaacaccattgaattttgattctagcaagcaaagcttttgtcaattttctattgaccttctcggtggaggaattttagtggacaaaactggagattggatcacacttatacanaatttctcaattagtaact

SEQ ID NO: 39216 - DNA, 293 bp, Glycine max
  Clone ID: LIB3139-002-Q1-N1-A5
aaaggtttggcgcattgctttctgtacatttaaatttaggttggttgggttgctgagtaaaaactaaaatgaaagtagatacaaattgctttttttttctttaaaacaaaaaaatccgcaaccatatattaaatgaacattagcatcataatgaatgaaaaaagctaatgagataaaaaaattatcaggattataaagaactaataaaaaaaatgggggtgcagcttccatttgtgcctgttaccttaaaaattaaatcttaacggcttcttaacaaagttccatttttattt

SEQ ID NO: 39217 - DNA, 196 bp, Glycine max
  Clone ID: LIB3139-002-Q1-N1-A6
caatttcaatgaactcattgaatttttagtttatttttcgactatatattttggagaattttgagagttactataatttgattttgtacatagtacttggaagttttgttggaccgtaccggacccagttctctggttgaggttgtactttcacaacagtggcagatttgcaattcaattcaatttatttgtttac

SEQ ID NO: 39218 - DNA, 407 bp, Glycine max
  Clone ID: LIB3139-002-Q1-N1-A7
gaagtggtgaactctggtccagaagacatgatttcagatttacgtaacagttacaacgcgataaatcatggaatttcagtgcgacttttagaggagcagttggcaactgcagagtctggagatgattttaagaggtcatttgtactctatgtgctgggaacgcttctgtgcccaacagctaggctggatgttagcccgtcattcctccactttttgacaaatatggatcttgtacatcagtataactggggtaaattcttgcttgataggctggttcgagaggtattgcgcttccatcaagggaagcaaagaactgttggtggttgtcttttatttttgcagcttttctactatgagaacatatctcttgaagggtcttctgctccagttccaacgattgttccata

SEQ ID NO: 39219 - DNA, 435 bp, Glycine max
  Clone ID: LIB3139-002-Q1-N1-A8
attttactttgccataacggtgagtttagagagggaataatggatggaagaggaggctgttgcatcgccaggtatgtacccggtgcatcccacgggtccaccgtcgacaaaataatgcttaggtttcgtccaatcgctcccaaacccgccgccgcggccaccgcttccgacggctcttcgtccgagagcagtgacgcttttctcaaaaacggaaccactaaaagaaagtacgtaagagataacaactacaccagcaaacgaagaatccgccggagaaagaacacttcctcgccggagaaaaagcagaagccggtggtgactcttccgttgcttccggaaactcccgatcggaaggattctcgggcaaaggatctaactccatcaccagctaaaccagtacgaaacaacaacaacaacaacaacaagagcaagaac

SEQ ID NO: 39220 - DNA, 430 bp, Glycine max
  Clone ID: LIB3139-002-Q1-N1-B1
agcaagcagagcttttgtcaattttctatcgaccttctcggtggaggaattttagtggacaaaactggagattggatcacacttatacaaaattctccaattagtaacttgttgagagttgctgcttggaagaaaggctgtttaatggtcaagattgtgatgtctgggaatgcagcagtcaaaaggagtgattgggcctcattggtacaagtgtttttaacaaacagcaacagtacagagcattttgatgcatgtaagtggacaaaatcagaaccacattcctgggaattgatcttcccaatagaggtatgtggtcctaataatggttttgaaatgtggagttctgagtgggcaaatcaaacttcatggcatttgagtttccttattgacaatcccaaacagtctacagtttttgatattctcttgggaa

SEQ ID NO: 39221 - DNA, 204 bp, Glycine max
  Clone ID: LIB3139-002-Q1-N1-B2
cagaacttgactgtgtgtggctctgtaccagatcttggttccggtggtgtgaagaagggggtgttgctcagcccggttcatacaaggggctgatctcatatggcgtggaagtatcactgtgcctaaagggttccaatgccattacaggtattatgtcgtagatactgacaaagacgtacttatatgggagatgaggaacacgcg

SEQ ID NO: 39222 - DNA, 411 bp, Glycine max
  unsure at all n locations
  Clone ID: LIB3139-002-Q1-N1-B3
cttcatgggaggaggcagccattaaacaacttgtaagtgttaggaaggacacaagaaaaggtggccctttagaaggagcacatgttcacatcgtccacttgtctgattcaagtgcttccttagatctgattaaggaagcaaaaagtcatggtgacagcataagtgttgagacttgtcctcattacttagctttcacgtctgaagagataccaaatggggatactcgttttaagtgttccccacccattcgtgatgcatacaacaaagacaaattatgggaggctgtattagagggacacattgacctattaagtactgatcattcaccaactgtgcctgaactcaagcttatggaggagggtgactntntaaaagcttgggggggcattatatcttngcaagttaatcttt

SEQ ID NO: 39223 - DNA, 311 bp, Glycine max
  unsure at all n locations
  Clone ID: LIB3139-002-Q1-N1-B4
ttcaaaaatatgccactcccatgagcccctagatgaagaaatgctgtctaaggttgcacaagatatggttgaggaatggttcgattgtgttgatgaggaggattcctttgaggaagtttctttaagtgcagcacttaatggtgttgagggtttggactatatggaaagaattcctcttgccacatctgagggatttcctcatgtgctttcacgcataaatggtgaaataggcaaaaggagatntgcctctggtgatggtgaagagattacactgattcacttaaccagtgttgttcaaggatggcaatttg

SEQ ID NO: 39224 - DNA, 338 bp, Glycine max
  Clone ID: LIB3139-002-Q1-N1-B5
tttcaagtttccatcattagctttggacttatccttctgaatgccactttcttctctttcacttccatgcgaagagatcttgcttgattcgaaaaggaaggaacttgagacttgtttctctcagagatggcgttgcctaaggttgatttcgaggttggaactgatggggttgctgtcatcactatgtgcaacccatccgtcaacgctttggccattccaactatcatggggttgaagaacatatttgatgaggcagctcggaggaatgacgtgaatgctatagtttggacttgcaaatgtggcatattttctggaggctttgatatcaaatgttatgc

SEQ ID NO: 39225 - DNA, 447 bp, Glycine max
  Clone ID: LIB3139-002-Q1-N1-B6
agaagactgttgatggtccttcaaacaaggactggagaggtggaagagctgcttcgttcaatataattcctagcagcactggagctgctaaggtactacctaattgttatatttaaaattatacatacattgctcctttagttggatggtgtaaattttattctaaagctttttgttctttattgaatgttgaatttgggataaacaacaggctgtaggaaaagttcttccagcgctgaatggtaaattgactggaatgtccttccgagtccccactgttgatgtttcagttgttgacctaactgtcaggctagagaagccagcaacctatgagcaaatcaaagctgctatcaagtaagtttttgaacctttttgaaaatctttgcatttggcaaatcgaatcatgttttttccccgttgacccaacaactctttgtgttcaaattt

SEQ ID NO: 39226 - DNA, 341 bp, Glycine max
  Clone ID: LIB3139-002-Q1-N1-B7
ttcggtcacagcatagcagagagtagtaagaagacactgcacagatctgagtggtgactgaaggaatctagcttctttcatttctcatcactattcttaggtctgagggctcattgccattatcatgtcaaggaggccagtaaatccttcgcgtcggttaggtgatggcggaagtataccatttgctgcatctatccggtctaaatctcaaaactctcccctactatctattgcgcttgtcattgtgggtgcaatccttctgattggttattgttacagcaattcaggtggagctagcggtgctattaaggatgtaagtccacttgcaggtggtccatcat

SEQ ID NO: 39227 - DNA, 449 bp, Glycine max
  Clone ID: LIB3139-002-Q1-N1-B8
caaacacggagttaatgttccgagaggcgtggctgtttcctctgttgaagaggtcagaaaggccatcaaggaccttttccctaatgaaaatgagttggtggttaagagtcaaattttagccggtggaagaggtttgggaactttcaaaagcggccttaagggaggagtgcacattgttaagactgaccaggttgaagacatagctgggaagatgcttgggcagatactagttaccaaacagactggtcctcagggaaaaatagttagcaaggtttacttgtgtgaaaagctgtcactagtaaatgagatgtactttgctataacactggatcgtacgagtgctggtccaattataattgcttgtagtaagggaggaaccagcattgaagacctagcagagaaatttccggacatgattataaaggtacctgttgatgtttttgaggaat

SEQ ID NO: 39228 - DNA, 241 bp, Glycine max
  Clone ID: LIB3139-002-Q1-N1-C1
cggaaacatcaagagtcctgctggctctgggtgctagaaatgtgtgggcaaagaaaaacagtgtttccgtcttcgccagcacatatattccacataaaaacagtgtctctgcaacgctctaaaatattcatctgctttgccagatatttttctgtctgccctcaggctccagctcctccatgagatatggactactctttatcgaccactgtggctactctcaagcgtcattgtctcccta

SEQ ID NO: 39229 - DNA, 445 bp, Glycine max
  Clone ID: LIB3139-002-Q1-N1-C2
gtgcgtcctgcaacaactctgttggctgatgggtgtccatatttggatgcaatggtgcatgatagttcagtgtctacaataccaggtgattttgtcattggtgtcaagttgacaaccataaacaatatgtgtgcatatgggctcaatcctggtatttcaggttctcgtcttttgggcaccattcctcagtccatttcacagcaaactgtttggaatcaaatggcaacagtgagaacaccattgaattttgattctagcaagcagagcttttgtcagttttctattgaccttctcggtggaggaatcttagtggacaaaactggagattggatcacacttatacaaaattctccaattagtaacttgttgagagttgctgcttggaagaaaggcttgttaatggtcaagattgtgatgtctgggaatgcagcagtcaaaaggagtg

SEQ ID NO: 39230 - DNA, 408 bp, Glycine max
  Clone ID: LIB3139-002-Q1-N1-C3
cgtctggcgatttaatagaaaagacacacacttcgcacttacatacgacttactgatggtgtggacaaatctagtgcgacttggcagtttataaagttagcagattgtgattttctcaagagaaactttaagcagatggctaatgttttgttggtggcttctgaggacaaggcaatgtttatggtcacaactttattatgttacgagttataatctgaaaatgcaagatgcttatcttgtcaacctagtaaatttgttacgagaattgtatatgcgcaatccagacgaagctccccaattgagaaggaaagctgtatctcgtgttgaatggctgcaaacatctgatgtgcctaccatagcacagattgaagagttccattcgatgcatatgatgatgaatgctcctga

SEQ ID NO: 39231 - DNA, 228 bp, Glycine max
  Clone ID: LIB3139-002-Q1-N1-C5
catgtacatgttaatatgtcttgcttatttttattttagttgtgttattgttttcccaattttccacggcaccttgaatgtggtgttggcttaatgatgtgataacgacgaagaaaatttggatcttttaatttgcatgatttttttctggcgtctattgtgctgatcaacggagaatgaaatgagaattaattttaggaaatacattccctgataataatggaatag

SEQ ID NO: 39232 - DNA, 426 bp, Glycine max
  Clone ID: LIB3139-002-Q1-N1-C6
cacacacacactctccccgaggtttgagagggtactggcatcgaaaaaatgggttctaaaactaatgcttcgggccatagagcacgaaggccgctgtcaatatttgctgtgcttggtctttgctgtttcttttatcttttgggagcatggcaaagaagtggatctgggaagggagataaccttgcattgaaagttaataacctgatgactgactgcactgttttacccaatttgagttttgaatctcatcacaatgatgtagaaattgtcgaacctgctgagccaaaagctaaagagttcaagccgtgtgatgtgaaatatactgattatacaccttgccaagagcaagaccgagcaatgacatttcccagagagaatatgatctatagagaaaggcattgtcccgctgaaaaggagaaattgcgc

SEQ ID NO: 39233 - DNA, 327 bp, Glycine max
  Clone ID: LIB3139-002-Q1-N1-C7
tccaattctccccccacgctctcccacgcgcagctgcgtggcgtcgaaagcgatgccgccgcggtccgccatcgcgtagattcggtccccgacgacggcgctggcgtgcatccacttctcccggacctccgtcggactggcgaccctctcccaccggcccgaggcggggtcaaggacctctgcccagttggcggagcgggaccaggtgtcggcgacgcagcctccgaggacgttgatcttgccgtggaggacgccggcggcggcgaactctcgggcgacgcgcatggtgggaccacggagccagctgtggatgcggccggtgaggag

SEQ ID NO: 39234 - DNA, 435 bp, Glycine max
  Clone ID: LIB3139-002-Q1-N1-C8
cgcgattccggctttggtgaagcatcttcaggccccggcttgaagtgaccgtgtccagaatccgttgccgttcgaccacgaggttgagaaagggagcgctttcacactaggacttcttgccgtcaagccagaacatcagcagttcattgttgacagtggtgccttaacacatcttgttgatcttttgaagaggcacaggaatggcttaacttctcgtgctattaatagtctcattcgtagggccgcaaatgctattactaatcttgctcatgagaacagcagcattaaaacccgtgtcaggatggagggtggaattccaccacttgttcatttgcttgattttgctgatgcaaaggtgcaacgagcagctgctggtgctctgcgaaccctggcttttaaaaatgatgaaaataaaaatcatattggtgaatgcaa

SEQ ID NO: 39235 - DNA, 409 bp, Glycine max
  Clone ID: LIB3139-002-Q1-N1-D1
gtgagttggaccagtcactagcttctgcagtcaatcaagcaactggccgtcttcgtttttgttggagtaatgtctgcttacacatgttcactctggattttctgaatcaagtggcaaatggccttgaaaaagacagcatttatcatcttgcagagaagaaaataccttccatacatggatatacaatgggattaaaacttgaacagtttatatttgatgcatttccatatgctcctacaactgcactttttgaggtgttacgggaggaggaatttgcaccagtgaaaaatgcaaatggatccaatgttgacactccagacagtgcgaaactacttgttcttcgactccatactcgttgggtagttgctgcaggtggcttcttaacacattcagtgcccttatatgcaac

SEQ ID NO: 39236 - DNA, 225 bp, Glycine max
  Clone ID: LIB3139-002-Q1-N1-D11
attttatgatgaatttaaagggttgtttttgtttctttactatgcttgcttcttgaacacggtcctgtcgtttttggcattgtaacctagtactagctttatgatgagttacatgtttgtaattttcgccaagtacttaactggtgcatgtgaatagatatgttgtaattatatattttgattccattatctatcaaaataaataaagattttttctttgttttt

SEQ ID NO: 39237 - DNA, 447 bp, Glycine max
  Clone ID: LIB3139-002-Q1-N1-D2
acaacttctaacacatacactactctctctctctctcttattgtatggccgccaattccagtagccgagggatcaccgccttagggaagcgagtcgccaaccggatctggacttccaacgcacctcctctcacttcaaggaggggagcatacagtagcggctcagtgtacgacaagaaccctgatgatgagatccagtctgggcaggtcccagacgatgtgatccaggcggcaacacaatccggcaaatactgggccccacatccacagactggggtatttgggccccccggaggaggtgaccaaactgcttctgccattcactctgatgcgctggaagagaaagcctggtttcgccccaccagtctcgaggatttcgagaagcctcacacccttccttaacaaccattggaagacatcatattataatactaaattaaaataacac

SEQ ID NO: 39238 - DNA, 420 bp, Glycine max
  Clone ID: LIB3139-002-Q1-N1-D3
atttaatccaaacccttgttctgatgcatggagtttggaatggctgaagcgtaccggatttcattgtgatatcatttgtgtcactggatggactgccaccccaatgcaggatgttcaggttacaattgattggtttatttcttctcaggaatgtgttcccaggacctattgtgttttaaatccacaaaatcctcttgtgttaaataggtggatggggaaactgactttcccccagggcacttcccgaagtgttaaaagaatgcctctttctatatgggggggagctggtgcaaagaatgctattctcataaatatgccaaatgctgttctttcaatgtggaaatattttgttggagatctcgtctttgaagtttctaagatgacttctccctacattaaatgtacaatacttttcttcat

SEQ ID NO: 39239 - DNA, 450 bp, Glycine max
  Clone ID: LIB3139-002-Q1-N1-D5
gaaatatttttcgaaactaattttgtggagatctgtcggaggggaaagcaaataattatcctctttccattcattcgctgttcacttggttctggtgagcgcagcagaggggaagaaagaagctgatgagaggagctcgttggatgaatatataatataaattggtttgtttgatgggcaacacttgccgcggatctttgaaaggtaaatattctcagggcttgagccagcccgaagaccattcaaagcccaccaccacccattctgatccctcctccgaccacccctctaccaagcaatctgcagaaaactacaacaacaacaactatcttcccttcaacgccaagagagagtccatcatgcgccgcggcctcgacaaccaagcctattatgtcttgggccataagactcccaacattcgtgatctatacactcttggccgtaaattgg

SEQ ID NO: 39240 - DNA, 443 bp, Glycine max
  Clone ID: LIB3139-002-Q1-N1-D6
cagcaattcacactggtctttgcttctcgttactcatttgtcacctaactttctattcttctcagtctcagatcagaaccttagccatggcagcgttccagaagatcaaggtcgccaaccccatcgtcgagatggacggagatgaaatgactagggttatctggaagtcaatcaaggacaagctcattttgcccttcttggagttggacatcaagtattatgacttaggccttccttaccgtgatgagaccgatgataaagttacaattgaaagtgcggaagcaactctcaagtataatgtggcaattaagtgcgcaactattactccagatgaagctcgtgtgaaggagtttggtctgaagtcaatgtggaagagtccaaatgggacaattaggaacattttgaatggaactgtcttcagagaaccaattctttgcaaaaac

SEQ ID NO: 39241 - DNA, 445 bp, Glycine max
  Clone ID: LIB3139-002-Q1-N1-D7
ggatgggctggtatagctgcagaggttttgatgttgaaaccggtaatcatatatcacttgaagaattttttcttggtgaagactgaaaaggatagggaagaggctatggatcctgggagtattggcttcaacactggagaacctcgaatacagttgtactttttgctgggtctagtctatgcttcagttacacctactgttcttcctttcataatagttttctttgggctcgcctatgttgtgttccgtcatcagattatcaatgtttataatcaagagtacgagagtggtgcagcattctggcctgatgtccattttcgtgtcattattgcactgatagtgtcacagatagttctgatgggactccttaccactaaagaggctgcttcatcaactccatttctaattgtactcccagtactgacgatatggttccatatatact

SEQ ID NO: 39242 - DNA, 447 bp, Glycine max
  Clone ID: LIB3139-002-Q1-N1-D8
gtggaggagaacaaggctacaattttggagctacgttatcgaacaaatgtgggtgagttgcttgggcatctgcgcaagaggctgccatggggtgatgcaaaagttgccaagcaacttgttgatgcaaaactatatgaactacttggtgatcggacagcagctgatgatgaaaagccttctagaaagaagaaggagaaacctgcaaaagtagaggataaggcagcacctgttgctactcctgaaaagtcacctgaagaagaccttaatccatttttaatattccctaatccagaggaaaatttcaaggtgcatactgaagtgccttttagtgatggtagtattttgagatgttgcaatacaagggatcttcttgacaaacacttaaaagcaacaggtggaaaagtcttgacccgctttccacccgaacctaatggatatttgcatatt

SEQ ID NO: 39243 - DNA, 262 bp, Glycine max
  Clone ID: LIB3139-002-Q1-N1-E2
gaactgtaagagtctcaaatatctggttgatgagtgtccttgggcgtttgtgaactagtatgtaatatttaattcacttaaataaagcgcattactatgtgcaatgagtgtgtttaaatataaaaaacaaaactataaaaactactagaaaaacaaacaaaaaaaaaaagaaaaaaaaaacaaataaaaagaagaaggaaaaacacagaaaaaaaaaaaggggggggccccccactagttacttcttaaacccgacaattaa

SEQ ID NO: 39244 - DNA, 278 bp, Glycine max
  Clone ID: LIB3139-002-Q1-N1-E3
ggaagggagctgtttgaacatgaacccaagcattgacattcagacatatactatgctcatgtcccgacaagtccatcatgctgtatgaggatcgatccaaacgcacattttctttaaatctgatcaaccttgttcagtcctcactcacggtgtgcaccactctcattgcccgtatgcagaagcaattgaagccaaactggactactgtgttgcctctagaggtggaaacattctcgtcgctgacagttatgttgatgatgataaacacgtcttctact

SEQ ID NO: 39245 - DNA, 251 bp, Glycine max
  unsure at all n locations
  Clone ID: LIB3139-002-Q1-N1-E4
ttaacttgcacaggagaggagagggacattgataaaaacctgtgttcggtactcagcatccgaagtttggcgggaagggaaatgaaaatgaacgggaaaatacgtctctccatccacatatgaaccaaattgctcattagtaaaataattatgtaaattgcttttgctgnaaacttgtatacaatgcatgtatacctatcttatgtctcattgcttctgccgaccttataatttattttattcccctcacc

SEQ ID NO: 39246 - DNA, 413 bp, Glycine max
  unsure at all n locations
  Clone ID: LIB3139-002-Q1-N1-E8
tttaagcgatacagcaaggataatgttcacagtttagtttactttggttttgcaatttgttttattgttggacttggagaggagaggagagggattttgataaaagcctgtgtttggtactttggttccgaagtttggcgggaagggaaatgaaaatgaaagggaaaatccctctctccttccacatatgaaccaaattgctcattagtaaaataattttgtaaattgtttttggtgtaaacttctatacaatgcatgtatacctatcttttttctcattggttcttctaaccttataatttattttattccccccccccccccccccccttttacttttggtgacaagcanattctgtanagagattccacatttcatcttttatcttattcgttttggctcaaaatattct

SEQ ID NO: 39247 - DNA, 445 bp, Glycine max
  unsure at all n locations
  Clone ID: LIB3139-002-Q1-N1-F2
attcgaaagggttaggctattgaattttaaataattacagatgaagagaatcgatagctttgattttaaaaattaatcataatcatcggttaggttgcaacataatacttaattcgcttaattttttaactgcgcctcagagtattcataacatattctattaaattaataagctggtgatgtaattaatattaatatgtagttttggcaatcttattggcagaagatgctaggtggagttcatcaatattctggtaggtataatatcttcatgaatctaatataacgttattcatagtgaaaataaatcgagccaaggaatttattaataattgtcttcatttcatattagctgcctgctgcgacttccttatgcataattntactgtttataagaattgtgaagctatacttgtgtaattgtcatgtaaattggttccttttt

SEQ ID NO: 39248 - DNA, 328 bp, Glycine max
  Clone ID: LIB3139-002-Q1-N1-F3
catatgagggattcacacattcagaaggcgctaatatgagcggcgggggttgctttcatcacaagccctgctcaggacatttgaacaggctgcgatcttgcctcctatcaagaattgtaatataccgactcttgaactcaaaaaccagtgaatgcaactggaagatagagcctgagagatggagacaccccttgtcatacagcactctgtgataattacagatcttggctatgacattcttaacagactgaatgaagatgatacatgatcatgccgcactatttgcctctatgaaatcttcatcgtactacctaatacatctgatcaa

SEQ ID NO: 39249 - DNA, 279 bp, Glycine max
  Clone ID: LIB3139-002-Q1-N1-F4
ctcgagccgtcaattttgaggcttttccccacaagctggtgcagttgggagagattcaggaaaaagttgtattgaaattttcacaagaggaatttcttacagcttggtcaactcaggtgcgtcctgcaacaactctgttggctgatgggtgtccatatttgtatgcaatggtgcatgatagttcagtgtctacaataccaggtgattttgtcattggtgtcatgttgacaaccatatacaatatgtgtgcatatgggctcaatcctggcatttcaggtt

SEQ ID NO: 39250 - DNA, 327 bp, Glycine max
  Clone ID: LIB3139-002-Q1-N1-F5
ctgatccatgatctgtctaggaggccctgaatgcgggggcggggattgatcgaatctcgagagctgcacaggccattagagcaggctacgaggttgcatccaatcaggaattgaaatataccgactcttgaacccaaaaaacagtaaatgctactggaagatagcacctgagagatggacacaccccctgtttacagcctctgtgatattacagattttggcttgacatacttaacagactcaatgaagatgatacatgacttaagcacgctctatttccctctatgaaatcgtttatcttactacctaatacatctgatcaacaaa

SEQ ID NO: 39251 - DNA, 404 bp, Glycine max
  Clone ID: LIB3139-002-Q1-N1-F6
gcaggtgattgatactggaattattactattctcgtaaaaattgtgaagaaaaagtctgatttgcctgtcagggagcggatatttctcctactagatgccacacaaacatcccttcgtggtgcatctggaaagtttccacagtattataatgcatattatgatttggtgagggctggagtgcagtttgctcaaagggatcaagtggtccaaccaaatattcctatttcacaacctagtaggactagtaatgtaccaaacagggagcaggcctcacctagacatgaagcagttgctcagccagcagagtcccagactgtccctgaatctagcattattcaaaaggctagcaatgcattagaaggactaaaagaggtccttgatgctgttgatgctcaaaatcctc

SEQ ID NO: 39252 - DNA, 199 bp, Glycine max
  Clone ID: LIB3139-002-Q1-N1-F7
gcatgcacccccacgtaacgctcttacattccgctcgtgaaaaaaaatttttcaaaaaaaaaaaaaaaaaaaaaaaaaacaaggaaaacaaaaaaaaaaaaaaaaaacaaaaaacaaaaaaaaaaaactaaaatcaatcccaaaacttaccaacccacccataccaaccctttccctcccacatccttcctaccccttc

SEQ ID NO: 39253 - DNA, 439 bp, Glycine max
  Clone ID: LIB3139-002-Q1-N1-F8
tgctttgctacttccaccctgtacagcgtatttttcgtgaatgtgccccattgctgttcctcatgtaaagaagaagaagaaaagttctgcccagacaaagtgaaaaaggaaaaaaggaaaaagatgattatagtgactaaatgatgtacaaatttccagctagcttaaccatccattcgtaattgcaggatgcgatgacttccttttcagcttgtggactaatagaccctctttgttctcaaaacctcactcccaagcattccaccatcactgcaaccattgattctcagtcatcgatttgcgccactagtaatgttgggagcccagtctcagctaataaaccagagggcagagagaatcatacgaaaggagccacaagtggttcctctgagccatctgatgaggatgatgaagcaggtgctcgtgaacagagcacaaa

SEQ ID NO: 39254 - DNA, 445 bp, Glycine max
  unsure at all n locations
  Clone ID: LIB3139-002-Q1-N1-G2
ctcctgctttcttcctttttcctttgcgcctgtgcatttcaggagggcaccacaatggccaccaatgcattcagctggcacatcatctctccatgcgatccgtcatgcctcaagcacaggcgtttgccttaattattggccctacatgatcttcaaatttcagccttgctagacagaacgttcctattagctggcacgcacacttaatttgcagcttgaggactagtgcagcctctttgctatcaacagctgactacgaagccttccaccatcactgccaccattgcttctccagcatctgatttgcgccactagtgaggatgagagcccactctcagctcataaaccagagggcacgagagaatcatacgaaaggagccacaagtgcttcctctgagccatctgatgaggatgatgaagcangtgcttgtgaacagagcacaaa

SEQ ID NO: 39255 - DNA, 356 bp, Glycine max
  unsure at all n locations
  Clone ID: LIB3139-002-Q1-N1-G3
ctcgcgaattcagtctcgattgaaattaaaatataccgcgatcacaggttgccgcaccttaagacgggatacaaacgcaacccctacacccatctatacaaatcctacatttactacaactacatcctgatcaattccttaattcaccaatcattcccttctgcgagacctacaaaccccccacgctcctccatccccgtactccgtctccgtcgccccttcccccttcatcttctccaacctccctccaccgccaccccttcctanatcctccgtctccgccgtccctccgccccctcccccgccgcgcgcctaccatctcttcttcttattcgtctcctcccccaacactctca

SEQ ID NO: 39256 - DNA, 337 bp, Glycine max
  Clone ID: LIB3139-002-Q1-N1-G4
ccaagaggagggaatttgaagggcccctctctcactcaaccctgtcaaaggtgtcaagcacatttttttgtttgtgtgtgtagcaaagggtggtggtgtggtgcttgttgtggttggtggtggagtgcgcatgataagcggcaaagtaaggttgttgcaatggggaaggttgtgttgttgtttctttgcatggtattggtggtggtgcctttggcttgtactgattcaattcagaagcttgaggttcagaagcacttgaagaacttgaataggcctcctgttaagtccatcaagagtcctgatggagatgttattgattgcattcatgttacacacc

SEQ ID NO: 39257 - DNA, 194 bp, Glycine max
  unsure at all n locations
  Clone ID: LIB3139-002-Q1-N1-G5
ctggttggcgttaatatggcgggtttcttaccataccggggcacctatcttcctaatctctcattgacgagatctataaccctatcaatgccagcgttcaccaatcactcccttcggcgataccttctanncccccactcgcctacattctcgtctttcgattccgtctccccttccccttttatcttcttcaa

SEQ ID NO: 39258 - DNA, 440 bp, Glycine max
  Clone ID: LIB3139-002-Q1-N1-G6
aagaggggctgagggagaggggatggaggacattgaggatttgctgattggaagtgcaactccaccgggctttcgtttgccattagcagcggctgttggcgtggggacaaagcggaatcaactctcttcttcttcgctttcgccttcacctgcaatccctggcactcagactatcttcataaagacctttggctgctctcataaccagagtgacagtgaatatatggctggtcagctttctgcttttggctattcattgagcgatgatcctgaccatgcagatctctggctcatcaacacttgcacggtcaaatccccaagtcaatctgctatggataccatcatatcgaaaggaaaatcttcaaataaaccactagttgttgctggttgtgtccctcaaggaagtcgggatttgaaagagctcgaaggaatcagcatag

SEQ ID NO: 39259 - DNA, 428 bp, Glycine max
  Clone ID: LIB3139-002-Q1-N1-G7
aagaagtagtggagtgatcctggttgggtgtgaaaaatgtcggacagcgataccataccccttcacccatcttcccaatccgacattgacgagatcgagaacctcatcaatgccagcgttcaccaatcagtcccttcggcgagacctcccagtcccccacgcgcctccatccccgtctccgtctccgccgccccttcccccttcatctcctccaacctccctccaccgccacccctccctaaatcctccgtctccgccgtccctccgccccctcccccgccgcgcgccgacatctcctcctccgggttcggctccgcccccaacacgctcactgagcccgtctgggacaccgtgaagcgcgatctctcgagaatcgtgagcaatctgaagctcgttgtgttccccaaccctttccgcgaggaccccgg

SEQ ID NO: 39260 - DNA, 164 bp, Glycine max
  Clone ID: LIB3139-002-Q1-N1-G8
attgaatgataaattattccctcttcaaaatgggggatcctcagtctcaagaaattacttggtcatatttttaggtatgggtcttgttctgtttaaaaccatttgtaataccgtcaaaactatggatattcttgttcctcagatgtgtttttgtgttttattac

SEQ ID NO: 39261 - DNA, 449 bp, Glycine max
  Clone ID: LIB3139-002-Q1-N1-H1
gacttggtgagtgtcactgctgaagagagaaccacgcagaactgacgcaatgggaagcacaagtttgcttcatctattacttggtgttgttttggctctgctgagtgtgtctcttgtggaaggagaagatgcatacaaatactacacgtggactgtgacatatggcattctttctccactaggtagtcctcagcaggtggttcttatcgatggtcagtttcctgggcctcaactagacttggtaactaatgaaaatgttgttctcaaccttgtaaacaagttagatgagccatttcttcttacttggaatggcatcaaacaaaggaaaaactcatggcaagatggggtattgggaaccaattgccccattccttccaactcaaattacacatacaagtttcaagtcaaggatcaagatggaacctacacatacttttcatcgacttcac

SEQ ID NO: 39262 - DNA, 179 bp, Glycine max
  Clone ID: LIB3139-002-Q1-N1-H10
aatctcccctacaacatcaatatttattcaacccttttctcacaactcttcttctcttttttttacctaaccacctacattcctatatttttaaccttattcttattaaacaacttttacctctccacctcacttttctttactacttttttacatcattctctacctaaacttctttt

SEQ ID NO: 39263 - DNA, 152 bp, Glycine max
  Clone ID: LIB3139-002-Q1-N1-H11
aattgggcaagtttctgcagatcgaatgttatgagctgataggaccattttatctggcttagtgagagaggtcttatacattataccacaattttaaaacaataatcacaggaaatagtaagttataatataaaaagaataattttttcagt

SEQ ID NO: 39264 - DNA, 380 bp, Glycine max
  Clone ID: LIB3139-002-Q1-N1-H12
cggctcgagggggcctcaaaccacggtggtttctgatctgtggtagtctctctaagtcatccctgagcttcatatcaagagcattagacacaacctgagagtactttccatccttgtaatccttcttcctgttcaaaaaccaccgtggtttgaggcactactggggccttcgtgtccgtggtcagcacaccaagactactggccgcaggggaaagactgttggggtctctaagaagcgttaagctattatgttttggcttggatattagattttgtttaggaggcatgtttgaagtacactacatgttttgcatcataccaactttgtatccgttgttaaatggcttgacaatttcaattttgtttgttatttgcatctg

SEQ ID NO: 39265 - DNA, 214 bp, Glycine max
  Clone ID: LIB3139-002-Q1-N1-H2
tgactagttgagtgtcactgctgacgagagaaccacgcaggacgtgaggcactgaagaagcacaagtggtgctacatctatgacttggtgttggtctggctctgaccagtgtgtctatcgtggaaagtgtagatgcatacagatactacacgtggactggggcatattggcttctttctccactaggtagtcctcaacaagtgggtcctatcga

SEQ ID NO: 39266 - DNA, 426 bp, Glycine max
  unsure at all n locations
  Clone ID: LIB3139-002-Q1-N1-H4
cttgtgcatcccttaactcctgttatggcttccttgctggtggccactcttctgcaacaaagttggatgggtggtggtggtggtggggtgaagggtcgtgatcatgatcaaggtgacaatactttccatggcttggcaccgctacaagggttgcgagtggaaggggatagtaataataatattggctcaaaagaagtgaaaggtgaaggacaaaacaggtttgagtggagcaataatagtaacaacaacaacaacaatggtggtggtggtcaaaaccagatggagcatgngtgtttgtctgatcctaattcgctttattggaacactgcaacgggtttgggtgcttggagtgatcaacctaacantggtccttcagtcacttctctgatctanaaaaaaagatgaagcattttttttaaaaagcta

SEQ ID NO: 39267 - DNA, 329 bp, Glycine max
  unsure at all n locations
  Clone ID: LIB3139-002-Q1-N1-H5
gaacttggttccttctatgctgaatttcttaatggcagggccgagagtgggggagatcaattggtcaaagactttgattttctttctaatattgaaagtgctaatttatatgtagagcagccgngacctgacgtctattctacatgtatgagaaacatatcgcgtctgctctacattgaggcttcactgaataatactgattatacattttactcctaagtagaccgatcatgaggttgttaacttttgagattgttattctaaggcttgtgatcttgttaaatgagccgtttgtttttactttgaatggccttcaacagaggtaaaac

SEQ ID NO: 39268 - DNA, 447 bp, Glycine max
  Clone ID: LIB3139-002-Q1-N1-H7
gctcctgctagtgcggctacggctgcagaggctgtaagaggtgcccagacttgatctacactgagtcaaccaacaccgagacctaggtcatgggagtggcacctgttagggctcactttgagggtgctgaaatgggtgtgcccgctgagaacgatggctgcaaatgtggaccaaactgctcctgcaacccctgcacttgcaagtgaggtgttgggagagcaagcttcaagcatagatagcccttaattaggaataatgataaactattaatgtgtagctaagaacttatgtattatgtctgttatggttttcgtgcactctggtgttttgtgttaaacaaacatccttagaataaagtggtcatgtcttgcctttcagcaagttcaagtgttttggacttgtgatgggtgtgttaagctcatggttgcttcctttttttttttttta

SEQ ID NO: 39269 - DNA, 431 bp, Glycine max
  Clone ID: LIB3139-002-Q1-N1-H8
cttgtgcaccctcaactcctgttatggcttccttgctgagttgcactcttctgcaacaaaattttatgggtggtggtggtggtggggtgaagggtcgtgatcatgatcaaggtgacaatactttccatggcttggcaccgctacaagggttgcgagtggaaggggatagtaataataatattggctcaaaagaagtgaaaggtgaaggacaaaacaggtttgagtggagcaataataataacaacaacaacaacaatggtggtggtggtcaaaaccagatggagcatgtgggtttgtctgatcctaattcgctttattggaacactgcaacgggtttgggtgcttggagtgatcaacctaacattggtccttcagtcacttctctgatctagaaaaaaagatgaagcatctttttcaaaaagctatatatg

SEQ ID NO: 39270 - DNA, 320 bp, Glycine max
  Clone ID: LIB3139-001-Q1-N1-D5
aaaatgcattggaaaattatgcctataacatgaggaacacaatcaaggatgacaagattgcttccaaactgtcttctgatgataagaagaaaattgaagatgcgattgagcaggctatccaatggctagatggaaaccaacttgctgaggctgacgaatttgaggataagatgaaggagttggagagcatttgtaatcccatcatagcaaagatgtaccagggtgctggtggtgatgcgggtggagccatggatgaggatggtcctgcagctggcagtggaagcggtgctggacccaaaattgaggaagtcgattaagca

SEQ ID NO: 39271 - DNA, 380 bp, Glycine max
  unsure at all n locations
  Clone ID: LIB3139-001-Q1-N1-E1
ttgttccatgttgtttactgcaatttggtatcccttgagcttgagaatttggggtattccacacaattaattccattgccggttaaggattgtttgggagaacaagtttgggaaggtgtgaaacaaagatattggcagctcgatacgtactatcttcctgtctgtcaggccgtagaggaccctgagtgaggcaggaaatggatttcctgcagcttagaaagaactgcaccatgtgcagttaaaatttcaccgtccatgcaagttttttctcttctttatatattaaaattaaaggaataattgaaatctcatgcaggttttttttttaactgtagagaatcntaatccccagtgatgtatggattggatttttaatcaca

SEQ ID NO: 39272 - DNA, 248 bp, Glycine max
  unsure at all n locations
  Clone ID: LIB3139-001-Q1-N1-E2
ggtaaatatggcatactctcaggttcaaaagctggaagctaacgtgagtatcaaggcttcagctgaacagttctatgatgttttatgccacaagacacaccaaattcccaaaattttccctgaaaaagcactgtcttgtgaaattctgaaaggtgcatggngccaccaaggatccaatatcttccggaattatttataccaaggaaaaggttgggtggcctatggaggggttggaggccttaaccagg

SEQ ID NO: 39273 - DNA, 383 bp, Glycine max
  Clone ID: LIB3139-001-Q1-N1-E8
tgttgatcgagataactagaaacagtgtgatgaaaatgaaggtccttgttttcttcgttgctacaattttggtagcatggcaatgccatgcgtacgatatgttccctctccgaatgaacactggctatggtgcccgtactccggaggtgaaatgcgcaagttggaggcttgctgtggaagcacacaacatctttggctttgagaccattcctgaagagtgcgttgaagcaacaaaggaatacatccatggcgaacaatatagatcatactccaaaacagttaaccaacaagcttacttttatgccagagacctcgaagtccatcccaaggacacatttgtgttcagtatagatggcaccgtactctctaatattccatactac

SEQ ID NO: 39274 - DNA, 397 bp, Glycine max
  Clone ID: LIB3139-002-Q1-N1-C4
agagacgtgactgtattttcacttggaatgatcaaggcagaattgatgggaaaacgtttcttgtgtcgcactgctgctagttttgtttctgcccttatgggaatcatctctaagcctccaatattgccaaatgatattggaatagctagagaaaggaatggtggtttgatagttgtgggatcatatgttccaaaaacaacaaagcaggttgaagagctcaaattacagtgtggtcagttcttaaaaagcattgaggtatcagttgaaaaacttgcaatgagtcctattgaggagatggaggaggaaatcagtagagcagctgaattagcagatgtatatcttaaagctcataaagatactctaataatgaccagccgaaatctcataactggaaaaa

SEQ ID NO: 39275 - DNA, 243 bp, Glycine max
  Clone ID: LIB3139-002-Q1-N1-E7
ctcgagccgtcctacagggggataaaatcgaactttcggcagacaaattcattttacgttccccactccactatattcccatccccacacacctctcattgtactcttactgctttcaaaagttgtgacaaatccatgaccgtccatgcctcatctactgctacaccaccaaaaccctcacctactccgacgacaatctctacgatcgccgcatgtgcaccggcctgcacaaaatcatcatct

SEQ ID NO: 39276 - DNA, 341 bp, Glycine max
  Clone ID: LIB3139-003-P1-N1-A1
gaactaacagctgccacaagaaatttccgtaaagacagtgtgttaggaggagaaggtgattttggatcagttttcaagggctggattgataaccactcactggctgctgcaaaacctggcacgggcgttgttgttgctgtgaaaagacttagtttggatagcttccaaggtcacaaggatcggttggtgagtttaatattcttctttaacccctttgatttgctcctgctaattaagaatcaaacactgcctctgttacatgtttaatttttaactgcgtttgagaatttttaccatataggcaaggcacggtatgactcatgaagcaagtcttgaggtgc

SEQ ID NO: 39277 - DNA, 75 bp, Glycine max
  Clone ID: LIB3139-003-P1-N1-A10
gagagttttaatttactcttgcagttattagtgaaagattgagcggtctcatgttcattgctcagtttaatcatc

SEQ ID NO: 39278 - DNA, 260 bp, Glycine max
  unsure at all n locations
  Clone ID: LIB3139-003-P1-N1-A11
attgccattcttgaacaacaagccaacagcaatttgtaagaaagatgtttggagagttgaatgtggaatcccttctggatttccgctcacagttatttgtaatagcatttttaatgagatgctcattagatatagctatgaaaaattactgcgcgcggctnaagctncgaggattgttaaaacattcttggagctttagcctggcgccgttatttttttttcacattcttcatatgttcttttttttttattttatcttt

SEQ ID NO: 39279 - DNA, 335 bp, Glycine max
  Clone ID: LIB3139-003-P1-N1-A12
ggcaattttagagcaagtgttgatttgcagcgcactcatcgtattaaaggaatgattaaaatggtggccacagttggtattcctgagaatacaggtatagcattggcctgtgctatgaatagttcttttagggggcgcgccagttctgatatttacaccatctgctctcaagactgtgaattatggaatcctgcttgcacaaaagcaatgactatgtcatttaatccaaacccgtgttctgatgcatggagtttggaatttctgaagcgtaccggatttcattgtgatatcatttgtgtcactggatggactgccaccccaatgcaggatgttca

SEQ ID NO: 39280 - DNA, 343 bp, Glycine max
  Clone ID: LIB3139-003-P1-N1-A2
gtatggtgtggtcagtgttgagctttttctcagcggggaaatatcggagaaggagggtgtgttattgtctggagaatatttgaggcaaaccttcgtcctttcaaaacgaagcgtcctcccactttttctggaatcaaccattcacgccccccttttactcttcttcttccttttgcgtttactcatcgttgtttttgtttcactcttaaaagcatgttgctttatcgggtttgttggttcttttgaatagagtggttttgaggaaattgggtttctctgtttcgtcgtgaaaaaaaaaaaatgttagctttgctgtttgccctgatcatggtttctgatggtt

SEQ ID NO: 39281 - DNA, 340 bp, Glycine max
  Clone ID: LIB3139-003-P1-N1-A4
agattacaattaccaacgacaagggcaggctttctaaggaggagattgagaagatggtgcaggaagctgagaaatacaagtctgaggacgaggagcataagaagaaagtggaggccaaaaatgcattggaaaattatgcctataacatgaggaacacaatcaaggatgacaagattgcttccaaactgtcttctgatgataagaagaaaattgaagatgcgattgagcaggctatccaatggctagatggaaaccaacttgctgaggctgacgaatttgaggataagatgaaggagttggagagcatttgtaatcccatcatagcaaagatgtaccaggg

SEQ ID NO: 39282 - DNA, 338 bp, Glycine max
  Clone ID: LIB3139-003-P1-N1-A6
ctcgagccgattcggctcgagcacaaaacaaagccttctttttcttgtgtgatctgacaagcccctaaaagccaccatgtcttccttcaagagcaaataccaagatgagttgattgccaatgctacttatattggcaccccaggaaagggtatccttgcagctgatgagtcaaccggcacaattgggaaacgtttggcgagcatcaacgtggagaatgttgaaacaaacaggcgcattcttcgtgagctcctattcactgctcccggttgtcttgagtgcctcagtggtgtcatcttgtttgaggaaaccctctaccaaaaatcagctgcaggagtac

SEQ ID NO: 39283 - DNA, 342 bp, Glycine max
  Clone ID: LIB3139-003-P1-N1-A7
ctcgagccgcgccagttctgatatttacaccatctgctctcaagactgtgaagggtggaatcctgcttgcacaaaagcaatgactatgtcatttaatccaaacccgtgttctgatgcatggagtttggaatttctgaagcgtactggatttcattgcgatatcatttgtgtcactggatggactgccaccccaatgcaggatgttcaggttacaattgattggtttatttcctctcaggaatgtgttcccaggacctattgtgttttaaatccacaaaatccttttgtgttaaataggtggatgggaaaattgactttcccccagggcacttcccgaagtgt

SEQ ID NO: 39284 - DNA, 341 bp, Glycine max
  Clone ID: LIB3139-003-P1-N1-A8
gttccaagatataaaatctctcttttacaagagatttgtgctagaatcaaagggcaacacacacaatcaaggaaaagtgaaagggaaaatttcagaaacttttttattgagtcagaactttcgcactcatgctggagtgctgaaactatcccagagcaccattgaacttctttttcgttttttccctcattctattgatgttttgaagcctgagaccagtttgatatatggggaaggtccagtggttcttgaatgtggaagtaggaaaaatgcaattgtaactatttttggcaacagtggacatgtggctggaaaaattgttggctttggtgctgagcaag

SEQ ID NO: 39285 - DNA, 208 bp, Glycine max
  Clone ID: LIB3139-003-P1-N1-A9
cgatctatttatgaggaggtacaccagtgacgacaatcatagcttttcgaagatgctagcaaaagtgtattacatgaggaaagaaagggctgggtctttgaatgaggataggcaggggatcgagggcaggatgagggataggaatactggtggacatagaccctgatctcagcctgctggttcccttagctggtggtactacccatgc

SEQ ID NO: 39286 - DNA, 343 bp, Glycine max
  unsure at all n locations
  Clone ID: LIB3139-003-P1-N1-B1
ttcactcactcttctattttccaactttacaatttcaggtcanatagcttcttggctgggtactgactcactcaatggctgaccgagttcaccccagccactcgccttccgtttccgccgattcacaaccgccatcgcctcaagactcccccgtcgttccgaaaccgccgtcgccaccgtcaccggagaagccagtgcctccgcctggaacctacgtcatcaagatccccaaggatcaagtctaccgcgtccctccgccggagaacgctcgccgctacgaccaatacgctcgccgtaaacaccgccggagccgatgctgctgctgcttctgctggctcatcgg

SEQ ID NO: 39287 - DNA, 335 bp, Glycine max
  Clone ID: LIB3139-003-P1-N1-B11
atcaactcaacacaaaccaaaactcaagctaaggggctcactctctctctcagcgcgagatcatagtatcatattcaatatcatttcataccaaacacatggctttggaagctctcaactcaccaacaacaaccgctccatcttttccctttgacgacccaactattccatgggcgaaacgaaaacgttcaaagcgttctcgcgaccatccttctgaagaagagtacctcgccctctgcctcatcatgctcgctcgcggcggcaccaccaccgtcaacaaccgtcacgtcagcccttcaccgtcacagccacagccacagcccacaccagatcct

SEQ ID NO: 39288 - DNA, 334 bp, Glycine max
  Clone ID: LIB3139-003-P1-N1-B12
ttaaaattcgggatttccgtttctttccacggggttcattttctccgcttcaggcattacttcattttggaacataattgcttcatctttctggactgagaaaattctgtaagttgatgattagaagatgaattgtttcttcttgaaaaacaaatcaaaatccgacgcagaattaccaaagcgaaggaagaagaaaaatcaggtggggaataatggagcaagcaagtcctccaccagctcgccgctaccatcgccaaggagcataaaagaattgtacaaagagaacgaacacaatttcagaatcttcactttgcaagagctggtagatgcaaca

SEQ ID NO: 39289 - DNA, 337 bp, Glycine max
  Clone ID: LIB3139-003-P1-N1-B2
ctaatctccatctaatagtgttaatttgtctttctgtggctctatcggtcatgggggcttttgcttttgatgaggaaaactcctccaccgtggctccggcaacactctacaaagctctgacaaaagatgctgacactatcatcccaaagattattggggccatccaaactattgaaatcgttgaaggaaatggaggacccggaaccgtcaagaagataacagctagtgaaggtgaccaaaccagtttcgtgctgcaaaaagtggatgcaattgacgaggctaacttggtatacgactacagcatagtgggagggacggggttgcatgaaagtttgga

SEQ ID NO: 39290 - DNA, 338 bp, Glycine max
  Clone ID: LIB3139-003-P1-N1-B4
gcatccttcgcttcaatctctctctctctctttgcgctttctgcaaaccgaacatgtcatctccaaagggatcaacaggtcgaaggagaaatggggctgacattcacgaagcttttcagccggcttttcgcgaagaaggaaatgcgaattctgatggttggtcttgatgctgctggtaagaccactatcctctacaagctcaagctcggagagatcgttactacaattcctaccattgggttcaatgttgagactgtggaatacaagaacattagcttcactgtttgggatgttggtggccaggacaagatttcgcccttgtggaggcactacttcca

SEQ ID NO: 39291 - DNA, 332 bp, Glycine max
  Clone ID: LIB3139-003-P1-N1-B5
ctacaaccgtctaccatcctttctgctcataccaaggattttctatctctctggcgcactctgtcatcatttttctacccataactttcattttaatttcattctttcaacctcaaatttatttcttcaacctagattatacgttaaatcactctaattggaaccaatgaaaaacgatacaatactaattactcaagaaattaaaattcttactaattactccaatttgaagacactatttgctaatctttttttacccaatttggggacacttaccaaatcctatttttattaacctaaccacctgaattttgattgcgatgataaatctc

SEQ ID NO: 39292 - DNA, 333 bp, Glycine max
  Clone ID: LIB3139-003-P1-N1-B6
aaacaggaacaaagaggtgttccaagaaactaaaaggctagtacttaatcccatcttctgcaatcccagtttcactgatctctcggagaggatggattatccgtacattctaggagggatcatggcttgtagttttgcatttttgtatgttgtgtacagttttggagcaaagaaggtcacagattcaagttcaatacatgtaaagagtaatgagtgtgcaaagacatcatcagaaggtggaatatgttcttcagatgaggatgcaggaagtgctgacatcatcattgtgggtgctggggttgctggtgcagctcttgcttacactctttgaaa

SEQ ID NO: 39293 - DNA, 341 bp, Glycine max
  Clone ID: LIB3139-003-P1-N1-B7
attccaatatattccattctctctgtgtatttccggacctctcccttcaagatggagatcttcgtcaagaccctcaccggcaagaccatcacccttgaggtggaaagctctgacaccatcgacaacgtcaaggccaagatccaggacaaggaaggaatccccccggaccagcaacgtctcattttcgccggaaagcaacttgaggacggccgtacccttgctgactacaacattcagaaggagagtactcttcacctcgtcctccgtctccgtggtggcatgcatatcttcgttaagacactcaccggcaagaccataaccctagaagttgaaagctccga

SEQ ID NO: 39294 - DNA, 343 bp, Glycine max
  Clone ID: LIB3139-003-P1-N1-B8
tcttcattgctctcaattatcaatggctccccgggcgcatttccattctcaacgctgggtaccagaacctgatgtcttcattcacacttcccatggaacacgcattccagcccacgcacccattctggcttctatgtccccggttctggagaacttgatagatcgcccacgtaagcatcggagctccgagagaataatccaaatccacggcgtcccctgcgacgctgtcaccgccttcgtccgattcctctactcctccaggtgtacggaggaagagattgaccagtacgggatgcacctccttgcattgtcccacgtgtacatggtgcagcaactgaaacag

SEQ ID NO: 39295 - DNA, 341 bp, Glycine max
  Clone ID: LIB3139-003-P1-N1-B9
agctggttcagtttggagagattcaggaaaaaggggtattgaaattttcacaagaggaatttcttacagcttggtcaactcaggtgcgtcctgcaacaactctgttggctgatgggtgtccatatctgtatgctatggtgcatgatagttcagtgtctacaataccaggtgattttgtcattggtgttaagttgacaaccataaacaatatgtgtgcatatgggctcaatcctggtatttcaggttctcgtcttttgggcaccattcctcagtctatttcacagcaaactgtttggaatcaaatggcaacagtgacaacaccattgaattttgattctagc

SEQ ID NO: 39296 - DNA, 342 bp, Glycine max
  unsure at all n locations
  Clone ID: LIB3139-003-P1-N1-C1
gagaaacactttcaactctctctctctctctctaagagggtcgacgatccaatgctgaggtcntctcttcccgcacctcgagtcgctcaagccgcaatgttcagcttgattcccgaggattggggcgaacatgttagtccctgggtcaaagagatttctcagtacttcgattgcctcaagagcctccacttccgccgcatgattgtcaaggattccgatcttcagaatctcgctcgtgaccgtggtcacgtgcttcatgctctcaagcttgacaagtgcttcagtttcaccactgatggtcttttccatatcggtcgcttttgcaatgataagctgggttta

SEQ ID NO: 39297 - DNA, 332 bp, Glycine max
  Clone ID: LIB3139-003-P1-N1-C10
aaggaaacgtgttggataatatttctgaatctgggcatgatgttccttcaactctgagaatttcctctgacattcctctccgatctccatagcttgtctttccacacactgggaggatatttttattctctcaatgttggattcaatggagtcaatttgagaagtccttggtaggtgactgtcagagaagttgttacaatttccagtgtagagtaatagccatgaaatattaattgaaaatttgaaatccttccttttattttatttatttttcattttaactttgacgtttgggatttgagtgatccctttcaagcttccattcaaagcac

SEQ ID NO: 39298 - DNA, 335 bp, Glycine max
  Clone ID: LIB3139-003-P1-N1-C11
cggctcgagttctcctcctacaccaacaaaaatggcgccttctccacaagaaatgatcttccgatccccactccccgatattcccatccccacacatctcccattgtactcttactgcttccaaaacttgtcaaagttccatgaccgtccatgcctcatcgacggcgacaccggcgagaccctcacctacgccgacgtcgacctcgctgctcgccgcatcgcctccggcctccacaaaatcggcatccgccagggtgacgtcatcatgctcgtcctacgcaactgcccgcagttcgccctcgccttcctcggcgccacccaccgtggcgccgtcg

SEQ ID NO: 39299 - DNA, 334 bp, Glycine max
  Clone ID: LIB3139-003-P1-N1-C12
aacacgagaaaaatcttgctttgacagaagaggaaaagatggaagtgattagaaatagaggcattcctgctgatgttcttgcaaagcgagctcatgaatttgaaaaacatgttgctcatgaaagcctcaaggatcagattcctgctgttgacaagttgtattctactaaggttaataaatttgcaaaaattatgaaccttagacaaagtgttgttggtgatcttaaacttcttactgatgggaagttgtatgagggtaagcatattcctgtatctaatattagtgcaggggaaaatcatgtagttcaaatacccttaatggcacaggaggaaat

SEQ ID NO: 39300 - DNA, 392 bp, Glycine max
  unsure at all n locations
  Clone ID: LIB3139-003-P1-N1-C3
agagctatgacgncgcatgcccgccttccttagcctcggatttcggttcaagtccacttttgacactgccaagtgccatccattctggggctttatgttattacagcagactgaactgaagcaagttccatccatgtctcggcttcaaaagtcaacaggtcagcagcaaatgtttcattccctacaccaaattctgtccccatacatgtcaagtgttgttgtatctgtgttattgtggcatgtcattgctgtgcttttggtttcaaatttggcctttgcttcaagccttgaggaaacaaatggacacccaaaacacaaaggtgaggtgatctatgcccacaatggagctgttgccactgatgaccgtagatgctcaaggattgggaaggatg

SEQ ID NO: 39301 - DNA, 338 bp, Glycine max
  Clone ID: LIB3139-003-P1-N1-C4
ctcattctctctcttaatatcttcctttctctttcgctttctagtttttctctttcactctcttctctttcgtttttctctgcctttgaatttgccagcgacgaagcatcgagaacctcggaagagtaaaacgagtcaaacatgtcgcccaacaacgtggaatctgggacaacggatgatacagaggtagtaggacaacaacaacgtcatagtccaatacatgatattgccttgcagatacagacacaggctccggtggaaacccatgggctataccaaacaaatgatgttcatacgcgtccgatgggcatggccgtgatagacgcgatcctcccacc

SEQ ID NO: 39302 - DNA, 274 bp, Glycine max
  Clone ID: LIB3139-003-P1-N1-C5
cccaaatcgttgccttcctctttcagcaaagttggggggtgttcaatctcttatagatggcgctacactagatgctcataatgccgctatatctgcaatgaaacctgtaataaactgggttgatatgcacatattatcagaaaaagtgattctggagtcactgaagaggggacatgtcatatcggccgatgtccataccatgatggctacacgcttctgtgctgctatgatgccacattttctgccgcatttgcttaccatgggcacacatgac

SEQ ID NO: 39303 - DNA, 333 bp, Glycine max
  Clone ID: LIB3139-003-P1-N1-C6
ttctctttctcactctcctctgatatttctatattgtggtgctctgtgtctctacgagctggatccaacggtccaaaatgttcggggcttgtgctgcttgttttcccaggttttagagctccaaaccttcagatccacctcattcgtctccagatcttccttccttgataacgttttcgggttcgagaaggcacttgtttgtttgtcgtacgaaatggagactaaaccgagttcggtgatggttacgctcagttacggcgcgttgacgtgcgccgcggaagttctcgcgactttgctagcttctgctgtcgtcaaagccacgcctttggcccc

SEQ ID NO: 39304 - DNA, 320 bp, Glycine max
  Clone ID: LIB3139-003-P1-N1-C7
cgctatctatcacactgagtgagagtggctgaaggggggcttcagcaaggcacggtcttataatcacctcatgcaattcaaccgtcaactaaagaggtgtgtctattacttgaacgcatggataaaatgtagttatcctggatctgaacttaaaaagggctttgagctgccggaacaggatggtggaataggatgggaacgactgcaatccatggttagggacagagcatgacaaatggtgagtgcataatcagcacttgctaatgcttactttgataaataatgcttgtttgcattgtctatcatgcaaacactgagac

SEQ ID NO: 39305 - DNA, 296 bp, Glycine max
  Clone ID: LIB3139-003-P1-N1-C8
cgagttcttgaaacaccacacacgcctgggctctggatctctgctgtctctggtggttgggatgcattccctatgtcatgaactcgctcaaggacgttcagcacaagtgcggtcgttgcggcgtcctcctcgctacctggcatcgtagcggcaccaccgaggtgcacattcactcttaagtggtgtttgaatcagggcatgtacacatagtttgataacacaggaagaggcgacagaggaaggcgcataattgataccattggagtgagggggtctgcaagtgtcgcttcaagagg

SEQ ID NO: 39306 - DNA, 335 bp, Glycine max
  Clone ID: LIB3139-003-P1-N1-D10
ctgttctatctcaagcaaacttttgaccaaggggggcagactgtggaagatggacgtacccctgaatcaagcaagaggtatcttagaggagaaagacagatgttgagcaagcaaatgcagaagaagctgtcaaaatctgaaagagagaacctgtacaataattggggaattcgtttgagttcaaagaacagaaggttgcacttggcccatcgcttgtggtcagaatcagatgacttagagcacattagagagagtgccaccattgttgcaaagctggttggttcagtagagccagatcaggcttttaaggagatgtttgggctcaactttgcccc

SEQ ID NO: 39307 - DNA, 332 bp, Glycine max
  Clone ID: LIB3139-003-P1-N1-D11
cagtaagagccaaggagaaaagaaaaaaaaaaagagctggactccttcaattagtgcattgtttcttttcttcaaatggtagcaagaagacattgttaatttgagagatggcgagttacgaggctattaagaactttgatgatgatgatgatgatgatgatgatgtggagatggcactcccccatagccagatctctgaatcaagatctgccactgtttcttcccccattggccaaactaccccgcttcacattcacaacattattgaggaacaacgcattatcttcaggcaccaacctcaacccaaatctccgcgtctggtttctcttgat

SEQ ID NO: 39308 - DNA, 331 bp, Glycine max
  Clone ID: LIB3139-003-P1-N1-D12
ctttattcttatatctatatttcagttcattttggtctccaataatttcttctggtactttagagaccttgctgcaaaggttctctcttagcatggtaacaatgggtttgaaagcactttttgtttggtgcataatatggttggcgtttgcacagttgtcactaggaggaagagtgaggcattacaagtttgatgtggagtacatgatcagaaagccagattgcttggaacacgttgtgatgggaatcaacggccagtttccaggcccaactattagggctgaagttggtgacatccttgacattgctctcaccaacaagcttttcaccga

SEQ ID NO: 39309 - DNA, 339 bp, Glycine max
  Clone ID: LIB3139-003-P1-N1-D2
gtcaaaagtttttaaattttgtgaggttcattatggagaaaagggacaagcttagttgtcaagttggaatcaacccatactccatggaatggactggtttggccaatagattactgagtaagggcaatgatattctgtgttgcgattatgctagttttgatggtttgattaccaagcaagttatgagcaagatggcagaaatgataaacagtctttgtggtggtgatgaaaaattgatgcgtgaaaggacgcacctgctgttggcttgttgttcaaggatggcaatttgtaagaaagatgtttggagagttgaatgtggaatcccttctggatttccgc

SEQ ID NO: 39310 - DNA, 227 bp, Glycine max
  Clone ID: LIB3139-003-P1-N1-D4
ctccaaaatgagagcaagttgtaagattttggagagtcaactaactggattaaaaggggtcactctaccttacaaataaatatcttccaactcctctttttctactcttccctataattaattacttaccttttcctacattcgtaccatctttccctataattattcattttatatcttttctttatcatattcatattcttttccttttttaaattgtttttctt

SEQ ID NO: 39311 - DNA, 337 bp, Glycine max
  Clone ID: LIB3139-003-P1-N1-D5
gcaagaagtcttatcttgtcaatctcgtaaatgtgtggcgagaattgtatttgcacaggccagaggaagctcgccaattgagaaggaaagctctctctcgtattgaatggctgcaaaaagctgatgtgcctaccatagcacagattgaagagttccattcgatgcagaggatgatgaatgctcctgattcaaatgataatattgatctactgttgagcattgatttgttgggtttacaaggagcaggtaaagcttttccaaacaagattgtttttgatgataagcttgtgttggctaacacacaagaattctttgatggaaattttccagtggattc

SEQ ID NO: 39312 - DNA, 336 bp, Glycine max
  Clone ID: LIB3139-003-P1-N1-D6
taggtggctctttgcaagacaaggtcatatatggagctgaagattgtcgtcaaccgtgtgctccttttgttttgaatgcgaatgaattgtttggtttcactcaagggtgcttaccgatgtataggtgggatgagctaaacagctttttccaaaaagcaggggttaaggttgtctttggattaaatgctcttgctggaaaatctttaaagtctggttctgcagttggaccttggaactacaccaatgctgaatcgttaatacgatacacagtcagaaagaagtacaccattcatggttgggaacttggtaatgaattgtgtggaaatggaataggag

SEQ ID NO: 39313 - DNA, 340 bp, Glycine max
  Clone ID: LIB3139-003-P1-N1-D7
gggaaactgactttcccccagggcacttcccgaagggttaagagaatgcctctttgtatagggggaggagctggtgcaaagaatgctattctcatgaatatgccaaatgctgttctttcaatgtggagatattttgttggagatctcgtctttgaagtttctaagatgacttctccctacattaaatgtacagtctctttcttcatagcatttggaaatttggctgatgacaccatcaattttgaggcttttccccacaagctggtacagtttggagagattcaggaaaaagttgtattgaaattttcacaagaggaatttcttacagcttggtcaacct

SEQ ID NO: 39314 - DNA, 334 bp, Glycine max
  Clone ID: LIB3139-003-P1-N1-D8
gtttacataccctatcctccaggcctgggactgtgtgcacatgtaccacaggaacggcttccagcttcaggttggcggctctgaccaatatggcaacatcatcgccggcatagacgctatcaactacgtccgggacaccatcctcgaccctgttgtccgcgaagccgtgtgggaccttgaaaaaccgcaggataactacatgaaggacccttatggtctgacagtccctctattaactacatcctcaggcgaaaagttcggcaaaagcgcggtcaacgccatctggctcagccccgaaatgacacccagtttcgacctgtacggcttttggatc

SEQ ID NO: 39315 - DNA, 336 bp, Glycine max
  Clone ID: LIB3139-003-P1-N1-D9
ggtccttctcctttggcccaaaacgttgtgttccgggatttgccgctccgtgatgtattatttgtttccgagagaaaagtgataggtgtgggatttgactgtaacccaatggtttttgccgcagatgaaaggggaatttggagttttgtaagatatttgggagaacgaaaagcagcatcttctggaccaagatatggctcacagttctctgaagcatttggaaagttttatggccaatcaaagcatggagtgagcaatgatgcagttgaaacttctagagctcgtggaactgttcatgaaaactgtataaattgtattatgccttttggggatcat

SEQ ID NO: 39316 - DNA, 336 bp, Glycine max
  Clone ID: LIB3139-003-P1-N1-E10
tccctcattcctcagctctccatcccattcggggcgaaatttcagttccacccagaaccctaattttctttctctcccgcacctagatcttcaggttttaggcaccttccggcatgcacaaacagggaagaggtcatcgggacaaactccagcagttcataacaataactggagccagcgagaaaatagcactgcaagctctgaaggctagtgattggcatcttgaaggagcatttgatttctttttcaaccaaccccagcttaagacatttactgattctaggcacttggaggagctatacaatctatctaaagacgcatatgttgatatgattt

SEQ ID NO: 39317 - DNA, 332 bp, Glycine max
  Clone ID: LIB3139-003-P1-N1-E11
cagagcacacagatatgagatgtcagttgttgagggctatgatcagtctcgagcggataacaaagatgtctggaagtttgttcttgggaagcataatcttacatcacccatctcttcttattatcgagcagaagttgttacaaaatcacagtcatacttttttacccattctgtgaaagcaatagaggtgacttcgacggccaagggtataacctctaagcagcttcttattggaacaattggtgatcaggttctggcacttgataaacgctttttggatccccggcgcacacttaatccctcacaagctgaaaaagaagaaggaattattc

SEQ ID NO: 39318 - DNA, 333 bp, Glycine max
  Clone ID: LIB3139-003-P1-N1-E12
aactctttttgtttcttcagtttggtataaccggggccgaggtcacgaggagcagtagctagtttcacaatttccaaatggctaggggattgaagaagcatctcaagaggctcaatgctcctaagcattggatgcttgacaaactgggtggtgcatttgcgcccaaaccctcatctggaccacacaaatctagggagtgccttcccctcatactcatcctacgaaaccggctaaagtatgctctgacttaccgtgaaggcatcgctattctgatgcaaagacatgttcttgttgatggaaaagtcaggactgacaagacttaccctgctggtt

SEQ ID NO: 39319 - DNA, 338 bp, Glycine max
  Clone ID: LIB3139-003-P1-N1-E2
gtgactgcatctaactggggttagcagaaatgaacggaacttatttgactgctggtattccaactgctgttactcaaagttggaggttgcacttctgttgatagtatatcttgcttatggctctaatgaaggtggtgcactctcatatattcttttgagtataagcagttggtttatggctctatcctggttgtttgctccatatttattcaacccgtctggatttgagtggcaaaaggtggtggaagatttcagagattggacaaattggctactctaccgaggtggaattggtgttaagggagaagaaagctgggaagcttggtgggaagaagaac

SEQ ID NO: 39320 - DNA, 340 bp, Glycine max
  Clone ID: LIB3139-003-P1-N1-E3
ctcgagccgctcgagccgattcggctcgagggctggagaaacccctcaagaatcacaagggtcaacttctcagacacagatcttcagaaatcatgtgcacaaacctgattcagtatcaaactcaatttccaatgtatcaagtgttgggtcgtctgttgatgataacgaatactcaacagcaaacttgtctcatagacgaagaacaaatgctcccgaagctgaattttcatgacaaaattcacgacaatttgatttgaagacggttggcatcaagaatagacatgcaccagttagggtgatatcccagatcagttttgtattattactacctatctatttt

SEQ ID NO: 39321 - DNA, 334 bp, Glycine max
  Clone ID: LIB3139-003-P1-N1-E4
cttaatttggttgtgtgagagaaagacctgagtgaaacaaacatggcagaggagaatgtcaggcaaccattgttggagaaaaagtactatgaggactgccccggttgtaaagtggatcaagccaaagagttgagtaagggacagggtgtttccattagaaatcttttgataatatggatggtggtgttgtgttctgcattgcctatatcatctctctttccattcctttatttcatggtaagggattttaatattgcaaaaacagaagccgatattagttcttatgctggttatgttggttcttcctacatgcttggcagatgtttgacatctg

SEQ ID NO: 39322 - DNA, 337 bp, Glycine max
  Clone ID: LIB3139-003-P1-N1-E6
cagattcaaccagttaaacttggaacccaaggctgtgaggtttcaaaattgggattcggatgtatgggccttactggagcgtacaatgaccctctccaagaacaggatggcatatctgttatcaagtatgcgttcagtaagggaatcacattttttgatactgcggatgtttatggagccaatgctaatgaacttttggttggaaaggctttgaagcagctgcccagagaaaagattcagatagccacaaaatttggtattgcttcacgaggttttcctgatatgaagatcaagggttcgcctgaatatgtgcgatcatgctgtgaagctagcttga

SEQ ID NO: 39323 - DNA, 333 bp, Glycine max
  Clone ID: LIB3139-003-P1-N1-E7
catttatcagagtctcctggtagcctttcctgtcaggagttccagaataaccaacatgataactgcactcatctgcctttccatcctagaagggtagaagtagaattaccagttcgtgtagattttgttgggggttggagtgatacccctccatggagcattgaacgtgctggatgtgttttgaatatggcaataagcttggaaggttttcagccaattggcaccatcatagagacaactaaaacagaaggaatattatttactgatgatgcaaagaaccaattatttgttggagattatacatctatttgtgcaccgtttgatggagatgat

SEQ ID NO: 39324 - DNA, 335 bp, Glycine max
  Clone ID: LIB3139-003-P1-N1-E8
gcgcactgtctccctctacaccgaccagaccggggccaacatctcccgctccggctccatcgccggcgagtactccgacctccgctactcccacggcacacacctcacccgcctctccgtgcaggacgtcatcgccaccgccgtccaggccaagcccttccccgtcgaccaccgcaacgggatctacctaatcctcaccgccgaagacgtcaccatggaagacttctgccgcgccgtctgcggtttccactacttcaccttcccatccaaggtgggttacacgctcccttacgcctgggtggggaactcaggaaaacagtgtcccgaggtttgcg

SEQ ID NO: 39325 - DNA, 337 bp, Glycine max
  Clone ID: LIB3139-003-P1-N1-E9
tgagaaggaaagctctctctcgtattgaatgggtggaaaaagctgatgtgcctaccatagcacagattgaagagttccattcgatgcagaggatgatgaatgctcctgattcaaatgataatattgatctactgttgagcattgatttgttgggtttacaaggagcaggtaaagcttttccaaacaagattgtttttgatgataagcttgtgttggctaacacacaagaattctttgatggaaattttccagtggattcttggttaccaatttttgtgaattgtctctatcctgtaagtcaattaccttcaaaagctgtcgttgtaaatgttacatg

SEQ ID NO: 39326 - DNA, 235 bp, Glycine max
  Clone ID: LIB3139-003-P1-N1-F1
gtttacaaggagcaggtaaagcttttccaaacaagagtgtttttgatgataagcttgtgttggctaacacacaagaattctttgatggaaattttccagtggattcttggttaccaatttttgtgaattgtctctatcctgtaagtcaattaccttcagaagctgtcgttgtaaatgttacatgtggtagtggacgtggtggtttacccaccactgttttgattagttttgcagt

SEQ ID NO: 39327 - DNA, 334 bp, Glycine max
  Clone ID: LIB3139-003-P1-N1-F10
gaagaagtgaagagaagagaagagaagggattgggatctgaaaagagaagatggggggaggaatggaagcaaacaagaacaagttcatagaggattggggcactgccagagagaatctggagttcaatttccgttggactcgccgcaaccttgctcttgttggcatcttcggcatcgctattcccgtcctcgtctacaagggcatcgtccgtgaattccatatgcaagatgaagataatggtcggccgtacaggaagttcatgtgagagagtatggagagtcttttgtaataattcgtcaagttagaccttgatattatgaggctacaaaccat

SEQ ID NO: 39328 - DNA, 339 bp, Glycine max
  Clone ID: LIB3139-003-P1-N1-F11
ctccctgccgccgctgagacacgaagagtaactgggtcgcaacgccgcccttgccatcgcgacagagtgtcgtacacagcggagctccctcgcgacgccatcctcactgtgccgtttcaggtgtttgacgaaattccccataaacgaagctcatgggcaagaaaggaggggccaaaaaattagagtctgtgtctcacactccaatatcattgagggaagaagccaccggaaaaatacaaaccaaggcagcctcaaacaccaagtccaaattgagatttgagcacttgaaaaacctagcagtgtgggccaccgccataccatctttgggtgccttctatg

SEQ ID NO: 39329 - DNA, 334 bp, Glycine max
  Clone ID: LIB3139-003-P1-N1-F12
cttgagcggtaacacagagcagagcacggaaaggaaaaacctcggtagagttgagggtttagcggcagcatagagaatagagatagagcgaattgaaactctctaatggcactctacacccatctcatctctttctcttcttcttcttttcttcattcaccttcgcctctatgtcttccaaagcctctcttcccttcttttactttgacagtgggcaattcaacctcccacaccaccagtctcgccgttcgctcctcttattccgaaatgggctcttcccctgagcccatcaatttcaggaagccagggattccgtccatgtctcacttgagac

SEQ ID NO: 39330 - DNA, 285 bp, Glycine max
  Clone ID: LIB3139-003-P1-N1-F2
ccctattggactgtgtctgcacataccactacctgtgccttttagaccgatatatcctgcaagaccctctccgagccgaccatcacgctcgaagaaactagctctgacaccactgtcaccggataggccaagactcaccacatggtgcgaatacccgccgaccagcatcgtttcattattgtcgaagagcaacttgtggactatcgctccattgacgactacaacatccagaacgagtgtactcttgacctcgacctccaacttattagcggctgcatattttcg

SEQ ID NO: 39331 - DNA, 139 bp, Glycine max
  Clone ID: LIB3139-003-P1-N1-F3
cttttccatatgggtacttcgaaagttctcagcattgttttcttcgtgctattgggcgtaggcatatgctccgctgcaagaacactcctcaccattggtggaggtgtgcatggtgagataggtgttggtgttgtttttt

SEQ ID NO: 39332 - DNA, 337 bp, Glycine max
  Clone ID: LIB3139-003-P1-N1-F4
ctcgagccgcttggatagtaattaacctcactcagggtggggatcacagaaaccaacagcagttcttgcactgaggtttcacgatgttgctggaacttgcacttggtttgtttgtgttagctttgtttctgcacttgcgtcccacaccaagtgcaaaatcaaaagcacttcgccacctcccaaaccctccaagcccaaagcctcgtcttcccttcattggccaccttcacctcttaaaagataaacttctccactatgcactcatggatctctccaaaaagcatggccccttattctctctctccttcggctccatgccaaccgtcgttgcctccac

SEQ ID NO: 39333 - DNA, 335 bp, Glycine max
  Clone ID: LIB3139-003-P1-N1-F5
caactctttttctaccgatccagcaccaaatagtagggctaacgcgactctaatccgcgtcccaataatcacagaatcagttgaaaagattgaaattgtctatatcaaaacatatagcctatatctctatacctatataaatacaattgtattctttaaaaaccttggacccctatcgagatctcaacgctttcattcaacaccgttctttacccttgttgttcacttacaggcccaaatcggagggcagtatgtatgatggtgaggaagataaacagctgttttcactttgattagccatgaagtctggagctgattacatttacatttaactt

SEQ ID NO: 39334 - DNA, 316 bp, Glycine max
  unsure at all n locations
  Clone ID: LIB3139-003-P1-N1-F6
gttgtaactctttcttcttcttttgttgttctgtgggggtgtttgttttttctctcagctnaaaatgtcttgctgcggtggtaactgtggttgcggaagctcctgcaagtgcggcaacagctgctgaggctgcatgatgtacccagacttgtgctacactgagtcaaccaccaccgagaccttggtcatgtgagtggcacctgttaatgctcaatttgagggtgctgaaatgtatttttccctcttattaactattgctgcaaaggtggacctaacttcttctgcatccctctgcacttgcaagttaggtgtttgt

SEQ ID NO: 39335 - DNA, 334 bp, Glycine max
  Clone ID: LIB3139-003-P1-N1-F7
atttgaaattttaataaaccgcgatcacaggttggcgcaccttaaaaccggaaacaaaagcaatcgttacttgatttcaagaatttctcaatttcttcctacttctttgtgtacgatttcttaagggaaagaaaatcactctctgtgctggtcacagacttcgtgaatcattttcttttccactcctagtttatttgctgaacactctcctatttgatataggacttcgtgtcagatttaaactttttctgtttctttctcaggtctctgtttaatttcaagttcaagctggtgaaattttggattagtgctcccactctcctatctggtatag

SEQ ID NO: 39336 - DNA, 335 bp, Glycine max
  Clone ID: LIB3139-003-P1-N1-F8
caaaaccatgacttcaagctggggcaccattttgtgggagagaaaaagggaaaaaggaggaaaaagaagaaaataatacccagttatacattattactactttgtgtcaggaagcttgtgtgtgtacgaaggggctttcatctttttttcttttttttttttggttaattcacatgctttctttctaggacttttagaatgagggttttctatgggaatcattacaatgatggatgtcacgtaaaagcgggctttaaagactgaaatcccatatgcttttatatgttaattaatggtttgatttactaaacgagatttttaatttaaaataaaaa

SEQ ID NO: 39337 - DNA, 258 bp, Glycine max
  Clone ID: LIB3139-003-P1-N1-F9
ataattgatctccctcccaccaagttcaatgattgcgaccttgggaagattcccttttgttgccggaatggtactattttgcctccgtccatggatcctagcatgtctgcttcgagattccaaatgcaggtcttcaagatgccgccggcgcttaaccgatcccagctttcgccaccgcaaaactggaagataagtggcacactcaaccctgactatgaatgtggccctccagtaagagtgagtcctaccgaaaattct

SEQ ID NO: 39338 - DNA, 339 bp, Glycine max
  Clone ID: LIB3139-003-P1-N1-G1
ctagctcgcatcctctcatagtctctttgcgccctgtgtcgctcgtgtcgccgacgaaggtgtccaacgccgctgttgaaggtgatcactgccgccgtcgaaggtgtccagggcagccgttgaagcttccttccggagaagaaggttattggttacatatgggtgacgattctcgcaccattgagaacacgagggaacacgacgagaccgtttgcaagcccgacgatgatgaggaaccaggctataacgcttcaggttttgctgccgcctctacaccaggagaagcgaagcttggtgtcgtgtcgccattgatcgaaggcatgccgctttcggtgttgg

SEQ ID NO: 39339 - DNA, 336 bp, Glycine max
  Clone ID: LIB3139-003-P1-N1-G10
gtcaattttctattgaccttctcggtggaggaattgtagtggacaaaactggagattggatcacacttatacaaaattctccaattagtaacttgttgagagttgctgcttggaagaaaggttgtttaatggtcaagattgtgatgtctgggaatgcagcagtcaaaaggagtgattgggcctcattggtacaagtgtttttaacaaacagcaacagtacagagcattttgatgcatgtaagtggacaaaatcagaaccacattcctgggaattaatcttcccaatagaggtatgtggtcctaataatggttttgaaatgtggagttctgagtggg

SEQ ID NO: 39340 - DNA, 334 bp, Glycine max
  Clone ID: LIB3139-003-P1-N1-G11
agcggtgattttgtttatcataggaggatctgatggactcgctcgtggatctcaactatattcacgatcatgatggcccttgaaaattctgaaaatatgcaaataaactgtgaggcatctttaaaatgcctccagggcaagggatttccttgcaattttcagagtaatgggagttctatggaaggctttacagagcttaaaaatgagcctggtactcatccttctggggatgttgctgagcctaactgtcacttaggcagtgagtttcttgagccttccaatgaatttcacaccaaacctacttatcaccaaaattacagcacctggacaccct

SEQ ID NO: 39341 - DNA, 338 bp, Glycine max
  Clone ID: LIB3139-003-P1-N1-G12
cttttctgacagaccccacaacactgctgcaaagatcttgctctatggatgcacagacgttggcttcgcaagctatggagaaaagtggagacagaaaaggaaaatatgcgtccttgaacttctaagcatgaaaagggtgcaatcatttcgtgtcataagggaagaagaggctgcgaagttggtaaataagctacgtgaggcaagctcgagtgatgcaagttacgtgaacctaagtgagatgcttatgtcaacgtctaataatattgtgtgtaagtgtgctattggaaggaactttacaagagatggttacaacagtgggaaagtgttagcgagggagg

SEQ ID NO: 39342 - DNA, 286 bp, Glycine max
  unsure at all n locations
  Clone ID: LIB3139-003-P1-N1-G3
ttcttctctttcgcgtgcgtcaccctgtagcnngtagcccatggcttttnncagagttggagagagccgggagggaggggaatatgcctnncttctggcatagggttgttgcatgagacatatgcgtatagcacccgttcctggatatctgcagaggaaggaaaagttcaatcgctttatgtgatttttaataattgacgaagaaataagaaaagagggttgttggttgaaaaaaacctggtaaggccctgcttgatgagccctatgatgtatgttcaccctgcat

SEQ ID NO: 39343 - DNA, 339 bp, Glycine max
  Clone ID: LIB3139-003-P1-N1-G4
tccaattctgctgtttgatatcatggacacccttggtcgtgaccctttttaccaagatgtccctgccttcttcggaatgtctctgaaggagctcatagattgcaagcaccccactgcttggattgagtttgaaaagggtctcattgatgagatggagctagcaagaaaattttttaaggacggaagggattttgatttagaaggccttaaaacttgtatgagaagtggatattcatacatagaaggcatcgaacagttgcttctttccttaaagctaaataactatgagatgcatgcttttacaaattatcctatatggtaccagttgattgaagacaa

SEQ ID NO: 39344 - DNA, 340 bp, Glycine max
  Clone ID: LIB3139-003-P1-N1-G5
gtaaactccaccaccggctacatcgactacgaccggtgtggaggaaaaagccctagacttcaggcccaaattgataatctgcggtggcagcgcttaccctcgcgattgggactacaaacgcttcagggaaattgcggataagtgcggggcattgcttctctgcgacatggcgcacactagcggccttgtggccgcgcaggaagtgaacagccccttcgagtattgcgacattgtgaccaccaccacgcataagagcttgcggggtccacgggcggggatgatcttttaccggaagggcccgaagccgccgaagaaggggcagccggagaacgcggtttat

SEQ ID NO: 39345 - DNA, 305 bp, Glycine max
  unsure at all n locations
  Clone ID: LIB3139-003-P1-N1-G7
caacttatttatttctacacttaattcccaatgtcagggcgcgctgtctaattgagaaactatgagcaacgctatggagtctaccatccatcaacacactgtggaccactgtctgcatctgtggaactaccacttccaaccaatcactgatctgaatcctgcaacatccaaaccaacatggacaatcaaatctgaactgtaccacttttcctcangctcaggctataacactgcgactgtcaatccgaatgtttcttactctcagatttgggtcggcaactgcttcgtgtgtacttctaggaccg

SEQ ID NO: 39346 - DNA, 313 bp, Glycine max
  Clone ID: LIB3139-003-P1-N1-G8
aaaattctctgggaaacaaggatgagaatgaaactagcaagacccctgtggtttattcagaacaatgctctattggtagggatattaattctactcgagttgccatcttgagagatagggaaaaggatcgcagtgatccagattatgatcgtaactatgaaaggtatgctaggagtattccaacttcttctgttaacttgatgccttttaatttgcaacaagttcgacatccatttgtgcagtatgataatgcttttaatcagttgagtcagatgtcacaaaatcaagcttcacttggctatggacctcaacc

SEQ ID NO: 39347 - DNA, 265 bp, Glycine max
  Clone ID: LIB3139-003-P1-N1-G9
gtgatgggtggaaggtcaagctttactattggaaactccaagtttgttgatatatataaccccgagagacatagctggtgtgagattaagaatggttgtgttatggtcactgctcatgcagtattaggaaagaagttgttctgcatagagtggaagaaccaacggaagctagctatattcagtccagaggacaattcatggaaaaatggaccagttccattgacaggaagctcaagtattggttttcgatttgggatactagatg

SEQ ID NO: 39348 - DNA, 335 bp, Glycine max
  Clone ID: LIB3139-003-P1-N1-H11
gcatcactgaactaacaaagcaaccctatgtcgaaggtggtttgtgtcaccggagccagcggcgccatcggatcatgggtggtcctactcctcctccagcgtggttacaccgtccatgccaccgtccaagatatcaaggatgaaaatgagacgaaacatttggaggaaatggaaggagcaaagagtcatctccatttttttgaaatggatcttcttgacatcgactccattgccgctgccataaagggttgttccggcgtaatccaccttgcatgtcctaacatcattggtcaagtcgaagatcccgagaaacagatattggaaccggcgataaa

SEQ ID NO: 39349 - DNA, 334 bp, Glycine max
  Clone ID: LIB3139-003-P1-N1-H12
tttgatggccatggtggtgctcgtgctgctgagtatgtcaagcaaaacctatttagcaatttgatcagtcatccaaaattcatttctgacaccaaatctgcaatagctgatgcatataaccataccgactctgaatttctgaaatctgaaaataatcaaaacagagatgctggatcaactgcttccactgccattcttgttggcgaccgtttgcttgttgcaaatgttggggactccagagctgttatatgcaggggtggaaatgccattgctgtttctcgggatcacaagccagatcaaactgatgagaggcgaaggattgaagatgcaagtg

SEQ ID NO: 39350 - DNA, 334 bp, Glycine max
  Clone ID: LIB3139-003-P1-N1-H3
agttaaagccctaagtgaggttgaagcttttgctctacgggctgaagacctcaagtttgttgctaatcaatttaggcgccttcacagtaagaagctgcagcacacttttcgattttattcccaccattggaggacttgggcagcctgctttatacaggctgcttggcgccgatataagaaaaggattactatgaaagatctcagtttgagggaatctattcctttagatgaaacagtagctagtgagagagaacatgaggactatgctgctggttcaaattcaactcgggctaaattaaaccttggggctacaattcttgcttcgagatttgct

SEQ ID NO: 39351 - DNA, 338 bp, Glycine max
  Clone ID: LIB3139-003-P1-N1-H4
accaaatccacttctccaactaatgggcgtgttcagcggagatccgaatcccaacccggacccgatcgtgatccgagaggtttgggcctccaatctcgaatccgaattcgaactcatccgcgaactcatcgatcgctacccttttatctcaatggacacagaatttcccggtgttattttccgaccacatgtggaccccaccaaacccttcaaccaccgcaaccgtccctccgaccactaccgcctcctcaagtccaacgttgacgctctcaacctcatccaggtcggcctcaccctcaccgacgccgtcggcaacctccccgacctcgccggaaacc

SEQ ID NO: 39352 - DNA, 340 bp, Glycine max
  Clone ID: LIB3139-003-P1-N1-H5
cttccgtgcacagcttgaacacaccgcgtttcggagagagacgtcgcaatggggaggaggcctgcaaggtgttatcggcagataaaaaacaagccataccccaaatcacgcttttgccgtggtgttcctgatcctaagatcagaatttatgatgttggtatgaagaagaaaggtgttgatgagtttcccttctgtgttcatctggttagctgggaaaaagaaaatgtttcaagtgaagcattggaagctgctagaattgcatgcaacaaatatatggcgaaatttgctggaaaagatgctttccacttgagagtccgagtacatccattccatgttctta

SEQ ID NO: 39353 - DNA, 289 bp, Glycine max
  Clone ID: LIB3139-003-P1-N1-H7
tctcacccttcactttctaatccatctgctcctaagctctcgcatctttacgtccacgatgaagtacgccgtttcgccacttctctttagcgtcggttcctacgctgctgctatcaagcagtcgcagtgctacttcgagcttgaagcctctgggggcgccttgggctacgtcggccagacaaacaatggctatagccgcatcggcggagaccgctctcccgcaacttactacatcagcaacggggtcatcaccgatttcgccgggccacggatacctttctccttgggc

SEQ ID NO: 39354 - DNA, 245 bp, Glycine max
  Clone ID: LIB3139-003-P1-N1-H8
atggatccgggtatggagggaggagtgagtatgaggagaaaccgagctatgggaggagcaactatgaaagccagggaggaggaggaggggttgagtatggttatgaggggcgtacacctcggcaggaggaggattgaggaggatgtgttctcgcaagccgctttttgataggatggttgatgatgatcttgataggtattgactcaaaggatatttatatacttaatatttaacacattcatttt

SEQ ID NO: 39355 - DNA, 327 bp, Glycine max
  Clone ID: LIB3139-003-P1-N1-H9
ccactttccacctttgactgtagccattcacgctgggtcctctcttctttggccttcctcacacttttctctcttctccctctctctctctctctctaacttttcagttataggattcatctccaatctccatctcttctcagttctctctctattctaagttggtgagtagtttttgagtgaaggagtggctttatctttttgtgggtaaggacacagcagcatgcggtggtggcctagtctttcttgtgatgtattccgcaaagggatttcattgaatctgtattgcaaagagattctgtaattcgggtggtggggattaaacct

SEQ ID NO: 39356 - DNA, 357 bp, Glycine max
  Clone ID: LIB3139-004-P1-N1-A1
attttgttggagatctcgtctttgaagtttctaagatgacttctccctacattaaatgtacagtctctttcttcatagcatttggaaatttggctgatgacaccatcaattttgaggcttttccccacaagctggtgcagtttggagagattcaggaaaaagttgtgttgaaattttcacaagaggaatttcttacagcttggtcaactcaggtgcgtcccgcaacgactctgttggctgatgggtgcccatatttgtatgctatggtgcatgatagttcagtgtctacaataccaggtgattttgtcattggtgttaagttgacaaccataaacaatatgtgtgcatatgggctca

SEQ ID NO: 39357 - DNA, 332 bp, Glycine max
  Clone ID: LIB3139-004-P1-N1-A10
gcgagatctcaagaaagctccgattctagcaagcaaagcttttgtaaagttgagattgaccttctcgggggtggaaggtgcgtgcacaaatctgccaatcgcgacagacttatacaaaatgctcgagttggctaccacgcgagagttgttggttggaagaaaggcagttgaatggtcatgaccgagatttgtgcaagggctgtacccaaaaagtgtgatagctcctgacgctgacaagtgtaatgaaccatcaggaaccggacagagcattttgctgcatgtaagtggacaaaaacacaaccacattcctgggaattaatctttccaataga

SEQ ID NO: 39358 - DNA, 353 bp, Glycine max
  Clone ID: LIB3139-004-P1-N1-A11
ccattcgatgcagaggatgatgaatgctcctgattgaaatgataatattgatctactgttgagcattgatttgttgggtttacaaggagcaggcaaagcttttccaaacaagattgtttttgatgataagcttgtgttggctaacacacaagaattctttgacggaaattttccagtggattcttggttaccaatttttgtgaattgtctttatcctgtaagtcaattaccttcagaagctgtcgttgtaaatgtcacatgtggtagtggacgtggtggtttacccaccactgcttggattagttctgcagttaacaatcgctccttagatatcaacaaaaggattcgcacag

SEQ ID NO: 39359 - DNA, 336 bp, Glycine max
  Clone ID: LIB3139-004-P1-N1-A12
ctcgagccgctcgaaattaatcgaaaactcaaactccgattccgcgtcgaaatcgctcgattcgccggcgatccgattaccgggaaccgaggatcggatcgtgttgtacttcactagcttgcgtggaattcgaagaacctacgaagattgctacgcggtgcggatgatatttcggggatttagggtttgggttgacgagcgcgacatttcgatggacgcgaattaccgtaaggagttgatgagcgcgttgtttggagagaataacaataacaacatcaagaagggacacgtggcgcttccgcagatttttataagggggcggcacgtggggggtgc

SEQ ID NO: 39360 - DNA, 242 bp, Glycine max
  Clone ID: LIB3139-004-P1-N1-A2
actgctgcaaattcgatgttcaattcccaatttctattttcaaattctcagaatttcaacggtttaattttaagtgtatgagatctgagcagaaatcataattttccatcgcaccggaagccggaaccctaaccgaacctgatcccaatctccgatgtcttgtttagcgctttctctgcaacccgcaaatggatccgacattctccttcagacgcgcgagtggtttccttcctcacgcgccc

SEQ ID NO: 39361 - DNA, 357 bp, Glycine max
  Clone ID: LIB3139-004-P1-N1-A3
tgagaacaccattgaattttgattctagcaagcagagcttttgtcagttttctattgaccttctcggtggaggaatcttagtggacaaaactggagattggatcacacttatacaaaattctccaattagtaacttgttgagagttgctgcttggaagaaaggctgtttaatggtcaagattgtgatgtctgggaatgcagcagtcaaaaggagtgattgggcctcattggtacaagtgtttttaacaaacagcaacagtacagagcattttgatgcatgtaagtggacaaaatcagaaccacattcctgggaattgatcttcccaatagaggtatgtggtcctaataatggttttg

SEQ ID NO: 39362 - DNA, 356 bp, Glycine max
  Clone ID: LIB3139-004-P1-N1-A6
attggtcaatctttgtaccgtgagggacctggtaaagatccatatagacctgatcaaaagacgccagtgaagaatttctttcttgctggatcttacacaaagcaggactacatagacagcatggaaggtgcaaccttgtctggcagacaagcttcggcctatatctgtgatgcaggggaaggattagtggcattgcggaagaagctcgatgatgagtttaaagacgacttaacaatatcaaatactaaagatgaattgagcctagtatgataaatttccacgaggtggtcacgttgacatgaagctagctcgttctttttccatgcaacattttacaatgtatattcaatccaaaa

SEQ ID NO: 39363 - DNA, 343 bp, Glycine max
  Clone ID: LIB3139-004-P1-N1-A7
ctgcgcctggctaaagctccaagtatgtttttacaatccttcaaaaattttgtttctttgtgtgtgtatggtgatgataacttaattagtgttcatgaatatgtcaagccttactttagtggttctaaattgaaaagctttctagctagtcataacatcaccattactgatggtattgacaaaactagtgcaactttgcaatttagaaagttagcagattgtgattttctcaagagaaactttaagcagatgtctaatgttttgtgggtggctcctgaggacaaggcgagtttatggtcacaacttcattatgtttcgtgtaataatctggaaatgcaagaag

SEQ ID NO: 39364 - DNA, 245 bp, Glycine max
  Clone ID: LIB3139-004-P1-N1-A8
ctggatgtgtgatcacgaaccctaaacatggcgctgattgaccatgatcttgacgcagcgctgctccaatctgatacactgcatggtgtgtatcaatcggctgaagatgagtacaagaggattatgagagcgaggaactttcgttgttggcgcgtaacataccaggagtgtgcctaggggatcctgtccggagtggaacacataacggcgttggcagtgcaacctcagtggattattgtgcattg

SEQ ID NO: 39365 - DNA, 340 bp, Glycine max
  Clone ID: LIB3139-004-P1-N1-A9
gagactcgttcttattcgtcgctatcttcttcgttcgttgattgcgtgtacaggtgctctctcacctgaaaatgacaagctgcgaaggtaactgtacttgcggaagcacctgcaagtagcggaacgaaatagcagtggctgcacgatgtacccaaacttgagctacaccgagtcaaccaccaccaggaccttggccatacaagcggcaccaggatatgctcaattcgagagtgctgaaacgggtgttcccgctgagaacgatggctgcaaaagtggagctaactgcacctgcaaaccctgcacttgcaagtgaagtgttcgatagctaaaactacaagca

SEQ ID NO: 39366 - DNA, 360 bp, Glycine max
  Clone ID: LIB3139-004-P1-N1-B1
caacaattcaccatgcgcttgagctgcaatggatgccgcgttctccgcagagggtgcaccactgagtgccccattcgcatctccctccaatggatcaattcccctaactcccaatccaacgcaaccctcttccttgcaaagttctatggccgccaaggcctcctcaccctcctcaccaacgctccctcacaactacaacaagccgttttaaaatctttgctttacgaagcatgcggtcgaatagtgaacccggttctcggctcgaccgggttgctctccaccgggaattggcatttgtgcgaagccgcggtcaaagccgttcttaatggcgcgccgattgagcaggctcctttggacggc

SEQ ID NO: 39367 - DNA, 252 bp, Glycine max
  Clone ID: LIB3139-004-P1-N1-B10
catgagtcttactaaatgatgtaggtccattccttatttagtgagtttcatatgaatttcaccaaataataaagaatatattgttgaaaagtttgtgtcaagtaatgtgatactagcatttgttatgtgtaaactatatcctccatagatcccagttgtaatttgcattctgtttgtgctaaaaatgatttgtaatgatcctgctccctcaaaaatgaaaataaaaatatttttaattaattagagaagaac

SEQ ID NO: 39368 - DNA, 245 bp, Glycine max
  Clone ID: LIB3139-004-P1-N1-B11
cgtgctaccacgccagcagcatctgctttttttgttattccttttggttctggggtggaatctacgtataaaagttgaaatctttgtttcgtttcttggtggaggaaaattgttttggagataacttggtgttgggttggtcctgatttttaatgcctttttgtttgttttctagttttttttttttttaaattgcataactctctctctctctctctctgggaaatgggggcctctatttggtt

SEQ ID NO: 39369 - DNA, 187 bp, Glycine max
  Clone ID: LIB3139-004-P1-N1-B12
gtgtctttcgaagtgattggcctatgtctaccagaaggccgatgcttaaattgggtggaagtgaattctctgtggttctattttaattttagttatttaaaagttttggttaatgtttttgttcaattagtgttatgactgtttgggctttgattaaacctttatgaatactgtttcgctttggatt

SEQ ID NO: 39370 - DNA, 358 bp, Glycine max
  Clone ID: LIB3139-004-P1-N1-B2
ggagctttttaagcatgtggaaaaccactctattagtgcaacacgaatcaagaacgtgtatgatatttggtctaagaaaattggatcaatgaagacttggccagttgagagcagatatgcagtccatttggagttcatgcttttctgtcttttgcaaggcaatgctgaggatgcataccagcttgctctatgccttgggcaagaaaaaggtgatattggtcctatgtcaaagatgatgatgggtttgacattctatgagttgtggtactcttctatccccaaagaattccagtggagaaattcagatcagtttgacttgcaagagaactcagatatggagggaacttcattcaacaat

SEQ ID NO: 39371 - DNA, 361 bp, Glycine max
  Clone ID: LIB3139-004-P1-N1-B3
ctaacactcattaattgcaagaatggcacttcgttgcttggtgatgtccctttctggtctcttcactcttggtcttgcgagagaaagccatgccagagacgaagatttttggcatgctgtttggccaaacactcccattccaagttcattgcgagatcttctaaagcctggccctgcaagtgttgaaatcgatgatcaccctatgcaaattgaagaaacacagtacccgaaaaccttcttctataaagaagaccttcatccaggcaaaacaatgaaagtacaattcagcaagcctccctttcaacaaccatggggtgttggtacatggttaaaggaaattaaagacactactaaagaagga

SEQ ID NO: 39372 - DNA, 307 bp, Glycine max
  Clone ID: LIB3139-004-P1-N1-B4
gtgatacatgcagtacaaacaacagtagcagagaagaacttaaagttgctgcaagagaagaaagaagtagccaaaacagatatgctaggattgctgatgttgaaaccaagacaaatcccatcgatcgaactgtagctcatttgctctttcataggcctttggatttaactgggaattatcctgataagcttgagtcacctatttctgctaagatacaatatgaaagcaaagaagctaacctcgagaagttttctattggatgcttgccagatgaggacatgtaaagttatcaacaaatttcttccca

SEQ ID NO: 39373 - DNA, 358 bp, Glycine max
  Clone ID: LIB3139-004-P1-N1-B5
cccactctcgcccctcgatttcactaccagcattactaccagccccatccctccgggtgtcccgcccctcgtcccgcctccaccactcctccgccctacgtcgaccaccagaccgccaagaagataaggaactatgtcaatgtccacaaagacaccctgcgcctcgaggtcgacgaccacaaccccgatcaccatcttctttccttcgttttcgatgctgtctacgatggcagcattactatcttatactttgccaaggaagaagaaaaatgtaggtttgttccattatatcctgatgcatttcagccggtcagaatcccctttcagaaaggagttggccagaaatttgctcagcctt

SEQ ID NO: 39374 - DNA, 344 bp, Glycine max
  Clone ID: LIB3139-004-P1-N1-B6
ctatcgttctttttaactaaaaaattcgagctgaacactagcctaacgatacattgttgcgcgattgacacatgatcggctgaccctgaagtcgtaactgtagcgttgatcgatctcttttatgttggagactggtgtatcaggtgggctggcgcgtatggcactcaagctttgaccggttcgaagattaagaaggggtgggatgtggcttggtgaagcgtgaggacttagggatcactatgaaactctggtgttgagatcatgcaccagatgatgcgccagatgcattggatctaacatgacaggaactgcaactggactatcttgacctctatctgatccac

SEQ ID NO: 39375 - DNA, 351 bp, Glycine max
  Clone ID: LIB3139-004-P1-N1-B7
tctggaaatgcaagaagcttatcttgtcaatctcgtaaatgtgttacgagaatggtatttgcacagtccagaggaagctcgccaattgagaaggaaagctctctctcgtattgaatggctgcaaaaagctgatgtgcctaccatagcacagattgaagagttccattcgatgcagaggatgatgaatgctcctgattcaaatgataatattgatctactgttgagcattgatttgttgggtttacaaggagcaggtaaagcttttccaaacaagattgtttttgatgataagcttgtgttggctaacacacaagaattctttgatggaaattttccagtggattcttggtt

SEQ ID NO: 39376 - DNA, 351 bp, Glycine max
  Clone ID: LIB3139-004-P1-N1-B8
gtttgggacgacaagttattgtcaggggaattgaacaaagtgaacaacaacgaagaccaaaagggtggtggttctggtggtgaccttaaccttaaagttagaactacaccacccaacaccaccatccagagaagccgctccaacggcggctaccgcaccggaaaagtctcgccggcgatcgagcctccctctcccaagctctctgcttgcggcttctgcagcgctttcgggaaaacaagggtaaagggccgtgctaagcatcgatcaaggtaggttttttctcgtcgccggagacggtggttcatgcagctcttcaacacgttctgtttatgtccacttaaaatttaaggt

SEQ ID NO: 39377 - DNA, 354 bp, Glycine max
  Clone ID: LIB3139-004-P1-N1-B9
cttgtcacttttgacttaaagctatttctgggcttcttgatgtctgaatttgaccaacagaaagttgtatattctggcagctgtttgtaattgtttaatcattgttattgcttattattattgctgctgctttccttttctgataatttactcccaaccctgtttgattagtggacacatctcatgaaatttaaatgggattgtgctaaatgaaactaaagcatactcatccttcatttcagttagcacaatcccatttaaatgaaggatgagtatgctttagtttcattttttttcaaaaattatgctcacccttttttgttttgctcttgaagattgtttttgcactgtcag

SEQ ID NO: 39378 - DNA, 351 bp, Glycine max
  Clone ID: LIB3139-004-P1-N1-C10
ctcataagcgaagaagaagccacagagaactagtctcctactctcacccgcaggaaaaaaatggcatctcacatcgttggatacccccgtatgggtcccaagagagagctcaagttcgctctcgagtctttctgggatggcaagagcagcgccgaggatttgcagaaggtgtcttctgatctcagggcatccatctggaagcagatggctgatgctgggatcaagtacatccccagcaacactttctctcactatgaccaggttctcgacgccaccgccaccctcggtgccgttccaccaagggtacggctggaccggcggcgagattgggtttgatacctacttctccat

SEQ ID NO: 39379 - DNA, 309 bp, Glycine max
  Clone ID: LIB3139-004-P1-N1-C11
agcaagtgttgatttgcagcgcactcatcgtattaaaggaatgattaaaatggtggccacagttggtattcctgagaatacaggtatagcattggcctgtgctatgaatagttcttttagggggcgcgccagttctgatatttacaccatctgctctcaagactgggaattatggaatcctgcttgcacaaaagcaatgactatgtcatttaatccaaacccgtgttctgatgcatggagtttggaatttctgaagcgtaccggatttcattgggatatcatttgggtcacttgattgaccggcacccc

SEQ ID NO: 39380 - DNA, 352 bp, Glycine max
  Clone ID: LIB3139-004-P1-N1-C12
gcggtgtggacttgcgaacactcactcgccactggtcacgaaacgtcgaaaccgtaaaacctctatttttcccaatccattccacacacaatatggcttcagatgctgacatggaggactatggcttcgagtactctgatgaggagcaagaagagcaagacgttgatatcgagaatcaatattacaattcaaaaggtatggttgaaagtgatcccgaaggtgcgcttgctggttttgctcaggtagtgcaaatggaacaagaaaaagcagaatggggatttaaagctctaaaacagactgtcaagctacattatcgactgtgaaggcataaagagatgatgaaagcctatag

SEQ ID NO: 39381 - DNA, 348 bp, Glycine max
  unsure at all n locations
  Clone ID: LIB3139-004-P1-N1-C2
cttgttggctaatggtcatggaacatgacattcccaaaagcagaccaagnttttctttgaagaaggattaaggcctggcacaaaattggatgctcacttcaagaaaagagaaaatgtaaccccattgttgcctcgccaaattgcacaacatataccgttgtcatcagcaaagataaaagaaatagttgagatgctttttgtgaacccagagccagagaatgttaagattctagaggaaaccattagtatgtgtgaagtgcctgcaataactggagaagaaagatattgtgcaacttcattagagtccatggtagattttgtcacttctaagcttgggaagaatgctcg

SEQ ID NO: 39382 - DNA, 359 bp, Glycine max
  Clone ID: LIB3139-004-P1-N1-C3
ctaatccctatttttcttcctcagtagtgtcatttgcgcttctcttctctgcagcggctatgcctaaccctaaggtcttcttcgacatgaccatcggcggtcaatctgctggccgcatcgtgatggagctctacgccgacgtcactccccgcaccgccgagaacttccgcgcgctttgcaccggcgagaagggcgtagggcggagcggcaagcccctccactacaagggctcgtccttccaccgcgtgatcccgagtttcatgtgtcagggtggcgacttcaccgccggaaacggaaccggcggcgagtcgatttatggcgccaagttcgccgacgagaacttcgtgaagaagcacacc

SEQ ID NO: 39383 - DNA, 299 bp, Glycine max
  Clone ID: LIB3139-004-P1-N1-C4
aaaatattctttcattgctcgctgagaagagagagaggtaccgcccgatgaccgggaaggcttatcccaagaagcacacggcgtaagaaatcgccgcgaaggttgacgccgtcaccactaaccgtggctgatggaaggctcggcctgatggaccgatccggtttggagaaaggcggtcactcgaaatacgagtgccctcactgcaaagtgaccgctctggacgtgaaatcaatgcaatttcatcactacgcgcgtaactctaagttggcggttgcggatttacttcttttttttatttt

SEQ ID NO: 39384 - DNA, 353 bp, Glycine max
  Clone ID: LIB3139-004-P1-N1-C5
ctcaatccatggctaccattgttagcatcaaggcgggccagatctttgacagtcggggcaatccaaccgtcgaggtggatttgacatgctccgatggtacttttgctagagctgctgttccaagtggtgcatccactgggatttatgaggcccttgaattgagagatggaggatctgactaccttggaaagggtgtatcaaaggctgttgacaatgtgaacaccattattgcccctgctttggttggcaaggacccaactcagcagactgctattgacaacttaatggttcaacaacttgatggaactgttaacgaatggggttggtgcaagcaaaagcttggagcaaatgcc

SEQ ID NO: 39385 - DNA, 358 bp, Glycine max
  Clone ID: LIB3139-004-P1-N1-C7
caaatcttcccacgtaacaccaatacacgaacgctggccctcctgccacgtcagccatcacaagtactttccgtaatcaacgagaacttcccaatctacccccactccccctccaaattcaccaacccaccctcccctcatataaaaaagataaaacgcagaacgcacaacactcccgagggaccctaatacccatttcggtaataacacaatcgcaatccgttactcactctcttccatggcgacggggttactgaagagggcggcgcagcgtgtcccctcctcgccagcgttcaagctggccattctccgggcccacgcgtcggaggcgcatgcccagcaggtggagcccaaggcc

SEQ ID NO: 39386 - DNA, 336 bp, Glycine max
  Clone ID: LIB3139-004-P1-N1-C8
ggacatcttggttgtttattatacaatagcaagggggtttagaaaatttctacggggttacattaggtggcatctgtataccttgttgatctacattctcccatcttttctcactgctgaaattaaatataagcggaatttgagtaatattcatatttccggcttattttacgacggcagatataaattctggactaaacacgagaaaaatcttgctttgacagaagaggaaaagatggaggtgattagaaatagaggcattcctgctgatgttcttgcaaagcgagctcatgaatttgaaaaacatgttgctcatgaaagcctcaaggatcaaat

SEQ ID NO: 39387 - DNA, 347 bp, Glycine max
  Clone ID: LIB3139-004-P1-N1-C9
caataatttctgtctttagatataaataataaaaagagaaaaagaataaataaaggtggaggaggagggtgtaggtttggttgatttgattgttgtgcatccatcgttaagctagtggcgatcggatccagctacagcatagagatcaaggaaggaaggaaggaagatgttgggtgttataaggcacaagagtattcgccctgccttctccgcaatcagacacttgtcttctgcagctaaagagattactgtcagggaggctctgaactccgcactcgatgaggaaatgtcagctgatcctaaagtgttcttgatgggtgaagaggttggggaatatcatggtgcat

SEQ ID NO: 39388 - DNA, 355 bp, Glycine max
  Clone ID: LIB3139-004-P1-N1-D10
atgaccagatattttgagtatttgtatgcagtagaacttaactagtaagatatgacatatgaggaagtaaaatcgatagatttggaaagttatgtacatctcatgccttgttgctattgaaacatggaggagttgctagcaagtaaccctcttttcccttggatgtttggcaccaaatgctaaaactacaagaaaataaagcttgcaatctgatgccacattttattaagtgggtcattaaattttgcttattatatattcattatattggatatgtatatcttcttgactctgtcttcactgtttattgccagttccgcaaagctcctgagggttctctcaggaaaaatgcagc

SEQ ID NO: 39389 - DNA, 350 bp, Glycine max
  unsure at all n locations
  Clone ID: LIB3139-004-P1-N1-D11
cgcatggtcctttctgaaaattcctccgcaatgggcctcaatttctccgccagtgctcccaagttggttcctctcgcgctagggttttagtctacagctcattctcacacacaaccctaacaacacaaatttcccactttctagggtttcctttcgtcatccaccatggccgagtggcagtccctcctccaatcgattctcgtcggcctcattttctcttaccttctagccaagctcatctccatcgtcgtttccttcaaagacgacaatctcaccgtcacgcgcgcctncgtcgtcgaaaccaccgtcacgcgcgcggaacaattcgaggatgctctgaagcgcgacga

SEQ ID NO: 39390 - DNA, 355 bp, Glycine max
  Clone ID: LIB3139-004-P1-N1-D12
cgaagaatccctaactacgcacgcattcgtgagaaaactcaatattcgtcgctcatggcactctcttctcgtctcttttccaaatccaaattgatctatggcagtcaaatacttctacaaaaggagcatgctattccagttcgtcactttgctaaagagtctgcccctcctgcccttaagggagacgagatgctgaagaacatttttgtggaggtgaagaacaaatttgagaccgccataggaatattaaagaaggagaaaatcaccattgacccagaagatccagctgctgtttctcattatgcaaaggtcatgaaaacaattagagagaaggcaagcttattgtcggagtccc

SEQ ID NO: 39391 - DNA, 333 bp, Glycine max
  Clone ID: LIB3139-004-P1-N1-D2
taactcgaattccttcagctctgaacttccttctccacccttttccaggagagccaaacccaaaggggttattttaacccaccatcaatcaaaaatagaaagaaagaaagttttaaaaccaaaaaatgccaagaaaccaaaacaagaaaagaaaatgccatttttttccttctagcacccaacaacaacagcaccccttttgtttcttcaccaagaaccgattttccaccgacccattcctccaaatgcttctcctccgccaaaacgccgtcgtttcctccctcattctctgcttcttcttcccaccattgctctgcctcggaatccgctctt

SEQ ID NO: 39392 - DNA, 356 bp, Glycine max
  Clone ID: LIB3139-004-P1-N1-D3
agtttcaaaaacctctatggctattcttgcttctggtgactctcctctcaagctcgggggccaacaaattcaacgttggtggaagcaaagggtgggttccaaacccttccgagagttacaacaattgggctggaagaaaccgattccaaatcaatgacacaatagttttcaagtacaataagggttcggattcggtgttggaagtgaagaaggaagattacgacaagtgcaacaagaccaacccaatcaaaaagtttgaaaacggtgacactgaattcaagtttgatcgatcaggaccattctacttcattagtggaaaagatgggaactgtgaaaagggtcaaaaattaatcgtt

SEQ ID NO: 39393 - DNA, 355 bp, Glycine max
  Clone ID: LIB3139-004-P1-N1-D6
tgaaattttcacaagaggaatttcttacagcttggggaactcaggtgcgtcccgcggcgactctgttggctgatgggtgcccatatttgtatgctatggtgcatgatagttcagtgtctacaataccaggtgattttgtcattggtgttaagttgacaaccataaacaatatgtgtgcatatgggctcaatcctggtatttcaggttctcgtcttttgggcaccattcctcagtccatttcacagcaaactgtttggaatcaaatggcaacagtgagaacaccattgaattttgattctagcaagcagagcttttgtcaattttctattgaccttctcggtggaggaattttagt

SEQ ID NO: 39394 - DNA, 355 bp, Glycine max
  Clone ID: LIB3139-004-P1-N1-D9
tttggagagttgaatgtggaatcccttctggattggcgctcacagttatttgcaggagcatttttaatgagatgctcattagatatagctatgaaaaattactgcgccaggctaaagctccaagtatgtttttgcaatccttcaaaaattttgtttctttgtgtgtgtatggtgatgataacttaattagtgttcatgaatatgtcaagccttactttagtggttctaaattgaaaagctttctagctagtcataacatcaccattactgatggtattgacaaaactagtgcaactttgcaatttagaaagttagcagattgtgattttctcaagagaaactttaagcagatgtc

SEQ ID NO: 39395 - DNA, 347 bp, Glycine max
  Clone ID: LIB3139-004-P1-N1-E10
gggaaagtagagaaaagaactagctagctggagtctgagaactctagcatgtactagtactactcctacattcctccatcttcctttgtactattttttttttaaccataaaagcaagagcacaaagatggtgagagctccttgttgtgaaaagatgggtttgaagaagggtccttgggctcccgaggaagatcaaatcctcacatcttacattgacaaacatggtcatggcaattggcgtgcccttccaaaacaagcaagcttgttaaggtgtgggaaaagctgtagactccgctggattaactatttgaggcctgatattaaaagagggaatttcacaatttaag

SEQ ID NO: 39396 - DNA, 350 bp, Glycine max
  Clone ID: LIB3139-004-P1-N1-E11
aagcctacagccattatgatagagtcaggttcgctcactatttaaatcctgaaagaattcagaaggtaatctgcaaagggaccgatttatttgatatgctgccggaggagtacactttcagggatatcattggtaaaatgggaccaataccccattcctattctgcagttcatcttcctgcttttcttctggaaaattctgacaagtataaatttcttttacctggaaattgcaagagagagagatgatcttggaaagtcatttatgatactggcttgtttctgagcttctagcttgtacagctcaagtgactctcctctctcggaggtttttaactgaggttgtgatga

SEQ ID NO: 39397 - DNA, 346 bp, Glycine max
  Clone ID: LIB3139-004-P1-N1-E12
gacacagtcaaatcagtgagtgtctatggttctgccagacgttgtggtggccaaggtgatatcctttctggaagtgtagctgtcttcttgtcatgggcacgtcaacatattttggctgctgattcaaattcgaatctcagttgtaaaaatccaatagttttgggatgcatagctgggtctgctatattgaggaaggcggcatcacttgctttctcgaataagaaaagatccacagtcactggtgacatcattgaatgcttgggcagaagtttggaagacatttctcctgcatgttaattccatgtgagcctttggtctacagatacgtacagttggcaaccaaatc

SEQ ID NO: 39398 - DNA, 357 bp, Glycine max
  Clone ID: LIB3139-004-P1-N1-E2
cgcctcttcttccaaatgttcttccgaaagccatgggcaactccgccactccactgtgtatcatctctaccctccacagcaattagcttctcaaaaactaaagacccccacaacaacaaattaaggtacaccatattttcatgtctcttccttgcttcatggctccttattctccaccgcttcaacttcacaatattagcaccctccaccaccacaaccacacccacatgcgacggatcaaaaccgttattctacatctacaaccttccctcgcgcttcaacctaggactcctcgaacgttgtcaaagcctcaacatatacaccaacatgtgccctcatgtcgctaacaacggcctt

SEQ ID NO: 39399 - DNA, 359 bp, Glycine max
  Clone ID: LIB3139-004-P1-N1-E3
tgactgtttttgatgaataccttattccctctagcgcatctggtgaacctagtgtgggttttctacaaaatgaagggggactattaccggtacctcgcagagttcaagtccggtgatgagagaaaagaggctgctgatcattccatgaaagcgtatcagttggcttccactactgccgaggctgagttagcatccacacatcccatccgtttgggcctggctttgaacttctctgtcttttattatgaaattttgaactctcctgaaagggcctgtcaccttgctaagcaggcatttgatgaagcaatctctgagttggatactctgagcgaggagtcttacaaagacagcaccctaat

SEQ ID NO: 39400 - DNA, 352 bp, Glycine max
  Clone ID: LIB3139-004-P1-N1-E4
ctgctgttgtgcttgttgttcaaggatggcaatttggaagaaagatgtttggagaggtgaatgtggaatcccttctggatttccgctcacagttatttgcaatagcatttttaatgagatgctcattagatatagctatgaaaaattactgcgccaggctaaagctccaagtatgtttttacaatccttcaaaaattttgtttctttgtgtgtgtatggtgatgataacttaattagtgttcatgaatatgtcaagccttactttaggggttctaaattgaaaagctttctagctagtcataacatcaccattactgatggtattgacaaaactagtgcaactttgcaattt

SEQ ID NO: 39401 - DNA, 347 bp, Glycine max
  Clone ID: LIB3139-004-P1-N1-E5
taagctcgaatcgctcgagttggagagttgaatgggaatccctctggattggcggtcacagtatttgcaggagcatttttaatgagatgctcattagatatagctatgaaaaattactgcgccaggctaaagctcaagtatgtttttgcaatccttcaaaaatttgtttctttggtgtgtatgggatgataactaattagtgtcatgaattgcaagccttactttagggtctaattgaaaagctttctagctagtcataacatcaccatactgatggtattgcaaaactaggcactttgcaatttagaaagtagcagattggattttctcaagagaaacttaagcag

SEQ ID NO: 39402 - DNA, 352 bp, Glycine max
  Clone ID: LIB3139-004-P1-N1-E6
gagattcatgaaaaagttgtattgaaattttcacaggaggaatttcttacagcttggtcaactcaggtgcgtcctgcaacaactctgttggctgatgggtgtccatatttgtatgctatggtgcatgatagttcagtgtctacaataccaggtgattttgtcattggtgttaagttgacaaccataaacaatatgtgtgcatatgggcttaatcctggtatttcaggttctcgtcttttgggcaccattcctcagtccatttcacagcaaactgtttggaatcaaatggcaacagtgagaacaccattgaattttgattctagcaagcagagcttttgtcaattttctatcg

SEQ ID NO: 39403 - DNA, 354 bp, Glycine max
  Clone ID: LIB3139-004-P1-N1-E8
caaaagctaaggaattgctgagatgggaaccaggggtcaagctgtatgatgggcgtcctctcatggaagaggatttccgtcagaggcttggagttcccaagagcaactaagctccttttactccttcatttcttatcatataatcataatgaatattttgatagtaacggggatgtggatgaacctgttaagtgttaagagatgttttatattgaaaattatggagaggaaggttaaacttgcagccggcaaagccaactggaacgtggtcttcaaattgatacaataagattgcttcttcacccaacttctattggaaatgctgttgttgagatgagttgaaattatttttta

SEQ ID NO: 39404 - DNA, 353 bp, Glycine max
  Clone ID: LIB3139-004-P1-N1-E9
tcattttaaacacacctatctacttattttcgacgggatcaatcttggtgcctggatcagatgacaaacctttttgatcttctaccttgctacacttatagatatccttagtgatatgatcatcaatgtcgagcctaatgctaacttgtaccaggcaactgtgctcatggttttccaagatgtgtaacactctaagccagcagacttggcatcacattattcactgactgtatctatccttgcacagagtgatcaaagatccacaacggctctgttcaaaattgattttaatgcctcgggataacggtacaacgagcatccacaattgctctacgaggccaatctttacaata

SEQ ID NO: 39405 - DNA, 352 bp, Glycine max
  unsure at all n locations
  Clone ID: LIB3139-004-P1-N1-F10
tgaaagtttagaaattggaaaatagtantgagagtgttgatgatgggcaagaagaggccacaaaaaactaaggaactttctgtggcaatagctgaagcatcatcaacaatagatgagaaagagcaacatgaagttcaagttcaacctcaacctcaagctcctcgaaaaagaggtagacctcgtaagattgttttaaagttggaagaaagtgaagaggaaaaggcacaagtgatagagcatggaggagcacaaggcacagagagttcaatggaaaaaggtacaaccaacgaggaagaaggaacatcatcggcatgcatgagggttacaacaaaacaagaagagatacaacttc

SEQ ID NO: 39406 - DNA, 68 bp, Glycine max
  Clone ID: LIB3139-004-P1-N1-F11
aatttactttaagaggttgtccatgggatatggtgagagttcaccttaatttaatagctcagctatca

SEQ ID NO: 39407 - DNA, 347 bp, Glycine max
  Clone ID: LIB3139-004-P1-N1-F12
gcgattagaatggctcccaagggtttaatctttttggctgtgttatgcttctgagcactgtcactgagtcgttgtcttgcggaggataatggacttgttatgaacttctacaaggaatcatgccctcaggctgaagacatcatcaaagaacaagtcaagcttctctacaagcgccacaagaacactgctttctcctggctcagaaacatcttccatgactgtgctgttcagagttgtgatgcttcactgttgctggactccacaagaaggagcttgtctgagaaggaaacagatagaagctttgggttgagaaatttcaggtacattgagaccatcaaagaagcttt

SEQ ID NO: 39408 - DNA, 357 bp, Glycine max
  Clone ID: LIB3139-004-P1-N1-F3
ggccacccctattggaaaagggcatcgttcgttaaatgttactctgagaaaagagctcaatttgtatgccaatgttcgaccttgctacagtcttccaggctacaaaactcgatatgataatgtcaatctaattacaattcgtgaaaatacggaaggcgagtacagtggacttgaacatcaggttgtgagaggtgttgtagaaagtctcaaaatcattacacgtcaagcaagtttaagggtagctgagtatgcttttcactatgccaaggctcatggaagagagagggtttctgccatacacaaagccaatattatgcaaaagactgatggccttttcctcaagtgttgccgtgaggt

SEQ ID NO: 39409 - DNA, 353 bp, Glycine max
  Clone ID: LIB3139-004-P1-N1-F5
tgcaaatgggggtgagagtgacacagatgatgcatgtgttgttgagacaggctcggtggttgaaactgataagtctggcactaaaacagatgaggaccttcatttgtatggcacaaacacataccatgatgaatcccatcctgtggaagctaggaacctgtcagctgaattaaatgaatcaaaggaaattaattggacagaagtagatcttgaagatgcaaatgtcacttctggtgcttgtcaaatcaatattgattctaaacagggctgtgatggtagtgaagttttcttgtgtggttctaacaagtctggatctgttggtgaacgagcagatataattatgtcagatagca

SEQ ID NO: 39410 - DNA, 350 bp, Glycine max
  Clone ID: LIB3139-004-P1-N1-F6
gttcctttcacacttgcattgttttttttttttttggctccttttcacgggctttctcttcttttcctctggcttcatcatctctcatctgcaccccttttgagaacttcaacttgttacctaattactctactccccctctcttgcttctgtgttcttcttcttcgcttctctcttcatggggtgctgcttaagtgccaggatcaaagctgagagccctccacgcaatggtttgagttcaaaggatggtaacaaggaagaagatggcttaagcagcaaggtctcaactccctccgatcctccaactccacggacggagggagagatcttgaagtcttcaaacatgaaga

SEQ ID NO: 39411 - DNA, 335 bp, Glycine max
  Clone ID: LIB3139-004-P1-N1-F7
gcaacattgagaacaccattgaattttgattctagcaagcagagcttttgtcaggtttctattgaccttctcggtggaggaattttagtggacaaaactggagattggatcacacttatacaaaattctccaattagtaacttgttgagagttgctgcttggaagaaaggttgtttaatggtcaagattgtgatgtctgggaatgcagcagtcaaaaggagtgattgggcctcattggtacaagtgtttttaacaaacagcaacagtacagagcattttgatgcatgttagtggacaaaatcaaaaccacattcctgggaattaatctttccaat

SEQ ID NO: 39412 - DNA, 346 bp, Glycine max
  Clone ID: LIB3139-004-P1-N1-F8
gttcataatccaaaaattttcttcttttttcttttgtttcgtatatacatttttcttgttctttttttaatttttttttctggacctggtaagctcgagccggtttggagagttgaatgtggaatcccttctggatttccgctcacagttatttgcaatagcatttttaatgagatgctcattagatatagctatgaaaaattactgcgccaggcttaagctccaagtatgtttttacaatccttcaaaaattttggttctttgggtgggtatggggatgataacttaattaggggtcatgaatatgtcaagccttactttagtgggtctaaattgaaaagctttc

SEQ ID NO: 39413 - DNA, 355 bp, Glycine max
  Clone ID: LIB3139-004-P1-N1-F9
ttggagctttagcctggcgcagtaatttttttacaatccttcaaaaattttggttctttgtgtgtgtatggtgatgataacttaattagtgttcatgaatatgtcaagccttactttagtggttctaaattgaaaagctttctagctggtcataatatcaccattactgatggtattgacaaaactagtgcaactttgcaatttagaaagttagcagattgtgattttctcaagagaaactttaagcagatgtctaatgttttatgggtggctcctgaggacaaggcgagtttatggtcacaacttcattatgtttcgtgcaataatctggaaatgcaagaagcttatcttgtca

SEQ ID NO: 39414 - DNA, 343 bp, Glycine max
  unsure at all n locations
  Clone ID: LIB3139-004-P1-N1-G1
cggctcgtgttgacagtggcagtgggaggagacatgtggaaggcccatgtagccgtggcgtttgttcagctattcaatggaggttaccatgtcatcaccaaagtggcccttaatgttggcatcaaccagttagttttctgtgtcttccgngatctccttgccctttccatcctcgcacccctcgcttatgtccgtgaaaatacagaaagagtgaacttactcagatatgatggtctggcaaaagttggaggaactattatctgtgtctctggtgccatatttatggttttgtatcgtggtccagctttgataggatatgccgaactcggtcatgtaacacaaa

SEQ ID NO: 39415 - DNA, 341 bp, Glycine max
  Clone ID: LIB3139-004-P1-N1-G10
aagcaccacagacccatcactgcagatccagaacggagaatggccaatgcatttgagtacggatcggggtttgtgaaccctgcaagagttcttgatcctggtctcatctatgactcaaagccagcagattttgttgcattcctgtgttcacttggctatgatcagaggtcactccatcaagttacaagagacaacagcacatgtgatagggcattcagcacagcatctgatctcaactacccatctattgcagttcccaatcttaaagacaacttttcagtcactaggattgtgaccaatgttggcaaagcaagaagtgtttataaagctgtagtgtcttc

SEQ ID NO: 39416 - DNA, 352 bp, Glycine max
  Clone ID: LIB3139-004-P1-N1-G11
gcttgctcaaaagcaatgactatgtcatttaatccaaacccgtgttctgatgcatggagtttggaatttctgaagcgtactggatttcattgcgatatcatttgtgtcactggatggactgccaccccaatgcaggatgttcaggttacaattgattggtttatttcctctcaggaatgtgttcccaggacctattgtgttttaaatccacaaaatccttttgtgttaaataggtggatgggaaaattgactttcccccagggcacttcccgaagtgttaagagaatgcctctttctatagggggaggagctggtgcaaagaatgctattctcatgaatatgccaaatgctg

SEQ ID NO: 39417 - DNA, 333 bp, Glycine max
  Clone ID: LIB3139-004-P1-N1-G12
aaaatagtaactgtcactatttttctgttttaatggttctctattcaacaataggttggaatgtcaagctatgggataattttactctgaataggaaaaaggaaaaaagaaaagtagaaagaagtcttttattttaaaacacagttcagtcatgtaataagctcagtcaaatatattcacacatttgatcttgattcagtatttatcattcgaagacatggtttctagtaattcgattgagacatattaatcaaacttttcaaaactattgagttctttcctttttttcatattatgttctgttcactcagcatttggtgctattttctcttt

SEQ ID NO: 39418 - DNA, 349 bp, Glycine max
  Clone ID: LIB3139-004-P1-N1-G4
cttgctcacagatatatttttttttttttgcctccatcattttctcgagagctttcggtttctgtggttcatctttcttcttcttaatctttccccccctctctgtaacatcccgcttctctgaatccctttctgctaatcatctgtctttcaagctaagattttctggtttgtcttttaattcaccaaaaagcaaacttagaaggatttttcgaaagccaggtgttttcagaaacgagatccaggttttattgtcgaatttcgctagtcatattaatatttcatcatttttttttcctttgaaaccagccaagagggttatttttgatccctcaaagctaatttctca

SEQ ID NO: 39419 - DNA, 349 bp, Glycine max
  Clone ID: LIB3139-004-P1-N1-G5
tctgcactggttactgattccactgattcagactgctcagaaggtcctgagataattcagacatttccttctgatgatggtcaggaagagaacagttccaagacaactcccaaggaaaattcttctccctcaccgatgaaagtcccatcaaaacaatggacaaatgaagattttgccacatggcaacggatcatccgacttgatgctgtacgtgcgaacgcagaatggatgccatactccccttctcaagcaattgtaccagacagtagggcatatcgttctgctgaggctgttgggttgaaggattatagtcacctagatgccagcagaatctttcatgctgctcgac

SEQ ID NO: 39420 - DNA, 343 bp, Glycine max
  Clone ID: LIB3139-004-P1-N1-G7
ctcgagccgcgccgtggttgctgcggctgttggggcgttaccttcatgtcctcgtgaacattgggggttttcttactacagtggcatgcgtgggaagcagtgtttggttactctcgacacctccttttgaagagaggaaaagagtgactttgttgatggccgcatcactgtttcagggtgcctctattggacccttgatagatttggctattcaaatcgatccaagccttatctttagtgcatttgtgggaacatccttggcctttgcatgcttctcaggagcagcttttgttgctaggcgtatggagtacctgtaccttgggggcttggtttcttctggatt

SEQ ID NO: 39421 - DNA, 352 bp, Glycine max
  Clone ID: LIB3139-004-P1-N1-G8
gttgtttttgtttggtccaggctggaccagggaatgaatagagatgagaggctggcggttgaagagaactgagttaagcggcgaagccaaacgcagaatcggcggcagaaattgccaccggaagcacgtcgaagacgggtgaaccaaacacaaaattccatccaccacttctcttttcaatccccaactcaaatctgtgaagaaaatctcaatttctaaattgtaattcttagcactactgctagtagtagtaaaaaaaaacaattagaaagtagtagagtgtttttttttctttttttcgtttgttttacttttaagatgctgagaagagcaacgttggcggcgacgcgat

SEQ ID NO: 39422 - DNA, 347 bp, Glycine max
  Clone ID: LIB3139-004-P1-N1-G9
caatttcacaagtgctattttcagtacattttctgagttgtgataatatgagagtgagcgcagagtttgagcgtgttctcaagtatttcgatgaagatggggatggtaagatttccccatctgagcttaggaaccggctatgcatgatgggtggtgagttattgttcaaagacgctgaaaagttgattgaggaattggattctgacggtgatgggtttttgagtttggaagattttgtgaagataatggaggcagcaggggaagatgagaagttgaaggatttggcggaagcttttgagatgtaccatgacactgaaatgtttgggttattacacccaaaagcttgc

SEQ ID NO: 39423 - DNA, 143 bp, Glycine max
  Clone ID: LIB3139-004-P1-N1-H1
acccgtccttaacctcgaaatacgcctcgaggaaaactctttttctaaagttcaccatcaacctccacggactctttcatggcttgacgttcaaataaaaaacttctaaaacaattaacgagataagtaattttcctcataaa

SEQ ID NO: 39424 - DNA, 239 bp, Glycine max
  Clone ID: LIB3139-004-P1-N1-H10
gttataacacactattccgatttgatttctgactcaactcgcccgagtcacgccgttcttttatcgccccaagcatctcttcttaatcacaacaacaatttcttgttcccaaaccctctccctccccaattctccaccaaaaccttcgtcaccgcccgccgtctaacacaccctctctccgcccggctatggacgcgcaaccgccggaattcgtcgtgccggcagcctttaccgaggac

SEQ ID NO: 39425 - DNA, 351 bp, Glycine max
  Clone ID: LIB3139-004-P1-N1-H12
atggactgccaccccaatgcaggatgttcaggttacaattgattggtttatttcctctcaggaatgtgttcccaggacctattgtgttttaaatccacaaaatccttttgtgttaaataggtggatgggaaaactgactttcccccagggcacttcccgaagtgttaagagaatgcctctttctatagggggaggagctggtgcaaagaatgctattctcatgaatatgccaaatgctgttctttcaatgtggagatattttgttggagatctcgtctttgaagtttctaagatgacttctccctacattaaatgtacagtctctttcttcatagcatttggaaatttggc

SEQ ID NO: 39426 - DNA, 331 bp, Glycine max
  Clone ID: LIB3139-004-P1-N1-H3
ggagaagagtaccggcaagtacgagaagaaggtttacgttttgcccaagcaccttgatgagaaggtggctgcacttcacctgggcaaacttggagctaagctgacccagcttagcaagtcccaggctgattacatcagtgtgcctgttgagggtccatacaagcctgctcactacaggtactaagtgattgagatgatcaactgaaaagtgagtgagggaaagacaaacaccgcgccccacccaccccacctgactgtttaattccccgggccttgatttttggtgttagacttttcagatttgtggtagaagaattgtagccatttttat

SEQ ID NO: 39427 - DNA, 89 bp, Glycine max
  Clone ID: LIB3139-004-P1-N1-H4
gaaagtgtaaccagtagcaccacaaccaccagcttccaaccacaagctgaaacatcaaacagcttcgcccaatcaaatatcctcaaagt

SEQ ID NO: 39428 - DNA, 197 bp, Glycine max
  unsure at all n locations
  Clone ID: LIB3139-004-P1-N1-H5
ctctaaattctgcaccaaaatnngnnaaatgaccaaatacttcttgctgnaaatgtcgaaaatgcctgcaggcacaacatgtgaagtgatgcaaaacggcaacacttgtttcaccagatcctttcgtcattgatggggaagaaaggaggcagctggttctcatctgtgaagaaagttttcaagtcatcttctaaaga

SEQ ID NO: 39429 - DNA, 356 bp, Glycine max
  Clone ID: LIB3139-004-P1-N1-H7
ctcgagccgctgaaactttgatctatgtgagacaagttgtggctaccctgcaaagccagaaaaaatggtgccagagaacttgaagaaacaacttgctttggctgtgagaagcatccattggagctatgcaatcttctggactgattcaactacccaacccggggtgttgagctggggggaagggtattacaatggagacattaagactaggaaaacaagtcaaggagtagaactcaattctgaccaaatagggttgcagaggagtgaacagctgagagaactattcaaatccctcaaaactgtagaagtcacccctcaaaccaaaaggccttcagcagcagcactgtccccagaag

SEQ ID NO: 39430 - DNA, 295 bp, Glycine max
  unsure at all n locations
  Clone ID: LIB3139-004-P1-N1-H8
agcttgtgttggctaacacacaagaattctttgatggaaattttccagtggattcttggttaccaatttttgtgaattgtctctatcctgtaagtcaattaccttcagaagctgtcgttgtaaatgttacatgtggtagtggacgtggtggtttacccaccactgtttggtttatgtttgntgtttacaattgtttctcatacattaacaaaaggatttgctcagcacttggtaaagtttataaaatttttttttccaactggggtgggggtgcttttccaatatactttatttg

SEQ ID NO: 39431 - DNA, 352 bp, Glycine max
  Clone ID: LIB3139-005-P1-N1-A1
ctcgagccggttaagattaacatgtgtttgcttgctcatctttagcattatcattacattttataatgttgaagacgatgattcctttttcttttgtctctttactagagtgatggaggaacaccatgcagcctttattgagaccgtgccattcaaaacggttgccatgtttaccttattccagacagcttacttgcttctctgctttggtctaacctggataccaattgctggggtcctattcccattgttaatcatgcttctaatcccagtacgccaatatttccttcccaagttttttaaaggagcccatcttcaagagttagatgctgcagcatacgaggaaacgcct

SEQ ID NO: 39432 - DNA, 369 bp, Glycine max
  Clone ID: LIB3139-005-P1-N1-A10
ttcgttaataattaaagatgtttgggagggcaccgaagaagagcgataatacgagggactacgaaatcctcggcgtctcgaagaacgcttcgcaggatgatctgaagaaggcttacaagaaagccgccatcaagaatcaccctgacaagggcggtgatcccgagaagtttaaagagctggcacaagcatatgaggttctgagtgaccctgagaagcgtgagatatatgatcagtatggtgaagatgcgcttaaggaaggaatgggtggtggcggtggccatgatcccgttgatatcttttcatctttctttggaggtgggagtccctttggatcaagtggaagtagtcgaggtaggaagcaaaagcgcg

SEQ ID NO: 39433 - DNA, 271 bp, Glycine max
  Clone ID: LIB3139-005-P1-N1-A11
ctcgagccgaatcggctcgagcggctcgaggcttctgtctctttctctctctctcgtgctctttttccatgtccatctgataaccctttcctgattctctttcggggttgttgctattctgagggatgggtatgccctgccggtgttcccacacctcccacatcactggaatcatcatcaccagcttcttccgccacaagtcttagatcaacaatttccgtcaattattccaaaaccaccttaagagcctttttcaaatggccccttaaag

SEQ ID NO: 39434 - DNA, 247 bp, Glycine max
  Clone ID: LIB3139-005-P1-N1-A12
ctgcttcaaaaataatggattttgggcgtcaattgacggttcgagaaggaagaacaggtgggaatgctgttgatgctgagacttttggtggtattgcagaggtcatgcttattgtgcaggtttctactgcaagctttgatgatgcaaaagtagctgctgaattcaagaggcttgctcaggcatttgttgtcggagctacttcgcattgttcgacattaccccttactgctctggttgttcaggatca

SEQ ID NO: 39435 - DNA, 375 bp, Glycine max
  Clone ID: LIB3139-005-P1-N1-A2
agaggatgctgataataattgcaaaacacttatacgtaggcagtgtgcgtgtgtctgatatcaagtttcctcttccatacaggccaaaatctttctctcttgtaattgtttcagatgctctggattacctgtctcccagatacctcaataaaactcttccggatttggtgagggtagcatctgatggtgtagtgatatttactggttttcccaccactcaaaaggccaaggtagctgatgtttctaaatttggaagagcggtgagtgtattttacataaagaaatattagaatgcaatccatgtttttgttgttgctttaaatttaaggtcaattactaagcctggatgaatagaagatccttgatcctagactc

SEQ ID NO: 39436 - DNA, 383 bp, Glycine max
  Clone ID: LIB3139-005-P1-N1-A3
caaatacacaaataacccctccaacatagtcttcgccgacaccaaccccaagttccccactatcctccaaaactacatccgaaacgcgcgtttcaacacctcctcgacgcgaaaaccattactcatcgtcactccccagcaagaatcacacgtccagggcacagtaatctgcgccaaaagcgttgaaattcaactcaaaatcagaagcggaggccatgattacgagggcatctcgtacatctccgaggaacccttcgtcatcctcgacatgttcaactatcgcagaatcaccgtggacgtaaaaaacgaggttgcagtggtcgaagctggagcaacacttggagaagtttattacagaatctgggagaagagtaaagttcttg

SEQ ID NO: 39437 - DNA, 261 bp, Glycine max
  unsure at all n locations
  Clone ID: LIB3139-005-P1-N1-A6
gaaactcataaaccatggcaaacacaaataacttctgagcccaacttcacaattgcaggcgcaaaaaacctaacaccctattcaccaacctctaccttctcacctttgctacctttctttgtacccttttctacttactcggcctctggcgccactaccccaccaccaccggcgntgccatcgccgctgtcgcagaatcctcctccctatgcttccaccccaacaccaccggcacaacccaatcatncaccaatctcgact

SEQ ID NO: 39438 - DNA, 341 bp, Glycine max
  Clone ID: LIB3139-005-P1-N1-A7
gttgacaaccataaacaatatgtgtgcatatgggctcaatcctggtatttcaggttctcgtcttttgggcaccattcctcagtctatttcacagcaaactgtttggaatcaaatggcaacagtgagaacaccattgaattttgattctagcaagcagagcttttgtcaattttctattgaccttctcggtggaggaattttagtggacaaaactggagattggatcacacttatacaaaattctccaattagtaacttgttgagagttgctgcttggaagaaaggctgtttaatggttaagattgtgatgtctgggaatgcagcagtcaaaaggagtgatt

SEQ ID NO: 39439 - DNA, 265 bp, Glycine max
  Clone ID: LIB3139-005-P1-N1-A8
atttagagttgaaatatctggacccaaaatagtcaacttcagtagattatttagaggtgaaatatctggacccaaaattgatatttttcatgtcctaaattaagttgttcagggaatatggatgggatgttttcgttcttgataaattttattcaacgggcttcttgtttcatttgtttacatgaatttaatgtttagccgaaaatgtgtttaaaacacttgacatttatttattcccaattgaaatttaaaatctagttgtttg

SEQ ID NO: 39440 - DNA, 374 bp, Glycine max
  Clone ID: LIB3139-005-P1-N1-A9
attgaatctcacaattctctaaaagagatctttttctgctctttgaagaaagaaggggctttgcttgattttggagatgtctctgctctcagatctcatcaaccttaacctctccgataccaccgagaaggtgatcgcagagtacatatggatcggtggatcaggaatggacctgaggagcaaagcaaggactctcccaggaccagttagcgacccttcagagcttcccaagtggaactatgatggttccagcacaggtcaagctcctggtgaagacagtgaagtgattttatacccacaagccattttcagggatccattcagaaggggtaacaatatcttggttatctgtgatgcctacactcctgctggag

SEQ ID NO: 39441 - DNA, 374 bp, Glycine max
  unsure at all n locations
  Clone ID: LIB3139-005-P1-N1-B1
ccagcatacacccacctcggattcatccaacctccgcgtcttgcgactgccttggcatcactgggcttcaacaacagaggtactctgccgcggcagttacatgcacactgccacaaactactcccggagcatctgtgcagcggtctggttctccattgtgagaactgccctcacagcgttgcttcgcggcggtcggtcgcggctagtgctgtgaactttgctcggctggtttcagcggctggtctgcttgccatcgcgactgaaaggcccttggaaatttcctgctttggcttgtcagaacttggcgctcacatctgctcctggttggtctctgcagcgggctgttctccaacgcgagtactcccctncgagcc

SEQ ID NO: 39442 - DNA, 354 bp, Glycine max
  Clone ID: LIB3139-005-P1-N1-B11
tgtagattatggtcgaatggctgaaatactggtacaaagggcaggttctccagatgaatttactaggttaacagctatcacatggataaatgagtttgtcaaacttggtggagatcagcttgttccatattatgctgacattcttggagctgttttgccttgcatatctgataaagaagagaaaattagagtggttgctcgtgaaaccaatgaagagttacgtgcaatcaaggccgatccagccgaagcatttgatgtaggagcaatcctctccattgctaggaggcaactatctagtgaatgggaggctactcgtattgaagctttgcactggatatcaacccttttattcag

SEQ ID NO: 39443 - DNA, 337 bp, Glycine max
  Clone ID: LIB3139-005-P1-N1-B12
gtggagattattgaggactcccaagacatgtcagtgttggacttgccagagctggtgttggaatgccattcttgaaaagctccctccaccttcactttgtcaaatggccggggtttgccgttccctaagggagagctgtgtgagtgatcacctttgggagaggcacatgaaacagaaatggggcagagttattggtcaagctgcttatagggagtggaaatggcatgctgcttctaaagggaatgttggaactcttagacatggcaagcaaaggagcttgttgaggctggtgtcacttaattggcctttttcatggatgagaaccaaggtagatgca

SEQ ID NO: 39444 - DNA, 377 bp, Glycine max
  unsure at all n locations
  Clone ID: LIB3139-005-P1-N1-B2
aaattctccaattagtaacttgttgagagttgctgcttggaagaaaggctgtttaatggtcaagattgtgatgtctgggaatgcagcagtcaaaaggagtgattgggcctcattggtacaagtgtttttaacaaacagcaacagtacagagcattttgatgcatgtaagtggacaaaatcagaaccacattcctgggaattgatcttcccaatagaggtatgtggtcctaataatggttttgaaatgtggagttctgagtgggcaaatcaaacttcatggcatttgagtttccttattgacaatcccaaacagtctacagnttttgatattctcttgggaatctctcaagattttgaaattgctggtaatactctta

SEQ ID NO: 39445 - DNA, 378 bp, Glycine max
  unsure at all n locations
  Clone ID: LIB3139-005-P1-N1-B3
ctcaaaggccatgactgggaagatgttgcaaaacatgtgttagcaagagcaaactccagcaagtcaccaaagactcagacacagtgcaagaacaagattgagtccatgaagaaaaggtacagatcagagtctgccaccactgctgatgcctcatcttggcctttgtattctcgcctcgacgttctgctccgcgggacgggactgatatcttcttcgctgccaccaccaatagcagcaacagcgatagcagcaccatctcaatcaccacatgctactataaataataaccaggctttggtgttgttggagccaccttcactggctgtgttacaagcacctncttctgttgctcctccaccaattgcaattgcacaaaac

SEQ ID NO: 39446 - DNA, 329 bp, Glycine max
  Clone ID: LIB3139-005-P1-N1-B4
ctgctccaaaaaaacagacctttgtctctatctctctgtctctcacccttcccagtgggcaattcaacgatgttagagcagttgctgatattcacgcgcggagggctcatcctctggacctgcaaccacctcagcaacgccctgaggggatctccgatcgacacgttgatccgatcctgcctcctggaggagcgatccggtgcggcctcctttaactacgacgcacctggagccgcatactctctcaaatggaccttccacaacgacctaagccttgtttttggcggcggctatcaacccgtccctcaccttttggacggtgacgattt

SEQ ID NO: 39447 - DNA, 234 bp, Glycine max
  Clone ID: LIB3139-005-P1-N1-B5
gattcctatctgatgcttacttaggccgttacaccggtgtgatagcatcatgcattggttatctcatgggtttgggtctgctttctttgacatggttcttaccaggtttcaaaccttgtgatcatcccagtacatgcaccgaacctaggaggattcatgaggtgggtttcttcctaggcatctatttaatatccggatgaactgggggccataaacctttcttgtagagctttg

SEQ ID NO: 39448 - DNA, 281 bp, Glycine max
  Clone ID: LIB3139-005-P1-N1-B7
tgaagaaagacacagccattgtttgtttactttccattgattgagcgaaagctttggtttttctgcgatcattttccattgggtggaagaaagtctcaacctttagtcgaaagagcaaggatctgagtgagtgagcgatcatgtgtggtggtgcgattatctccgacttcattccagcgggtcccgccggcggggcgcatcgcgtgaccgccgacattctgtggccgaatttgaggaagcggttctcgaagtccctgctggacgatgatttcgaggcaggg

SEQ ID NO: 39449 - DNA, 294 bp, Glycine max
  Clone ID: LIB3139-005-P1-N1-B8
aacaacccttctctgattcgtcttcaatttttgtttgtcttcttacaaaaccttagggcagatttctgggtttgtcttttctgataatctggagtggagctaagtcaagatgccgtgggtttccttgtttgtggatcacaaaagaaattgtgttcgcttggtggtgttttttcgtgtgattctgtaatttaattgctcaggtgtagtcccattaggttgcaaagcaactcttttcattagctgttctccttttcatttccaaagctgttagggggattgaggatgtactttgca

SEQ ID NO: 39450 - DNA, 363 bp, Glycine max
  Clone ID: LIB3139-005-P1-N1-B9
aaaaaataacagaaaaaaaagaaaaagataattctgatttacttgttcctgaaaacattttatccgctagacgtcgtagagaattgagaattctaatttgtttaaatccaaataatataaatagtatgcatagaaacacaatattttataatccaaataaagtccaaaatggttttccacttttgactaaaaaaagaaaatattttgagaaagataaaaaaaaactaatgaatttcaaaatttttctttggccaaaatatcgattagaagatttagcttgtataaatcgatattggtttaatacccataatggaagccgtttcagtatagtaaggatacatatgtatccgcgaatgaaaattc

SEQ ID NO: 39451 - DNA, 376 bp, Glycine max
  Clone ID: LIB3139-005-P1-N1-C1
ctatacggtactatgcagagatgatggctgagactagtggtttgatcatatgactacagtgaaactgtatgaggaggacaatacgagggtaaggatatcacagcaatgggtgtgacagtgactatacactatattatatggccacttcacaatgactgctaagatgtgtgatctcatgcgatgcatacatgtagttgctcgaggataacccatagttagttcaaggacacaaatggagatgtgtgatagcgagcataacatccattgccagggcctatctcttattctggggacactcatgcctactaatgcattcgggtgtacatcacaataccaatatcacgacacggcgctcttaccactaaagaatgatttt

SEQ ID NO: 39452 - DNA, 363 bp, Glycine max
  Clone ID: LIB3139-005-P1-N1-C10
atctgctatcaccttttccgtttcttgcgattcgacgatggccgatcaaaagctttcagaaccggcgcttaaacgtgagcagcttgatgaattcgtgagtagtctatattttgaacaacgaattcttgaactccgacttcttcaagacctcgagaacaatgatgaatgtaggaaaaatgggagcctgaaaaggttaaatgaccagagtgatgtctgtggatttagaaagtgcttcaaaaatcattatgattcgcttccgaatcaaaggtgctttgggaatcgagaagaagtgattcaagagacgatggaaatggaggtgggaaaatatgatggaactgggcacccttaagggcaaggaaacat

SEQ ID NO: 39453 - DNA, 322 bp, Glycine max
  Clone ID: LIB3139-005-P1-N1-C12
ctctggtacagatcttttgcctggtgatgttgtctccataggtcgctcttctggtcagaatggggaggagaagtctgtaccagcagacatgcttctattggctggaagtgtgattgtgaatgaagctattctgacaggcgagtctactcctcaatggaagatttcaatcgcgggtagggcgatggaggagacattgtctgcaaagcgagataaaaaccatgtgttatttggtggaactaaaatattgcagcacactccagataagagttttcctctaaaaacacctgatggtggctgcttggctgttatcttgagaacgggg

SEQ ID NO: 39454 - DNA, 366 bp, Glycine max
  Clone ID: LIB3139-005-P1-N1-C2
cttctacaaggaatcatgccctcaggctgaagacatcatcaaagaacaagtcaagcttctctacaagcgccacaagaacactgctttctcctggctcagaaacatcttccatgactgtgctgttcagagttgtgatgcttcactgttgctggactccacaagaaggagcttgtctgagaaggaaacagatagaagctttgggttgagaaatttcaggtacattgagaccatcaaagaagctttggaaagggaatgcccaggagttgtttcctgtgctgatatcctcgttctctctgccagagatggcattgtttcgctaggaggtccccatatccctcttaaaacaggaagaagggatggtagaag

SEQ ID NO: 39455 - DNA, 216 bp, Glycine max
  Clone ID: LIB3139-005-P1-N1-C5
ggtgaaatgttgaacaccagaaatcatgggaagatgtggaggctggtgggcaacctttacattttttgtgtgtttgtgttcattaaaattcagcaaaccacttctccaaccacaaggacccaattcactatggcttgccatattaggaatgttcagttttactgtgtttgtatctgctgattctgatctggtagagggtgaagcacactacactcg

SEQ ID NO: 39456 - DNA, 350 bp, Glycine max
  Clone ID: LIB3139-005-P1-N1-C6
caacatgctcactctcaccgcagccgccatggccggtggcgccgccaccatcgccaccggtgacgcgccacttctggctctaaaactatcctccacgctcttgttctctgcctccacggggatgctgatggtgatgaacaaaatacagccttcacaactggccgaggaacaaagaaacgctacgagggtgttcaagcagctcaagtcccacatcgaaacaatactagccattggaaaccctaccgaggaagatgtcaaggactcaatggaaaaagttttggcacttgacaaagcctacccacttcctttgttaggagccatgattggaaaattccccaaaaaatttgaac

SEQ ID NO: 39457 - DNA, 329 bp, Glycine max
  Clone ID: LIB3139-005-P1-N1-C7
gggtcccgtctaaatacaatctgattcagctctgggggggcatcttcctcacagggtgctgaagatgataagcctctaccagttatttccgagaactccgaggaagcaatatccaacattataacccctggtgatattcatagtgacgaatgtgatgcttctgatgcacaatatcaaattgttgaaccaattgcaaaggaggatcaactgccgaacgtggacatattttatgacccaacaaatcagcaattagacgacaaattgttctcccctgtccatgcacatttcccagcagatttttattatcaagctaacaatcaatcagaact

SEQ ID NO: 39458 - DNA, 376 bp, Glycine max
  Clone ID: LIB3139-005-P1-N1-C9
gatgcatatgccttgatcaagcagaacaaaacttcacgcgaatgatggccatgattttagatgagaggaactgaattgacagggttattggtcaattagaaaatcggggttttctgagaggatctgatgggttgatttgaataaacagagaagctaccctgtgtacaaatgtgcttcagaagtgttgaggccagcaacatgcgttcagcctcctttgtaattttttgccattctgttgttatagttaaagtttttattgaatattactctctttccctgatttattcttccccaaatgtaataatagaaacctttgttggcatttgtatgtatttattgtattggagaaggaatgaattacttaaagaatgatata

SEQ ID NO: 39459 - DNA, 366 bp, Glycine max
  Clone ID: LIB3139-005-P1-N1-D10
gtttttcttctctctctcaatctctttcatgtgagggtggaaccacaacaaaacacaaaccacacactctcctaactcgaggttatttttttctttccccaaagaggcatgagttgcaacgggtgccgcgtccttcgaaagggttgcagcgagtcttgtattctgcggccgtgtctacagtggatcgatacgcccgaagcacaaggccatgccactgtcttcgttgccaaattcttcggtcgtgccgacctcatgtccttcatttctaacgtccccgaaccccaaaggcccgctctgtttcaatctctgttgttcgaagcgtgtggaagaacagtgaaccctgtcaacggtgctgtgggacttttg

SEQ ID NO: 39460 - DNA, 360 bp, Glycine max
  Clone ID: LIB3139-005-P1-N1-D11
caagcttttgcatctgcttcagctgacaatattaaaaagttcacccttccaaaaggagaattttgccacaatatgctctctcaacagaaaactatcatcaatgcaatggctgtcaatgaggagggtgtgatggttactggaggcgacaatggcagcatgtggttctgggattggaagagtggtcacaatttccagcaatcccaaacaattgtccagcctggttcattggacagtgaagctggtatttatgcttgtacctatgatcttactggttcgaggctcataacctgcgaagctgacaagacgataaaaatgtggaaagaagatgagagtgccactccagaaacccatccccttaac

SEQ ID NO: 39461 - DNA, 364 bp, Glycine max
  Clone ID: LIB3139-005-P1-N1-D12
agaacctattgtgttttaaatccacaaaatccttttgtgttaaataggtggatgggaaaactgactttcccccagggcacttcccgaagtgttaagagaatgcctctttctatagggggaggagctggtgcaaagaatgctattctcatgaatatgccaaatgctgttctttcaatgtggagatattttgttggagatctcgtctttgaagtttctaagatgacttctccctacattaaatgtacagtctctttcttcatagcatttggaaatttggctgatgacaccatcaattttgaggcttttccccacaagctggtgccagttggagagattcaggaaaaagttgtattgaaaatttcac

SEQ ID NO: 39462 - DNA, 354 bp, Glycine max
  unsure at all n locations
  Clone ID: LIB3139-005-P1-N1-D3
gagagaaatggcttgcaggcaattgtgggcttcaagagctgcctcttacctgaggatctctgtgtttcacagaggcttttctaatgttattaaagatttcaagtatgttgattctcatgagtgggtgaaagttgatggaaattacgcaaccatcggcataactgatcatgcccaagatcatttgggtgatgttgtatatgttgaattgccagaagtgggagcagctgtgacacaaggaggtagttntggtgcagttgaaagtgtgaaggctactagtgatattaactctcctatttcaggaaaagtttgttgaagtcaatgaaacgcttaacagctcttctgctttgtcaattc

SEQ ID NO: 39463 - DNA, 367 bp, Glycine max
  Clone ID: LIB3139-005-P1-N1-D5
gattcaggtaaaaagttgtattgaaattttcacaagaggaatttcttacagcttggtcaactcaggtgcgtcctacaacaactctgttggctgatgggtgtccatatttgtatgctatggtgcatgatagttcagtgtctacaataccaggtgattttgtaattggtgttaagttgacaaccataaacaatatgtgtgcatatgggctcaatcctggtatttcaggttctcgtcttttgggcaccattcctcagtctatttcacagcaaactgtttggaatcaaatggcaacagtgagaacaccattgaattttgattctagcaagcagagcttttgtcaattttctattgaccttctcggtggagg

SEQ ID NO: 39464 - DNA, 306 bp, Glycine max
  Clone ID: LIB3139-005-P1-N1-D6
gaacttatttacaagagagggtatggaaagctaatgggggagaggactgctctaactgacaactctatcattgagcaggctctgggcaagtatggaatcatatccactgaagatctgatccatgagatcatcactgttggacctcactttaaggaggctaacaacttcctttggccatttaagctcaaggctcctttgggtggcttaaagaagaagagaaaccattatgttgagggaggtgatgctggaaaccgggagaattacatcaatgagctgatcatgaacaatgaatttggctgtatcact

SEQ ID NO: 39465 - DNA, 375 bp, Glycine max
  Clone ID: LIB3139-005-P1-N1-D7
gaagaaattaaagggcaattccaggctctttctgttttagagggattggcaacacaactcacttcattttgtgacacatctttgattgccatgggaaaaacttgcacagcattcaatcaaatttgcactgctgggaaaaatgttaaagtgattgctggcagattgttggatgtagtttccaattttgtgaggaaacttttgggattggatagtgcttttcttagagatgcagcgcttatcttctctcaagatgttgatggttggctgcgcaatatcagctggtgtcaggaacaattcctactgaaagcatacatgtctcaagatgatcttattgtcttgcgttccctttttaatgtcaattccatcaacatgttc

SEQ ID NO: 39466 - DNA, 246 bp, Glycine max
  Clone ID: LIB3139-005-P1-N1-D8
gccattcggaacaccacgaaccgcttgtgattcccggcgtgcgaagcggatcggatcgaggacacacttaaaccgtttttatcgcctataggggagatgtacaacagttacctcttaccgagataggaactactaaccggagactgattcatgatgaacacgaggcaagaactggataccgctgtaactaaggcggcgtgagaggaccggatataggtccattttacaaaaggagctgagtgttca

SEQ ID NO: 39467 - DNA, 365 bp, Glycine max
  Clone ID: LIB3139-005-P1-N1-D9
cttgcaaagcgagctcatgaatttgaaaaacatgttgctcatgaaagcctcaaggatcaaattcctgctgttgacaagttgtattctactaaggttaataagtttgcaaaaattatgaaccttagacaaagtgttgttggtgatcttaaacttcttactgatgggaagttgtatgagggtaagcatattcctgtatctaatattagtgcaggggaaaatcatgtagttcaaatacccttaatggcacaggaggaaattctgtcttctagtgcaagtgatttcagaactgcaatggtgagtaaaaatagcaaacctcaagctactgcaatgcatgtgggagctatagaaattatcattgatagttt

SEQ ID NO: 39468 - DNA, 369 bp, Glycine max
  Clone ID: LIB3139-005-P1-N1-E11
aatcaactcttcaaaagggagaagaaaaggaaagaaaactctcaaaaaactattatagcaatggcagaacaaaaccaaaaccaaacaactgaagctggaaggcaccaagaggttggtcacaagagccttctccagagtgatgctctttaccagtatattctggagacaagtgtctacccaagagaacctgaatccatgaaagaactgagagagttgacagcaaaacacccatggaacatcatgacaacctctgcagacgaagggcagttcttgaacatgctccttaagctcatcaatgccaagaacaccatggaaattggtgtctacactgggtattcacttcttgccaccgctctcgctcttcctgaa

SEQ ID NO: 39469 - DNA, 365 bp, Glycine max
  Clone ID: LIB3139-005-P1-N1-E12
gctgtcttcagcttccaactcttcttgcagggtatcctctaccctttcagattggagttcccctaccgggaaactggattggggtgtaaacggagacaagctgaacaagctgaggaaatctacttcctttggattcagaaacagtggggtaactgcatcccccatagcacagcctgaatttggtgctgagccggatgtctcatgggttcattcattggttaaagatgttccctccgagaggtctgagatatttggtgctgagaagcaacaatatgatctcagtaaagagatgcttccaccatggatggagcagctgtatatagagcaggagcagatggtagcatgagctagggctgccatggcaa

SEQ ID NO: 39470 - DNA, 325 bp, Glycine max
  Clone ID: LIB3139-005-P1-N1-E3
tttgcaagttggcttgctcttggaatctcaaattctgggtttcaagtttatttgctacagcaaaatgactagtacagaggaaaagcctgtgactgtgagtgaggaacatgatgcaagttcttgcagaagaacagtttctcttccagttcaaaaggttgatgatccaatggcgataactgaagaaaccacacatgttcctcctcggaagcgacagaatctttttctagaaataccctcaagaacagaagagagttctcaagaatttgttgcaatcaaaatgccaccgacacccagttccaatcccactcctactccaaagagagtg

SEQ ID NO: 39471 - DNA, 351 bp, Glycine max
  Clone ID: LIB3139-005-P1-N1-E4
attgaatgtctttctctggactgtgcaaatacaattgtgggaacacatttacgagattgacaagataagcttcttgcatttccagattattgcacgaaacataatgaagttgtgaccataaactcgccttgtcctcaggagccacccataaaacattagacatctgcttaaagtttctcttgagaaaatcacaatctgctaactttctaaattgcaaagttgcactagttttgtcaataccatcagtaatggtgatattatgaccagctagaaagcttttcaatttagaaccactaaagtaaggcttgacatattcatgaacactaattaaggtatcatcaccatacacac

SEQ ID NO: 39472 - DNA, 247 bp, Glycine max
  Clone ID: LIB3139-005-P1-N1-E7
agctcttgtacttcaaacaaccaaaaataacattgaagacgggggaagtgctatgggcgtaacaccttatttccggcccatgcacgagattaccttttcaacagttgacaagcctaaactccttagtcagttaactgcaatacttggtgagatgggactgaatattcaagaagctcatgcattttccaccactgatggattttctctggatgtctttgttgttgagggatggcctaaagaggaaact

SEQ ID NO: 39473 - DNA, 233 bp, Glycine max
  Clone ID: LIB3139-005-P1-N1-E8
ctctcagttatgtgttcccaggacctattgtgttgggaatccacaaaatccttttgtgttaaataggtggatgggaaaactgactttccctcagggcacttcccgaagtgttaagagaatgcctctttctatagggggaggagctggtgcaaagaatgctattctcatgaatatgccaaatgctgatctttcaatgtggagatattttggaggagattttctctttcaatatt

SEQ ID NO: 39474 - DNA, 356 bp, Glycine max
  Clone ID: LIB3139-005-P1-N1-E9
cgaagaacgaacgagagtgcagcgccagcggcaatgggaaggagcactttggctttggttctcgcgattctgatctctttgcagggaaccccccacgttagatccgatgcctccgatcatcgttacaaggacggagactccgttcctctttacgccaacaaagtcggtccctttcacaaccccagtgaaacgtatcggtactttgacctgccattctgtgtaacaggtcatgagaaagataagactgaagccctcggtgaggtgttaaatggcgatcgccttgttagtgctccttatgaacttagtttcaagaaggagaaagactctaaggttgtatgcaagaggaagctcacaaa

SEQ ID NO: 39475 - DNA, 385 bp, Glycine max
  unsure at all n locations
  Clone ID: LIB3139-005-P1-N1-F1
tcggatttcggttcgggcttgaatttgtcaagcctaactttaggggttctaaattgaaaagctttctagctgggtcataaatatcaccattactgatggtattgacaaaactagtgcaactntgcaatttagaaagttagcagattgtgattttctcaagaaaaactttaagcagatgtctaatgttttgtgggtggctcctgaggacaaggcgagtttatggtcacaacttcattatgtttcgtgtaataatctggaaatgcaagaagcttatcttgtcaatctcgtaaatgtgttacgagaattgtatttgcacagtccagaggaagctcgccaattgagaaggaaagctctctctcgtattgaatggctgcaaaaagctgat

SEQ ID NO: 39476 - DNA, 367 bp, Glycine max
  Clone ID: LIB3139-005-P1-N1-F10
gataaaatatcttttgctcgacgttgctattagtcagaagccagaaattcgtgtaggtgagtgaggaagagagaaaagaaaaccggtgctgttgaggcagagattcaagagaatggaaggtgtgagccctgagcccttgagatcagaattggattccaaatccaaacaagacacagcgaaagaagaagatgacgacacattcaaagaaagcactgacgccgaggtcactaaaattcgtctcatgagagcctttgttgaaagccgagatccctcttccaaggaagtagatgatttgatgattagaagattcttgcgggctcgtagtttagatgtggagaaggcttcggcaatgttccttaagtacttg

SEQ ID NO: 39477 - DNA, 331 bp, Glycine max
  Clone ID: LIB3139-005-P1-N1-F11
ggaatgctgtttttgtgtcggataaaagcctgatgtgtggggtgcacatggacaaactacatcacccgtctatcgcaggtcagctacgtctgcggctatgggacccacacacagtcccaccgtctggctactcattatggggcgaggaagcggaacggttcttcttgcttgaccaaatctgtggcagtgctacacctttgaaaacctttgtgcatggatggcatgctaaacaacacaatcttagagcttccctctatattttgaggggcaacacgacccgcaagaccctctctatatttgctgcatataaaaaggaaagggcaaaatcttc

SEQ ID NO: 39478 - DNA, 253 bp, Glycine max
  Clone ID: LIB3139-005-P1-N1-F12
cgtatacaaaaacctcaatctccgcgggttcaacactgtgttctgtgttctctctcacttctccgtagatctactttctctctctctctctgagaaatgcgtggggtctcgcttctggcgtttcttcttttcctatccctctgcgcctaaacttctgatcacgactacatttttgtgaaattctgccctctaacgttactttcttgtcctcctataatgcatctcaagtattcactttttttcccccaaccct

SEQ ID NO: 39479 - DNA, 320 bp, Glycine max
  Clone ID: LIB3139-005-P1-N1-F4
ggcaaccaagctcaatggagagctttggtgtgggcatgggttctttgattcttctttggatgcttactaaaaatttaagttccaatgcacttggtgacagtataaaggatgaggaaggactcaaagaagaccaaaatgaaatggaaaattctctctcaaataatgatgaaatgaggggcatgaaagatgatgattggcagatggtgcaaaagaaaggaaaccaatttgtggtgaatgacaaacctttctatgtcaatggattcaacacgtattgggtgatggtatttgctgcaagagagttcaccagtggaaaggttact

SEQ ID NO: 39480 - DNA, 367 bp, Glycine max
  Clone ID: LIB3139-005-P1-N1-F5
tggagattggatcacacttatacaaaattctccaattggtgacttgttgagagttgctgcttggaagaaaggttgtttaatggtcaagattgtgatgtctgggaatgcagcagtcaaaaggagtgattgggcctcattggtacaagtgtttttaacaaacagcaacagtacagagcattttgatgcatgtaagtggacaaaatcagaaccacattcctgggaattaatcttcccaatagaggtatgtggtcctaataatggttttgaaatgtggagttctgagtgggcaaatcaaacttcatggcatttgagtttccttattgacaatcccaaacagtctacagtttttgatattctcttgggaatc

SEQ ID NO: 39481 - DNA, 369 bp, Glycine max
  Clone ID: LIB3139-005-P1-N1-F6
gcgtagaaaaggaaaataaagaaattagcgtgaaaaatgtgtgggtgtgttcagcagctccatagtgtcgccgccggaggagctcgttgccgccggcagccgtacaccgtcgccgaagatgacggcggcggcgctgcggaagtggttcgaggagaagaacccctccgcagtgtcggtggaggtcggagagcatgtccagctcgcttatacccaccagaacgagtcgccgtttcagcccagatcctttgctgtgaaggatgaggtattctcgttgtttgagggagcccttgacaatttgggcaacttgtgacaacaatatggattggccaaggcaaccaatgaagtatcgttggccattgaggcttacca

SEQ ID NO: 39482 - DNA, 368 bp, Glycine max
  Clone ID: LIB3139-005-P1-N1-F7
gcttgttgttcaaggatggcaatttgtaagaaagatgtttggagagttgaatgtggaatcccttctggatttccgctcacagttatttgcaatagcatttttaatgagatgctcattagatatagctatgaaaaattactgcgccaggctaaagctccaagtatgtttttacaatccttcaaaaattttgtttctttgtgtgtgtatggtgatgataacttaattagtgttcatgaatatgtcaagccttattttagtggttctaaattgaaaagctttctagctggtcataatatcaccattactgatggtattgataaaactagtgcaactttgcaatttagaaagttagcaaattgtgattttct

SEQ ID NO: 39483 - DNA, 343 bp, Glycine max
  Clone ID: LIB3139-005-P1-N1-F8
cacagaatcactctctgaggctggaaatattcaggggtttaaatcctatttgactgatttgtcatgggcttgtcagatattgagtaagttggaaattatgagggagtttgtttacacattctttaacctcaagttttatgttgtcatcagctgtcaacaaaggggcatcatcatcttcagttagcatgtactcaagttgctcttgtgccgaagacttaagatcattcaattgtggaggtggagatgcggctcgagccatctttcctaattatggctaattctcatttctctcattattttggttttaagtattgataacatgatgattgggtggctgactatg

SEQ ID NO: 39484 - DNA, 365 bp, Glycine max
  Clone ID: LIB3139-005-P1-N1-F9
ttccagctttgtgcaggaagatggaaattccatactggattgtcaagggcaaagcgcgcttgggaacaattgtccacaagaaaactgcttcagttttgtgcttgacaactgtcaagaatgaagacaagatggagttcagtagaatcctagaagctattaaggccaacttcaatgacaagtacgatgaatacagaaagaagtggggtggtggaatcatgggttcgaagtcccaagccaagaccagggccaaggagaagctccttgctaaggaagcagcccaaagaatgaactagattaagttgcttttacattatttaggatggcatttttctatatcttatatgggagcatattcatgttaaaat

SEQ ID NO: 39485 - DNA, 165 bp, Glycine max
  unsure at all n locations
  Clone ID: LIB3139-005-P1-N1-G10
tgataagcttgtgttggctaacacacaagaattctttgatggaaattttccagtggattcttggttaccaatttttgtgaattgtctttatcctgtaagtcaattaccttcagaagctgtcgttgtaaatgtcacatgtggtagtggacgtggtggnnnacccac

SEQ ID NO: 39486 - DNA, 358 bp, Glycine max
  Clone ID: LIB3139-005-P1-N1-G11
caaaattggctcacggcatactttctggtaaatattctgttccggcatttgagaatgatgaaaaagaaaatgttgctacttcaactacaactggtaaacaagaagggatacgtccacatatgtttaaatctgtaatagctgccagccatcctgaattttcatctccgaggcaacaggatgctttagaatttttcctacattttcttgatcaagttgagcgagctaatgctgggaaagttgaactggatccatcgacgagtttcaaatttggtattgaagatagaattttgtgttcatctggaaaagttacatataatagaaagcatgactacattctttctctcaatatcccattaca

SEQ ID NO: 39487 - DNA, 372 bp, Glycine max
  Clone ID: LIB3139-005-P1-N1-G4
cgctcagcactcaaatcctctgagagaaaaaaaaattagggttttgcatttcgggtcagacagactcagacatgggaggaggcaatgcccagaagtcaaagatggctcgcgagaagaacctcgagaagcagagggctgccgctaagggaagccagttggattcaaacaagaaagccatgtctattcagtgcaaggtgtgcatgcaaacatttatatgcaccacatcagaagtgaagtgcaaggagcatgctgaagccaaacaccccaaatctgatctccatgtttgttttcctcatcttaaaaagtgaaagagtgcatgttgagacatgatatatcaatatatggcctgttatatagtctctatccacagag

SEQ ID NO: 39488 - DNA, 224 bp, Glycine max
  Clone ID: LIB3139-005-P1-N1-G6
caatcaatggagaacaccgagggatccagatctgcgacgaacggggtgctgcctctggcgcgcaaagtggcattgattaccggaattaccggccaagacggttcgtaacctgacagaattccttttagacaaaggttacaaggtgcacgggctgatccgtcgctcctcgaacttcaacacgcagcgcatggaccacatctatcatgatttgcacaacatccaca

SEQ ID NO: 39489 - DNA, 373 bp, Glycine max
  Clone ID: LIB3139-005-P1-N1-G7
atcaccattactgatggtattgacaaaactagtgcagctttgcaatttagaaagttggcagattgtgattttctcaagagaaactttaagcagatgtctaatgttttatgggtggctcctgaggacaaggcgagtttatggtcacaacttcattatgtttcgtgcaataatctggaaatgcaagaagcttatcttgtcaatctcgtaaatgtgttacgagaattgtatttgcacagtccagaggaagctcgccaattgagaaggaaagctctctctcgtattgaatggctgcaaaaagctgatgtgcctaccatagcacagattgaagagttccattcgatgcaaaagatgatgaatgctcctgattcaaatg

SEQ ID NO: 39490 - DNA, 374 bp, Glycine max
  Clone ID: LIB3139-005-P1-N1-G9
ctcgagccgaatcggctcgagaaatcaaacttacttgaaaatacttccccttttccaacattcaataccttggtttctgtactgctctttaaaaactgaatttatataatttgcttacaaaaaagtatttccaataacatcacatccatcattaactaatgaagaaactttgattttctagtgaggaggagttctttctactttattagcctctcagcactttatagaagtgtctaacttgtaacttatacaagagatgcagtgagaagaaagatatgagatcccctaataagtaactcattcctatgagaatgcagtctgatgtacccacaataaaaccttgcactttatgttgagttgatgaggactggatt

SEQ ID NO: 39491 - DNA, 355 bp, Glycine max
  Clone ID: LIB3139-005-P1-N1-H11
tctacaatgtcctcagccgcatcccccaccactgtcgctctcctacactccgggaccgcttcctcctcctccaccgccacctccgcctccccctccccctcgcgcgtgcagctcacctcctccctccgcgcccgcccgctgcgccgcctgggcttcgccgcggcggacccgctgctcgcggcgagtgtagcggcgcgcgtggcggcggtgagaggaggaggaaagggcgcgaggggggtggtgtcgatggcaaaaaaaagcgtgggggacctgagcgcgacagacctgaaagggaagaaggtcttcgtcagggccgacctcaacgtcccgctcgacgacaaccagaacatcaccg

SEQ ID NO: 39492 - DNA, 262 bp, Glycine max
  Clone ID: LIB3139-005-P1-N1-H2
cgttattttatataaaacacacacacttcacacatcattacgacatttaaatgtgggggggtaatgatgtgagatgaggcagtcaccttcaagaccttcgccaccgttatcatcggggcgctttttttcgccgccgccgcctcctccgttcaggatttgcctccgccgccggcacccgaacccgatgcctaagcagccggatccgttttgagctcgatggccgtcattggagcttccgttgtgaatacattgctcgctatct

SEQ ID NO: 39493 - DNA, 364 bp, Glycine max
  unsure at all n locations
  Clone ID: LIB3139-005-P1-N1-H4
cttcgccaccggccaacacaacgtggccaaggtaacgaaatgggctttcgacgcgtgcgacggcggnagcgccgttttcaccctgacctccggtccagcgaccgtgaccctgaacgaaacaggggagcaatactacatttgctccgttggatcacactgttccgctggccagaaactggcaattaacgttaacagagcttcttctaccggtccttcccctgcacctcaacccagaggaagtggttctccaccaagggctagccctgtccccacacaagcaccacaagccagtagccccactcctccaccaaggtctgcaccagcacctgcttttggtccatcctctgaaccagctactttcatt

SEQ ID NO: 39494 - DNA, 208 bp, Glycine max
  Clone ID: LIB3139-005-P1-N1-H7
cgttgctgatatgacagagcttcctagtgtgctgccgctccaaataatggtaatgctggtccttatcaaaaggggcagcagcaacaatgagtgggggggatgggcttgcggctcttgcccaccacctatcaaattttcctttaaacttatcaaggggattaaagattgatgggggtatccgggggtttggctatattggactcaaaaa

SEQ ID NO: 39495 - DNA, 278 bp, Glycine max
  Clone ID: LIB3139-005-P1-N1-H8
ctcgagtttttggaagaaaggctgtttaatggtcacggttgtaatgaatgggaatggagcaatcaaaaagagtgattgggcctcattggtacaagtgtttttaacaaacagcaacagtacagagcattttgatgcatgttagtggacaaaatcagaaccacattcctgggaattgatcttcccaatagaggtattgtggtctctaaataatggttttggaaatgtggagttctgagtgggcaaatcaaactttatggcatttgagcttccttattgac

SEQ ID NO: 39496 - DNA, 373 bp, Glycine max
  Clone ID: LIB3139-005-P1-N1-H9
agtagcggtgccaagaggagcggtcccccaaagcacgggaacaagtacgcttggaaggccaacgctggtcgcaaaatcaacgaaactgaagttggaggaagattcagacccctctctgagatcactggggtgtgccctcgttgcaaggatcaaatcgaatggaaacgacgttatggaaagtacaagcctcttcttcaaccagccaaatgtcagagatgttccaagcgtgctgtacgtcaagcttaccatagcttgtgtcctggttgtgccaaggagcatggtgtatgcgcaaagtgttgttgcaatacgaagcaaatagttggaagggatatatcagaagttgaggctgagcaaaagatgctagaggaggcca

SEQ ID NO: 39497 - DNA, 342 bp, Glycine max
  Clone ID: LIB3139-006-P1-N1-A10
ggaaataccagaagagtaccgagcttttgatccggaagctccccttccagaggctggttcgtgaaattgctcaggacttcaagactgatctgcgtttccagagccacgccgtgcttgcattgcaagaagctgctgaggcataccttgttgggctctttgaggacactaacctgtgtgccattcacgccaagcgtgtaaccattatgcccaaggatattcagctggcaagaaggattcgtggtgagcgtgcttgagttggtggttggaaagatgaagatgattggtggctgcggttggtgtttttgtttttcagattcctttttttattcaatagatggggtt

SEQ ID NO: 39498 - DNA, 364 bp, Glycine max
  Clone ID: LIB3139-006-P1-N1-A11
tcaatttggaggctggaaatcaacctttgtcattggttatgggctaccattgcaagactttctttttgagtctccagatggcagaagatacctcaattttacttttggttgccctcttgttgagacagtggttgacaagttgattgtaaaagttgtgctgccagagggatccaaagatcccactgttgagattccttttgaagtgaagcaacatctagagatcaagtattcataccttgatgttgtcggcagaactggggtggttctagaaaaaagaaatgcagttcctgagcataatactcctttccaggtatactacaggtttaaccccatattcatgcttgctgagccattgatgctggta

SEQ ID NO: 39499 - DNA, 360 bp, Glycine max
  Clone ID: LIB3139-006-P1-N1-A12
cccaatcagagaaagaaagataaaattctcaaaatggcagccagttcgatccccatccgagtcgccggaatccaaccgtgctccacctccggccaccgcaggaccgatcccgatcgccggagagcctcctccaccagctggtggaccccgctgttcggctggtcctccgaaccggactacattgactcaaacaacagagcatcgagtcttcaacggaccaagcctgaaccggttacggcggcgacggagtcgaaagcgccgagaccgcgcttcgccggttgcttcacggaggagaaggcgaagcagcttcggatgatgaccagcaagtcttttcacgacaccatgtatcactccgcgatc

SEQ ID NO: 39500 - DNA, 372 bp, Glycine max
  Clone ID: LIB3139-006-P1-N1-A2
cagcaactctttttgtttcttcagtttggtataaccttagccgaggtcacgaggagcagtagctagtttcacaatttccaaatggctaggggattgaagaagcatctcaagaggctcaatgctcctaagcattggatgcttgacaaactgggtggtgcatttgcgcccaaaccctcatctggaccacacaaatctagggagtgccttcccctcatactcatcctacgaaaccggctaaagtatgctctgacttaccgtgaagtcatcgctattctgatgcagagacatgttcttgttgatggaaaagtcaggactgacaagacttaccctgctggtttcatggatgttgtttcaatcccaaaaaccaatgag

SEQ ID NO: 39501 - DNA, 374 bp, Glycine max
  Clone ID: LIB3139-006-P1-N1-A3
tctacaacgcctcgaatccacacagttctactctacgctctaaaccctctctctctctctctctcgatctatcatggctttgcccaatcagcaaaccgtggattaccctagtttcaaactcgtcatcgtcggtgacggcggtacaggaaagacaacgttcgtgaaaaggcatcttaccggtgaattcgagaaaaaatacgaaccgaccattggagtggaggttcacccattggatttcttcacaaactgcggaaagattcgcttctactgttgggatactgctggacaagagaagtttggtggcctcagagatggatattatatccatgggcaatgtgcgattataatgtttgatgttactgcccgtctaacat

SEQ ID NO: 39502 - DNA, 367 bp, Glycine max
  unsure at all n locations
  Clone ID: LIB3139-006-P1-N1-A4
gttggggggggatgcttcagatggtgctctttgggatgtgttttcggagacaggatgtcgctaagttgcaggaatatctgaagaagcatttcagagagtttaggcatgtccattgctgtcctttaaagcaggttattcatcccatccatgaccagaccttctatctgactatggagcataagaggaagcttaaggaggagtatggaattgagccctggacttttattcagaagttaggagatgctgtttttattccagttggttgtcctcaccaagtcagaaatctgaaggtatggttctgtcatactataatagtatctntccttagtaccttaatcaagcctagatactccattgcacttcttat

SEQ ID NO: 39503 - DNA, 370 bp, Glycine max
  Clone ID: LIB3139-006-P1-N1-A5
gccaaacagagcaaaaacccaacacaccacactctggcaatcaatcaatggcggagccttcctcctcgaagcccgccgtccctctcctgaaggacgagctggacatcgtgatcccgacgatccgcaacctcgacttcctcgagatgtggcggcccttcttcgagccctatcacctcatcatcgtgcaggacggagaccccaacaggaccatcaaagttcccgatgggttcgattacgaactctacaaccgcaacgacatcaacaggatcttgggtcccaaggcctcctgcatctcgtttaaggattctgcttgtcgctgctttgggtacatggtgtctaagaagaagtacatctacaccatcgacgacga

SEQ ID NO: 39504 - DNA, 368 bp, Glycine max
  Clone ID: LIB3139-006-P1-N1-A6
gaaaatggctcatcctgagggagaatatgcaacagcaagagctgcatctgctgctggaacaatcatgactttgtcttcatgggctacttcaagtgttgaagaggtagcttcaacaggacctggcattcgctttttccagctatatgtgtacaaggacaggaatgtggttgctcagcttgtgagaagagctgaaagggctggattcaaagccattgcccttactgttgataccccaagactaggacgcagagaagctgatatcaagaacagattcacactgccaccatttttgacattgaagaactttgaaggattggaccttggaaagatggacaaagctgatgactctggacttgcttcatatgttg

SEQ ID NO: 39505 - DNA, 190 bp, Glycine max
  Clone ID: LIB3139-006-P1-N1-A7
gctctgtttctgcctctgagtaagcggctgaggaggccgaaccagcgaccttgtgggcatctcgcaaagtttaagtcatcatgggtaaggaaaagactcacatgaacattgtcgtcactggacatgtcgactctgggaaggcaactaccactggtcatctgatctacacgcttggacgtattgtcacgcg

SEQ ID NO: 39506 - DNA, 360 bp, Glycine max
  Clone ID: LIB3139-006-P1-N1-A8
gcgcttcttagtacagaatggctccgcagtgattcaagaagaacagtagtaggattagatttggatcttgaggcactcaattggtgcatggaaaacaacatacctaaagttggggctgatggattttcaagaatttccctctttcatgggaatgttttacaacctcttcagtctaaacttgtaaaagtagatcctcaggagctggtaagcaatatttcattgtcacagaatgaagaaaatcttcagactggtgtgccagaatctgatgctccaacaggctctattgctcaagatgataagtatactaagggaaacataacactgcctggaagagatattgtgtgtgcttttaactacagc

SEQ ID NO: 39507 - DNA, 370 bp, Glycine max
  Clone ID: LIB3139-006-P1-N1-A9
gtctgatatcactgatatagtttcagcaccaacttggagtcaccaattcaccggtagtggaccttgatttctttttcgataagatcgatttcgacacagatttccctttgagcaccatggaactttgcacttaataaatggtccccacttttaagtttacagcatttgtgttttttatgcggattacctgtgagtttgggagatcctgcctagcaccataaccgagggaaggaagtctataataatcaccatagatcatgtccataaatgaagacaatgaaaaacttccctcttgtgctaattaagagagttttcatgtacctaggctgcaaatgtgaaaataatttgtaggttgcagcttaatttggtg

SEQ ID NO: 39508 - DNA, 172 bp, Glycine max
  unsure at all n locations
  Clone ID: LIB3139-006-P1-N1-B1
ctgtcttctcttacattcctttctccaccacacattcaagtttaaacctctgggcgtgggtagcttcaacctttaacattaacatggccattccctacccccatttcatcgccaccgagaaagccgncatggacgccggcttcttcaacccttcttccccttccgtattctt

SEQ ID NO: 39509 - DNA, 365 bp, Glycine max
  Clone ID: LIB3139-006-P1-N1-B10
ctcttcctcaccgattgctagaatggaatttcgaggctcagtcatctcttttgccggtctcttctctcttgctcttgcaggagagagccatgtccatgcatcgctacctgaggaagattattgggaagctgtttggccaaacactcccattcccactgcactgcgagagcttctaaagcctctccctgcaggtgttgaaatcgatgaactccctaagcaaattgatgatacacagtacccaaaaacattcttctataaagaagaccttcatccaggcaaaacaatgaaagtacaattcaccaagcgtccctatgcacaaccttatggtgtatatacatggttaacggatattaaagacacctcta

SEQ ID NO: 39510 - DNA, 358 bp, Glycine max
  unsure at all n locations
  Clone ID: LIB3139-006-P1-N1-B11
ctcaagctaacaagagatatgatctcctcgggggagaatcctcgaaaagcgcgtgatttggctgttagagctttgaaatcatttgagatttgtgcagatgggaaaccgagtttggacatggncatgtgtctgcatgtcttggcaacaatatactgtaatttaggacagtacaatgaggccattcccgttcttgagcgttccattgatattccggtgttggaggatggccaagagcatgcactggctaagtttgcagggtgcatgcaattgggtgacacttatgcaatgatggggcagattgagaattctctgctgttttatgcagcaggtcttgagattcaagggcaggtcctggtgg

SEQ ID NO: 39511 - DNA, 362 bp, Glycine max
  Clone ID: LIB3139-006-P1-N1-B12
aaaacttaacacaacaccccctctccaccctggggttcttttaatttctgatgggatctattaatcttatatacatatatataaagacatagataatagtcatatagatataattatttcgttatattttccttgcatgggctgttaagatgtctcgcacgtgctcacagtgcggcaacaacggccacaactcacggacatgcaccgacggtggcgccgccgggtctccgagggagaacggcatcatgctgttcggcgtaagagtcatgacggaagctaactcctccttcaggaagagcgccagcatgaacaacctctcacagtacgacgcggagttcaacgccggcgacgccggctacgcc

SEQ ID NO: 39512 - DNA, 248 bp, Glycine max
  Clone ID: LIB3139-006-P1-N1-B2
gaattgtatttgcacagtccagaggaagctcgccaattgagaaggaaagctctctgtcggattgaatggctgcaaaaagctgatgtgcctaccatagcacagattgaagagttccattcgatgcagaggatgatgaatgctcctgattcaaatgataatattgatctactgttgagcattgatttgtggggttacaaggggcagtaaggcttttccaaccaggatggtttttgatgttaagctggggt

SEQ ID NO: 39513 - DNA, 216 bp, Glycine max
  Clone ID: LIB3139-006-P1-N1-B3
gattgagaaaggtaaaggtccttgttgttccggtgtgctgctagagaatctggtgggggatgtcaattgttccaatcaaccaaggtcactcccaggactcttgggatcaattcatcgattttcctctccctccttccatctccagcttcttccccggcttcgaattcggattcggctcatcggtggttaacacacgtgtggactggagggagactc

SEQ ID NO: 39514 - DNA, 126 bp, Glycine max
  Clone ID: LIB3139-006-P1-N1-B4
atctcttactaattcatgacacaaccatttccatgcatcactaccttaagaaaattattgtgaaacttttttgtcaaacactcccattcccttttaatttatatttttttaataatctttccacac

SEQ ID NO: 39515 - DNA, 369 bp, Glycine max
  Clone ID: LIB3139-006-P1-N1-B5
accaaatctccgatgctgtcctcgacgcttgcctcgagcaggacccagacagcaaggtgcctgcgaaacatgcaccaaaaccaacttggtcatggtcttcggagaaatcacgaccaaggccaacgttgactacgagaagatagtgcgtgacacctgcaggaacatcggcttcgtctcaaatgatgtgggactggatgccgacaactgcaaggtcctcgtcaacattgagcagcagagccctgatattgctcagggtgtacacggccaccttaccaaaaaacctgaagaaattggtgctggtgaccagggtcacatgtttggctatgccactgatgaaacccctgaattgatgccattgagccatgttct

SEQ ID NO: 39516 - DNA, 237 bp, Glycine max
  Clone ID: LIB3139-006-P1-N1-B7
ctaacgcgtgcagagcagagagagacgcatccatggggcgaagacccgcgaggtgtgataggcaaattaagaacaaaccataccccaagtcacggttttgccgtggtgttcctgatcccaagatcaggatttacgatgttggtatgaagaagaagggtgttgatgagtttcctttctgtgtccatctggttagttgggaaaaggaaaccgtttttagggaggccctggaagctgttc

SEQ ID NO: 39517 - DNA, 269 bp, Glycine max
  Clone ID: LIB3139-006-P1-N1-B8
gtgtttgagaaacttggaccaagcttatacggtttgcttcggaaaaacaatggtgggtcatttcccattgatcttgtccgtgagattggcagacaactattggaatgtatagcattcatgcatgacttgcgcatgattcatactgacctgaagcctgaaaacatactactagtttcaccagagtatgtcaaagttcctgactacaagagttcatttagaccaccaagttcttatttaaggagagttcccaaatcaagtgctataaaggt

SEQ ID NO: 39518 - DNA, 360 bp, Glycine max
  Clone ID: LIB3139-006-P1-N1-B9
gtttttacaatccttcaaaaatcttcttactgtgcgggtgtatagtgatgatgactgaataagtgatcatgaatatgtaaagccttactaaaatggctgtaaaaagaaacgctatctaactaggcataacatcaccattactgatggtgttgacaaagctcgggctacttcataatttagaaagtgcgcatattgggatcttatcaagagaaactttaaacagcagtctaatgttttgtgggtggctccttaagacacggcgagtccatggtcacaacttcattatgcaatacgatataatctataaatccaggaatctaatcatggcaacatcttaaaagtgctcactagaattggttt

SEQ ID NO: 39519 - DNA, 374 bp, Glycine max
  Clone ID: LIB3139-006-P1-N1-C1
attttaataaaccgcgatcacaggttgccgcaccttaaagaccggaaacaaaagcaagtcgttacttgatttcaagaatttctcaatttcttcctacttctttgtgtacgatttcttaagggaaagaaaatcactctctgtgctggtcacagacttcgtgaatcattttcttttccactcctagtttatttgctgaacactctcctatttgatataggacttcgtgtcagatttaaactttttctgtttctttctcagttctctgtttaatttcaagttcaagctggtgaaattttggattagtgctcccactctcctatctggtataggacttcgtgggtagacttttctacttctctcctttctttcactct

SEQ ID NO: 39520 - DNA, 360 bp, Glycine max
  Clone ID: LIB3139-006-P1-N1-C10
agcaattttaaataatataacttttaatactgcgggggaacccaaaccgtgggagtgggcacattattatattaggggagattatactcaacagaaaaaaagaagaaaaaaaataacattaagaaattgcattaggaaacaaacaaacctattccttcaagggttacgaacaagctgtgaaatatttaaatcacatgtacataactggcgctaaacggtcctagacaaactcgaatctaaattggcttgtcatacttatccttgtcttggcagatacactcaataatgaatgtactatcccattaactacatatggtgtataggtaacacgtgattcacagactacaccaacttttacta

SEQ ID NO: 39521 - DNA, 294 bp, Glycine max
  Clone ID: LIB3139-006-P1-N1-C11
ggaatttcttacacatcgcacaactaatgtgcgtggggaaacaactctgcgggggtgatcggacacatatttgaatcctatgcggcatgatacctcagtgtctacagtaccaagggactgtgacatttgtgctaacaaaacaaccataaacaatatgtgtgcatatgggctcaaacctggtatgttaagatctactcttttgaggaccattcctcaggacatgtgacagcaaactgagtgaaatctaacctcaacagtgagatcacgatgaaagtttgattctagcatgcagag

SEQ ID NO: 39522 - DNA, 361 bp, Glycine max
  Clone ID: LIB3139-006-P1-N1-C2
cttctctagctatactttctcttcagctctctttccaatgacctcgttcaatagctccaaggttctgagttgcaagctaaacatgggtgagatagctttaccaaatggcattagcaatggcagtaatggagtcaatggacaaagccattctctgaatggctacaggaagagttgttggtatgaagaagagattgaagaggacttaagatggtgctttgctctcaatagtatattgcatacaggagctagccagtaccaggacattgcattgttggatacaaagccctttggaaaggctttggtaattgatggaaagcttcagagtgcagagacagatgaatttatctaccatgaatgtctt

SEQ ID NO: 39523 - DNA, 367 bp, Glycine max
  Clone ID: LIB3139-006-P1-N1-C3
ctggaagtcaatcaaggacaagctcattttgccctgcttggagttggacatcaaggattatgacttaggccttccttaccgtgatgagaccgatgataaagttacaattgaaagtgcagaagcaactctcaagtacaatgtagcaatcaagtgtgcaactatcactccagatgaagctcgtgtgaaggagtttggcctgaagtcaatgtggaagagtccaaatgggactattaggaacattttgaatggaactgtcttcagagaaccaattctttgcaaaaacattccccgccttgttcctggttggacaaaggcaatatgtattggaaggcatgcgtttggtgatcaatatcgggctactgacact

SEQ ID NO: 39524 - DNA, 366 bp, Glycine max
  Clone ID: LIB3139-006-P1-N1-C4
ttaatctctgtatttttatagcaaaatgctaaccgtcaaaagtgttaccagtattgattatttaattttactgtgttttgtaatgcaccttgaatttaatttattattatttattactgtgtttgaatttgagagttgagattggactttttgttgttgaaggtgtggaaacggtgaaggctgatagcgacgccgggaaggtgaccgtgaccggaaaagtggaccccacgaaagtgagggataacctggcggagaagataaggaagaaggtggaactggtgtctccgcagcccaagaaggagcaggagaacgagaaagagaacaaggatgctaaggcaaacaacaaatccgagaataacaaaaccc

SEQ ID NO: 39525 - DNA, 366 bp, Glycine max
  Clone ID: LIB3139-006-P1-N1-C5
cttgcagatgatttttcatgcacttttgaagttccgagggcaattcctgttttgggggatgcatattgtggcagcatgaaaaatgttttgcacgtaggccctgagagttgttcggtggtctccaaatttttaagagaaggggaaactgaagcatggggtgtggagccatatgacttagacgatgctgataggaactgcaaggctcttgtgcagaaaggcattatacgtgttgcagatataaaattccctttaccatacagggtgaagtctgtttctcatgttatagtgtcagatgctttggattacctgtctccaaaatatataaacaaaactcttcctgagctagcaagggtatcttctgatggt

SEQ ID NO: 39526 - DNA, 366 bp, Glycine max
  Clone ID: LIB3139-006-P1-N1-C6
atataattgtattcttacttggtagttcatttgtataacggaaattacaaactggggagatcattctaactacacaataacattgactttaaatatatttaataagataagcgggcaacatgaatatatcttttcctttatagagcagttatcatatttcttaccatgcatattttatttaataaatatattcttctgcactgttttaaaatttctaatatgggcgttccttcttctatttagttttttctccttttatttaattttcggaccggtacctttcatcttaccatttttccttattgttagtcattttatatctttttgtattcatttccttatttttttcttttgtatatatttttt

SEQ ID NO: 39527 - DNA, 371 bp, Glycine max
  Clone ID: LIB3139-006-P1-N1-C7
ctgaattcttcactttgatcatcatcttcttcaaggccagcaaggatgtcacagcaaggcgaatcatcggacccgaaatcggggaagaaggacttctcgaccgcgattctggaacgtaaaaagtcgccgaaccggcttgttgtggatgaggctgtcaacgacgacaactccgtagtgaccatgcacccccaaaccatggaaaagcttcagcttttccgaggggacactatccttatcaagggtaagaaacgaaaggatactatttgcatagctcttgctgatgagaactgtgaggagccaaagatcaggatgaacaaagttgtgaggtcgaatttgcgggttcggcttggagatgttgtgtctgtgcacca

SEQ ID NO: 39528 - DNA, 368 bp, Glycine max
  Clone ID: LIB3139-006-P1-N1-C8
agttggtgttagtcttggtgtagtgtacctagggggggatatatatctgagtggggtggcatcagagcttgaattgcccccaggcttcagattccatccaacggacgaggagctggtgttgcactatctctgccgcaaatgcgcgtcgcagccaatcgccgttcccatcatcgccgaaatcgacctctacaaatacgacccctgggacttacccggattggctacttatggagagaaagagtggtacttcttttcaccacgggaccggaaatacccaaacggttcgaggccgaaccgggcggctggcaccggttactggaaggcaaccggggcggataagcccattggtcagcccaaaccggttggga

SEQ ID NO: 39529 - DNA, 361 bp, Glycine max
  unsure at all n locations
  Clone ID: LIB3139-006-P1-N1-C9
cgccaattgagaaggaaagctctctctcntagggagtggctgcaaaaagctggtgtgcctaccatagcacagattgaagagttccattcgatgcagaggatgatgaatgctcctgattcaaatgataatattgatctactgttgagcattgatttgttgggtttacaaggagcaggtaaagcttttccaaacaagattgtttttgatgataagcttgtgttggctaacacacaagaattctttgatggaaattttccagtggattcttggttaccaatttttgtgaattgtctttatcctgtaagtcaattaccttcagaagctgtcggtgtaaatgttacatgtggtaggggacgtggtg

SEQ ID NO: 39530 - DNA, 369 bp, Glycine max
  Clone ID: LIB3139-006-P1-N1-D1
ctgaattattctaacccacacatattccataatcgggcgtggtcaacgactgctaggattccaatttttctccatactctttatcctatacatcaacatccttaccttgcttaaacgacatatcgtacatcaccccttttgtcttgctcacagtcacagcagtggtagcttcccaaaaaagagtgccaatggcatcttcttcagactcatgggtgaaggaatataatgaagcactgaaacttgctgatgatatcagtcgcatgatttctgagcagagttcatttcctgcatctggaccagaaacccagcatcattcatctgctataaggagaaagattacaatattggggaccaggcttgatagcttgc

SEQ ID NO: 39531 - DNA, 340 bp, Glycine max
  unsure at all n locations
  Clone ID: LIB3139-006-P1-N1-D10
cggctcgagtactgatcntctaagctcagggatgacaacctacgccgagtgaaaccccaatcccaatacactcccaactcacaaagccatgtctccaggtcctgttgtcgacgcttcccctgaggttgaagcagagcaacaacttccctccgtcgatgacgcaacccagttgaagaaatcccaaccgcaggaggatgatgctcccgttgtcgaggacgtgagggatgatgacaaggacgacgacgatgaggactactacgacgatgatgaagatgacaaggaagacgatgctctaggtggtgctgagggttcaaagcagagcagaagtgagaagaagagt

SEQ ID NO: 39532 - DNA, 358 bp, Glycine max
  Clone ID: LIB3139-006-P1-N1-D11
ctttcctccagggtacttcccgaagtgttaagagagtgcctctttctataggggggggagctggtgcaaagaatgctattctcatgaatatgccaaatgctgttctttcaatgtggagatattttgttggagatctcgtctttgaagtttctaagatgacttctccctacattaaatgtacagtctctttcttcatagcatttggaaatttggctgatgacaccatcaattttgaggcttttccccacaagctggtgcagtttggagagattcaacaaaaacttctattgaaattttcacaagaggaatttcttacagcttggtcaactcaggtgcgttctgcaacaactctgttggc

SEQ ID NO: 39533 - DNA, 362 bp, Glycine max
  Clone ID: LIB3139-006-P1-N1-D12
ggacttgacatgacagcgatgagtccattggctcgtagttccacatctttgccgatgccaactgtttcaaccccacccatgtctcccttggcagcagcttcatctcccaagagtggaagcatgtggcagaacaaaataaaccttactccaccatcgttgcagctccctggtagccgactgaaggctgctttgagtgccagggatctggagatggagatggaactgctcggtctagaaagccctgctcgccaacaacagcagcagcagcaacaattgatcgaagagattgccaggatctcttccccatctttccggagcaaggaattcaataggattgttgatttgaatcctactaaccttga

SEQ ID NO: 39534 - DNA, 370 bp, Glycine max
  Clone ID: LIB3139-006-P1-N1-D3
agaagctctagaggcagctactttacttattgatggaagagctagcaagggtctgcgcaagttcctgcgtgttcattgtgaaaatgaaacactaggtgtggcagattcaaagcttgggaatgtgatcaaggagaaattgaaaattgactgtattcacaacaatgcagttatggagttgatgagaggcgttagaaatcagttaactgaacttatatctggtctagctgttcaagacatggccccaatgagcttgggtttatctcacagcttatccagatacaaattgaagtttagtgcagagaaggtggataccatgattgtccaggctattggtttactagatgatcttgataaagagttgaatacctat

SEQ ID NO: 39535 - DNA, 370 bp, Glycine max
  Clone ID: LIB3139-006-P1-N1-D4
tctctgtctcctccatggccatctccttcagtcccggacaccctccttacgatgagatgatatacacagcaatcggagctctgaaggagagggatggttcgagcaagcgagccataggaaagtacatagaacaagtctacaaggaccttccacccactcaccctgctttgttgactcaccatctcaaccgattgaaatcctctgccctcctcgtcctcgtcaagaaatcctacaagcttcctggatctcatcatctgcctgcgctccagccccaaaagacccgtggtcgtcctcccaagcccaagccccaccccgtctggcctgctgcagccctcaccgacagccctgctcttctatccgccaaaagagg

SEQ ID NO: 39536 - DNA, 352 bp, Glycine max
  unsure at all n locations
  Clone ID: LIB3139-006-P1-N1-D5
tagatcttcttcttgttgttggaaagaaaccctaggaagcggaacaatggcagacgttgaggtcnatgtggcggctgcagcagcagcagggcagccgaagaagagaacgttcaagaagttcagtttcaggggcgtggatctcgatgcgcttctggacatgtccaccgatgaactcgtgaagatgttcagtgctcgcgcacgtagaaggttccagagaggcctcaccagaaagcccatggccttgatcaagaagcttcgcaaagcgaaaagagaagctccaccaggtgagaagccagaacctgtccgcacccacctccgcaacatgattattgtgcctgagatgattggtagc

SEQ ID NO: 39537 - DNA, 113 bp, Glycine max
  unsure at all n locations
  Clone ID: LIB3139-006-P1-N1-D7
caaatgcaacagttctttaaatcttgcanatnttgctagtgatgacatgctggcgggggtataacacatactttatacatatcttaattgtattgaaacaaaaatttattctc

SEQ ID NO: 39538 - DNA, 345 bp, Glycine max
  unsure at all n locations
  Clone ID: LIB3139-006-P1-N1-D8
cttataatgaaggggcagagagtggttttaagggagggaaattaaaaagaagggagtaattnttattgttccctatccggcacagggacacgttagtcccatgcaaaagctaggcttggaatttgtgaggcaagggttctaggctttgattgtgatccccaaatttattcacaggcagatagcagagcttcagaaaaatgatgagaatgagatgataaagtgggtggctcttccagatcatgaaaaataagaaggaagcaacccaccagaagatttcttctccatagaatcggccatggagaacagcagcatcacaactcactttgaagcactgcttcataacct

SEQ ID NO: 39539 - DNA, 361 bp, Glycine max
  unsure at all n locations
  Clone ID: LIB3139-006-P1-N1-D9
aactgcttcgccgattttgcggcggttccgacggtggctgacagttcattgagtgcaacatatttngaaacctcttcgaggttacgacgaagtaccgtcctccgatcatgcctatcggacgcggcgcgtacggaatcgtttgctcactgttgaataccgagacgaacgagctggtggctgtgaagaagatagcgaacgctttcgacaatcacatggacgctaagcgtacgcttcgtgagattaagcttcttaggcatttggatcatgaaaatgtaattggtttgagagatgttattcctccacccttgcgtagagagtttaatgatgtctacatagccactgaactcatggatactgatct

SEQ ID NO: 39540 - DNA, 369 bp, Glycine max
  Clone ID: LIB3139-006-P1-N1-E1
gggacacataattccatggaatgcccccagcctctgatgtttcatcaaggttagcccttccttagctgcaggctgtactatggtcctcaaacctgctgaacaaacacccctctctgctttgttttatgctcatctagctaagttggctggaatcccagatggtgtgcttaatatagtacctggatttggcccaactgctggcgcagcaataagctcacacatggacatagatgcggtcagttttactggttcaattgaagtagggcgtgaagtgttgcaggctgcagcttggagcaatttaaaaccggtttcacttgaattaggaggcaagtctcctctcattattttcaatgatgcggatatagacaa

SEQ ID NO: 39541 - DNA, 358 bp, Glycine max
  Clone ID: LIB3139-006-P1-N1-E10
ctccgcctcctcaccaccaccactccttcaccgcggcgccgagcctcaccttgctggcgcctacaccatcgccgcccactacctcgcgtgagctgccaccatgcgttccaacagcatctcatccatctcctcttcctcctctgcctgggactgcgacgactccatgcagatcttcgtcaagaacatcgccggcgagactttccctctaactgtaccgtcggatacctcgatagaaacgctcaagagcctccttgccctgcgcaccgacctggcctcctcagacctgcgtctcgtgcatgccggcaagcatctgacgttggctgactcgaccctgaccgactacaacatcacccgagac

SEQ ID NO: 39542 - DNA, 361 bp, Glycine max
  unsure at all n locations
  Clone ID: LIB3139-006-P1-N1-E11
ctctatcctctcgagccgattcggctcgagctcgggcctcaatttgtgcgagggatgtctnnanagtttaatgtttaatcccttcttgatttccgctcacagttatttgcaatagcatttttaatgagatgctcattagatatagctatgaaaaattactgcgccaggctaaagctccaagtatgtttttacaatccttcaaaaattttgtttctttgtgtgtgtattgtgattataacttaattagtgttcatgaatatgtcgagccttactttatttgttctaaattgaaaagctttttatctatttataacattaccatttctgatgttattgacaaaacttttgctacttttcaatt

SEQ ID NO: 39543 - DNA, 366 bp, Glycine max
  Clone ID: LIB3139-006-P1-N1-E12
ccctttttctcttctcatttcctttcatcactctcttgcttcttttcttcttctcgcaattttccattttcacacttttagcgtaagaacatcttttaatggcgtcccaaatccgtgagtggtctggaatcaatacattcgcacctgctacccagactaagttgcttgaactcttgggaaatcttaaacaagagaatgtgaactccttgactatacttgtgatgggaaaaggaggtgttggaaaatcttcaactgtgaactccatcattggggaaagagtggtttcgattagtcctttccagtcggaagggccaagacctgtgatggtgtcacgatcaagggctggttttacattgaacattattg

SEQ ID NO: 39544 - DNA, 370 bp, Glycine max
  Clone ID: LIB3139-006-P1-N1-E2
ctattcgtgtacacaccgtgctaatctccacccaagacggcgagactgtcaccaatgacgaaattgctgctgacctcaaagagcatgtgatcaagcctgtgatcccagagaagtaccttgatgagaagaccattttccacttgaacccttcaggccgttttgtcattggtggccctcatggcgatgctggtctcaccggccgcaagatcattatcgatacttatggaggatggggtgctcatggtggtggtgctttctccgggaaggaccctaccaaggttgataggagtggtgcttacattgtgagacaggctgctaagagcattgtggcaagtggacttgccagaaggtgcattgtgcaagtgtctta

SEQ ID NO: 39545 - DNA, 363 bp, Glycine max
  Clone ID: LIB3139-006-P1-N1-E3
ctgagaatacaggtatagcattggcctgtgctatgaatagttcttttagggggcgcgccagttctgatatttacaccatctgctctcaagactgtgaattatggaatcctgcttgcacaaaagcaatgactatgtcatttaatccaaacccgtgttctgatgcatggagtttggaatttctgaagcgtaccggatttcattgtgatatcatttgtgtcactggatggactgccaccccaatgcaggatgttcaggttacaattgattggtttatttcctctcaggaatgtgttcccaggacctattgtgttttaaatccacaaaatccttttgtgttaaataggtggatgggaaaactgactt

SEQ ID NO: 39546 - DNA, 352 bp, Glycine max
  Clone ID: LIB3139-006-P1-N1-E4
atggatcctgtcatcaattgggtttcaaactttctgggcagtcttcagcattgcatgggtcctgtcatcaactgggttttaaactttcttcacagtcttcagcattgcatggatcctgtcatcaactggctcatgtccctgataagttgcttagcgacaaagattaatcaaatacttgaaaaattcactgggcatcaatttaacgttaagactgacgcttgtgatgaaatttcattgggtggagaatggttgttgtatgttgctattgcagttgttgtagcactggcagctattcctgttgtctggttgctttggaaggtggtttttggtgttggatggttgctttggaagc

SEQ ID NO: 39547 - DNA, 369 bp, Glycine max
  Clone ID: LIB3139-006-P1-N1-E6
gcaagaatggcacttcgttgcttggtgatgtcccggtctgttctcttcactcttggtcttgcgagagaaagccatgccagagacgaagatttttggcatgctgtttggccaaacactcccattccaagttcattgcgagatcttctaaagcctggccctgcaagtgttgaaatcgatgatcaccctatgcaaattgaagaaacacagtacccgaaaaccttcttctataaagaagaccttcatccaggcaaaacaatgaaagtacaattcagcaagcctccctttcaacaaccatggggtgttggtacatggttaaaggaaattaaagacactactaaagaaggatatagttttgaagagctatgcatc

SEQ ID NO: 39548 - DNA, 366 bp, Glycine max
  Clone ID: LIB3139-006-P1-N1-E7
tgcttcctcttcaacccttcttctttccatcatctgccaccactttcacgctgctgtggaatttacaacactaactcacataaaaccaaagttaaatgatgaatttcattgtaaattttcaattgaaatctgttgtggaaatttcctttgttcattgagattttttcgaggtgcagaagatttcccagttttgaagatatatttctcttcagacgggttttgaaactctgaactttttgcaagtcgtacgtgacaaggacgatcgctacttggccatcgtcgcagacagaagctcagaaatgtgattagtagttgagttttcggcatagatttgcattttccatagctctggaactgaaatctgga

SEQ ID NO: 39549 - DNA, 365 bp, Glycine max
  Clone ID: LIB3139-006-P1-N1-E8
ggctgcaagcctaaaagggatggatgatgacagaggggtgttgatgtcccaaatgaattttgagaagaaatttggacaatcctctatttttgtgacttctaccttgatggaagagggtggtgtgcctccttcttcaagtccagctgccctgcttaaagaagccattcatgtgattagctgtggatatgaagataaaactgaatggggacttgagcttggttggatctatggatctatcacagaagatattctaacaggttttaagatgcattgccgtgggtggaggtccatttattgtatgccaaagagagctgcattcaagggtactgctcctatcaacttgtcagatcgtctcaaccaggttc

SEQ ID NO: 39550 - DNA, 330 bp, Glycine max
  Clone ID: LIB3139-006-P1-N1-E9
gttgtaccaatccctttgaaagtgaaagttaagaggggttcttgaaattattggtatgcaataattttgaactgcgtggtagtgtgggaattcattatatagcttttgttcgttgttatctagaagttttagtcatttgtaatatcatatgtcgtgaaaaatttgtatctggtatatatgtacgttatgggcgattttgttatttttatatatacattccttggttgctatgttcctattttataatttttaatttctggggggggggtggggtatatattttttatctatttatttattctttttattttatttttatatatcttatca

SEQ ID NO: 39551 - DNA, 368 bp, Glycine max
  Clone ID: LIB3139-006-P1-N1-F1
ctctcatcacttttatctgtcctcttttattttgtgccgtttcccaggtcttcttggaaaagaaaagtcgttgtgcaggtaccttcatgctccaactacttccccttgcttcctcgtcattatcatcatctgtaatttcgtattagcgtacactacacacactcctcttcctagctgccttcacagcaaaatactgaccccagtggaggaagtgatggaagcagtttacaggttgaaacctcttttgccttgtctagaggaggaagtggttagagttgggaacgctactacttctgagatgcgtgttggatcaacggctaattgttgttacctgcagctggaagctcctcaacagaataatgtaaccg

SEQ ID NO: 39552 - DNA, 364 bp, Glycine max
  Clone ID: LIB3139-006-P1-N1-F10
tgatacattgatactaacatttcaccacactggcggcatcttcatcactactgatggtttcccttcaacctaatgaatcacctccctcatttttattttgactgaaagttctgaagaagaaagatatgagtctttttcagtcttctcttttacttccttctacatggttgaagcatagccattccccatttcatcaatagctataaaaatataaccccttgtttcagcaacctgcaaacttgtcaaagttgaagtcttcaagcacttagtttcttaaagttaactcctttaaggttcattcacaatcttctcagagagaaagagagtgatccattcgttctgatcatttggggtgtcagaaacg

SEQ ID NO: 39553 - DNA, 364 bp, Glycine max
  Clone ID: LIB3139-006-P1-N1-F11
ctcgagccagataaggtccatgcttattgaatggtgtgtgctcaccatcgagtgcgagagcattactgcatgggcccctacatgttgtatctatgtgtcttagtcataatgcaaaacaccctttcccactagggcgtctacccctttggctttttgctaattgccactagtactactagtactatactccatgtggtctcgatgaattcgccactgttcgttgttatttaaaacaacctcggtcaacactaacacatgtcacacaccaatatgattcctctttaaccatgaatcttccttcctttagcttttttccatcagggctttcttatgttattatgatttttactattttttcattctc

SEQ ID NO: 39554 - DNA, 369 bp, Glycine max
  Clone ID: LIB3139-006-P1-N1-F2
cattcctgttcctcaagtcaagctttgtagtgagcagatataatggctgttgaaaggtccggaattgccaaagatgttacggaattgattggtaaaaccccattagtatatctaaataaacttgcggatggttgtgttgcccgggttgctgctaaactggagttgatggagccatgctctagtgtgaaggacaggattgggtatagtatgattgctgatgcagaagagaagggacttatcacacctggaaagagtgtcctcattgagccaacaagtggtaatactggcattggattagccttcatggcagcagccaggggttacaagctcataattacaatgcctgcttctatgagtcttgagagaaga

SEQ ID NO: 39555 - DNA, 370 bp, Glycine max
  Clone ID: LIB3139-006-P1-N1-F3
gagggttttcctcatgtgctttcacgtaaaaatggtgaaaaaggcaagaggagatttgtttctggggatggtgaagagatgacattgattccgggaaccagtgttgaagaggcttacaacaagctaatagttgaacttgagaaaagtgttcccacattggttggcattgaatgtcccaaggatgaaaaacttcctcgtcgcaaaatttttgacaaacctaagacgcgctgcttcactattctccctatggagtttaatcttgtggtccgtcagaagtttttaaattttgtgaggttcattatgaagaaaagggacaagcttagttgtcaagttggaatcaacccatactccatggaatggactggtttgg

SEQ ID NO: 39556 - DNA, 372 bp, Glycine max
  Clone ID: LIB3139-006-P1-N1-F4
ttttaattctaattctgcacttcttgatcattcggggggtctcctcaagatgcaggtattcgtaaaaactttgaccggcaagaccatcacccttgaggtggaatcctccgacaccattgacaacgtaaaagctaagattcaagacaaggaagggatcccacctgaccagcagagacttatctttgcgggtaaacaacttgaggatggtcgcacccttgccgattacaacatccaaaaggaatcaaccctccatctcgtgcttcgcctcaggggtggcatgcaaatctttgtcaagactttgaccgggaagaccatcacccttgaggtggaatcctcggacaccattgataatgttaaggccaagatccaggg

SEQ ID NO: 39557 - DNA, 364 bp, Glycine max
  Clone ID: LIB3139-006-P1-N1-F5
atcattttttcagtgccctaaggttgtggtagagttgcagaatggtggtgatggcaaagtattctctccctcttctgcaaatacagctgtgtcccagcccaacacctctcagaaaagaactgctcctgctccagtggtggggtggcccccaattcgttccttcaggaagaaccttgcaagcagcagcagtgcttctaagccacctcctgagtctcaggctgagcagcacaacaaggttgctggtaaaaaacctgttgacaactatgctaataataaaggtttgtttgtcaagatcaacatggatggtgttcctatagggagaaaagtggacctcaatgcctatgacagctatgaaaatctctct

SEQ ID NO: 39558 - DNA, 357 bp, Glycine max
  Clone ID: LIB3139-006-P1-N1-F7
ggttagatgtaaagtgggaattaacccatactccatggtaaggactggtttggcgaatagaatacttaataaggtcaactatattctgttttggaagaatgctagatgtgatggtttgatcaccaagcaaggtattagcaagatggcagaaatgataaacagggtttgcggtggctatgaaaaattgatgcgtgaaaggacacacctgctggtggcttggtgttcaaggatgggaatttgtaagaaagatgtcaggagagtcgaatggggaattccttcttgatattcgttcacagatatttgtaataggatctttaatgagatgctcattagatatagctattagaaattactgcg

SEQ ID NO: 39559 - DNA, 367 bp, Glycine max
  Clone ID: LIB3139-006-P1-N1-F8
ttctctctttcaccaatcaacacaaactaaggtctgccttctgttgaaagcgatagcaatggccacgaatccaatcgaagcggggaacggcgacgctgctcccaaccctaacgcgactaccaaatcctccgtgtacctgcaagactcggaggagctgaagcgagtcttcagccgcttcgacgccaacggcgacggcaagatctccgtctcggagttggacaacgtcctccgctccctcggatccggcgtcccgccggaggagctccagcgtgtcatggaagaccttgacaccgatcacgacggctttattaacctctcggagttcgccgccttctgccgctccgacaccgcggacggcggcgacacc

SEQ ID NO: 39560 - DNA, 266 bp, Glycine max
  Clone ID: LIB3139-006-P1-N1-F9
acatcattaggatgatgttgttgtacgtcaagtcaggaaacttggaggtcatctccgcgcgcgcaaaatctttcccggagtccctggccagcctgtgtatcaaccttttcgtctcgtcgctccggattccggagaaggagtggacgcgctgcgtcgatagaacgtcgagagaggttatgcggcggaggttgcgccagtgctcgccgtgggagcaagaccctacggttgggtttgcttattatttttattttatccccggagggggg

SEQ ID NO: 39561 - DNA, 367 bp, Glycine max
  Clone ID: LIB3139-006-P1-N1-G1
cccggaagcttctctctttgcacttgcatgatttgatctccgccgtggattcgtgatggtgattttatgaacttcctcctctgccccctctttccttttctgattatcattatttttatatttaactagagagagagactcatccttccttcgagacatgagatgaggccgatgcaactgccaccgccttccgcttccggggccaaccctgcccctgcaaccaccaacaacaacaacaaggagcagcgtccccagcgccgccgcaaggacctcacgctgccgctgccgcagcgagacaccaacttggcggtgccgcttcctctgccgccatcgacggcgcctgctgcggcggcgagcggcggagcga

SEQ ID NO: 39562 - DNA, 368 bp, Glycine max
  Clone ID: LIB3139-006-P1-N1-G10
cataaacctaaacacccttttattatcacgtgccaaatcataatttccttacagcaacataagcctgcaattcaagttaatttttcattagaaagcttggttaatcctaaatcttgttatggagatgaattcagttcctggtgttatgtctgaggcagaatatgaagaagatactttctatgctgagattaggaggcagattctgctattgacatctgaagacaatgaagatttactagaaacaagaagtttcaaccccattaatgtcacaaatggtggttcaaacaggtcagcttacagctttaactgtgcatctccatccgcaagcaacttttctttgtgggaaagacatagttctggttcaccac

SEQ ID NO: 39563 - DNA, 321 bp, Glycine max
  Clone ID: LIB3139-006-P1-N1-G12
cggttcgaggaggtgctattatgcgcctcggacggttcgtcgtgggttgaggaggctgagaaccatatacaaatggtgtctgatttatagatataggtcaatcaggtgcactgctagaggcattgctcaaatgacttttatgagttacagaattagagagagaactgatgcccttgatgctgacagaaacacgactgccgctattggtaagggatttgacataggttatgctgccctagtataactagccctatttggtggctttgtgagccgagcttttttttcaacctgctgattgtagtaatttcaaagtatttttat

SEQ ID NO: 39564 - DNA, 365 bp, Glycine max
  Clone ID: LIB3139-006-P1-N1-G2
gctggtaggcaccaccaagggtgtacttttctggcggttgatatgcttaataattgcaactgggaacactgctatcatacttggactttggatagtgcatgctgtttggacatattactgcgttgtgagagctaaacaatttgggcctattctgaagcttgttattggcctatgtgtactaccagtgctgttggttgagtatgccattgctggtattctaggaagtattgctggaggagcagcctatggatttctctcacccatatgtgctactttgtaagctgtagaagaaggaaaagatgacaaattttaccactgcttcattggtggttcatggtgcactgttgaaaagagctgcatggttg

SEQ ID NO: 39565 - DNA, 368 bp, Glycine max
  Clone ID: LIB3139-006-P1-N1-G4
taaagattttatattttataaaaaaaaaataataacgtgggaaaaattaataaaatggtggggttaataaattatagataaaatggaaatatgagatatgtgtataatatgaaacagttattagagtatgattataatttgtaggattataatgatttttatgagattaatacttactaagttgtatcatattcttcttttcgaaagaagatataagagtattctttcaatcctagctgacaccattatgcaagataaagaataaacgcggagagagagataaatcttgtttttttactttcttaagaaaaccaaagtgcgattaagtttttgtgaaagtatccttgtgttaagaggtacattctttt

SEQ ID NO: 39566 - DNA, 372 bp, Glycine max
  Clone ID: LIB3139-006-P1-N1-G5
gaggtggccagctttgggggaccgatgtgtacacagacgattcagatcttgttgctggtctcatgcatacaggttactgtcgcccaacagcgtctccaccccatgcagccatacaagaattgcgtgcaaccgttcgtgtactacctcctcaagattgctatatttctacactgagaaacaatgtccgttcccgtgcttggggtgcagcaattggttgtagttatagagtggagcggtgttgcattgtgaagaaaggaggtggaactattgatcttgaaccttgccttacacatacatcaactattgagcccacccttgctccagtgactgttgagcgaactatgactaccagggctgcagcttcgaatgcat

SEQ ID NO: 39567 - DNA, 365 bp, Glycine max
  Clone ID: LIB3139-006-P1-N1-G7
atcatttgtgtcactggatggactgccaccccgagtgcaggatgttcaggttacaattgattggtttatttcctctcaggaatgtgttcccaggacctattgtgttttaaatccacaaaatccttttgtgttaaataggtggatgggaaaactgactttccctcagggcacttcccgaagtgttaagagaatgcctctttctatagggggaggagctggtgcaaagaatgctattctcatgaatatgccaaatgctgttctttcaatgtggagatattttgttggagatctcgtctttgaagattctaagatgactttttcctacattaaatgtacagtctctttcttcatagcatttggaaatt

SEQ ID NO: 39568 - DNA, 367 bp, Glycine max
  Clone ID: LIB3139-006-P1-N1-G8
ctcgagccgtcctatctcaccatatcacgaaagcggcgacaacccgttccttgagaaaaccgaaaccctaatcacgactccgagaaccctaaattcgcccaatccaaagtcccaaacctctaaaatcaaaccatgaaaagcgtagaggtggcgaagacggtgctcgaggtcgccgacgtggcttggaccgccgttgaacacacccaccatctccgccaccgcagtcatcccgtccccgctgcccccgcagccgatgtctgcccatccgaccaagatttggagtctctgcgatccgaaaatcgacgtctcaggaacttactcgaccagaatctgaaattgctgcaaaacctctctgaggcgacttgct

SEQ ID NO: 39569 - DNA, 183 bp, Glycine max
  Clone ID: LIB3139-006-P1-N1-G9
cgcacgcctccgcgagttggtgaacctggtggtgggggctggagacaggaggaaggagtccaaagacttggaagagaatgccgagatgaaaaatatgtatggcctaatctagacctacaagaagaacagccaattcagatggatatcctcttaaataaaccgcgtgaggaacggacagctcta

SEQ ID NO: 39570 - DNA, 368 bp, Glycine max
  Clone ID: LIB3139-006-P1-N1-H1
cgcacctgctgttggcttgttgttcaaggatggcaatttgtaagaaagatgtttggagagttgaatgtggaatcccttctggatttccgctcacagttatttgcaatagcatttttaatgagatgctcattagatatagctatgaaaaattactgcgccaggctaaagctccaagtatgtttttacaatccttcaaaaattttgtttctttgtgtgtgtatggtgatgataacttaattagtgttcatgaatatgtcaagccttactttagtggttctaaattgaaaagctttctagctagtcataacatcaccattactgatggtattgacaaaactagtgcaactttgcaatttagaaagttagca

SEQ ID NO: 39571 - DNA, 368 bp, Glycine max
  Clone ID: LIB3139-006-P1-N1-H10
cggctcgagcaaatttgtttaaattgtctcttgatgatgttgaaactcctaaagggtccatgttggatcttaaaatttctcaatctaaaattgcacttcccaaaaacacagttggaggaaccattctgcgtagtgatttattggcaaattttttgacagagggcaattttagagcaagtgttgatttgcagcgcactcatcgtattaaaggaatgattaaaatggtggccacagttggtattcctgagaatacaggtatagcattggcctgtgctatgaatagttcttttagggggcgtgccagttctgatatttacaccatctgctctcaagactgtgaattatggaatcctgcttgcacaaaagcg

SEQ ID NO: 39572 - DNA, 369 bp, Glycine max
  Clone ID: LIB3139-006-P1-N1-H11
ccagtacaagaattatgaaaacataccacaatcaggggaaatgtcagagaaggaatgcaaagcaacagataaaggggggaaatattatgatttctggcaaaacactagatctgtgaagtcaacaatacttcatttccaattgaggaatttggtttggtcaacatcaaaacatgatgtatatcttgtttcaaattactccattgttcactggtcttcattaacttccaagagatctgaagtcttgaatgtatcagggcatgtagctccatgtgagaaacatcctggaagcctcttggaaggttttactcagacacaaattagtacactggctgtacgagataacttgttgattgctggagggtttcaagg

SEQ ID NO: 39573 - DNA, 364 bp, Glycine max
  Clone ID: LIB3139-006-P1-N1-H12
ctcaaacttgttacagataaaaaccctttcttgaaacctttctccaaaatttctcacaacccacttctactctactcattccacacccaacttacaaaaacccattcttttgctcactcattttcttaacgtagattaatcattatgtgtggcggtgccatcatcgctgacttcataccccgccgtggaggccgccgcctcacggcctccgagctctggccaaactccttcgccaaagacgatgactttgacttggattactcccacatcgctacccaacaaccctgcactctcaaaaggtcccaacctcccaaagttagcgagcaggttgagaataagccggtgaagaggcagaggaagaatc

SEQ ID NO: 39574 - DNA, 366 bp, Glycine max
  Clone ID: LIB3139-006-P1-N1-H2
gttgctttgacagcactgcttgtatttatgcttttcttgctagctgcaaccataaatgccattgtcatatcgctgctgatatctttggcagctgcaggaggattcctggctcttttctttgcttttgttacagctatatacattggagcattagcaattgccatatttgctatttcagttaccacattttggtcaattgtggctattctgataatcacaggttttattggattcatttacactgtgtggctggtaactagaaaaagctttggatttgctaaacactccttggacgtgaccggctctgcaatttcatcttacactactgcacggcatgcccaccacctaatacacacgaattcaaag

SEQ ID NO: 39575 - DNA, 299 bp, Glycine max
  Clone ID: LIB3139-006-P1-N1-H3
gcaaatttcctggttgccttaacgctgtatgaaaaacggtatagccacaaacccatgtgactaacacaagctctgatgatatactcaatgatattcgactagcatgggggcgtgtgaacaaggccaagctgagagacttttatgcaagccacagacttggtgatatagacacacaggcacctccccagtgtatgcattgcactttacgatcaaaaaattgtctggtggtaaaatcatatcgtgatgaaaataatgcatacatctcaccaataaagagagttgaatcacaatctaatgaa

SEQ ID NO: 39576 - DNA, 374 bp, Glycine max
  Clone ID: LIB3139-006-P1-N1-H5
gaaagggtgaactgaaggttaatgtttccagtgaaaccgaaaaagccagacttctaatgaggtctaagggaaattttagattgattttgaatgcacgtctctaccctgatatgaagctcacaaatatggacaagaagggtgttacttttgcctgcatcaatagtgccagcgaagggaaaggtggtctttcaacatttgccttggagttcaaggacggctccatagtggaggagtttaaagccactgtcatggaacacaaaggtgagacatccacagttctcaagacccctgaaaattctccaaaggcttctgatgattgagagacactccttactcatgtctcacaatgtctgtctcgttagatgttccttcac

SEQ ID NO: 39577 - DNA, 371 bp, Glycine max
  Clone ID: LIB3139-006-P1-N1-H6
atgagctgcttgctgctagacttagatatgcagtagagaaacaactcttatctgcatcagaccgatttggcattttggatgattcatttgcactttgtatggctcgccaggaatcattgacctccttgattaacttgatgggatcttacagggaggaagttgattataccgtgttgtctaacctgataactataagtcttaaagttcaacgtattgcagctgatgcagtaccagacttactagaatatttcaagcagttctttattaacctttttcagtactctgctgagaggcttggttgggagcctaaaccaggagagagtcatgtagatgcaatgttgagaggagaaattttgactgcccttgctatg

SEQ ID NO: 39578 - DNA, 367 bp, Glycine max
  unsure at all n locations
  Clone ID: LIB3139-006-P1-N1-H7
ccgaaattctgatctgtgagaatgggaaaaggtgggtctctgagcgacggcgtggggaagaagatcgttctctcctacagctacgtggcaatatggatcttcctgagcttcaccgncatcgtctacaacaagtacatcctggacaagaagatgtacaactggcccttccccatctccctcaccatgatccacatgtccttctgcgccaccctggccctcctcctcgtccgcgtcttccgcctcgtcgagcccgtctccatgtcccgcgacgtctacctctcctccgtcgtccccatcggcgccctctactccctctccctctggctctccaacttcgcctacatctacctctccgtctccttcatcc

SEQ ID NO: 39579 - DNA, 368 bp, Glycine max
  Clone ID: LIB3139-006-P1-N1-H8
ctcgagccctcggaatcaaatcaccatcacaacacgtccgatggggtctcccagcgggtcaacagcccgcgtttctcgggtccaatgactcgccgcgcccactccttcaaacgtaacaacaacaacatcgccgccaacaccgccgccaccacctcccacggcggcgccggcggaagtggcgccggcgaagttgagcttcaaatcaactcgcccagatcggaggaagcgtcggagggagttccggtggggaagcacagccaccatcacgtgactcagagagtgcacgtgagggggttgctgaagaagcccctagcatccatcgttgaggatttggggttgagggaaaggaagaaaattgggcactggat

SEQ ID NO: 39580 - DNA, 366 bp, Glycine max
  Clone ID: LIB3139-006-P1-N1-H9
tttattgtgccacctgaaagcagtggtaggattgagcttgttgatggggacaagagactatccctgtttgccttatttattagggagcaactaagctttcttaatgagaaagaagacatgaaaaattgccaccaagcccatcttggtgtcgtacagactgcttatgcaaatggggcatctactaattaccttaaactgttgggacttgaagtcaattttactccaactggagtgaaatatctgcatgaaaaagccaccgaatttgatattggtatctactttgaggcaaatggccatggaactgtcttattttcagaatctttcatagagtcgttggaggctagaactaatgagatttctttaggg

SEQ ID NO: 39581 - DNA, 345 bp, Glycine max
  Clone ID: LIB3139-007-P1-N1-A1
gtgagtcttgggagtgagtcactcttcctgcagaacccagatctgtagacaatatgggaagcactggtttgctacatttgatatgccttgtcattgctttagtaagtgtgtcgcttgtgcaagcagaagatgcgtataagtatttcacatggacggtgacttatgggactctttatcccttggctagtccccagcaggttattcttatcaatggtcagtttcctgggcctagacttgacttggtaactaatgaaaatgtaattctcaaccttatcaacaagctggacgaaccatttttactcacttggaacggtattaaacaaaggaagaattcatggcaagatg

SEQ ID NO: 39582 - DNA, 343 bp, Glycine max
  Clone ID: LIB3139-007-P1-N1-A10
ctccatcctcatgctccccgcggacgtggcgaatcgccaggcgtgccgccacgcgatctacaacggcgcgtgtagcctcactctccccatgaaggacctctggctcgcagtctacatcctcgacgccgtcctcgtcttcttcgtcatccccttcgccatgttcttctacgagggcgaccaggacaagagtgtgggaaagaggatcaagagtgctttgttgtggatggtcaccacggctatagtgtgcgccctcgttctgggtattttgtatgggctcgtgggtaaggtggactttactgttaggcatctctcttcatccacaacttcatttcctagcacatgg

SEQ ID NO: 39583 - DNA, 342 bp, Glycine max
  Clone ID: LIB3139-007-P1-N1-A11
ctcgagccgaatcggctcgagtgtgatcatcagtgatgaaattgagctacccttggaagatgacttggactactctgacttttccataattgtccatgcctctgacgccatgaagaaaggctacttgctgaatctcctttgttcaatcaagcgtgatgagtggaacaagatgtgggaaagattgaagcagattacacaccactttgagtatcagtatccatcccaacctggggatgcagtgaatatgatatggctgcaagttgaacgtaagatatcttcgataaggttcaatttgcacaggaagaacagataccagagatcttagcttcgtgttaagactaa

SEQ ID NO: 39584 - DNA, 344 bp, Glycine max
  Clone ID: LIB3139-007-P1-N1-A2
gtgtttttaacaaacagcaacagtacagagcattttgatgcatgtaagtggacaaaatcagaaccacattcctgggaattaatcttcccaatagaggtatgtggtcctaataatggttttgaaatgtggagttctgagtgggcaaatcaaacttcatggcatttgagtttccttattgacaatcccaaacagtctacagtttttgatattctcttgggaatctctcaagattttgaaattgctggtaatactcttatgccagctttttctgttccacaggctactgccagatcttctgaaaatgcggaatcctctgcatgatctggaattcgtgttttctttcg

SEQ ID NO: 39585 - DNA, 347 bp, Glycine max
  Clone ID: LIB3139-007-P1-N1-A3
aattaacactaataacagcaaactaaaggtgaagtttgccagaaacaagatgggaaggaaccattttcagcagcaacactgtgctgatgggagcatgtggatggagagtcagggtcagcaacagagctatgccttccaagaagagtcttggagccctgataacaactatggccacaaccacaagcaattcccaggcatgcacatgaacatgaacaacaacaacaacaacaaaaggcttggtgcttttgctgctgtggactctgacttctcaatgcaaaaacatcatcatgggcatggcaacggcgtaggagccatgcacatgaacatgaacaggcatggtggcaagg

SEQ ID NO: 39586 - DNA, 331 bp, Glycine max
  Clone ID: LIB3139-007-P1-N1-A4
atctcctgcaaaagttggtgcaaagcgggaccctcctgttccatattcatctgacatggatcaatctccaaatatcagggctggggatccaggattgggcaatgcctcatggaaagacagagacagtggctggcagatgcatcatgaaaggaatgctgattcaatgtgcacaggccaagctgcttctccaagaggagcttgcgatattgatgctacaactgatgagcttgtagatgattctgtattgaatgatgaagctcgacagactctgtgcaggaaggtatctattgcactttctaggataaatccatatcgaatggccattatgctg

SEQ ID NO: 39587 - DNA, 346 bp, Glycine max
  Clone ID: LIB3139-007-P1-N1-A5
tagacttagagaggcagcatcattggaaaaacatgttcttttgaaaaagcttagagatgcacttgaatccttaaaagggcgtgtggcaggcagaaacaaggatgatgtggaagaagctattgctatggttgaagctctagcagttcaattgactcagagggaaggggaactaatacaagagaaggcagaggtgaagaagcttgcaaattttcttaagcaggcttctgaagatgctaagaaacttgttgatgaggaaagagcttttgctcgtgctgaaatagaggatgccagagcagcagttcaacgagtggaagaggcacttcaagaacatgagagaatgtctcaa

SEQ ID NO: 39588 - DNA, 344 bp, Glycine max
  Clone ID: LIB3139-007-P1-N1-A6
ctttttcctaatgactcaaaggtgagggcagaggagcaggtatcaaaaccaggggagtttagtcaccaagagaatgagtcaaagggcagcatagatagtgagaattatcttgagagggatgaggtcaaaatggtgatggctaaacttggattttttttcagctcagaaagtgaggaacttcaggagaagtatggttccaaggagctttctgaactgtttgaggagcaggagccaagtttggaggaggtgaagcaggcttttgatgtttttgatgagaacaaagatggctttattgatgctgaggagttgcagagagttctttgcattttgggattgaaggaagc

SEQ ID NO: 39589 - DNA, 340 bp, Glycine max
  Clone ID: LIB3139-007-P1-N1-A9
cacacagaaaaaatgggttcttcttcttctatgtggacggtgtgtgtgattttggcatcactggcctctgcagcactctgtgccaacccacgcaggccagtggatgtacaatttggccgaaactacgtgcccacatgggcctttgatcacatcaaatatttcaatggtggttctgacattcagcttcatcttgacaagtacactggtactggcttccagtccaaagggtcttacttgtttggtcacttcagcatgtacataaagatggttcctggagattctgctggcacagtcactgctttctatttatcttcccaaaacgcggagcatgatgagatag

SEQ ID NO: 39590 - DNA, 103 bp, Glycine max
  Clone ID: LIB3139-007-P1-N1-B1
tgtaatcttaagtaatgtttatgtggagaaggattaaaaaggaagctttcttcagatgtgattttccatttgctctactttgaatccaatctaacttttaagt

SEQ ID NO: 39591 - DNA, 341 bp, Glycine max
  Clone ID: LIB3139-007-P1-N1-B10
ctattatcatccgcagctgcttttattcgcaccgcaaacagtgagccatggccgtcggaaagaacaagcgcatctccaaggggaagaagggtggcaagaagaaggcagctgatccctttgccaagaaggattggtatgacattaaggctccttctgtttttcaagtgaaaaatgttggcaaaaccctcgtctctcgtactcagggtaccaagattgcttctgaaggactcaagcatagagtgtttgaggtctccttggctgatcttcaaggggatgaggatcatgcattcaagaagattaggttgagagctgaagatgtgcaagggaagaatgttctgaca

SEQ ID NO: 39592 - DNA, 339 bp, Glycine max
  Clone ID: LIB3139-007-P1-N1-B11
cttagttgtcaagttggaatcaacccatactccatggaatggactggtttggccaatagattactgagtaagggcaacgatattctgtgttgcgattatgctagttttgatggtttgattaccaagcaagttatgagcaagatggcagaaatgataaacagtctttgtggtggtgatgaaaaattgatgcgtgaaaggacacatttgctgttggcttgttgttcaaggatggcaatttgtaagaaagatgtttggagagttgaatgtggaatcccttctggatttccgctcacagttatttgcaatagcatttttaatgagatgctcattagatatagc

SEQ ID NO: 39593 - DNA, 324 bp, Glycine max
  Clone ID: LIB3139-007-P1-N1-B12
tctctctctccctctttctcgtcactagctctgtgcattcttctctcgctctctgccttccatcacactcgggatttcctttcccaagatagtagaagatggcagacactggggatattcaacctcttggttgtgacaatggaacaagaatggttaaagctggatttgctggagatggatccccacgtgctgtgtttcccaacattgtagggtcgcctcgtcacactggtgtgatggttggcatgggccaaaaaagatgcatatgttggtgatgaggcacaatctaaggggggtatttgactctcaagtaccccattgaacatg

SEQ ID NO: 39594 - DNA, 341 bp, Glycine max
  Clone ID: LIB3139-007-P1-N1-B2
ctgaaaacagtaacactgacgacgaagaaacgaatcaggttgatcaaatacgcgagtaggagtggcacaatgtgttgagtgtggagcaagaacgtttttatcaatggcggaatgtgtggcttctgcattctgtgttaagctgaatgcgcagagaaggcctgttagagagaggggcttctcgggccagattacaagtctcaagtctgttcaaagaaagtattccagaaatggatgtaaatttgttcacttttctatgtggaagacatttgagctgagtgtatttggggccacacacttgaaattcactcctcatcttcaggaatttccattaaagtgcattg

SEQ ID NO: 39595 - DNA, 343 bp, Glycine max
  Clone ID: LIB3139-007-P1-N1-B3
caaatttgtttaaattgtctcttgatgatgttgaaactcctaaaggttccatgttggatcttaaaatttctcaatctaaaattgcacttcccaaaaacacagttggaggaactattctgcgtagtgatctattggcaaattttttgacagagggcaattttagagcaagtgttgatttgcagcgcactcatcgtattaaaggaatgattaaaatggtggccacagttggtattcctgagaatacaggcatagcattggcctgtgctatgaatagttcttttagggggcgtgccagttctgatatttacaccatctgctctcaagactgtgaattatggaatcc

SEQ ID NO: 39596 - DNA, 345 bp, Glycine max
  Clone ID: LIB3139-007-P1-N1-B4
cctctctcttttcttcccattttgccccttcctcgtttccttgtttccgaggagggccaaccacatatgctaaacaaggaaactaaattctaacctccttcagatctacaccacccttctctttttttccagtttcataaattctacaccatgggcacggaggttctacggccacaagattgtttcacccaccgcatcgctgttccaccggcggggttttcccggagaagaacctctgggacacacaacaacaattacttcaggggcacgcggaagccggttacccgacccgaacagagaaaacgggttgtggagaaaaggcccagcttcgatgattcgaggttt

SEQ ID NO: 39597 - DNA, 341 bp, Glycine max
  Clone ID: LIB3139-007-P1-N1-B5
aaaagctgatgtgcctaccatagcacagattgaagagttccattcgatgcagaggatgatgaatgctcctgattcaaatgataatattgatctactgttgagcattgatttgttgggtttacaaggagcaggtaaagcttttccaaacaagattgtttttgatgataagcttgtgttggctaacacacaagaattctttgatggaaattttccagtggattcttggttaccaatttttgtgaattgtctctatcctgtaagtcaattaccttcagaagctgtcgttgtaaatgttacatgtggtagtggacgttgtggtttacccaccactgtttggatta

SEQ ID NO: 39598 - DNA, 345 bp, Glycine max
  Clone ID: LIB3139-007-P1-N1-B6
agactttgatagggaagttagaatcctcgggaaagcaaggcacccaaatctaatagcattgaaaggatactattggactcctcaactacaacttttagtaactgagtttgcaccaaatggtagcttgcaagccaagctacatgaaaggcttccttcaagtcctcctctttcttgggctataaggttcaaaatcttgcttggaacagcaaaggggcttgctcatttgcaccactctttccgtccaccgatcatccactacaacataaagccaagtaacattttgcttgacgaaaattacaacgccaagatctcagattttgggttggctcggcttctgacaaagct

SEQ ID NO: 39599 - DNA, 333 bp, Glycine max
  Clone ID: LIB3139-007-P1-N1-B7
aattgattggtttatttcctctcaggaatgtgttcccaggacctattgtgttttaaatccacaaaatccttttgtgttaaataggtggatgggaaaactgactttccctcagggcacttcccgaagtgttaagagaatgcctctttctatagggggaggagctggtgcaaagaatgctattctcatgaatatgccaaatgctgttctttcaatgtggagatattttgttggagatctcgtctttgaagtttctaagatgacttctccctacattaaatgtacagtctctttcttcatagcatttggaaatttggctgatgacaccatcaattt

SEQ ID NO: 39600 - DNA, 316 bp, Glycine max
  Clone ID: LIB3139-007-P1-N1-B8
agaatttaaggtgaaaattaattctttagtggcaaaggctcagaagaaacccgaggaggggtgggtgatgcaggatggaactccatggccagggaacaacactcgcgatcatccaggaatgattcaggtatatttaggaagtgccggtgcgctagacgtggaaggcaaggaacttcctaaacttgtgtatatttcacgtgaaaaacgtcccggctatccacaccacaagaaagcaggtgccatgaatgctttggttcgagtttctgctgttcttacaaatgcaccattcatgttgaatctggattgtgatcactac

SEQ ID NO: 39601 - DNA, 327 bp, Glycine max
  Clone ID: LIB3139-007-P1-N1-B9
gtatggtgatgataacttaattagtgttcatgaatatgtcaagccttactttagtggttctaaattgaaaagctttctagctggtcataatatcaccattactgatggtattgacaaaactagtgcaactttgcaatttagaaagttagcagattgtgattttctcaagagaaactttaagcagatgtctaatgttttgtgggtggctcctgaggacaaggcgagtttatggtcacaacttcattatgtttcgtgtaataatctggaaatgcaagaagcttatcttgtcaatctcgtaatgtgttacgagaattgtatttgcacagt

SEQ ID NO: 39602 - DNA, 339 bp, Glycine max
  Clone ID: LIB3139-007-P1-N1-C1
ctcgagccgttttttcatatttgatccaaacaaacgtgggaatttgaattgggaaagacgctacaatatcataagaggcatcgctcgcggtcttctttaccttcatgaagattctagattacaagttgttcatcgtgatctcaaaataagtaacattttgttggatgaagagttgaaccccaaaatatcagattttggcatggcaagattatttgagatcaatcaaactgaagccaatacaaatacagttgtcgggacctttggatatatggctcctgagtatattaaacatgggaagttttcagtcaagtcagacgtttttagttttggtgtaatgat

SEQ ID NO: 39603 - DNA, 342 bp, Glycine max
  Clone ID: LIB3139-007-P1-N1-C10
gctttaacacattacactcacactctttgtgaggggggggagtttcttattcgggctagacgcttccattgatcggcgatttcttagacatggcggagcatcacgaacacgaggaagtgaagggtgagtccttgttggagaagatttctgggaagatccacgaccacgattcgtcatcttcgtcggattccgacaacgagaaaaccagcgcttctgactccttgaagtcaaaggttttcaggcttttcggcagagaaaagcccattcaccatgttcttggtggcggaaaaccggccgacgtttttctctggagaaacaagaagatatctgcatcgacactcg

SEQ ID NO: 39604 - DNA, 111 bp, Glycine max
  Clone ID: LIB3139-007-P1-N1-C11
cgtttcgagctcgagccattcacacctttaatggagttaacgaaattgttccggaccctataattgagtatcctctgtctatttgaaaacatccacacctactactaattg

SEQ ID NO: 39605 - DNA, 340 bp, Glycine max
  Clone ID: LIB3139-007-P1-N1-C12
aaaagtgttcctacattggttggcattgaatgtcccaaggatgagaaacttgctcgtcgcaaaatttttgacaaacctaagacgcgctgcttcactattctccctatggagtttaatcttgtggtccgtcaaaagtttttaaattttgtgaggttcattatgaagaaaagggacaagcttagttgtcaagttggaatcaacccatactccatggaatggactggtttggccaatagattactgagtaagggcaatgatattctgtgttgcgattatgctagttttgatggtttgattaccaagcaagttatgagcaagatggcagaaatgataaacagtc

SEQ ID NO: 39606 - DNA, 342 bp, Glycine max
  Clone ID: LIB3139-007-P1-N1-C2
gatatctcgaattgctccacatacattctcccatgaggcactccatctccatcggtgtgaccgcccttgttggcgccgccgcagccagcgtcaacggtccttggcaaagccacagctcatggggtacggccgtttccagcacgccgagcgcctctaagaccatcatctcggacccgacaatcaagccgagcggcactggtgtcaccatttctgatcccacgatcaagccaaccgccactgggggccacaacaccactgagacggagactttgacgaccttcaccactgtcaccacttgccccgtcactcagacgacctcgggccatggctctacctacatca

SEQ ID NO: 39607 - DNA, 339 bp, Glycine max
  Clone ID: LIB3139-007-P1-N1-C3
ctcaactctaatcggctagcgcttactctccttcggggaacaactactctccctgggtatactcaaacgggttatcatccatacccaacaccacccaaaacttaattggtttcgggcaagggcagcccacatctcttgtgggcctgaaccacctaaccccatctcagatctctcagatccaggcccaaatccagatccagaatcacagcaacacgctgagcttcctagggccgaagcccatccctatgaagcacgtgggcatgcctccgaagcccacgaagctatacagaggggttcgacagaggcactgggggaagtgggtggctgagattagactcc

SEQ ID NO: 39608 - DNA, 353 bp, Glycine max
  Clone ID: LIB3139-007-P1-N1-C4
ctcgagcttctcgagccgattcggctcgagaaagagaaaaaaaaaaaaaaaaaaagaaaaaaaaaaaaaaaaaaaaaaaaaaaaggaaaaaaaaaaaaaaaaaaaaaaaaaaaaacaaaaaataaaaaaaaaaacaaaaacctaaaaacaaacaaaaatatacatatagtaaaataaaataaaaaatagaaataaaaaatgtaaatagaataataattgtttgaaatttattattcactcacattttccactcaacattctatctctaagcttgaagggttgagcctttttactttaatgagtgatctaatttacattaattgcctttttcttactgccctttttctattttt

SEQ ID NO: 39609 - DNA, 343 bp, Glycine max
  Clone ID: LIB3139-007-P1-N1-C6
ctgctgttggcttgttgttcaaggatggcaatttgtaagaaagatgtttggagaggtgaatgtggaatcccttctggatttccgctcacagttatttgtaatagcatttttaatgagatgctcattagatatagctatgaaaaattactgcgccaggctaaagctccaagtatgtttttacaatccttcaaaaattttgtttctttgtgtgtgtatggtgatgataacttaattagtgttcatgaatatgtcaagccttactttagtggttctaaattgaaaagctttctagctggtcataatatcaccattactgatggtattgacaaaactagtgcaactt

SEQ ID NO: 39610 - DNA, 338 bp, Glycine max
  Clone ID: LIB3139-007-P1-N1-C8
caactctcaacaagttactaattggagaattttggataatggtcaagattgtggggtctgggaatgcagcagtcaaaaggagtgattgggcctcattggtacaagtgtttttaacaaacagcaacagtacagagcattttgatgcatgtaagtggacaaaatcagaaccacattcctgggaattaatcttcccaatagaggtatgtggtcctaataatggttttgaaatgtggagttctgagtgggcaaatcaaacttcatggcatttgagtttccttattgacaatcccaaacagtctacagtttttgatattctcttgggaatctctcaagatttt

SEQ ID NO: 39611 - DNA, 337 bp, Glycine max
  Clone ID: LIB3139-007-P1-N1-C9
attgaattttgattctagcaagcagagcttttgggaattttctattgaccttcgcggtggaggaattttagtggacaaaactggagattggatcacacttatacaaaattctccaattagtaacttgttgagagttgctgcttggaagaaaggttgtttaatggtcaagattgtgatgtctgggaatgcagcagtcaaaaggagtgattgggcctcattggtacaagtgtttttaacaaacagcaacagtacagagcattttgatgcatgtaagtggacaaaatcagaaccacattcctgggaattaatcttcccaatagaggtatgtggtcctaat

SEQ ID NO: 39612 - DNA, 339 bp, Glycine max
  Clone ID: LIB3139-007-P1-N1-D10
ctttcctgttgcttctgtgcatcgtatagggattttggacattaggattcttaacacggataggcatgctgggaacttgttggttaggaaacttgatggcatcgggagttttggtcaggtggagttgattcccattgatcacgggctctgcctgcctgaaactttggaggatccatattttgagtggattcattggccacaggcttccattccattctcggaggatgagcttgcctatattgaagatcttgacccttatcatgattgtgagatgctgagaagggaactgccgatgatccgagaggcatgtctcagagtcttggtgctgtgcactatttt

SEQ ID NO: 39613 - DNA, 339 bp, Glycine max
  Clone ID: LIB3139-007-P1-N1-D11
agaatatattacattaagaaagcccaaagaaagaagaagatggcgtccgagtgcaaaggtaagagctcatggcctgagttggttggagtggaaggaacggtggcggtggctacaattgagagggagaatcctttggtggatgctaacactgtgcttaaaggatccatcgtcaccgctgattttcgatgtgatagggttcgggtttgggtcaccaaacatggaattgtttatcaggctccaagaattggataagaagtgtttacactaaagcacttcatatatatgttatgagtcatgaatataatagtatttaaataaggagttattcttccaattatg

SEQ ID NO: 39614 - DNA, 342 bp, Glycine max
  Clone ID: LIB3139-007-P1-N1-D12
aacaacagtatataactattaggcaacaagtgcaagaaaatccaatgaagaagcctaagttggttattctttctagaagtggttcaagagctataactaatgagaatttgcttgtgaagatggcaaaggaaattgggtttttggtgcaagttttgaagcccgacagaacaacagaaatggcaaagatttataggactctcaatgcaagtgatgtcatgattggtgttcatggagcagctatgacacattttctgttcctgagacctggttctgtgtttattcaagtggttcctcttggtaccacatgggctgcagaaacttattatggggaaccagcaagga

SEQ ID NO: 39615 - DNA, 341 bp, Glycine max
  Clone ID: LIB3139-007-P1-N1-D2
ctttgacgtaacctattactctaatttggttcaaaagaaagggcttcttcactctgatcaagaactcttcaatggtggttctactgatgaactggtcaaagagtacagcgacgataccgaagatttctacgaggacttcgcaaactcgatgattaagatgggaaatattcagcccctcactgggaatcaaggtgaaattcgggttaactgcaggaatgtgaactaattcattgcaaaaattatgcaataagtatgtattatatatacatacagaataattcttgagtggtgcacgatttagaatttattatttatatatgtaatggtatgtattctttact

SEQ ID NO: 39616 - DNA, 340 bp, Glycine max
  Clone ID: LIB3139-007-P1-N1-D3
aaatgctgttctttcaatgtggagatattttgttggagatctcgtctttgaagttgctaagatgacttctccctacattaaatgtacagtctctttcttcatagcatttggaaatttggctgatgataccatcaattttgaggcttttccccacaagctggtgcagtttggagagattcaggaaaaagttgtattgaaattttcacaagaggaatttcttacagcttggtcaactcaggtgcgtcctgcaacaactcggctgatgggtgtccatatttgtatgcaatggtgcatgatagttcagtgtctacaataccaggtgattttgtcattggtgtca

SEQ ID NO: 39617 - DNA, 344 bp, Glycine max
  Clone ID: LIB3139-007-P1-N1-D4
tttgtattgttattattatagcaggcacctaatagatagatagatagatacgtagggatagggttaaggccatggagcgcatcatctgcgccaagtacaagctaggtcgcaagatcggaagcggatccttcggcgaaatctaccttgcgacgaatattgataccttcgagatcgtcgccgtcaagatcgagaacggtaaaacgaagcatccacaattgctttacgaggccaagctctacaatattcttcaaggaggaagtggcatcccgaacataaaatggtgcggcgtagacggggaggataatgtgcttgttatggacttgctgggacctagtcttgaggat

SEQ ID NO: 39618 - DNA, 341 bp, Glycine max
  Clone ID: LIB3139-007-P1-N1-D5
tatgccccatggaaggtccttagttttctctctcttcatctcaaagtttcactctcactcttcttcttcttcttcttcatcctttctgatctgtgctgttttttcagggtacaacaaaattgggtgctttcggttaaactgtgatgtctccgccagtgctgagcataggggaggaggagggtaaaagcaatgtcactttgttggtttcctcatcaaccaccatggaaagtgtgtgtctcaagagcttagaatttaaagagcgcaactacatgggattatctgattgttcttctgtggacagctcggttccgtccttctctgaagagactaaaagtaatctg

SEQ ID NO: 39619 - DNA, 344 bp, Glycine max
  Clone ID: LIB3139-007-P1-N1-D6
catttgtgtcactggatggactgccaccccaatgcaggatgttcaggttacaattgattggtttatttcctctcaggaatgtgttcccaggacctattgtgttttaaatccacaaaatccttttgtgttaaataggtggatgggaaaactgactttccctcagggcacttcccgaagtgttaagagaatgcctctttctatagggggaggagctggtgcaaagaatgctattctcatgaatatgccaaatgctgttctttcaatgtggagatattttgttggagatctcgtctttgaagtttctaagatgacttctccctacattaaatgtacagtctctttct

SEQ ID NO: 39620 - DNA, 338 bp, Glycine max
  Clone ID: LIB3139-007-P1-N1-D7
ccgtgattcagttcaacggaagcgggggcacgaagagcgacaaggacctacgcgccggcgtggcgctatgcgcaagagcggcgtttctcggacacgtcgacgcgctgcgcgagctcggccactgcctacaggacggttacggcgtacggcagaacatcgccgagggacggcggttcctcgtgcaggccaacgcgcgtgagctcgccgccgtgctgtccaccggcgccgccgcgcgtaccttgctgagttggaatcttcagccgcagcagctccggcaggggtccgggtgtccgcttctcagcgatttcggatgcaacgtgccggcgccggatgtgcat

SEQ ID NO: 39621 - DNA, 340 bp, Glycine max
  Clone ID: LIB3139-007-P1-N1-D8
tcttccactgtctgtctacactacggacagagcttttttcacaccacagctggaattgctgcaatagagcccttcttctcccttcttcttctctacccacacccaaacccaaaccaagttctttctttctaattcccttgataatgtaaaatcacagaaaaacaaaaaaagctactcaaaacttggctccaattagcctttctttttttgttttgaggaaaaacagaaaagttccacacaatgtcttcttttagagctctcttcttcttctttctcatcaacgtctccttgctcctcacactctcttctgcggcggatccattcgtttcatacgaatttg

SEQ ID NO: 39622 - DNA, 339 bp, Glycine max
  Clone ID: LIB3139-007-P1-N1-D9
cttcttctgtatcgtatcaccgtcgcgcgattttcgcatctccacgacttcgaggtgcacgacgatgattcataatgagaacccactttggttttgattattgttgctgttgttgttaacttgttattgtatgttctagggtttagctggtttgaagcttaagaaacgaaaccctagcttgcaaaaagtggttgttaaggaatggcctcttacaggcccttccctcctcaatcgagtcaaattccaaaccctatcccaggtgggaatcatcagtataataataatcaaaatcaaaattggggtgcttatggagatccctctacttcttcattcccccaa

SEQ ID NO: 39623 - DNA, 342 bp, Glycine max
  Clone ID: LIB3139-007-P1-N1-E1
ggggtgaactaatggaagttcttgaaccttttatgaaaagtcctttctcaaccccttctccttcaaattcttgttttctttctacctcttactctccttcccccaacaactactctccctccctatactcaaacgggttatcatccatacccaacaccacccaaaacttaattggtttcgggcaagggcagcccacatctcttgtgggcctgaaccacctaaccccatctcagatctctcagatccaggcccaaatccagatccagaatcacagcaacacgctgagcttcctagggccgaagcccatccctatgaagcacgtgggcatgcctccgaagccca

SEQ ID NO: 39624 - DNA, 339 bp, Glycine max
  Clone ID: LIB3139-007-P1-N1-E10
ttaaaatggtggccacagttggtattcctgagaatacaggtatagcattgggctgtgctatgaatagttcttttagggggcgcgccagttctgatatttacaccatctgctctcaagactgtgaattatggaatcctgcttgcacaaaagcaatgattatgtcatttaatccaaacccgtgttctgatgcatggagtttggaatttctgaagcgtaccggatttcattgtgatatcatttgtgtcactggatggactgccaccccaatgcaggatgttcaggttacaattgattggtttatttcctctcaggaatgtgttcccaggacctattgtgttt

SEQ ID NO: 39625 - DNA, 341 bp, Glycine max
  Clone ID: LIB3139-007-P1-N1-E12
atcgggagaagtaatcgagcttcagcaatggtgtacgtcaaggctcagaaatcagaagcctacttcaagagatatcaagtcaagttcaagagaagaagagagggaaaaaccgattaccgtgccaggattcggttgattaatcaggacaagaacaaatataacactccgaaataccgatttgtggttcgctttagcaacaaggacattgttgcacaaataatatctgctagcattgccggcgatttagttcttgctacagcatattcacatgagctgccacgatatggtcttgaagtaggacttacaaattatgcagcagcttattgcactggtctcctgtt

SEQ ID NO: 39626 - DNA, 342 bp, Glycine max
  Clone ID: LIB3139-007-P1-N1-E2
ctaagatctgcaatggacgggcacaatgtgtgtgggtttgcttacggtcaaacaggcacaggcaagacattcaccatggatggaacaaacaaggagccaggaataattccgcgtgctcttgaagagctctttcgtcaagcctctttggataattcatcttcttttacctttacaatgagcatgttggaagtttatatgggcaatctcagggatttgttatctccaagaccatccggtagaccacatgaacaatatatgacaaagtgcaatctcaatattcaaacagatccaaagggattgattgaaattgagggtctctcagaagtgcaaataagtgattat

SEQ ID NO: 39627 - DNA, 345 bp, Glycine max
  Clone ID: LIB3139-007-P1-N1-E4
tgacgatggaattggaagttgacgagaacgacttgggagccgccggcgctgaactgttcgccgaaggtggccggcgaggcattcgtatcaatggctggttgatcgagactcggaggcactccatactgaactcttccacattccaagagtgggaacagaaactcgatacgtctcatttaccagaaatggtttttggggaaaacactttgattctaaaacacttgagcagtggaaccaacattcattttaatgcatttgatgctctacgtggctggaaacaggaagccttgccgccagttgaagttcctgcggcggctaaatggaaatttagaagcaagccctctc

SEQ ID NO: 39628 - DNA, 341 bp, Glycine max
  Clone ID: LIB3139-007-P1-N1-E5
ggctcagatggaaacaaatttgtttaaattgtctcttgatgatgttgaaactcctaaaggttctatgttggatcttaaaatttctcaatctaaaattgcacttcccaagaacacagttggaggaaccattctgcgtagtgatctattggcaaattttttgacagagggcaattttagagcaagtgttgatttgcagcgcactcatcgtattaaaggaatgattaaaatggtggccacagttggtattcctgagaatacaggtatagcattggcctgtgctatgaatagttcttttagggggcgcgccagttctgatatttacaccatctgctctcaagact

SEQ ID NO: 39629 - DNA, 347 bp, Glycine max
  Clone ID: LIB3139-007-P1-N1-E6
aagaaagaatcccaggcgaggagaaagatggaggggaaggagcaggatgtgtcgttgggagcgaacaagttccccgagagacagccgattgggacggcggcgcagagccaagacgacggcaaggactaccaggagccggcgccggcgccgctggttgacccgacggagtttacgtcatggtcgttttacagagcagggatagcagagtttgtggccacttttctgtttctctacatcaccgtcttaaccgttatgggagtcgccggggctaagtctaagtgtagtaccgttgggattcaaggaatcgcttgggccttcggtggcatgatcttcgccctcgtttactg

SEQ ID NO: 39630 - DNA, 340 bp, Glycine max
  Clone ID: LIB3139-007-P1-N1-E7
tgcgttttcctttcactacctcattcctaacgcacacacacacaacgggtgagatcaatgtcgactcctgctaggaagaggctcatgagagatttcaagaggctgcaacaagacccgcctgcaggaatcagcggggcacctcaggataacaacataatgctgtggaacgctgtcatatttggtcctgatgatactccatgggatggaggcacgtttaagttgactctccaatttactgaggattatccaaacaagccaccaactgtacgatttgtctctcgaatgtttcatccaaacatttatgcggatggaagtatttgtttggatatattacaaaacc

SEQ ID NO: 39631 - DNA, 340 bp, Glycine max
  unsure at all n locations
  Clone ID: LIB3139-007-P1-N1-E8
ctccttctggtctccctggtgttggtctcctgcgctgcccggtcggaatcggggctgatcnnctggagccccatcaaggacgtaaacgacagccacgtggcggagatcgccaactacgcgctgagcgagtacgacaagcgttctggggccaagctcacccttgtcaaggtcgtcaagggcgagactcaggtcgtttccggcaccaactaccgtctcgtcctcaaagccaaggatggatccgccactgccagttaccaagccattgtctgggagaagccttggctccattatatgaatctcacttccttcaaaccccttcattaatcttagacccatactt

SEQ ID NO: 39632 - DNA, 339 bp, Glycine max
  Clone ID: LIB3139-007-P1-N1-E9
agcgcactcatcgtattaaaggaatgattaaaatggtggccacagttggtatgtcctgagaatacaggtatagcattggcctgtgctatgaatagttcttttagggggcgcgccagttctgatatttacaccatctgctctcaagactgtgaattatggaatcctgcttgcacaaaagcaatgactatgtcatttaatccaaacccgtgttctgatgcatggagtttggaatttctgaagcgtaccggatttcattgtgatatcatttgtgtcactggatggactgccaccccaatgcaggatgttcaggttacaattgattggtttatttcctctcag

SEQ ID NO: 39633 - DNA, 342 bp, Glycine max
  Clone ID: LIB3139-007-P1-N1-F1
cagatcaggggaatgcatacgttgattcgtgaccgagacatatcaaagcatgatttcgtgttttattcagatcgacttatacgcctggttgttgagcatggtctaggtcatctgcctttcaccgaaaagcaagtggttactcccacaggtaatcatccgcccttgtcctcagtccttgcaatttttatgttctttataactcctcttgtttggggaacaagatttatgctttgtgaactgcaacatgtctgggaaagaagtgacagatcgacagtgggtcacaaatggaggtttatgttgacagtgctaattaactgaaatgaggtttatattgcaggatct

SEQ ID NO: 39634 - DNA, 343 bp, Glycine max
  Clone ID: LIB3139-007-P1-N1-F10
cggctcgaggctagttttgatggtctgataactaagcaagtcatgagcaagatggcagaaatgataaacagtctttgtggtggagatgagaaactgatgcgtgagagaacgcatcttctgttagcttgttgctccaggatggcaatctgcaaaaaagatgtttggagggttgagtgtggtatcccttctggatttccactcactgttatctgcaatagcattttcaatgagatgcttatcagatatagttatgaaaagttgttgcgtcaagctaaggctcctagtatgtttctccagtcttttaaaaattttatttctttgtgtgtttatggggatgataatt

SEQ ID NO: 39635 - DNA, 344 bp, Glycine max
  Clone ID: LIB3139-007-P1-N1-F11
gttctcctgcatggaggagaaccgaatacgtgaaagcgaagtggctctccggtggcacgcgcactcacgatatcaaagaggagaagaagaaggaagaagaacaacaacagctttttaaggacaatttaaacaccgcggagtcagagagttccggcgaagataacacggcggttgtcgaatggaagccaccggagttgaaacctaagggttcgctttccggcgtgaaggttgtgactggtttggcagtggtttttcatgatgacaataacccataaaattttgaatttttttcggcttttttttttcaatttcaaatgtctaaaatgaggattaaaatctatatg

SEQ ID NO: 39636 - DNA, 335 bp, Glycine max
  Clone ID: LIB3139-007-P1-N1-F12
ggctgaagatgggaacaacaacgatgtacccttacacaaattcaaagacagcgatccaaaccctgaagagttcgatgcaaagggttacagcctcagcggaaaaatcatgctttcagcaataatccttcttttcttcgtcgtcgttttgatgttgtgccttcatatctacgcgcgctggtacctccggcgtgctcgccgccgccagctccggcgccaacgcgagctccgccgcacccagcttgtcttttacaacgacgacgccacccccgcagccgtgtcacgtggcctcgacgccgccatccttgccacgctccccgtcttcaccttcgacccgg

SEQ ID NO: 39637 - DNA, 344 bp, Glycine max
  Clone ID: LIB3139-007-P1-N1-F2
ctaaaggctgcactctcttttatccctcaaaaaccaaagccctaatggcagagcgcgggggtggcgaccgtggcagcgaccgtggcggtttcggacgcggctttggtgggcgagggcgcggaggtgacaggggccgaggccggcgccgaggtccccgccgcgaggaagaggagaaatgggtcccagtgaccaaactgggccgcctggtgaaggagggaagaatccgaagccttgaacagatctacctccactcgctcccgatcaaggagcaccagatcatcgacacgctcgtgggtcccaccctcaaggacgaggtgatgaagatcacgccggtccagaagcag

SEQ ID NO: 39638 - DNA, 342 bp, Glycine max
  Clone ID: LIB3139-007-P1-N1-F3
tggaatcaacccatactccatggaatggactggtttggccaatagattactgagtaagggcaacgatattctgtgttgcgattatgctagttttgatggtttgattaccaagcaagttatgagcaagatggcagaaatgataaacagtctttgtggtggtgatgaaaaattgatgcgtgaaaggacacacctgctgttggcttgttgttcaaggatggcaatttgtaagaaagatgtttggagagttgaatgtggaatcccttctggatttccgctcacagttatttgcaatagcatttttaatgagatgctcattagatatagctatgaaaaattactgcg

SEQ ID NO: 39639 - DNA, 344 bp, Glycine max
  Clone ID: LIB3139-007-P1-N1-F4
gctgcaatgcctgcagcaatgtctcaagagtggtatggaaagaaggcagatattaactgcgttggagccagcggtcggatattcatatgcttgaactcccctaagctatgtacttatgttctgtgtgatttggtgaccaacaaatggaccgagttgccgaaatgttgcttgaatggagaagtcatggaattcatgtctgccttttcatttgagccaagaatagaggcttctgtatgacactaaagtaccccagtctggtatattgatcttggttttcatcctttttctgtgttctgttagattaattttcttcccacttgtacttgaatttgtcatccaaaata

SEQ ID NO: 39640 - DNA, 344 bp, Glycine max
  Clone ID: LIB3139-007-P1-N1-F5
cattctttctattccacaaggacttagcaacacttccttcggagattgtgcaaagcctgacccagaagtgagtggagacactgaaaagaattttgctgagctattgacagaagaactcaagcttcaggagagccaagctgtggaaaatcagcaacgtgctgacatggcattgcttgaggcaaaaaagattgcatctcagtatcagaaggaagcagacaagtgtaattcaggaatggaaacgtgcgaggaggctagggagaaggctgagttgacattagtcacgcagaagaagctaactgcattgtgggaacttagagcacgtcagaaagggtggaaggaagggc

SEQ ID NO: 39641 - DNA, 336 bp, Glycine max
  Clone ID: LIB3139-007-P1-N1-F7
aacagaagtactttggctcttttcagtctctctctactctacacaacactacacggactttgtacctttctttttctttgcttgctattgctattctgcactgtgtctttactcttgttcttgttgctgcagctggtggttgcattgaatcggaggggtaagtgggaagacgtgtcttgttttgtagctttcccttccctctctcttttccccgccgcatgtgccggattagacgcgaactgcttccataattcacctcctccaatcaaccatcacaagatttcccactgattggatggaagaagcatgtgaatttcgaagttgggctgaattgat

SEQ ID NO: 39642 - DNA, 340 bp, Glycine max
  Clone ID: LIB3139-007-P1-N1-F8
aatcatgtgagcaatcctccatgttatatctgcaacaacttctcatcatcatgagcggcagcaccaccaaaacttaccttatagtaataattctcttcctgtggtgcgtcctgatgctagtgctttccagaggtatagacaagacttaggctccaacatggcctcaaatttcagaaggcaaagcctcatgaagaggtctcttgtgttctttagaaacatgaactttatgagaatgagagaacgcgttcaagcaacgtctcgtcccaccaatactcagcttcatcatatgatatcagagaggagaaggcgtgagaagctaaacgagaattttcaagcactt

SEQ ID NO: 39643 - DNA, 338 bp, Glycine max
  Clone ID: LIB3139-007-P1-N1-F9
cgtacattcactccagtttaaccgaccgaatatgttgttgtttggagcgatcggggagaaactctgtaaacatgttggtttaccaggaccttcttacaggtgatgagcttctttctgactcctttcgttacaaggaaattgagaatggaatgctgtgggacgttgaggtgacgaggttagctatgggagtacgccacttatctcactctcagctggcccagaacccttttgtgccactccctaaccatttcagccacagatatattttccatcacaatttctctgaactcctcaaccttcttcttcagaacacgccatggctcaaaatcaatcaacaa

SEQ ID NO: 39644 - DNA, 344 bp, Glycine max
  Clone ID: LIB3139-007-P1-N1-G1
ggccgtgactgatcatcagaggcaatggcgagcaggtactgggcagtgtctcttcccgtccacaactcggcatcatctcagctctggaaccaattgcaggaacgaatctccaagcattccttcgacacacctctctacagattcaacattcccaacctccgcgtcggaaccctagactctctcctctccctcagcgatgacctcgccaagtccaacaatttcgtcgaaggagtcacgcacaagatcaggcgccagattgaggagctcgagagagtttccggcatcgacagcggcgccctcaccgtcgatggtgtccccgtcgattcctacttgaccaggtttgt

SEQ ID NO: 39645 - DNA, 343 bp, Glycine max
  Clone ID: LIB3139-007-P1-N1-G10
cggctcgagtctctcctcacaatgctgcctcacaagcacactctggtggttgggggcactgtggccacactcgcgctggcggcggtgctcgcagcaccacaagcagatctggcctccgagcgagctgcattactctccctccgttcctccgtgggaggccgtaccctcttctggaacgccaccagggacagcccctgcaactgggccggggtccaatgcgagcacggccacgtcgtcgagctccacctccccggcgtcgctctctccggcgaaatccccgtcggaatattcgggaatctgacccagctccgcaccctcagtctccgtttcaacgccctcagag

SEQ ID NO: 39646 - DNA, 342 bp, Glycine max
  Clone ID: LIB3139-007-P1-N1-G11
gagaagcaaaactcagatgcaaaaagtgtggtggaacttacaaatggctcatgtgaagatggtaaagagacatctaacagtgatgctcctgagaacaatcctcagtatactactgtttatgtgggtaaccttgctccagaggtaactcaacttgatctccatcgccacttccatgctcttggggctggagtgatggaggaggttcgggtccagcgtgataaagggtttggttttgtgaggtacagtactcatgctgaagcagctctggctattcagatggggaacgcccagtctcttctatgtggaaaaccaattaagtgctcttgggggagcaagcccact

SEQ ID NO: 39647 - DNA, 342 bp, Glycine max
  Clone ID: LIB3139-007-P1-N1-G2
cgaacgtagctgagcaataacaatgccactgccaacgggcgtttccccattttcttctggctcaggcaccttcttatccacagttaccgcgcgctcttcactccctccaaaacgcaacgtctccccttccccttcccccttctccactctctctcgcagagacattgctctgctttccttcttctccctctccctctcagcaccatcctccgccatcgacattggcatctcaggaccgaaggattggctgaaagagcaaaaaaagaaggcctccaagtacctattggcccccgtcgatgcctcccgccaaatccttcgctctgcctatctcacgctcacgga

SEQ ID NO: 39648 - DNA, 345 bp, Glycine max
  Clone ID: LIB3139-007-P1-N1-G3
ctcaagttcaccaaaagcaaccacaacaagcacttctggtgatttcctatcacaccctatggcagattcacaagcgcagacacttcaaatggctctggaagctcttcaatcacccagaactgccactccatcgtttagtccctttgaagaaaccaacctcagttacttggagacaccgtggaccaaaggaaagcgttctaagcgtagccgcatggagcagcaactgcaacactcttcatgcaccgaggaagagtacctcgctctctgtctcatcatgctcgctcacggcggcgccggcggtgtccccgccgacaagcctgctgtcttcgacaacaattccgcgcc

SEQ ID NO: 39649 - DNA, 333 bp, Glycine max
  Clone ID: LIB3139-007-P1-N1-G4
ggaatccacacaatactttcgcgttcaataagcggatgggaaaactgactttacatcagggcgctatctggacagatacaagagtgcctatttgtatatgcagaggagcttacgcatacactgctcttatcatgaatacaccaaatgctgttctttgaatgttaaaatgtcaaattgctgatatcgtttataaaggtactaataaccattctacgctacataatactacgagaaactttataaatagcatttgtatagcagtctgttaacaccatccaatcagaggtttaatcccacatgaatgctctgccacacatagaatgaggcaaatgg

SEQ ID NO: 39650 - DNA, 346 bp, Glycine max
  Clone ID: LIB3139-007-P1-N1-G5
gcttgcacaaaagcaatgactatgtcatttaatccaaacccgtgttctgatgcatggagtttggaatttctgaagcgtactggatttcattgcgatatcatttgtgtcactggatggactgccaccccaatgcaggatgttcaggttacaattgattggtttatttcctctcaggaatgtgttcccaggacctattgtgttttaaatccacaaaatccttttgtgttaaataggtggatgggaaaattgactttcccccagggcacttcccgaagtgttaagagaatgcctctttctatagggggaggagctggtgcaaagaatgctattctcatgaatatgccaa

SEQ ID NO: 39651 - DNA, 347 bp, Glycine max
  Clone ID: LIB3139-007-P1-N1-G6
ctcgagccgcgccgcagcgccctcgaacactccgggaacccccgccgccgccactggcgcccaagcaccttccacaccgaattcaccagccccagttgcttctcccaaatcatctccaccagcttcgtctcctaagcccgcaaccgcaacccctgcttcgtcgccggcggcatctcctaccaccacccccgccgcgcctgctccagcgaccaagccacctgcagcctctcctcctccggcgccggttcccgtgagctctccccccgctcccgtgccggtgagttctccacccgctcccgttccggtggcggcgccgaccacccctgtggctcccgctccggctccga

SEQ ID NO: 39652 - DNA, 337 bp, Glycine max
  Clone ID: LIB3139-007-P1-N1-G7
cccttattcagggtcaccgctgttagggttagggttagggttagggtttttccgcacattctttctctagcaatcttcttctaccactttcccctcattctctctcttagtctcttcaattgtaagttttttgcgctagggtttcctctgctatctcttgtactcgaagctcgtccctttttccggatctcgatctatggatatccgcaagaggggaagacccgaacccggcttcagcttaaatggtggattcaagaaatccaagcaagaaatggagtccttatcaactggtgtaggaagcaaatcgaagccatgtaccaagtttttcagcactgct

SEQ ID NO: 39653 - DNA, 340 bp, Glycine max
  Clone ID: LIB3139-007-P1-N1-G8
atcttaaaggatcatccacaagccaacccgttttgtgcaatagcagcttatgtgagctacagagacaatgcccttcatctgataccatctgtccatatgaagtaaactatctatcgaatggtacttcaactactggattcctggtggaagatgtgttgcacttaattacagatgacgataaaacaaaagatgccgacacacgaattacttttggttgtggccaagttcagactggtgcatttttggatggggcagctccaaatggtctgtttggactaggaatgagcaatgaatctgtcccaagtatcctagccaaagaagggctcacttcgaattcctt

SEQ ID NO: 39654 - DNA, 340 bp, Glycine max
  Clone ID: LIB3139-007-P1-N1-G9
ctcgagccgtaaaattttcgaagttgaagcgagagcttgccatttcaagggtttgagggttagggttttctcaaattgcaaggacatgggtttcaaccttcaaccatatgggattcaatccatgctcaaggaaggccataagcacctttctggcctcgacgaagcggttctcaagaacatcgacgcttgcaaacaactttccactattactcgaacttccctcggtcccaatggaatgaataagatggttataaatcacttggacaagctttttgtcacgaacgatgctgggacaattgtgaatgaacttgaagttcagcatcctgctgccaaggttttg

SEQ ID NO: 39655 - DNA, 344 bp, Glycine max
  Clone ID: LIB3139-007-P1-N1-H1
caaaatttgatttggagttaagcctttccactgggccctgtgagtcggatattacaagcgtacatctaaatccatcacctcttcaattgaatatggagataccattaacattcagtgggacacaaaatacagatgagggatcaacttcatgtagctggcagccagggattgttttgccatcttctaagatgtcatcaaatacaggtactaattttcttttaagtcagtcatcgaagcagtttgatcatagtcccattgttgtggacctctcgtcaaccggaccaaaaagttcagtcacctgcacttctgggcttacacagcagcaacagccactacatcgccct

SEQ ID NO: 39656 - DNA, 320 bp, Glycine max
  Clone ID: LIB3139-007-P1-N1-H10
atcgtgatgaccttcggtctggtgtacacggtctacgcaactgccattgaccccaagaagggtaatttgggaattattgctcccatcgccattggtttcattgtcggcgctaacattttgttgggtggggccttctctggagcggccatgaaccccgctgtgacatttgggcctgctgtcgtgagctggacctggaccaaccactggatctactgggccgggcctctcatcggtggtggaatcgctggccttgtttacgaggttgtctttatcagccacacccacgagcagcttcccaccactgactactagaggggggg

SEQ ID NO: 39657 - DNA, 342 bp, Glycine max
  Clone ID: LIB3139-007-P1-N1-H11
gtgtttttaacaaacagcaacagtacagagcattttgatgcatgtaagtggacaaaatcagaaccacattcctgggaattaatcttcccaatagaggtatgtggtcctaataatggttttgaaatgtggagttctgagtgggcaaatcaaacttcatggcatttgagtttccttattgacaatcccaaacagtctacagtttttgatattctcttgggaatctctcaagatttttgaattgctggtaatactcttatgccagctttttctgttccacaggctactgccagatctttttgaaatgcggaattctttgcatgatctggaattcgtgttttcttt

SEQ ID NO: 39658 - DNA, 341 bp, Glycine max
  Clone ID: LIB3139-007-P1-N1-H2
ggagatattttgttggagatctcgtctttgaagtttctaagatgacttctccctacattaaatgtacagtctctttcttcatagcatttggaaatttggctgatgacaccatcaattttgaggcttttccccacaagctggtgcagtttggagagattcaggaaaaagttgtgttgaaattttcacaagaggaatttcttacagcttggtcaactcaggtgcgtcccgcaacgactctgttggctgatgggtgcccatatttgtatgctatggtgcatgatagttcagtgtctacaataccaggtgattttgtcattggtgttaagttgacaaccataaac

SEQ ID NO: 39659 - DNA, 342 bp, Glycine max
  Clone ID: LIB3139-007-P1-N1-H3
aattaatactccaatgtccatttccatcgataggaagaaggaacatagctgactgaattcggcatctgaaccgcactccccttggctttgatattcgcactcctcgcacttcgaatccgatgctggcagctgcagatcaaaccttgtttcacctgaatgctccttctggactcgatttagatcgagttcttcgtaccctgatagtgtgggaggatatatatgaaaaacggggtgctggaatgcactgtgtgccattccaaattggtttccccctcctgcaagactatatcaagggcttatgatcgccataaaagtaggatatcgaccaagcaacgtgctctc

SEQ ID NO: 39660 - DNA, 346 bp, Glycine max
  Clone ID: LIB3139-007-P1-N1-H4
taagtgagggtgtgaagctttttgcttctacggggctagaagaccctcaagctttgtgtgctaatcaatttcagagcgccttcacagtaaggaagctgcagcacactttttcgattttattcccaccattggaggacttgggcagcctgctttatacaggctgcttggcgccgatataagaaaaggattactatgaaagatctcagtttgagggaatctattcctttagatgaaacagtagctagtgagagagaacatgaggactatgctgctggttcaaattcaactcgggctaaattaaaccttggggctacaattcttgcttcgagatttgctgctaacacaa

SEQ ID NO: 39661 - DNA, 340 bp, Glycine max
  Clone ID: LIB3139-007-P1-N1-H7
gtggtgaacaacgactacacccactgggaaatgtatgcaattggtgggagtgcaaatcctaccatcaacagccaagggaacaggttccttgccccaaacatcaggttcagcaaagaggtaaccaagcatgaggatgctccacagagtgagtggatggggtggaattggaggtcagagggtgacatgttcttgaatggagcatacttcaggcaatctggtgctggtgcctcttccagctatgctagggcttcaagtctcagtgcaagaccttcttctcttgttggctccatgaccaccactgctggtgcacttacctgtagaaagggcaaccgttgctgat

SEQ ID NO: 39662 - DNA, 339 bp, Glycine max
  Clone ID: LIB3139-007-P1-N1-H8
actcatccctgcaaaaaatatccatccccaatggcccaaaacaacttctggcacatcttttgtgaaactaggaacatcttcgaagcacactctcgtcacttactaactctctcactaatcttcctctttcccctttcattctccctcttactctctcccaccctctccaacctcttcaaccatttctataccaacattatcccttatccttataattattcttctacaacaaacccaaattataaacaccactctctcttctttcatctcctctattcccttttcacttttatcttctcaaactgtggagtcattagcatcacctacagcgttttccac

SEQ ID NO: 39663 - DNA, 340 bp, Glycine max
  Clone ID: LIB3139-007-P1-N1-H9
aaatgataaacagtctttgtggtggtgatgaaaaattgatgcgtgaaaggacgcacctgctgttggcttgttgttcaaggatggcaatttgtaagaaagatgtttggagagttgaatgtggaatcccttctggatttccgctcacagttatttgcaatagcatttttaatgagatgctcattagatatagctatgaaaaattactgcgccaggctaaagctccaagtatgtttttacaatccttcaaaaattttgtttctttgtgtgtgtatggtgatgataacttaattagtgttcatgaatatgtcaagccttactttagtggctctaaattgaaaag

SEQ ID NO: 39664 - DNA, 303 bp, Glycine max
  Clone ID: LIB3139-008-P1-N1-A1
ctcgagccgctgaaaatggtcaagaggagtttgtgagggaacaattaaacagaggtgtagtaccagatggcattgatgtgcactgcttggcaggtctcataaaggcttggtttagagaactaccaactggagtattggaccctcttttgccagagcaggtgatgcaatcccagtcagaagaagaatgtgctcagcttgtgaggcttcttcctccaacagaagctgctttgctagattgggcaataaacttaatggcagatgttgctcaaatggaaaacttgaacaagatgaatgcacgtaata

SEQ ID NO: 39665 - DNA, 355 bp, Glycine max
  Clone ID: LIB3139-008-P1-N1-A10
taatgagatgctcattagatatagctatgaaaaattactgcgccaggctaaagctccaagtatgtttttacaatccttcaaaaattttgtttctttgtgtgtgtatggtgatgataacttaattagtgttcatgaatatgtcaagccttactttagtggttctaaattgaaaagctttctagctggtcataatatcaccattactgatggtattgacaaaactagtgcaactttgcaatttagaaagttagcagattgtgattttctcaagagaaactttaagcagatgtctaatgttttatgggtggctcctgaggacaaggcgagtttatggtcacaacttcattatgtttcg

SEQ ID NO: 39666 - DNA, 319 bp, Glycine max
  Clone ID: LIB3139-008-P1-N1-A2
gctctgaatccaattcttcttcttcttgttctctgtttaaggcaatacaacatttactactcatactcaaagtagcttagtgttttgtttagcatatcatggagaataataatcagtcgttttggcaattcagtgaccagctgaggttacaggcatccaatttggcgaacctttctctaaacgattcgatttggagcaacaattacatctccaagaggcgtgatgaaaggattaattttgacatcaaagtggggggtgagatcaactctttcaagtcaaaggatccagcttgtgattacaacgattacgtgaatggatc

SEQ ID NO: 39667 - DNA, 357 bp, Glycine max
  Clone ID: LIB3139-008-P1-N1-A3
agccactcaagtctgagaagcctcaagcttaagattgttgtgaagttaatcactcccttcaatggatgtcttgctaggtgtggatgaataatttgcgtgttccatgactactactacttcattcataggtctaatgtcatctcatcaatacttaaactgtttttttttttccttttctccttttactcacaatttattttttggttatgcaatgttaccgttttgatgcaatggaaattttatcagaattttgtaccaattgattgcattttgagagggtgaaaaaggtctctgcaatgtattctttaacgaaattgaaaaattgtttcctttgatcctcccaagcaaaccgacatt

SEQ ID NO: 39668 - DNA, 344 bp, Glycine max
  Clone ID: LIB3139-008-P1-N1-A7
tgccattcaactcttggcatttttttcactgtctctttttcaaaatgctctgaggctctctctaaccttcttccagttgtctctaaacctcttgaaatccgtgatggataccaggatgggttcactcgacgcggccaagcccgcctgcaacgacgtcgtatcgtgcaaccacaccaccagcgccgccatccagccctgcgtgccggcgacggtgatcaacggcgccggcggagactccactttaggcggccacctggcacgccggctggtcgaaatcggcgtcaccgacgtgttctccgtttcccggggacttcaacctgacgctgcttggaccacctgatcgc

SEQ ID NO: 39669 - DNA, 355 bp, Glycine max
  Clone ID: LIB3139-008-P1-N1-A8
gtcgccctccatggtcctccctcccagccaccctttccgccgcctccctcgcagcctcgtctccgcccgaaccagaagccgccgccgccgccacgtgtcggtgtcctgcaccctctccggcaacggcaccgacgacgaggtcgagagggccctccacatggacggcgcaattcccggcacctccgacgagttcgtcaagcgcgtctcctcacgcgcctacgacatgcgccgcaacctccaacaatccttcgacaccagcagctacgacgttttagatgccaacccctggagagagacttcgaagcccgtgtatgtactcacacagaaggaaaatcaattgtgcacaatgaaaacc

SEQ ID NO: 39670 - DNA, 358 bp, Glycine max
  Clone ID: LIB3139-008-P1-N1-A9
aagcaaacgcagcattgggagatagaaagagagagagaaagagagagagagaaagacccttacccttctctatcgctcgctttcctttgacgcttctgacccttgctttgtctgcgtcttccttctttctttctttctttctctgagtgtcgtaatggctctcccagactcttctttccgtcgcaactccctgatcccctccttcatctactcctcttcctccaaaacgctccctctccaccacatgctcaacaccgcctgcggtgccgccggcgacgctccctacccggcgacggccaatctcgacgccggatcgcgtggcctcatgattccctctcccagcgagtcacgcaagatc

SEQ ID NO: 39671 - DNA, 364 bp, Glycine max
  Clone ID: LIB3139-008-P1-N1-B1
gttcattctccaacttgataccgcgttcgctcactctctactcaacttcaattaatcaaatccctcactttctctctcttgtcttcaaatctcaattctattttggaaaatcagaatcaaagacagttaaaaatacagaacaaacatctcactcaacatcaacacttcagatctacgtttccactctcacaacaacgaaaaaggaaagaaaaaccgattctacagcgacaacaaggaacgaaagaacgatcgatttctcgaagcgccctcaaaatggcgcgtgcacccttcacttctttccccttcgtcctcattatccttctgtcaatcgtccacctttcgcactgcaagaccctcaaacgtg

SEQ ID NO: 39672 - DNA, 362 bp, Glycine max
  Clone ID: LIB3139-008-P1-N1-B11
gttctgatatttacaccatctgctctcaagactgtgaattgtggaatcctgcttgcacaaaagcaatgactatgtcatttaatccaaacccgtgttctgatgcatggagtttggaatttctgaagcgtactggatttcattgcgatatcatttgtgtcactggatggactgccaccccaatgcaggatgttcaggttacaattgattggtttatttcctctcaggaatgtgttcccaggacctattgtgttttaaatccacaaaatccttttgtgttaaataggtggatgggaaaattgactttcccccagggcacttcccgaagtgttaagagaatgcctctttctatagggggaggagct

SEQ ID NO: 39673 - DNA, 362 bp, Glycine max
  Clone ID: LIB3139-008-P1-N1-B2
caaacgatccaaactcttttttcatttgcagcatcaaaatgagtggtagcaacgatggtagcggcagctggagctctaggtttttgaaggtggctagtgcagctgccgctacagccgccgttgccggcggtttatatgccattctttcatcctcaacctctgctagctctgagatggaagtgccgtttggcagcgcacggcgtgagagcaaagaacgtgacgatggtggctccgggtctcatcctcgcgagggtgccaccacggtcagtcgttggaagaaacctgagattggttgggtgaagctgaacgtggatggttcacgcgacccatacaaaagttcctccgctggttgtggtggtgtt

SEQ ID NO: 39674 - DNA, 362 bp, Glycine max
  Clone ID: LIB3139-008-P1-N1-B3
ggtcatcctggaaaaacttaccgacttcgtgtacataatgttggagtatcaacaaggctgaatttcaggatccagagtcataacttacttctagcagagacagaggggtcttacacagggcaacagaactacactagcttagatattcatgttggacaatcttattcttttctgttaagcacggatcaaaatgcaagtacagattactacattgtagcaagtgccaggtttgtgaatgaatcacgttggcaaagagttactggagttgctattttgcgctatacaaatttcaaggggaaggcacgtggtcctctcccacctgctcctgatgatcaatttgacaaaacttactcaatgaacca

SEQ ID NO: 39675 - DNA, 361 bp, Glycine max
  Clone ID: LIB3139-008-P1-N1-B4
ggatcgtgagaggggcagtagccgagattccgtgagttgcaaaaatgaagacgattctttccaccgagaccatgaacatcccggacggcgtgagcatcaaagttcatgccaaggtcatcgaagttgagggcccccgcggaaaattggtgcgagacttcaagcatttgaatctcgattttcagctcattactgacgaaaacggtaaaagaaagctgaaaatcgacgcgtggtttggttctcggaaaacatccgccgccattcgcaccgccttgagccacgtggagaatcttatcaccggcgtcaccaagggctaccgctacaaaatgaggttcgtttatgcccattttcccatcaacgcaag

SEQ ID NO: 39676 - DNA, 357 bp, Glycine max
  Clone ID: LIB3139-008-P1-N1-B7
aaccggtttgctaatggtgagcagagcacttgttttcttttccacttaggataacagtatttgggatttgtacctgctgaggaaaacggaagtgatgatattgagaaacctggaggcatttgtgcctattattaaagcaggatggaggttttctaagatctactgttttatacacgttacccaaacctatttgatcgcccctgctgtgacctatggtcctagcatgcttcctactatcgatttgaaaacaggtgtgttcttaatggaaaagatctcaccccggtttggtaaaggtacttgtggagatattgtagtcttgcgcaatcctcaacaccctaggcactttatgaccaaacg

SEQ ID NO: 39677 - DNA, 359 bp, Glycine max
  Clone ID: LIB3139-008-P1-N1-B8
caaacattataatttctattacatacattttgtagctaggatgagcaagttactactcattcgtgttgctgggttcgtggcaacctttgtcaccatggtgatgatgatggtgcccaaaaacgtgagtgcccaaaacataggtgatgacatcgtcacacaagacttcttcaacagcataatcagtcaggctgatgatggttgtgcagggaagaacttctactcacgagatgctttccttaatgctcacaattcctacaatgagtttggtaggcttggtaatcaggatgactccaagcgtgaggttgcagctgctttcgcccatttcacccatgaaacaggacatttttgctacatagaag

SEQ ID NO: 39678 - DNA, 361 bp, Glycine max
  Clone ID: LIB3139-008-P1-N1-C1
tctacaccgtgtctttactcttgttcttgttgcagcttggtggttgcattgaatcggagagggtaggtaggtgggaagacgtgtcttgttttgtagctttccccttcgctctctctctctttcccggcgcatgtgccggattagacgccaactgcttccataattcacctcctccaaccaaccaacacaagatttccctctgggagagggtaacagtgatccccagggtgtgcaaatcatgggctaatgcagtaactggaccttactgctggcaagagatagacatcaaggattggagcaaccgatgccagcccgaccaactcgatcggctacttgagatgcttatcacaagaagttgtgg

SEQ ID NO: 39679 - DNA, 272 bp, Glycine max
  Clone ID: LIB3139-008-P1-N1-C10
gtgactgtgtcaagagaggttccaaaacacgggctataaaggttattgattgtggcagcaccacttatgagcgagatgatcagcactacattgtgtcaactcgtcattatagcgctcctgaagctatccttggacttggctggagctatccatgtgatctatggagtgtgggatgtgtattgtacggatactgcccaggtggagcttgggttgaaactcatgaacgcttacagcatttacatgggctctaagggtgccctgggtgagatcca

SEQ ID NO: 39680 - DNA, 357 bp, Glycine max
  Clone ID: LIB3139-008-P1-N1-C11
tttcgaatttcgatacttagatcagatccacaacactccttcatccatgacgcttggctcttcaggatccagtgtcgtggatccaaggaacttcagattgctggaggagcttgagaagggagaaagaggaatcggagatggaacagttagctatggaatggacgatggtgacgacattcacatgcgctgtcggactggaaccattattggcccctataatactgtgcatgaaggaagaatttatgcaattgaaggtgttttgtgataaagactacccagaaaagcccccaagtgttcggtttcattcacgaatcaatatgactcgtgttaatcatgaaactggagtggttgaatcaa

SEQ ID NO: 39681 - DNA, 358 bp, Glycine max
  Clone ID: LIB3139-008-P1-N1-C12
ctttttacactccacacacacacacatacacacctctaccttgtgtttgagattgaggaatataagaaaatgaaaatgggtaaagggatgatttttattgttgctctggtggtcatttgccttggtgggaaatgggtggaagcgcaggtgcaccatgtggtcggagcagaccgtggttgggatcaaacctcagacctcgtttcctgggctgcaggcagggtcttcagggttggagaccaaatttggcttacctactccgtggctcagggattagtcgcagagctgaaaagcaaagaggaatatgaggcatgtgatgtgagcaaccccatcaagatgtacacagagggtttgcatacta

SEQ ID NO: 39682 - DNA, 360 bp, Glycine max
  Clone ID: LIB3139-008-P1-N1-C2
ggctgttagatttgaatctcccagcagaagagaatgaacagaaacaaacaaatgatggaaactctgatcatgtctcaactgagaaccaaaacctttggttgcaagatttgtgtgatctggttgatgaaacagttgtttttaaaccttatgattttgaagcacttgcggatagagtgttgaaagtgatcagaagtaacttcaacaaaattcttggatccgagtgtgcattgcagatccagacagaagtcatggaccaatttcttgcagctcaatatgtttcagaccgggatagggaggtggagaactgggtggaggaagttctatgtgaaggatttacagaagttcagagaaggttcaacc

SEQ ID NO: 39683 - DNA, 356 bp, Glycine max
  Clone ID: LIB3139-008-P1-N1-C3
aaggcttctttctctctcttcttcccttgctctgtgtcgccgtaacacaaaaaagggaagagagagaaagaaccacccacccaacagcttttgttcttaacaagacaaagcttcgcgtgtgtttgggtttcttttcatccttccagcttggaaggattgaagtttctgtctttttctgatctccgcgtgcgtggtttggttttgttgttgaagatgttggtagctaatagctttgatctatggcgaaaggacgcttttttctctgcggcggaagaggtgcaggaatcagctgatataatggaatctgcatacagggcatggttgagagagaagagagaaaggtcaactcctgagga

SEQ ID NO: 39684 - DNA, 359 bp, Glycine max
  Clone ID: LIB3139-008-P1-N1-C4
caaaaagctgatgtgcctaccatagcacagattgaagagtttcattcgatgcagaggatgatgaatgctcctgattcaaatgataatattgatctactgttgagcattgatttgttgggtttacaaggagcaggtaaagcttttccaaacaagattgtttttgatgataagcttgtgttggctaacacacaagaattctttgatggaaattttccagtggattcttggttaccaatttttgtgaattgtctttatcctgtaagtcaattacctccagaagctgtcgttgtaaatgttacatgtggtagtggacgctgtggtttacccaccactgcttggattagttctgcagttaacaa

SEQ ID NO: 39685 - DNA, 147 bp, Glycine max
  Clone ID: LIB3139-008-P1-N1-C5
caagattttccaatggtcaaagataagtggtggtgtgtgctatgtgaagtgggtgtttgcatcgcttgctaccacttttcatgcatcttggacatgggttgtgtttgagtagacaacttgattaagctattaaaataactgtttatc

SEQ ID NO: 39686 - DNA, 361 bp, Glycine max
  Clone ID: LIB3139-008-P1-N1-C6
agatagtttttcaattctctcgaggtgtgtactctggtcttccccacattctaaaattgtgtttgtgtgtgcgtgcgtgtaacataatcatccatcttgttgcttattcaacattacatttggtgtgttaattcatacaggaactccctcttcccagaacaagatttgagatgttaatcccagggagtgaaattccatcatggtttgtccctcaaaaatgtgtttcattagctaaaataccagtccctcataattgccctgtaaatgaatgggtgggatttgctctgtgcttcctattagtaagttatgcaaatcctcctgaggcgtgccatcatgaagttgagtgctacttgtttggacc

SEQ ID NO: 39687 - DNA, 356 bp, Glycine max
  Clone ID: LIB3139-008-P1-N1-C7
gccttcagatttagctacctctttatttttattattattatcattcattagtcatttctcgtaccaaacacaacacactcttctcctctcttatcccattacaatgcctgggagtttagaaccggtagatttgggtgttcacataccctaccacttccgatgccctatctcgctcgaactcatgcgagacccagtcactgtctgcaccggtcaaacctacgaccgcgccagcatcgaggcatgggtcagcaccggcaacaccacatgtacggtcacacgcgccactctgaccgacttcaccctaatcccgaaccacacccttcgccggcttatccaagagtggtgcgttgctaacc

SEQ ID NO: 39688 - DNA, 354 bp, Glycine max
  Clone ID: LIB3139-008-P1-N1-C8
ggacacacctgctgttggcttgttgttcaaggatggcaatttgtaagaaagatgtttggagagttgaatgtggaatcccttctggatttccgctcacagttatttgcaatagcatttttaatgagatgctcattagatatagctatgaaaaattactgcgccaggctagagctccaagcatgtttttacaatccttcaaaaattttgtttctttgtgtgtgtatggtgatgataacttaattagtgttcatgaatatgtcaagccttactttagtggttctaaattgaaaagctttctagctggtcataatatcaccattactgatggtattgacaaaactagtgcaactttgc

SEQ ID NO: 39689 - DNA, 354 bp, Glycine max
  Clone ID: LIB3139-008-P1-N1-C9
ggaaatctttgaaaaatactacacgacaataccgtgttattaacagattatagatttagttagcagcagagcagaagaaaaagaagaaggtgattgttgttcggtggtttgcaaggatggggaacacgttctgcttcttctgtggttgcgttgctcaatccagcgtcggcgtggtcgagcagtggggtcgcttccaccgcctcgcccaaccgggctttcactttttcaaccctctcgccggcgaatgcctctccggtatcctctccaccaggatcttctccctcgacgtccgcatcgaaaccaaaaccaaggacaatgtttttgtgcagttgctgtgttcgattcaataccgag

SEQ ID NO: 39690 - DNA, 360 bp, Glycine max
  Clone ID: LIB3139-008-P1-N1-D1
attcagtagctcatctcttgcagcaagcaacagcagtgttagtgcatatgtagcctccactagcatgggcatgacaactagcacccctgctgtagttgccgccagcaatagcagttcctccacccaagtctcatcttcatctcccacaacttcatttttcaaatttggatctaccccttcagcaccaacaagtttacctgtgtcatcttctggctcagaaccactggaaaacaagagtggcacagggattggcatgtttggaagctcttctgctgcaattggaagcacagggagtggcatttttgggtttagtaccccagcaatgacaactggaaatagccagtctctgggttctgtctt

SEQ ID NO: 39691 - DNA, 359 bp, Glycine max
  Clone ID: LIB3139-008-P1-N1-D10
attcttttcttctctctccagttctctcttccctcagcacaaacatcccatagccactgcttaaccacgaagaaaccgagacaacaaaacacacttttcccccctgttctgctctgttctgtcctgttctttccacgctgttcttcaccgtttcaacaaaaacatgatccaccccatttcatgtttcctcttcctaccctcaaattctccataaagttcatctcttttcaatccattctcaactgggtcactcacaattccaaagggtgtcacatcgttagatctcaaattcttcagctccaatggcgtcgtgccccgcgaattccttcaacttcaacaccaccctctgcgcgtgcacc

SEQ ID NO: 39692 - DNA, 355 bp, Glycine max
  Clone ID: LIB3139-008-P1-N1-D11
ggagattttcacagtcttctcttctctgttgcctgtcataaattatggtcaaccatactttctcagctccatcaggtacgtgctcatgattggcctaccttaagttacgacagatcagagtttcccatagtccattattaaaccgtttgagatttctccaacccaatacaatggagcagctgacagaattgtgtggttttcacaaccagatattctaaaggcgggaacagcaaagaagaggaagaaatctgttaaaatggtccaagtaagaggatcaatatgccccatgcattgccaattttgttgtaccaagtcactgaaatattatgagtctgacgttgagcccgattttttt

SEQ ID NO: 39693 - DNA, 356 bp, Glycine max
  Clone ID: LIB3139-008-P1-N1-D12
gaattgatcttcccaatagaggtatgtggtcctaataatggttttgaaatgtggagttctgagtgggcaaatcaaacttcatggcatttgagtttccttattgacaatcccaaacagtctacagtttttgatattctcttgggaatctctcaagattttgaaattgctggtaatactcttatgccagctttttctgttccacaggctactgccagatcttctgaaaatgcggaatcctctgcatgatctggaatttgtgttttctttcgcttgttcgtttgtttaattcaataaaggaaattaggcatgaccctcttgttgagtatgctctgcctatttgaaaatttccacacctc

SEQ ID NO: 39694 - DNA, 346 bp, Glycine max
  Clone ID: LIB3139-008-P1-N1-D2
atcgctcctcagatctgaaccaacggacacgcacagcacttgtgagaggtaagaaaatagaatttcttactcgagtacatcctcactcagtcgctctactgtctgtgctgtttgacgttaagaatgaaattatgcgatataaccccactaacactatgctgacgcgaccttttgagagctgtcagactctaaaatctttgagagatcagagctctttggcatatgcgaactagcttaatggatgatctacactcaaataaagcgcattactatgtgcactgagcctggttgcatgttcttcccagtgactcatggaatccatgctgtgaggcttggcaatgatgcc

SEQ ID NO: 39695 - DNA, 358 bp, Glycine max
  Clone ID: LIB3139-008-P1-N1-D3
aaaatggtggccacagttggtattcctgagaatacaggtatagcattggcctgtgctatgaatagttcttttagggggcgtgccagttctgatatttacaccatctgctctcaagactgtgaattatggaatcctgcttgcacaaaagcaatgactatgtcatttaatccaaacccgtgttctgatgcatggagtttggaatttctgaagcgtaccggatttcattgtgatatcatttgtgtcactggatggactgccactccaatgcaggatgttcaggttacaattgattggtttatttcctctcaggaatgtgttcccaggacttattgtgttttaaatccacaaaatccttttg

SEQ ID NO: 39696 - DNA, 361 bp, Glycine max
  Clone ID: LIB3139-008-P1-N1-D4
cgctcctctaatgctccgtttggcatggcactctgctggaacctttgacaagggcacgaagaccggtggacccttcggaaccatcaagcaccctgccgaactggctcacagcgctaacaacggtcttgacatcgctgttaggcttttggagccactcaaggcggagttccctattttgagctacgccgatttctaccagttggctggcgttgttgccgttgaggtcacgggtggacctgaagttccattccaccctggaagagaggacaagcctgagccaccaccagagggtcgcttgcccgatgccactaagggttctgaccatttgagagatgtgtttggcaaagctatggggcttact

SEQ ID NO: 39697 - DNA, 362 bp, Glycine max
  Clone ID: LIB3139-008-P1-N1-D5
cggctcgagcgtgtctgtgtttgtttccactttgcaaatcagtgtgtacccaggaatctcttgattgagaaagtgtgttagggtaagagttgtgtcgtgtccacgagacactgggagaaagaaagtgtgtgtgagttgttgtaaactgaattttcatttttctttagccatgagcacacttgttcgcaacaccaccctcaccttcagccgcagaaacagatacgagcttcttggtttgcagggcaaagacaagatggtcaagtccatcagctacagacgcagaagggcaaagcaaaggcaaatctttctcacaacctacaagttatcttctttgaatagtaacacttttggggagccgacac

SEQ ID NO: 39698 - DNA, 330 bp, Glycine max
  unsure at all n locations
  Clone ID: LIB3139-008-P1-N1-D7
ggtttcgctttttttcttttcagatttatatatagagagaagaaaaaaaaagtagcagataacaggtttgagagagagagagagagagtgtgaggttttagattgagagagagagcgagagagagagattgttgctgaaaagaagatgaagaagaatttatctgaatttctcttgtgttcatcgatcaaactctgatcgtttaatttttttttaaattttctcttctaatnntttttttttttttttttnttttaggaagaaattaaacataaattttgggcccaagccatttccattgaattttccaccaccgcaccagaacccccttt

SEQ ID NO: 39699 - DNA, 344 bp, Glycine max
  Clone ID: LIB3139-008-P1-N1-D8
cgaagaacttctttacagctcagtggagaatgaagaacacatatgtgtgctgaaggaccgcatcaagccaattatcttcaccatggcaaggttggatcgagtgaagaacatgacaggacttgcggagtggtacggtaagaacgcgaagctgagggagctggtgaaccttgtggatgatgctggagacaggaggaaggagtcaaaggactaggaagaaaaggccgcgatgaagaatatgtacagagctgatcgagacctacaagtcgaacggccgattcagatggattgcatagtatatgaaccatgtgaggaatggagagctttaccgagtgatctgcgacacc

SEQ ID NO: 39700 - DNA, 356 bp, Glycine max
  Clone ID: LIB3139-008-P1-N1-D9
atcaactatttcaaaagggagaagaaaaggaaaggaaacaaaacgcacaaaggattattatagcaatggcagaacaaaaccaaaaccagacaactgaagctggaaggcaccaagaggttggccacaagagccttatgcagagtgatgctctttaccagtatattctggagaccagtgtctacccaagagaacctgaatccatgaaagaactgagagagttgacagcaaaacacccatggaacatcatgacaacctctgcagacgaagggcaattcttgaacatgctccttaagctcatcaatgccaagaacaccatggaaattggtgtctacactggatattcacttcttgccacc

SEQ ID NO: 39701 - DNA, 360 bp, Glycine max
  Clone ID: LIB3139-008-P1-N1-E1
attataaatttgaataaatctgtcaaatttttctaacccaagttccaaacttctctcgtttccatcacaattctctccgaatcctggtgggtctgcacccgtttgagtgtttgaccgatcgttcgttcattgcagcgtaatctgctgcaaagcgagcgatgaagggtgttggaggatatcacgattggccttattacgcgtcgccgacttcaaatttatcagctttcgcggcgccttttagtgtgaatccctacacttcaagcgaggcttcgtctcagttcatggatacagctgaatccgcagaaaccctgcccccaattcagtttcaaccctaccggtacgatttcttttcgggccccg

SEQ ID NO: 39702 - DNA, 358 bp, Glycine max
  Clone ID: LIB3139-008-P1-N1-E10
tccttctttacttagttcaactcaacccaaggagataattaatatggctctgggaagaggcagtgcagtggttctactactttgcttcttggtgcttcagtctgagatggctcgtgctgccacttatagagttggagattctaggggttggacctttaacaccgttacctggccccaaggaaaacgctttagggcaggtgacacacttgcgttcaattatagtcctggggctcacaatgtggtggcggtgagcaaggctgggtatgatagctgcaagacaccaagaggagccaaagtgtatcggtcagggaaggatcagatcagacttgctaggggacaaaactacttcatctgcaat

SEQ ID NO: 39703 - DNA, 358 bp, Glycine max
  Clone ID: LIB3139-008-P1-N1-E11
ctcgagccgaaaacatatcacacaatatggcattcaagggctatttccttctcggcctcgttactcttgttcttgttaaatcttccaaagttacatgcgaagaagaatcagttaatacagtttcacccattattgacatttcactcaatcggaagagtttcccagaagggttcatatttggggcgggatcttcctcgtaccagttcgaaggggcagcaaaggaaggtggtagaggaccaagtgtatgggataccttcacccataattatccaggaaagatcatggatagaagcaacggagacatggcaattgactcatatcacaactacaagaaagatgttgggatgatgaaggatat

SEQ ID NO: 39704 - DNA, 359 bp, Glycine max
  Clone ID: LIB3139-008-P1-N1-E12
ccgcaacgactctgttggctgatgggtgcccatatttgtatgctatggtgcatgatagttcagtgtctacaataccaggtgattttgtcattggtgttaagttgacaaccataaacaatatgtgtgcatatgggctcaatcctggtatttcaggttctcgtcttttgggcaccattcctcagtccatttcacagcaaactgtttggaatcaaatggcaacagtgagaacaccattgaattttgattctagcaagcagagcttttgtcaattttctattgaccttctcggtggaggaattttagtggacaaaactggagattggatcacacttatacaaaattctccaattagtaacttg

SEQ ID NO: 39705 - DNA, 360 bp, Glycine max
  Clone ID: LIB3139-008-P1-N1-E2
cgctctgtttctgtctctgtgtttgcggctgaggattccgaacgagcgaccttcttcgtttctcgcaaagtttaagtcatcatgggtaaggaaaagactcacatcaacattgtcgtcattggacatgtcgactctgggaagtcaactaccactggtcatttgatctacaagcttggaggtattgacaagcgtgtgattgagaggttcgagaaggaggctgctgagatgaacaagaggtcattcaagtatgcttgggtgcttgacaagctcaaggctgagcgcgaaagacgaattaccattgatattgctttgtggaagtttgaaaccaccaagtactactgcacagtcatcgatgccccc

SEQ ID NO: 39706 - DNA, 358 bp, Glycine max
  Clone ID: LIB3139-008-P1-N1-E3
ctttttggagaaacggatgggttcacatcagggtgcagcatcagatggccttcatttttaatggtcaagttgtcatagatacctccttacctttcagaagtaataattatagcaagattttgactgttagtccaattgctgcaccagcatcaaagagagctcaattttctgttaagggtgtcaacctgatacgccctgccactaggttaatgtgtgctttagaagggaaatatctggtctgtgaagatgctcatatgtcaatggatcaaagctccaaagagcctgatgaacttcagtgtgtccagttttcatgctctgtccctgtgatgaatggaagaggatttattgagattgagga

SEQ ID NO: 39707 - DNA, 358 bp, Glycine max
  Clone ID: LIB3139-008-P1-N1-E4
caaatgcgctgggcaataggaaaataaactcgggagcaaaacacaaggccatagctatgcatgttgaagaacgaacctgcgactactgacaacactgcacagtactggttgactgcataggcgtgccaggaaaactgtgattctagtgcgatcgcgaggatgactacaccaaccaggtgttatcgaaacacacgctcacgctgctctgcgactcatgcgatcattccggtgtcaccatactttgtttcaccgacacctttgttctgtgccagaactgcgactgggagaagcacaaccctgcgctcttcgattccctttacgaacgaaggcccctcgaaggcttcactgtgtgcccttc

SEQ ID NO: 39708 - DNA, 362 bp, Glycine max
  Clone ID: LIB3139-008-P1-N1-E5
gaaaagctttctagctggtcataatatcaccattactgatggtattgacaaaactagtgcaactttgcaatttagaaagttagcagattgtgattttctcaagagaaactttaagcagatgtctaatgttttgtgggtggctcctgaggacaaggcgagtttatggtcacaacttcattatgtttcgtgtaataatctggaaatgcaagaagcttatcttgtcaatctcgtaaatgtgttacgagaattgtatttgcacagtccagaggaagctcgccaattgagaaggaaagctctctctcgtattgaatggctgcaaaaagctgatgtgcctaccatagcacagattgaagagttccatt

SEQ ID NO: 39709 - DNA, 354 bp, Glycine max
  unsure at all n locations
  Clone ID: LIB3139-008-P1-N1-E6
gaacgagcgactgaggaaagagaacgttcagttaacgaaagagctcgcggagatgagatcgctctgcaacaatatttattctctcatgtcaaattatgcaaacgccaacggaaaaggaaacagcaacggcagttacaaaactaaaggcggcgccggtgtcgcgcacggaagtttagagtccggcatgacggcggtgaagctgctggatttgatgccggtgatgcgaagctccgatgaggacgcggcggagatggcgccggaggagatgaatccgaagctgtttggtgtggcgattggagcgaatcgagcgagagagggaggaggtggnttatatttttgaggtttatttttttt

SEQ ID NO: 39710 - DNA, 309 bp, Glycine max
  Clone ID: LIB3139-008-P1-N1-E7
cagactcagtatatgatactgagaaactggctgagaggatagctaaactgtctggtggagttgcagtcatcaaggttggtgctgccacagagaccgagcttgaggatcgtaagctccgaattgaggatgccaagaatgcaacttttgctgccattgaggaaggtattgtacctggtggaggtactgcactggttcatctttccactcatgtcccagcactcaaggacaagcttgatgatgcagatgagaggctaggagccgacattgtgcaaagggcactgatagctcctgcagaattgatggctaaaa

SEQ ID NO: 39711 - DNA, 355 bp, Glycine max
  Clone ID: LIB3139-008-P1-N1-E8
taatagttgagtacttgggaacctttgcaaacacaacacctctcaccctggcacagtggttcttttgcttgttggttggatttttgggcatgccaattgctgctcgcttaaagaagatccctgtttgaagcacctgaatggataaaaagcagtagttggttaccgttagttgttgcattgcttcaaggtccattatgcctttacattcactaactcgcctggtaatgcttgaggctttcttgggttggaatcagaaatcgagcagtgaaacaaatcactggagtgatgtctcgaagcagtttgactagcattaaccatttaaccattttatttaatacgttgtttattttctagg

SEQ ID NO: 39712 - DNA, 358 bp, Glycine max
  Clone ID: LIB3139-008-P1-N1-E9
gtcttcttctctgcttgtatgcaacggccacagccatagtcgcctgaaaccgattgttgttgcagggaaaacacagagatccgggtcgacccgttgcagatccgatccaaataagaaaagatgaatattttcaggttagccggggacatgacccatttggccagcgtcctcgtccttcttctcaagatccacaccatcaaatcctgcgccggtgtctcattgaagactcaagaactctatgcactcgtttttgcttgtcgctacctagatatctttactaattatgtatctctctataataccactatgaagttgatattcttgggaagctcattttctattgtgtggtacatgaggg

SEQ ID NO: 39713 - DNA, 359 bp, Glycine max
  Clone ID: LIB3139-008-P1-N1-F10
cctcaaatcacgtcgcgcccacgtcatctctgagttccacgcgtcctacaaagaactcttccacgccctcgaagccaacctcgccgaagccggcaaagccagcttcggcgatgccaacgaccaagccgccttcaactttttatcacgctccctcttcaactccaaccccgccgataccaaactgggcctcgacggcccaaaaatcgttcagaaatgggttctctttcagatcggcccaattctccgattgggcctccctcaattcttagaagaatccaccatccgaaccttccgtctcccgttctctctgataaaaaaagattaccagagactatacgatttcttctacgagtcttccg

SEQ ID NO: 39714 - DNA, 348 bp, Glycine max
  Clone ID: LIB3139-008-P1-N1-F11
aactaaaccaaaaccggacacctgaagctggtaggcaccaataggctgggcacatgagtcttatccagagtgatgcagtgtaccagactttatgtgcaccaggtgtctacccatgagaacctgaataacatgaaagaactgagagagatgacagccaaacactcatggacacctcagccaacctgtccagacaaggggcgattattgaacatgctctttaagcttatcaatgccaagaacaccatggctattgctgattacactgcatatgcacttctagccaccgatctcgctgttcctgcagatggaaagatctcggccatggctattaacagggagaattatgaa

SEQ ID NO: 39715 - DNA, 356 bp, Glycine max
  Clone ID: LIB3139-008-P1-N1-F12
ggtggatgggaaaactgactttccctcagggcacttcccgaagtgttaagagaatgcctctttctatagggggaggagctggtgcaaagaatgctattctcatgaatatgccaaatgctgttctttcaatgtggagatattttgttggagatctcgtctttgaagtttctaagatgacttctccctacattaaatgtacagtctctttcttcatagcatttggaaatttggctgatgacaccatcaattttgaggcttttccccacaagctggtgcagtttggagagattcaggaaaaagttgtgttgaaattttcacaagaggaatttcttacagcttggtcaactcaggtgcgt

SEQ ID NO: 39716 - DNA, 361 bp, Glycine max
  Clone ID: LIB3139-008-P1-N1-F2
gcgagcatggctccgaagaaggttcttctcctttgcggggacttcatggaagactatgaagccatggttccatttcaggcattgcaagccttcggtctcgccgtcgacgccgtctgtcccggaaagaaatccggcgatgtctgccgcaccgctgtccatgtacttgccggcgcccagacttatagtgagacggttggtcacaatttttcactcaatgcaacgtttgatgaagttgatgctgcaagctatgatgggttgtgggtgccaggtgggagggctccagagtatcttgctcatgttcctggtgttgtggaactggtgaccaagtttgtcagtttgggaaaacaaattgctagcattt

SEQ ID NO: 39717 - DNA, 362 bp, Glycine max
  Clone ID: LIB3139-008-P1-N1-F4
ctcgagccgaatcggctcgagcccaaaggtgacaatggagaaagtttgaaactatttggggtttggttgaagggtcaaaatgggaaagagaattcaattggtaaatgccgcaagagagggcgccaagactaccctattgctgccactgccaaggaattgaagaccctagtctagtacaacatatcatattcttgttaattaattaccttttaagaaacaactattgtagccagatctagaacacaaagaaaaatactctcttagtcatcatggaaaatgtatggctctttcatggtatttcgttgtttggtttgatggtgcaagggacctaataaaggatactaatgatgatgattaagatt

SEQ ID NO: 39718 - DNA, 363 bp, Glycine max
  Clone ID: LIB3139-008-P1-N1-F6
aatggtcaaccttattatatataccataaaccataaacccttcgccaccaccaaccattagcttcttccatcctcagagcttgccgtcaacaacgattcctttcggttttctgtttctctggattcattttcatttttacggctaccagaatgtccagctcatcggaatattcggcattttccggcccccgcccggccaagtcgccggccgagaagtccactttctctcagacttgtagtctattgagccaatacatcaaggaaaaaggtgccttcggagaccttaccctcgggatgactcgcacccccgatacttacggttcccctgagacatcgtgtcactctgcaacaaccatggagttg

SEQ ID NO: 39719 - DNA, 353 bp, Glycine max
  Clone ID: LIB3139-008-P1-N1-F7
ggaggctattttttgccctttgggtcattgtacacctttaccctttcctcaagggtgtcatgggaaaacaagaaggtgttcctaccatcattttggtctgggctattctcctgtcttcaatcttaaccctactttgggtgagaatcaacccattcttggccaaaagtgatgtggtgttggaaatttgtggattgaattgtgactaaaggtaacaaaaaatggaagggcatgccatggtttgacgttttacactgataagatctgcaacatgcataagtttttggtcaaagacacatgacacatccctggatctgttggtgagaactgccactgcaaaaaaaaatgttatttgt

SEQ ID NO: 39720 - DNA, 351 bp, Glycine max
  Clone ID: LIB3139-008-P1-N1-F8
tacagagaaatccataagttaaatccctttattcaattttaaaggactctgataaatcttttcaactgagactattgcgaaaaatcagtaaaagcatgcattcaatatcttgatctaaagcccaagctgtgagcctctccttccctatcagactctcaaaagcaattgcatgaatataacagtaggtatctgccaggttgaatgtaagatttaatatatcattcacaattaaaatataattttggccacttccagtggcgtgtccctgaatgaaattggttcgaaggctgtatccaacaagttacagcagttgattgggtagctaagacagagttaagggcaatatccttc

SEQ ID NO: 39721 - DNA, 351 bp, Glycine max
  Clone ID: LIB3139-008-P1-N1-G1
cgcgttctcttcggtcaattcctcgaatgttctaccttgagccatgtccaacctcgttcagattcgcgtcgccgccgacgcaggcgacggcttcgactctccggcgaagcagaaagccgccaaccgcagcgcctacagcattcgcccctttctctacctccgccgcgccaaacagtttctcggcgccgccaagttcaagctcttcttaggtctatttgctctctccggcatcggtttcgtctcctccagactcagttcgtggatgggatggaaccctcaccaatcctcttcggtttctttcacttcaaggggtggttatactgtgcttataaacacttggaggcaaaaatc

SEQ ID NO: 39722 - DNA, 352 bp, Glycine max
  Clone ID: LIB3139-008-P1-N1-G11
ctgaaaaggaagatcaagaaaaacccaaaaagattgataccagattgagacaaagaatagatcctcaatacaatgaggttcaggctcagatggaaacaaatttgtttaaattgtctcttgatgatgttgaaactcctaaaggttccatgttggatcttaaaatttctcaatctaaaattgcacttcccaaaaacacagttggaggaaccattctgcgtagtgatctattggcaaattttttgacagagggcaattttagagcaagtgttgatttgcagcgcactcatcgtattaaaggaatgattaaaatggtggccacagttggtattcctgagaatacaggtatagcatt

SEQ ID NO: 39723 - DNA, 357 bp, Glycine max
  Clone ID: LIB3139-008-P1-N1-G2
gaatgattaaaatggtggccacagttggtattcctgagaatacaggtatagcattggcctgtgctatgaatagttcttttagggggcgcgccagttctgatatttacaccatctgctctcaagactgtgaattatggaatcctgcttgcacaaaagcaatgactatgtcatttaatccaaacccgtgttctgatgcatggagtttggaatttctgaagcgtaccggatttcattgtgatatcatttgtgtcactggatggactgccaccccaatgcaagatgttcaggttacaattgattggtttatttcctctcaggaatgtgttcccaggacctattgtgttttaaatccacaaa

SEQ ID NO: 39724 - DNA, 354 bp, Glycine max
  Clone ID: LIB3139-008-P1-N1-G5
ttctctctccgtttttgtttgcatcattaatagacccaaatggacccgaacccgacagcctcgctggactccgacccggacccgcttcgcgtgaagaggaagaccctcgaggccgtgctcttgcagtgtcagagagctctcgaatcgattaacgctacttctgctactgcttcttcttctgcttctacttacgtggacgaagaggattacgacggtgaaggtgaagccactgcatcagctgatcccgatgccgacgagttatgtgatctgctgaaatctagagttgaatgtccggcctttcttcaacagttggagtgtgctcgggcttcagtttcacagaatatagatgaagaa

SEQ ID NO: 39725 - DNA, 362 bp, Glycine max
  Clone ID: LIB3139-008-P1-N1-G6
gttgatcatactctctttgtgtaaattgagtgattgtgcggtataaagacacgtgtgttgagcatatatatacagaccctaaggtggcgggcatgcttgtgagcatagatcagaccacattattgggagataaggttacatatagacgtatgtgggcctaataaaccaggtgataagcagtgtcatgtgtgtgcatagatagcaacatccaccctgataggacttggactccaccacactctgtctacagatcaagagcctgcataaacagaactgaatggagcactgacctcagactaggctttagcatctgttcttcttgtcaaacaggattacgcttgaattcaacaccaagggaggaa

SEQ ID NO: 39726 - DNA, 358 bp, Glycine max
  Clone ID: LIB3139-008-P1-N1-G8
ggaatcatcaacctttactctctgatcggatcatgccttgtcggtagaacctgctactgaataggtcgacggtacacaaaggatgacgagggcgccatctaatttgccggagcactattgatgggtttgtccatcaactatacatttctcatgttcggccgattgggagccggcatcggtatcggatacgccctcatgatagcccacgtatacaccgtcgaggtctacccggcctactctcggggctgagtcacatccttcccagaggatcgttgctttaattctatatatatatctccatcgttatatatatatatatgacaatatgattctgcaggttgagattaatggagggata

SEQ ID NO: 39727 - DNA, 357 bp, Glycine max
  Clone ID: LIB3139-008-P1-N1-G9
aattttaataaaccgcgatcacaggttgccgcaccttaaaaccggaaacaaaagcaatcgttacttgatttcaagaatttctcaatttcttcctacttctttgtgtacgatttcttaagggaaagaaaatcactctctgtgctggtcacagacttcgtgaatcattttcttttccactcctagtttatttgctgaacactctcctatttgatataggacttcgtgtcagatttaaactttttctgtttctttctcagttctctgtttaatttcaagttcaagctggtgaaattttggattagtgctcccactctcctatctggtataggacttcgtgggtagacttttctacttctc

SEQ ID NO: 39728 - DNA, 148 bp, Glycine max
  Clone ID: LIB3139-008-P1-N1-H1
gcatcaacaatcaacaatcaacaatcaacaatcacaaatagaaactcactctttcgaaaaaaccagaatttgaatatgacgttagggtttgagggttatagttataccacaacacttggaaggaagagggtcgtgttattacacaatg

SEQ ID NO: 39729 - DNA, 177 bp, Glycine max
  Clone ID: LIB3139-008-P1-N1-H10
ctcaattcgttagccctcactctcttgttccccaggctcccttaaatggtgcggggaatggcctaccagcttacctacaaccatttagctattttcaaggtttcctttaacctgtttcacatggactgcttttttatttttactactattttactcttaatttttattagattattt

SEQ ID NO: 39730 - DNA, 361 bp, Glycine max
  Clone ID: LIB3139-008-P1-N1-H11
gctcccaaattcattttaatcctaattctgcactgcttgatcattcgcttggtctactaaagatgcagatattcgctaaaactttgaccgggaagaccatcacccttgaggtggaatccttcgacaccattgacaacgtaaaagctaagattcaagacaaggaagggatcccacctgaccagcagagacttatctttgcgggtaaacaacttgaggatgggcgcacccttgccgattacaacattcaaaaggaatcaaccctccatctcgtgcttcgcctcaggggtggcatgcaaatctttgtcaagactttgaccgggaagaccatcacccttgaggtggaatcctcggacaccattgg

SEQ ID NO: 39731 - DNA, 359 bp, Glycine max
  Clone ID: LIB3139-008-P1-N1-H12
gagaacttgcatgatcacatttatgatttattatgaatatatacactacctaaacagataaaattacccctatttccactccacccacagatttgatgaaaactgtccctagctagttatactactactccatggagcttcccagcttgattacctcaaaattcaatactaagctgcccaataaagaaaaataaaatcttaaaattttacagaaacagctaccgggaaggcttaaaataccccagagcagcacacaacttagaaagagatagctagctaataacatgacacaaacacacacttataatctcaacgctgccgcaaagtgccaacatcatcgtacatccccaaccttagcc

SEQ ID NO: 39732 - DNA, 316 bp, Glycine max
  Clone ID: LIB3139-008-P1-N1-H3
tcggttgggggccgaagttgtttgacctgaaccttttaagtcccgaggggataaattggctgggctcgtatcacgccacatgtaggaatattctggcgccatatttggatgaagttgaaaatgcatggctgaagaaagccactgaacctgtaggtgcatgagctgtgtttggagttgaaaagttaaataacttaaagatggttcagcgtaattttagtgtcttccgtatccataatactgtaatctagattttagatatcattgggaatggttattccttcaaattactatgcacagcatatataatatatcaata

SEQ ID NO: 39733 - DNA, 366 bp, Glycine max
  Clone ID: LIB3139-008-P1-N1-H4
aaaaaaaaaaactcttgatcattattaatggcctctcattccccaaagagagaaggcccttattatcttaatattgtactattccttaccattctcatctccatcatcaacccttcacaccaagacccttcttcccctctccccccaataaacccaagactcaccaaagcctacacagcactccaagcatggaaacacaagatcacctcagaccccaaaaacttcaccttaaactggtgtggccccaatgtttgcaactacactggcatatactgtgcaccagccctagatgatcctcacatctacactgttgctggagttgacctaaaccatgccaccatatctggctcattgccagaagaactt

SEQ ID NO: 39734 - DNA, 385 bp, Glycine max
  unsure at all n locations
  Clone ID: LIB3139-008-P1-N1-H5
caagaattctttgatggaaattttccagtggattcttggttaccaatttttgtgaattgtctttatcctgtaagtcaattaccttcagaagctgtcgttgtaaatgttacatgtggtagtggacgtggtggtttattcatcactgnttgttttttttcttttttttctatttttttttttttttttctttttttttttttcttttcttttttttgtttataacttattttttcttacttttttctttcttatttattatttttcttttctctactttaattctttttttccttaactcctttttatatctttatattatttttatctcttacttatattctcattctattttttccttcttttttttacctttactttttttttt

SEQ ID NO: 39735 - DNA, 363 bp, Glycine max
  Clone ID: LIB3139-008-P1-N1-H6
ccgccacttctgaatctattgaatcaacaatcatgtcggacgaagagcaccatttggagtccaaggccgacgccggagcctccaaaacctaccctcagcaagccggtaccatccgcaagaacggctacatcgtcatcaaaggccgcccctgcaaggttgtggaagtttcgacttccaaaactggaaagcacggtcacgctaagtgtcactttgttggaattgatattttcactgccaagaaacttgaggatattgtgccctcttctcacaactgtgatgttcctcatgtgaatcgtactgattaccagctcattgatattgctgaggatggatttttgagtctgcttactgaaaatggtaaca

SEQ ID NO: 39736 - DNA, 204 bp, Glycine max
  Clone ID: LIB3139-008-P1-N1-H7
ggtgggaaaaaaaaggataaagaaaagatggaggaaaggaagggaaagaaccaccttttcttcttttggggatgtaatggagtttacctacatgttctttctcctctcatttcttttctcttttatttattttggcttctaaggctatctatagccgtaacacaaacatttttttgacaaaaaaaaaaaaaaaaaggcgggccg

SEQ ID NO: 39737 - DNA, 359 bp, Glycine max
  Clone ID: LIB3139-008-P1-N1-H8
aagagattgctggaagcaaggacactgttggacagtatgagagtcacactggcttcacccttccaggactctaccgtgttgttcacggtattgatccctttgatccaaagttcaacatcgtctctcccggtgccgacatgagcatatacttcccatacactgaaactgagcgtaggttaacagagttccaccccgacattgaagagcttctttacagctcagtggagaatgaagaacacatatgtgtattgaaggaccgcaacaagccgatcatcttcaccatggcaagacttgaccgtgtgaagaacatcacgggacttgtggagtggtatggcaagaatgcgcgcctccgcgagttg

SEQ ID NO: 39738 - DNA, 376 bp, Glycine max
  Clone ID: LIB3139-009-P1-N1-A1
aaatgcagttcgtagtatttttgttgcgcctttcagaggcggaaggcccattcgggtggttacatttccgaataccattgtgcagattgaaccagacatgaattcaaggtttcagcttttgagtaccactaccaatggtgattttgttcaagggaaagatctcgcaatggttaaagttaatgtagcatgtgctgctgttggcttgacatcaagttacactccaactccattgttggaatctggtttgcaaaaagacagagggttaattgtggagtattttggaaggatgtcttacgttgctcataacgttaatcagccccaagagaaagatttgttagagggaaatttttcctttgatattaaatctcgctctaga

SEQ ID NO: 39739 - DNA, 369 bp, Glycine max
  Clone ID: LIB3139-009-P1-N1-A10
caacaaatggattccccccactttccttcatttgcatctctcagagttcttctgtttggtttctgcgttataactttgtttcctgagtttgtagtgagcataacaaggcactacacatttaatgtggagtacctgaacgtcactagattgtgccacacaaggaacattctgagtgtgaatgggaaattcccaggacctcgcttggtggcaagggaaggtgatagggttgtggttaaggtggttaaccatgtctcaaacaatgtatccattcattggcatggcatccgtcagataacaactgggtgggctgatggaccagcatatgtgacacagtgccccatacaaaccaaccagtcatacacatacaac

SEQ ID NO: 39740 - DNA, 368 bp, Glycine max
  Clone ID: LIB3139-009-P1-N1-A11
ctttcccccagggcacttcccgaagtgttaaaagaatgcctctttctataggaggaggagctggtgcaaagaatgctattctcatgaatatgccaaatgctgttctttcaatgtggagatattttgttggagatctcgtctttgaagtttctaagatgacttctccctacattaaatgtacagtctctttcttcatagcatttggaaatttggctgatgacaccatcaattttgaggcttttccccacaagttggtgcagtttggagagattcaggaaaaagttgtattgaaattttcacaagaggaatttcttacagcttggtcaactcaggtgcgtcctacaacaactctgttggctgatgggtgt

SEQ ID NO: 39741 - DNA, 199 bp, Glycine max
  Clone ID: LIB3139-009-P1-N1-A12
ggcaggctgcacacactgtcatggcctaaggcctatctagaagggacagagcgcgagatagctataccatggctgtacttgagcccattccagatgtggcaggcactcataacaactctgaagactactgacaaggctattctgctgattgagaacgcaacttacgacttcatacctttaatgagcaccattaacttgt

SEQ ID NO: 39742 - DNA, 368 bp, Glycine max
  Clone ID: LIB3139-009-P1-N1-A2
aaaaaagagtagctagcactagctagctaaacacagtacgagtagtgatcataggcaagcaaaagcatattcataatatggcaaccatggaagacatgaacaacatgagtggtgaaattacacttccaggcttccgattccacccaactgaagaagagcttcttgatttctaccttaaaaacatggttgttggcaagaaacttcgttacgatgtcattggtttcctcaacatctatcagcatgatccatgggacttgcctggtttggcaaaggttggggaaagagagtggtacttcttcgtgccaagggacaaaaagcacggaagcggaggaaggccaaaccgcacaactgaaaaagggttctggaaa

SEQ ID NO: 39743 - DNA, 371 bp, Glycine max
  Clone ID: LIB3139-009-P1-N1-A3
caacaagtactgcagattataactctagtagaagtcgtaagccaattgctgtggttggtgaagctgggttgagaccacctgatttccagcaagaccctaatcagaaagcatatgcatatctacaatccaaaccaccttaagaaagagcttaagacaaggctagtagtagttcatgcacaaagccaaaagaagctgtggaatctgatcctagacaaaatcaagcagttgcccaaaagttacttcagatggtcaaacacccaagtcagagatgatcgacatcataggggttgtgaacataggggcagggggcaacaagaagatccagttgtcttcactctggaagaatatgaaaacagaaaggcccatacaaa

SEQ ID NO: 39744 - DNA, 372 bp, Glycine max
  Clone ID: LIB3139-009-P1-N1-A4
cttttcttcttcaattcatatcatatcaattagatttgttttcagagtttgctagtgagataccatggacaactacaacagcaatgacttttggaaattcagtgaccagttgaggcttgaatctggtttggccaatctgtctctgaatgattattccatttggagcaacagctacagctccaagaggcctgatcagaggaggaactttgatgtcaagggcagtgatttcaacaactcatcaaagccttttgatgatgatttcaatgatggctggaagatcaccaattccaatggaccccttttctctatgcctcacaacaacaacactcacactcttgaagttggaggcttcaacaagggaggaatctattc

SEQ ID NO: 39745 - DNA, 329 bp, Glycine max
  Clone ID: LIB3139-009-P1-N1-A5
cagaggccaattctttcgccgcttcttctctctttccaacgcttccccctgtggtgttctcgtgttgctggtaacaatatggttgttgacgctttgaatgaggatttgagaatcaacggagcagttgaaccgttgcctgaggactttgatgcaacagctgtaatcatagatcccgtgcctttggcagttgtagacaatggcattgtcaaggaggaggcgcagatcattaaaggaaaagagaaaagagaaatagtactgggaagaaatattcatacctcgtgtctagaagtcacagagcccgaggcagatgatgaggtcactggggaccg

SEQ ID NO: 39746 - DNA, 372 bp, Glycine max
  Clone ID: LIB3139-009-P1-N1-A6
gtcgtttccttcccttccctaacgatctgaggaagacaccaagcttctctccacgcccttcttgggtaatctgaagtgcagcgatggcggatggattgcactcgcggcatccatcagtagttcagaagttatctggacagtcttatttgttgtctaggcttgcccctactcactcaagaaactattccacaactggtagttacttcaatggaggcttgcagtcttcgggtttggttccagtcatggcacatgcaccggctgagaaaggagtgtctggatttttgttggatttcatgatgggaggagtgtcggctgctgtgtccaagacggctgcggctccaatcgagcgagttaagttgctcatccaaaacc

SEQ ID NO: 39747 - DNA, 350 bp, Glycine max
  Clone ID: LIB3139-009-P1-N1-A7
aattagaaagaaaattttactctgctagatctgatgaaaatcacgagaagaaagaaacaggtaatgtagagtccactgacaaatggacaagtggggatgaccctaatcagaaaactcgcaaagacaatggagaagatggaaaatgtgatacaagagacaatccaagtagttccagcactaatggaaaaccttctgctgtggaggaagaagaagtgattctcttcaggcctctagcgaggtataattctgcaccattgtacgcactttttccccctcatgagcagatgtcatcaccaaaagacaaggatgataaagtcttgccttctgatgattgtctgcgccgtactaca

SEQ ID NO: 39748 - DNA, 368 bp, Glycine max
  Clone ID: LIB3139-009-P1-N1-A8
cggctcgagcccaagtgaagaaaaaagggttgccttggacacttctcaccttgttttctggatttgctatgtgacgtagtttagggacaagggaagggcagaagagattgagggaaagggagactgaaagtgggagaaataaaggaatggaggacgactaaaatgagaagaaagaaacagaaaatttcaaaattatttcaagcatcaattcaagtctaaatccaaaacttactaaatagccatccttgaattgagttatgttaatttgaaagaagctacgtggcatcaagaatgggttcaggtgattggtttaagacaataattagctcaagaaaatcaaaagaaggaagatcaaagaaattaaagac

SEQ ID NO: 39749 - DNA, 371 bp, Glycine max
  unsure at all n locations
  Clone ID: LIB3139-009-P1-N1-A9
ttatcatttaagaaaaatcaattgcattcagaagtaaggaagtcaagttctgacagtcatgctggacagtcatatagacagatttctgatgcaccttctttgaatggccaaacttttagcatgcagaaaggtagtactgtcccttctcctaagccgtcacccgtgaagccttctgtagctatctctaaagcttcaaaatctcttgtcaacacctcctctacgaagttgccagtagcaaactcaaaagcaccttctttgggagataaacagaaaatgtccgttgatgttaaggtggaaccaaaatatattgaacgctgtgctaaaaantttgttgaagattcagaagatgatgaggataataaaccattgag

SEQ ID NO: 39750 - DNA, 375 bp, Glycine max
  Clone ID: LIB3139-009-P1-N1-B1
gttcttcatcatagtcttaaacattaaaccttagcaaaactcaacaatgctagacatcaaaggctacctcgtactcttcttcctatggttcatatcaaccattctgatacgttccatcttcaagaaaccacagcgtctaagactcccaccgggtcctccaatttcaatacccttgctgggacacgcgccatatctccgttcactgctccaccaagcattgtacaagctatcactgcgctatggacccttgatccacgtcatgatcggttcgaagcacgtggtggtggcgtcgtcggcggagacggccaagcagatcctcaaaacctcggaggaggcattctgcaaccgtcccttaatgatagcgagcgagagcct

SEQ ID NO: 39751 - DNA, 369 bp, Glycine max
  Clone ID: LIB3139-009-P1-N1-B10
ggtgaacgaacgaggactcgtgacaacaatttgcttggcaaatttgagttatctggaattcctcctgctcccagaggtgttcctcagatcactgtttgcttcgacattgatgccaacggtatattgaacgtgtctgcggaggacaaaaccactggacagaagaacaagattacaattaccaacgacaagggcaggctttctaaggaggagattgagaagatggtgcaggaagctgagaaatacaagtctgaggacgaggagcataagaagaaagtggaggccaaaaatgcattggaaaattatgcctataacatgaggaacacaatcaaggatgacaagattgcttccaaactgtcttctgatgataag

SEQ ID NO: 39752 - DNA, 368 bp, Glycine max
  Clone ID: LIB3139-009-P1-N1-B11
ctcagattcttccactgccctcatgacaatttttccatcatcatcaacagaggaacatagtccgaggaacagccaccacatgtatggcagggagttccgatcgatgttggacggactcgacgaggaagggtgtgttgaagaaccggggcatcaatctgagaagaagcgtcgactaagtgtggaacaagtgaaggctttggagaagaactttgaggttgaaaacaagcttgaacctgagaggaaggtcaagcttgcccaagaacttgggttgcaacctagacaagtagccgtttggttccaaaaccgccgagccagatggaaaaccaaacaattggagagagattatggtgtcctcaaagccaattatg

SEQ ID NO: 39753 - DNA, 291 bp, Glycine max
  Clone ID: LIB3139-009-P1-N1-B12
ctcgagccgtagaagcttggctagtgaagactctgatgggctaacccctagtgctgtgttctcccagatcatgaatccaaaaggtcgttaaggttatgcagtagtaacaacactttcactacatacgcggtcaacccactcaagttctgtagtgcaatctgctttcaccaaatttgaatgttactcgttattcattttcttaatattgctattcctttgtatgttgtttctaatttattatgattatgtaagttgtaatttgtgaccatgttatataaagattgaagagca

SEQ ID NO: 39754 - DNA, 356 bp, Glycine max
  Clone ID: LIB3139-009-P1-N1-B2
cggctcgagattaaatggcacgtttcatctactacgacacgaaaccccgatccagagaaactcctccttctcctcaacatatccttcatttatctcacctttctcttcctcaaaacctatctccacccttcttctagtcctaatattgttcatgcctccacaaaaatcttcaaccatgctagaatgctaagtgacatcagtgttgatggctgcactgatcttcacaagtactcagattatgactccaagtgcttatatgtcaaatccaatgttcactgcaggtcaaaagggtacataaactatctccaaatcttctactgcagctttggccactccccaattttgggtcattcact

SEQ ID NO: 39755 - DNA, 368 bp, Glycine max
  Clone ID: LIB3139-009-P1-N1-B3
aattcctccgatgcttcctcgtctggcttggtggagtgggcgatccctctctcacggcttgctgttgcctcctcccacctccagcaccaggtttattgccaagtgtttgaataagaacatgggcgtggacaataatttgcttgccaaacctagaaggcgtgctaattttcggttatgcaatgtgtcatgttacacttctgaagtattggagattcaatctgatgctcctacactgcatgttctgtttgttcctggaaacccaggtgttattttattctacaaggactttgtggaatttctatatgagttgctggagggaactgcttctgtcacagctattggccatgtttctcactcaagaaagaact

SEQ ID NO: 39756 - DNA, 376 bp, Glycine max
  unsure at all n locations
  Clone ID: LIB3139-009-P1-N1-B4
tatcactccccaccacctcctcacccttaccctcagcctcgccctcacccttaccgtcaccctcaccctcacccccatcctcaccctcacccacatccacaccctcaccctccctacgtttacccctccccaccacctcctcctaagaagccatacaagtacccatctccgccacctcctgtccatcactaccctcaccctcaccctcccttcgtccattactctcctccaccatctcctaagaagccatacaagtacccatcacctccaccaccagtacaccctccttacactccccacccagtttatcactctcctccaccaccttctaccaacaagccttacatctatgcgtcacctncccctccttaccact

SEQ ID NO: 39757 - DNA, 371 bp, Glycine max
  Clone ID: LIB3139-009-P1-N1-B7
ggaaatttttcctttgatattaaatctcgctctaggttggaaaaagtttcctctacaaaagcacaatttgttagtggaaaaaccttcaaatatgatataattggtgctggttcacattcttcagaagattttcctgaaaaggaagatcaagaaaaacccaaaaagattgatgccagattgagacaaagaatagatcctcaatacaatgaggttcaggctcagatggaaacaaatttgtttaaattgtctcttgatgatgttgaaactcctaaaggttccatgttggatcttaaaatttctcaatctaaaattgcacttcccaaaaacacagttggaggaaccattctgcgtagtgatccattggcaaattt

SEQ ID NO: 39758 - DNA, 367 bp, Glycine max
  Clone ID: LIB3139-009-P1-N1-B8
ctcacaaatccctcccccaaacattaatatgcagtgagtttgtactttcagttcaatatccttaatttctctcaggtcatccttagttataatatcgcctactcatactcaacaaaagaaaccagcatacatacatacaccaaccgctgcacagctcctcttctctaattatttggtctcgagtctcgtggttgtgtaagtgtgtccaaacaaaccataactagcaagccacagccacagtcacattcacatccttaattactttgcaaatattcaacagctccccgcgtgtttgacattccaggtctagagaagagagaaagaaaaaaaaagaccatgatgaacatgctttcggtgtcagcagcgc

SEQ ID NO: 39759 - DNA, 369 bp, Glycine max
  Clone ID: LIB3139-009-P1-N1-B9
gttactcatttcttctcatcttctttttcttccctttaaaattattattgcgtgcaaacacaacaacaacttcatcaccaacacgaagaacaagattagcgttatgggtctcttcctttctaggaatttggcttgcaaattcatatacccttttcttttttccaataaggtttcaaaggatttgttccccaagcagttggagaacatgatgtctctggtctctcctcgtactggcaggcatttgcagcgctatgacaaaggctgtcgccaagttgtgggatgcattccttacagatacaagaacaatggaacacaggataaggaattagaggttcttgtgattagtgctcagaagggtcatggaatgca

SEQ ID NO: 39760 - DNA, 372 bp, Glycine max
  Clone ID: LIB3139-009-P1-N1-C1
gccatctcttataatcactcaggattgacggctacccatcagaacactgaggtcaccatctatgctaccctcactcttcccagtggtaccaccactttggtccacctttggaacgatggtcctgtgtcttctggtacccctgcaatgcatgctatgacttcttctaacacccaatccaaggaaagcttggatcttctttctggctccagtcaagcaggaagtgggaattcacttaggagaagaagaaatgtccatggagtcctgaatgcactgagctgggggattttgatgcccgttggtgccataatagcaaggtatttgaaggtgttcaaatctgcagaccctgcttggttttaccttcatgttacatgc

SEQ ID NO: 39761 - DNA, 368 bp, Glycine max
  Clone ID: LIB3139-009-P1-N1-C10
agaatattggagaagagtacaagcattactgggagaccaacatgttcctccaaacccaagaacttgacagttgggggttggatgaggccttatctgggtactacgattcgagttccccggacggcgctgcttcgtctgcggcatctaagaacattgtttccgagaggaatcggaggaagaagctcaatgaaaggctttttgcgcttagatcggtggtacctaacattagcaagatggacaaggcttcgattatcaaggatgctattgagtacatccagcacttgcacgagcaagagaagattatccaagctgagataatggaacttgaatctgggatgccaagaaagagtccaagctatggttttgag

SEQ ID NO: 39762 - DNA, 367 bp, Glycine max
  Clone ID: LIB3139-009-P1-N1-C11
ggattctatgaaacactcaaattgatgaaagcaggtggaaggaaaatagttttgacaattgttgaggatgaagatgaagaaacaacaagagagctgattaagttattgaaggctgcggtatctgcaaatcgagacttaatatttggttacgttggagttaaacagatggatgaatttgctgaaaattttgatattgatactaaactaccaaaaatggttatttgggataaaagtgatgattacctttcagttgttgattcagaaaccatagagggggaggaccaaggtactcaaatcactaaatatctcgaaggatacagggaaggaagaaccataaataaaacatttagaggcccttcactaatgc

SEQ ID NO: 39763 - DNA, 366 bp, Glycine max
  Clone ID: LIB3139-009-P1-N1-C12
gtttgtttttttgttgagaagagagaatggctgtggcgtcgtcatcatcccttatcacgttgaaggtgaaaccttgcattttcgggtctcctcggagatccgcggtggttcggaattgtgcgaagtcaacggcggggacaatatcgacgagttggagcctggacagctggagggcgaagaaggcgcttcagcttccggagtacccagatgcgaatgaattggacctagtcctccaaaccctctcttcttttcccccaatcgtcttcgccggcgaggcgaggaatctggaggagaagctcgctcaggctgccatggggaacgcttttctccttcagggcggtgattgcgccgagagcttcaaggaat

SEQ ID NO: 39764 - DNA, 346 bp, Glycine max
  unsure at all n locations
  Clone ID: LIB3139-009-P1-N1-C2
gaacgactcggtatttctcttcctctaaagaccgagtccgactcggagggcgaagaaggcaaactcagtaacctttccttccttcactacacgcgagagagacctcagtgtctgagacgcaggcaacgtgcattttcccatacgaaggacaccatcacgccgttttcgcgtccccgtcgtttcggatccatcgtcatcgtttttggcttcttcttccattagtttagttgagaatcaatcccaagacaccgagctggagccttcgnccgccaccgncgntgtcttcaacggtcagatccggtaccgatcgccgtcctccgccgagctcttcgacggcagcagcaac

SEQ ID NO: 39765 - DNA, 372 bp, Glycine max
  Clone ID: LIB3139-009-P1-N1-C3
aagccccactcaaccaccacaccactctctctgctcttctggtacctttcaaggttttaaagtattaagatggcagagacattcctatttacctcagagtcagtgaacgagggacaccctgacaagctctgcgaccaaatctccgatgctgtcctcgacgcttgccttgaacaggacccagacagcaaggttgcctgcgaaacatgcaccaagaccaacttggtcatggtcttcggagagatcaccaccaaggccaacgttgactacgagaagatcgtgcgtgacacctgcaggaacatcggcttcgtctcaaacgatgtgggacttgatgctgacaactgcaaggttcttgtaaacattgagcagcagagc

SEQ ID NO: 39766 - DNA, 369 bp, Glycine max
  unsure at all n locations
  Clone ID: LIB3139-009-P1-N1-C5
cttgatagtactcaagcaagctaaggcattattatggctgatcaagtgttgctaattggtttggtctccaccatagtgtttgcatacatactatggagaaaacaaagcaagaaaaaccttccaccaagtccaaaggcccttcccataattggccacctncaccttgtgtccccaattccccaccaagatttttacaagctctcaacccgccacggacccatcatgcaacttttccttggctcagtcccttgtgtggtggcttccaccgcagaagccgccaaagagttccttaaaacccacgaaatcaacttctccaaccgccccggccaaaacgtcgccgttaagggcttagcctacgattcccaagac

SEQ ID NO: 39767 - DNA, 373 bp, Glycine max
  Clone ID: LIB3139-009-P1-N1-C6
ctcattaggtattccctcctaaaaaacaccaaaccgtctgaaaccttaatttacccaaagtgataaaacactctcttttagtcttacccatctaattaacacttgtaatttctctcttgcattcaaccactttagcagcgatagcttcggccaccgcaccggcacaagctccccccactactccagcgggcttcgacctaacaccaccccagccctccggcggcaccaccgacatagtgcaagttcttcaacaagcgaactcgttcaacatcttcctccgcctcatgaaaaccacccaactaataaaccaactgaactcccagctcctaaccataaagtccggcgggctcaccatccttgcccccgacgacgg

SEQ ID NO: 39768 - DNA, 369 bp, Glycine max
  Clone ID: LIB3139-009-P1-N1-C7
ctcgagccctttcacactctttctctctctgtctgtctctctcagaatttgctcctctctccgattccttttattaattggagttttctcgctcctttttctttccctgaaaacatttcatcttcgtattgatgtcggaaaagggtcggccacttcccaaatttggtgaatgggatgtcaatgatccagcctcagctgaggggttcacagtgatttttaataaggccagggatgagaaaaagacaggtggcaacccagagtcaccaggaaagactgctactgatcctcatagcaaacctgcagtagagcctggcaaaactcagactaaaaaatggttttgctgcatgcaaaacccttctgccgaatcat

SEQ ID NO: 39769 - DNA, 369 bp, Glycine max
  Clone ID: LIB3139-009-P1-N1-C8
gggagccgcggattcaacaaatgtttctcttcgcaatgaccacgctcaggttctcaatttagttctaagaaggaatgagaatgccctagtacggaactacaagcatggtttctcaggattcgcagctcgtctatcaaaggaggaggcagcctcaattgctcacaaacctggtgtggtgtctgttttccctgaccccattctgaatctccacacaacacgttcctgggaattccttaaataccaaacccacgtcaaaatcgacaccaaaccaaatgctgtctccaattcttcttcctcgtcagacatcattcttggcgtcttagacacaggtatatggccagaggcggcgagttttagcgacgagggtat

SEQ ID NO: 39770 - DNA, 369 bp, Glycine max
  Clone ID: LIB3139-009-P1-N1-C9
ggtgctcagcaccactgagcggttaatagcttttgctctgctagttgaggcttattcatcccagaaaccggcttcaaatcccttcataagctttattgtaaatgcttcctgtaatgaagggtccgaaaaagttgagagggcatttattctacagctactaggtcttgatagctccaacagtgggaaagagtttcttaaacagtctgcatcagattatgtgaaaggatttgatcagtcattacatgagttccctccactagatcagttgaagcagcagttttctgataaagttcatctagaaccatatcgctgcttgtttaaagatggttctgtaaaaaatgtagtcccagacccagatgttcccccaag

SEQ ID NO: 39771 - DNA, 372 bp, Glycine max
  Clone ID: LIB3139-009-P1-N1-D1
tgatcttgagaagattcattttgaaaggttctctggtgaagagacaattgcaactgttcacttgaagttggaaaacaagaatgattttgacctcggcctcaacgcgctcgattatgaggtctggcttggtgatgttagcattggtggtgcagaactcaccaagtctgctaaaattgaaaaaagtggaattagttatattgatattccaattaccttcaggcctaaggattttggctctccactatgggacatgattagaggaagaggaactgcttacaccataaaaggacatattgatgttgacactccctttggagcaatgaagttgctcatcagcaaagaaggtggtactacccgtcttaagaaaaagaa

SEQ ID NO: 39772 - DNA, 364 bp, Glycine max
  Clone ID: LIB3139-009-P1-N1-D10
acaaaacttcaatttctctatgattatgataatgatgggttcaaacccaaaacccgttgtgcacctttctcttcttctcctggtcctcttttcttcctcaaccgaatccctgagatttgaaatccaatccgggcacaccaaatgcatctccgaggatatcaagagcaattccatgaccgttggcaagtaccaaatcgttagccccaacgagggtcaacctctgccagatgcccacagattcaccgtcagggtgacttcgtcttatgggaacaactatcactacggggatcgcgttcagacggggcagtttgcgtttgctgcagtggaggctggagattacatgacttgcttctgggctgtggat

SEQ ID NO: 39773 - DNA, 367 bp, Glycine max
  Clone ID: LIB3139-009-P1-N1-D11
caaagtggttcaacctctttgcaacacaacttcatcatgttcaaaaccttactgatagagtacatggaaccaagctgcatcaaggtgaagactggcatcacaacgagacagtcaaacactggacttataccatagatggtaaggctacaacatgtctggagagtattgaatccattgatgaacagaacaaaacaatcacctacaagctcttcagtggagacattgatcataagtataagaaatttaagttcacctttcaagccattgataaggatcaaggcggtgcttttattaaatggacggttgaatatgaaaggcttgctgaggaggttgatcctccatatggatacatcgaatacctgcacaa

SEQ ID NO: 39774 - DNA, 368 bp, Glycine max
  Clone ID: LIB3139-009-P1-N1-D12
gtgaacacttacaaggccatgtgcagggatagccgctttgtacctggagctgcagcaactgaaattgagttagctaaaagggtgaaagacttctccttcaaggagacagggttggatcagtatgctatagcaaaatttgctgaaagttttgaaatgattcctagaactttggctgagaatgctgggttgaatgcaatggagatcatatcttctctgtatgcagaacatgcatctggaaatgccaaagttggcattgatttggaagaaggcgtatgtaaggatgtctcaaccttgagcatttgggatctccatgtgactaagttatttgctcttaaatatgctgcagatgctgcatgcactgtactacg

SEQ ID NO: 39775 - DNA, 368 bp, Glycine max
  Clone ID: LIB3139-009-P1-N1-D4
attatgaagaaaagggacaaacttagttgtcaagtggggggcaacccatactccatgggagggactggtttggccaatagattactgagtaagggcaatgatattctgtgttgcgattatgctaagtttgatgggttgattaccaaacaaggtattagccagatgggagaaatgataaacacggtttgtggtggtgatgaaaaattgatgcgtgaaaggacgcacctgctgttggcttgttgttcaaggatggcaatttttaagaaagatgtttggagagtttaatgtggaatcccttctggatttccgctcacagatatttgcaatagcatttttaatgagatgctcattagatatagctattaaaa

SEQ ID NO: 39776 - DNA, 299 bp, Glycine max
  Clone ID: LIB3139-009-P1-N1-D6
gactaaacaacagcacaaaagcgggttactgtctgtgcaggctaccatctctctctgtctgtcttagtgcctccttgccagaagttaaaatggcccaagaaactttcctattcacatctgaatcagtgaacgaggggcaccctgacaagctctgtgaccagatctccgatgctgtgctcgatgcatgcttggagcaggaccctgacagcaaggttgcctgtgaaacctgcaccaagaccaacatggtgatggttttcggagagatcacaaccaaggccaacgtggactatgagaagatt

SEQ ID NO: 39777 - DNA, 369 bp, Glycine max
  Clone ID: LIB3139-009-P1-N1-D7
ctcgagccgtggagattggatcacacttatacaagattctccaattagtaacttgttgagagttgctgcttggaagaaaggctgtttaatggttaagattgtgatgtctgggaatgcagcagtcaaaaggagtgattgggcctcattggtacaagtatttttaacaaacagcaacagtacagagcattttgatgcatgtaagtggacaaaatcggaaccacattcctgggaattgatcttcccaatagaggtatgtggtcccaataatggttttgaaatgtggagttctgagtgggcaaatcaaacttcatggcatttgagtttccttattgacaatcccaaacagtctacagtttttgatattctctt

SEQ ID NO: 39778 - DNA, 369 bp, Glycine max
  Clone ID: LIB3139-009-P1-N1-D8
gtacatagcttgaaaacacagtgcttgtttagactagtatcttccatggctccgaaagatagaatcctggttttgggacccacaggagccattggaagacacatagtttgggcaagtgtaaaggcagggaatcccacttttatattggttagggacacccctgcctctgttaacaagccaaggcttgtcactgctgctaatcctgaaaccagggaagagctcattcagagcttccaaaattctggagttactctaatccagggagatatgaacgatcatgaaagtctggttaatgcaatcaagcaagttgatgtagtaatctgctcatttggtagactactaatagaagaccaagtcaagatcgttgca

SEQ ID NO: 39779 - DNA, 365 bp, Glycine max
  Clone ID: LIB3139-009-P1-N1-D9
ggagaatgttaatcgcgatatctcgggaaaatttgcgggttggttgaataagcgagataggagattattgagtttaccagtgtcggcaattcaggcagatataaccgtttctaagactggtaacggaacagtgaagaccattgccgaggcgattaagaaagcgccagagcatagtactcgccggttcataatttacgtgagggcaggaaggtatgaggagaataatttgaaggtggggagaaaaaaaacgaatgtgatgttcataggtgacgggaagggcaaaactgtcatcacagggaaaaagaatgtgatagatggcatgacgacattccactcggtatccttcgctgctagtggcgctggat

SEQ ID NO: 39780 - DNA, 368 bp, Glycine max
  Clone ID: LIB3139-009-P1-N1-E1
aaatccacaaaatccttttgtgttaaataggtgggtgggagaactgactttcccccagggcacttcccgaagtgttaagagaatgcctctttctatagggggaggagctggtgcaaagaatgctattctcatgaatatgccaaatgctgttctttcaatgtggagatattttgttggagatctcgtctttgaaatttctaagatgacttctccctacattaaatgtacagtctctttcttcatagcatttggaaatttggctgatgacaccatcaattttgaggcttttccccacaagctggtgcagtttggagagattcaggaaaaagttgtattgaaattttcacaagaggaatttcttacagctt

SEQ ID NO: 39781 - DNA, 367 bp, Glycine max
  Clone ID: LIB3139-009-P1-N1-E10
tgaaagtgtgagtcacatcttcctgtgccttataggtcttgtgacccttttggctggcagcattaaaagtgcaccaacaaacgtgaagccaagccattatgctgcacccttcaataggagcggttttccttctggatttctatttggaataggctctgcagcttaccagatagaaggagcagcagctatagatggcataggaccaagtatatgggacacctatactaaacagcaaccagggaagatttgggatcatagtgatggaagtctagcacttgatttttatcaccggtacaagagcgacataaagatggtgaaagaagttgcgttggattcatacagattttccatctcatggtccagaata

SEQ ID NO: 39782 - DNA, 367 bp, Glycine max
  Clone ID: LIB3139-009-P1-N1-E11
ctcgagccgatcgagaccgacgaggagcgcaggagcggctcctccaccccggcatgcgtcgagatggagggtgaggacggcaggagatgtgccaggggccccggcggtctcccgctctgggtctggcactagacgagagtgttagaagacgatggtcgttttggcattgtgttaaagaggcgggtttttttttttttttttttgctttgatacgagataccacggtttccggcgtttcatgggatctcgaatgaataacagggggaaaaaaaaaggcgttagatgggacttattcagggataagggatattgattcccaagacagactttagagaagacaatttcctctaatggtttctagacaagc

SEQ ID NO: 39783 - DNA, 369 bp, Glycine max
  Clone ID: LIB3139-009-P1-N1-E12
ctcaaacccatttccttgatatcttagttatctaagtacctcaattaatcccttaattgcaagcatcatggctgaggagaaacaccaccaccacttccaccaccacaagggcgatgatgtgcctggcgaggttgattataagaaggaggagaagcaccacaagcatcttgagcaccttggggaacttggtgctgcggctgccggtgcttatgccttgcatgagaagcatgaggccaagaaagacccagagcatgctcacaggcacaaggtagaagaggagattgcggcagcagctactgttggtgctggtggttttgtcttgcatgaacaccatgagaaaaaggaagttaagaaagaagatgaggaagc

SEQ ID NO: 39784 - DNA, 190 bp, Glycine max
  Clone ID: LIB3139-009-P1-N1-E2
ctcgagccgattcggctcgagatcccagttccaggtgtacgtgaggtctcttcctatgcagaaagtaactgttttccctatcacagaccagatacatacatatctggctctggtgatgaggtaactagagtaatgacaagggcaactgcaaattattacatggattcttaaaattaagaatggcttaaaa

SEQ ID NO: 39785 - DNA, 343 bp, Glycine max
  Clone ID: LIB3139-009-P1-N1-E3
cttttgagtaccactaccaatggtgattttgttcagaggggaagatctcgcaatggttaaagttaatgtagcatgtgctgctgttggcttgacatcaagttacactccaactccattgttggaatctggtttgcaaaaagacagagggttaattgtggagtattttggaaggatgtcttacgttgctcataacgttaatcagccccaagagaaagatttgttggagggaaatttttcctttgatattaaatctcgctctagattggaaaaaggttcctctacaaaagcacaatttgttagtggaaaaaccttcaaatatgatataatttggtgctggttcaca

SEQ ID NO: 39786 - DNA, 341 bp, Glycine max
  unsure at all n locations
  Clone ID: LIB3139-009-P1-N1-E4
gaaggtggcccgcaaggtgagaacatttcaggaacttcatgacatggactctctggagcgagctgacctgcttattcaaacaggtgggttatcttctacggaagtgcaagacattgagacggtactggacatgatgccttccttgacacttgaggtaacttgtgagactgaaggtgaagagggtatacaagagggtgacattgtgaccctccatgcttggataaatgttaaaagggggaatggcctgattggagcccttccttaatgaatgggccanacacancatgnaggatggctacctgtttctgcaatggatgcggtagctaagattgaagaggttc

SEQ ID NO: 39787 - DNA, 368 bp, Glycine max
  Clone ID: LIB3139-009-P1-N1-E6
gagaaactttaatcagatgtctaatgttttatgggtggcgcctgaggacaaggcgagtggatggtcacaacttcattatgtttcgtgcaataatctggaaatgcaagaagcttatcttgtcaatctcgtaaatgtgttacgagaattgtatttgcacagtccagaggaagctcgccaattgagaaggaaagctctctctcgtattgaatggctgcaaaaagctgatgtgcctaccatagcacagattgaagagttccattcgatgcagaggatgatgaatgctcctgattcaaatgataatattgatctactgttgagcattgatttgttgggtttacaaggagcaggtttagcttttcaaacaagat

SEQ ID NO: 39788 - DNA, 360 bp, Glycine max
  Clone ID: LIB3139-009-P1-N1-E7
cctgtgaatacaggactagcattggcctgcgctctgaatagttctaatagggggcgcaccaagactgatatttacaccatgtgctctcaagactgtgaattatggaatcctgcttgcacaaaagcaatgactatgtcatttaatccaaacccgagttctgatgcatggagtttggaatttctgaagcgtaccggatttcattgcgatatcatttgtgtcactggatggactgccaccccaatgcatgatgttcaggttacaattgattggtttatttcctctcaggaatgtgttcccaggacctattgtgttttaaatccacaaaatccttctgtgttaaataggtggatgggaaaactg

SEQ ID NO: 39789 - DNA, 369 bp, Glycine max
  Clone ID: LIB3139-009-P1-N1-E8
ggaacaccgagatgtgcattacatatatttggctggttacaagagcttcatggaggcaattgatgctatagacaatggaatcaatcggtatgatacagaccaacctccaagatatgtgaataatactcatttatcctcaagagtaggaaggctaaatttagattggacagatcctgatcagtcacctgagaaagaaaatgaggcctttcaacgtgcaatggctcttgctggcagtgagtttctggatagtgttcgatttcatgtcaattcatggttaccagcaaggtcaattgtaatggagaccctagaggctagacatactgttgatcctagtggagaaattctagttttgactaaattgtgtccttg

SEQ ID NO: 39790 - DNA, 371 bp, Glycine max
  Clone ID: LIB3139-009-P1-N1-E9
ggcaactctaaccccaatgtgttgctcatgtgtcaagacccagattcagtggtcaacaccatcagcatggctatcaactaaaactaaaaccctcagttttgaatttcagacctcagaagcaaaatagaagcatcagaatccgatcaccctctgcctccaacccgaaccagaatgagtcttcttctcccggattatactctgccaagaaattcgacctcaccgcatccaacgtcgacctcgttctcgacgatgttcgcccttacctcatcgccgacggcggcaacgtggacgtggtgtcggtggaagacggcgtggtatctctccgtctcgaaggagcatgcgagagctgtcccagcttcaccaccaccatg

SEQ ID NO: 39791 - DNA, 368 bp, Glycine max
  Clone ID: LIB3139-009-P1-N1-F10
gggaaagtcttacccaactgtgagtgctgattaccagaaggccgttgagaaggcgaagaagaagctcagaggcttcatcgctgagaagagatgcgctcctctaatgctccgtttggcatggcactctgctggaacctttgacaagggcacgaagaccggtggacccttcggaaccatcaagcaccctgccgaactggctcacagcgctaacaacggtcttgacatcgctgttaggcttttggagccactcaaggcggagttccctattttgagctacgccgatttctaccagttggctggcgttgttgccgttgaggtcacgggtggacctgaagttccattccaccctggaagagaggacaagcctg

SEQ ID NO: 39792 - DNA, 367 bp, Glycine max
  Clone ID: LIB3139-009-P1-N1-F11
gcaagctagctaggttgaaaatagtttggttttgtagtaagtgaggtgaggtgccaaaatggtgaagataactcttggtactttcgatgactcttttggtgttgcctctcttaaggcttatttggcagagttccatgcaactctgattttcgtgttcgctggtgttggttcagccatcgcttacaacgagcttacaaaagatgcagccttggatccaacggggctggtggcagtagctgtggcccatgcatttgcactgtttgtaggtgtctccgtcgcagccaacatctcgggtggccatttgaacccagctgttacttttggattggccattggaggcaacatcaccctcattactggtttctta

SEQ ID NO: 39793 - DNA, 366 bp, Glycine max
  Clone ID: LIB3139-009-P1-N1-F12
ctcgagccgattcggctcgagcaaagaggggatccaaagaaaaccttcggttagcagtccctcattgggtggtcctactaccattgctgctagacaaagtggagctggaatctcttggctttttccatttgtggacggacatccacctttgggttggcaagatactgcagcatatcttgttttacctattcttcttgtcgtttctcaatacgtttcaatggaaatcatgaaaccacctcagacagatccttctcaaaagaatcaacttcttattttaaagtttcttccactcatgattggctacttctcattatctgtcccatctggactaacaatttactggtttataaacaatgtcctgagcac

SEQ ID NO: 39794 - DNA, 367 bp, Glycine max
  Clone ID: LIB3139-009-P1-N1-F2
cttctattatatatatcaatgttcttgttctgtttgaggcttccatgtgttggaagcagggaaacctcagttttagatagaagaacgattgattagtttttaggaatttagctctctcatgaacagaggacatattaggggaaaaaaaaaagaattgtatgttgggtggaaatgtgtttagttcaaaaagtcgttagtgttttttccctcttgcctttcacatagagccgttactctattaaatattcaaatggcagttatcagaggtttaccgctcggtcatgtgctcgatgctggtgttgttggcttgtaaaggaactggctggtgcttggagggaaagggtgggaaccttttcaattttttttt

SEQ ID NO: 39795 - DNA, 371 bp, Glycine max
  Clone ID: LIB3139-009-P1-N1-F3
cacttgtgacttgacaccaaatggcctccctttacccttgaagtcaccacgaatgatgagaagtgctatacagcttatttcttcaaactggccttattggaaccggacagagggggctgatcacttctttgtggttcctcatgactttggggcatgtttccattaccagagaaggcaattgaaagagggattcttacactactacggcgtgctaccttggttcaaacatttggacagagaaatcatgtgtgcttgaaagagggctcgattaccatccctccgtatgctccaccacagaaaatgcatacccacctaattcctgacaagactcccaggtccatttttgtatacttccgaggactcttttatga

SEQ ID NO: 39796 - DNA, 371 bp, Glycine max
  Clone ID: LIB3139-009-P1-N1-F6
gacttctaacacatacactactctctctctctctcttattggatggccgccaattccagtagccgagggatcaccgccttagggaagcgagtcgccaaccggatctggacttccaacgcacctcctctcacttcaaggaggggagcatacagtagcggctcagtgtacgacaagaaccctgatgatgagatccagtctgggcaggtcccagacgatgtgatccaggcggcaacacaatccggcaaatactgggccccacatccacagactggggtatttgggccccccggaggaggtgaccaaactgcttctgccattcactctgatgcgctggaggagaaggcctggtttcgccccaccagtctcgagga

SEQ ID NO: 39797 - DNA, 367 bp, Glycine max
  unsure at all n locations
  Clone ID: LIB3139-009-P1-N1-F7
aaatgatatcacaatgaaatcatttgtgtcactggatggactgccaccccaatgcaggatgttcaggttacaattgattggngtatcatcactcatgtaagtaatccatccatctatcgtatgcatagctatttattacaaaatttaataatattacactttccaacaacccctgacacagtaatcttgggttccaaaagaaggagaagatgaacgtggatctggaatcattggcagaggcaacttctggggccataggatcactgatcagcaccactattctctacccacttgacacctgcaagaccaagtaccaggctgaggctcgttcctcaggtcgaataaaatacaggaatctcactgatga

SEQ ID NO: 39798 - DNA, 367 bp, Glycine max
  Clone ID: LIB3139-009-P1-N1-F8
cttctttgtctcggtgcgtccattgctccaatccattttttctttttccttttccgactgtaacacccattttccttcccttgtctcattactcctataaataatttatccatctatcttatgcattgttatttattacaaaatttaataatatcacaccttccaacaacccctgccacagtaatcttgggttccaaaagaaggagaagatgaacgtggatctggaatcattggcagaggcaacttctggggccataggatcactgatcagcaccactattctctacccacttgacacctgcaagaccaagtaccaggctgaggctcgttcctcaggtcgaataaaatacaggaatctcactgatgt

SEQ ID NO: 39799 - DNA, 367 bp, Glycine max
  Clone ID: LIB3139-009-P1-N1-F9
catacacactgcactataatagtttcaactccacaatcaatgatcaagatctcactctcatttgatcgctgtctacttcacttctcaatccctatgttccatttcgcatgcgcgcgcttttctgaaccgttaagggacagagaataagagcttcttggtctctcccctgttgcaggttcatgcgaggagacaatggacactttgtttttcgggataaagcttcgtgctcctttggaagttaacaacactatcaaaagggttttccctagaagcaagaggtgcaatgtttctgcaaaacatgttcgttacccatcgaggcatgcttttaggttttgtagccaaaatgtaaacttgttgaggaaacccc

SEQ ID NO: 39800 - DNA, 370 bp, Glycine max
  Clone ID: LIB3139-009-P1-N1-G1
gaccaattctttaatgagcgagagagagagggcgcaatagtagccatagccataatttattgttattatttagggatgagtgaagtgaatgaatgaaaacaaaaacaccgccatcgctcttgtctctcacggttgactctgcggttcttaatctctccgacatctccgatctctcccatgtccctgatcacatcctcctcgacctcttcctggcgaagaatattgaaggctgggaagctgactgagaaagttctgagactttttatagcaactggtaaggatgaagtcctctcatttgttcaggcactcaatatccaacatattttgacccctgtgcttcccaccaggtgttctgaggcaaaatcagact

SEQ ID NO: 39801 - DNA, 369 bp, Glycine max
  Clone ID: LIB3139-009-P1-N1-G10
gagaattacagagcattttccaacacgattacacgaccgaatcaaacccctctttctctccgaagctgcttttaatatcgtactggccttcgattgttctcctctttaatacatactgttctctcttcgatttgagggaacagtacaagagtctgagcatcggttaacccaactgcacaggtagtctccaaataatggagcctcatgatgagactggatgccaggctcctgaacgccccattctttgcattaataattgtggcttctttggaagagcagctaccatgaacatgtgttccaagtgttacaaggacatgctgttgaagcaggagcaggacaaatttgcagcatcatccgttgaaaacattg

SEQ ID NO: 39802 - DNA, 367 bp, Glycine max
  Clone ID: LIB3139-009-P1-N1-G11
ccgggattgatcaaccaccatgtctgacgaagtcaacagcgttttcaagaaatatctcaaccagcttcagctccatcctctcagaaccaaggcaattactgcagcagttttggctggttttagtgatgcagttgctcagaagttatctggggccaagaagcttcagttgagaagggtgcttcttttcatgctctatggtttcgcctactctggaccctttggacattttctccacaaattgatggataaaatctttaaggggaacaaaggcaatgatactgttgctaagaaggtgatccttgaacagataaccagttccccatggaacaacttttgttcatgatgtactatggcttggttatagaag

SEQ ID NO: 39803 - DNA, 369 bp, Glycine max
  Clone ID: LIB3139-009-P1-N1-G12
cgtctctgcaattacgatggcgcccagggacaagactagtgccgttaagcctagcggtaacgccggggtgaaggacctgcattttcgtggagtcaggaagagaccgtgggggaggttcgccgccgagatcagagatcccgccaagaagacccgcgtctggctcggaaccttcgacaccgcggaggaggcggcccgtgcctacgacgccgccgcgcgggagtttcgcggccctaaggcgaagacaaacttccctctcccttcggaaaattttaagaacgcgagccctagccaaagcagcacggtggagtcctccagccgcgaccgcgacgtcgccgccgattcctctccgctcgacctcaacctcgcccc

SEQ ID NO: 39804 - DNA, 369 bp, Glycine max
  Clone ID: LIB3139-009-P1-N1-G2
agaacagtgactggacaaggaaaaagaagcaacttgtgatggcacggacaatttctcttgttttgggtagttctgtgaacagatagtattaatttgttatgtgtatattagttggtacttggtagattagagagggacttgatacatacttagaagatctcactagctgatttcacacgttttgaaatagtctttacaagctaaatcttcttcaattccttcattgaagattgctttgacttgtttgcaatctttctgtatatctataggacaagtagaaagtgggataggttatagatgattatttggagggaaatccttggcccttctagtgtgataaatttaactgtgcacagtccattaagcata

SEQ ID NO: 39805 - DNA, 373 bp, Glycine max
  Clone ID: LIB3139-009-P1-N1-G4
gaaactttaagcagatgtctaatgttttgtgggtggctcctgaggacaaggcgagtttatggtcacaacttcattatgtttcgtgtaataatctggaaatgcaagaagcttatcttgtcaatctcgtaaatgtgttacgagaattgtatttgcacagtccagaggaagctcgccaattgagaaggaaagctctctctcgtattgaatggctgcaaaaagctgatgtgcctaccatagcacagattgaagagttccattcgatgcagaggatgatgaatgctcctgattcaaatgataatattgatttactgttgagcattgatttgttgggtttacaaggagcaggtaaagcttttccaaacaaaattgtttt

SEQ ID NO: 39806 - DNA, 369 bp, Glycine max
  unsure at all n locations
  Clone ID: LIB3139-009-P1-N1-G5
ctcgagccctcttcacaagtgccaatccaatcccagccggtgcagaaaaaccatgaacacgccgtggcgtcggaattgaatgcgcgcgtgcgcacgtgtcaaacgcgacgacagttttcttctccaattcaatactactactactactattactataacatagacggcgtgttcttctttcaaaacccggntcatctttcttttttgttgctgccatattcctcccattttttttccttccttcaatctgctgcttcaatggaaggtttggcttctctcagggttccctttcagaccacccaattccactcttccagacccagaacctctattcttccatcccaagccatttttttccacaaaagaagc

SEQ ID NO: 39807 - DNA, 373 bp, Glycine max
  Clone ID: LIB3139-009-P1-N1-G6
cagcaatattattgtgcaaggcatcaccatttatgctcctgtcacatctccaaacactgatggcatcaacccagattcttgcacaaatgtaagaattgaagattgctatatagtttctggggatgactgtgtggcggctaagagtggatgggatgagtatggcataaaatttgggtgccccaccaaacagctagtgataagaaggctaacatgcatctcaccatacagtgcaaccattgccttgggaagtgagatgtcaggtggaatccaagatgtgagagctgaggacatcacagcaatccaaacagaatcaggtgtcagaatcaagacagcagtagggagaggagggtatgtgaaggacatatatgtgaag

SEQ ID NO: 39808 - DNA, 365 bp, Glycine max
  Clone ID: LIB3139-009-P1-N1-G7
cataaatttgtgaggtttgaggactggaaatcagagtcatcttttagtccagagcaagaagattctattgacagtgggaatcacaaaagaagaccaagtgtgggtactgttttaaagagtataggaagaaggcttgagagtgggtcggagaagatgaagaacttgagaagagcttcagctgtccatcctgtaagtgatggacagaaaaagctgccacctaggaagaaaattcttgatccacagggtccggtccttcagaaatggaacaaaatctttgtaataacgtgtgtgctggctgtctctgtggacccgctcttctcttacattccggtgataaataatgaggaaaaatgtgttcatttgga

SEQ ID NO: 39809 - DNA, 365 bp, Glycine max
  Clone ID: LIB3139-009-P1-N1-G8
gttggatcggttcaccgagatggagtatgagcattgtgtgaaggcctttgattcttatgttagtgctgctaagatgatggatgagttggtggggttctatggttggtgtaaagacacgggaattgcgaggtcttctgagtaccctgatgtgcagagaatcactgataagcttttggggactcttgagggtttcttgaaggagatgagttgtaggccaaagagtcctgagaggaagttagaagtgaaggtaactgtgaatgaatcacaaccagaggcagatatgaataaggtgaaggctcttccagcacctgagactgagagttttacacctccaccacccatgtcggttgcacagcctaataaga

SEQ ID NO: 39810 - DNA, 368 bp, Glycine max
  Clone ID: LIB3139-009-P1-N1-G9
caagaatggcacttcgttgcttggtgatgtccctggctgttctcttcactcttggtcttgcgagagaaagccatgccagagacgaagatttttggcatgctgtttggccaaacactcccattccaagttcattgcgagatcttctaaagcctggccctgcaagtgttgaaatcgatgatcaccctatgcaaattgaagaaacacagtacccgaaaaccttcttctataaagaagaccttcatccaggcaaaacaatgaaagtacaattcagcaagcctccctttcaacaaccatggggtgttggtacatggttaaaggaaattaaagacactactaaagaaggatatagttttgaagagctatgcatc

SEQ ID NO: 39811 - DNA, 366 bp, Glycine max
  Clone ID: LIB3139-009-P1-N1-H10
cggaaccacactggcagagggagccatctcttataatcactcaggattgacggctacccatcagaacactgaggtcaccatctatgctaccctcactcttcccagtggtaccaccactttggtccacctttggaacgatggtcctgtgtcttctggtacccctgcaatgcatgctatgacttcttctaacacccaatccaaggaaagcttggatcttctttctggctccagtcaagcaggaagtgggaattcacttaggagaagaagaaatgtccatggagtcctgaatgcactgagctgggggattttgatgcccgttggtgccataatagcaaggtatttgaaggtgttcaaatctgcagaccc

SEQ ID NO: 39812 - DNA, 378 bp, Glycine max
  unsure at all n locations
  Clone ID: LIB3139-009-P1-N1-H3
agtatagtgctttgggattanctcgaactggttgcagggagagggttaacaacacttaaggacgtggaaccaggaaagtctgcacttgagtttcaatccaagtttctaaacgacaccgttactgagttttactccgaaaacctgtccgcgcttcagtctggatgctgtaaacctgcagaagaatgccagtttagctatgtgaatccaacgacatggacgaagcccacaaatgtgactaatcagagcaacccagattgtgatgcttggaataacgatccaacagttctgtgcttcaattgccaatcatgcaaggctggcttactgcaaaacctcaagactgattggaagagggtggctgttgttaacatcgtattcctt

SEQ ID NO: 39813 - DNA, 369 bp, Glycine max
  Clone ID: LIB3139-009-P1-N1-H4
aaacgatccaaactcttttttcatttgcagcatcaaaatgagtggtagcaacgatggtagcggcagctggagctctaggtttttgaaggtggctagtgcagctgccgctacagccgccgttgccggcggtttatatgccattctttcatcctcaacctctgctagctctgagatggaagtgccgtttggcagcgcacggcgtgagagcaaagaacgtgacgatggtggctccgggtctcatcctcgcgagggtgccaccacggtcagtcgttggaagaaacctgagattggttgggtgaagctgaacgtggatggttcacgcgacccatacaaaagttcctccgctggttgtggtggtgttctgaggga

SEQ ID NO: 39814 - DNA, 362 bp, Glycine max
  Clone ID: LIB3139-009-P1-N1-H5
cttgaacacttttaatcaaaagtcaaggaatctcttgcagttcttaagcctcattttaaccatgaaagtccagtcactgcaattgctgccattcaagagttagaagtactgggaactatggacctcaatgctccactaagggatgaaacacttccaccgcaagaggagcagccaccactgcagcagcagcagcagccaccgcagcaacagttcccaccaccacaacagcagccaccacagcaacacctagcaccacaacaactgccgtcacagccacaggcaccaatatttcagcaaacatatcctccatttcatctgccgcagttccaccatcaccagccgacgctgcagttccagcagca

SEQ ID NO: 39815 - DNA, 371 bp, Glycine max
  Clone ID: LIB3139-009-P1-N1-H8
ctctctagcttggacgagtgaattagattcatcatcaagatgtcgtctctgatagcagaagatgtgaagagcagatcagaggtgtaccacggggacgaaatgtgccaagtgaagtccaaggagcttctcaaggaaatcgccctccccaacggccttcttcccctcaaggacatggaggagtgcggctacgacagacaaaccggcttcgtctggctcaaacaaaagaagagttacacccacaagttcgacaagatcggaaagcttgtctcctacgcgcccgaggtaactgctcatgtccaacaaggtaaaattaccaaactcaccggggttaagaccaaggagctcttgctctggatcacgctcagtgatat

SEQ ID NO: 39816 - DNA, 369 bp, Glycine max
  Clone ID: LIB3139-009-P1-N1-H9
cggctcgtggtgatcgaacagcatgttcaagcttttggttagtagagcagctagggtttcaactccacacaaccacaatgcctttgcttctttcgctttctctaggtatgctcattcattaccatttgcaactgtagaagcagaagagatatcaggctctagggctgctgaagttttgaacctggtgcaaggtaaatgggtaggatcttcaaattggaatacagttgtagatcctttaaatggagactcatttattaaagttgctgaagttgatgaaacaggcattcagccctttgtagaaagcttgtccagctgtcccaaacatggtgcacacaatccttttaaggcaccagagagatatctcatgtt

SEQ ID NO: 39817 - DNA, 363 bp, Glycine max
  Clone ID: LIB3139-010-P1-N1-A1
ctcgagccgaacgcaaccacatcactctttctttcaaatctagggtttcctccttctgcaaccatcaatgtcggcaatcgcggctccccaacacagatcctcgaagacagagtcctacgtggacaataagcgcaaggaggatatccgccatgccaacatcgtggccgcacgctcagtcgccaacgcggttcgcaccagtctgggccctaagggcatggacaagatgatctccacctcctccgacgaggtcatcatcaccaacgacggcgccaccatcctcaacaagatgcaggtcctccagcccgccgccaagatgctcgtcgagctctccaagtcccaggactccgccgccggcgacggcac

SEQ ID NO: 39818 - DNA, 352 bp, Glycine max
  Clone ID: LIB3139-010-P1-N1-A11
gagttgtacaaaaacaacattcaaggaactattccgccagaacttggaaacctgaagagtctagttagcttggacttgtacaacaacaacatatcaggcaccatcccaccttcattggggaaattgaagaatcttgtctttttacgactcaatgacaaccgactaactggcccgatccccaaggaacttgctgctgtttcaagccttaaagtagtggatgtctccaataatgatttatgtggtacaattcctacctccgggccattcgagcatattccattgaataactttgagaataatcctcgtttggaaggtccagagttgttgggacttgtaagttatgacacaaact

SEQ ID NO: 39819 - DNA, 352 bp, Glycine max
  Clone ID: LIB3139-010-P1-N1-A12
ggaatcccttctggatttccgctcacagttatttgcaatagcatttttaatgagatgctcattagatatagctatgaaaaattactgcgccaggctagagctccaagcatgtttttacaatccttcaaaaattttgtttttttgtgtgtgtatggtgatgataacttaattagtgttcatgaatatgtcaagccttactttagtggttctaaattgaaaagctttctagctggtcataatatcaccattactgatggtattgacaaaactagtgcaactttgcaatttagaaagttagcagattgtgattttctcaagagaaactttaagcagatgtctaatgttttgtggg

SEQ ID NO: 39820 - DNA, 352 bp, Glycine max
  Clone ID: LIB3139-010-P1-N1-A6
gcgatctgggacttttctttctcccccacaccacacgcagattcaaaaactcgcgctgctctgctctgcaattccccttccgtttcgtttcgatctcaaaacatgttcttcttcgattggttctatggcattctagcttccctcggtctctggcagaaagaagccaaaattctcttccttggtctcgataatgcagggaagaccacacttcttcacatgctcaaagacgagagattagttcagcaccagccgacccaacaccccacttcggaggaattgagcattgggaagatcaagtttaaggcttttggattgggggggccatcaagttgcccgcagagtctggaaagac

SEQ ID NO: 39821 - DNA, 312 bp, Glycine max
  Clone ID: LIB3139-010-P1-N1-A7
ggggaccacacaccactcggaggttgtcagggtccaatatgatcccaatgtatgtggctatgagagtttgcttgatgtgttctgggctagacatgatcctaccacactgaatcggcagggaaatgatgtgggaacacaatacaggtctggaatatactattacacacctgaacaagagaaggcagccatagagtctttagaacaacaacagaagaagctgaacaggaagattgttactgagatccttcctgccaagaagttctacagggctgaagaataccatcaacagtaccttgagaaaggagggagatt

SEQ ID NO: 39822 - DNA, 323 bp, Glycine max
  Clone ID: LIB3139-010-P1-N1-B1
tgctgaagaagatataggaagacatggaatacctgtcccatcagctatgggaaatgcaactgctagcagaggattagaagtagcagttgctaatttacaggactactgcaatgaactggagaatagattgctttctcggtttgatgcagcatcacagaaaagagaattgaccacaatggcagaatgtgccaaaattttgtctcagtttaacaggggtacaagtgccatgcaacattatgtggcaacacgtccaatgtttattgatgtggaaataatgaatgcagacactaagctggttcttggtgaccaggcttgccaagcta

SEQ ID NO: 39823 - DNA, 357 bp, Glycine max
  Clone ID: LIB3139-010-P1-N1-B10
ttccatttcttgcttcttaatttcttgatcatgtgacttgctggtaaaatcagcattgaaattggggtgcatgcaagcgctgcaaagtggttcaacctctttgcaacgcaactccatcatgttcaaaaccttaccgaaagagtgcatgaaaccaagctacatcatggtgatgactggcatcacaacgaatcgatcaaacactggacttgtaccatagatggtaaggttacaacatatcacgagagtattgaatccgttgatgaacctaacaaaacaatcacttacaagatcttcggtgaagatatcgatcaccagtataaggtctttaaggtcatctttcaagcaattcataaggat

SEQ ID NO: 39824 - DNA, 353 bp, Glycine max
  Clone ID: LIB3139-010-P1-N1-B12
atttttgtgaacaccagaagaaaggttgattggctgactgacaagatgcgaagccgagaccacacagtctcagcaacccatggagacatggaccaaaataccagggacattattatgcgtgaattccgttctgggtcatcccgtgttttaataactactgatcttttggcccgtggtattgatgtccagcaagtgtctctagttataaattatgatctcccaacacagcccgagaactatctccatcgtattggtcgtagtggaaggtttggtaggaaaggtgttgccattaactttgtcacaagggatgatgaaaaaatgctgtttgacatccagaagttttacaatgtgat

SEQ ID NO: 39825 - DNA, 295 bp, Glycine max
  Clone ID: LIB3139-010-P1-N1-B2
cacgtcttaccttccgagacccttttcttgaaggaaactctactccaccaaaaccttgccttttcttggtgaagaagaacaagaagaaaaataccaataataacaacaacaataataataaatatattattgttgttattgttattaaaaattatgacggatgtgctttagttgccttcattcataagctgatattgtttttcatgtgaacatctaatcaatatccatgtctcatttccagtcaacattatcaacgtttattgtgttggagatcattaaagcatacacttttctt

SEQ ID NO: 39826 - DNA, 360 bp, Glycine max
  Clone ID: LIB3139-010-P1-N1-B3
ttggactgcagtcaaagagtcaacgatccacaacatgttttcgaggggcagagggagtgacattggtggccatggcaacacaaacgtggctgaatgggaattaaggccaggaggaatggtcgtgcagaaacgtaactcggatttgaatcaaaattctgcatctaaattcaccatcaaagtcaaagtgaagtatggctcatcctatcaccaaattcaaatcagttctcatgcaagtttcggggaattgaagaaaatgttaacagaacctacaggattgcacgttcaggatcagaagttgatttacaagaaaaaagagagagactcaaagtcatatcttgatgttgagagggtcaaagatgg

SEQ ID NO: 39827 - DNA, 342 bp, Glycine max
  Clone ID: LIB3139-010-P1-N1-B4
gaagagctttgacgtcgcatgccccccttccttaggttcgaaattcggttcgagcaccagttggtcctgctttagtttcataaacaaatgattgtcgtcggcttggttattctaccttctatgtctagaagactgtcttttttaaagatcatcttgtagttgtaacattaaatagtaagttgcactgttgagttacctatccacacattatgatctcacaaggtcttatgaatgctagttttgcgagtttgtattccacatgactaatctgtcttgtagtggcgatgtgattcttacaattgcaagatagcaattgtacgtagaaatatcagttcagtttag

SEQ ID NO: 39828 - DNA, 352 bp, Glycine max
  Clone ID: LIB3139-010-P1-N1-B6
aaaactcccgttttctctctctgtttttccatggccatctgatcaaacttttcttggttctctctctcagtttttgctattctgagtgatgggtatgccctgccgctgttcccacacctcccacatcactgaaatcatcatcaccagcttcttccgccacaagtcttaaattacaacaatttccctcaattattcatcaaccaaccaccttaatagccttttccaatggttccttaaagatccaacttggtcggagtaaacatggcggctagtggaagttccttttccaacatcactagcttccttcgcaaccaacaaccctcttcccaacctctcgattcttctctcttcc

SEQ ID NO: 39829 - DNA, 261 bp, Glycine max
  Clone ID: LIB3139-010-P1-N1-B8
gtcagtttctcacctaacaatagcccagtctcaaagctgcaatcaaaatcaaacgtgttgagttcgcagaattctcttgaacttgttaatgattcgctagaaaacgaatcttgtttgacacttaacaatgacgagctgaggcacaagataagagagcttgaaagtgctttgttgggacatgatacatatattctggatacttatgataccataattccagaagaatctgattcatttatgttagaggccgaaagatggaag

SEQ ID NO: 39830 - DNA, 312 bp, Glycine max
  Clone ID: LIB3139-010-P1-N1-B9
ctcgagccggaacagatccaaggtttaacaaggttttcaacaaggggatggctgatcactccacaatcacaatgaagaaaattcttgagacctacactggctttgagggtcttaaatctctggttgatgttggtggaggaactggagccgtagtcaacatgattgtctcaaagtatcccactatcaagggcattaattttgatttgccccatgtcattggagatgccccatcttatccaggagtggagcatgtcggtggagatatgtttgtcagtgttccagaagctgatgctatttttatgaagtggattt

SEQ ID NO: 39831 - DNA, 358 bp, Glycine max
  Clone ID: LIB3139-010-P1-N1-C1
gttcgtccggttgttcccatcttctctctcgtaccggtcaaatcacacttttgtgtggtgttgggaaaccctaaaccccgttttcggtgagatcgagatcgatcgaacatggatgaggagtacgatgtgatcgtgttgggcacgggtctcaaggagtgcattctcagcggtcttctctccgtcgatggcctcaaggttctgcatatggataggaacgactattacggaggagaatccacttcgctcaatcttattcagctttggaagagattcaggggagatgacaagcctcctccacatttgggcgctagcagggactacaacatcgatatgaaccccaagtttattatggctaatg

SEQ ID NO: 39832 - DNA, 348 bp, Glycine max
  Clone ID: LIB3139-010-P1-N1-C10
tggtttcaacaacaacagcagcatgaatgggggtagacagcaacagcaacagcctcagcctcaggtttacaacataagcaagaatgatttcagggatattgttcagcagcttacagggtctccctctcagtctcaggatcatcctcaatccaaacctcctcagaatcagaacaattccccaaaacctcaaagtatgaggttgcagaaaattaggcctccccctttgccctatgtgaggcctccattgcacaccaccttgccagctgctagacctgctcactttagacaacaaccatcaccaaaccctaataatatagctgagtcaccaatctctgcctacatgagata

SEQ ID NO: 39833 - DNA, 351 bp, Glycine max
  unsure at all n locations
  Clone ID: LIB3139-010-P1-N1-C12
aacatattattaagacacaccccaaaccaaaccacttcacacagaacacatatccattggtggtgagttccaacttctttctttgctttcttttctgtcttttagcttcccaaaggaatatactatcatatatcatagtatatcctctttcttttgtttttgtttttgtttagctgaagttggatcagtatggcaaatgctaaacacacttcacttgcaattctgatcgggaaccttctcttatatccactattctttgttttatttaatgtagatttgctgatcaatacactcttcattttatttctcattcggntctatgatctattggcttttgtagtcggtactatt

SEQ ID NO: 39834 - DNA, 349 bp, Glycine max
  Clone ID: LIB3139-010-P1-N1-C2
cccagctattattcagtctcactatcctttcccggggaccacatctacaagtttgccttctgctgtaagtgggtctttgactgatcctagctctcataccacacaacttggacttcccgggtcaaattttcaagggcccttacctttgtatcaacctggagggaacataggatcgtggggagcttctccacctgctcctaatgcaaatggtggtcggcttgctatgccaccaatgtattggcaaggatattatggtgccccaaatgggcttcctcaattacaccaacaatctttgcttcaaccgccacctggtttatcaatgccttcatctatgcagcagcccatgcag

SEQ ID NO: 39835 - DNA, 354 bp, Glycine max
  Clone ID: LIB3139-010-P1-N1-C6
ctcgagcctattcggctcgagcggctcgagcggctcgaggatctattggcaaattttttgacagagggcaattttagagcaagtgttgatttgcagcgcactcatcgtattaaaggaatgattaaaatggtggccacagttggtattcctgagaatacaggtatagcattggcctgtgctatgaatagttcttttagggggcgcgccagttctgatatttacaccatctgctctcaagactgtgaattatggaatcctgcttgcacaaaagcaatgactatgtcatttaatccaaacccgtgttctgatgcatggagtttggaatttctgaagcgtaccggatttcattgtgat

SEQ ID NO: 39836 - DNA, 336 bp, Glycine max
  Clone ID: LIB3139-010-P1-N1-C9
ctactctcttatctttctcttgttaactaattaaaatgactctcacaaaggccttgttctttgtgaccgctctatgctgcacctctgccgcatatgctgcaaggtttgacatcacaaaccgatgctcataccctgtttgggccgcggctgtgcctggcggtggcaggaggctgaactcgggccagtcatgggctttagacgtgcctgcaggaacgaaaggggcccgcgtttgggcccgaaccggctgcaacttctacggcttgggccttggtgtatgccatacctgttgcttgtcgtggattaatgcttccacttctcctatcttggtataggact

SEQ ID NO: 39837 - DNA, 356 bp, Glycine max
  Clone ID: LIB3139-010-P1-N1-D1
gatgtctggagagttgaatgtggaatcccttctggatttccgctcacagttatttgcaatagcatttttaatgagatgctcattagatatagctatgaaaaattactgcgccaagctaaagctccaagtatgtttttacaatccttcaaaaattttgtttctctgtgtgtgtatggtgatgataacttaattagtgttcatgaatatgtcaagccttactttagtggttctaaattgaaaagctttctagctggtcataatatcaccattactgatggtattgacaaaactagtgcaactttgcaatttagaaagttagcagattgtgattttctcaagagaaactttaagcagat

SEQ ID NO: 39838 - DNA, 347 bp, Glycine max
  Clone ID: LIB3139-010-P1-N1-D10
agttttatcaccaccattggtatcgattttaagataagaaccattgaactagacggcaaacggattaagttacaaatctgggatactgctggtcaggaacggtttcgaactattaccacagcttattaccgtggagccatgggtatcttgctggtttatgatgttactgatgaagcatctttcaataatattaggaattggattcgcaatattgaacaacatgcttctgacaatgtaaacaagatacttgttggcaacaaggctgatatggatgaaagtaaaagggctgtacctaccttcaaagggcaagcacttgctgatgagtatggtatcaagttctttgaaac

SEQ ID NO: 39839 - DNA, 270 bp, Glycine max
  Clone ID: LIB3139-010-P1-N1-D11
caggaggcagaggaagatgattgattacaaggacttgttgggttcattcatggatgagaaatcagggctcaccgacgaccagatagcggataatgtattgggcgtaattttcgcagttcgtgacaccaccgccagtgtgctgacgtggatcgtcaagtacctcggtgaaaaccccagtgtcctagaagctgttaatgaggagcaagagtgcatattgaagagcagggaaaaagggggaaaagataggggtttaaatgggaaagaccccaa

SEQ ID NO: 39840 - DNA, 343 bp, Glycine max
  Clone ID: LIB3139-010-P1-N1-D12
tactccgcgaaggattaccatgacccacctccggcgccgttgatcgacccagatgagctcactaagtggtccttgtacagagccgccatagctgagttcatagcaacactccttttcctttacatcaccgtgttgaccattattggctacaagagacagagtgacaccaaaatccccggtaacaccgagtgcgacggcgttggcattttgggcatcgcttgggccttcggtggcatgatcttcatccttgtttactgcaccgccggcatctctgggggacacatcaaccctgcggtgacattcgggttgttcctgggacgcaaggtgtctttggtgagggcgt

SEQ ID NO: 39841 - DNA, 350 bp, Glycine max
  Clone ID: LIB3139-010-P1-N1-D2
tattattcaatagaaaagaaagaaagatgagtccaacatgggtttttgtgttaggtattattgcagcaatgttggtggttgtgaatggacaatcatcagtgaagccattggtgaagacagtgaaggggaagaaggtgtgtgacaaagggtgggagtgcaagggttggtctgcttattgctgcaatgagactatctccgattactttcagacataccagtttgagaacctcttcgcgaagcgcaattcgccggtggcacatgcagtcggattctgggactaccgttctttcatcactgctgcagcactgtatcagcctcttggctttggcaccactggaggaaagaccagt

SEQ ID NO: 39842 - DNA, 359 bp, Glycine max
  Clone ID: LIB3139-010-P1-N1-D3
ctctttctctctctagaattctcagatttgcggggcgagatgatgcagcagccaggacccggcatggcacctcccaccatgggccagcagccgccgcaacagtaccagcagcctccgccgcagcagcagcaaccctacgtcatgatgccgccgcaggcccaggccccgcaggccatgtgggccccctccgcccagcctccgcctcagcagcagcccgccagcgccgacgaggtccgaaccctctggatcggggatctgcagtactggatggacgagaactatctctatacctgctttgctcacaccggcgaggttacatcggttaaagtaattcgaaacaagcaaactagtcaatctgg

SEQ ID NO: 39843 - DNA, 337 bp, Glycine max
  Clone ID: LIB3139-010-P1-N1-D5
ttccttgtttgagaccaacatctttcatcactttggggaccaacaaaatcgccctgggcatcatgaagaacaacacccttctcttccttgcacttgttgcatgcttcgagactgccacgtctctgcctgttgcaaatgagaactctcagtcgatcactgatcgtctgctgaaatatggcgacgctgagaagcgtgataactctattgcggaccgcctcctcaagtacggcgatgcatataagcgcgaggagtctattgccgaccgtctcctgaactacagtgacaagattcaaaagcgcgaggagtccattgccgaccgccttctaaagtatggcga

SEQ ID NO: 39844 - DNA, 354 bp, Glycine max
  Clone ID: LIB3139-010-P1-N1-D6
ggaatcctttctggatttccgctcacagttatttgcaatagcatttttaatgagatgctcattagatatagctatgaaaaattactgcgccaggctaaagctccaagtatgtttttacaatccttcaaaaattttgtttctttgtgtgtgtatggtgatgataacttaattagtgttcatgaatatgtcaagccttactttagtggttctaaattgaaaagctttctagctggtcataatatcaccattactgatggtattgacaaaactagtgcaactttgcaatttagaaagttagcagattgtgattttctcaagagaaactttaagcagatgtctaatgttttatgggtg

SEQ ID NO: 39845 - DNA, 208 bp, Glycine max
  unsure at all n locations
  Clone ID: LIB3139-010-P1-N1-D7
ctcgagccgttcagaagctgtcgttgtaaatgttacatgtggtagtggacgtggtggttnacccaccantgnttggatttatttttgttttaacattagattttcatatatnaacaaaaggtttcgcacagcactttctatcggaagataattgtttttcttactagatttgatcctttttcatttgctttactttcttttctttttg

SEQ ID NO: 39846 - DNA, 337 bp, Glycine max
  Clone ID: LIB3139-010-P1-N1-D8
agacattacagtttgtattattgtagaagagagagggagagagatggagttgagcatgaaagtgttggtgaaagttgcttcgttgcttttcctattggaattcactgcaacagttgttgatgctcgcttcgatccaagttcattcatcactcagtttctccccaatgctttagccaacaattactatgttaaatccacaacataagcatgctgtaacagctgtccttgcacaaaatcaatccctccacagtgtctttgtttcatatattgtagaaacatttcactcttcattcaaaacttgtttttgccctcgctcaattcctccacagtgtcattt

SEQ ID NO: 39847 - DNA, 316 bp, Glycine max
  Clone ID: LIB3139-010-P1-N1-D9
ccctcttaataccaaatttgtaggggttatacaagggtcgatggcttcttcagaggttgagtaccgttgctttgtcggtgggctcgcttgggccactgacgaccaagctctcgagagagccttctctcagtacggcgaaatcgttgaaacgaagactatcaacgatcgtgagactggaagatccaggggttgcggatttgtgaccttcgcctcggagcagtccatgaacgacgccatcgaagggatgaacggccaaaaccttgacggccgtaacatcactgctaacgaagctcagtcccgcggtggcggtggctat

SEQ ID NO: 39848 - DNA, 356 bp, Glycine max
  Clone ID: LIB3139-010-P1-N1-E1
caagattgttgctgtagaagagaagaaagagattgaagagacccagcagaccgacaaggacagatggaagggtcttgcctatgatatctcagacgaccaacaggacatcacaagaggaaagggtttggttgactcccttttccaagctccacaggatgctggaactcactatgctgtcatgagctcctacgagtaccttagcactggacttcgccagtacttggacaacaacatggatggattttacattgctccagcttttatggacaaacttgttgttcacattaccaagaacttcatgaccctgcccaacatcaaggttcctctcattcttggtatctggggaggcaagggac

SEQ ID NO: 39849 - DNA, 342 bp, Glycine max
  Clone ID: LIB3139-010-P1-N1-E10
cgcctcatgaggaagaagccgccgggcccgttacgggagcccagcccgctaagggcgtcgtcaagcaaagaagaggaaaattgttggaaacagcatgttggatgcttggaagctttggacagaactctagattcatctcttgtcaatgaagagctcttatctggatgctagcaagactagttaagaacgaaaaccctgcacaggaaattccaaagatgtaaaaagtcaacggaatatgaaggccaggttacttgaaatgggttaatagcagcagctgctatggatttggttttcccacgtttttgtgatggtctttttttctttctccttctcgatttttct

SEQ ID NO: 39850 - DNA, 354 bp, Glycine max
  Clone ID: LIB3139-010-P1-N1-E11
caaaactagtgcaactttgcaatttagaaagttaggagattgtgattttctcaagagaaactttaagcagatgtctaatgttttgtgggtggctcctgaggacaaggcgagtttatggtcacaacttcattatgtttcgtgtaataatctggaaatgcaagaagcttatcttgtcaacctcgtaaatgtgttacgagaattgtatttgcacagtccagaggaagctcgccaattgagaaggaaagctctctctcgtattgaatggctgcaaaaagctgatgtgcctaccatagcacagattgaagagttccattcgatgcagaggatgatgaatgctcctgattcaaatgataa

SEQ ID NO: 39851 - DNA, 353 bp, Glycine max
  Clone ID: LIB3139-010-P1-N1-E2
atgaagtttctcatggcaatgattcatcattgggcgtgagttggtcaaaagttcttagagttaggaccatacagataagttctccaattcttgcagaaaaaagccccttcttttacaagttgttttcaaatgtgacgcgagagtctaagcaacaaaatgtgactcttcaaatccatgattctgaagaggctgccggtatggacctacttaattttatgtatagtaatactttatcaagaacgacatctgctgctgtattggacgtgctgatggctgcagataaatttgaggttatgtcatgcataaggtattgcagtaggatgttggcgttactgcctatgacctgtgagtct

SEQ ID NO: 39852 - DNA, 284 bp, Glycine max
  Clone ID: LIB3139-010-P1-N1-E6
gctagcaagggtgttgtagtatagttagagatatcaggactacaccaccctgcataggttgttcagctataatactacttgagcttctttacctacttttcaaacctacattgcacacaaaatggcaacatcttggtcatgttatctacttgcattgcttctttttatgtcaactattgtatcagagagtagagtggcaaggaaggacttgggcctggaccttggtgggttgggggttggactaggactgggtttgggcctgaggataggagagagctgatgct

SEQ ID NO: 39853 - DNA, 336 bp, Glycine max
  Clone ID: LIB3139-010-P1-N1-E7
tctctctcccggcaaatcaaagacatcagaaagaggcaattggcacgcccatgcattaattccaaattcactcgttttaaaagacttgtctccatttaacgtgcgaaccatcccagaagtcacttcctcaccctttggccgttgccttgttcttgaagtctctacctttcacccttgactttgctctctctgctatttccaaccacccaaaagccttctttttgttgctgacttgtttcttcttcttgttcagctcttaagtaaaatcccaaggtatcagtatatcttctccctgtcagatttttgctggcagctacttattgacaatgaacaatc

SEQ ID NO: 39854 - DNA, 352 bp, Glycine max
  Clone ID: LIB3139-010-P1-N1-E8
ctcgagccgaatcggctcgagctatccccatcggaactttactttacccctcccaaagaagaaaaaaaaaaggaaaaggattccaacatatttgcattatacaattcaaatggaacacacaaaaatggagatgggtttggttttggtggtaatggccatgctgtgcgcaggagctgtggcacaatcgagttgcacaaatgtgttagtgagcctgtcaccatgccttaactatatcacagggaattctttgaccccatcttcaggatgctgctcacagcttgccagtgtggtgcgctcacaaccacaatgcctatgtcaggttcttagcggcggtggatcatcactggggctc

SEQ ID NO: 39855 - DNA, 348 bp, Glycine max
  Clone ID: LIB3139-010-P1-N1-F1
ctaaaatgtttctattaccttagccaaaccaagattggggaaaataattcggaacactagttgtgctgaccaaccaaccatgtttcctttacaacgcggcaatgagctggtaatccagttttctaatggtcaccacccgcagcacaaaatctcccaagatctgattctggatgatcaagatatcgatcaatctccccttgtcggttattccgataaaaaattgcgtactagccgtccaaaaaaactattttatcatgaggctgatacctgtcacgctaattctaaccaagaatatacaaaaaagatggttcatagagagattgaaaagcaaaggaggcatgaaatggt

SEQ ID NO: 39856 - DNA, 351 bp, Glycine max
  Clone ID: LIB3139-010-P1-N1-F10
cccattgtacatggtcaaactttgaaatacaacatgaaagtgagagctggaaggggattttcccttgaagaactcaaggcagcagggattcccaaaaagcttgcaccaacaattggtattgctgttgatcatcgccgcaagaaccgttctttggaaagtctgcaagctaatgtgcagaggctgaaaacatacaaggccaaattggttgtgttcccaagacgggcacagaaggttaaggctggtgattctactcccgaggagcttgcaaatgcaacgcaagtccagggttctttcttgcctattgtgagggagaagccaactgttgaacttgtaaaggttacagatgacatg

SEQ ID NO: 39857 - DNA, 348 bp, Glycine max
  Clone ID: LIB3139-010-P1-N1-F11
cccagaccttactgtttctggcattcgcttcaagtttcaggagattaattatggcttaacccacaacaagaataggccttgctggattggctgttatgggccaaattctggctctcaatactgctgtgaaaggctttcccatttctgcttacaaccgcaccacttacaaggatgatgagacagtagaacgagctgaacaagaaggaaatcttgcaggttatggctaccatgaccctgaagcttttgctcattccattcaaaagcctagggtgataataatgcttgttaaggctggggcacctgttgaccagaccattaagaccctatctgcgtacatggaaaaaggtg

SEQ ID NO: 39858 - DNA, 299 bp, Glycine max
  Clone ID: LIB3139-010-P1-N1-F12
aatacattcaattatgtcttcgcgtatcaaatatggtcttttcatatcgatgcggacgatatttttccagcaattaatgtatgtgagacagaaactttcacttacagttttttctttttactcgagccgcacagagcaagaacactgttccaatacggaatctaaggcaaagcaaaccaaacatcttggatcatgggttcaacaggtgagactcagattaccccaacccacgtatttgatgaagaagcaaacctttttcgccaggcacctagccagggcttttgtccttccaaggatcc

SEQ ID NO: 39859 - DNA, 357 bp, Glycine max
  Clone ID: LIB3139-010-P1-N1-F2
gaaaaaaaagggggggaaatttcaatggcgtcaagggtttctctgaaggcgaagggtaagagttcaaagggatcgaaggccgcggaagatcgatctgcgagcgagtgcctgaaggagtggacgacatgggcaatgcgaaaagcgaaggtcatcactcactatggtttcatccctttggtcatcatcatcggtatgaactctgaccccaagcccccactttcccagcttctcagccccgtctgatctacctcttcatttcttccaccatcaacgcgacctcgtttttttcttttcttttgccccctttctacatttgtaagtttctttatggatcaattttcacttgcacatctcatg

SEQ ID NO: 39860 - DNA, 335 bp, Glycine max
  Clone ID: LIB3139-010-P1-N1-F3
ggtcttaaccccatgccagaaaaagagactctaactaattcggagtttggccgggaggtaactaaaacttgaccaagaattgtttctaccaaagattgaactaagttcgaccttaattttaacacattaaccacgtgtacccaatcatttggttattttatgcttttgtttacttgcccaaattgaagaaaaacaaaatgtagagtcaaactgattgggaattattttgttagatattgcagttttaatcaatttagttcaacttgattaatggttaaactgagtttggttttggtgttttctaattccctgtctaagaatagtgaaagttgttt

SEQ ID NO: 39861 - DNA, 351 bp, Glycine max
  Clone ID: LIB3139-010-P1-N1-F6
gttggccagtacaaaggcatcatcgctgccagtgtcggcgcgttcagaggaaggaggccttcgcagacgtctttcttcgctgtctctgaagatccaagacagcccaacatggtcattttccagatccaagtccctctcatccatgggtgactatgtaaggacatgctgggcctggatcctctccaggaagctcatctttgccacagatctcgaaatgaacgaccagaaaactaagctccttggctcccccaacaggggcacttggagccatgttttctataagctgcgctctgagatcagaaggttcatctctacttctgatcacgccactcttcccaaaacctaccacag

SEQ ID NO: 39862 - DNA, 112 bp, Glycine max
  Clone ID: LIB3139-010-P1-N1-F7
attcaataaaggaaattaggcatgaccctcttgtgtgagtatgctctgcctatctgaaaatttccacacctcttttaattgtcgtaatgatgtgtgaagtgtgtgttatttt

SEQ ID NO: 39863 - DNA, 354 bp, Glycine max
  Clone ID: LIB3139-010-P1-N1-F8
ctgtcactctctctctctctctctctcattcacacgaatcacactctccacagtgcgattcattcaccaatggatcgcaacggtgttctctctcttgcattcatctgcattgtagtcgccggcgtcggaggccagtctcccgccgcagcgccctcgaacactccggcaacccccgccgccgccactcccgcccaagcaccttccacaccgaattcaccagccccagttgcttctcccaaatcatcttcaccagcttcgtctcctaagcccgcaaccgcaacccctgcttcgtcgccggcggcatcttctaccaccacccccgccgggcctgcttcagcgaccaagccacctgca

SEQ ID NO: 39864 - DNA, 324 bp, Glycine max
  Clone ID: LIB3139-010-P1-N1-F9
caacaatatgatcatctcagcaaagagatgcttcttgcaccatgggtagaagcaacaatatgatcttcttcagtaaagagatgctgctttcaccatgggtggagcagctgtatatagagcagaagcaaatggtagcatgagcagcaagggctgctgccatgacaatgcttcttggttattctgacatagtttgtttatttatttatttaattattttattcattttgaactgcttctactatccacaacattacacaatattataggttgggataggatgagatatgatattgcaaagaacaaaagtcaggcttatccagagat

SEQ ID NO: 39865 - DNA, 353 bp, Glycine max
  Clone ID: LIB3139-010-P1-N1-G1
ctcgagccgttgaaccttccggatttcgttttgctttgttcaggtagccagccagtcatggtgctcttcaatgtttcacgcgtagagaccactcccttcgatggccagaagcctggaacctctggtctccgcaagaaggtgaaagtgttcgtgcaacctcattacctccataactttgttcagtcaacattcaatgcattaactgtggaaaaagttagaggtgcaacgctagttgtatctggtgatggtcgttatttttcaaaggaagctattcagattataactaaaatgtcagcagcaaatggagtaagacgtgtttggattggtcaaaatggattgctttcaactcctgc

SEQ ID NO: 39866 - DNA, 349 bp, Glycine max
  Clone ID: LIB3139-010-P1-N1-G10
cttaactagtaatatttattagaatttgctagagaattagaagaataaacataataccccagatggcttcaaaaacttgttcctcccttgcccttttcctcacactcaacctcgttttcttctcacttgtctctgcatgcggttatacaccatgccctggtccaaacccaaagccaaggcccaaccccaaccctaaccctaaccccagcccaagtggctcgtgcccccgtgacgcactcaaactaggtgtatgcgccaatgtgctaaacttggtgaacgccactttgggtcaaccaccagttaccccttgttgctcccttctcgatggtctcgttgaccttgaggctgc

SEQ ID NO: 39867 - DNA, 351 bp, Glycine max
  Clone ID: LIB3139-010-P1-N1-G11
atcattttcttttccactcctagtttatttgctgaacactctcctatttgatataggacttcgtgtcagatttaaactttttctggttctttctcaggtctctggttaatttcaaggtcaagctggtgaaattttggattagtgctcccactctcctatctggtataggactctcgggggagacttttctacttctctcctttctttcactctctttttctcactgatccgcattgccgctcaaagtggtcttatttgaaaaacacttgggcgttggtgcaaatgtttgcttcgttaattttctctggagacaacaggctcactgagaaaacaatttttacttgcagagat

SEQ ID NO: 39868 - DNA, 353 bp, Glycine max
  Clone ID: LIB3139-010-P1-N1-G12
cacacacttttttatttagtggaaaatttcattgaaacacctcacaaacatgccttttgaatcatcagccaagtctagtcaatctccccctgctgaaggcgacaagcacaagcatttggacagggaaattagggagatggtatctgccatcactcaccgtgtaactgattttcacaaagctggctccacccaccatttggagaaagagcatgaagatgacacgaggatcattaccctcacaggaaccaatgatggagcaacactgcgaagcgaattggatgaaaaatcgggcaaaacttctcatggtgagtctgaagaattgagcacctttgttaacagcaactttcaggcca

SEQ ID NO: 39869 - DNA, 353 bp, Glycine max
  Clone ID: LIB3139-010-P1-N1-G2
cttagtttgcacctgtattcaattaatggaaagtatgttgctgcctctgaatccaatggacgccttaatgctgttcaattgagcagatgtggaaagtttttggtaggcgcaggtgaccagggacagatttttgttcgctctatgaacacccttgaagttgttaagaaatatcaaggagttggaaaggttttgacatctctggcagtaaccccagaagaatgcttcttagctggcacaaaagatggaagcctcctagtgtactcaatagaaaatcctcagattcgtaaaactagccacagcaaaagtacaaaatcaaaactgacataacagaaaatataacaatacagcagaag

SEQ ID NO: 39870 - DNA, 335 bp, Glycine max
  Clone ID: LIB3139-010-P1-N1-G5
ctggggaacagtaatcggtttggccatcctaaagctgggaaacaacatccaaggactctcaagttcctgtgtcaataagcaagagcattacactgtggaacgagtgcataatcttggagacaaagacatctatgtgctatggactaactttcagaactacagtattttactgtcatagagtacgtgatacaccatcttccatgggtccattgacggctggtgatggaaccaactctcactgacttgctgtatgccactcagatacttctgagttgaagcatcacatgcttcatgaactcatgggagctgttcctggaactaaccctgtttgccat

SEQ ID NO: 39871 - DNA, 360 bp, Glycine max
  Clone ID: LIB3139-010-P1-N1-G6
ctcatttctttctattcatttcttcattccaccatcaccatggtcaaggagaagaagaacgtggtggtcaagaacaagaagccaaacaacaatgccgacgagcttcacttccgcggcgtccggaagcgaccatggggccgctacgccgccgagatccgtgaccccggcaagaagacccgcgtctggctcggcaccttcgacaccgccgaggacgccgcccgcgcctatgacgccgccgcccgcaacttccgcggccccaaagccaaaaccaacttccccgtgccccccgacgacaacaacaacaacaacgttaacgtgaacaaaaacaagagtgttaacgttaaatctcacagtcccagc

SEQ ID NO: 39872 - DNA, 333 bp, Glycine max
  Clone ID: LIB3139-010-P1-N1-G7
ctccctcttaattctttcatcttttgtttcttgcagacaaactcctcttattatgatgggtcttgatcaagatgctagcagcaactctggccttcatcttattctagggttagctttgactgccaccaccaccactactccatcactaccattcatttccaacaagcttgctcatgttgatcatgatcaccatgttataactcttagaccaacaacaaatgctcgtatcgtgatgaccctcttgatcacttgttcacacagactaattcacctcatcacagcgctagttcctccttctccagaggcagggtcaagagggagagggatctcagt

SEQ ID NO: 39873 - DNA, 349 bp, Glycine max
  Clone ID: LIB3139-010-P1-N1-G8
ctcgagccgctcgagccgattcggctcgagaaacgatccaaactcttttttcatttgcagcatcaaaatgagtggtagcaacgatggtagcggcagctggagctctaggtttttgaaggtggctagtgcagctgccgctacagccgccgttgccggcggtttatatgccattctttcatcctgaacctttgctagctctgggatggaagtgccgcttggcagcgcacggcgtgagagcaaagaacgtgacgatggtggctccgggtctcatcctcgcgagggtgccaccacggtcagtcgttggaagaaacctgagattggttgggtgaagctgaacgtggatggttca

SEQ ID NO: 39874 - DNA, 354 bp, Glycine max
  Clone ID: LIB3139-010-P1-N1-G9
agtttatctacctacccatgggaaagattgccctagccaatgtcctcttggtccttctcttgaacttgagcactttgctcaatgttcttgcttgtccctattgcccttacccatctcccaagcctcctccaaaaaagcctcccattgtgaaaccaccagttcacaaacaaccaaaaccatgtccaccacccaagtcatctccaaaaccaccccatgtacacccaccctatgtcccaaaacctcctcactaccctaaaccaccagttcatccacatccaccccatgtcccaaaacctcaccctaagcctccactgcatccacatccaccttatgtcccaaaaccaccagttgtta

SEQ ID NO: 39875 - DNA, 331 bp, Glycine max
  Clone ID: LIB3139-010-P1-N1-H1
attaaaataataatagtttctgtgaggtaggtggagggtagatcgggaagaaaaaaaaatgtcacagcagcagcgttcgacgccggcgccgttcttgacgaagacgtatctgctggtggatgaccccgccaccgacgacgtcgtttcgtggagcgaaggtggcaataccttcgtcgtttggaaacacgccgatttcgctaaggacttgcttccgaagtacttcaagcataataatttctccagcttcgttcgccaactcaacacctatggattccgaaaaactgttcccgacaaatgggaatttgccaatgagtatttcaagcgaggacag

SEQ ID NO: 39876 - DNA, 305 bp, Glycine max
  Clone ID: LIB3139-010-P1-N1-H10
gaatctggcttacatgttgcttatgatagcctagcggatcaattatgcgctggcgaccaggaggatactactacagttaatactgcatgaccaccaaatgaaccattaacagagagtcgttatcaacttggcacactgtaccaccggtacttccaagcactctctcgcaagtatgggcctctaatgatgctgcaattaggccaaactccaaccctagcggcctcatcagctgacgtggccagagaaataatcaagacgcatgatgttgttttctccaaccgaccacaacctacgggtgctaaaat

SEQ ID NO: 39877 - DNA, 284 bp, Glycine max
  Clone ID: LIB3139-010-P1-N1-H11
cataagttggtggttaatctcccttatttctactgccgtgtcaataagttggtggttaatctcccttatttcttccaaaagggcatgattaacctcaatctttggtttcttgacacggtagtagacataagcaatgaagatgttgatccaacagctgctgttgctgctgctgaaagggcagaaaggatcattgtcaaatgctctttcattgtcgcggcttttaaccctagcttaaaatcccaatatgcttcagcacagatgtcacctatttaacccctgcgttt

SEQ ID NO: 39878 - DNA, 105 bp, Glycine max
  Clone ID: LIB3139-010-P1-N1-H12
cgagaattaaataaaagaccattttcgtccgcaccaactctcagaacatcaatcacttgatcacgtcacgcgaaaaccgaatggtagaagaagaaaaagaagaca

SEQ ID NO: 39879 - DNA, 355 bp, Glycine max
  Clone ID: LIB3139-010-P1-N1-H3
taaagagcagcaataacaatgaactaaaatgcgctattgaccacattttggatgcccagagaaaaggcgagatcaacgaagacaacgtcctttacattgttgaaaacattaatgtcgctgcaattgagacaactctatggtcgattgaatggggcattgctgagcttgtgaaccacccagagatccagcagaaggtgagggatgaaattgatagagttcttgaagcagggcaccaagtgactgagccagacatccaaaagctgccataccttcaagcagttgtgaaggaaactcttcggcttcgaatggcaatccctctccttgtcccacacatgaacctccacgatgcgaagct

SEQ ID NO: 39880 - DNA, 356 bp, Glycine max
  Clone ID: LIB3139-010-P1-N1-H4
ctcgagccgaatcggctcgaggtcagttgcaggaaaaatggtttcgctgaaactgcagaagcggctcgccgcgagcgtgctcaagtgtggcagaggaaaggtttggcttgaccccaatgaagtcaacgaaatctccatggccaattctcgccaaaacataaggaagctggttaaggatgggtttatcatcaggaagcccaccaagattcactctcgctcacgtgctcgtcgaatgaaggaagccaagaggaaaggacgtcactctggatacggtaagcgtaagggtacaagggaggcaaggcttcccactaaaattctatggatgaggagaatgcgtgtgctcagacgcttgcttc

SEQ ID NO: 39881 - DNA, 352 bp, Glycine max
  Clone ID: LIB3139-010-P1-N1-H5
tatttgtatgttatggtgcatgatagttcagtgtctgcaataccaggtgattttgtcattggtgttaagttgacaaccataaacaatatgtgtgcatatgggcttaatcctggtatttcaggttctcgtcttttgggcaccattcctcagtccatttcacagcaaactgtttggaatcaaatggcaacagtgagaacaccattgaattttgattctagcaagcagagcttttgtcaattttctatcgaccttctcggtggaggaattttagtggacaaaactggagattggatcacacttatacaaaattctccaattagtaacttgttgagagttgctgcttggaagaaag

SEQ ID NO: 39882 - DNA, 76 bp, Glycine max
  Clone ID: LIB3139-010-P1-N1-H6
gctgaagccgttcgagccgctcgagccgaatcggctcgagcacgatcctactaaaaccaaacaacttcttggtgtg

SEQ ID NO: 39883 - DNA, 339 bp, Glycine max
  Clone ID: LIB3139-010-P1-N1-H7
gtcatgaagctgccggtctgactgggttacattgaagacaagaaaaaacaacaaatcgcttctttcttttttcgtcttttctttcctttttcttgtttaaggcttaacaaattatctcagctctagtagatgtagattattacagacagatgctagttaattagctagctccacaagatgtttaaaaatgtgatctatccatatcaagctggaccaaatccaaataattttactggagcttttctttcttggtaaaagctggacatttttaaaggtttgggtgccactataacgccaccaaagttttctttcttgatttttaaccaagttacatttttt

SEQ ID NO: 39884 - DNA, 348 bp, Glycine max
  Clone ID: LIB3139-010-P1-N1-H8
ctgctgttggcttgacatcaagttacactccaactccattgttggaatctggtttgcaaaaagacagagggttaattgtggagtattttggaaggatgtcttacgttgctcataacgttaatcagccccaagagaaagatttgttagagggaaatttttcctttgatattaaatctcgctctagattggaaaaagtttcctctacaaaagcacaatttgttagtggaaaaaccttcaaatatgatataattggtgctggttcacattcttcaggagattttcctgaaaaggaagatcaagaaaaacccaaaaagattgataccagattgagacaaagaatagatcctc

SEQ ID NO: 39885 - DNA, 352 bp, Glycine max
  Clone ID: LIB3139-010-P1-N1-H9
gaaaaattgatgcgtgaaaggacacatttgctgttggcttgttgttcaaggatggcaatttgtaagaaagatgtttggagagttgaatgtggaatcccttctggatttccgctcacagttatttgcaatagcatttttaatgagatgctcattagatatagctatgaaaaattactgcgccaggctagagctccaagtatgtttttacaatccttcaaaaattttgtttctttgtgtgtgtatggtgatgataacttaattagtgttcatgaatatgtcaagccttactttagtggttctaaattgaaaagctttctagctggtcataatatcaccattactgatggtattg

SEQ ID NO: 39886 - DNA, 203 bp, Glycine max
  Clone ID: LIB3139-011-P1-N1-A1
cctcagaattcggatcgaggcgcgtgctaacataaaccctactcattttccatacctcaacgactaggttaaagagaccggaacacttttctgttcttcttgaccgaccacaacatcgacttggtttctctattttgccctaaagtactactcattcacaacagacaccgtcggggtcgcttcgacatcaatggctccgaaac

SEQ ID NO: 39887 - DNA, 358 bp, Glycine max
  Clone ID: LIB3139-011-P1-N1-A10
aagctttctagctggtcataatatcaccattactgatggtattgacaaaactagtgcaactttgcaatttagaaagttagcagattgtgattttctcaagagaaactttaagcagatgtctaatgttttgtgggtggctcctgaggataaggcgagtttatggtcacaacttcattatgtttcgtgtaataatctggaaatgcaagaagcttatcttgtcaatctcgtaaatgtgttacgagaattgtatttgcacagtccagaggaagctcgccaattgagaaggaaagctctctctcgtattgaatggctgcaaaaagctgatgtgcctaccatagcacagattgaagagttccat

SEQ ID NO: 39888 - DNA, 362 bp, Glycine max
  Clone ID: LIB3139-011-P1-N1-A11
gcgcaaaccaaaccaacacaaacaaaaacatctctcagcaaatgaatattctcggacaatcactccaccaatcaaacaacggcagctactcttgttcgtcgccggagactgcaaactcctctaaccttccgaccactccgaaagccgttcactccgacgaggaagtgaacacattagcatcggctcatcctaagaaacgtgcggggcgtcgaatttttaaggagacaaggcatcccgtgtacagaggagtgcggcggaggaacaacaacaagtgggtctgcgaggttcgtgttcccaacgacaagtccacgaggatttggctcggaacgtatccaacgcctgagatggccgcacgtgcgcac

SEQ ID NO: 39889 - DNA, 360 bp, Glycine max
  Clone ID: LIB3139-011-P1-N1-A12
cggaagaataacttaggaggaagtgggagctttctattaataggtcaagtatggctaagtcttaagcaccaggtaagcgtaaatgggaattcgggtttacctaataatcgccgttggagccgaatcaaccagtacttagaatgaactatgcgtaaactaaaaagaaaccaactctttagaggacgacacatagctttaccattggtaatgggatctagaagaataatccgttgggttcttccggatcgtctaggatcacaactaccgacatcaaaacttaatagatttttacgccatcaacaagataggattatcaaagcgatagaccgtggggatctagtgctggccttcaggatgttc

SEQ ID NO: 39890 - DNA, 278 bp, Glycine max
  Clone ID: LIB3139-011-P1-N1-A2
gcgggataacgaagcctcctcgttcttcttcttccgccctttctctctctagaaccgcacgggcgcttctttctctctcctcaaccggagacagcgtcgccttcttttctgaatctcgcggagttgctagttctgcggcggatgtagttccggcggcgatgggacagcaatcgttgatctacagcttcggcggtcgcggcaccgtgatcctagcggagtacaccgagttcaccggaaacttcaccagcgtggcggcgcagtgcctccagaaactccct

SEQ ID NO: 39891 - DNA, 274 bp, Glycine max
  Clone ID: LIB3139-011-P1-N1-A3
gtgaggttggtttatgaaccccagccacgtcctcgagcaagtgctgctcttgctggggaagcaattgtcaaagtggcatgtggaacaaatcatacagtggcggtggataagaatggcttcgtctacacgtggggttttggtggttatggaaggctaggacatatggagcagaaggatgagtgggtcccaacgacatggtgaagtttttcaaaatagaaatgttttgccacccgatgcaatcatatcagcaggttctgtgaattctttatgtact

SEQ ID NO: 39892 - DNA, 361 bp, Glycine max
  Clone ID: LIB3139-011-P1-N1-A4
catcatcatcacagaagaacaacaacagaggaaaaaagaaaaagaaaaatgttagaggtgaagagaatcggtgtggtggggagtggccaaatgggatcgggaatagcccaagtcgctgccatgcacggcatcgacgtttggcttcacgacctcgaccctcaagctctctccaaagcctcctcttccatctcttcctccatcaaccgtttcgtttccaaaaaccacatctctcaggttgcgggtgctgatgctttgaaacgactgcgtctcacgacggatttggaggatttacagctagcggatttgatcattgaggcgattgtggaatccgaagatgtgaaaaagagtttgtttgcgcaac

SEQ ID NO: 39893 - DNA, 364 bp, Glycine max
  Clone ID: LIB3139-011-P1-N1-A5
gccataatagcaaggtatttgaaggtgttcaaatctgcagaccctgcttggttttaccttcatgttacatgccaaacctctgcctacatagttggtgttgctgggtggggaactggtctcaaactcggaagtgactcggttggtattaagtataacacccatagagcactcgggatcaccctcttctgccttggaacccttcaggtttttgctctgcttttgaggcccaacaaagaccacaaaatcagaatctactggaacatttaccactacgccgttggatactccaccataatcatcagtatcatcaacgtctttaaagggtttgatgcattggagacttctgtaggggatcgctacaatg

SEQ ID NO: 39894 - DNA, 364 bp, Glycine max
  Clone ID: LIB3139-011-P1-N1-A6
ctttcaaacatcacaaacactttttaacgttgttcgattttggtgcaatctttacttcacaacttcctcgtacttctgagaatcatcatcaaaaaccccaaactcatgatcatgatgatgatgaataggttccttccactctttgtgttcgcattgttattcatgtggtcggttcacgcagacaatgctcctgccccttcacccaagtcatcaccctcgttgccgacggccaaaccaccctgtacggcgacccatccggcgcctcctgcaaagtctccgactttatcaccgccttcacaatctccggcagtttctccatctgggtccaccccgccgccggcgactgcccctccggcgaagtctc

SEQ ID NO: 39895 - DNA, 69 bp, Glycine max
  Clone ID: LIB3139-011-P1-N1-A8
gaagctttttgaatgcaaaccatgttctagagctagaactaatattgaccagtctgcaattttacacat

SEQ ID NO: 39896 - DNA, 266 bp, Glycine max
  Clone ID: LIB3139-011-P1-N1-B1
tagcaacactactttttctttacatcaccgtgttggccattattggctacaggagacagagtgacaccaaaatccccggtaacaccgaatgtgacggcgttggcattttgggcatggcttgggcctagggtggcatgatcttaatccttgcttactgcactggcggaatctctgggggacacatcaaccctgcggtgacattggggatggtccttgaacgcaaggagtctttggtgagggcgtctgtgtacatgatagcacaaggt

SEQ ID NO: 39897 - DNA, 356 bp, Glycine max
  Clone ID: LIB3139-011-P1-N1-B10
agttattctctttcttcttttttagctatccctctcttgaaaaatctagatctcgttcttccttgatctacgttacgcttttagtgaccggatctgtatggatctgaaccagatctacacgccgatggtggttttggcctggtctttcatagatctgatgcatggaggctcagatctactgtacagaggtgtgcgattcatgttcgtctctcttttggaatctgtttcgtagaaagtcgtttggtcttccatgtcgcatggctcttgaggtatttttttttgcagatactgtagataatcgatgagaagaacgcagatccagccgcttccgcttgttcgatcgctacagacgcttg

SEQ ID NO: 39898 - DNA, 357 bp, Glycine max
  Clone ID: LIB3139-011-P1-N1-B11
caacagccagggaacacctgggagatctcggttaagaccggttaatcgaggagatgaaacaccggataaaggtgcagctgttccaaagtttggtgactgggatgtgaataacccatcatcagcagatggctttactcacattttcaacaaagtgagggaggagagacagggtgtcccaggacaagtgccgggaacgcctaatgagagaccacaagctattaggggccaatctaacgatgacaaagtccagtgttgctgcttcgcatgggggggcaaaaaatgatttcttggattagaagtgtgaatgataatatttgaacaaaaatgatggaaaagatagcgttgtgaatgatcatg

SEQ ID NO: 39899 - DNA, 356 bp, Glycine max
  Clone ID: LIB3139-011-P1-N1-B12
gtcccattggccattgtccatgcgccatttgctgcgtttcttgtcctaagccctcaacacaaacacaaacgctctctctttcttctatcttctcccaacttgagttgagattctgagtaacaatcaaagtttggaaaaaagttttgagggaagaaaagaccacgatgctgggtgtgaccactcttactctgggttcgtccaccacattggtggctcagaaccatgctcaacaacatgccaccactcttgcctcagccaatggaaacagaagggacagtgtttccaacaggactcaccccttgcctatgagtttggtatcttccaccgaccaaagtttcagctttctctcttccttc

SEQ ID NO: 39900 - DNA, 366 bp, Glycine max
  Clone ID: LIB3139-011-P1-N1-B2
ggagcaggtaaagcttttccaaacaagattgtttttgatgataagcttgtgttggctaacacacaagaattctttgatggaaattttccagtggattcttggttaccaatttttgtgaattgtctttatcctgtaagtcaattacctccagaagctgtcgttgtaaatgttacatgtggtagtggacgtggtggtttacccaccactgcttggattagttctgcagttaacaatcgctcctcagatatcaacaaaaagattcgcacagcacttgggaaaggtaagaaaattgtttttcttactagagttgatccttttccagtagctttactggctgttctttctggcgttaagaatgaaattctg

SEQ ID NO: 39901 - DNA, 361 bp, Glycine max
  Clone ID: LIB3139-011-P1-N1-B3
cagtggcggggcagtgatacagtgtgggcataaaattttcgaagttgaagcgagaacttgccatttcaagggttttagggttagggttttctcaaattgcaaggacatgggtttcaaccttcaaccatatgggattcaatccatgctcaaggaaggccataagcacctttctggcctcgacgaagcggttctcaagaacatcgacgcttgcaaacaactttccactattactcgaacttccctcggtcccaatggaatgaataagatggttataaatcacttggacaagctttttgtcacgaacgatgctgggacaattgtgaatgaacttgaagttcagcatcctgctgccaaggttttg

SEQ ID NO: 39902 - DNA, 361 bp, Glycine max
  Clone ID: LIB3139-011-P1-N1-B4
acaccatcaattttgaggcttttccccacaagctggtgcagtttggagagattcaggaaaaagttgtgttgaaattttcacaagaggaatttcttacagcttggtcaactcaggtgcgtcccgcaacgactctgttggctgatgggtgcccatatttgtatgctatggtgcatgatagttcagtgtctacaataccaggtgattttgtcattggtgttaagttgacaaccataaacaatatgtgtgcatatgggctcaatcctggtatttcaggttctcgtcttttgggcaccattcctcagtccatttcacagcaaactgtttggaatcaaatggcaacagtgagaacaccattgaattt

SEQ ID NO: 39903 - DNA, 366 bp, Glycine max
  Clone ID: LIB3139-011-P1-N1-B5
gtgcatttaggagcaccatgtgacagagaaaaaagaagagcggcctacagccatgaatgcatttgagttaatctccatgtccaaaggactgaaccttgaaaacttgtttgatactgagcagggatttaaaagggaaacaagattcacctcaaaatcccctgcggatgagataatcaacaagattgaggaagccgcaaaacctcttggctttgatgtgcagaagaaaaattacaagatgaggcttgcaaatgtgaaagctggaaggaagggaaaccttaatgttgccacagagatatttcaagtggcaccttctcttcacatggtagaggtacggaaggcaaaaggagatacattggagttccataa

SEQ ID NO: 39904 - DNA, 363 bp, Glycine max
  Clone ID: LIB3139-011-P1-N1-B6
catgccgcgaaattggattcatctctgatgatgttggtcgtgatgctgacaaatgcaaggtgttggtcaacattgagcaacagagcccggatatcgcccagggtgtgcacggccacttcaccaagcgcccagaggaggttggtgctggtgaccagggtcacatgtttgggtatgccaccgatgaaacccccgagtacatgcccctcagccatgtccttgcaaccaaacttggtgctcgcctcacagaggttaggaagaatggcacctgtgcttggttgaggccagatggtaagacacaagtaaccgtcgagtactacaatgacaatggtgccatggttccagttcgtgtccacactgtcctaa

SEQ ID NO: 39905 - DNA, 361 bp, Glycine max
  Clone ID: LIB3139-011-P1-N1-B8
gttcattcaggatcttacactcttggtcaagagcagtatcattccaatggagcgcattgatgatgctgtggagagaattttgcttgtaaagttcaccatgggtctttttgagaatcctctagctgataccagcttagtcaatgagcttggaagccaggaacacagagacctagcaagggaagcagtgagaaaatctcttgtgctgcttaagaatgggaaaaatgaaagtgcttctcttctgcctcttccaaagaaagtcccaaaaatcctagttgctggatctcatgctgataatttgggttaccaatgtggtgggtggacaatcaaatggcaaggattcagtggcaacagtgacacaaga

SEQ ID NO: 39906 - DNA, 336 bp, Glycine max
  Clone ID: LIB3139-011-P1-N1-B9
gttcagataaggttttggattggggcggcgatgaagagattcttctacgcgtataagcaggtgttggcggtggtgatgggaagttcagaggctaacggtaaccgagttgggttgagttgcgactcggctgactcgttgactcagattttccttgaaccgacgtattttccaagcttggatgccgccaagacttttcttggatacctgtgggataataacgataataacaaatggatatgaaaacgaaaaaaaaaaaaaacaaaaacgatggtcagagtgaaaatttctttatggatggataatgttattcactttagtttgatagtgttacacgtc

SEQ ID NO: 39907 - DNA, 365 bp, Glycine max
  Clone ID: LIB3139-011-P1-N1-C1
accgaatccttcattcttatgctaaatcctaatcgttcttgactttcagtgctgaggatgggaagttctggaacaaccgactatggagcatacacataccaaaaccttgagagggaaccttactggccctctgaaaagctcagaatttccatcactggggctggtggtttcattgcctcacacattgctcgccgcctcaagaccgagggacattacatcattgcttctgattggaagaagaatgagcacatgactgaggacatgttctgccatgaattccatcttggtgaccttagggtcatggataactgcttgacagttaccaagggtgtggaccatgttttcaatcttgctgctgatatggg

SEQ ID NO: 39908 - DNA, 356 bp, Glycine max
  Clone ID: LIB3139-011-P1-N1-C10
ggtgcagcagtgcaggctgccattctcagttgcgagggtaatgagaaagtgcaggatcttctgttgttggatgttactcctctctcccttgggttggagaccgcgggaggagtcatgactgtgttgattcccagaaacacaaccattcccaccaagaaggagcaggtattttcgacctattccgacaaccagcctggtgtgttgattcaggtctatgaaggtgaacgtacgaggactcgtgataacaatttgcttggcaaatttgagttatctggaattcctcctgctccgagaggtgttcctcagatcaccgtttgctttgacattgacgccaacggtatattgaacgtgtctgc

SEQ ID NO: 39909 - DNA, 334 bp, Glycine max
  Clone ID: LIB3139-011-P1-N1-C11
gaatctctcatgaggttattctctgccaaccaaaataaccaaaccaatcaataatacatcatgatcataatcgaagctcccatcgccgtcagattccacgccaccgccgccattcgctccgccgccgcaccttcacctcataataaccgttcaatgtggagcgccgatgacgtgaacggtgtgcgttatgccgcttcgtgcaggctcgcatgcagctgcggtttcgacgcgccttgggtaagaagtaaaataaattcaggcactccgttcacaagaagaaacaaacttgtaaaaaatagaattagggcatcatcagagcatctgggctccgctc

SEQ ID NO: 39910 - DNA, 355 bp, Glycine max
  Clone ID: LIB3139-011-P1-N1-C12
tttcaactgctcaacagatattgccatctcaagtccttaagagagttttacaggaggtttttgctcacatatcggagaagatagttgggactttagttagtgattctgttaagaggtttaatgtgaatgctattaatggaattgaagtagacatccggctcttagagtcattttctgataatcaggcttcccttttctctgatggggatgttgatgttctgaaagcatcacttgccagctcaaaacaactgattaatttgctgttaagcaatcatccggagaatttcttgaatccagtgatcagggagaggagctacaatactttggaccacaagaaagtggtgattgtttcaga

SEQ ID NO: 39911 - DNA, 363 bp, Glycine max
  Clone ID: LIB3139-011-P1-N1-C2
cataacatcaccattactgatggtattgacaaaactagtgcaactttgcaatttagaaagttagcagattgtgattttctcaagagaaactttaagcagatgtctaatgttttgtgggtggctcctgaggacaaggcgagtttatggtcacaacttcattatgtttcgtgtaataatctggaaatgcaagaagcttatcttgtcaacctcgtaaatgtgttacgagaattgtatttgcacagtccagaggaagctcgccaattgagaaggaaagctctctctcgtattgaatggctgcaaaaagctgatgtgcctaccatagcacagattgaagagttccattcgatgcagaggatgatgaat

SEQ ID NO: 39912 - DNA, 364 bp, Glycine max
  Clone ID: LIB3139-011-P1-N1-C3
cgaaaccctaagcttcccctttctttcactctcatcagatcctttcgtcgttgcgcgaaaccctatctctgaaccagcaaacatgtctgcagccatggatatgtcgctcgacgacataatcaagaacaacaaaaagtctggatccggaagttcacgtggccggacccgaccctccggatccggacctactcgccggctccccaaccgtgccgccaaccgcgccgcaccttatgcccccgctaaggcgccggaggcaacgtggcagcacgatttatatgcagatcagcatgtggctgcggcggggtaccctgctcaaggtggtcgtgcggcttccatagaaactgggaccaagctttacatttca

SEQ ID NO: 39913 - DNA, 363 bp, Glycine max
  Clone ID: LIB3139-011-P1-N1-C4
atagaagaatatgtggtggctgcaaccaagagataatgtatggaaattgtttgggctgcatggatacttattttcacccaaattgttttcgctgtcactcttgtggttaccccattacagagcgtgagttttccttgtcagggaagcatccatatcacaagtcatgttttaaagagttgaatcatccaaaatgtgaagtttgcttccaatttattcctataaatgctgctggtttgattgagtataggtgccaccccttttggtcccaaattattgtccatctcatgaatatgataatacagctcgctgctgtagttgtgaaagattggagcctttgaacataaaatactatagactagaaga

SEQ ID NO: 39914 - DNA, 363 bp, Glycine max
  Clone ID: LIB3139-011-P1-N1-C5
ggtaattggtttgagagatgttattcctccacccttgcgtggagagtttaatgatgtctacatagccactgaactcatggatactgatcttcaccatatcattcgctccaatcaaaatctgtcagaggagcactgccaatacttcttgtaccagattcttcgtgggcttaagtatatacattctgcaaacgtaatccatagagatttaaaaccaagcaacctgctgctaaactcaaactgtgatttaaagattattgattttggtcttgcgagaccgactttggaaagtgacttcatgacagaatatgtagtcacaagatggtatagagctcccgaattgttgttgaactcctctgattacac

SEQ ID NO: 39915 - DNA, 362 bp, Glycine max
  Clone ID: LIB3139-011-P1-N1-C6
ctcgagccgaatcggctcgagcttttccccacaagctggtgcagtttggagagattcaggaaaaagttgtgttgaaattttcacaagaggaatttcttacagcttggtcaactcaggtgcgtcccgcaacgactctgttggctgatgggtgcccatatttgtatgctatggtgcatgatagttcagtgtctacaataccaggtgattttgtcattggtgttaagttgacaaccataaacaatatgtgtgcatatgggctcaatcctggtatttcaggttctcgtcttttgggcaccattcctcagtccatttcacagcaaactgtttggaatcaaatggcaacagtgagaacaccattgaat

SEQ ID NO: 39916 - DNA, 359 bp, Glycine max
  Clone ID: LIB3139-011-P1-N1-C7
gcagtcaaaaggagtgattgggcctcattggtacaagtctttttaacaaacagcaacagtacagagcattttgatgcttgtaagtggacaaaatcggaaccacattcctgggaattgatcttcccaatagaggtatgtggtcctaataatggttttgaaatgtggagttctgagtgggcaaatcaaacttcatggcatttgagtttccttattgacaatcccaaacagtctacagtttttgatattctcttgggaatttctcaagattttgaaattgctggtaatactcttatgccagctttttctgtttcacaggctactgccagatcttctgaaaatgcggaatcctctgcatgatc

SEQ ID NO: 39917 - DNA, 360 bp, Glycine max
  Clone ID: LIB3139-011-P1-N1-C8
gtttgttacttctcttcgccttttgctttgcaattgtcaccaaacaattcttgcttagctctcacaagcaagcattatcaacaatgaagaaaattgtgttaaaggtggacttacatgatgacaggatcaagcgaaaagctatgaagacagcatctggcctttcgggggttcaatcagtttctgttgacattaatgacaagaaaatgaccttattgggggatgttgatccagtgagtgcagtgtcaaagctacgaaagtggtgtcacactgaaatagtctcagttggaccagcaaaagaggaaaaggagaaagagaaagtggagccagcaaaagaacctgttcctctcaagctctatgatg

SEQ ID NO: 39918 - DNA, 353 bp, Glycine max
  Clone ID: LIB3139-011-P1-N1-C9
cacagtacatgtgttgttggagggacaagagctatcgtactgggtggtcaaaccggggaggaatggatgctaagcgagctccatgaactttccctggcaagttctgccatctaattccagtgaataaactctattgtagtgaagggaatactacatggctctgcttgaagtcgtgaatttgaacataagtttgcgggaaaggttgtattggtcactaactcgacaagcattggtctggtcagaatgtgtatattaagttgttacgaatatgcatttgcttgaatggttggttctggctcgttgagagtgacatgagacgaagttttttgtgaggttgtgtgagactttgccct

SEQ ID NO: 39919 - DNA, 230 bp, Glycine max
  Clone ID: LIB3139-011-P1-N1-D1
gatagcggcatctatgagaaatgtgccgcaactgcggtaagagttttttttctctattcctttatagctgtcatgatccttttgcttcagagtttttttggttaaatcacatcattccctatattcctttaaatcacattttgtatctaatattccggaataattgttttggaactgcccacaattatgccatttttttagaagtcatatgcttcttgtttgtcttttgc

SEQ ID NO: 39920 - DNA, 360 bp, Glycine max
  Clone ID: LIB3139-011-P1-N1-D10
gggcgtcaaaggttttgttgaaggaggcatcgcttgcatcatcgcaggatgttccacacacccacttgatctcatcaaggtccgcatgcagctccagggtgaaaacaatttgcccaaaccggttcaaaatctccgacccgcactcgccttccaaaccggttcgaccctacacgtggcagctgcagttccgccgccccgcgtgggccccatctcggttggggttcgcctcgtccagcaagagggcctcgccgccttgttctccggcgtctccgccaccgtcctccgccagacgctctactccaccacccgcatgggcctctacgacgtgctcaagaccaagtggaccgactccgtcaccgg

SEQ ID NO: 39921 - DNA, 359 bp, Glycine max
  Clone ID: LIB3139-011-P1-N1-D11
gtcacaacttcattatgtttcatgtaataatctggagatgcaagaagcttatcttgtcaatctcgtaaatgtgttacgagaattgtatttgcacagtccagaggaagctcgccaattgagaaggaaagctctctctcgtattgaatggctgcaaaaagctgatgtgcctaccatagcacagattgaagagttccattcgatgcagaggatgatgaatgctcctgattcaaatgataatatcgatctactgttgagcattgatttgttgggtttacaaggagcaggtaaagcttttccaaacaagattgtttttgatgataagcttgtgttggctaacacacaagaattctttgatggaa

SEQ ID NO: 39922 - DNA, 357 bp, Glycine max
  Clone ID: LIB3139-011-P1-N1-D12
gtgaccacaacacaaacagaatgaatcgtcgcgcagagctttccctcttgaacgcgttcttcagaacccgacgcccttttcaccaatccccaattgctgctccattcactccaccgacccacgtcgcgtccacctcaaagttccactctttttccaatacccctcacacccacttcgcgattcggcataatccgagaagtttcagtggtgggtccggtgtgttggaccacaccaaggaggtggacaccatcaacctcaagtttgcagaggcgagggaagagatagagatggcgttggagtccaaagacaccgtttatttctacgaggaagccgagtgtgcacgggccgctgtcaacg

SEQ ID NO: 39923 - DNA, 358 bp, Glycine max
  Clone ID: LIB3139-011-P1-N1-D2
cgctctctcactcacaaacgcacactgaattcaaaaacatcgaaagagagaggcatggccgagcaaaccttcatcatgatcaagccagatggcgttcaaagaggccttattggcgagattattagcagatttgagaggaagggtttttacttgaaagggttgaaactcgttactgtggaccgtccttttgctgagaagcactatgctgatttgtctgcaaagcctttctttagtggtttggtggattacattgtctctggccctgttgttgccatgatctgggagggtaagaatgttgttacaactggccgaaagattatcggagccacaaacccagctcaatctgagcctggaacta

SEQ ID NO: 39924 - DNA, 351 bp, Glycine max
  Clone ID: LIB3139-011-P1-N1-D3
ctgttgatgctggtttctccgttttgaaattcccatctgtttggatgcactaatcctgcatccctcgaagcgcgtttgatctaaaaccataaacctctgtctcgtcagatctccttcttccgttcagtaaacctgtccttcgatccgatctgatctattttccgaatccaaaatggcgacgatgacaagcttgatcggtctcatcaataagatccaacgagcctgcaccgttttgggcgatcacggtggcgagggcttgtcgctttgggaggctcttccctccgtcgccgtcgtcggtggacagagctcagggaaatcgtcggtgctagaaagtgtggtcggaagagattt

SEQ ID NO: 39925 - DNA, 362 bp, Glycine max
  Clone ID: LIB3139-011-P1-N1-D4
cttagttgtcaagttggaatcaacccatactccatggaatggactggtttggccaatagattactgagtaagggcaatgatattctgtgttgcgattatgctagttttgatggtttgattaccaagcaagttatgagcaagatggcagaaatgataaacagtctttgtggtggtgatgaaaaattgatgcgtgaaaggacgcacctgctgttggcttgttgttcaaggatggcaatttgtaagaaagatgtttggagagttgaatgtggaatcccttctggatttccgctcacagttatttgcaatagcatttttaatgagatgctcattagatatagctatgaaaaattactgcgccaggc

SEQ ID NO: 39926 - DNA, 363 bp, Glycine max
  Clone ID: LIB3139-011-P1-N1-D5
cttgttttgttctgtgcaagtgatcttgaaaggaacaacggtggtgaagtctataaactttctcctgcttctgtctctactagcctttgttccctcctgtcactgcaaaaagaaaataggaggttacctctaccctcaattttacgacggttcatgccccagagctcaagagattgtccaatccatcgttgccaaggctgtggcaaaagaaccccgcatggctgcttcgttgctcagactacatttccatgattgttttgtcaagggctgtgatgcatcggtgttgctagatagcagtggaactattatcagtgagaagaggtcaaatccgaaccgtgattcagctcgaggatttgaagtcat

SEQ ID NO: 39927 - DNA, 363 bp, Glycine max
  Clone ID: LIB3139-011-P1-N1-D6
gggattctgtacttgaagattttccatgtgttgaaaaccgacacaaatcattctcttaccttgaaaaccaatgcagtaacacaactggtggggttcagaaagatattgcagcttcagggtttgttccatgcaactcggactccaaggattgcctggatatagaggatcatgcagtcaaagtcttggacacttttgagcagtccaatggagatgacaccatgcttgagcagttatctcttgaggaatatacactgcaggcttttgagatgttaattgcacagttcactgagaagactcgtatttctttccgagatgccctgtaccgccttgctagaaatacaaaacaacatgtaatagaggacc

SEQ ID NO: 39928 - DNA, 357 bp, Glycine max
  Clone ID: LIB3139-011-P1-N1-D7
atgtgatgcatcagtccttctgaactcaacaaccaatcaagctgaaaagaatgctcctccaaatctcacagtaagaggctttgacttcattgacagaataaagagccttgttgaggcagaatgccctggtgtggtctcttgtgctgatatcctcactttgtctgccagagacactattgtagccacaggtggaccattttggaaagttccaacaggtcgaagagatggggtcatctctaacttgacggaagccagagataacattcctgctccatcttctaactttaccaccctacaaacactctttgccaaccaaggacttgatttgaaggacttggtcctgctctctggtgctca

SEQ ID NO: 39929 - DNA, 286 bp, Glycine max
  Clone ID: LIB3139-011-P1-N1-D8
gttttagtgcctactgattttggggtggtggagatggggtctgtgaggatggttggtgagagttttgcgttgttgcacgctgtcaaatctgacttttttgcacaggcatcatcattattattcccccacatggttaatccaactgcaccgctgaatttggttagggaaaagagagatgggagtgagagtgcaaatgctcttttatctgctttggcaattggggataagaatatgaatatttataacaatactagagaagactttattgtttttcgaatattttttc

SEQ ID NO: 39930 - DNA, 355 bp, Glycine max
  Clone ID: LIB3139-011-P1-N1-D9
taaagctccaagtatgtttttacaatccttcaaaaattttgtttctttgtgtgtgtatggtgatgataacttaattagtgttcatgaatatgtcaagccttactttagtggttctaaattgaaaagctttctagctggtcataatatcaccattactgatggtattgacaaaactagtgcaactttgcaatttagaaagttagcagattgtgattttctcaagagaaactttaagcagatgtctaatgttttgtgggtggctcctgaggataaggcgagtttatggtcacaacttcattatgtttcgtgtaataatctggaaatgcaagaagcttatcttgtcaatctcgtaaat

SEQ ID NO: 39931 - DNA, 362 bp, Glycine max
  Clone ID: LIB3139-011-P1-N1-E1
gcttgttactctcttctctctcaaaacaaaacttgaatccatccatactctacataccccttgcccttgctttgcttctttctttctcacaagcaccagcagcactcaaatcaatcaatcgtttttaatgcccttgcttctccctctttccgtgtgtatgtaaaatctttgtttttatcagaggtggtgcagaaagttgtatctcagatccctatatacaccgaaaacgatacaactgtgtgctgtgtacactgtgcactgtgcttctccctctctctctctctctctctcacaaaatcataatcattttacatattacacctattaccgaatagagtggtcctcaacctcaacctaaaagc

SEQ ID NO: 39932 - DNA, 361 bp, Glycine max
  Clone ID: LIB3139-011-P1-N1-E10
attccattctctctgtgtatttccctacctctcccttcaagatgcagatcttcgtcaagaccctcaccggcaagaccatcacccttgaggtggaaagctctgacaccatcgacaacgtcaaggccaagatccaggacaaggaaggaatccccccggaccagcaacgtctcattttcgccggaaagcaacttgaggacggccgtacccttgctgactacaacattcagaaggagagtactcttcacctcgtcctccgtctccgtggtggcatgcagatcttcgttaagacactcaccggcaagaccataaccctagaggttgaaagctccgacaccatcgataacgtcaaggccaagatcca

SEQ ID NO: 39933 - DNA, 360 bp, Glycine max
  Clone ID: LIB3139-011-P1-N1-E11
gtcatcggaaccggcattaacatcattggaggaggcgtcgacaccgttactgctttggcgtcccacatctccatccagctcattagtgccaccaaggctgatggacatgggaaaggaaaagttggaaaggctacaaatttaagaggacaagtgtcgttaccaaccttgggagctggcgaagatgcatacgatgttcattttgaatgggacagtgacttcggaattcccggtgcattttacattaagaacttcatgcaagttgagttctatctcaagtctctaactctcgaagacattccaaaccacggaaccattcacttcgtatgcaactcctgggtttacaactcaaaatcctaccat

SEQ ID NO: 39934 - DNA, 300 bp, Glycine max
  unsure at all n locations
  Clone ID: LIB3139-011-P1-N1-E12
cttattgacaatcccaaacagtctacagtttttgagattctcttgggaatctctcaagattttgaaattgctggtaatactcttatgccagctttttctgttccacaggctactgccagatcttctgaaaatgcggaatcctctgcatgatctggaattcgtgttttctttcgcttgttcgtttgtttaattcaataaaggaaattaggcatgaccctcttgttgagtatgctctgcctatctgaaaatttccacacctcttttaattgtcgtaatgatgtgtgaagtgtgtgttntttt

SEQ ID NO: 39935 - DNA, 363 bp, Glycine max
  Clone ID: LIB3139-011-P1-N1-E3
ctcaaaaacaactcacctcatcgttattcactttctgtcaccacattctaaacagacagtagtagcaccatcatccccaataatggcatcatccccaacctttgctttgagaaccatctgctctttctctgtgaaacctgttaccaccacaagatcatcactcaccacctcatgcaccacaaccctgttaccatttacttcaacaaactcatctctccccagaactctcaaactcaacaccttttccccacatactcacctttcactaccccacaagtctttcacttgtagaagccaggctgagccatcttctgattcagccaaagtccaagaactgagtgtgtatgagatcaatgagagaga

SEQ ID NO: 39936 - DNA, 364 bp, Glycine max
  Clone ID: LIB3139-011-P1-N1-E4
gccatgcgcaagataaagaatgagtttatgactcattgggatggacttatgacaaactccggggagcgcatccttgttcttgctgcaaccaataggccatttgacctcgatgaagcaataattaggagatttgaaaggagaattatggtagggatgccatctgtcgagaacagggaaaagattttgaggactcttttggcaaaagagaaggtggatgagaaacttgattttaaggaagtcgcaaccatgaccgaaggatatagcggaagtgatctcaagaacttgtgcacaactgctgcttacaggcctgttagagagttaattcagcaagagagactaaagactctggagaaaaagcagaagg

SEQ ID NO: 39937 - DNA, 361 bp, Glycine max
  Clone ID: LIB3139-011-P1-N1-E5
atttgtaagaaagatatttggagagttgaatgtggaatcgcttctggatttccgctcacagttatttgcaatagcatttttaatgagatgctcattagatatagctatgaaaaattactgcgccaggctaaagctccaagtatgtttttacaatccttcaaaaattttgtttctttgtgtgtgtatggtgatgataacttaattagtgttcatgaatatgtcaagccttactttagtggttctaaattgaaaagctttctagctggtcataatatcaccattactgatggtattgacaaaactagtgcaactttgcaatttagaaagttagcagattgtgattttctcaagagaaacttta

SEQ ID NO: 39938 - DNA, 363 bp, Glycine max
  Clone ID: LIB3139-011-P1-N1-E6
tctcaatcccagtgagtgctttctttctgtaactaaccccaatcaatcaactcagtcagcgaatgaatctgtggacggacgagaactcctcggtgatggaggccttcatgccatcctccgatctctcctccatctggccccctcccgctcctccgcagccgcaatccacggcggtcttcaatcaggacaccctccagcaccgcctccaggccttaatcgagggcgcccgagagacctggacctacgccatcttctggcagtcctcttacgactattccggctccactctcctcggttggggcgacggttactacaaaggcgacgacgacaaagccaaggcaaaggccaagtccaaagccacct

SEQ ID NO: 39939 - DNA, 359 bp, Glycine max
  Clone ID: LIB3139-011-P1-N1-E7
gtagagaaataagggaaaaatggtgtcgctgaaactgcagaagcgcctctccgcaagcgtgctcaagtgcggcagaggaaaggtttggcttgaccccaatgaagtcaacgaaatctccatggccaattctcggcaaaacatcaggaagttggttaaggatgggtttatcatcaggaagccaaccaagattcactcccgctcacgtgctcgtaggatgaaggaggcaaagaggaagggccgccactccggttatggtaaacgtaagggtacaagggaggcaaggcttcccaccaagatactctggatgagaaggatgcgtgtgctcagacggttgcttcgtaagtacagggaatcaaaga

SEQ ID NO: 39940 - DNA, 357 bp, Glycine max
  Clone ID: LIB3139-011-P1-N1-E8
ctcgagccgggcttcttgatgtgaagcatctctttcagggatctgtggaaccacagcctaaggtggtggatgtacttcgagatactaagcaaaaaaggcaccgtgatggctatgaagatggaaacacaactttgaggaaggtgtcttcagctgcaaatttcatttggtcaaattctcctctggagatccttggttcagtcacttccataacctttactgatccagctgattcactgatcaaggatcatgacctaactagtgaagaggtaaaatctctctgcgatgatttaagggttctggggaagcaagacttcaagcatcttctaaagtggaggattcaagttagaaaagctcttt

SEQ ID NO: 39941 - DNA, 358 bp, Glycine max
  Clone ID: LIB3139-011-P1-N1-E9
attgctcaggaggtagtgcccgtgttgaaggtgatttggatgaattgaaccctagaagcaacataacaactgggcttcaagcatcacaagttgacaatagaggtagtggactttccgttgcagctgatagagtatctgatgatggatacaactggagaaaatatgggcaaaaacatgttaaaggaagtgaatttccacgcagttattacaaatgtacacatcctaattgtgaagtcaagaaactatttgaacgctctcatgatgggcagatcactgagataatttacaagggaacacatgatcatcctaaacctcaaccaaaccgccgttactctgctggaactattatgtctgtgca

SEQ ID NO: 39942 - DNA, 131 bp, Glycine max
  Clone ID: LIB3139-011-P1-N1-F1
gtttgatgcatgtatgatgtatctattattaggttgtcgatcttctgggaaatatgtgtatttatatctagtactatatatatggtatcttaatcaagtttgtcatagtaatttttcttttcttatttttg

SEQ ID NO: 39943 - DNA, 348 bp, Glycine max
  Clone ID: LIB3139-011-P1-N1-F10
ggccaaagttatgatttctctgtagttatgcagttggtgaccatgttgtccattaaaccttctgatggcttaaagggtttcatttgcattgtatacagatctctagcagatgctgttggttccttttccaagtggatatctgcttttaaggaaaattttagagccttgctattatttcttgctattgggatttcacaacctctatcttcgaatgcctgtgcatctgccttgcgtaaagtctgtgaagatgcttctgtagtaatttatgaaccttcaaatttggaaattttaatgtggataggagagggttgggacaagtggcatttatctttggaagatgaggaagaa

SEQ ID NO: 39944 - DNA, 361 bp, Glycine max
  Clone ID: LIB3139-011-P1-N1-F12
cacgaaccatgattctcaatcgggacagaaaatgcatccttctatgtatgatgatcgtgttggggcaatgtacaatcttagacagaggttgaaatgtgacaagagagttttattgggaaaaactacatctggaggagtctccttagcttcatctggaggaacacatgtggatttggagaggaccccaagttctcatgctgaagatcgtgctgagaaattgttacctgactccggtactgctcactcaagccttgatagatgtgccagagtgcacatccctttggggccaaaccatcaagctgaagtgccagaatggactgtcataacttatgaggttgattcaaagtggttggggacccaa

SEQ ID NO: 39945 - DNA, 353 bp, Glycine max
  Clone ID: LIB3139-011-P1-N1-F2
tgataacttaattagtgttcatgaatatgtcaagccttactttagtggttctaaattgaaaagctttctagctggtcataatatcaccattactgatggtattgacaaaactagtgcaactttgcaatttagaaagttagcagattgtgattttctcaagagaaactttaagcagatgtctaatgttttatgggtggctcctgaggacaaggcgagtttatggtcacaacttcattatgtttcgtgcaataatctggaaatgcaagaagcttatcttgtcaatctcgtaaatgtgttacgagaattgtatttgcacagtccagaggaagctcgccaattgagaaggaaagctc

SEQ ID NO: 39946 - DNA, 356 bp, Glycine max
  Clone ID: LIB3139-011-P1-N1-F3
actactcaatcttgacttaacatacttcattagcgcataacgcgctacacgctttgacaatgttttctcgacactcggtcagcaacgatgcctcccagaagagacagttggcgaggtcgttggcggcgaggatcggtgaggaccgcatgaaaacagtcggcactctagacgacctcaaaagggaatacggccgccttaagttgagcgacgacatgtccgttgcggactccaaatacgactgtgtgacgcaggtctcgatgccggagccgctacgccaccatgagcaccaccagaaagatgaaccggccccccaagaggtctggatggggccctggggtgaaattccccgatggaaa

SEQ ID NO: 39947 - DNA, 93 bp, Glycine max
  Clone ID: LIB3139-011-P1-N1-F4
ggcatgaccctcttgttgagtatgctctgcctatctgaaaatttccacacctcttttaattgtcgtaatgatgtgtgaagtgtgtgttatttt

SEQ ID NO: 39948 - DNA, 365 bp, Glycine max
  Clone ID: LIB3139-011-P1-N1-F5
acgaaagacgtttgtagagaccaatgcgcaatccgttgtggattatcgctcacagaggttggtaatagcttctttaatgagaggctcattagatctacctatgaacaatgactgcgccaggctacaagctcgcagtatgtgcttacactcccacaaaagttttggttgtttgggtggggatggcgatcacaccttaattagtggacatgaatatgtcaggccttactttagtgccaataaatgggaaaggtctctatcctgtcagtaaatcaccattactggctgtcttgacaaaactagcacgactttgcaaactagaaagttagcagattgtgattttctcaagagaaactttaagcagatgt

SEQ ID NO: 39949 - DNA, 357 bp, Glycine max
  Clone ID: LIB3139-011-P1-N1-F8
ggagactgatgctgcatttctaaaaacatcctctcacgagccttccctttcttctggtacaactgcaataactgcaattatatttggaaggtgagcacttgtctccactgttctttgtccttcagaactgtgggatatattatcttttcatacaataagtgtagctgtgaaaatggcacattagcattcaagtcaaatggggtgccagatatcatcaacattatttcttgcatgatttattattgtatctatgcctactctatatccccttccctgttaggatagcaattaaccacttatccgttagctagttagttagaaaggattggttagatcaataaggtaagagggattcat

SEQ ID NO: 39950 - DNA, 248 bp, Glycine max
  Clone ID: LIB3139-011-P1-N1-F9
cggctcgaggtacctttgggagatgatgtgggctctagaatatgatcctgatttgttcttgatgtatgaaatgcctcaatcagcttctgaaaaggctgagggctcaaaagggaaaacaaagtcaatacgtcaatgtggaaagtatgagagagaaattgtgaagagtggagcaaaaaatgctgaagcacctcttcctatgtctgttttccttgttgctagtgttttgaaagataaaagtgcaaaactac

SEQ ID NO: 39951 - DNA, 361 bp, Glycine max
  Clone ID: LIB3139-011-P1-N1-G10
ctccatcatggctcacctgctccccttcctggggcggactctcctcgccggcaccgcctccgcccacaacatcaccgacattctcgccgccaaccccgactacagcgacttcaacgacttcctctcccaaaccggcctcgccggcgacatcaacacccgccagaccatcaccgtcctcgtcctcaacaacgccgccttctccgccgtcgccgcgaaacaccccctctccgtcgtcaagaacctcctcagcctccatatcctcctcgactacttcgacaacacaaagctccaccagatcaccaacgggaccactcttttcaccactctctaccaaaccacaggtaatgccaacggcaacgtc

SEQ ID NO: 39952 - DNA, 363 bp, Glycine max
  Clone ID: LIB3139-011-P1-N1-G11
acacaattattcgaacacaaaggaatgcacaagattagatcattggcaacaaaagatgccagagtggagacacctaaattatcacagattccttgcaagttgattgagaaagacttgcacaaaggtatgaatgcattaagagtactgtgcaggtttctggctcttaaaggagctgataactgtgtattatataggcagcaaaggtaatcatgatgtggaacagcctgctggctctctaaagtcatatttttcagtacgttttgtcacatccaagtgtagaatttgtggcaatatcatatgccattgtgaaaatcctagcaattcaacacaggtgtcatcagacatatcattcgaaggatctgg

SEQ ID NO: 39953 - DNA, 359 bp, Glycine max
  Clone ID: LIB3139-011-P1-N1-G12
ttacgcccctcttttactctttttcttccttttgcgtgtactcattgttgttttgtttcactcttaaaaagcatgttgctttgtcgagttttttggttctttggaatagactggttttgaggaattgggttgtttctctgtttcgtagtggaattttttttttttaaaaaatgttgctttgctgtttgcctgatcatggtttctgacgcttggctttcagcgtgttttgatttgaagggagtacgcaattgatggatggatattctggtaaaagagccattgatggggtggtagtccctagaaaggggatgggccttgcatttagagatactgctaatgctagagatcgaaatggtcag

SEQ ID NO: 39954 - DNA, 355 bp, Glycine max
  Clone ID: LIB3139-011-P1-N1-G2
ctcgagccgaatcggctcgagcggctcgagcggctggagagagcatctcgctctgttttgcccacagagatatcgccccagctcgtttcttttgccgttgatgggactctgctacttgcttcactttctgttgtcaaagcacttcttgaggtcatctgcactcttggaggtactgtatttgctgcaattctggtcctgcgtgtgatttgggcagcagtttcttacttccagtcaagtgggaatagcttcaatcaaggggggaattcctttggtgctgttgcctaaacctctcttcaacttttaacaaaagatggcttatgtgaatttgtagtcccaatgatgaaaatgagatttg

SEQ ID NO: 39955 - DNA, 364 bp, Glycine max
  Clone ID: LIB3139-011-P1-N1-G4
caaaatcagaaccacattcctgggaattaatcttccgaatagaggtatgtggtcctaataatggttttgaaatgtggagttctgagtgggcaaatcaaacttcatggcatttgagtttccttattgacaatcccaaacagtctacagtttttgatattctcttgggaatctctcaagattttgaaattgctggtaatactcttatgccagctttttctgttccacaggctactgccagatcttctgaaaatgcggaatcctctgcatgatctggaattcgtgttttctttcgcttgttcgtttgtttaattcaataaaggaaattaggcatgaccctcttgttgagtatgctctgcctatctga

SEQ ID NO: 39956 - DNA, 359 bp, Glycine max
  unsure at all n locations
  Clone ID: LIB3139-011-P1-N1-G5
gcaactgcaagcagtagtgagtgatgaagatgaaaagtgggttccatttaattgaagtggtagtatgctagccaggtagcatttacatatttgctttggtgtgtggcactgcaaattaagagcaaacaaagtcttggtctttgtggctgtgaagaagggaagggatgctttgcttgatgcttggaaaaacaaaaacaaaaaggcatgaggatgtgatgcccccatttttctagttttagttttatccacaagctttgttttgtgagttgtaactttgtatttgtaacctataaacccacacaaccccaaccttcaccacccctcatcctcatctttcactctntttcattttgttttgt

SEQ ID NO: 39957 - DNA, 368 bp, Glycine max
  Clone ID: LIB3139-011-P1-N1-G6
aagagagcgtcctagtcgcaaccctaataagaagaaccacagcttcaagcgagtgacatccaccagccatgggtcgtatgcacagccgcggtaagggtatatcctcttctgctttgccctacaaaaggacaccccctagctggctcaagatctcttcgcaagatgtggaagaaaatatctgcaagtttgcgaagaagggtttgaccccgtctcagattggtgtcattcttcgagattctcacggtattgctcaggtcaacagcgtcactggcagcaaaatccttcgcatcctcaaagctcacgggcttgcgcctgaaattccagaggatctttaccatttgattaagaaggcagtttcaattaggaag

SEQ ID NO: 39958 - DNA, 288 bp, Glycine max
  Clone ID: LIB3139-011-P1-N1-G7
tccactaggagcctgtcggtttcctttcaaggagaggccttttcgctgcccgttagcaagaccaaggccgccagcgccaccccgacgccgaggaaggccgccacgccggagagacggagggccactccggtgaaaggggagaattcccggccggcggatcagcaccggtggccggcgaggacccggcatgtggatcatctctccaagagtgtggatataattgataataagaagaaggttgttggaaatgggaaatgggaatgggtttgggattgtggtcttttcttt

SEQ ID NO: 39959 - DNA, 124 bp, Glycine max
  Clone ID: LIB3139-011-P1-N1-H1
cttgatccggtttatccccacaaactatttcaatttaatgagattgattcaagttttgtaattacaataacacaatatgacatccttacaacatttctaatttaatctcatacaccaacaattt

SEQ ID NO: 39960 - DNA, 356 bp, Glycine max
  Clone ID: LIB3139-011-P1-N1-H10
gttggaatcaacccatactccatggaatggactggtttggccaatagattactgagtaagggcaacgatattctgtgttgcgattatgctagttttgatggtttgattaccaagcaagttatgagcaagatggcagaaatgataaacagtctttgtggtggtgatgaaaaattgatgcgtgaaaggacacacctgctgttggcttgttgttcaagaatggcaatttgtaagaaagatgtttggagagttgaatgtggaatcccttctggatttccgctcacagttatttgtaatagcatttttaatgagatgctcattagatatagctatgaaaaattactgcgccaggctaaagc

SEQ ID NO: 39961 - DNA, 354 bp, Glycine max
  Clone ID: LIB3139-011-P1-N1-H11
agcatactggtcacgtgaataaagatcaggatgctgaggctaaaactagatcaagtttaggtttaccttcaaatgataaagatcctcaacaaatgaatcattctgtacttgaagacactccatttataactttaataaatttaatcgggcaacaattatttggttggcctttttatttaatattcaactcttccggtcaggtttatgatggtcgttggacaaatcattttaatcctaattctcctatttttgatcctaaaaattttgttgacgtcattatctttgatattggtatcattatgggatcatcaactatcggtgatttctcttatgtctattcgctcattgtcgtag

SEQ ID NO: 39962 - DNA, 367 bp, Glycine max
  unsure at all n locations
  Clone ID: LIB3139-011-P1-N1-H12
aggagataaggaaacaagcagatgatgcaagaaccaattcaatatcgatgccttacagagttcaaagaatagaggaatttgtcaagcaacttgaggcaggagacctgaaactccgagtccgagtacttgagtctgaaagagctgctcgaaaagcaacaatattacaaatggctaccatgtattcagtattggggggaaccttgctaaaccttggtgtcactttgagtagccaaggcaatcaagcttttgcaaatggatcattcattggtgcaggcattttaggggctctatttttaaggtctatgcaacgggtgaagaaacttgacangtttgagaacatgatataattcgttcccaccaaattcaa

SEQ ID NO: 39963 - DNA, 356 bp, Glycine max
  Clone ID: LIB3139-011-P1-N1-H2
aattttgaggcttttccccacaagctggtgcagtttggagagattcaggaaaaagttgtattgaaattttcacaagaggaatttcttacagcttggtcaactcaggtgcgtcctgcaacaactctgttggctgatgggtgtccatatttgtatgcaatggtgcatgatagttcagtgtctacaataccaggtgattttgtcattggtgtcaagttgacaaccataaacaatatgtgtgcatatgggctcaatcctggtatttcaggttctcgtcttttgggcaccattcctcagtccatttcacagcaaactgtttggaatcaaatggcaacagtgagaacaccattgaattttga

SEQ ID NO: 39964 - DNA, 363 bp, Glycine max
  Clone ID: LIB3139-011-P1-N1-H3
ttgggaaggtacttaatctaaacacagctcataaagccttgccactggctcgtctcttagaatatgtggaaaggctttatgagcttgggaaggtacttaatctaaacacagctttacttttgtctgataattttttatttataataatatttctattcatagtcaaaatagttcgaatgaatctctgttcttgacctgaatgatccaaatccttccaggaaaatgcacataacttcatagtcaaaattcactgtgcttattattctcattcagtggctggtggaccatgaattgtttattgttcttggaagttaatgttgctttttggatataatgctagtggttatttggagaggacattct

SEQ ID NO: 39965 - DNA, 367 bp, Glycine max
  Clone ID: LIB3139-011-P1-N1-H4
gcaagaatgcaaatctcacatccctgccaaaaaggaactcaattgtgactgatccatgtagtgagtattatgtgtatgcatatcttaatagaaaagatgttcaagaggctctccatgccaatgtaaccaacctcaaacatgactgggaaccctgtagcgatgtcataacaaagtgggttgatcaagcttcaacagttcttccacttttacatgaattcctcaacaatagcctcagggtttggattttcagtggtgacacggatggaagggtgcctattacatcaaccaagtattcagttaagaagatgaaccttcccattaaaactgcttggcacccttggttttcctatggagaaggtggtggcta

SEQ ID NO: 39966 - DNA, 369 bp, Glycine max
  Clone ID: LIB3139-011-P1-N1-H5
aaaaggaaactctcattcaccttcttctctctccctcactccctctctttcttaatacaccaccttcccaaccctcttccattctccttctccaactccaacccctgcttcccttttttcattttctcactccccatcttctgagagtgatgggtgtttgctaccgctgttcccacacctcccacatcaccgccatcatcatcaccagcttcttccgccacaagccttagaattatactattcccaccctccctctttcttcaacaacaaccgttgacttcactacagtcacgtggtctttctctgaggatccaaccatggcggctggaactgtcttctgcgctgctgctactgctgcttctaatttgg

SEQ ID NO: 39967 - DNA, 347 bp, Glycine max
  Clone ID: LIB3139-011-P1-N1-H8
ggtgaaagcaattcaaagaaaacaacacattctgaggctggtggaatgaaatcaggcaaaggaaaaccttatccttctcaacaaccagatcatgatactggccaaaacagaaggcgtacaacatcacatgtcagaggaaaatctctttcttctgagccaacaactgcagtggaaacatcaaaggggcatacacgaacaatttccttagaatcaggaattcgcggtggtggttcatggcgtgtgcatccaaatctacccgattatgatgatttgagagctcgtcttttagctctcagacaaagataagaaacttacagcttcactagcaccagcatcagatagaactt

SEQ ID NO: 39968 - DNA, 352 bp, Glycine max
  Clone ID: LIB3139-011-P1-N1-H9
cctagtttcctaattcccacactaccaatctcaacagcaaccgaaaaaagtgaacaaatgattgaaacatcagaagcttcagtttacggtgtgatggcaagttggctcacaccctccaatctattcattttcatcaatctcgtcattggaaccatcgccatctcctctcgtttcgccaacacgaccaaaagacaacaccagctcgtccgttctccttctttgctagaaaggcttgcgtcctttaacctttgttatcacaaacatgaaccaacaacaaggatgatgacgacgacaacaacaatgtttcacagagttgtggacccagtcgagcgtctggatgaattcaggctcg

SEQ ID NO: 39969 - DNA, 218 bp, Glycine max
  Clone ID: LIB3139-012-P1-N1-A1
cggctcgagcggctcgagcggctcgagtgagagttgttatataatatctgtattatatataattttttttatttatctggtacagatgggggtatatgatcttgtttcatatttaataaattttttttgggggggtggggggttctgttctgttatttgagttttctatgctgtatttttgtaaaaaataatgaataaaaatatatggtttaattttt

SEQ ID NO: 39970 - DNA, 361 bp, Glycine max
  Clone ID: LIB3139-012-P1-N1-A10
atgataacttaattagtgttcatgaatatgtcaagccttactttagtggttctaaattgaaaagctttctagctagtcataacatcaccattactgatggtattgacaaaactagtgcaactttgcaatttagaaagttagcagattgtgattttctcaagagaaactttaagcagatgtctaatgttttgtgggtggctcctgaggacaaggcgagtttatggtcacaacttcattatgtttcgtgtaataatctggaaatgcaagaagcttatcttgtcaacctcgtaaatgtgttacgagaattgtatttgcacagtccagaggaagctcgccaattgagaaggaaagctctctctcg

SEQ ID NO: 39971 - DNA, 362 bp, Glycine max
  Clone ID: LIB3139-012-P1-N1-A11
ttgaaattttaataaaccgcgatcacaggttgccgcaccttaaaaccggaaacaaaagcaatcgttacttgatttcaagaatttctcaatttcttcctacttctttgtgtacgatttcttaagggaaagaaaatcactctctgtgctggtcacagacttcgtgaatcattttcttttccactcctagtttatttgctgaacactctcctatttgatataggacttcgtgtcagatttaaactttttctgtttctttctcagttctctgtttaatttcaagttcaagctggtgaaattttggattagtgctcccactctcctatctggtataggacttcgtgggtagacttttctacttctct

SEQ ID NO: 39972 - DNA, 361 bp, Glycine max
  Clone ID: LIB3139-012-P1-N1-A12
ctcgagccgaatcggctcgaggaaaattctattgaacccaaaaagagagaactttttttcttggtttgtgttttcattttgttgtggttttctaaagcgaagtgaaaaattcaatggcggaggttttaaccaaggcgagtttggtttcatcttcttggcatggggttagtcaacggcatcatcatcgaagggtttcaacggttctttcaaataatacatgtagcttccgttccggcgtgggaaagttctcttctttgaagatgaattctcaggttctcagatcttggtcctcttcttctgagtttcagggtaaaaagcttgtctttcatgtaaatataggattacccaatagggtcaattc

SEQ ID NO: 39973 - DNA, 380 bp, Glycine max
  Clone ID: LIB3139-012-P1-N1-A2
gcacgaagggccctttgggacattatgttgtcaattgagcagagggaagagtcttacggaaatgagcgccctgtgccactgatcaagaggtactgtcgaacagttgaggaggaactctccaaaatttgcggtgacattgctgactattatagaccaacatttgattccttcttgcgcatcatcagaagctagtgttttctactataagatgaaaggtgattattttcggtttcttgctgagttcaagactgaccaacataggaaagaggtccctgaacagtcactgtaaggatacgatgctgatttatccactgcaaacacagatcttccatgaacacatacaatatgtattggacttgcactcaagttatgtgcctttt

SEQ ID NO: 39974 - DNA, 377 bp, Glycine max
  Clone ID: LIB3139-012-P1-N1-A3
caaagatggctaggtctagtgcttatcctttgttcttgatttcttccattctgtttatttcttccatgattgttttgttcagggatgtgatggatcattgctgctagatgggagtccaagtgaaagagaccaaccagccaacggaggcatcagaactgaggccttgcaaaccattgatgacatcagagctattatccataaggagtgtggaaggatcgtttcttgcgcagatatcactgttttggcagcacgtgattcagttttcctgacaggaggtcccgattatgcagtgccactaggaagacgagatggcctgagcttcagcacatcaggaacaagtgatctccccaaacccttcaacaccaccggcgtgaccc

SEQ ID NO: 39975 - DNA, 146 bp, Glycine max
  Clone ID: LIB3139-012-P1-N1-A5
ggaaaaagttgtgttgaaattttacaagagaaattcttacgcttgtcaactaggtgcgtcccgcaacgactctgttggctgatgggtgcccatatttgtatgctatggtgcatgatagttcagtgtctacaataccaggtgatttt

SEQ ID NO: 39976 - DNA, 369 bp, Glycine max
  Clone ID: LIB3139-012-P1-N1-A7
aattgactagtggccttgagactgcatggaacaagctcaaaggagaagaggttttgtctaaagagaacattgtggagcccatgcgagatattaggagagctctcttagaagctgatgttagtcttcctgttgtcagaaggtttgtgcagtctgtcagtgatcaggctgtgggtgttggtgtcattcgaggagtgagaccggatcagcaattggttaagattgtacatgatgaacttgtacgattgatgggtggagaagtttctgaactggtttttgccaaatctgggcccactgtcattttattggctggacttcaaggagttgggaagacaacggtttgcgcaaagttggcaaattatctcaagaaac

SEQ ID NO: 39977 - DNA, 375 bp, Glycine max
  Clone ID: LIB3139-012-P1-N1-A8
atggagaaaggagaatatatattatgggaaggaactctcccttcgcctctgcagcttcttcttcttctccgttttctgatgctttttctcgaaggtactaattgaagatcccctttccttttcgttttcggtctccccttttctgaccctcaattttttttttggagcatcgtgctgtgataatatatatactctcttcttttcttttcttttcttttttttttttccttttcaagatttatggagatccctgggttagggttagatataatatttctgtagcatttttcaattggttcaactctctctctttttattctctcccaaaagaagaacatttttttctagagtagttggtgtttattatttttgctt

SEQ ID NO: 39978 - DNA, 375 bp, Glycine max
  Clone ID: LIB3139-012-P1-N1-A9
tgatttgttgggtttacaaggagcaggtaaagcttttccaaacaaaattgtttttgatgataagcttgtgttggctaacacacaagaattctttgatggaaattttccagtggattcttggttaccaatttttgtgaattgtctttatcctgtaagtcaattaccttcagaagctgtcgttgtaaatgttacatgtggtagtggaccgtgtggtttacccaccactgcttggattagttctgcagttaacaatcgctcctcagatatcaacaaaaggattcgcacagcacttgggaaaggtaagaaaattgtttttcttactagagttgatccttttccagtagctttactggctgttctttttggcgttaagaa

SEQ ID NO: 39979 - DNA, 379 bp, Glycine max
  Clone ID: LIB3139-012-P1-N1-B1
acaacatccaaaaggaatccactctccacctcgtgcttcgcctcaggggtggcatgcaaatctttgtcaagactttgactggcaagaccatcaccctcgaggtcgaatcctcggacaccattgataatgtcaaggccaagatccaggacaaggagggtatccctccagatcagcagaggttgatatttgctggtaaacaacttgaggatggaagaacccttgctgattacaatattcagaaggagtctaccttacacttggttcttcgtttaagaggtggcatgcagattttcttcaagactttgacgggaaagaccatcaccttggaggtggagagttcagataccatatacaatgtgaaagccaagattcaagataa

SEQ ID NO: 39980 - DNA, 365 bp, Glycine max
  Clone ID: LIB3139-012-P1-N1-B10
ccaaatccacttctccaactaatgggcgtgttcagcgaagatccgaatcccaacccgaacccgatcgtgatccgagaggtttgggcctccaatctcgaatccgaattcgaactcatccgcgaactcatcgatcgctacccttttatctcaatggacacagaatttcccggtgttattttccgaccacatgtggaccccaccaaacccttcaaccaccgcaaccgtccctccgaccactaccgcctcctcaagtccaacgttgacgctctcaacctcatccaggtcggcctcaccctcaccgacgccgccggcaacctccccgacctcgccggaaaccgctccatctgggaattcaacttccgtga

SEQ ID NO: 39981 - DNA, 362 bp, Glycine max
  Clone ID: LIB3139-012-P1-N1-B11
gaggccttcaaggagattcctttaagggagcccatcttctagcctctgcgtgctgcaagcatttcaccgcttatgatttggacaattggaagggcgtcgatcgctttgtcttcgatgctcgcgtatctttgcaagatttagcggacacataccagcctccgtttcagagttgcgtgcagcaaggacgagccagtgggataatgtgtgcttacaatcgtgtcaacggagttcccaactgtgctgattacggtctgttaacccaaaccgccagaaatcaatgggatttcaatgggtatatcacttcggattgtggaacagtgggggttcatacacgacaggcaaaggtatgcaaaatcaccaga

SEQ ID NO: 39982 - DNA, 342 bp, Glycine max
  Clone ID: LIB3139-012-P1-N1-B12
aaaaaattaaaaaaaaaaaaaaaaaaaaaaaaaatggggaaaatttaaaaaaaaaaaaaaaaaaaaaaaaaaaaataataaaaataaaaaaaggcgggacttaattctagtaacaaatacctccccccgtactaaaattttcctcttcttctgtcgaattaacccttttacctattcatggggggtcccccccccctttgtgaccttgttctcccctaatttttttcgggccagatcctttccggctccctttttttctttttatgggggtgcttaaggtttgggcttactcccgttaattttttttctcttggtgaccttttttccgtccccaaacccccc

SEQ ID NO: 39983 - DNA, 366 bp, Glycine max
  Clone ID: LIB3139-012-P1-N1-B2
agcttgttctcttaggtgattctggtgttggtaaaagctgtattgttctacgatttgttcgtggtcagtttgatccaacatctaaggtaactgttggagcttcttttttgtcgcaaacaatagctctgcaagactctacaacagtcaagtttgaaatatgggatactgctggtcaagagaggtatgctgcgttagcaccgctatattaccgtggtgcagcagttgcagttattgtttatgatataacaagcccagaatctttcagcaaagcacagtactgggttaaggagctacaaaaacatggaagccctgatatagtgatggcactggtcggtaataaagctgatcttcttgagaagcgggaag

SEQ ID NO: 39984 - DNA, 365 bp, Glycine max
  Clone ID: LIB3139-012-P1-N1-B4
atgggttcaacaggtgagactcagattactccaacccatgtatctgatgaagaggcaaaccttttcgccatgcaactagccagtgcctcagtactccctatggttctcaaatcagctcttgagcttgatctgttggaaatcatagccaaggctggccctggtgttcacctttccccctccgacattgcttctcggctcccaacacacaaccctgatgcacccgttatgttggaccgtatattgcgcctcttggcttgctacaatatcctctctttttctcttcgcactctccctcatggcaaggttgagaggctctatggtctcgcccctgttgctaagtacttggtcaggaacgaagatggtgt

SEQ ID NO: 39985 - DNA, 370 bp, Glycine max
  Clone ID: LIB3139-012-P1-N1-B5
gcaacacacacttcaatttatcagcatggcctccgttcagtgccacaaaacctgcaaagtgagctgccaacaggaaaaccagcacgcctcgtttgggcagaaagtttctgacttgttcaaagggcatcaacataatgaccacagctccaattatgccacccaaaccaaagtgctttcccagtcagggtcagggttaggccccttcaccaccaaaactcaaacacaatgcggttgcccccaaacacatctcagtaccactcatggctccaacacaaaaggccatggccatggccaagggagaattaagagggagcacaagagagggatgctgcagaacatcaaggatcgcttatcaggtgacaccagcagc

SEQ ID NO: 39986 - DNA, 200 bp, Glycine max
  Clone ID: LIB3139-012-P1-N1-B6
gccgtagccttcaaaactgggttcttgatcggcggtaacattttcgttgctgtttgtttttgatgagtactgttttttgttttgatggtaaaagtctgagattttcaaattcacaagcagccatagggttttagtccatttcctttgctgctgaggagggatgtcttaaatttgcatttaatttataaggaagttttgtt

SEQ ID NO: 39987 - DNA, 374 bp, Glycine max
  Clone ID: LIB3139-012-P1-N1-B8
gcacttaactagtaatatttattagaatttgccagagaattagaagaataaacataataccccagatggcttcaaaaacttgttcctcccttgcccttttcctcacactcaacctcgttttcttctcacttgtctctgcatgcggttatacaccatgccctggtccaaacccaaagccaaggcccaaccccaaccctaaccctaaccccagcccaagtggctcgtgcccccgtgacgcactcaaactaggtgtatgcgccaatgtgctaaacttggtgaacgccactttgggtcaaccaccagttaccccttgttgctcccttctcgatggtctcgttgaccttgaggctgcagtgtgcctttgcactgctctc

SEQ ID NO: 39988 - DNA, 372 bp, Glycine max
  Clone ID: LIB3139-012-P1-N1-B9
cgtctttgaagtttctaagatgacttctccgtacattaaatgtacagtctctttcttcatagcatttggaaatttggctgatgacaccatcaattttgaggcttttccccacaagctggtgcagtttggagagattcaggaaaaagttgtgttgaaattttcacaagaggaatttcttacagcttggtcaactcaggtgcgtcccgcaacgactctgttggctgatgggtgcccatatttgtatgctatggtgcatgatagttcagtgtctacaataccaggtgattttgtcattggtgttaagttgacaaccataaacaatatgtgtgcatatgggctcaatcctggtatttcaggttctcgtcttttggg

SEQ ID NO: 39989 - DNA, 376 bp, Glycine max
  Clone ID: LIB3139-012-P1-N1-C1
cccagttgatcgatcccgccccactcgtgtggagaggcgtgcatcttcttctcggagcaggagtccatccaaatcccggtctaggtctaggtccaggtcatccgtggaatctctaccaagagcaagtagagacagcaggtccaggtcatcgtccagaagcccagatggaaagaaaggcttggtctcatatggcgatggttctccatactaatgtgaaaggtgaaatatgtggtgctgagggctttgggtcacactgtaacctttaatgagttgcaggcttcaatttttgaacttcagcacctgcattgcttgatggaattcgtgaatgacacttgtttttcccctttagagacagcaatgacatgttgaaatattc

SEQ ID NO: 39990 - DNA, 202 bp, Glycine max
  Clone ID: LIB3139-012-P1-N1-C10
tttttttctctccatgttttgaccagtagtcgcatttataataaggctatagatgaatatacacacatatattatgtataatcggttagtgtatgaagatgcgaataatactataaaatgctgtagaccataaatttttctggaacccttttggttctgttgagaaaaaaaaaattatttaagtcttaatggtttttttaat

SEQ ID NO: 39991 - DNA, 363 bp, Glycine max
  Clone ID: LIB3139-012-P1-N1-C11
attagatatagctatgaaaaattactgcgccaggctaaagctccaagtatgtttttacaatccttcaaaaattttgtttctttgtgtgtgtatggtgatgataacttaattagtgttcatgaatatgtcaagccttactttagtggttctaaattgaaaagctttctagctggtcataatatcaccattactgatggtattgacaaaactagtgcaactttgcaatttagaaagttagcagattgtgattttctcaagagaaactttaagcagatgtctaatgttttatgggtggctcctgaggacaaggcgagtttatggtcacaacttcattatgtttcgtgcaataatctggaaatgcaa

SEQ ID NO: 39992 - DNA, 364 bp, Glycine max
  Clone ID: LIB3139-012-P1-N1-C12
ctcgcttctaacgtcaccgactcagttgttgtcagcgagtgagtgagtcgtttctctgcagcaacaaggtttagccactccaaacagacgagaaatgggtcgtggggtcagtgctggtggtggtcagagttccttaggttatctctttggcagtggggtgcctgccagcagtgcaaacagtcagcctgcaaatggtgctcgcactcaaaatgctagtgctccttcaccaccagtcgataagcaaagtccagcaccagcaccagcaccagcaccagcacctgcatcatcaccaattgataagcaaattccagctggaattcctggaagtctcaaaaacaattaccatcgtgctgatgggcaaaac

SEQ ID NO: 39993 - DNA, 333 bp, Glycine max
  Clone ID: LIB3139-012-P1-N1-C3
tggggctggggatttggcaatacttggtttggttttaagcacccaactggtactggctggtttccattggtgcttaccaccaccaattaggtgggtattgcgacaaaatgtggaattaataaaaaagaaattttccaactttaccaaactaataaatattatggagtccaattttgggattcttctgatctttatggtggcatcaaatccatgctcaccaggcaccttttccatctccctctcccaccatttcccctaacaacaattgaccatgcccagtggccatgaattatgtgcaaacagccccttggaacagctcttcctgccaaaact

SEQ ID NO: 39994 - DNA, 368 bp, Glycine max
  Clone ID: LIB3139-012-P1-N1-C8
gcgggttcagtcacaatcacaaacccccaatgctgcaactgatagaaataatggtttgcttgctcaatctcgcctgcagacaggcaatgatcgtggtactggttcctctcagactccgatttcaaccttgttagtgcaaggagctgcttcgttttcatccctttcatcagcattaaattctgcgatggattctgctgaaagattagttgaggaccttgagtcatatattcataatcacccaacaaatggtgtcaatacaaattcaactcatgatgggaatgttgctgcaactgattccacacctgcagcttctacatctcattttagtaggaatgttgacaccactgctgatattggcttagaaattc

SEQ ID NO: 39995 - DNA, 369 bp, Glycine max
  Clone ID: LIB3139-012-P1-N1-C9
ggtagacacgaccacctccaacgataacaacaatgaggaaccaacctcgttgtccttaacgtcgtccctgaattctatactaacaaaattccatgcaggttacttcagaataagcctctccctcggtggccaagctttgttgtggaagacactgatcgaatcatcatcatcaccaacacacgacacaagcgccgctctacgacgcgttctttgcacgcttccttccgcagcagctattcttgcactgtggtcgttggctctctttgctctcgtgttgctctctcttctttacctcctacggtgcttgttttactttaagatggtaaaggcggagttcttgcatcccgtaggggttaactacctcttcgc

SEQ ID NO: 39996 - DNA, 372 bp, Glycine max
  Clone ID: LIB3139-012-P1-N1-D1
caccgatcaaggcgagaacgacccttcctcgctctggctgaaccctgaaatcaaagactcctccaccgtctcgccgccgaattccacggttaataagacgatgcatttcgaaacccctggttccagtaccctaaccgaaacccctagcgctgctgctgctgttcacgtccccaattctaaaagccagggattcttcccgagggaattgaacttttcgaattcattgaaacctgaatccggtgaaattctgagctttggggagagcaagaagagctcttacaatggggctttctttcccggtgttgttgcggttgaggagaacaacaacaataacaagaacaagaagaagaggtccccggtggtttctcggag

SEQ ID NO: 39997 - DNA, 367 bp, Glycine max
  Clone ID: LIB3139-012-P1-N1-D10
gtttgaagaaaaagaaggatgcggagagcacaaagaagaagaacgaagcggctataacaagaagcagaagcgagagttcctcgtcaacaacctcagaatccagaggcttcacgaggtggtcgtgtttgaggaagagaacggaagaggaagattcttccgagacaacaagctcttccgaaagtgaagtggagggagccacggcggcgacacatgataataataataataacaacacggggactctagttactgtggacggtgaacgacaactggaggtcgaaacgctgctgaaggcttccgcgtacatattgggtgccacggggtccagcataatgtacaaggcagttctggaagacggcacgtcgtt

SEQ ID NO: 39998 - DNA, 364 bp, Glycine max
  Clone ID: LIB3139-012-P1-N1-D11
cggcggcgtggttccgatgtccgtcgtctccgaggagtctggcggacggccgaggccgtccggggcttccgccggcgggcacctgcggagtctgtcggtggattctgacttcttcgatgggctcgggtccggcgtcggcggcgatgagagaggtgccgggaatggcggcggcgagcggcacagcaactcgatggaggggtcgtcgacgacgtcgtttgaggcggactcggcgacgatgatggatggcatgaagaaagctacggcccctgataaacttgctgagcttgctcttacggatcccaaaagagctaagaggatgcttgctaacaggcaatctgctgcaagatctaaggagaggaagatt

SEQ ID NO: 39999 - DNA, 261 bp, Glycine max
  Clone ID: LIB3139-012-P1-N1-D12
gccatggctctcatttgcacgtggagccgcgtgtctaacccgcattggtctctgctcttccaagacgccccttcaactcatccaccgccgtggcctcgccgatcaccatggccctcccaaagttgcctgctggaaagacccaatgagcccgtctaaatggaaggaagagcattttgtgattgtctctttaactggctgggggctactcatctatgggggattcaagttggccacaggaggcaggggcaagaaagaagaggg

SEQ ID NO: 40000 - DNA, 373 bp, Glycine max
  Clone ID: LIB3139-012-P1-N1-D2
ggcagatgatttgctgctgcaacaagatggatgccactacacctaagtactccaaggcaaggtacgatgaaattgtcaaggaagtttcttcctacatgaagaaggtcggatacaaccctgacaaaattccttttgttcccatctctggttttgagggagataacatgattgagaggtctacaaaccttgactggtacaagggtccaacccttcttgaggcccttgatcagatcaatgagcccaagaggccatcggacaagcctctccgattgccccttcaggatgtctacaagattggtgggataggaactgtgcctgttggacgggttgaaaccggtgtcttgaaacctggaatggtggttacctttgcacc

SEQ ID NO: 40001 - DNA, 368 bp, Glycine max
  Clone ID: LIB3139-012-P1-N1-D4
cttcttctcttgcggctagggttttagcgcagcttcttctagatttaaggaagatgggtaaggaaaaggttcacatcagtattgtggtcattggccatgtcgactctgggaaatccactaccactggtcacctgatttacaagcttggaggcattgacaagcgtgttattgagaggtttgagaaggaagctgctgagatgaacaagaggtctttcaagtatgcctgggtgctggacaaacttaaggctgagcgtgaaagaggaatcaccattgatattgctttgtggaagtttgaaacaacaaagtattattgcacagttattgatgcgcctggacatagggatttcattaagaatatgattactggg

SEQ ID NO: 40002 - DNA, 368 bp, Glycine max
  Clone ID: LIB3139-012-P1-N1-D5
gtgagtatggctggaaaaggcgagggtcctgctatcggaatcgatttgggaacgacgtactcttgcgtcggcgtgtggcaacacgatcgtgttgaaatcatagccaacgatcagggtaacagaactaccccatcctacgtggctttcaccgacacagaacggttgatcggcgatgcggcgaagaaccaggtcgctatgaacccaaccaacaccgtttttgatgctaagcgtttgattggaaggcgtttttccgatgcatcagtacaaggtgacatgaaattgtggccgttcaaggtgattcctggccctgctgagaaacctatgattgtggtgaactacaagggggaggagaaacagttttccgcgga

SEQ ID NO: 40003 - DNA, 368 bp, Glycine max
  Clone ID: LIB3139-012-P1-N1-D6
aatgcagttcgtagtatttttgttgcgcctttcagaggcggaaggcccattcgggtggttacatttccgaataccattgtgcagattgaaccagacatgaattcaaggtttcagcttttgagtaccactaccaatggtgattttgttcaagggaaagatctcgcaatggttaaagttaatgtagcatgtgctgctgttggcttgacatcaagttacactccaactccattgttggaatctggtttgcaaaaagacagagggttaattgtggagtattttggaaggatgtcttacgttgctcataacgttaatcagccccaagagaaagatttgttagagggaaatttttcctttgatattaaatctcg

SEQ ID NO: 40004 - DNA, 164 bp, Glycine max
  Clone ID: LIB3139-012-P1-N1-D7
gtcgacatatgggcaactccgcatcccactgggttggcgcgttgggattttgagccaacaaaccttattcagacgtgcgaagtcttgcggggggctcgcgtggacaaggcgagtgaatggtcacagccacaataggtttggggaaatatgctggagatgcacgg

SEQ ID NO: 40005 - DNA, 369 bp, Glycine max
  Clone ID: LIB3139-012-P1-N1-D9
ctcgagccgaatcggctcgaggttgaaaaccctcacacagaaagagtggtttgtgcggtggtgaagaagcgttcggaatagaagaagaagatgtcgtcggtttacgttctagagcctccgacgaaggggaaggtggtggtgaacactacgcgcggtcctttggacattgagctgtggccgaaagaggctccgaaggccgcgaggaacttcgttcagctctgcctcgaaaactattacgacaacaccatcttccaccgcatcatcaaggacttcctcgtccaaagcggcgaccccaccggcaccggcaccggtggtgaaagcatttatggtggtgtttttgctgatgagtttcattcacgtctgaaattc

SEQ ID NO: 40006 - DNA, 367 bp, Glycine max
  Clone ID: LIB3139-012-P1-N1-E10
cgggactgtaactagccgcagcacgaggagcagcctcaggaggagaaggatgtctcacaggaagttcgagcacccaaggcacggttcactgggatttcttcccaggaagcgtgctgctcgtcacaggggaaaagtgaaggcattccccaaggatgacccatccaaggcacccaagctcactgcattcttgggttacaaggccggtatgactcacattgttagagaggtcgagaagccaggatcaaagcttcacaagaaggaaacttgtgagcctgttacaattattgagacccctccaatggttattgttggtgttgtgggttatgtgaaaactccacgtggtctccgaacattgaacactgtctgg

SEQ ID NO: 40007 - DNA, 364 bp, Glycine max
  Clone ID: LIB3139-012-P1-N1-E11
aaggacacacctgctgttggcttgttgttcaaggatggcaatttgtaagaaagatgtttggagagttgaatgtggaatcccttctggatttccgctcacagttatttgcaatagcatttttaatgagatgctcattagatatagctatgaaaaattactgcgccaggctaaagctccaagtatgtttttacaatccttcaaaaattttgtttctttgtgtgtgtatggtgatgataacttaattagtgttcatgaatatgtcaagccttattttagtggttctaaattgaaaagctttctagctggtcataatatcaccattactgatggtattgataaaactagtgcaactttgcaatttaga

SEQ ID NO: 40008 - DNA, 363 bp, Glycine max
  Clone ID: LIB3139-012-P1-N1-E12
tttggatcctctcacatctctctttctttctccggtgtcatggaatccggtagtgcccgatgtttatattccctccggttctgaaatcatcaaatgcaactaccaaacctcgagaagcttccttcacacacttccttctgtgagtttccttctcttcttccttctcggtcgccggacaacttctccggcgtaaccacggttaccggagtatcttctaattattttttccctctctttgcttctattccgcgcagtttccttgttcttcgaacaagctctttctcattccatcaccacaacttccgatattgcatcttcaactgttttggttacattttacgcgtaataactgattgtttcttt

SEQ ID NO: 40009 - DNA, 297 bp, Glycine max
  unsure at all n locations
  Clone ID: LIB3139-012-P1-N1-E2
gggatgtgtatattatattctaatggagggtgtaaatatttagtggtgtacaagaatttgctaaatattggttgttgatggatgatagctttctaatgggaattatgggatgttttaatatatccctttattagtctaatctcggatccaagttctgtatatatattttttttactcacagattttttagagataatcttgttggtgagacagtaaaaatactaaaagttaatatctacatcatatctttgttaatcatgttgttttggtactagctactanctctgtgctagattc

SEQ ID NO: 40010 - DNA, 367 bp, Glycine max
  Clone ID: LIB3139-012-P1-N1-E4
gatccatgacaacaacgacaatgcttcttcgtagctgatccacgccgattctcaattctcgcatccctcactcgaatctcaaccccaaggattcgcctcacgaacctgaaatccttcaccggagcccgcggacgcgctcgctcacgctctccgcgtcgttgagttcgctgtcgcctagcagaatgacgcgagcgttgtcggagactgatctttccgcgcgctccaaaacggcgtcgttcggctccgctttgttttccttctacgagtcggacgatggagacgttgcggttgttgaaggaggcggagttggcggcggcggcggtggatgggacaatggtgacggcggaggttcggggttttgggattc

SEQ ID NO: 40011 - DNA, 370 bp, Glycine max
  Clone ID: LIB3139-012-P1-N1-E5
ctaagccacttctccaccctagacgtcctcttgaaaccctactacagcaccacacttccccctctcaattcatctctctctcgatttacattccagagatagaagaagaaagagagcaatgacagcaacaacagagagcgagaagaagaagcgagaagaagaagaggaaccagaacaagttgtgaacccatgggaagtttcagccaaaggtaaaatcgattacgacaaactcatagatcgtttcggttgccagaagctcggcgaagccctaatttcgcgtctcgagcaactcacctctcgcactcctcacgtctttctacgacgcggcgttttcttcgcccaccgcgatttcgcggagattctggacgcg

SEQ ID NO: 40012 - DNA, 368 bp, Glycine max
  Clone ID: LIB3139-012-P1-N1-E6
gttacaattgattggtttatttcctctcaggaatgtggttcccaggacctattgtgttttaaatccacaaaatccttttgtgttaaataggtggatggggaaactgacttttccccagggcacttcccgaagtgttaaaagaatgcctctttctatagggggaggagctggtgcaaagaatgctattctcatgaatatgccaaatgctgttctttcaatgtggagatattttgttggagatctcgtctttgaagtttctaagatgacttctccctacattaaatgtacagtctctttcttcatagcatttggaaatttggctgatgacaccatcaattttgaggcttttccccacaagctggtgcaat

SEQ ID NO: 40013 - DNA, 367 bp, Glycine max
  Clone ID: LIB3139-012-P1-N1-E7
tgtatcggctgttcaagaagggcctagaaagggtgaggccacattgcgcccaagggtttattctcactacggtgaggctcaagctcagccggacacatgttggtgtaaagcgcctataggttgtgcacaagctcctaatggtgataggtgctatctccagattattcattgtaccagtgcactccccaagaacactgaatgcatgaccgtactgcgtgaggttacattggcacacccatggaccatgatgacaacctgtgcaggcgaagggcagtacttgaacatacttcttaagctcaatgatgccaatggcaccctcagaatgggtgtctgcacttgctattctcttattggcaccggttttgat

SEQ ID NO: 40014 - DNA, 368 bp, Glycine max
  Clone ID: LIB3139-012-P1-N1-E8
gtgaacatgagagggaggaaaggagaaagaggagggaaaggattctggctgagaaagtagcagctaaagcaataaatgctatcaaggagcgggagaatatagtggccaaattagagggggagaaggaaagtctagagaaaatacttgaggagcgagctaaacaacaagcacaagaggcttcacagcttcagagcactatgatggaaacaatggaagctgttgagttagaaaagcagaaacataataatactagaatggaagttcttgcacgtttagctaaactggagactgtcaatgctgatcttgcaagatcccttgcagctgtgcagtggagccttgaagttgaggttaagcaagtatcagaactc

SEQ ID NO: 40015 - DNA, 366 bp, Glycine max
  Clone ID: LIB3139-012-P1-N1-E9
ctcgagccgaatcggctcgagtgtaaatgagagtatggtgactggtgaatctatacccgtttcaaaggaggtcaatgcatctgttattggaggtacgatcaatttgcatggcgtccttcacgttcaagccaccaaagtaggatctgatacagttttgagtcagataattagtttggtggagacagcccagatgtccaaagctcccattcaaaagtttgctgattatgttgcaagcatatttgttcctacagttgtggtgttggcattattgacactattgtgttggtatgtagctggggctcttggagcatacccagatgaatggctgccaaaaaatggaaatcactttgtttttgctcttatgtt

SEQ ID NO: 40016 - DNA, 370 bp, Glycine max
  Clone ID: LIB3139-012-P1-N1-F1
caaagacacaattcaacttaagagatcaatatggccaccattaccaagcctccttctaatatatgtttcctccttctgttgcttctagcacacttccatttgggccaaagccaagttgagttgaattactactctaaaagctgcccaaaagctgaagagataatcaaggaacaagtcacacaactatacaacaagcatggaaacactgccgtttcgtgggtcagaaatctcttccacgattgcgtggttaagtcatgcgatgcatcactactgttagcgacggtgagcgatgtagtgtcggagcaggcgtcggatagaagttttgggatgagaaacttcaagtacgtaaacaccatcaaagcagcggttg

SEQ ID NO: 40017 - DNA, 170 bp, Glycine max
  Clone ID: LIB3139-012-P1-N1-F10
aggaagttgattttcttggaaatattattattttaaccttgtgtatgttgtcagcttctcactgaagcataaacagggaatattgattcttttcaggttcttgtgagaggaaaagattgtgtttttgtttttggacttttgattgttgtggatgaggggggggggggggg

SEQ ID NO: 40018 - DNA, 362 bp, Glycine max
  Clone ID: LIB3139-012-P1-N1-F11
caaggacgtggcgcagaggattctcaattcggtggactacgagatggggaggtgcacctacaccttaggtttaggagaggcgaatatcgcgggaaagaagatatttctcttcgacgcggtttgcaggccgagggagattcactcgttggagacgacgccgtttgatgattacgtggggaaccacgagaacaagacgctgcacgccacgcagcagatcgccgagtgttggacgcgctcggtgaagaagctgctggagagagtaacggagtcggtggagaaaaaggcgttggagaaggccgcgagtgagtgccatgcggtggagcggatctggaagttgttaacggaggttggggacatgaacc

SEQ ID NO: 40019 - DNA, 365 bp, Glycine max
  Clone ID: LIB3139-012-P1-N1-F12
caaacagcaacagtacagagcattttgatgcatgtaagtggacaaaatcagaaccacattcctgggaattaatcttcccaatagaggtatgtggtcctaataatggttttgaaatgtggagttctgagtgggcaaatcaaacttcatggcatttgagtttccttattgacaatcccaaacagtctacagtttttgatattctcttgggaatctctcaagattttgaaattgctggtaatactcttatgccagctttttctgttccacaggctactgccagatcttctgaaaatgcggaatcctctgcatgatctggaattcgtgttttctttcgcttgttcgtttgtttaattcaataaaggaaa

SEQ ID NO: 40020 - DNA, 369 bp, Glycine max
  Clone ID: LIB3139-012-P1-N1-F2
cacacacacagttcgtcggaatgggaagggtgattcgcgctcagcgtaagggtgctgggtcggtgttcaagtctcacactcaccaccgcaagggtccggcgaggttccgcagcctcgacttcggcgagcgcaacggctacctcaagggcgtcgtcaccgacatcatccacgaccccggtcgcggcgcccctctcgccaaggtggcattccgccaccccttccgctacaagaagcaaacggagctcttcgtcgccgccgagggcctctacaccgggcagttcgtctactgcggcaagaaggccaccctcgtggtcggcaacgtgttgcccatccgatccatccccgaaagtgccgtcatctgcaacgtcg

SEQ ID NO: 40021 - DNA, 370 bp, Glycine max
  Clone ID: LIB3139-012-P1-N1-F3
gttgctggaagcaaaggaagattgggctatgcttcattaataccatatgttgagcctgtggtacaagcccaaagtgctgaagtctattttgacttctttcctgtggaagttgatagtcaagagggagttgctcatattggtgaactcaaatctggggtttatgtaccactgcccacaaaaactaatcttgtggaaactcccaaagaatggcagttggatttgccttgtgataagattccaagtgtgttaaccactactgatgagagattggttggcacagagcatgaaggatatgacccatttcttggtggtattcaaaaatatgcaactcccatgatgcctcttgatgaggagattctttccaaagttg

SEQ ID NO: 40022 - DNA, 371 bp, Glycine max
  Clone ID: LIB3139-012-P1-N1-F5
gtcgtggttgcacttgtactcactcaatccgagaccaaaacggcgccatgcctaccgtcagtgtggggcgggatcgcctgtttgcggctctaggaaagacttacacgcaagaggaattcgaagacttgtgcttcagtttcgggatcgagcttgacgacgtcacgacggagaaggcaattgtgagaaaagagaagcatttggaggaagaagaagctgatgaggacgaagaagttatctacaaaatcgaagttcctgccaacagatatgacctcctgtgccttgaagggcttgctcaagccctccgagttttctgtgagttccaggagattcccacttacaaactgtccaagatcagtaaggatgcaatgctg

SEQ ID NO: 40023 - DNA, 365 bp, Glycine max
  Clone ID: LIB3139-012-P1-N1-F7
tcgagttccattaacagcaacagtaaggagataaccatggagattccaagcttggttcgactttacaaggatggcaccattgaacgcctccaaaactcaccaattgtgccacccacgcttcaagatccaacttcttccaaagacgtcgtcatctctggtgaccccctcatctctgctcgtcttttccttccaaaccggattcgatcccagcaagagggtcataaagtccccatcttggtctactttcatggtggaggtttcttctttgaatctgccttcaaccaactccaccataactatttcaacaagtttgtctccgtagcagatgttttagtcgtttccgtcgagtataggttggctccaga

SEQ ID NO: 40024 - DNA, 326 bp, Glycine max
  Clone ID: LIB3139-012-P1-N1-F8
ggtttctcttacttccttggagaaaaagaagagccaccgttgcgacgccgttcgtgcattgttgaggtgccgatgtcatgtttgggcgtggtggaccaaggaggagtgattactggaaatattatgatattctggggatttacaaaaatgccagtgaagatgaaatcaagaatgcctataggaaggggggtatgaagaaccgtccagcttagggtggagatgctgaaacgtataacgaggtatgtccagcatatgaaggcttaagtgatgctgggaagaacgaactgtatgaccagtatggtgaggatgctcttaaagcagggatg

SEQ ID NO: 40025 - DNA, 368 bp, Glycine max
  Clone ID: LIB3139-012-P1-N1-F9
gaaatggagaaggagaaagagaaagaatctaagctgaagaacaagatcttcaaaatactgccaaaagcagcggctgcagcagtgagcatgacattccaaaaccctcccttcagcccaggcagggatcacaagttcaaacaccatggcggcaaagggttcttctctggccctatgattcccgttgaagccagaagaaaatcaaaggatggttgtgttgaaactcaagaacccacttcccccaaaatctcctgcatgggacagatcaagcacaagaagaagaaaaaccaaatcaaaaaagcggcaaagaccatgtccatgcctacagaagaaaagaaacaagcttccaagtttcagaggatgatgtcgtt

SEQ ID NO: 40026 - DNA, 367 bp, Glycine max
  Clone ID: LIB3139-012-P1-N1-G10
attggaggcagcatgttagttctaggaaccctagaattgagaaatgtagttctatgttagataatcttgtgggctcacttgatcttcctaaggttaaaaattctgccaaaggaaaggttttgatgcaagctatgtatggagttaaggtggagactgtatttatttgcagggtgtttactgcagcattctctggctcgtcaaagaagttatcagacttgaatgtggccgacatacattcatgggctccagattttagaaggttgcaggatcttgtaaatgaggaaattagagttagattttctggtggtaaatttactgtattgaatgagttggaagcggttgatgcctctgtgaagatattatatcc

SEQ ID NO: 40027 - DNA, 369 bp, Glycine max
  Clone ID: LIB3139-012-P1-N1-G11
gataaatattgtaataaatggagtgctgcacccaaaacgggcttcattgacatcacaatttctaaagatttctatcgaatatacagtggtctccaaattggatacttggaagaatctgcccaagtgccatcaaatagtcatgaaaggctgggagattcaattgcttgggggggctgcactataatttatttgcttgggcagcagctgcattttgagctgtttgacttttcatatcagatcctcaatatcgcagaagtggaggctgcatctgttatgcaaacacataagaactcacaatttgccgtgcagggatgggaagccttattggaagcaatgaaaaaagcaaggagattaaataaccatgtattt

SEQ ID NO: 40028 - DNA, 276 bp, Glycine max
  Clone ID: LIB3139-012-P1-N1-G12
attcattaaaacatcacactgattaccgaacggagttaaatggaagacgcttgctcacctttatgggttgtattgggattgcgagcttggtgccagtggtttatagagcttatgtgcatgcgaacaatgatgtgctccactccagatatgattatactgatgcaaagacgttcaatgagtaacataaagggagtgtctgttcagaaaaaaggattaacaatgcatacaagtgtaatacaccagaatgcagaatgaagaatgagtgattgttactga

SEQ ID NO: 40029 - DNA, 371 bp, Glycine max
  Clone ID: LIB3139-012-P1-N1-G2
ttcaattccactcacattcgccatatcgtcttctcccatggccgccaccgatgaatccctccgcaaatccctcgccgagaagcacgccgcagtggaagcccaaggcaacgccgtccgcgccctcaaggccgccaaagccgccaaacccgaaatcgacgccgcaatcgaagccctaaacgcgctgaagctcgaaaaaagctccatcgagcactccctcctcggcggctccgacagccgcgaggccttccgtcagtccgtggtgaacacccttgaacggcgcctcttctacatcccctccttcaagatctaccgcggcgtcgccggcctcttcgactacggccctcccggctgctccgtcaagtccaacgtgc

SEQ ID NO: 40030 - DNA, 367 bp, Glycine max
  Clone ID: LIB3139-012-P1-N1-G3
gagacaatttaaacaaatttgtttcttgatgatgttgaaactccttaagatccaacatagaacctttaggagtttcaacatcatcaagagacaatttaaactcctaaaggttctatgttggatcttaaaatttctcaatctaaaattgcacttcccaagaacacagttggaggaaccattctgcgtagtgatctattggcaaattttttgacagagggcaattttagagcaagtgttgatttgcagcgcactcatcgtattaaaggaatgattaaaatggtggccacagttggtattcctgagaatacaggtatagcattggcctgtgctatgaatagttcttttagggggcgcgccagttctgata

SEQ ID NO: 40031 - DNA, 373 bp, Glycine max
  unsure at all n locations
  Clone ID: LIB3139-012-P1-N1-G4
cggngcgattttcagcaacctaggctcgttgtaccttctccttctccttctcctcctcctcctcctcctcctcctcctcctgcgtcaggtatggtacacgtttactcaccgcccccaacttcacagttccatgtaccgattcaaggccatgtcgtcccggtccagaatcaccaccaccatcttgcccatcagcaccacgttccggctcactaccgctctcatcatcacccgcatcagtattatgttagctccgattctgccgtgcagcagcctcaagttgacccagatcatgctccttccaaaagcaagatgtctgacgaagccagtcagaaaattttgaatcaggtggagtattatttcagtgatttaaact

SEQ ID NO: 40032 - DNA, 372 bp, Glycine max
  Clone ID: LIB3139-012-P1-N1-G5
gtaaggttacttcttcttcttcttcttcttcttcttcttctctctggaattttccctgacttttgtgtgcatcgatggcggcgatcagtctccggaaggggaacacgcggctgccgccggaggtgaaccgcgtgctgtacgttcggaaccttcccttcaacatcacgagcgaggagatgtacgacatcttcggcaagtacggcgccattcggcagatccgcatcggcaccaacaaggacactcgcggaacggccttcatcgtctacgaggacatctacgacgccaaaaccgccgtcgaccacctctccggcttcaacgtcgccaaccgctacctcatcgttctctactaccagcaagcgaagatgagcaaga

SEQ ID NO: 40033 - DNA, 363 bp, Glycine max
  Clone ID: LIB3139-012-P1-N1-G7
ctcgcaagcaaaaagaaagaatcccaggcgaggagaaagatggaggggaaggagcaggatgtgtcgttgggagcgaacaagttccccgagagacagccgattgggacggcggcgcagagccaagacgacggcaaggactaccaggagccggcgccggcgccgctggttgacccgacggagtttacgtcatggtcgttttacagagcagggatagcagagtttgtggccacttttctgtttctctacatcaccgtcttaaccgttatgggagtcgccggggctaagtctaagtgtagtaccgttgggattcaaggaatcgcttgggccttcggtggcatgatcttcgccctcgtttactgcacc

SEQ ID NO: 40034 - DNA, 365 bp, Glycine max
  Clone ID: LIB3139-012-P1-N1-G8
cccacatctcttgtgggcctgaaccacctaaccccatctcagatctctcagatccaagcccaaatccagatccaggcccagcagcatcagaatcgcagcaacaccctgagcttccttgggccgaagcccatccccatgaagcacgcgggcatgcctccgaagcccacgaagctttacagaggggtgagacagaggcactggggaaagtgggtggctgagatcagacttcccaagaaccggaccaggctgtggctgggaaccttcgacaccgccgaggaagccgctctggcatacgacaaggccgcgtacaagctccgaggtgacttcgccaggctcaacttcccaaacctgcgacaccagggttc

SEQ ID NO: 40035 - DNA, 363 bp, Glycine max
  Clone ID: LIB3139-012-P1-N1-G9
gctgagagatcttcagagttgttgatctaattttccttcaggagaaaatgggactgcagctgattttcttgctaattgagctgcatttagttttctgcactcagcaggtccatgaatatgcagccaccaagctgcaacattccagtgacagaagccattttagtattgcaatcccaccatcaaagtcatcttctgaaggtcattcaagtattgcacacccaccttctgagtcatcttctggtgtacctgcaagtattgcactttcagcttccaagtcaattcacaaagctcctacaattatatggacacatagttctgtggattctcctatcttacatcataagcatcacttttccaaaagaa

SEQ ID NO: 40036 - DNA, 368 bp, Glycine max
  Clone ID: LIB3139-012-P1-N1-H10
ggaccctgagactataatctcaagcaacggtgacttcaagctaggattcttcagccctgaaaaatccacacatcgctatgtagctatctggtatctcgctgaaacctacatcatatggatagccaatagagaccaaccacttagtgatttatctgggcctggggtgttcaaaattcacaaggatgggaatcttgtggtattgaatgcacaaaatagggtcatatggtcaacaaatgtgtcaattactgctaccaatacaactgctcaacttgatgattcgggaaatctgatcctgcgtgatgtcacaaatggaaaaacattatgggacagtttcacacaccctgctgatgctgcagtgccatcgatga

SEQ ID NO: 40037 - DNA, 451 bp, Glycine max
  unsure at all n locations
  Clone ID: LIB3139-012-P1-N1-H11
ttcggctttcgaggctttacaatacnncaggnntgattttngnntcattggtggttannagtgtgacaacccanntaaacnnaatatgnntgtgcantttatgggcntnncaatcncnntggtattntnncaggttcnntcgtcttttgggggcacccaaattcctcaaagtccaatttcaacagnncaaactgtnnttggaatcannaatggcaanncagtgagaacnaaccattgannattttgattctanngcaagcagagcttttttgtcaattttcttatttgaccttctcggntggaggaattttnagtggacanaaactggagatntggatcacactttatacaanaattctccaattagtaacttgttgagagttgctgcttggaagaaaggttgtttaatggtcaagattgtgatgtctgggaatgcagcagtcaaaaggag

SEQ ID NO: 40038 - DNA, 249 bp, Glycine max
  Clone ID: LIB3139-012-P1-N1-H12
aataaaagcaccgatgatcctaaattcgaaccttgcgcttatttgagacactactccaatcaaaggagcgaaatcaaggcagcttgatgagggcacaaaccggtatgaaacgagcacaccatgtgaaggcgggtgcacactatgaccaccaatacagtgaaggtgaccaccaccaccaatggagattcatataccgccaccaccaagtgcgtattcatgaccaacaccaattgcagacaacaaaccacc

SEQ ID NO: 40039 - DNA, 349 bp, Glycine max
  Clone ID: LIB3139-012-P1-N1-H2
ctggttttttatactggcttgcccagttgttgggttccattgtggcatgcctcctcctaaatttcatcaccggcaagagcattccaagccacgcaccggcaactggtgtgaacgattatcaagctgtagtgcaagagattgtaatcacatttgggttggcatacactgtgtatgcaactgccgcagacccaaagaaggagtcattgagtatcattgcacccattgctatcgtgttcgttgcgggtgccaacatcttagcagctagcccattcagtggcgggtcaatgaacccagctcgctcattcagaccagctgaggtcagtggagacttacgtgctaactggatcta

SEQ ID NO: 40040 - DNA, 374 bp, Glycine max
  Clone ID: LIB3139-012-P1-N1-H4
cagcatctggtgatcttgttcctttgtcctacattgctggtttgctaactggtagaccaaactccaaggctgttggaccctctggtgagattctgaatgccaaagaagcctttgaattggccaacatcggtgctgagttctttgagttgcaacctaaggaaggccttgcccttgtgaatggcactgctgttggttctggcttggcctcaattgttctatttgaagccaacatcattgctgtcttgtctgaagttatttcagcaatttttgctgaagttatgcaaggaaagcctgaattcactgaccatttgactcataaactaaagcaccaccctggtcagattgaagctgctgctattatggaacacattttg

SEQ ID NO: 40041 - DNA, 93 bp, Glycine max; identical to SEQ ID NO: 39947
  Clone ID: LIB3139-012-P1-N1-H5

SEQ ID NO: 40042 - DNA, 376 bp, Glycine max
  Clone ID: LIB3139-012-P1-N1-H6
aatcctaaggccaaccatgtcttccttcaagagctggtgccgagatgaactcattgccaatgctgcttgcattggcgccccatggaagggtatcctcgctgctgatgagtcaactggtacacttggcaagcgactggccagcattaatgtcgagaatgttgaagcaaataggcgtgctcttcgtgaactcctattcaccacacctggtgcttttgagtgcctcaccggtgtgatcttgtttgaggaaaccctataccaaaagacagcttctggaaaaccctttgtctaagatatgaaggaaggaggagttttccctgttatcaaggttgacacgggcacagcaaagcttgcaagaactaatggcgagactactact

SEQ ID NO: 40043 - DNA, 361 bp, Glycine max
  Clone ID: LIB3139-012-P1-N1-H7
gcaatttgtaagaaagatgtttggagagttgaatgtggaatcccttctggatttccgctcacagttatttgcaatagcatttttaatgagatgctcattagatatagctatgaaaaattactgcgccaggctaaagctccaagtatgtttttacaatccttcaaaaattttgtttctttgtgtgtgtatggtgatgataacttaattagtgctcatgaatatgtcaagccttactttagtggttctaaattgaaaagctttctagctagtcataacatcaccattactgatggtattgacaaaactagtgcaactttgcaatttagaaagttagcaaattgcgattttctcaagagaaact

SEQ ID NO: 40044 - DNA, 363 bp, Glycine max
  Clone ID: LIB3139-012-P1-N1-H8
ctaaaaagtatgatcacaggattttgggtgtgaaacaggagcttattcttcatcatgaatggagtccgggaagctggttttttcttccacatggcgctcggatctacaacaaactcatggacttcattcggaatcagtacagggacagaggctatcaagaggtcatatctccaaatgtatttaacatggatctatgggtgcaatctggtcatgctgcaaattatagggaggatatgtttatcttagaggttgacaaacaagagtttgggttgaaaccaatgaattgcccagggcactgcctgatgtttaaacacagggttcgatcatatagagaacttcctcttcgctttgctgattttgggg

SEQ ID NO: 40045 - DNA, 364 bp, Glycine max
  Clone ID: LIB3139-012-P1-N1-H9
tgctcgtgcctctagggttatcatatctccatttccatttcctctctctcagtttccaagaatcttaagctatgggaaagtcttacccaaccgtgagcgctgattaccagaaggccgttgagaaggcgaagaagaagctcagaggcttcatcgctgagaagagatgcgctcctctaatgctccgtttggcatggcactctgctggaacttacgacgtgagctcgaagaccggtggtcccttcggaaccataaagcacccctccgaactcgctcacggcgctaacaacggtcttgacatcgctgttaggcttttggagccactcaaagcggagtttcctattttgagctacgccgatttctacca

SEQ ID NO: 40046 - DNA, 357 bp, Glycine max
  Clone ID: LIB3139-013-P1-N1-A1
caaacattcctctcttatctctagctatataataaacttttcctgtttccactcatcgatatctaacgctttagtcttgcaattgatatataattatcatccaaaacatgtcaccaacaaacaacacttttgcaatttttgtcatcttctgctgtgccatatcctttgccttcgcttctgaccctgacacacttcaagacctttgtgtggcacttccctcttcaggtgtgaaggtgaatggatttgcctgcaaggcagagtcaaatgtgacagaagctgatttcttctttgctggtttagccaagcctggagttatcaacaacacagtgggatctgtggttactggagctaatgtgg

SEQ ID NO: 40047 - DNA, 308 bp, Glycine max
  Clone ID: LIB3139-013-P1-N1-A10
gcatgcgtaaataagcttggtgacaccatcggttttgatgcttaacacgacaagtgggcgcccaataaaaagaccaaccaaacacacgaatagaaattttcacaaaacgaatcccttacagccacgcctaacttatgtgatttctacagcagctactatgagatgatagcagcacatactggtacccatgaagtgcaagatcaggcaccgtctacatacccatctgaagatgtgataggcgttaatcagacaaccataatcaatatatctgcctatgaaacaaataaatggaagatacgttttcaact

SEQ ID NO: 40048 - DNA, 366 bp, Glycine max
  Clone ID: LIB3139-013-P1-N1-A11
accatctgtattacccctgatattgaaacgggcgtggcattctggcacctgttgtttttatgatggcagagatgacacagctaatgggcttatgtggctaacgggaggacctggagaccaagctctcaattgcctgaattataaaggttctgggttggtgacatggatgcagcatataatggacccaacattacttggaaatgatcataatcagcaataccaagccatgaatgcatctggtgttgcagaacttagggagtggagacttaatgagacaacaaatgatgaattttcaacagcctttcaattatcttcaacaatcaggaaaccccaatcttcctttgcagcttcagcaaccgcaagcag

SEQ ID NO: 40049 - DNA, 364 bp, Glycine max
  Clone ID: LIB3139-013-P1-N1-A3
ctcgagccgtgcggttgacgtatggcttcttttcctccgtcgacgagctgatagtgcggcaatgaacgataccgacatccttgccgtttggtcgatgaatgcaacgtgcgacgctctggcgtgcgatgaggacacatatcgtctgctgcagccattttgggatttcctacgattgaactacgggcatattcttcggtcaccactattcccgcctttcttcgctttgtccatcgactacatctgggtcgccgtgttcacatttatcgacgtatgctgcacagaagtgccgttctttaagcaagccaagatacagaaggaccgaaaagtgacgtgggacctcataaaggagtcactgcatctacaa

SEQ ID NO: 40050 - DNA, 365 bp, Glycine max
  unsure at all n locations
  Clone ID: LIB3139-013-P1-N1-A5
cttggccttaacaagccgggggcttaacccttcggggagctcaacgctcccgatgttaaccttttccgccacaaacaacccaacggaatgcgcggtttgtttatcagagttcgagaacggggaaacgggtcgggtattgcccaaatgcaatcacagtttccatactgagtgcatcgacatgtggtttcagtctcatgccacgtgtccgctttgcagggaacccgtagaggctatacccgagcgagaaacccgatccgaggtggctgttattgtgtgcgacaacgaaccggttcgggaagaggtgaaccggtctggaccggtgggtgcttcttcttctccttctgctgcttcgntgcatattgaga

SEQ ID NO: 40051 - DNA, 366 bp, Glycine max
  Clone ID: LIB3139-013-P1-N1-A6
aaccggtctttacattttacctggaactcattagggacttgcttcactcgtctatgtatatgtgcttctttcttgtaatttttgtaaactatggtattcccttgcaccttatacgggagctttatgagacatttaggaacttcaaagtccgtgttgcagattacatacgttatcgtaaaatcacttcaaatatgaacgatcggtttccagatgcaacccctgaagagcttaatgcaagtgatgcaacctgcattatttgtcgtgaagagatgacgacagccaagaaacttatatgtggacatctttttcatgttcattgtctccgatcatggctggagcggcagcacacttgccccacctgcagag

SEQ ID NO: 40052 - DNA, 358 bp, Glycine max
  Clone ID: LIB3139-013-P1-N1-A7
gtgctggttcacattcttcaggagattttcctgaaaaggaagatcaagaaaaacccaaaaagattgataccagattgagacaaagaatagatcctcaatacaatgaggttcaggctcagatggaaacaaatttgtttaaattgtctcttgatgatgttgaaactcctaaaggttctatgttggatcttaaaatttctcaatctaaaattgcacttcccaagaacacagttggaggaaccattctgcgtagtgatctattggcaaattttttgacagagggcaattttagagcaagtgttgatttgcagcgcactcatcgtattaaaggaatgattaaaatggtggccacagttggtat

SEQ ID NO: 40053 - DNA, 359 bp, Glycine max
  Clone ID: LIB3139-013-P1-N1-A8
agcgcactcatcgtattaaaggaatgattaaaatggtggccacagttggtattcctgagaatacaggtatagcattggcctgtgctatgaatagttcttttagggggcgcgccagttctgatatttacaccatctgctctcaagactgtgaattatggaatcctgcttgcacaaaagcaatgactatgtcatttaatccaaacccgtgttctgatgcatggagtttggaatttctgaagcgtaccggatttcattgtgatatcatttgtgtcactggatggactgccaccccaatgcaggatgttcaggttacaattgattggtttatttcctctcaggaatgtgttcccaggacctat

SEQ ID NO: 40054 - DNA, 360 bp, Glycine max
  Clone ID: LIB3139-013-P1-N1-A9
tgagcattgatttgttgggtttacaaggagcaggtaaagcttttccaaacaagattgtttttgatgataagcttgtgttggctaacacacaagaattctttgatggaaattttccagtggattcttggttaccaatttttgtgaattgtctttatcctgtaagtcaattaccttcagaagctgtcgttgtaaatgttacatgtggtagtggacgtggtggtttacccaccactgcttggattagttctgcagttaataatcgctcctcagatatcaacaaaaagattcgcacagcacttgggaaaggtaagaaaattgtttttcttactagagttgatccttttccagtagctttactgg

SEQ ID NO: 40055 - DNA, 363 bp, Glycine max
  Clone ID: LIB3139-013-P1-N1-B1
tctctctctctctctctctctctcggatcggagcgaggctggcggttccggcgttggggacgttagggttagggtttccgagagatgtggtatgctccaggcattgatgaatctgttctcgctgtgttggaagccgtttggccgcgatgctgatcgaatcgattccatcggagttatcggaagagaaggcaaagacggcttgctctggttccgcgacttcggaaaatatggctccggtgatttctccatggctgtcgttcaggccaaccaggttctcgaagaccagagccagatcgagtctggtcctctcggcaccttcgtcggcatctacgacggtcacggaggacccgacgcatcaagata

SEQ ID NO: 40056 - DNA, 362 bp, Glycine max
  Clone ID: LIB3139-013-P1-N1-B10
cgcttattgctaacgcgacctcttcctgttcccgctgcatcagcctcagagcacccgctagggtttcttctgcacacccaaccaaatggcggatcctgagttggaagcaatcagacagagaaggttgcaggagcttatggctagccatggtggcgtgggaaatcaacagaaccctgaacaggagaaagctcaggatgatgcaaagagggaggctgaggaacggagacagatgatgcttagtcagatattgtctgctgaagcgcgagaaaggcttgctcgaattgctttggtgaaacctgagaaagcaaggggcgttgaagattttatattgagagctgctcagatgggtcagataactgaaa

SEQ ID NO: 40057 - DNA, 359 bp, Glycine max
  Clone ID: LIB3139-013-P1-N1-B11
ctgaagccagcgagtgagcgagcgagcgaggtagggttttcgttgttcccccgtctttgaattcagttcgcgacgatggggtccatccccgatccaggcgagttgagcgagttgactcagccgagcttcgacgagttccagcgccaaacttccctcatgaccagctgcaccctcctctggaaggagctctccgaccacttctcctccctcgagcaagacctcaaccacaaatccgaagccctcaaacgcaagattcgcaccctcgacaacactacttccgactccctccgcctcctcgatcgccgcgaaacctccctcgacgccacgctccagatcgcccttcgcacgctcgacacgcg

SEQ ID NO: 40058 - DNA, 363 bp, Glycine max
  Clone ID: LIB3139-013-P1-N1-B12
ggtgatgaaaaattgatgcgtgaaaggacgcacctgctgttggcttgttgttcaaggatggcaatttgtaagaaagatgtttggagagttgaatgtggaatcccttctggatttccgctcacagttatttgcaatagcatttttaatgagatgctcattagatatagctatgaaaaattactgcgccaggctaaagctccaagtatgtttttacaatccttcaaaaattttgtttctttgtgtgtgtatggtgatgataacttaattagtgttcatgaatatgtcaagccttactttagtggttctaaattgaaaagctttctagctagtcataacatcaccattactgatggtattgacaaa

SEQ ID NO: 40059 - DNA, 365 bp, Glycine max
  Clone ID: LIB3139-013-P1-N1-B2
tattatcatccgcagctgcttttattcgcaccgcaaacagtgagccatggccgtcggaaagaacaagcgcatctccaaggggaagaagggtggcaagaagaaggcagctgatccctttgccaagaaggattggtatgacattaaggctccttctgtttttcaagtgaaaaatgttggcaaaaccctcgtctctcgtactcagggtaccaagattgcttctgaaggactcaagcatagagtgtttgaggtctccttggctgatcttcaaggggatgaggatcatgcattcaagaagattaggttgagagctgaagatgtgcaagggaagaatgttctgacaaatttctggggaatggatttcacaa

SEQ ID NO: 40060 - DNA, 367 bp, Glycine max
  Clone ID: LIB3139-013-P1-N1-B3
gcaacgttgtgtggcggtgacaaccatgggcgactcatctgaagaccttgaccaactcctcgatagtgctttggatgattttcagtccttcaacctcaattctccccctccaagtggggaagcacgtgcgaacacaaagaaggagagtccttctttgtcgtcgggggtgcaaggattgggcatgggtttacccgatttgagaacgaagaaaaaggggaaacagaaggctgcttccaaagacagccacgtgtcggaggcgctcaacaagctcatggagcagaccaaagaggctgttaaagggctggagtctattttcacacccactgccgatgatttggggaaggatgccttgatggaggattgggtg

SEQ ID NO: 40061 - DNA, 346 bp, Glycine max
  Clone ID: LIB3139-013-P1-N1-B4
gttcccttacccatcccaattctcatgggctacctgtgttgcgatgcccactcctgaatcgccacctgccacccccaccacaaacccctcgccgcaacaccaatccgacactttccctacgccgacatcgactgcgccgtcaacggatttttctccgacaccttactgggccgaggcaggcacggtagagtctacagagccaccctggacgcctgaaagcttcttgccgtcgtcaaaacgaccaaacttgtcgccaccagcacctctaaaaaccacgctcccaaatgcaccggctgcggtaactgcaccagtcccgccgaaaacgagatcgagatcctcttccaaa

SEQ ID NO: 40062 - DNA, 365 bp, Glycine max
  Clone ID: LIB3139-013-P1-N1-B6
agctagtttatcgtgaggagaatatgaagttgtttgttttctttgttgctgcagtagttttggtagcatggccatgccatggcgcaggctaccaaaggttccctctccgaatgaaaactggctatggtgagcgttcttcggaggtaaaatgcgcaagttttaggcttgctgtggaagcacacaacatccgagcctttaaaaccattcctgaagagtgcgttgaaccaacaaaggactacattaatggcgaacaatttagatcagactctaaaacagttaaccaacaagctttcttttatgctagtgaacgcgaagtccatcacaacgacatatttatattcggcatagataacaccgtactctct

SEQ ID NO: 40063 - DNA, 354 bp, Glycine max
  Clone ID: LIB3139-013-P1-N1-B7
gttgggtttacaaggagcaggtaaagcttttccaaagcaagattgtttttgatgataagcttgtgttggctaacacacaagaattctttgatggaaattttccagtggattcttggttaccaatttttgtgaattgtctttatcctgtaagtcaattaccttcagaagctgtcgttgtaaatgttacatgtggtagtggacgtggtggtttacccaccactgcttggattagttctgcagttaacaatcgctcctcagatatcaacaaaaggattcgcacagcacttgggagaggtaagaaaattgtttttcttactagagttgatccttttccagtagctttactggctgttc

SEQ ID NO: 40064 - DNA, 359 bp, Glycine max
  Clone ID: LIB3139-013-P1-N1-B8
cgcatttctgaaaaccccttacggcttacgctgctttcttttttcttcatttgcggttttgatttggatttggatttggatttggactttggtcgtcaacacagcttttggtccttcgcttcgtttacgaatcctcttcttgttgttcctgcaacgcactgcattcgatcaatccatccatcttcacttgcttggtttcgatcggagggaaatggccgatcagttatccaaaggagaggaattcgagaagaaagctgagaagaagctcagcggttggggcttgtttggctccaagtacgaagatgccgccgatctctttgataaagccgccaattgcttcaagctcgccaaatcatggg

SEQ ID NO: 40065 - DNA, 366 bp, Glycine max
  Clone ID: LIB3139-013-P1-N1-C1
ctcgagccgattcggctcgagctaacactcattaattgcaagaatggcacttcgttgcttggtgatgtccctttctgttctcttcactcttggtcttgcgagagaaagccatgccagagacgaagatttttggcatgctgtttggccaaacactcccattccaagttcattgcgagatcttctaaagcctggccctgcaagtgttgaaatcgatgatcaccctatgcaaattgaagaaacacagtacccgaaaaccttcttctataaagaagaccttcatccaggcaaaacaatgaaagtacaattcagcaagcctccctttcaacaaccatggggtgttggtacatggttaaaggaaattaaaga

SEQ ID NO: 40066 - DNA, 365 bp, Glycine max
  Clone ID: LIB3139-013-P1-N1-C11
aatactaccccctcttgtgtggtgttcatattcttgaaagtccaaagtagcttctcactgcagattctttcctctttttttatagtacagtactaggtgatacctaaatggtaagctgacctaagcgaaaatttgttccattctttccaatttcttaaaagaagttagctcacagcagatccatacaaacatgatgactccaaacttgaatctggaaccagaaggtggtttaaaagtcctcagccaagtaggtttcgataaatcaatacaagagacatctcatgatcttactaaggacagcactgctacttcctcctgtcttaccaaggctgatcctgacccaggttctgtttcccttgacttgt

SEQ ID NO: 40067 - DNA, 360 bp, Glycine max
  Clone ID: LIB3139-013-P1-N1-C12
aagctgcacaaattaatatccaacactctcaagctttccactttcaaactctgcccgctcaatttgctttatctttccgagatttatatacacttttattgaaactgttgggattcaagtctgaaacaaaatcttaagaagtttgcggcagctgatgccatcatcttttagtatggattcgcaacagctcttcagtttcgaattaccttacatgtcatctttacccaccgttccatcgcttcttggatccttgaaatatgacacaggaaactcacctaattcacccttctccacttattttgattctgacactctttcggcattgagtgacggccaggagcaatacagccctggagaaat

SEQ ID NO: 40068 - DNA, 241 bp, Glycine max
  Clone ID: LIB3139-013-P1-N1-C2
attattattactttgtatttggcgttgagtactactgtatgatatatagatgataatatgtgtccatgctctgcactagctgagacctggattattccaacttgcaagtgctgtgagaataacagtgtgttctggtcatgcatgcatgctgagagaaacaatgtatgtcggtcttaaaaagttcactgtatttgcataaactatatgtactaaataatggatttacaagtgtgtttttttt

SEQ ID NO: 40069 - DNA, 365 bp, Glycine max
  unsure at all n locations
  Clone ID: LIB3139-013-P1-N1-C3
gtgaagggtgaggacttcacgtggcacatcancagcgttgagacgtgggtgagttcggctttgaccgatgagagcacttgcggcgatgggttcgccgggaaggcgctgaatgggaagattaaggaggcgattagggctagaatggtcaatgttgctcaggttactagcaatgctctctcgcttattaatcagtatgctgcacaacactagggggagttgggaagaaagtttttgttttttgttttcgttttttcctttgaggggaaaaaaaaaaagaacaaacagttctatgtggttggttaatggttaattttgtgttttgtgtggtgtatgtaattgtgagtttttatagagatatggatctt

SEQ ID NO: 40070 - DNA, 368 bp, Glycine max
  unsure at all n locations
  Clone ID: LIB3139-013-P1-N1-C5
ggtaggggtttggagcctttggtccaggtgggcctggtccggctgccttttgttgaagggggcccctgcaaaggttttggttttgtgcagttggcacgcctggaaaatgcaagaaatgctcaaagcttgaatggtcaattaaagatgggtggtaggacaatcaaggtttcagctgttactgatcaatctggaatccaagaagttgggggaaatactggtgattttgatgatgatgaaggaggtggcttgtccttgaatgcatgttctcgagcaattctcatgcagaagttggatcgtagtggtactgcatcaagcatggttggttccatcggtnattctggtgtcaacaacacaggtcttaatctacc

SEQ ID NO: 40071 - DNA, 364 bp, Glycine max
  Clone ID: LIB3139-013-P1-N1-C6
ctcgagccgctcgagccgattcggctcgagaaatggacaaaatcggaaccacattcctgggaattgatcttcccaatagaggtatgtggtcctaataatggttttgaaatgtggagttctgagtgggcaaatcaaacttcatggcatttgagtttccttattgacaatcccaaacagtctacagtttttgatattctcttgggaatttctcaggattttgaaattgctggtaatactcttatgccagctttttctgttccacaggctactgccagatcttctgaaaatgcggaatcctctgcatgatctggaatttgtgttttctttcgcttgttcgtttgtttaattcaataaaggaaattag

SEQ ID NO: 40072 - DNA, 360 bp, Glycine max
  Clone ID: LIB3139-013-P1-N1-C7
caaattctgtgattcgggtaatggccaccagtggaggcgatgaggggcagaacaaccctgccctcgacccggatttggatgctccggatgacccggatcacgagttcgctgagttcgggtcgggttgcttctggggtgctgagttggcctttcagcgagttgtgggtgtggtgaagactgaggttggttacactcagggtcacactccggatccgaattacaaactggtttgcaccggaaccactaaccacgttgaagtggttcgggtccagttcgacccgaaggtttgcccctacaatgatctactcgctctcttttggtctcggcatgaccccacttccatcaaccgtcagggcaatg

SEQ ID NO: 40073 - DNA, 360 bp, Glycine max
  unsure at all n locations
  Clone ID: LIB3139-013-P1-N1-C8
acgactcctccgcgaaagagtattattcaatattttggttgggttgaatcccggggttgaagcgttgcagacatcacggctattctaagagtgtctcgctccctcattcatgtccgatctgtacgacggaggacgggtagttgcgtaactgccgttaacccttcgccgcacggtgggcgtggtgctttgccttctgaaggtggtagcccttcagacttgctcttcctcgctggtggtggtttcttctagtttcttcactcttttcattacttttagcctgcatagttttaaataagaaaaaaaaaacagcgactttgtgactagttaagatcaccgnttcttcttcttcttcttcttctt

SEQ ID NO: 40074 - DNA, 93 bp, Glycine max; identical to SEQ ID NO: 39947
  Clone ID: LIB3139-013-P1-N1-C9

SEQ ID NO: 40075 - DNA, 366 bp, Glycine max
  Clone ID: LIB3139-013-P1-N1-D1
gaaatttaagtgaggagctagagaatgatgatgaagtctgctatgtgtgcagtggtggttgtagcacttcttcttctggcggaggtggggcccatggctgaggctgtgacatgcaccccaacagagttgagtccgtgtcttccagcaatcacttccggtgctaaaccttccaatgcttgttgcacgaagctgaagcagcaaaaaccatgcttatgtggctacctcaaaaacgctagcttgaagcagtatgttaactctcctaatgcccgaaaaaccgttgcttcttgtgggattccctttccaacttgttaattaattaagccttcttataattaaagtgtgggatatatatatatatatagataa

SEQ ID NO: 40076 - DNA, 370 bp, Glycine max
  Clone ID: LIB3139-013-P1-N1-D10
ggcggggctacccgctgagtttaagcatatcaagagggagaagaagaaaaaggaaaagaaggacaaagatgaagaaacagacacattaaagggaaagggaaaaaatggtgatggtgaagagaagaaggaaaagaaagagaaggagaagaaaaaggaaaagaaggacaaagatgaagaaacagacacattaaaggaaaagggaaaaaatgacgaaggcgaggatgatgaagaaaataagaaaaataagaaaaaggataagaaggagaaagagaaggatcacaaaaaagaaaagaaggaggatggaaaagaagagggtgagaaagagaaaagcaaggttgaagtttctgtaagggatattgatatagaagaa

SEQ ID NO: 40077 - DNA, 334 bp, Glycine max
  Clone ID: LIB3139-013-P1-N1-D12
cctcattgctctctcactctcttcttcttcgccgggtcttgtcggccttcgctgttcactctctcgctaaatttcaaaaccctagaaccgcttctctaaccgcaaatcaaaatcaaatcgaatccaatccaatcgacgcgctaggtatttggtgttcggctgctgttttctctcctagctgcttctgctgttttatggaaaaatgtcttatcagttaactgtcgagaagtttcaattcccaccatgtggttcgttgcaaacagtatgagtgcttccatggtgtgttttggaaggagtcggatcttgttaggttaaatttgacttgcaactgaca

SEQ ID NO: 40078 - DNA, 361 bp, Glycine max
  Clone ID: LIB3139-013-P1-N1-D2
tgtgtttcttggaaaaatgattaaacaaacacaagatgaatgttattacttcatctcaacggatccaacaatgagctgctcccttgacaaaggctcctaccatagtgtaacatacagaaaaaataactactacattcatcttgcagtaatattaaacatcaaaagccaaggcaagcttgcaccatatatgtcttcagtttactagtcaaggagaaggttgatcaataatgcttattattgcttcatcgtgacctgtgatcagaaagctcttttaaattatcctgctcctctttgatgcatggttcatccactgccattgagtccacccccaacaccttggagcatgaaatctccttgaaag

SEQ ID NO: 40079 - DNA, 361 bp, Glycine max
  unsure at all n locations
  Clone ID: LIB3139-013-P1-N1-D3
cggctcgagctactatccccataaagaggtagtaggaataactgttgtgcttcagattgtcatcgttgaatatcttgggaagttcactaaaacagccaagcttaattggaagcagtggctcatttctgttattatagcatttatcagctggcctcttgctgtggttggaaaactgatacagtaccaaantgttacatnggtacaacccttcttgaggcccttgatcagatcaatgagcccaagaggccatcggacaagcctctccgattgccccttcaggatgtctacaagattggtgggataggaactgtgcctgttggacgggttgaaaccggtgtcttgaaacctggaatggtggtta

SEQ ID NO: 40080 - DNA, 355 bp, Glycine max
  Clone ID: LIB3139-013-P1-N1-D5
ttaaaggcccggtagttaaggccagggcttgtactgccacaaccatgtcttacgatgatctgtctcttgcaggaaacagtgtaagcagttttagaagctcaactagacctggtagttattctgcctcatcatcaattgatctcagctcaagtaggcaaacagagtttcgtgtgcaaaggcagttgagtggaaggaaattggatgtggactgtggatatgactcaaggatcaagcctccaagcactgcttcatctttctctggagcttcaatccattctcgccaagagttaggtcttgcaactcgagagacttctggcagtacagaatgtggctctgtagaggaggttccccgagt

SEQ ID NO: 40081 - DNA, 363 bp, Glycine max
  Clone ID: LIB3139-013-P1-N1-D7
gcgttcttcccaccaacatcgaaaccatgtgcaccgacttgcacctccacaacgacctgccccagctccgaatcgcctccgccgccgccgccgatgccgtcgtcaaaaccgacgacctcccctccgacgatgacgaccgcaacgccgtctcttccgtcatcactcaaaccgagaccgaaactgacggagccaccatcgtcgacgtcgccgtcgccgtcaacgtcaacgtcaacgtcaacgacgagaattaccgtactccgacttcgaaggagagcaaaattccagcgacgatgacgtgtccgccggcgccgaggaagccgaagctcgcctcctgcaaaagaaaacttcttgatgagtttcagt

SEQ ID NO: 40082 - DNA, 356 bp, Glycine max
  Clone ID: LIB3139-013-P1-N1-D8
cactgagcagttgaggaaatgggaacccttgggagagcgatctacagcgttggtaactggattcaagaaactggacaggccattgatcgtctcggttcccgtcttcagggcggttactacttccaagagcagctctctaggcatcgaactctgatgaacatatttgataaggctcctgttgttgataaggatgtatttgttgcgccaagcgcctacgtcattggagacgttcaacttggaagaggatcatccatttggtatggagttgtcttgagaggtgatgttaacatcatcagagttggaaatggaactaacattcaggacaactctctggtgcatgttgcaaagtcaaattt

SEQ ID NO: 40083 - DNA, 169 bp, Glycine max
  Clone ID: LIB3139-013-P1-N1-D9
gatggaaacaaatttgtttaaattgtctcttgatgatgttgaaactcctaaaggttccatgttggatcttaaaatttctcaatctaaaattgcacttcccaaaaacacagttggaggaaccatcctgcgtagtgatctattggcaaattttttgacaaaaggcaatttt

SEQ ID NO: 40084 - DNA, 364 bp, Glycine max
  Clone ID: LIB3139-013-P1-N1-E1
tattgagatcctcaagctcatgtcctccactttcctggtcgccctttgccaagccattgacttgaggcatttggaggagaatttgaagaacacggtcaagaacgttgtgagtcaagttgctaagaggactctcaccacaggtgtcaatggagagcttcacccttcaaggttttgtgagaaggacttgctcaaggttgttgatagggagtacacatttgcatacattgatgacccctgcagtggaacataccctttgatgcaaaagctaaggcaagtgcttgtggactatgcattggccaatggagagaacgagaagaacacaaacacatcaatcttccaaaagattgcaacatttgaggaagag

SEQ ID NO: 40085 - DNA, 356 bp, Glycine max
  Clone ID: LIB3139-013-P1-N1-E10
tttcagaggtggaaggcccattcgggtggttacatttccgaataccattgtgcagattgaaccagacatgaattcaaggtttcagcttttgagtaccactaccaatggtgattttgttcaaggaaaagatctcgcaatggttaaagttaatgtagcatgtgctgctgttggcttgacatcaagttacactccaactccattgttggaatctggtttgcaaaaagacagagggttaattgtggagtactttggaaggatgtcttacgttgctcataacgttaatcagccccaagagaaagatttgttggagggaaatttttcctttgatattaaatctcgctctagattggaaaaag

SEQ ID NO: 40086 - DNA, 364 bp, Glycine max
  Clone ID: LIB3139-013-P1-N1-E11
aaaagtcatagttacctcttcgccttcctttgcaattgtcatttgtcgccaaacaattattgcttagctctcacaagcaagctttaacaacaatgaaggtcagaactagatgcaacctattaatttctttataatttcctcaccttcatcgatatcctctaattaatcaatgtttctaattgatagtttaatttcctcagagctttacactattttgattccactagaagtaattaattgtgggggtcttaacttaattacctcatgttttagatgtagaagtaattaactgtggggtcttaacagctctttcatttgttgtgtaacagaaagtagtgttaaagttggacttacatggtgatag

SEQ ID NO: 40087 - DNA, 364 bp, Glycine max
  Clone ID: LIB3139-013-P1-N1-E12
cagttcttggagagtattaccgtgagccagaaagatctgcaccattaccatttcatctaataaagtatttaattcagagtatgagacaagaccacttcgtaagtgacactggagatgtggtttattatcagactgattctctgcaccttcactcgcaccgagactgagtttcaatttttgggttatttattggattctagctactcaaattactttttttttaatgttacgtttttggagttttaacgttttctgaacaacttgcaaattacatgcatagagagacaggaattcatagtgggcctcaatggaatatttatttgaaattagtaaggtggtaattaataaatattgaattgtcagt

SEQ ID NO: 40088 - DNA, 363 bp, Glycine max
  Clone ID: LIB3139-013-P1-N1-E2
caaagaatagatcctcaatacaatgaggttcaggctcagatggaaacaaatttgtttaaattgtctcttgatgatgttgaaactcctaaaggttccatgttggatcttaaaatttctcaatctaaaattgcacttcccaagaacacagttggaggaaccattctgcgtagtgatttattggcaaattttttgacagagggcaattttagagcaagtgttgatttgcagcgcactcatcgtattagaggaatgattaaaatggtggccacagttggtattcctgagaatacaggtatagcattggcctgtgctatgaatagttcttttagggggcgcgccagttctgatatttacaccatctgc

SEQ ID NO: 40089 - DNA, 364 bp, Glycine max
  Clone ID: LIB3139-013-P1-N1-E3
cggggaaggcatggacgagatggagttcacagaggcagagagcaacatgaacgaccttgtttcagagtaccagcagtaccaggatgccactgccgaggatgatggggagtatgaggacgaggaggacgatgatgttgaagcagaccacatgtgaagagactgaatgtgaaagatgcctgtgtcttacttatgctatgtgatgcgtaagtgtgtttgctctgctctccaacgtgaagaagattgtaattactaatagtgtatgtacggtttgcgggataaaactttgatgagcttggtgtggagaatggaaaaaatagggggttagtggggaatgagtttggaacaatgttatgcggcacctatc

SEQ ID NO: 40090 - DNA, 307 bp, Glycine max
  Clone ID: LIB3139-013-P1-N1-E4
ctctggctgacttgcaaccggaagaactgaaccgtgtccagcaccctttgggtagcatctcttacaactctataccttccttatgaccactctcttatgaccggtcgctttcttaactagagccctctccgatgagggcactgcacgcgggtagatcacagctctgatagctgcagaaacaaaaaagcttgaacgctttagctcttttgtgtgaaatatgctggaaagtggcgcgaaattcccaggactaatagatctcaacacccctaatgacggctactatgatccatgctaaggcttttaccat

SEQ ID NO: 40091 - DNA, 360 bp, Glycine max
  Clone ID: LIB3139-013-P1-N1-E7
gcatatgtctcaaaggcccacggttcctcactcctgttccatagcctgcggccttcactctcatctcctggtctccagtgagatgaaccctagctccaattggtccctttaatcaattacctcttaattagtaattacttaatctcaattagcctttcactctcccacacaacaacatcatgggcgtcaaaggttttgtcgaaggaggcatcgcttccatcattgcaggatgttccacacacccacttgatctcatcaaggtccgcatgcagcttcagggcgaaaacaatttgcccaaaccggttcaaaatctccgacccgcactcgccttccaaaccggttcgaccgtccacgtggcag

SEQ ID NO: 40092 - DNA, 362 bp, Glycine max
  Clone ID: LIB3139-013-P1-N1-E8
atacattttgaggaagactataacaagttttatgaaggcttctctaagaacctgaaacttggtattcatgaggattctcagaacaagacaaagctaattgaattgctcaagtatgactcaagtaagagtggtgatgagatgaccagcctcaaggactatgttacaaggatgaaggaagaacagaatgacatctactacattactggtgaaagcaagaaagttgtcgagaattcccccttccttgaaaagcttaggaagaaggggtatgaggttctctacatggttgatgcaattgatgagtatgctgttggtcagcttaaggaatttgagggaaagaagttggtctctgctaccaaggaagg

SEQ ID NO: 40093 - DNA, 363 bp, Glycine max
  Clone ID: LIB3139-013-P1-N1-E9
cccatttccataatcactttttcctactttgttctggatccatcccttgactaattaattatccctcacaactaccaatggccgaagagaaacaccacaagcaccgcctcttccaccaccacaaggacgaggataataagccagtagaaaccgatactggttacgacaacacatcatattccaagccttctgatgactatgactctggtttcaacaagccatcgtatgagtcttctggcggtggctatgaaggtggttacaacaaaacatcttattctagtgatgagccagcttctggtggtggctatgaaggtgggtacaagaaaacagggtattctggtggcattgatgagacttctggtg

SEQ ID NO: 40094 - DNA, 365 bp, Glycine max
  Clone ID: LIB3139-013-P1-N1-F1
ctttattaaaaccctatctcgctcgcactcacccacacaccatccgttctagtctcaacttctgctcttccaactcctacaacgcttttctctgcactcatgggcaaggtcaagatcggaatcaacggatttggaagaattggccgtttggttgccagagtcgctctgcaaagagacgatgttgaactcgttgccgttaacgaccctttcattaccaccgattacatgacatacatgtttaaatacgacagtgttcacggacactggaagcatcacgatgtcaccgttaaggacgagaagacccttctcttcggtgacaaggcagtcactgtttttggacacagaaaccctgaagagatcccatg

SEQ ID NO: 40095 - DNA, 327 bp, Glycine max
  unsure at all n locations
  Clone ID: LIB3139-013-P1-N1-F10
ccggaatcagaggctccccctaacttctggggccacaccccggaagaagaatactacacctcccaaggcgttcgcaacaccaagtcccacttcgaaacccccaacggcaaaatcttcacccagtccttcctccctctcaacctccaaccccaccaagtcaaagccaccgtctttatgacccacggctacggctccgacaccggctggctcttccagaaaatctgcatcaacttcgccacctggggctacgccgtcttcgccgccgaccttctcggncacggncgctccgacggtctccagtgctacctcggcgacatggacaaaatc

SEQ ID NO: 40096 - DNA, 359 bp, Glycine max
  Clone ID: LIB3139-013-P1-N1-F11
caggaaaaatggttctgtcggatgccgttaattttgctcggaatttcgcagttatggtcagagttcgtggccctgacccaaaagggttgaagatgagaaatcacgcttttcatcaataccgttctggtgaaacaaccctttcagcttcgggggtacttgtacctgatactctttgtgattctcaagtagctacgcgtcttaatggtgataactgtgaggatagggtattggttgtaacggttgcttcagttgttgagccttttctgtcacctcaacagagagacaatattcctcagggtaggccagacttgattgccggtgttcagattgatgttatgaccgaggaaaccaatgaaaaa

SEQ ID NO: 40097 - DNA, 350 bp, Glycine max
  Clone ID: LIB3139-013-P1-N1-F12
caaaaacgcattgtgtttctctctttccgcggcgtagatctgagcagtttgggaaaccctaactgctctcaccactctctttgctttttttcctctccgatcaacgacctctttcgtcgccctaagtcatggcaggacttgcacccgagggatcacagtttgatgctcgtcaatatgataccaagatgaatgagttgcttacatctgatggacaggattttttcacatcttatgatgaggtttatgacagttttgatgctatgggcttgcaggagaatctcctgagaggcatttatgcatatggttttgagaagccatcagctattcagcagagaggaatagttcctttc

SEQ ID NO: 40098 - DNA, 261 bp, Glycine max
  Clone ID: LIB3139-013-P1-N1-F3
aattgtatttgcacagtccagaggaagctcgccaactgagaaggaaagctctctctcgtattgaatggctgcaaaaagctgatgtgcctaccatagcacagattgaagagttccattcgatgcagaggatgatgaatgctcctgattcaaatgataatattgatctactggtgagcattgatttgttgggtttacaaggagcaggtaaagcttttccaaacaagaatgcttttgatgacacagctttgtgtggtcacacac

SEQ ID NO: 40099 - DNA, 370 bp, Glycine max
  unsure at all n locations
  Clone ID: LIB3139-013-P1-N1-F5
gggtttaagttaagggtcccaagttaataggtcctttatattaagttgttgacataaacaaagtcatggaggaagttaatgtggttcaaaccaaaaatggaactgttgcagtagcttctgcgtttgctggacataaggaagctatacagcanaagggaccacanaatttttaaagaattgcttgtgaaaaacctataaggggtagactgtgaagatgggggtccctttggtgctattatagtatgtaatgatgaaatagttgctcgatgtcacaacatggttctgaggaacacagaccctactgctcatgcagaagtcactgttataagaaaggcttgtgaaaagttaaaccagatagaactttcagact

SEQ ID NO: 40100 - DNA, 366 bp, Glycine max
  Clone ID: LIB3139-013-P1-N1-F6
cattgaattttgattctagtaaacagagcttttgtcaattttctattgaccttctcggtggaggaattttagtggacaaaactggagattggatcacacttatacaaaattctccaattagtaacttgttgagagttgctgcttggaagaaaggctgtttaatggttaagattgtgatgtctgggaatgcagcagtcaaaaggagtgattgggcctcattggtacaagtgtttttaacaaacagcaacagtacagagcattttgatgcatgtaagtggacaaaatcggaaccacattcctgggaattgatcttcccaatagaggtatgtggtcctaataatggttttgaaatgtggagttctgagt

SEQ ID NO: 40101 - DNA, 340 bp, Glycine max
  Clone ID: LIB3139-013-P1-N1-F7
atgcagtggaggagattgcagtgtcaagttcaagagtcttatgaacgaaatatcaaaatcacaaactctctgggatgaatatcattcattgcggattgaataatatttatcccagagagttgggggttttgatattattcaatccgcaatgaatgattcacatccagttttaatttttttctcagctctggaaggagtgttaaaatattacctgccaagacatctccgctagtagatgcaaggggtctggaaaactaggtaatttcattgtaacatacgagatttcgattcaagcaatcggaatactagtggcgatttcttgtataggatgaaagatttt

SEQ ID NO: 40102 - DNA, 364 bp, Glycine max
  Clone ID: LIB3139-013-P1-N1-F8
cctttacaaagcaaaaatgattcatatcttggaagctgtcataaatgagagaaatcttgagctacaaaagaaaaacatgatagctccaaggaccacaatgaaagagggtgatttgcatgagtttcttgagattgattccactcattttgatggtgctagctctgatgattctgacatatcagaaataagtggttctaatcccgttagtgctaatggagataaaccagttgagaagctagaaaactctcatccatcatcaccacaccatatgaataactgcctagttagattaacaaatgaaaatgaatgtttggaagaacataatttgaggaaagaagaatcttctagtcccagctccagttct

SEQ ID NO: 40103 - DNA, 363 bp, Glycine max
  Clone ID: LIB3139-013-P1-N1-F9
cttcatcacaacaaaaagaaagaaagaaacaaagatcgttcattgctttgtagtaagatcagatcatcaaaaatggttttgtcttggtcaagaaggaacgttttccgccgtgccaagaaggagaagtcacaaactcaattggaagtggaggttgtgattcccaaccactttcactgcccggtgagtctggagctgatgacagacccagtgactttatcaaccggcatcacctacgaccgtgtgagcattgagaagttgttgaagctttggttaagatggttagggagcctattgggagcacttccaccaaggcttgtttggcaacaatttttaacttggtgtcgttggctgcgaatagagagg

SEQ ID NO: 40104 - DNA, 353 bp, Glycine max
  Clone ID: LIB3139-013-P1-N1-G10
ctttctttttcttcccatttcacccctcgtctttccttgtttccggtgagggccaaccacaacatatgttaaacaaggaacaacctccaaaacataacatcctacgccaaacaaaactttgacctccttcagatctatacccttctctctctctctcttctattttcaaattctacatcatgggcacggaggttctacggccacaagattgtttcacccaacgcatcggtgttccaccgcctggcttttcccggcgaagaacctatggtacccaccacaacaacaaaaacaataacgttaacaattatttcaggggtaaccggaagccgacaacccgacccgaacaaagaaaa

SEQ ID NO: 40105 - DNA, 362 bp, Glycine max
  Clone ID: LIB3139-013-P1-N1-G12
cacctttcttggggcaactgaaggaactcaccttgttctatgcctggcagaatcagctccatggaagcataccaacagaactctccaactgtgagaaacttcaagcaattgatctttcacataatttcctcatggggtccattccaagttcactgtttcatctagagaatttaacacagttattgttgttatcaaatagactttcaggtccaattcctccagatattggcagttgcaccagcttggtcaggctaaggttgggatcaaacaacttcactggccaaattccaccagaaataggctttttaagaagtttgagctttcttgagttgtcagataattcactcactggagatataccc

SEQ ID NO: 40106 - DNA, 368 bp, Glycine max
  Clone ID: LIB3139-013-P1-N1-G2
gcagcgccagtgctgcagcggtgcctgtctgctgcgcgcagccgccgaatcggcacactttcgagtcgtccgtctctatctccatgttcgtgtcctgtccctccccctcctgcgcgtgcccttcgaggtgttggtgcaattcccgcggcgagctaaagttcggctgcccagctccacacccattccagcggcacttccaccgctcgtcgagcttgcgctcgccctcggaccgcacctcgggtggcggctttggccggatcccagcgacaatataacttctggtaccgtcggcgccctcgacgcacttgggcgaggccgaggggaacgcttcgctgatgtgcttgatgacgtctgatgcattcagcatg

SEQ ID NO: 40107 - DNA, 362 bp, Glycine max
  Clone ID: LIB3139-013-P1-N1-G4
ccgactcctttgaaatctaacggcgacacctcaggttccggtgtccggtcatgtggggattgatgactataaatagcgagacagcgtcctttgctgattcccacatcacagcaaaggagtgatttggagtttggagcgactgaactaatcattaatttgcactcgctgtttcagcttcatcacccttcttttgcatcatttatatctcttgagaaatggcacaagaaacctttctattcacatctgaatctgtaaacgagggtcaccccgacaagctgtgcgaccagatctctgatgcagtacttgatgcgtgccttgaacaggaccctgacagcaaggttgcctgtgagacatgcaccaag

SEQ ID NO: 40108 - DNA, 371 bp, Glycine max
  Clone ID: LIB3139-013-P1-N1-G6
tttcacttttctttttctcatttcgtccgccctcaaccgccgtgatggccctcgtccgccaccgccgccaccccaacctccgtctccccctcccggagccctccgagcgccgcctccgcttccccctccccctccctcccaccaccaccgccaaaccagcctccggcgacgccattgccgccgccgacctcgagaagctcgccatccttggccacggaaacggcggcaccgtctacaaagtccgccacaaggccacctccgccacctacgcgctcaagatcattcactccgacaccgacgccaccaggcgccgccgcgccctctcggaaacctccatcctccgccgcgttaccgactgcccccacgttgtc

SEQ ID NO: 40109 - DNA, 356 bp, Glycine max
  Clone ID: LIB3139-013-P1-N1-G7
gacacgtgacgttcattctgtctgttggaactgttggccttttagggttagggtttcggtttgtggatctattgttgcctctgcgatggatcgcaagaggggaaggcctgaagctgccttcaatttcaatggcggcgccaagaaatcgaggcctgcaccttcggctgtccatttggtgaaggatgccacttcctgcattatgttcctggtggctttaaagctgtctctcaactgatcaatgttggtagcaatcctgttactcctcaagttgggagaaaccctgttccaccatccttccccgatggatcttctccttcagttgttaaaacccgattgtgcaacaagtttaatacagc

SEQ ID NO: 40110 - DNA, 364 bp, Glycine max
  Clone ID: LIB3139-013-P1-N1-G8
gctccgtcggagctggggatcctgatgaggtctctgggaggtaacccgacgcaggcccaactcaaagccatcgtggctgaagagaacctcacggcccccttcgacttcccccgattcctcgatctaatggccaaacacattaaacccgaacccttcgatcgccaactccgcgacgccttcaaggtcctcgacaaggactccaccggcttcgtcgccgtctccgagctccgccacatcctcaccaacatcggcgagaagctcgagccctccgagttcgacgagtggatccgcgaagtcgacgtcggatccgacggcaagatccgctacgaggatttcatcgccagaatggtcgccaagtaacgcc

SEQ ID NO: 40111 - DNA, 365 bp, Glycine max
  Clone ID: LIB3139-013-P1-N1-G9
agcagtcaaaaggagtgattgggcctcattggtacaagtgtttttaacaaacagcaacagtacagagcattttgatgcatctaagtggacaaaatcagaaccacattcctgggaattaatcttcccaatagaggtatgtggtcctaataatggttttgaaatgtggagttctgagtgggcaaatcaaacttcatggcatttgagtttccttattgacaatcccaaacagtctacagtttttgatattctcttgggaatctctcaagattttgaaattgctggtaatactcttatgccagctttttctgttccacaggctactgccagatcttctgaaaatgcggaatcctctgcatgatctggaa

SEQ ID NO: 40112 - DNA, 366 bp, Glycine max
  Clone ID: LIB3139-013-P1-N1-H1
gattattatagagatggtaaaaaagggggtaagcaatgagccatggaaattttgctgttcccaatttgtttcggatctgtgttgacaaaccctaaccctgaggagtatgagtggttattgagattgaggaattgacgaaaaggaaaggaaagggggagatgtacctgaagaaaccgctatggagtgaaacagggaaagacgatggtggaagtgcaaagacagaagaagaggatcatggtgatggtgcagtgagtgaggtcgtgaagtcactgcagcaacagagagtgtatagagaagtcactcttgcactcagaactggcctcagagacgcgcgtgccgagttctcctttctccgtgttcgcgctc

SEQ ID NO: 40113 - DNA, 364 bp, Glycine max
  Clone ID: LIB3139-013-P1-N1-H10
caaagaggaaccaaactgttggctggcaaagacctgcgacaaatgactgctatatggaaagagaacctggtcgtcgccctcctctttgccagcctgatgatgacccatatgcaatctggggagtaaatatggaagcatgcataacaccttacagggatcatgacaacagagccaagggtagtggattagctccatggcctgcaagattgactagaactcctgctagattaactgactttggctattcaagtgacatgttttaaaaggacatggaactatggcaaacgagagtcgagaagtactgggatctcttgagttcaaaaatcacatcaaacacattgaggaatattatggatatgaaagc

SEQ ID NO: 40114 - DNA, 351 bp, Glycine max
  Clone ID: LIB3139-013-P1-N1-H11
gcacaaagcggggtactggacgcacaagctgccagcggtctctatctaacttagtgcctacacgccagaaggtaaaatgggccaagaaactatcctattcacatgtgaatcagggaacgaggggcaccctgacaagctctgagaccagatctccgatgctgagctcgatgcatgcttggagcacgaccctgacagcaagggtggctgcgaaacctgtaccaagaccaacatggagatggttttcggagagatcacaaccaaggccaacgtggactatgagaagattgtgcgtgacacatgcaggaacattgcctatggctctgatgatgttggtcatgatgctgacaactg

SEQ ID NO: 40115 - DNA, 360 bp, Glycine max
  Clone ID: LIB3139-013-P1-N1-H12
cctaacattagattagaccctctaccatgctcctctgcctctgaagtctgaacctcccacaggaatggcaatggagaagacaacattgtttgtgttgttgctgaatgtgcttgtgttcagtgcctctcttgtgtcctcagagcaaagtcatgtctcagctgtaggggacccaggaatgcagagagatggtctgagggtggcctttgaggcttggaacttctgcaatgaagttggtcaagaagctcctcacatgggtagtccaagagctgctgattgttttgatctttcaggttctctgactcacaaggtcacagaagctgataacagacttggggtgggggactcatttcctggtttaaa

SEQ ID NO: 40116 - DNA, 294 bp, Glycine max
  Clone ID: LIB3139-013-P1-N1-H2
ctcaaagcaacacaagaacactctcttgaacattcatggatccagtgagcgtgtggggtaacacgcccttggcgacggtggatcccgagatccatgacctcatcgagaaggagaagcaccgccaatgccgcggcatcgagctcatcgcctccgagaacttcacctccttcgcagtcatcgaggccctcggcagcgccctcaccaacaaatactccgagggcatgcccggcaaccgctactacggcggcaacgaattcatcgaccagatcgaaaacctctgccgctcacgcgccc

SEQ ID NO: 40117 - DNA, 365 bp, Glycine max
  Clone ID: LIB3139-013-P1-N1-H3
gattatctatatatatagatagatatctatttgaattgcttcattcgcgaggagccgtatgaggtgaaaatctcatgtacggttctgtaataaagatggaattgagaaacaaccatcaattataacccccaaagaaccagatttcgtaaacaacatagaggaagaatgaaaggaatatcctatcgagggaatcatatttgcttcggaagatatgctcttcaagcacttgagccagcttggataacatctagacaaatagaagcgggacggcgggcaatgtcacgaaatgttcgccgaggtggacaaatatgggtacgcatatttccagacaaaccggttacagtaagacctactgaaacacgtat

SEQ ID NO: 40118 - DNA, 357 bp, Glycine max
  Clone ID: LIB3139-013-P1-N1-H4
caccgagcagccacacctcccgcagcagccatggttctcaaaactgaactatgccgattcagtggtgccaagatctacccaggaaagggcatcagatttgttcgtgattctcaggttttcctgtttgcaaactcaaaatgtaagaggtatttccacaatcgcctgaagccttcaaagctcacctggactgcaatgtacagaaagcaacacaaaaaggacattgctcaagaagctgtgaggaagaggagacgtgctgccaaaaagccttactctaggtccattgttggtgcgaccttggaagtaatccagaaaaagagagctgagaagccagaagttcgagatgcagctagggaagct

SEQ ID NO: 40119 - DNA, 356 bp, Glycine max
  Clone ID: LIB3139-013-P1-N1-H5
cgtcgaagttgacgttattctcagcgatggaagcttccacagagccgccgtgcctagcggtgcttcaacaggtgtttatgaggctttggaattaagggatggaggctcagactacctcgggaaaggtgttctcaaggctgtggagaatgttaattcaattatagcacctgctctgcttggcaaggacccaacgaagcagactgaaattgacaattttatggtacagcagcttgatggaactgttaatgaatgggggtggtgcaagcagaagcttggagccaatgctattttggcagtgtcacttgctgtctgcaaggctggtgctgcagtgaagaaaattcctctgtacaagcaca

SEQ ID NO: 40120 - DNA, 363 bp, Glycine max
  Clone ID: LIB3139-013-P1-N1-H6
cacgaggaacagcgcagaacctaaccctcacgaaaaccccgttcgattccgataactctcgttgtgccgaaaccctaaccttaaccgggttttctcgttggttgggattgaattggcatcggagggaggcgatcgattggaaaattggtagtagtagtttagcgttgaagaacgatgtctgctgctgtgtgcggaagcaagagatctttcttcgaagagcttcctccttctccgccactctccaagaggctccgttgttcctcttcgccgattcgattccctcctccctctcccgtcgaccaacttcgccctctctttccccacatggacgacttggttcttgagagagctctccaagaatgt

SEQ ID NO: 40121 - DNA, 365 bp, Glycine max
  Clone ID: LIB3139-013-P1-N1-H7
aatcttctgagagtgtttggttgaaagtagcaaagatgtttcctttcgggcaaaagggtcaaaagataaaggggactatggtggttatgcagaagaatgtgttggatatcaacagcatcaccagtgttggagggatcgttgaccaaggcttaggcttcataggcagtgcagtcgatgcacttacttttgcagccaccaaaatctccatccagttgattagtgctaccaaggctgatggtgggaaaggaaaaattggaaagagtacaaatttaagaggaaagataacattaccaaccttgggagctggcgaacaagcatacgatgttaattttgaatgggacagtgacttcggaattcccggtgca

SEQ ID NO: 40122 - DNA, 366 bp, Glycine max
  Clone ID: LIB3139-013-P1-N1-H8
cgggaagcaagacccgacgcaagcggtggctgccggaatattccagatcaacaccgccgtctccaccttccagagactcgtcaacaccctcggaacccccaaagacacccccgacctccgcgaaaaactccacaagacaagactacatattgggcaattggtgaaagatacatcagctaaacttaagcaagccagtgacattgatcaccatgctgaagttaatgcaagcaagaagattgcagatgctaaacttgcgaaagattttcaggcagtgttgaaagagtttcagaaggcacaacgtcttgcagctgagagggaaacagcgtacactccttttgttccacaagcagtccttccttcgagcta

SEQ ID NO: 40123 - DNA, 365 bp, Glycine max
  Clone ID: LIB3139-013-P1-N1-H9
gtggatttgagacaagtggtggcaggtgtcctcaccctcacaatgtttgtcatgcttggaaatatgatcaaaagagaccacttcgataattcacttcaagaaaagcttccaggaggatcggaagatgccaactttgagactgctacgtttgatgctactcatgtaagaaagaatatagggctttggaagggagatgtggatgacctaaaaccgtgttgggttaagccatcttctgatgatgtggagcagacccaaggatttgttacttttgcgttaaccaatggcccagagtaccatatttctcagatagcagacgcagtgattgttgctagaaatctgggggcaacgcttgtgatgcctgacat

SEQ ID NO: 40124 - DNA, 362 bp, Glycine max
  unsure at all n locations
  Clone ID: LIB3139-014-P1-N1-A1
acgtcccgcgcgcgcatcctttagcgccgacctgcactcgtgctcgcttccttttttcaccaacaaaaaaaaagctatgggcctcttacaggagcagggggggagagatacaagaaaaaattgtgtaagaaattntcacaaaaagaataaaaatacagcttgatcaaactcaagtncntnccgaaacaacaaataaaaaactaaaaaaaaacggggccccccccccttttgggccctgccccccccggatttaattctcccccgggcccttggggttccccttttttcctttttgggggcccttttaaaccttgggggaacccgggccctacctttttccttggggaaatttgttttcccct

SEQ ID NO: 40125 - DNA, 357 bp, Glycine max
  Clone ID: LIB3139-014-P1-N1-A11
tgagatttgaaattttgataaaccgcgatcacaggttgccgcaccttaaaaccggaaacaaaagcaatcgttacttgatttcaagaatctctcaatttcttcctacttctttgtgtacggtttcttaagggaaagaaaatcactctctgtgctggccacagacttcgtgaatcattttcttttccactcttagtttatttgctgaacactctcctatttgatataggacttcgtgtcagatttaaacttcttctgtctctttctcagttctctgtttaatttcaagttcaagctggtgaaatcttggattagtgctcccactctcctatctggtataggacttcgtgggtagacttt

SEQ ID NO: 40126 - DNA, 172 bp, Glycine max
  Clone ID: LIB3139-014-P1-N1-A12
caataagctaatagttgaacttgagaaaagtgttcctacattggttggcattgaatgtcccaaggatgagaaacttcctcgtcgcaaaatttttgacaaacctaagacgcgctgcttcactattctccctatggagtttaatcttgtgggtcgtcagaagtttttaaatttt

SEQ ID NO: 40127 - DNA, 366 bp, Glycine max
  Clone ID: LIB3139-014-P1-N1-A2
ctttagtctggtgacaccatctatgtcgcggctgtgtgccactcgatgccgctccgagactggattcatggcatgccatgtcatcacacggcgacgatcatctctccaaagaggaggtcgtcgaaagagtcctcgctgtcgtcaaagatttccccaaagtcgatccttccagggtgagtccagatgtacatttccagaaagatttgggtttggatagcttggacaatgtggaaattgtaatggcactagaagaggagttcaagctagagatcccagacaaggaagctgataaaattgactcttgtcatcttgctattgagtatatttctaaccatccaatggctggttaactaatgtgttcttttt

SEQ ID NO: 40128 - DNA, 368 bp, Glycine max
  Clone ID: LIB3139-014-P1-N1-A3
gggtgactaggatcgagtggcgagctgcttgagatgtgcacacaccacacgggcaagggaaatgcgctgctgccactctgggcagtggacactgctgacatacctgtctgagctttctagcagatgatatgcgagcagtcgaggccctctcaggactgttgcaagaggggactccaagaggaaagaacgatgccggacagctttgatcaatctttccacacacactgagaattgtgttagaatgatcgaggccggggcagtgacagctcttgttagtgctttggggaatgaaggagtttcagaagaagcagctggtgcactggccttgatcgtccagcagtcaattggcgacaaagcagaggtcaatg

SEQ ID NO: 40129 - DNA, 355 bp, Glycine max
  Clone ID: LIB3139-014-P1-N1-A6
gccttgttggagaagatgaagagttgagtgcaggtgaggatgtgaaggtaggagccaagaggaggagaggtgataaggggtctcctcagtcttggataagtcgccagggagttaggaagttaattaagagtaagcaaatgatggtatacaaaaccttccaggttgcaaattatgcaagatcagaaaggagattgctttctcggaagcaggttgagtgtcaaccttggtctaaccacacatacaaggttgatgacaagatagagttactttgtcaagatagtggcatcagaggctgctggttcaggtgtacagttgttcaggtagcccggaagcagttgaaagtccaatatgatga

SEQ ID NO: 40130 - DNA, 375 bp, Glycine max
  Clone ID: LIB3139-014-P1-N1-A7
cgcgagcctgttgtcaccatcaattatgaggactttgccccacaagctggtgcagtttggagagattcaggaaaaagttgtgttgaaattttcacaagaggaatttcttacagcttggtcaactcaggtgcgtcccgcaacgactctgttggctgatgggtgcccatatttgtatgctatggtgcatgatagttcagtgtctacaataccaggtgattttgtcattggtgttaagttgacaaccataaacaatatgtgtgcatatgggctcaatcctggtatttcaggttctcgtcttttgggcaccattcctcagtccatttcacagcaaactgtttggaatcaaatggcaacagtgagaacaccattgaattt

SEQ ID NO: 40131 - DNA, 340 bp, Glycine max
  unsure at all n locations
  Clone ID: LIB3139-014-P1-N1-A8
tgacactgtgggcagnctggctataatatgaccatgtgtgatggtattgacaaaactagcgcaactttgctatttataaagctagcagatcgtgattttctcaagagaaactttaagcagatgtctaatgttttatgggtggctcctgaggacaaggcgagcttatggccacaacttcattatgactcatgcaataatctgtagatgcaagatgcttatcttcgtaatataggaaatgtgttacaagaattgtattctcacacaccagaggaagctcttcaattgagaaagaaagctctctctcgcattgaatggttgcaaaatgctgatgagcctacca

SEQ ID NO: 40132 - DNA, 295 bp, Glycine max
  Clone ID: LIB3139-014-P1-N1-A9
gggagaataggcacgtggggcgagctcttgcgagggtgtcacagtaaccgctgttgggttctgcgttggcgtctctctcggtgttggccactgataagaaacagggctgggctatcgactctttctatttataccaggcattcacgtataggtagtgagggaagggtattcggcttgtgcattccgcgttgcagatatgtgatcttgggcggtactttgcaacgggaaagcacttggtggagcaccagctaaggggttatttcactttcgcgctgggtcagatcttgacatacct

SEQ ID NO: 40133 - DNA, 375 bp, Glycine max
  Clone ID: LIB3139-014-P1-N1-B1
ctcgagccgaatcggctcgagcccattcgatcttgaagtctgcaaccgccggacaccgtcgatctacaaccgccggacgtcgacgtcgttgcggctctgtgttcgagcattcaatttcattggaagttcaaaaggacatgatttccatcaatacagcctccatattgggttgaaaattgagcaaattctgtttgagtgtacaaaaccagccttgttgggtttcagcattaaatacagcatctacattccttttatttcttctatcactcccaaattctggcatgggaaaagagaaactaagcttcaaagaagttcaccattctcatagtcccaaaactactctatggtggttctttcttgtagctacctgcataa

SEQ ID NO: 40134 - DNA, 364 bp, Glycine max
  Clone ID: LIB3139-014-P1-N1-B10
gctccgctggcccatcgccgtagccaatcggaggaatattccggtggctgcgttttggaccatgtcggcgtcgttttattccatgctgcatcaccttgatgtctttgcacgacaccggggtttgaccgtcgataaggatacgatggatggacaagccgagaacatcccgggaatttcttcagctcatttggcagaccttcgaactgtgcttcatgaaaatgatcaacgagtcatgcagcttgctttggaatgtatttcgaaagttcccagagcaaattatcttttactcaccacagtccaagagttagaagctgaaacaattgagtccttaaaagctatatttccctttccagtctatcctatt

SEQ ID NO: 40135 - DNA, 364 bp, Glycine max
  Clone ID: LIB3139-014-P1-N1-B11
agacgagaagccaaaaaatggaggccgacgagaagaaagcaatgatccgcgacgtagcgctacaagtcgttttcatttccctcactattttcagcttcctctggatgcacggcctccctcaaaacctctacgccaagctccgccaccgtcctccaaactctcgcgccgtccaagccaagcgccacttcgtccaaggcgcacagctcctcgcccaagccagaagatccaaaagcgcttccgccgcaacctccctcgccaaacaggccctagccgaggccgagaaggccctcgcgctcgaccccaaggacgccgcctcgcaccttctcaagtccatggcgctcgacctccagggcttccgcaccaa

SEQ ID NO: 40136 - DNA, 354 bp, Glycine max
  Clone ID: LIB3139-014-P1-N1-B12
atgataacttaattagtgttcatgaatatgtcaagccttactttagtggttctaaattgaaaagctttctagctggtcataatatcaccattactgatggtattgacaaaactagtgcaactttgcaatttagaaagttagcagattgtgattttctcaagagaaactttaagcagatgtctaatgttttatgggtggctcctgaggacaaggcgagtttatggtcacaacttcattatgtttcgtgcaataatctggaaatgcaagaagcttatcttgtcaatctcgtaaatgtgttacgagaattgtatttgcacagtccagaggaagctcgccaattgagaaggaaagctc

SEQ ID NO: 40137 - DNA, 204 bp, Glycine max
  Clone ID: LIB3139-014-P1-N1-B2
cgttgcgtggatcaaactgactcacacacataaagtgtcttgctttgaataaatgaggcgacggctccggaggccggaatgaactcacatgcgttaatatagatcctgcccagcgtgaattgctaacgtaggctctcgtcaaggtcgatgagatcggggagctcgatattggtctttacgtgatggacaccatcactgagggaa

SEQ ID NO: 40138 - DNA, 326 bp, Glycine max
  unsure at all n locations
  Clone ID: LIB3139-014-P1-N1-B3
gatgaatgctcctgattcaaatgataatattgatctactgttgagcattgatttgttgggtttacaaggagcaggtaaagcttttccaaacaagattgtttttgatgataagcttgtgttggctaacacacaagaattctttgatggaaattttccagtggattcttggttaccaatttttgtgaattgtctttatcctgtaagtcaattacctccagaagctgtcgttgtaaatgttacatgtggtagtggacgtggtggnttacccaccactgcttggattagttcttgagttaacaatccctcctcagatatcaacaaaaaga

SEQ ID NO: 40139 - DNA, 365 bp, Glycine max
  Clone ID: LIB3139-014-P1-N1-B4
ccgcgatcacaggttgccgcaccttaaaaccggaaacaaaagcaatcgttacttgatttcaagaatctctcaatttcttcctacttctttgtgtacggtttcttaagggaaagaaaatcactctctgtgctggccacagacttcgtgaatcattttcttttccactcttagtttatttgctgaacactctcctatttgatataggacttcgtgtcagatttaaacttcttctgtctctttctcagttctctgtttaatttcaagttcaagctggtgaaatcttggattagtgctcccactctcctatctggtataggacttcgtgggtagacttttctatttctctcctttctttcactctcttc

SEQ ID NO: 40140 - DNA, 356 bp, Glycine max
  Clone ID: LIB3139-014-P1-N1-B5
ggatgataagggagatggatatcttgttgacagggtcctagacaagactggcatgaagggcactggtaagtggactgttcagcaagctgctgaattatcaattgctgctcccactattgaagcatcattggatgcaaggttcctgagtgggttgaaggaggaaagagttgaagctgcaaaggtctttaaatcaggtggtattggtgatatcgtgactgatcaacctgtagacaagaaaaaattggttgatgatgttaggaaggctctttatgcagccaaaatctgtagttatgcacagggaatgaatttgatccgtgcaaagagtattgaaaagggttgggatttgaaggtgggtg

SEQ ID NO: 40141 - DNA, 316 bp, Glycine max
  Clone ID: LIB3139-014-P1-N1-B6
taacctacctctttttcttctctctcaacaacttcaccttcttcctcctcgatcatgtctcacttcaagggcaagtaccatgatgagcttatcgccaatgctgcgtacattggcactcctggaaagggtattcttgctgctgatgagtcaacagggacaattggcaagcgtttggccagcatcagtgtagagaacattgaatccaacaggcgagctcttagggagctgcttttcactgctcctggtgttcttcaatatctcagaggcgtcatcctctttgaggaaaccctctaccagagcacagctgcaggcaagc

SEQ ID NO: 40142 - DNA, 277 bp, Glycine max
  Clone ID: LIB3139-014-P1-N1-B7
ctcgagcctgactcattcccgtggataactttgcctcttaatctgcttcctattgcttgtacagatgtactcaagattaagatcttgggtatattaggagttatatattccctggcccagtatctaattactaggcaacaatatatctctggtttaaagtacatctaaaccatcatatatactgtacgatatgtttgtcaatttaggtattcatgcacgtgcttgtcttcctaaatttgtatgaggaatatgtgaatgcatttttgttattacctat

SEQ ID NO: 40143 - DNA, 331 bp, Glycine max
  Clone ID: LIB3139-014-P1-N1-B8
gaaagaaaagaccatcaaagtttcacttcagccttatccggtttagggtttcggtttttgacccaacctttgacgtatcgaaaccttaagtttcggatcaggtctgagcaatctggttggtagaacctttggtcttagagagtcaagttttatgtctgaattagacgatcaaattcctactgccttcgatccttttgctgatgcaaatgctgatgactcgggtgctgggtcaaaggagtatgtgcatattcgcgtacagcagcgaaatggaaggaaaagcctgacaaccgttcagggattgaaaaaagaattcagctataacaagatactt

SEQ ID NO: 40144 - DNA, 371 bp, Glycine max
  Clone ID: LIB3139-014-P1-N1-B9
gatgaatgctcctgattcaaaaaccagacgggactactctctagctccgtccacgtgccgtcgtacgctctgaaatcttccgtcgtctctggcatctccgctgccagccttctgatctgtcataccaaatggccaacagggttcaaattcctaccaacaattcagcactcattgctatgattgcagatgaggatactgtagttggatttttgttggctggagtgggaaatgttgacatacgtaggaagacaaattacctcattgtggattcaaaaacaaccgtcaaacaaattgaggatgcattcaaagaatttacaacaagggaggatgttgcaattgtgctgattagccaatatgttgcaaatatgata

SEQ ID NO: 40145 - DNA, 359 bp, Glycine max
  Clone ID: LIB3139-014-P1-N1-C10
ctcactcaaccaacgtgacagagaaatggttgcacctgcgaggccacagttcgttctcttcggatcctccatcgttcagcttagtttcagccatggcggttggggttcccatctttctgacatctactctcgtaaggcagacatattgttgcgaggatactatggatggaactcacgacgtgccctccaaatcctttatcaagtttttccaaaggatgctgcaacacagccttctcttgtgattgtttattttggaggtaatgattccatgggtcctcatttttctggcctaggccctcatgtgcctcttcatgaatatattgaaaacatgagaaagattctgattcatattcagggtc

SEQ ID NO: 40146 - DNA, 361 bp, Glycine max
  Clone ID: LIB3139-014-P1-N1-C12
gccggtttcgagcgtctcgaagacaagcgccttgtgcaacaacgatacaccctcacctctgagaagaccgacgacatgagcaaactggctctcggagcgaaactcgaccgtgctctatctcgccgtatgtctggccaggacgctaccttccgccctaagattatcaatgagaagaaagtggaagcataggcgacaggtttcgtcacagagtgcgacatgcagacattgttgttacagcaaaagcagatcacgacattttctcttttagaagtaagcaggatatccatacattatcgacagccgcagttacggcgaatataccacgtacgctgctgtcatgccgatagcgctacagcttttg

SEQ ID NO: 40147 - DNA, 373 bp, Glycine max
  Clone ID: LIB3139-014-P1-N1-C2
cagagtccttgttcaagagagcttatgtcaaaacaagtgtcagcaaaaacttgtgaggctgtgaaaccaaaagatggtgactgtaagctatttggcttctcacttatcagtggccctactttaccagagccttctttatcacaaagaaatgtgagtgaggctgctgatcagatgcatcttacagcacaccaacaaagaacatctgaaaatgatgaaaagttagaccactcgaagggatcaagacctgtagatgatatagttgttgatgaccaggacagaccattacggacttctcagctgcatactaaagatgttcaagctaaacctctcagtggttctgctaggagttgcactaaagttcacaagaagggca

SEQ ID NO: 40148 - DNA, 357 bp, Glycine max
  Clone ID: LIB3139-014-P1-N1-C4
gaaagtagtacatgcgcaaagcaagtatttgcaaaacacaactttctcagctttggaatttcagaataatgtttgagatccatattctatgcattcttggagacattgataatttcctttttctatcagggtgttggcaatacactcaaaagacattatgaaacttatctcttagaatatgaattatctcatgatgacgtagatggagagtgctgcttgatgtgtcacaggtctctgtctctcttctctggtctttatatctattataatgcgggggtggtcaagttttgtcttattgactattatttacctttcatgttgggggcaacagtagcgcagcaggtgactgggtgaact

SEQ ID NO: 40149 - DNA, 363 bp, Glycine max
  Clone ID: LIB3139-014-P1-N1-C5
tccatggaatggactggtttggccaatagattactgagtaagggcaatgatattctgtgttgcgattatgctagttttgatggtttgattaccaagcaagttatgagcaagatggcagaaatgataaacagtctttgtggtggtgatgaaaaattgatgcgtgaaaggacgcacctgctgttggcttgttgttcaaggatggcaatttgtaagaaagatgtttggagagttgaatgtggaatcccttctggatttccgctcacagttatttgcaatagcatttttaatgagatgctcattagatatagctatgaaaaattactgcgccaggctaaagctccaagtatgtttttacaatccttc

SEQ ID NO: 40150 - DNA, 364 bp, Glycine max
  Clone ID: LIB3139-014-P1-N1-C6
aatctcgaaaagtttatccaggagaggtccacaagggatgtggagtggaaaattcttcacaagatcgcattagacatagcccgtgcactcgcctatctgcatgatacgtgtgttccccgcgttcttcaccgcgatgtcaagcccagcaacatcttgttggatgatgatttcaatgcttatctatctgactttgggttggctagacttctggggacttcagagacacatgctaccactggtgtagccggaacattcggctatgttgcacctgaatatgccatgacgtgccgcgtttctgataaggctgatgtgtacagctacggtgtggcgcttctggagttgctctcagacaagaaggcattgg

SEQ ID NO: 40151 - DNA, 367 bp, Glycine max
  Clone ID: LIB3139-014-P1-N1-C9
ggacaagatcccggaaaggcgtgccagcgtcagagagactcatcagttctcactcgtacggcgcttttgctttgctttgcttcatttctttcatcgtcatcataaagttcgttcctttctcagttttcacccatacccagatgagtaacagcaccatctcggatctgtgtccctcctttgagtgaaaaaggttcaatctttggtctctggggctgttggggttccgtcattgaagaagaagaagaagaagggtattattgttattataatcatgtacccgaggctcatacacccccacgatgggattgtgacgcaggatgagttgcagggtggtgctgcttccaacctctctcacgctcacaagggt

SEQ ID NO: 40152 - DNA, 368 bp, Glycine max
  Clone ID: LIB3139-014-P1-N1-D1
gctcgacccgcgaaacgacggagactaaatctctaaaacgcttgaaaccctaaaactctgtgtcctccgccgttcacatcattgtcgacgttcgttcagttgctcacactctcaacagagaagagaagagaatgagaggaaggagctatagtccatcgcctcctcctccacgttacagcagaagaggaggagggaggagtcccagccctaggggccgctatcctccccgtccccgacaacaagatctccctaccagccttcttgttcgtaaccttcgtcatgactgtaggcctgaggatcttcgcagaccttttggtcaatttggtcctctcaaggacatttaccttcctaaggattactacactgga

SEQ ID NO: 40153 - DNA, 361 bp, Glycine max
  Clone ID: LIB3139-014-P1-N1-D10
gcttatatcaaggccacacatggaacctgacatatatgctatgtactgtaacaggaagaggtagtaatctctcatctcttgtttttttaaaaaaaaaataaaaattgcattgcatggcagcatcgttttctgctgtttctactctatcttcagcttcaattcaaacttatgataaacgaatttgcatttcaggttctgcacgtgagaagtcagctacagtttctcaagagatgtcaagagagtagggtagatgaggatcttggtgcgcctctctcttatcatgatctccctcatttttaaatcattgatctcaaggctaagtcagtgagccagggcttctttacagtgtaaatttatatta

SEQ ID NO: 40154 - DNA, 363 bp, Glycine max
  Clone ID: LIB3139-014-P1-N1-D11
cgaggaggaggagaagtgggtcccggtgactaagctgggacgcctggtgaaggaaggaagaatccgaagcctggagcagatctacctccactcgctgcccatcaaagagcaccagatcatcgacacgctggtgggccccaccctgaaggacgaggtgatgaagatcacgccggttcagaagcagacccgggccgggcagagaacccgtttcaaggccttcgtggtcgtcggcgacaacaacggccacgtgggtctaggcgtgaagtgcagcaaggaagtggccaccgcaattcgtggcgcgattattctcgcgaagctttcggttattcccgtgaggaggggttactgggggaacaagattgg

SEQ ID NO: 40155 - DNA, 359 bp, Glycine max
  Clone ID: LIB3139-014-P1-N1-D12
caattttgaggcttttccccacaagctggtgcagtttggagagattcaggaaaaagttgtattgaaattttcacaagaggaatttcttacagcttggtcaactcaggtgcgtcctgcaacaactctgttggctgatgggtgtccatatttgtatgctatggtgcatgatagttcagtgtctacaataccaggtgattttgtcattggtgttaagttgacaaccataaacaatatgtgtgcatatgggcttaatcctggtatttcaggttctcgtcttttgggcaccattcctcagtccatttcacagcaaactgtttggaatcaaatggcaacagtgagaacaccattgaattttgatt

SEQ ID NO: 40156 - DNA, 364 bp, Glycine max
  Clone ID: LIB3139-014-P1-N1-D5
gcaagatgatgctcctgatcctataattaacacttgcaatggcttctaattgggattatttctctccaaataaggcttacaaaccaaagatgtggacagaggcttggactggctggtttactgagtttggaggtgcagttcctcacagacctgctgaggacttggcattttcaattgcaaggtttatacagaaagggggatcatttgtcaattattatatgtatcatggcggaacaaattttggtcgaactgctggtggcccctttattgctacgagctatgattacgatgcgccccttgatgaatatggattggccagacagccaaagtggggtcatctgaaggatttacatagagcaataaa

SEQ ID NO: 40157 - DNA, 362 bp, Glycine max
  Clone ID: LIB3139-014-P1-N1-D6
gaaaagactctactcaaacaccaagaccaacttccgcgaggttgcaatcaaaggattttgggacatgtacgatccagagggatattctctgtggttctgtgattacaaatacaatgatgagaacacagtttcctttgttacgttaaacaaggttggtggatttcttcagaggatggatctggctcgcaagtatgcatttggaaagatgctggtgattggatcacaggcaccatttaaggtgaaggggttgtggcttttccgtggacaagagattccaaaatttgtgattgatgaatgctatgatatggagctctacgactggaccaaggttgacatctctgatgaaactcagaaagagcgcg

SEQ ID NO: 40158 - DNA, 357 bp, Glycine max
  Clone ID: LIB3139-014-P1-N1-D7
cacctcaaaaccggaaacaaaagcaatcgttacttgatttcaagaatctctcaatttcttcctacttctttgtgtacgatttcttaagggaaagaaaatcactctctgtgctggccacagacttcgtgaatcattttcttttccactcttagtttatttgctgaacactctcctatttgatataggacttcgtgtcagatttaaacttcttctgtttctttctcagttctctgtttaatttcaagttcaagctggtgaaatcttggattagtgctcccactttcctatctggtataggacttcgtgggtagacttttctatttctctcctttctttcactctcttcttctcactaat

SEQ ID NO: 40159 - DNA, 302 bp, Glycine max
  Clone ID: LIB3139-014-P1-N1-D8
tttgcacagtccagaggaagctcgccaattgagaaggaaagctctctctcgtattgaatggctgcaaaaagctgatgtgcctaccatagcacagattgaagagttccattcgatgcagaggatgatgaatgctcctgattcaaatgataatattgatctactgttgagcattgatttgttgggtttacaaggagcaggcaaagcttttccaaacaagattgtttttgatgataagcttgtgttggctaacacacaagaattctttgatggaaattttccagtggattctgggtaccaatttt

SEQ ID NO: 40160 - DNA, 359 bp, Glycine max
  Clone ID: LIB3139-014-P1-N1-D9
aaaagacaaaatatagtgaaaccttaactatcagaacctatttaagtatgcagggttggatattgacaatcttcagaacttggagagctgtctttttgttcttttcccatacttctcgtacatgcttgcagaaggtcttggactgtctggtattgtgtcaatattgttcacaggaatgggcagccaatgtgttctcttgtgcttatctagtcaacttgatcagacctgcctatcgacaaataccgccaaaacaccagaaagcactttggtatagtggacttcgaggggcaatggcctttgcccttgctctgcaatcaattcatgatctgccagaaggacatggacagaccatcttaact

SEQ ID NO: 40161 - DNA, 360 bp, Glycine max
  Clone ID: LIB3139-014-P1-N1-E10
tgttactcatttcttctcatcttctttttcttccctttaaaattattattccgtgcaaacacaacaacaacttcatcaccaacacgaagaacaagattagcgttatgggtctcttcctttctaggaatttggcttgcaaattcatatacccttttcttttttccaataaggtttcaaaggatttgttccccaagcagttggagaacatgatgtctctggtctctcctcgtactggcaggcatttgcagcgctatgacaaaggctgtcgccaagttgtgggatgcattccttacagatacaagaacaatggaacacaggataaggaattagaggttcttgtgattagtgctcagaagggtc

SEQ ID NO: 40162 - DNA, 364 bp, Glycine max
  Clone ID: LIB3139-014-P1-N1-E11
gagaacaccattgaattttgattctagcaagcagagcttttgtcaattttctattgaccttctcggtggaggaattttagtggacaaaactggagattggatcacacttatacaaaattctccaattagtaacttgttgagagttgccgcttggaagaaaggctgtttaatggttaagattgtgatgtctgggaatgcagcagtcaaaaggagtgattgggcctcattggtacaggtgtttttaacaaacagcaacagtacagagcattttgatgcatgtaagtggacaaaatcggaaccacattcctgggaattgatcttcccaatagaggtatgtggtcctaataatggttttgaaatgtgg

SEQ ID NO: 40163 - DNA, 361 bp, Glycine max
  Clone ID: LIB3139-014-P1-N1-E12
attctttccctctcgcaataaagattcactggtgttacgcgttaacatccactctattaagcaaatgtgctcctagtagtacaataaaaatataaaataaaataaaaataacaaatatttatataagattgtgttcttgcaagttccaagttccaagttcatgcacaaccgatcttttcctctgagaagacgtgtcggtagctgaagcattttataagcctccactttcctgaactagttttaacatacaatctttcaagtacacctccccagcttccatttaagaatggagatcactagaataggccaatggttaagtcttctgatatgtgtactactattactgcagacagaaggggtt

SEQ ID NO: 40164 - DNA, 364 bp, Glycine max
  Clone ID: LIB3139-014-P1-N1-E3
gttcgtacctttttgtgatttggaaggatctgatgccagtttggttttctggggtggctgtgttccttgtcccactttccttctttttataggatacttgactaattgaaaaaattccttttgttttcattgttatattatagtcaagttatttgatgtattttagttcttcagtttggaatccgttttgggtttggttatgctgttatggtggctttggaagtttgaacaagggggattcttagatccttttgcactttccctctcctgaaattttgcagtcatatcaaatatttgcgttattttttcttctttcgtaagagcatagctcttgaaatagagaaagtatctttagctttttttt

SEQ ID NO: 40165 - DNA, 355 bp, Glycine max
  Clone ID: LIB3139-014-P1-N1-E5
ggagtttggaatttttgaagcgtactggatttaattgcgatatcatttgtgtcactggatggactgccaccccaatgcaggatgttcaggttacaattgattggtttatttcctctcaggaatgtgttcccaggacctattgtgttttaaatccacaaaatccttttgtgttaaataggtggatgggaaaattgacttttccccagggcacttcccgaagtgttaagagaatgcctctttctataaggggaggagctggtgcaaagaatgctattctcatgaatatgccaaatgctgttctttcaatgtggagatattttgttggagatctcgtctttgaagtatctaagatgac

SEQ ID NO: 40166 - DNA, 364 bp, Glycine max
  Clone ID: LIB3139-014-P1-N1-E6
ggtttggactatatggaaagaattcctcttgccacatctgagggttttcctcatgtgctttcacgcaaaaatggcgaaaaaggcaaaaggagatttgtctctggggatggtgaagagatgacattgattccaggaaccagtgttgaagaggcttacaacaagctaatagttgaacttgagaaaaggggtcctacattgggtggcattggatggtccaagggttaaaaaccttcttggcgcaaaaattttggccaaacttaaaacccgctgtttaactattttccttatggagttaaatcttgtggtccgtcaaaagtttttaaattttgtgaggttcattatgaagaaaagggacaagcttagt

SEQ ID NO: 40167 - DNA, 361 bp, Glycine max
  Clone ID: LIB3139-014-P1-N1-E7
cgctctgtttctgtctctgagattgcggatgaggagtccgaacgagcgaccttgttcgattatcgcaaagattaaggcatcatgggtagggaaaagactcacatgaacatcgacgtcaatgcacatggcgactctgggaagacaactaccactggtgatttgatctacaagctgggaggtattgacaagcgagtgattgagaggttcgagaaggaggctggtgagatgaacaagaggtcattcaagtatgcctgggtgcttgacaagctgaaggctgagcgcgaaagaggaattaccattgatattgctttgtggaagtttgaaaccaccaagtactactgcacagtcatcgatgcccccg

SEQ ID NO: 40168 - DNA, 300 bp, Glycine max
  Clone ID: LIB3139-014-P1-N1-E8
ctattatactcgatctagtaaaagcagaatgcgttcgaattacatactagtggtgaaggacgcatagcatgtgacagagcacggcgaagactgccgcgaaggactaccatgaccctcctcctgcacccgttgatcgacccaaacgaactcacaacgtggactggtacacagatcaacatatatgagctcatagcagcacatgctgtctgtttacgtacaccccgttgatccataataaggatacgacagacagagcgacaccactgatcacggagacaccggatgtcactggggcatgct

SEQ ID NO: 40169 - DNA, 364 bp, Glycine max
  Clone ID: LIB3139-014-P1-N1-E9
caattattcctgacatttcgaaaccgaactgtggctgtgtggaacttccgtggagaacttgtaacttcttttgaggatcacctcttgtggcatcctgattgcaatacaaacaacatatatataaccagtgaccaggatcttatcatatcatattgcaaggccgattctgatgattcattgtccgaaggaaatgcaggttctattaatgtcagcaacattttaactggcaagtgtcttgcaaagataagagcaagtaatggcttacccatggtgaaggaatgcagttgcagcgatgacaattgttcaagtagtgcttgcaattcagggaaacgaaagcgttcctccagaattaggagcacagttg

SEQ ID NO: 40170 - DNA, 348 bp, Glycine max
  Clone ID: LIB3139-014-P1-N1-F1
atttggacaggatatagctgctcagtttaatcataccaatggtctctccctgatatcgagagctcatcagcttgttatggaaggattcaattggtgccaggacaaaaatgtggtgactgtatttagtgcaccaaattactgttaccgatgtgggaatatggctgctatactagaaataggagagaatatggatcagaatttccttcagtttgatccaccgcccaggcaaattgagcctgacaccacacgcaggactccagattattttttataatttcatttatctgcctgtttgtagttactgctctctgccattactgtaaatgtgtctttaaggaaaggagtttt

SEQ ID NO: 40171 - DNA, 323 bp, Glycine max
  Clone ID: LIB3139-014-P1-N1-F10
ggaaaacaaagtatagagtgaaagaatgggtgagaaaagcaagattttgatcataggaggcaccggctacatcggcaaacatatagtggaagcaagcgcaaaggctggaaatcccacttttgctttggtgagggaatccacactctctgacccctccaaggcacaactcatccacaattttgaggctttgggcgttaatttggtccgcggggatctgtacgatcatgagaagttggtgaaagctatcaagcaagtagatgtcgtcatatccacgctgggtcacctgcagcttgccgatcagctcaagatcatcgctgccatta

SEQ ID NO: 40172 - DNA, 364 bp, Glycine max
  Clone ID: LIB3139-014-P1-N1-F11
gatctctgtgctaggccatggatctctttggagtagaatatcatcaaagctccacaagttagagctattgtagatattctactccaaagagatctctgtgctaggccatggatctgagaccgctagcaagcttcaagggacaacaccccatgatcagcttctgattgacacctctgattccttctctggattgttgttgttcacaatagggttccttctgttgatggttgcttttgttaaggacagagaatttcagagtttctttgccaaagggtgtgtgatgcttcacatctccatggcagtgtggagattcttctttgagaggaagcttggggatcttgcacatgagtggcctaggcatgct

SEQ ID NO: 40173 - DNA, 365 bp, Glycine max
  Clone ID: LIB3139-014-P1-N1-F12
ggacaagatcccggaaaggcgtgccagcgtcagagagactcatcagttctcactcgtacggcgcttttgctttgctttgcttcatttctttcatcgtcatcataaagttcgttcctttctcagttttcacccatacccagatgagtaacagcaccatctcggatctgtgtccctcctttgagtgaaaaaggttcaatctttggtctctggggctgttggggttccgtcattgaagaagaagaagaagaagggtattattgttattataatcatgtacccgaggctcatacacccccacgatgggattgtgacgcaggatgagttgcagggtggtgctgcttccaacctctctcacgctcacaagg

SEQ ID NO: 40174 - DNA, 347 bp, Glycine max
  Clone ID: LIB3139-014-P1-N1-F2
attttcccagtttgaccttttactagaacctctcgtgaaatcctttcattctcaatgtccttatttgaaactttcacaccatcaagaagcaagagcttcaatcaaagatccaaaatccaaccctctttcaagcctccttggagatttttcatatttgacgatggatacaaaactgctccaacagcaactattccaggcacatacaaacagtgaaggcacactccgaacaaatgaatgcaggaaatcgaaaatcctagcgcactccctttgatcttcttcatcaaatcaatcggaaatatgacagcccacatgctaaaaatagctattctaaattttatcagcagaaa

SEQ ID NO: 40175 - DNA, 369 bp, Glycine max
  Clone ID: LIB3139-014-P1-N1-F3
caatgttctacttgatgacaacttcactccaaaaatttctgattttggcttagccaaattgtgttccaagaatcctagtttggtgtccatgacagctgcaagaggaaccttgggatacattgcacctgaagttttctccaaaaactttgggaatgtgtcttataagtctgatatttacagttatggaatgttattgttagaaatggttggaggaagaaagaatgtagccatgtcttctgctcaagatttccatgttttgtatccagattggatccataacctgattgatggagatgtacatatccatgttgaggatgaatgtgatattaaaattgcaaagaaattagcaattgttggactttggtgcat

SEQ ID NO: 40176 - DNA, 364 bp, Glycine max
  Clone ID: LIB3139-014-P1-N1-F4
atcacatggaaacgaaaaagccctaactacgcacgcactcattcttgagaaagctcggtatttattcaagcatggcactatcttgtggagtatattgcacatccaaattgatctatggctggcaaatacttctgcaaaaggagcatgctattccagttcgtcactttgctaaagagtctgccccttctgcccttaacggagatcagatgctgaagaacatttttgtggaggtgaagaacaaatttgagactgccatacgaatattaaagaaggagaagatcaccattgacccaaaagatccagctgctgtttctcattatgcaaaggtcatgaaaacagttacagagaaggcaagcttgttgtc

SEQ ID NO: 40177 - DNA, 365 bp, Glycine max
  Clone ID: LIB3139-014-P1-N1-F6
taaactttttctgtttctttctcagttctctgtttaatttcaagttcaagctggtgaaattttggattagtgctcccactctcctatctggtataggacttcgtgggtagacttttctacttctctcctttctttcactctcttcttctcactgatccgcattgccgttcaaagtggtcttatttgaaaaacacttgggcgttggtgcaaatgtttgcttcgttaattttctctggagacaacaggctcactgagaaaacaatttttacttgcagagatttggacatcttggttgtctattatacaatagcaactcaatttagaaaatttctaccgcattacattaggtggcatctgtatacctt

SEQ ID NO: 40178 - DNA, 335 bp, Glycine max
  Clone ID: LIB3139-014-P1-N1-F7
gattggtttatttcctctcaggaatgtgttcccaggacctattgtgttttaaatccacaaaatccttttgtgttaaataggtggatgggaaaactgactttccctcagggcacttcccgaagtgttaagagaatgcctctttctatagggggaggagctgttgcatagaatgctattctcatgaatatgccaaatgctgctctctcaatgtggcgatatcttgtcggagatctcgtctttgcagcagctaagatgacttctccctacattaaatgcacagtctctttctttatagcatctggaaattcggctgacgacaccattaattttgaggc

SEQ ID NO: 40179 - DNA, 340 bp, Glycine max
  Clone ID: LIB3139-014-P1-N1-F8
ggaatcccttctggatttccgctcacagttatttgtaatagcatttttaatgagatgctcattagatatagctatgaaaaattactgcgccaggctaaagctccaagtatgtttttacaatccttcaaaaattttgtttctttgtgtgtgtatggtgatgataacttaattagtgttcatgaatatgtcaagccttactttagtggttctaaattgaaaagctttctagctggtcataatatcaccattactgatggtattgacaaaactagtgcaactttgcaatttagaaagttagcagattgtgattttctcaagagaaactttaagcagatgtcta

SEQ ID NO: 40180 - DNA, 368 bp, Glycine max
  Clone ID: LIB3139-014-P1-N1-F9
ccagaacccacactctctcaactttctcggcccgaagcccgtcccaatgaagcacgtgggcgggcctccgaagcccacgaagctgtaccggggcgtaaggcagaggcattgggggaagtgggtggcggagatcaggctcccgaagaaccgaaccaggctctggctcggaaccttcgacacggcggaggaagctgctttggcttacgacaaagccgcgtataggctccgaggcgacttcgcgaggctgaacttcccgagcctgaaaggctcgtgccccggggaggagtacaagcctgtgcattccgcggtggacgctaagctcgacgcgatttgcgccaacttggcggaaatgcagaagcaagggaaga

SEQ ID NO: 40181 - DNA, 360 bp, Glycine max
  Clone ID: LIB3139-014-P1-N1-G1
ctcgagccgaatcggctcgagtgctcttctctctcactaccattgatttccccgcacgttcctctcctaattcccctcctttttcgctactctttttctttgggggtgaaaactgaaaactagaaagaagcgtccggagagaaccaaagaaaccgaatccaatgggaggatgtgcaactaagccgaaggtctcccaggacgatcccgatggaaagcccaaggcaccccaaccagaaccagaacctgaacctgaacaccaacaacccaacaccaaagacaccctgcaaaccaaagtaccccaagtggaacagggtgctgctaacaaagaccacaacaaccttaatgtcaacgaaattgttg

SEQ ID NO: 40182 - DNA, 366 bp, Glycine max
  Clone ID: LIB3139-014-P1-N1-G10
ctccgtcaaaccctccaacacacaccttctctcaacgcccccattctctttctctttccctaacgtccccgacgacgccgtaacgtcctccctttcatggcctcttgcgacgacgacgacgacttctctctcctccgcgacgacagccaccaccacctccaccaaccctacgcgccgcaccaccaccacttctctccctccgccgtcgccgcctccgtgccgcccaagcccgttgccgaagctgaggacttcgccaaccccttcgaagacgacgacggtagcgccagcgagaagcgcaaggagtgcgacgagatcggtgagggagccgcctcgtacggattcaacaacaagagatctaaggcgact

SEQ ID NO: 40183 - DNA, 362 bp, Glycine max
  Clone ID: LIB3139-014-P1-N1-G11
ggcaggtgtcctcaccctcacaatgtttgtcatgcttggaaatatgatcaaaagagaccacttcgataattcacttcaagaaaagcttccaggaggatcggaagatgccaactttgagactgctacgtttgatgctactcatgtaagaaagaatatagggctttggaagggagatgtggatgacctaaaaccgtgttgggttaagccatcttctgatgatgtggagcagacccaaggatttgttacttttgcgttaaccaatggcccagagtaccatatttctcagatagcagacgcagtgattgttgctagaaatctgggggcaacgcttgtgatgcctgacatcagaggaagccaacctg

SEQ ID NO: 40184 - DNA, 366 bp, Glycine max
  Clone ID: LIB3139-014-P1-N1-G12
tggtaagagcagcaatatttcatccagtgcaaaagaatcagaagttcagcctgtcactagagatgcatcacttcatccagtttcaaaagagaattttatggagtcaaaaacacaattttgtggcaggggaaagagatatgccgttactgtaaaaaattcaaacccaagatcatcaggtccagctacaagggttaatcgcccagactctggaggatttatgaggaggcctcgccggaatatgcagcgcactgagtttcgagttcgggaaagtgctgaaaagaggcagtctactagttctgttttgaccgatcagtttgggttggataataggtcaaatatcaatgggaggggagcaggtgtatctgg

SEQ ID NO: 40185 - DNA, 318 bp, Glycine max
  Clone ID: LIB3139-014-P1-N1-G4
gtcctacaggctctgccagattccaacatggggtgggtgctagatctttctaacatggacctgcaatatgtaacttccagccaagacaacgcacacagatgggtgcgcgacaatgtgataaactattggaatgtcagagtcaggcacattactgtggcaaaagaaaagaagccttgcgactcattttcacagttcgtatggcctgcgatgcaaaacattcaaagagcactctctaaggctggacttggaaaccaaatgaagggtgccactgcccttgagtctggggcattggcaggatcctaccctccatcgagaggc

SEQ ID NO: 40186 - DNA, 366 bp, Glycine max
  Clone ID: LIB3139-014-P1-N1-G6
aaacacacaaaaaatttctagagcgagaaagtgagaggagagagaaagtagctgatcctccatggcctccaccaaggaacgcgaaaactttgtctacaccgccaagctcgccgaacaagccgaacgctatgaagaaatggtggaagcaatgaagaatgtggcgaagctgaacgtggaattgacggtcgaggagcggaaccttctgtcggtagggtacaagaacgtggtgggtgctcgtagggcttcgtggaggattctatcgtcgattgaacagaaagaagaagctaaagggaacgatgtgagtgtgaagaggataaaggagtataggcagaaggtggagtctgagttgtccaatatctgcagtga

SEQ ID NO: 40187 - DNA, 356 bp, Glycine max
  unsure at all n locations
  Clone ID: LIB3139-014-P1-N1-G7
acttcattatgtttcgtgcaataatctggaaatgcaagaagcttatcttgtcaatctcgtaaatgtgttacgagaattgtatttgcacagtccagaggaagctcgccaattgagaaggaaagctctctctcgtattgaatggctgcaaaaagctgatgtgcctaccatagcacagattgaagagttccattcgatgcagaggatgatgaatgctcctgattcaaatgataatattgatctactgttgagcattgatttgttgggtttacaaggagcaggtaaagcttttccaaacangattgtttttgatgataagcttgtgttggctaacacacangaattctttgatggaaatt

SEQ ID NO: 40188 - DNA, 365 bp, Glycine max
  Clone ID: LIB3139-014-P1-N1-G8
ccaaaaactaccaattgtcctccatttccacggcggcgggttttgcataagtgaaccggactggttcatgtactaccaagtctacacccggttcgcccggtccactcggtccatcgtggtttccccgttcctccgccgtgccccagagcaccgcctccccgccgccatcgatgacggctttgacaccctcctctggctccaaaccgtggcccggtccggttcactcgagccgtggctcgagcaacacggtgacttcaaccgggttttcctcataggagacagttctggcggaaactccgtgcatgaagtggccgcgagggccggttcggcggacctaagcccggtccgggtcgcgggggcaattt

SEQ ID NO: 40189 - DNA, 354 bp, Glycine max
  Clone ID: LIB3139-014-P1-N1-G9
cttttattctatctcactttcatactcacccttattgcagtattttgacctcaatggcaccaagttcggcagtgccagatgaacaggttgttgttggagaggagatagagcatgtaagagtgatcactttgaacaggccaaggcaattgaatgccatctcaccagaattggtttctctgctagcaacatatttggaaaagtgggagaaggatgaggaagcagagctagttatcataaagggatctggtagggctttttgcgctggaagggatttgagagtgttctatgacggcaggaaaataaaggatgcctgtcttgaagtggtctacagattttactggctttgctatcaca

SEQ ID NO: 40190 - DNA, 365 bp, Glycine max
  Clone ID: LIB3139-014-P1-N1-H10
aacaccattgaattttgattctagcaagcagagcttttgtcaattttctattgaccttctcggtggaggaattttagtggacaaaactggagattggatcacacttatacaaaattctccaattagtaacttgttgagagttgctgcttggaagaaaggctgtttaatggttaaaattgtgatgtctgggaatgcagcagtcaaaaggagtgattgggcctcattggtacaagtgtttttaacaaacagcaacagtacagagcatttcgatgcatgtaagtggacaaaatcggaaccacattcctgggaattgatcttcccaatagaggtatgtggtcctaataatggttttgaaatgtggagtt

SEQ ID NO: 40191 - DNA, 278 bp, Glycine max
  Clone ID: LIB3139-014-P1-N1-H11
ggagttgatcctggaactaaccctgtttgccatttccttggaagcaaggccattttatgggtacccaatttatctatggacactgcctatcagactaacgttgttgtttaattagtccatgcatctgcatcttgggcaccataagattgtatataaaataaattatggtgtgttgtgtatgttgtgcaagacctggaacttcacctttctacgtacgtgtgctgttaggatgcagtgtgctttgatgatgctttgatgaatatgcagtgtgctttttt

SEQ ID NO: 40192 - DNA, 366 bp, Glycine max
  Clone ID: LIB3139-014-P1-N1-H7
aattgatgcgtgaaaggacacatttgctgttggcttgttgttcaaggatggcaatttgtaagaaagatgtttggagagttgaatgtggaatcccttctggatttccgctcacagttatttgcaatagcatttttaatgagatgctcattagatatagctatgaaaaattactgcgccaggctagagctccaagtatgtttttacaatccttcaaaaattttgtttctttgtgtgtgtatggtgatgataacttaattagtgttcatgaatatgtcaagccttactttagtggttctaaattgaaaagctttctagctggtcataatatcaccattactgatggtattgacaaaactagtgcaactt

SEQ ID NO: 40193 - DNA, 365 bp, Glycine max
  Clone ID: LIB3139-014-P1-N1-H8
attgctttctcgttagccttcaattcgttcaccaatttcctgaggggaaagaggaggggccttttgccttcgtgagaggaagaacggggcatgttcttttctgtcctctctctctctctctctctgatcagacagacagacacgcgcatattacacatagatgcagcagagaaactctctctctctctctctctctctctctctctcattattgctccaaacccattcagagtacagatggatcttcgattatagcggttttagcagctggaatctgcacttgcaccatgtgtgtttctactgttaatatatattttttcaacataaacattcaattccaccactgaaagaagaaattggagaaa

SEQ ID NO: 40194 - DNA, 60 bp, Glycine max
  Clone ID: LIB3139-014-P1-N1-H9
gcgtattatacgattattgagaaggctctttcatatgcgacggcgaagatggcagagacg

SEQ ID NO: 40195 - DNA, 365 bp, Glycine max
  Clone ID: LIB3139-015-P1-N1-A1
gagaagtaaagagagttttgctttttgaaatggcagcgtcgtcgtcgtcgtcggagaagcaagtggtgctgataggcatagacgacagcgagcagagcacgtacgcgctgaattgggctttggatcacttcttcccgagcccaatcttcaagctcgttctcatccactcaaggcccaccgccacctccgccgtgggcttcgccggccctggagccgctgagatcttgcctattgtagattccgatttgagaaagattgccgccagagtcctcgaaaccgccaaacaactttgcttcaacaaatccgtgaatgatgtgacagcggaagtggtggaaggtgatcctagaaatgttctttgtgatgct

SEQ ID NO: 40196 - DNA, 362 bp, Glycine max
  unsure at all n locations
  Clone ID: LIB3139-015-P1-N1-A10
gaagaaagaagaaaaagaagcgaaactaaagtcagcattcgaaaaagatgagtagcatcggtacaggttacgatctatcggtcaccactttctcccctgatggccgcgttttccagatcgagtatgccgctaaagccgtcgacaacagcgggactgttattgggatcaagtgcaaagatggggttgtgttgggcgttgagaagcttattccgtcgaaaatgatgcttncgggttccaatagaagaatacactccgttcatcgtcactctgggatggctgtagcaggattagcagctgatggcagacaaattgttgccagggctaagtctgaagctactaactatgacagcgtatatggcgaa

SEQ ID NO: 40197 - DNA, 338 bp, Glycine max
  Clone ID: LIB3139-015-P1-N1-A11
taaaaataaaaatcattgtaactcatgtctaataatgcactaataactctgtaacaccaccttcataattccgattccagttcaaagcgactcaagcacttgttcgactcttttatcctacgcactcctccctgcttatcctgcgcatctttcacctagatcctccccttcactccttcactttcctatttcagtgggaaagaatcatgagttgtttcagctgttgcgaagaggatgacctccataaggctgctgaaagtggaggaccctatgttgtaaaaaatccagcagggaatgatggaaattatcatgcttctcaaactgcaaagcagggcact

SEQ ID NO: 40198 - DNA, 347 bp, Glycine max
  Clone ID: LIB3139-015-P1-N1-A12
caagaatggaactgtttcagtagcttctgcgtttgctggccataaggaagctatacagcaaagggaccacaaatttttaagaattgctgttgaagaagcgtataaaggggtagactgtgaagatgggggtccctttggtgctattatagtttgtaatgatgaaattgttgctagatgtcacaacatggttctgaggaacacagaccccactgctcatgcagaagtcactgtaataagaaaggcttgtgaaaagctaaaccagatagaactttcagactgtgaaatatatgcttcttgtgaaccttgcccaatgtgctttggagcaattcacctctcacgagttaaga

SEQ ID NO: 40199 - DNA, 253 bp, Glycine max
  unsure at all n locations
  Clone ID: LIB3139-015-P1-N1-A2
gagacaccttctacgcnncgttgagttttatagaaacacacacgattctgcaacaatgcgcaccttctacttcttaaaaanaggcgacgaggaacacggggaagggaggtgtgttgtggttaaggaaaaggaaaaggaaaaggagagtgtgaagatgaatatgagaaagcaggggaaagtgtgcgacgtgacggaacaggcaaggaagccagtgacagtgagcaaagagatgatgcgtttacacgacgccgtt

SEQ ID NO: 40200 - DNA, 345 bp, Glycine max
  unsure at all n locations
  Clone ID: LIB3139-015-P1-N1-A4
cttctttccagatccacagtatgaaaatgttcaacacatcatatgttgtgattcttatgctacatatgcttacgactttgtgtttgagaacaacgttggattttcaagaactaaatcagatgttcctacaattcagattgcatttcagtactcagttgtagttcctcctcaggaactttctatttctaattcaggaggggtttctacaaatagaaccaagcatttccttcagcgccgggtaaagatccgaacattggaatttggtgttgctcagaacattcatgaactttatgatagctgtgatcccgaagntgttctatctttgcttggtcacaaggttatatt

SEQ ID NO: 40201 - DNA, 270 bp, Glycine max
  Clone ID: LIB3139-015-P1-N1-A5
tctcaacttatctctctctctcaatctccttaccttggaagcaccccacccacacactgtgcaacgttaaccgatcaaaaacccatctctgtctacctttgtttgatctcaaagttggctctcacaaaaacgtgaaaaaatttcattcccgtgagattctcctccaccgatgcagattgaatttcaggaattctgggtgtctacgaaacgattgagacctgtgaattgttagtcagttatatttttgcgcaccagttttatttttttgtt

SEQ ID NO: 40202 - DNA, 364 bp, Glycine max
  Clone ID: LIB3139-015-P1-N1-A6
ctttttcttctctctcaacaacttcaccttcttcctgctcgatcatgtctcacttcaagggcaagtaccatgatgagcttatcgccaatgctgcgtacattggcactcctggaaagggtattcttgctgctgatgagtcaacagggacaattggcaagcgtttggccagcatcagtgtagagaacattgaatccaacaggcgagctcttagggagctgcttttcactgctcctggtgttcttcaatatctcagtggtgtcatcctctttgaggaaaccctctaccagagcacagctgcaggcaagccctttgtgaatgtcttgaaggaagctggtgtgctttctggcatcaaggttgacaaggg

SEQ ID NO: 40203 - DNA, 295 bp, Glycine max
  Clone ID: LIB3139-015-P1-N1-A7
aaaccctaaaaagatgaacccctacgacagcagatattctgacgcctcttcttttcgcggccgtcgtagtgatttcgttggacctattccgccgccgtctttcgtcggccgcggcggcgcggtttcctacggcgtccctggacccaacgggttccgatccgcacccgttgctccggtcccaccctttgtgcctccttccggaggctttaatgtaggtcgaggcggtggcagagcgggctatggtcatgtgagtgatagaatgggtcgtagcggtggtggaagaagtcgtggtggt

SEQ ID NO: 40204 - DNA, 359 bp, Glycine max
  Clone ID: LIB3139-015-P1-N1-A8
ggactcgtcaatggctaaacactggctgcactattggcaggacacgggccataagggtcacactctatgcatgtatcgccgtagaccattggtggtgcacggaaccacaacagcaagacacgtggcagttcgtccttacgactatgcaccaccaccatcataatcaaaacctttgatgccaaccctaccacctataaacgacacagcaacgggtcacaaattctacagcaacataactggcaaggtgggggccccacactgggttcctgtgccagccaaagtggatgagcacatgttcattactattggattaaacctagacacgtgtgatcctaagaatgccaccaatgccacgtgtc

SEQ ID NO: 40205 - DNA, 363 bp, Glycine max
  Clone ID: LIB3139-015-P1-N1-A9
gaataaccaaaccctaccaccttgcttgttaaacactctagtctgcccacaaaaggggcatatgatactgaggcacaagttccttggaagaccttcacttccacagttgcaagttacagcattaccttctgtttcagaggaaagaaaacgaaggaagtgagaaaaattttaaaattgaatagaagagaaaatagaaagaaagaaaattttgattttttcttctaaatgtcaatttttctttctttcctcaaccaaataaaagaaaatgtatcattgtctgtattttcttctagtccaaacacatgattaaagtttagcaacagatttggtgtaactaacgatattttaaaaccgaaagtaatt

SEQ ID NO: 40206 - DNA, 360 bp, Glycine max
  Clone ID: LIB3139-015-P1-N1-B1
agagatcctggtggatggacctcatgacatcaacaagtgtgctgaggtgaccgagcgcgttcttgcagcatgctacaaggctctaaatgatcaccatgttctgcttgagggcactctgttgaagcccaacatggtcacccctggttcagagtctaagaaggtcaccccagaggtgattgctcaatacactgttacagctttgcagcgaactgttcccgctgctgttccggccattgtcttcttgtctggtgggcagagcgaggaggaggcaaccctcaacctcaacgccatgaacaagtcccagggaaagaagccgtggtccctttctttctcttttggaagggcacttcagcaaagcac

SEQ ID NO: 40207 - DNA, 357 bp, Glycine max
  Clone ID: LIB3139-015-P1-N1-B10
caacaatgaagcgtggggtcctcatggatcacttcttgcggatattgcacaggcatccagaaattttcatgaataccaaatgatcatggcagtaatctggaagcggattaatgacacaggcaagaattggcggcatgtctacaaggctttgacggtattagaatacttggtggctaatgggtcagagcgtgtcatagaggaaattagagagcacgcccaccaaatatcgacattgtccaattttcaatatattgattccagtggaagagaccagggaaacaacgtcaggaggaaatcacagagtctcgttctccttgtgaatgataaagaaagaatcacggaggttagacagaaggc

SEQ ID NO: 40208 - DNA, 329 bp, Glycine max
  Clone ID: LIB3139-015-P1-N1-B11
acacgatccattagaagaaagaaaattaagcaaatgacaagaaagaaacaatgaacgacttgttctccggttccttctcccgcttccgcagcgaccagtcctccccggaccgccaccacgacatcgagatgggcgccaccgcctccggcggcggtcgcggcggcgaggtgaaccttgacaagttcttcgaggacgtggaaggcgtgaaggaggaactaaaggagttggaaggtttggctcagagtctaaggagcagtcacgagcagagcaagacgctgcacaacgcgaaggcggtgagggacctgcgcgcgcgcatggacggcgacgtc

SEQ ID NO: 40209 - DNA, 352 bp, Glycine max
  Clone ID: LIB3139-015-P1-N1-B12
gttgaccacagagtttctgagaaaacccaagtgattgctccattaccagaggataggttcctttgcagctttagccatatatttgcaggtggatatgcggctggatactatagttacaagtgggctgaggtgctgtctgctgatgctttctctgcatttgaggatgctggattggataatgacaaggctgttaaagaaacggggcgcaagttccgggagaccattcttgctcttggaggtggcaagccaccactagatgtttttgtgcaattccgtgggagagaaccaacaccagatgcattgcttaagcacaatggcctattacaagttgcagcttcgtgatagatagagt

SEQ ID NO: 40210 - DNA, 362 bp, Glycine max
  Clone ID: LIB3139-015-P1-N1-B4
cttaattagtgttcatgaatatgtcaagccttactgtagtggttctaaattgaaaagctttctagctagtcataacatcaccattactgatggtattgacaaaactagtgcaactttgcaatttagaaagttagcagattgtgattttctcaagagaaactttaagcagatgtctaatgttttgtgggtggctcctgaggacaaggcgagtttatggtcacaacttcattatgtttcgtgtaataatctggaaatgcaagaagcttatcttgtcaacctcgtaaatgtgttacgagaattgtatttgcacagttcagaggaagctcgccaattgacaaggaaagctctctctcggattgaat

SEQ ID NO: 40211 - DNA, 237 bp, Glycine max
  Clone ID: LIB3139-015-P1-N1-B5
cagcacttgggaaaggtaagaaaattgtttttcttacgtagggttgatccttttgcagtggctttactggctgttctttttggcgttaagaatgaaattctgagttctaacgccactaaccctatgctgacgcgacttcttgagaactgtaagagtctcaaatatctggttgatgagtgttcttttgcatttgcgaactagtatgaaatattttattcacttaaattaagctcatta

SEQ ID NO: 40212 - DNA, 361 bp, Glycine max
  Clone ID: LIB3139-015-P1-N1-B7
ctagtgcaactttgcaatttagaaagttagcagattgtgattttctcaagagaaactttaagcagatgtctaatgttttgtgggtggctcctgaggacaaggcgagtttatggtcacaacttcattatgtttcgtgtaataatctggaaatgcaagaagcttatcttgtcaatctcgtaaatgtgttacgagaattgtatttgcacagtccagaggaagctcgccaattgagaaggaaagctctctctcgtattgaatggctgcaaaaagctgatgtgcctaccatagcacagattgaagagttccattcgatgcaaaggatgatgaatgctcctgattcaaatgataatattgatctact

SEQ ID NO: 40213 - DNA, 360 bp, Glycine max
  Clone ID: LIB3139-015-P1-N1-B8
agccaacggcatcatggaagacagtttcagagtacgagcagagagagcctttggttctcttccaatcccttcttcttctctcaacattctctggtctctcaccgaagacgaaatcaataactccccttccaatcgcacccccaaacctaaacccaaaccctacccctcttcaagctcccgggttcagctccagaagggcctccacgatctcgacgacgacgacgacgacgacgacgaagaagaagaagagcctcgtggagtctctaaaccccctgattacgacgatgaacagtggcagattagggctggtattggccgagattgcaccctcgattacgaggaagaggaggatcaatatga

SEQ ID NO: 40214 - DNA, 361 bp, Glycine max
  Clone ID: LIB3139-015-P1-N1-B9
tcaaatcttaggagctgaggagaatcaatcgagagaaatatgtctggtatcgctcgtggacgccttgctgaggaacgaaagtcatggcgcaaaaaaccatccacacggtttcgttgccaagcccgagactctacctgatggcaccgtaaatttgatggtctggcattgcactattcctggcaagaccgggactgattgggagggtggatatttcccactgacaatgcacttcagtgaagattaccctagcaagcctcccaagtgcaaattccctcaaggtttctttcaccctaatgtgtatccatctggaactgtttgcttgtctatacttaatgaagatagtgggtggagaccagctata

SEQ ID NO: 40215 - DNA, 334 bp, Glycine max
  Clone ID: LIB3139-015-P1-N1-C10
cacggcttgcattcagatattaataaaacatagagttgtggctagaggattttgaaagggccttatttgtgccacctttcattagtgccctcaaaattgagggggggcgcttgttgccatcacgacgacatttcctacgattctttttcactatattttctaaaggattctttttggttcgtgtaatttattatatactgtttatacctagactatgaactattttacttcagttttctttttgtaatgtatgatgaacctcaaagaaaggttcagagacgcaaacaattccttgtactgtatgaactataaaaaaatgtttggaggtaaagaa

SEQ ID NO: 40216 - DNA, 211 bp, Glycine max
  Clone ID: LIB3139-015-P1-N1-C12
gatttgttgggtttacaaggagcaggtaaagcttttccaaacaagattgtttttgatgataagcttgtgttggctaacacacaagaattctttgatggaaattttccagtggattcttggttaccaatttttgtgaattgtctttatcctgtaagtcaattaccttcagaagctgtcgttgtaaatgttacatgtggtagtggacgtggtg

SEQ ID NO: 40217 - DNA, 243 bp, Glycine max
  Clone ID: LIB3139-015-P1-N1-C2
gtggagccagatctagggatacctctagatcttcttgatcgtgagtgtttacaattctcccagtgtcagaccacctcttgctccagaagataaagaattgttgcgagatgatgaagctgttactcctattaaaaaagacggcataaaaagaaaagagaggcctactgataaaggtgttgcatggcttgtcaaaacacaatatatatctcctctaagcatggagttaacaatacagtctttaac

SEQ ID NO: 40218 - DNA, 191 bp, Glycine max
  Clone ID: LIB3139-015-P1-N1-C3
cttcttcattgctttttccgattgcttctccttcaggtgcgttctattttttctggagaagatccacctcgattttcccggaaaaaaaaaagaaagaagaaaatgctgaacgcaggcttgaactctctcctaaattttccttccatggtttctgcaagtcattgccatcgttcccttgttcctattgctgc

SEQ ID NO: 40219 - DNA, 146 bp, Glycine max
  unsure at all n locations
  Clone ID: LIB3139-015-P1-N1-C4
gtcgagaaccagatgangcgacccacattgcttgttgaacggcacgcgtctaaaacagatgggggagtacttggccttgctccgatccttgatgccttcttcttatgttcaaaggggtgaccaatcgtttattattggaggggcct

SEQ ID NO: 40220 - DNA, 311 bp, Glycine max
  Clone ID: LIB3139-015-P1-N1-C6
tgacgcaaatattttctttattgagacaattctgaagcatcatggagtgtggaactgtttctcagatgtcattgccaaccccatccatgttaatgaagggaggctcaatatttgtccataccatgattatcttaaatcttctcatggatgcaatctttgcccaccaaacatgtgcaaggcaataattgcattgattcccaagatctatttacttatggccaagcaattaattctcatatttattctagtaatatatagttaaccacttaagcttttattatgcctttgaaccccaggtctagtattttact

SEQ ID NO: 40221 - DNA, 357 bp, Glycine max
  Clone ID: LIB3139-015-P1-N1-C8
cgttaatcagccccaagagaaagatttgttagaggggaatttttcctttgatattaaatctcgctctagattggaaaaagtttcctctacaaaagcacaatttgttagtggaaaaaccttcaaatatgatataattggtgctggttcacattcttcaggagattttcctgaaaaggaagatcaagaaaaacccaaaaagattgataccagattgagacaaagaatagatcctcaatacaatgaggttcaggctcagatggaaacaaatttgtttaaattgtcttttgatgatgttgaaacttctaaagcgtctatgttggatcttaaaattttctcaatcttaaaattcactttcca

SEQ ID NO: 40222 - DNA, 364 bp, Glycine max
  unsure at all n locations
  Clone ID: LIB3139-015-P1-N1-C9
ccagaatcctccattactccgagacccagcacatgctagctccttcttttctcatttctttatttgcaaaatccacacaccctaaattcctttcccttcgaagaatcccttacatcaccgtaacccaataagaagtacctcatttcgctatctcgatccaaaacaccagaaaaaaaataatgcttacgtgcatagcacgtccgaagaaactcgtcggcgactcggcagcgagcgaggatccgagttcgcggggagtgaagtcgctgacgggtcagctgaaggagatggcgctgaaggcgtcgggggcgtacaagcagtgcggcgggccgtgcgcgacggcgccgncgagtcgagtgagtcgcgg

SEQ ID NO: 40223 - DNA, 364 bp, Glycine max
  Clone ID: LIB3139-015-P1-N1-D1
agaagttcttaactattttggtcatagtacagtcatgtgtatgggagtaactgctggggcttacattcttaccttatttgctatgaagtatagacatcgtgttcttggtttggtactagtttctcctttatgtaaagcaccatcttggactgaatggttgtacaacaaggtcatgtcaaatttactctacttttatggcatgtgtggggtggtaaaagaaatattgctaaagcggtactttagcaaggaagttcgaggcagtgattatttgtcagagtcagatgtagttcaagcatgccaaaggtcattggatgagaggcagagtttgaatgtgtggcggtttcttgaagcaattaatgggaga

SEQ ID NO: 40224 - DNA, 362 bp, Glycine max
  Clone ID: LIB3139-015-P1-N1-D10
caccaaaccaaagcaagaatagtgttctaagagtgagcaacaacttcaaacaccattgtgagaaatggcttccaagggtgcacttctcttgtgtctcaacattctcttcttcactgtggtaagctccacatatgtcccatgcaacccaccccctaaaactcctaaacacacacctgtcccaaagccaccttccccaaagcaaccaagttgccccaaagacaccattaagtttggtgtgtgtgctgatgtgttaggtttgattaacgtgcaacttgggaagccaccaaagaccccatgctgcaacctcattcagggtcttgctgatcttgaagctgcggtgtgcctttgcaccgctctcaaag

SEQ ID NO: 40225 - DNA, 358 bp, Glycine max
  Clone ID: LIB3139-015-P1-N1-D11
tttgtttgttgatccatctcttgtttcttgctttcggtcttcaccatgtcacttgctgggaaaatcaccactgaaatcggggttcatgcaaccgctacaaagtggttcaacctcttcgcaacacaactccatcatgttcaaaacctaactgatagagtgcatggaaccaagctgcatcaaggtgaagactggcatcacaacgagacagtcaagcactggacttataccatagatggtaaggttacaacatgtctggagagtattgaatccattgatgaacagagcaaaacaatcacctacaagctcttcagtggtgacattgatcataattataagaactttaagttcatctttcaag

SEQ ID NO: 40226 - DNA, 358 bp, Glycine max
  Clone ID: LIB3139-015-P1-N1-D12
ggttattgtgtatgccaagccaggatacccgatggtgaaaggcagtgatacatccactgctgaatcagggtcagaagccgaagatatatcctctccaaaagcgatgaagagttattcacaccttacgttgacccctgttcatgaggaagctaagatagtaggaaaaacaagctatgccagcaacttgtctgggtatgatgaatatgttccaatggtagacatacctgttgatgctggttggaagaagcaagcatctctacagaggtcttacacctctaaaggagcacctcctcctgacactcagaaaactcctgaagggattcaagctcggatgtgggtagcactgtctatcttcttc

SEQ ID NO: 40227 - DNA, 364 bp, Glycine max
  Clone ID: LIB3139-015-P1-N1-D4
tttaaatgatgtgaaagctatatggctgaggaatcgagaaggaggttacagaagaagaatacaccaaattctaccactctcttgccaaggatttcagtgatgagaaacctttagcatggagtcatttcactgctgagggcgatgtcgagttcaaggcagtcctgtttgtaccacctaaggcacctcaagatttatacgagagctattataacgcaaacaaatccaacctgaagttgtatgttagacgtgtgttcatttcacatgaatttaatgaactgttgcctaagtacctaaactttttgctgggtcttgttgatttttacacattgtcacttaatgtatctcgagaaatgctttaccatca

SEQ ID NO: 40228 - DNA, 362 bp, Glycine max
  Clone ID: LIB3139-015-P1-N1-D8
ctgcaatgcatgtgggagctatagaaattatgattgatagtttcgcaagtcctgactgcaacatagttggtgcaatgcttttggttgatacttatcataccaatcctgaaaatgcagttcgtagtatttttgttgcgcctttcagaggcggaaggcccattcgggtggttacatttccgaataccattgtgcagattgaaccagacatgaattcaaggtttcagcttttgagtaccactaccaatggtgattttgttcaaggaaaagatctcgcaatggttaaagttaatgtagcatgtgctgctgttggcttgacatcaagttacactccaactccattgttggaatctggcttgcaaaaa

SEQ ID NO: 40229 - DNA, 193 bp, Glycine max
  Clone ID: LIB3139-015-P1-N1-D9
ggatgattaacttttttgcttgacgagcattctttatctgtactagtattgttttccctttttatgagcagcttctcctttctcatgtgatgcctgtatatatacatatgatgtgtcctgttctatatttttctttcccttatgtccatactagatagacataataaaggaaattgaggtgctacctattacc

SEQ ID NO: 40230 - DNA, 358 bp, Glycine max
  Clone ID: LIB3139-015-P1-N1-E1
attcaggaaaaagttgtattgaaattttcacaagaggaatttcttacagcttggtcaactcaggtgcgtcctgcaacaactctgttagctgatgggtgtccatatttgtatgctatggtgcatgatagttcagtgtctacaataccaggtgattttgttattggtgttaagttgacaaccataaacaatatgtgtgcatatgggctcaatcctggtatttcaggttctcgtcttttgggcaccattcctcagtccatttcacagcaaactgtttggaatcaaatggcaacagtgagaacaccattgaattttgattctagcaagcagagcttttgtcaattttctattgaccttctcg

SEQ ID NO: 40231 - DNA, 359 bp, Glycine max
  Clone ID: LIB3139-015-P1-N1-E10
gcaagattcaaattttgtaaatgcatttcgcttcttatctgctgaaagtgtcctaaagaatgaaggtgatccctgtgttccaactccctgggagtgggtaaattgtagcacaactacacctccaagaattacaaagataaacctgtcaagaaggaatatgaagggtgaaattccacgggagctcaacaacatggaagcattgacagaactgtggttagatggcaacatgctcacaggacaacttcctgacatgagaaatcttatcaatctaaagattgtgcatctagagaacaacaaattgagtggtccattaccatcttacttgggtagcttgccaagtttacaagcactgttcatac

SEQ ID NO: 40232 - DNA, 362 bp, Glycine max
  Clone ID: LIB3139-015-P1-N1-E2
ggaattttagtggacaaaactggagattggatcacagttatacaaaattctccaattagtaacttgttgagagttgctgcttggaagaaaggctgtttaatggttaagattgtgatgtctggaaatgcagcagtcaaaaggagtgattgggcctcattggtacaagtctttttaacaaacagcaacagtacagagcattttgatgcttgtaagtggacaaaatcggaaccacattcctgggaattgatcttcccaatagaggtatgtggtcctaataatggttttgaaatgtggagtttttggtgggtcaaataaactttatggcatttgtgttttctctttgacaatcccaaacatttttc

SEQ ID NO: 40233 - DNA, 365 bp, Glycine max
  Clone ID: LIB3139-015-P1-N1-E8
aaattaatttaaaaaaaaaaaaaaaaaaaaaaaggaaggatttaataaaaaaaaaaaaaaaaaaaaaaaaaaaaaaaaaattaaaaaaataaaaaaaaaataaaaaaaaaaaaaaaaaaaaaaaataaaaaaaaatggggcgctccccctttattaattttttcaacccttaatttattttttacccgtatctttaatgtttccaatttttctttttaagaggtttttttaaaattttctttaataattttaatattttttttttttttaaaatttttttctctctaaaattccaaaaaaatttttaatttgtaatttaaaattttaaaaccttttttcctttaataagtttcttaccttaattt

SEQ ID NO: 40234 - DNA, 362 bp, Glycine max
  Clone ID: LIB3139-015-P1-N1-E9
ccttcggaaggagaattcctttctcgtacttggaagatatccaaatgaggtttatgaagaactacactagagttgccaattatgcaccagcttatgcaatgaatgatgaattttcaagggttttgcatcagcagatggaatttttttctagtaatacgagtgccgataccctcaatcgtgtgaggggagaagttggtgagatacgcactatcatggtggacaatattgagaaaatattggagagaggtgaccggattgagcttcttgttgataaaacagcaacaatgcaagacagtgcatttcactttaggaaacagtcaaagcgccttcgaagagctctttggatgaaaaattttaaactc

SEQ ID NO: 40235 - DNA, 303 bp, Glycine max
  Clone ID: LIB3139-015-P1-N1-F1
cgcaagatgagtggtagggtttctgggaaggtgaagtggttcaatgatcagaaggggtttggattcataagccctgacgatggcagcgacgatctcttcgttcaccaatctcagatcaaatctgacggtttccgaagcctcgccgaaggagagtccgttgagttcgccattgaatctgaatctgacggacgcgcgaaggctgttgatgtcactggccccgacggcgccagcgtccagggaaccagacgaggcggtgatggtggccgaagctatggcgggggacgaggaggtggtggaggtggc

SEQ ID NO: 40236 - DNA, 362 bp, Glycine max
  Clone ID: LIB3139-015-P1-N1-F10
ctaataacagcaaactaaaggtgaagtttgccagaaacaagatgggaaggaaccattttcagcagcaacactgtgctgatgggagcatgtggatggagagtcagggtcagcaacagagctatgccttccaagaagagtcttggagccctgataacaactatggccacaaccacaagcaattcccaggcatgcacatgaacatgaacaacaacaacaacaacaaaaggcttggtgcttttgctgctgtggactctgacttctcaatgcaaaaacatcatcatgggcatggcaacggcgtaggagccatgcacatgaacatgaacaggcatggtggcaagttaggaggcatgtttcaagaaggc

SEQ ID NO: 40237 - DNA, 359 bp, Glycine max
  Clone ID: LIB3139-015-P1-N1-F11
gatcaaaagctttcagaaccggcgcttaaacgtgagcagcttgatgaattcgtgagtagtctatattttgaacaacgaattcttgaactccgacttcttcaagacctcgagaacaatgatgaatgtaggaaaaatgggagcctgaaaaggttaaatgaccagagtgatgtctgtggatttagaagttgcttcaaaaatcattatgattcgcttccgaatcagaggtgcttgaggaatcgagaagaagtgattcaggagacgatggaaatggagttggaaaatatgatggaactgggcaccctcaagggcaagaaaacatattcttttaagaatggtacaagaagtgcgttgaaccttga

SEQ ID NO: 40238 - DNA, 359 bp, Glycine max
  Clone ID: LIB3139-015-P1-N1-F12
gcccattcgggtggttacatttccgaataccattgtgcagattgaaccagacatgaattcaaggtttcagcttttgagtaccactaccaatggtgattttgttcaaggaaaagatctcgcaatggttaaagttaatgtagcatgtgctgctgttggcttgacatcaagttacactccaactccattgttggaatctggtttgcaaaaagacagagggttaattgtggagtattttggaaggatgtcttacgttgctcataatgttaatcagccccaagagaaagatttgttggagggaaatttttcctttgatattaaatctcgctctagattggaaaaagtttcctctacaaaagcac

SEQ ID NO: 40239 - DNA, 364 bp, Glycine max
  Clone ID: LIB3139-015-P1-N1-F2
ctagaacaagtgaagataaggagggagggatgtatcaaacattgagctttcaatctcaccacttcaagacaaaaggaaatgattttgcacttttgcagcaaacatctgagactactaaagaaagaaatatggaagaaaacaagggtattacttacttgagcaaatgtgcttagtgatttttagctatcacaataccaatgtatcctttggtagctctatttacttagatatatgtgtcattacaaaatgaaagttttcagtctgggagcagtagcattaaaagcattagttagatccatttggacattcaattgtatattggctttaaaatgttgataagtaaacggtcctgtttctttggttt

SEQ ID NO: 40240 - DNA, 365 bp, Glycine max
  Clone ID: LIB3139-015-P1-N1-F3
ggccaggcaagccccactcaaccaccacacctctcctggggcacgctacccctttctgctcttcttctacctttcaagttttaaaagtataaagatggcagagacattcctatttacctcagagtcggtgaacgagggacaccctgacaagctctgcgaccaaatctccgatgctgtcctcgacgcttgcctcgagcaggacccagacagcaaagttgcctgcgaaacatgcaccaaaaccaacttggtcatggtcttcggagaaatcacgaccaaggccaacgttgactacgagaagatagtgcgtgacacctgcaggaacatcggcttcgtctcaaatgatgtgggactggatgccgacaact

SEQ ID NO: 40241 - DNA, 257 bp, Glycine max
  Clone ID: LIB3139-015-P1-N1-F4
cttagccatatctttacttcccaaaacttgctctacgatgagtttccttcgttctttggcaagaaacaaggatatatcaaaagtaggacgcagaggtatccattgcatgcagaaactatgtgcagaaaaaatatctcctgattcactagagaaggcccaaaatcgcgtgatagatgctgcacttacacttgttctagaaaatacatggcttacgacagcactcccgtatagcttggtacttttgctgctgtggactc

SEQ ID NO: 40242 - DNA, 338 bp, Glycine max
  unsure at all n locations
  Clone ID: LIB3139-015-P1-N1-F5
aattntaataaaccgcgatcacaggttgccgcacctgaaagccggaaacaaaagcaatcggtacttgatttcaagaatttctcaatttcttcctacttctttgtgtacgatttcttaagggaaagaaaatcactctctgtgctggtcacagacttcgtgaatcattttcttttccactcctagtttatttgctgaacactctcctatttgatataggacttcgtgtcagatttaaactttttctgtttttttctcagttctttgtgtaaggtcaggttcaagtttggtgtaattttggatttagtgctcccacttttcctatctgttatttgtctttc

SEQ ID NO: 40243 - DNA, 358 bp, Glycine max
  Clone ID: LIB3139-015-P1-N1-F7
atgggttttaatccgattatggcaattacccgccacgatctcagactttaagtagaaggtcagatgatgggtacaattggaggaaatatggtcaaaaacaagtgaagggaagtgaaaatccaagaagttattacaaatgcacataccccaattgccctacaaagaagaaggttgagaggtctttagatggacaaattactgagatagtttataagggtactcataaccatcctaagcctcataatactaggagaaactcatcaaactcctcttgtgttgcaatccctcattcaaattccattaggactgaaatcccagatcaatcctatgccacacatggaagttgacaaatggattt

SEQ ID NO: 40244 - DNA, 366 bp, Glycine max
  Clone ID: LIB3139-015-P1-N1-F8
aagaaactttgcctgctcagaaagaatccaaaaccacgtcagaaagattccaaaaacaaggggagggatttgaaatccaaactggagagtaaggatgtagcagaaactgatgaatatgaatttgaaagtcccgaaaaggaggcccctgccaaagagcctgaaattgatccagcaaagctgaaagagatgaaaagagaggaggaaattgtgaaggcgaagcaggccttggaaagaaagaagaagttagcagagaaagctgcagccaaagcagccatcagagcacaaaaggaagctgagaagaagcttaaggaccgtgagaagaaagcaaagaagaaatcaggcactgcagccgtggccaaccctgag

SEQ ID NO: 40245 - DNA, 361 bp, Glycine max
  Clone ID: LIB3139-015-P1-N1-F9
ctgagaagtaagacaagagcaaatatcaaggttactgccaaggatgcagctgacccgacacactcatgtgctatggagtttgataattttgttgtgatcactggtgaatcagaagcagttaaaagagcactatttgcagtttcctctattatgtacaagttcggtcccagggaggacatctcacttgacacagctgtaccagaagcccctcctagtattattattccctctgatgttccagtttatcctcccggcggactgtatccagcttcagatcctattgtcacacctagagcagttcctcaaattataggcgcaacaaatgtaccagatctgcaaggttatgctgatgcaggaaatt

SEQ ID NO: 40246 - DNA, 363 bp, Glycine max
  Clone ID: LIB3139-015-P1-N1-G1
ctagattagtactcagaccttataaaaaagaaagaataagagagagaaagcggagatgaaggatggagcccaagttgtgctgaatgataatggtaactacggcaaattctcacacctacttgcttcccaagatcgtgattatcttctctctccaactggggctcaggtgaaagtttctgatcttgaagggagagtagtgggtctattattcgctgcgaattggtacccaccatgccgtggattcacccaaatcctagttggaatctacgaggagctgaaaagcagagtccctcaattggagattgtgtatgtgtcctctgatgaaaacttggatgcctttaatagcttctatggaaacatgcc

SEQ ID NO: 40247 - DNA, 359 bp, Glycine max
  Clone ID: LIB3139-015-P1-N1-G10
cgctttctttcttcccaccttttctctgtttcttcttcttcttccattagttcctgctgaaagtcctaacacaacaccacccttcttcatcttcttatgtttttgacttgtggccaccactgtgacccatttctgtatcttctggcaaggttctatccgtttcttcttttggatcacccttttcactgttcgactccttcttgctatctgcttcgtcaatctgattattcatgggtgaaaagctaatttgttcacttgaataggtgtacagtgctaaagggttaagtttgaaacctagcctgctagttgcatcatcaggtcaaatccataactttctgggaatcaaacgatgatgatgt

SEQ ID NO: 40248 - DNA, 355 bp, Glycine max
  Clone ID: LIB3139-015-P1-N1-G11
gaggagctggtgcaaagaatgctattctcatgaatatgccaaatgctgttctttcaatgtggagatattttgttggagatctcgtctttgaagtttctaagatgacttctccctacattaaatgtacagtctctttcttcatagcatttggaaatttggctgatgacaccatcaattttgaggcttttccccacaagctggtgcagtttggagagattcaggaaaaagttgtgttgaaattttcacaagaggaatttcttacagcttggtcaactcaggtgcgtcccgcaacgactctgttggctgatgggtgcccatatttgtatgctatggtgcatgatagttcagtgtctac

SEQ ID NO: 40249 - DNA, 360 bp, Glycine max
  Clone ID: LIB3139-015-P1-N1-G12
ctcgagccgcggtaaaactatgctgatggacctgttgtttgatcaattgccttctaattggaggaaaaagaggattcattttcatgactttatgttgaatgtgcatagcatgttacaaaagcataaggggttgtcagatccacttgatgtggttgcaggggagatttctgatgatgcaattttattatgtcttgacgaatttatggtaacagatgtagcagatgcattggtactaaatcgcttgtttagacatttgttcaacaaaggcattattctagtggccacatcaaatcgtgcaccagataacctatatgagggtggattgcagagggatctctttctacccttcattgcagcatt

SEQ ID NO: 40250 - DNA, 270 bp, Glycine max
  Clone ID: LIB3139-015-P1-N1-G2
gttgggtttacaaggagcaggtaaagcttttccaaacaagattgtttttgatgataagcttgtgttggctaacacacaagaattctttgatggaaattttccagtggattcttggttaccaatttttgtgaattgtctctatcctgtaagtcaattaccttcagaagctgtcgttgtaaatgttacatgtggtagtggacgttgttctttttttttttttttctttttccctctttttttttttcctaattttacaatatttttttattt

SEQ ID NO: 40251 - DNA, 365 bp, Glycine max
  Clone ID: LIB3139-015-P1-N1-G3
gaaaaattactgcgccaggctaaagctccaagtatgtttttacaatccttcaaaaattttgtttctttgtgtgtgtatggtgatgataacttaattagtgttcatgaatatgtcaagccttactttagtggttctaaattgaaaagctttctagctggtcataatatcaccattactgatggtattgacaaaactagtgcaactttgcaatttagaaagttagcagattgtgattttctcaagagaaactttaagcagatgtctaatgttttgtgggtggctcctgaagacaaggcgagtttatggtcacaacttcattatgtttcgtgtaataatctggaaatgcaagaagcttatcttgtcaa

SEQ ID NO: 40252 - DNA, 362 bp, Glycine max
  Clone ID: LIB3139-015-P1-N1-G4
ggcagaaatgataaacagtctttgtggtggtgatgaaaaattgatgcgtgaaaggacacacctgctgttggcttgttgttcaaggatggcaatttgtaagaaagatgtttggagagttgaatgtggaatcccttctggatttccgctcacagttatttgtaatagcatttttaatgagatgctcattagatatagctatgaaaaattactgcgccaggctaaagctccaagtatgtttttacaatccttcaaaaattttgtttctttgtgtgtgtatggtgatgataacttaattagtgttcatgaatatgtcaagccttactttagtggttctaaattgaaaagctttctagctggtcata

SEQ ID NO: 40253 - DNA, 366 bp, Glycine max
  unsure at all n locations
  Clone ID: LIB3139-015-P1-N1-G5
ttcgtcttctgcatctgcattccgtagattcagttcgcgtcggaaaatggacgttcgccgaagacccattcctccctccggcgatcgccgacaaacccagaagctgaagaacaccgccaccaccgattcgcagactcttctgcctctctacctcaccaacgccctcttcttcgcggtgttcttctccgtggcctacttcctcctccaccgctggcgcgagaagatccgcaccgncactcccctccacgccgtcacccccgccgagaccgccgccatcgtctccctcgtcgcctccgccgtctatctcctcggcttcttcggcgtcgcctcccgcgcctccctcgacgagctctccgacgacgagat

SEQ ID NO: 40254 - DNA, 87 bp, Glycine max
  Clone ID: LIB3139-015-P1-N1-G7
cgtctcttgtttacttagttcatataaaacccatctgtagaccatttgctgaggtcgctatctcccacactatcctatcttatcact

SEQ ID NO: 40255 - DNA, 361 bp, Glycine max
  Clone ID: LIB3139-015-P1-N1-G8
gttcttcaattcattctagttctggattccgactagccgcgttgactcggttccgtttttcattctcgcggatctaatattaaggaatagcttaagggcacattacaatgaaggcattgattctggttgggggatttggaacaaggctgaggccactgacactcagtttccctaagcctcttgttgattttgctaacaagcctatgattttgcatcagatagaagcccttaaggccattggagtgactgaggtagtgctagccatcaattaccaaccagaggttatgttgaatttcttgaaggattttgaatcaaagctcggcatcaagatcacatgttctcaggaaactgaaccactggg

SEQ ID NO: 40256 - DNA, 359 bp, Glycine max
  Clone ID: LIB3139-015-P1-N1-G9
ctcgagccgaatcggctcgagggactggtttggccaataggttactgagtaagggcaacgatattctgtgttgcgattatgctagttttgatggtttgattaccaagcaagttatgagcaagatggcagaaatgataaacagtctttgtggtggtgatgaaaaattgatgcgtgaaaggacacacctgctgttggcttgttgttcaaggatggcaatttgtaagaaagatgtttggagagttgaatgtggaatcccttctggatttccgctcacagttatttgtaatagcatttttaatgagatgctcattagatatagctatgaaaaattactgcgccaggctaaagctccaagtatg

SEQ ID NO: 40257 - DNA, 365 bp, Glycine max
  Clone ID: LIB3139-015-P1-N1-H1
gttcgtgtgtgacattgcactctcttacactgcgccacctcgttctctccgtctaaatagctttcacttcctcattcttcttcttcgtgcgtgcgtgtttctgtaaaatcgaatctcaagtctctgaatctgaatctcaacacaaccttcgttgttctcaacactgtgttcgtttttgctgccaaggttacaacactgaaagagacaccggagtaacataaataagatggaccaacaaaaccaaaataacactccagatggttcaggagaggtgcctttgaagcgcaaacgtggtcgtccacggaaatacccaaagccagattcagaggagagttcctatatcctagttagtcaaaataaaaggc

SEQ ID NO: 40258 - DNA, 156 bp, Glycine max
  Clone ID: LIB3139-015-P1-N1-H10
gtgaggttcattatgagtagagaatggacaagcttagttgtcaagttttaatcaacccatactccatggaatggactggtttggccaatacgttacttagttagggcattgatattctttgttgcgattatggtagtttttatggcttgattacca

SEQ ID NO: 40259 - DNA, 359 bp, Glycine max
  Clone ID: LIB3139-015-P1-N1-H11
ggcaaattttttgacagagggcaattttagagcaagtgttgatttgcagcgcactcatcgtattaaaggaatgattaaaatggtggccacagttggtattcctgagaatacaggtatagcattggcctgtgctatgaatagttcttttagggggcgcgccagttctgatatttacaccatctgctctcaagactgtgaattatggaatcctgcttgcacaaaagcaatgactatgtcatttaatccaaacccgtgttctgatgcatggagtttggaatttctgaagcgtaccggatttcattgtgatatcatttgtgtcactggatggactgccaccccaatgcaggatgttcaggtta

SEQ ID NO: 40260 - DNA, 364 bp, Glycine max
  Clone ID: LIB3139-015-P1-N1-H2
aaactttgccaaataatttttctgcagaattgctctctggaaattggatactgttactggccaatattatcctgagtgggctccaattaattgtcgagttcatcgacaaccaattcacatcactgaaggaaattatgtcagaaagcaagatgtcagcattgaatatgatgcatgtacaattccaaatgattgtggttcattggttgttgccaaggttggaaatcacaaacaaattgttggtttccatgttgctggaagcaaaggaagactgggatatgcttcattgataccatatgttgagccagttgtgcaagctcaaagtgctgaagtttactttgacttcttccctgtggaggttgatagt

SEQ ID NO: 40261 - DNA, 116 bp, Glycine max
  Clone ID: LIB3139-015-P1-N1-H3
actaacatttactaaacaccacaccaattgtagtaggtgctgtgatatatgtctggtgtgggacagggattggtccctgagctaacaatcactgtagcaacagatatgctcccaca

SEQ ID NO: 40262 - DNA, 363 bp, Glycine max
  Clone ID: LIB3139-015-P1-N1-H4
gccactgagttctcactcaagtcttccatttcaaatgctggtgctgaatatgaggcaaatgagcttgattcttatagcagaagaagactgagatgggttcagaagtacttcatgatctataactactgcagtgatctcaagcgattcccacaaggtcttcctgctgaatgtagacgctgaaggttccaagagatgaagagaatggccactttctgattggatttgaatcgtctatgtaaaatatgctatgtttattatgtcttagattctttattgacttctgtcttttttttcttcctttttttttagtttctattttatagttgctaatgtatatgtatattaaggggtcttaacaataaa

SEQ ID NO: 40263 - DNA, 358 bp, Glycine max
  Clone ID: LIB3139-015-P1-N1-H5
attttgtttctttgtgtgtgtatggtgatgataacttaattagtgttcatgaatatgtcaagccttactttagtggttctaaattgaaaagctttctagctggtcataatatcaccattactgatggtattgacaaaactagtgcaactttgcaatttagaaagttagcagattgtgattttctcaagagaaactttaagcagatgtctaatgttttatgggtggctcctgaggacaaggcgagtttatggtcacaacttcattatgtttcgtgcaataatctggaaatgcaagaagcttatcttgtcaatctcgtaaatgtgttacgagaattgtatttgcacagtccagaagaagc

SEQ ID NO: 40264 - DNA, 357 bp, Glycine max
  Clone ID: LIB3139-015-P1-N1-H7
gagaaactttaagcagatgtctaatgttttatgggtggctcctgaggacaaggcgagtttatggtcacaacttcattatgtttcgtgcaataatctggaaatgcaagaagcttatcttgtcaatctcgtaaatgtgttacgagaattgtatttgcacagtccagaggaagctcgccaattgagaaggaaagctctctctcgtattgaatggctgcaaaaagctgatgtgcctaccatagcacagattgaagagttccattcgatgcagaggatgatgaatgcttctgattcaaatgataatattgatctacttgtgagcattgatttgttgggtttacaaggagcaggtaaagtttt

SEQ ID NO: 40265 - DNA, 357 bp, Glycine max
  Clone ID: LIB3139-015-P1-N1-H9
ctttaatgaaagggcaaatgtatcagggaagtgtccgattgggagttttaattctgcatttagcttcactggttcaaaacatgttgatgaagcagctacaaaaaccttgtcttcagatgggttttacattcctcttgcaaaggttcagcttcaaaaatcccacttaaggttgcaaggaaatgtcaaaaaggctgtcccagtcaattgggacccactgtccttggcaagttttattgaaaattttgggactcatgtcattacatcaataactatgggtggtaaagatgttatttatgttaaacaacaccatacttcttctttgtcaaagttggagatgaaaaactatattcaggatat

SEQ ID NO: 40266 - DNA, 200 bp, Glycine max
  Clone ID: LIB3139-016-P1-N1-A1
tctcacttttattgctcatttcatttatgtatttgacaaccacctcagacccattatcaccagctacagcctctttcaaaccgccccaacctgttcctaccataccagttgcggttcctaaacaaccattggttacctcatgggcacagccaccaagagattccactcctgaaagtactccattacttgactattgtggg

SEQ ID NO: 40267 - DNA, 362 bp, Glycine max
  Clone ID: LIB3139-016-P1-N1-A10
ggccaatgaacacaccaacaacgcagcggcacgccttcagctcccctctgcagaactagtccctgctctggttgacaattcctacttccactttgtccttgcctcagacaatgtgttggctgcatcagtggttgcagcatcgcttgttcgcaactttttgagacctcagaaggttgttctgcatataattacagacaagaagacttattatcccatgcaggcttggttctcattgcattctttgtcacctgctataattgaggtcaaggcattgcaccattttgattggtttacaaagggaaaggtacctgttttggaagctatggagaaagatcaaaaggtgaggtcacatttaagagggg

SEQ ID NO: 40268 - DNA, 369 bp, Glycine max
  Clone ID: LIB3139-016-P1-N1-A11
caaaaaaaagaaaagaaaacgcaaacctaaccgcaaacggtaaccccattatgccatgcttcacaccacacccctctcttctcttccttcttctcacccttctctctatttccttcttctctccttccaccgctgcaagaacctcttctttccattccttacgtatttcagatggagtcgaggatggtggtgagggagagtactaccacgaggtactaccatggaaaacgaggagatccatggctgaagaagaggccacgagcaacacgtctctgatattggctcagagaagaaccacaaggaaggaccctttggataactacaaccattacaccggtggctggaacatcagcaatcgccactacattg

SEQ ID NO: 40269 - DNA, 245 bp, Glycine max
  Clone ID: LIB3139-016-P1-N1-A4
aagattttgaaattgctggtaatactcttatgccagctggttctgttccacaggctactgccagatcttctgaaaatgcggaatcctctgcatgatctggaattcgtgttttctttcgcttgttcgtttgtttaattcaataaaggaaattaggcatgaccctcttgttgagtatgctctgcctatctgaaaatttccacacctcttttaattgtcgtaatgatgtgtgaagtgtgtgttatttt

SEQ ID NO: 40270 - DNA, 371 bp, Glycine max
  Clone ID: LIB3139-016-P1-N1-A5
ctgcagataagatgcaagaacccaactctatgtagcaaagaaggtaccaaagtggtattgactgatcttaatcacaacaatcaaactgattttgtgctaagcagcagagcctttgcgggcatggctcaaaagggtatgggccaacaaatactgaagcttggcattgctgaaattgaatacaagagagtaccttgtgattacaaaaatcagaatttggccgttcgagttgaagaatcaagcaagaagcctgattacttggcaattaaatttttgtatcaagggggacaaacagagatagtagccgttgatgtggctcaggttgggtcttcaaactggagcttcatgagcagaaaccacggggcagtatggga

SEQ ID NO: 40271 - DNA, 309 bp, Glycine max
  Clone ID: LIB3139-016-P1-N1-A6
ctcctaacatgttcaaccaaaatcttgttccttcttttcgcatcacttcagaggccccaaaggagagtggttcaacttctgctccagctggtactgcgtcagtttctactggtcaacagtcagtcaacatttctgttggcaaggaagtgatggtcaatggcgaggatggatatgatgaaggcaatggcaggcagagctctagtcatgacgattgtgacttgcaagaatgtttatagcataatctccctgatagcccttttggtggcgcgtggaagctatctggcctggaggcttcatggctcccttctt

SEQ ID NO: 40272 - DNA, 231 bp, Glycine max
  Clone ID: LIB3139-016-P1-N1-A8
attaagaagctcaacttagtaacaacacacactcacagtggtgttgaattttcctcagagagaagagagagagaggatgtggaaactcgtgcgatacgccgacggcttcaacctagcccgatcgcggaggttttacgccgtgaatcccggtccgcgcattgagcacaagcgcggggccgacatactacacgatcccgggttcaacaagagaacatcgttttacttttgagt

SEQ ID NO: 40273 - DNA, 358 bp, Glycine max
  Clone ID: LIB3139-016-P1-N1-A9
ggatctctttaggaagtgtatggagccggtggagaaatgtttgagggatgctaaaatggacaaaagaagtgttgatgatgttgtccttgttggtggttctaccagaattcccaaggttcaacaactgctgcaggacttctttaatggaaaggagctgtgcaagagcatcaatcctgatgaagctgttgcatatggtgctgctgttcaggctgcaattttaagtggtgagggcaatgagaaggttcaggatcttctcctccttgatgtcacccctctatctcttggtttggagactgctggcggtgtgatgactgtcttgatccctaggaacactacaatttcaaccaagaaggaacag

SEQ ID NO: 40274 - DNA, 102 bp, Glycine max
  Clone ID: LIB3139-016-P1-N1-B10
cttttatttaagctacaagggctctgcaaggggattatagtgaccctgggtctacatatttttagggatgagcgcgagcttttgctatttcttggaataaca

SEQ ID NO: 40275 - DNA, 284 bp, Glycine max
  Clone ID: LIB3139-016-P1-N1-B12
ctcgagccgattcggctcgagaaaaaaaaaagaagaaaaaaaaaaaaaaaaaaaaaaaaaaaaaaaaaaaaaaaaaaaaaaaaaaaaaaaaaaaaaaaaaaaaaaaaaaaaaaaaaaaaaaaaaaaaaaaaaaaaaaaaaaaaaaaaaaaaaaaaaaaaaaaaaaaaaaaaaaatgaaaaaaaaaaagtggaaaaataataaaaattgtataaaaatttatataataataaatttttaaaaaaaaaaaaaaaatataaaattaaaagtgagatggagggggggg

SEQ ID NO: 40276 - DNA, 309 bp, Glycine max
  Clone ID: LIB3139-016-P1-N1-B2
tgcgaaattcccgggaataatagatctcaacaagaataataacaactactatgatttctctcaaggcttttaccataagctgggggagggtaccaatatgtcaattgacagcgttgggagcttacagacaagtaacggcggaggatctgttgcgatgtctatcgataatagcagtgttgggtccaatgattcccatactcgcatgttggaccaccaagggttacggaggcgtgccaatgataactactctgttgcacatagtgccaatcgtcggggaagagtcacccatgctttgagtgatgatgcttt

SEQ ID NO: 40277 - DNA, 363 bp, Glycine max
  Clone ID: LIB3139-016-P1-N1-B4
cacaatattggtgaaacgggcttcctgcaaactccagaaaatggggggcaaggaaacccatccaacaaaacctttgtgaaggtttacaagtcagggtcctttggaagatccttggacattactaaattcaccagctaccctgagctacgcagcgagcttgctcgtatgtttggccttgaaggtgagttggaggaccctgtgagatcaggctggcagattgtattcgttgaccaagagaatgacgttctgctccttggtgatggaccgtggacggaatttgtaaatagtgtagggtatatcaagatacttttcccttaggaagtgcagcagattggcaacaatgaacttgagcttgttaactcg

SEQ ID NO: 40278 - DNA, 373 bp, Glycine max
  Clone ID: LIB3139-016-P1-N1-B5
attctccctacaagttacaatcattaggagagaaaaaaaaaaaaaaaacacttactcttgaatattcatgaccatgaaggactctatagttctatactcagctttgggaaggggacacctagtttccatggtggaactaggcaaactcatactaacccaccacccttcactttccatcaccattcttttcctaaccccaccccccaaccaagacacacccacctcccccaccgccttcacctgcgacgccacctccaaatatatcgccgccgtcagcgccgccaccccctccattaccttccaccgcatccctcagatctccatccctactgtcctccctcccatggccctcaccttcgagctctgccgcgcc

SEQ ID NO: 40279 - DNA, 363 bp, Glycine max
  Clone ID: LIB3139-016-P1-N1-B7
caataacttgtaactcgcgtagtgcacgggacaggttaaacgacgccgcgctgatcaacgactccttacgtaaacgacgacggtgtcagacaaacggtgccggttggtggtgccgccacgctattacgctaatcgtatccatcaccctcatcaaaacccctcctttctcttaatttagaaaccctaattcagaagaaaaaagtcaccttctccagaatttgcgcggtaatggcatcttcttcagactcatggatgaaggaatataatgaagctgtgaaacttgctgatgatatcactggcatgatttctgaacgtagttcattccctgcatctggaccagaaacccagcgacatgcatctgct

SEQ ID NO: 40280 - DNA, 182 bp, Glycine max
  Clone ID: LIB3139-016-P1-N1-B8
ctttaatgggaatgggaaaatcttggaggatttggtcttggctgctcaggaaggtgtgtttgtcaacattgatagtgagtttgacttggaaaacattgtagaggctgcaaaaagggctgggaagaaggtcaatgttttacttcggattaatcctgatgtggatccacaggttcatccttatg

SEQ ID NO: 40281 - DNA, 249 bp, Glycine max
  Clone ID: LIB3139-016-P1-N1-B9
tggtaaatcaagcatgattgccgctatggccaaggttctcggctatgatatttacgatttggagttgactgaggttcataacaactctgaactcaggaagcttctcatgaaaaccagctccaaatcgattattgttattgaagacattgactgctctatcaatctcaccaacagaaagaacaataacagctcgagttccgtttctgcttcgacaggttactatgattcggagatacgcggtggcggcgg

SEQ ID NO: 40282 - DNA, 314 bp, Glycine max
  Clone ID: LIB3139-016-P1-N1-C10
caaaccctcaatgtcacttttctttcttacctctggggcatcactgtgactctgtgcatgcttgctgtgcttgaaattaaatggtctggcattgagctggaagaatggtggagaaatgagcagttttggctgattggagggaccagtgcccatctagctgcggtgcttcaaggtttgctcaaagtcatagcagggattgaaatatcattcaccttgacttcaaaatctggtggtgatgatgtagatgatgagtttgctggggggggtgtggttaaatggtcattccttatgtttccatttatcacaaccattat

SEQ ID NO: 40283 - DNA, 347 bp, Glycine max
  Clone ID: LIB3139-016-P1-N1-C11
ctcctcttctcttcttttccaaaaacaatgaagctgattagcaccatcaaccccaaaaacctcaaactaagccccaaacgcttctttcgtaaaaaggaaccatctttagtctcacgctccgacccgccttctttcggatccggatcctcttccgttgactcttccaccgcaaatcacaaaccttccgccggtaaccaaactccgaccagcgttctcccggacgtctccggcgagtggtccgaggtcgccaccgccgccgttgacgtgcggtgggacctcgcgcaggccttacgcctcatcgatcgcgacaacgacggcgtcgtcacgcgccaggacctcgagttgct

SEQ ID NO: 40284 - DNA, 366 bp, Glycine max
  Clone ID: LIB3139-016-P1-N1-C12
tgttgagccagttgtgcaagctcaaagtgctgaagtttactttgacttcttccctgtggaggttgatagtcaagagggagttgctcacattggtgaattgaaatctggtgtctatgttccactgcctacaaaaactaatttgatggaaactcccaaggaatggcaactggatctaccttgtgacaaaattcctagtgtcttgactacaactgatgagagattggtaggcacagaacatgagggatatgatccttttcttggtggaattcaaaaatatgccactcccatgatgcccctagatgaagaaattctttctaaggttgcacaagatatggttgaggaatgggttgattggtgtgatgagga

SEQ ID NO: 40285 - DNA, 362 bp, Glycine max
  Clone ID: LIB3139-016-P1-N1-C3
ccaccattagacacacactttagcccaatatcaactataagtacccttctacccctcccttggtagttcaatatttgtccatttcccatgtcagcgtgaacacgcacacccgtgagagcagaaagatagtcatggacacatgaacattgctcctgaaactactcatcactcttgtggctctttcaggatgctcttcttcggcttcagatcattcggataatgtatccaagctggagaagtttgaggatgagcttactcacatgcccaaaattcttggctatcatctttcagacggcgacccaaaaactaagtacttgaagattggcatggtcaagaagaaatggatattccacagggatctg

SEQ ID NO: 40286 - DNA, 253 bp, Glycine max
  Clone ID: LIB3139-016-P1-N1-C7
ctcaaaattgatggtgtcatcagccaaatttgaggcttttccccacaagctggtgcagtttggagagattcaggaaaaagttgtgttgaaattttcacaagaggaatttcttacagcttggtcaactcaggtgcgtcccgcaacgactctgttggctgatgggtgcccatatttgtatgctatggtgcatgatagttcagtgtctacaataccaggtgattttgtcattggtgttaagttgacaaccataaac

SEQ ID NO: 40287 - DNA, 130 bp, Glycine max
  Clone ID: LIB3139-016-P1-N1-C9
atcaaggtaacactctctcttagctctctgcagacttctgccttatcctcagagagaaacaaacattcgttgtctactacttttgttctgtctcctaaaaaggtcggaaatttagttgagttttgaggct

SEQ ID NO: 40288 - DNA, 176 bp, Glycine max
  Clone ID: LIB3139-016-P1-N1-D10
gattcatattgatagaacagacaaagaaaaagtaggtacttcaaccagagtgagacgctccaccagaaacggaggctccaccaggatggatccgtatcctgatccgtacctctgcgacataaacccaccgttccttcctcttattccattttcgaaaaactcacctttctaactga

SEQ ID NO: 40289 - DNA, 277 bp, Glycine max
  Clone ID: LIB3139-016-P1-N1-D11
gttctatgaatagttcttttagggggcgtgccagggctgatatttacaccagctgctctcaagactgtgaattatggaatcctgcttgcacaaaagcgatgactatgtcatttaatccaaacccgtgttctgatgcatggagtttggaatttctgaagcgtactggatttcattgtgatatcatttgtgtcactggatggactgccaccccaatgcaggatgttcaggttacaattgattggtttatttcctctcaggaatggggtcccaggaccta

SEQ ID NO: 40290 - DNA, 367 bp, Glycine max
  Clone ID: LIB3139-016-P1-N1-D2
gaatgctctcttttgtttttcaccttcttttttttgtttgtgtgttcatcttcaacttcatcctaaccttttacacatcatattttcggcttagaacaaccaaaagcaagttcacattgtcttgtcttttcgggtagtggctgtagaggaaacactcctgttttgtgcgcatattgatattggaatagtctttctctgaaccccatttttgcaaaaaggaagaaagagaaagagagagagagagagagagaagagatatacactgccaagaagaagaacatgaaaattcagtgcgatgtgtgtgagaaagccccggcaaccgtgatttgctgcgcagatgaggcagctttgtgtgccaaatgtgacg

SEQ ID NO: 40291 - DNA, 264 bp, Glycine max
  Clone ID: LIB3139-016-P1-N1-D3
ctagatagaattttatagagagagagagtttttagagagagaaaggatgaagatcacggcattgttcgtgcttaaatgcacaggtgagggttccgatcccgctattctggcgaacgcttccgacgtcagccacttcggttacttccagcgctccagcgtcaaggagttcattgccttcgtcggtcgcaccgttttccgtcgcaccccttagggccaacgccaatccgttcaacacgaagagttcaaggtgcacacatacaacag

SEQ ID NO: 40292 - DNA, 374 bp, Glycine max
  Clone ID: LIB3139-016-P1-N1-D4
cagtgatgatgaacaattaaagaaaactgacaacaaaccaacaccgatggaagaagctgtgcaagctgcaaaatcagctgcagctgcagctgcagatgtggcaaaagcgagccaagaaatgctggcttcaaaaggcgaagagaggagatactttgtggaagttgtgagccttttagataagcaagtacaagaaatgaagtcaatgaccaatgccataagaaggttggaagggcaagaagatcttcgaatcagtcaaacaagttcaaagcaactgattgtgaatggaaaagcagactacgacatgagttcagtgagatcttcatccccacctacatctgttgaaccatcaagtggtcttcatccaaaggcatatg

SEQ ID NO: 40293 - DNA, 370 bp, Glycine max
  Clone ID: LIB3139-016-P1-N1-D5
aaaattttcttttcgtatgtgtaatacaaggcaggcttttgaaaactgttctatccaaatctcaaatgcaatgccatatcttgaggaaatgagcattgactattgcaatgatttgattacattacctgatggactgtgtgagattagcccattgaagaaacttagtatcactaactgccacaaactttctgcactgccacaaggtattggaaaactggagaatctggaagtgctaaggctatgttcctgctctgatttgctagagatgccaaattcttttgaagggcttaacaagctaagctgtcttgacatctcagactgtgtaagtcttaccaaattaccagatgatattggtgagttgaagaagctt

SEQ ID NO: 40294 - DNA, 226 bp, Glycine max
  Clone ID: LIB3139-016-P1-N1-D6
gcattgttgtgtggatgatgctcctgatgtaagacgaaagggcctttgccttacttggagaccttgcgcgagtgtgctcggttcatttggactctcgtttgtctgagtttcttgaggctgcagccaaacaactggagatttctaaggtcaaggaggctatttcagtagcaaataatgcatgctggtcaattggagaactagcagttaaggttcatcatgaaatttc

SEQ ID NO: 40295 - DNA, 246 bp, Glycine max
  Clone ID: LIB3139-016-P1-N1-D7
gactgagtcttacttcaccactgcaatactgcaagcgtactattggctgcaaccttcccacaactacacaactttacaggactttaacatgctagagccaaatctaattggatagacatatattaaaaactaacgacaggcttgatttttttttaaagcgaatgcataaggcaattcatattgcataaacattttaacatgtaatgtctgcttacataattctaaataaagtggatgcgaaatgaa

SEQ ID NO: 40296 - DNA, 84 bp, Glycine max
  Clone ID: LIB3139-016-P1-N1-D8
gtttaattttatcctcaacaccatcacctgcgtaggttactaatgacggttaccgccccataactacttactttatattacatt

SEQ ID NO: 40297 - DNA, 365 bp, Glycine max
  Clone ID: LIB3139-016-P1-N1-D9
gttgggaacgctccgacttccccatcatctgcgaatcctgcctcggcgacagcccctatgttcgaatgacaagagctgagtatgacaaggagtgcaagatttgtacacggccattcactgtttttagatggagacctggtcgagatgcaagatataagaaaactgagatctgtcagacatgtagtaaattgaaaaatgtctgtcaagtgtgccttctggatcttgagtatggactaccagttcaagtccgggacacagctctcaatattgattcccatgatgccattccaaaaagtgatgttaatcgggagtattttgctgaagagcacgaccgtagggctagagctggtatagattatgaatcc

SEQ ID NO: 40298 - DNA, 366 bp, Glycine max
  Clone ID: LIB3139-016-P1-N1-E1
gattgggcctcattggtacaagtgtttttaacaaacagcaacagtacagagcattttgatgcatgtaagtggacaaaatcagaaccacattcctgggaattgatcttcccaatagaggtatgtggtcctaataatggttttgaaatgtggagttctgagtgggcaaatcaaacttcatggcatttgagtttccttattgacaatcccaaacagtctacagtttttgatattctcttgggaatctctcaagattttgaaattgctggtaatactcttatgccagctttttctgttccacaggctactgccagatcttctgaaaatgcggaatcctctgcatgatctggaatttgtgttttctttcgc

SEQ ID NO: 40299 - DNA, 249 bp, Glycine max
  Clone ID: LIB3139-016-P1-N1-E10
cagtcatggacagaaacacactaagaaccgtgatgggcttcatcaacgagaagcgtatccaccttgtatctgatgaaatatactctgcaacagtttttagccaccccagtttcataagcattgctgagatattagaggaagacacagacatcgaatgtgaccgtaacctcgttcacattgtttatagtctttcaaaggatatggggttccctggcttcagagatggcatcatatactcttacaatgatg

SEQ ID NO: 40300 - DNA, 222 bp, Glycine max
  Clone ID: LIB3139-016-P1-N1-E11
tgaattaatgatactatggcatgtttcagtggcagtctgcagttttctttcctttgaaagatgttagtggttggcatgtttgattgggtatgattatggaatttttatttactcaattgatgtatccgaaatatgttgtttttacaggataaaaagtcaatccagttggggcctgaagacaatttatatctcgagggatctgcttttgaacgtgttcgtaaa

SEQ ID NO: 40301 - DNA, 361 bp, Glycine max
  Clone ID: LIB3139-016-P1-N1-E12
ggctgatgacaccatcaattttgaggcttttccccacaagctggtgcagtttggagagattcaggaaaaagttgtgttgaaattttcacaagaggaatttcttacagcttggtcaactcaggtgcgtcccgcaacgactctgttggctgatgggtgcccatatttgtatgctatggtgcatgatagttcagtgtctacaataccaggtgattttgtcattggtgttaagttgacaaccataaacaatatgtgtgcatatgggctcaatcctggtatttcaagttctcgtcttttgggcaccattcctcagtccatttcacagcaaactgtttggaatcaaatggcaacagtgagaacacca

SEQ ID NO: 40302 - DNA, 399 bp, Glycine max
  Clone ID: LIB3139-016-P1-N1-E2
gacgtgcacctccacccttacctcagctttcggctcgagtctcactataaacacaaaacccttcccatcctaattaaggtgaaaatgaaggcatcacccattgcttggttcactttggtggttgtgtttcttgtggctgaagttcaagtttcaatggcagtgacatgcagcccagtgcagctgagtgcatgtgtaagtgcaataacctcttcaacccctccatcaaacctatgctgctccaagatcaaagaacagaaaccatgcctctgccaatacctcaagaaccccaatctcaagaagtttgttgactctcctaatgcaaggagagttgctagcacttgtggaactcccttcccaaggtgctaagtgttaataaattggaagaggttttaatttctc

SEQ ID NO: 40303 - DNA, 380 bp, Glycine max
  Clone ID: LIB3139-016-P1-N1-E5
tttcggttcgggaggggaaaggccaaggtaatacatggataatactcgtcagcattgtgaagaataatattaaagtgaaaagcatatttttgatatgttcgattcactgcaaattgtttgttctagtaattccaaggaggcatccagttctcagaaactttctcaagggggaatccctttggcaaatggagatgctctcatgcaaaaaccacctccttgggcttatccattacggacagcacaagaggtgtaccgcaatagcaacgataggatgtccagttcaactgctcatgcaattgaccaggcgatgactcatgtatctgaggcaaaaatcaaatttgttagtgtgaatttttctgtggaaatgcagttaaatggtc

SEQ ID NO: 40304 - DNA, 360 bp, Glycine max
  Clone ID: LIB3139-016-P1-N1-E7
acaatttttacttgcagagatttggacatcttggttgtctattatacaatagcaactcaatttagaaaatttctaccgcattacattaggtggcatctgtataccttgttgatctacattctcccatcttttctcactgctgaaattaaatataagcggaatttgagtaatattcatatttccggcttattttacgacggcagatacaaattctggactaaacacgagaaaaatcttgctttgacagaagaggaaaagatggaagtgattagaaatagaggcattcctgctgatgttcttgcaaagcgagctcatgaatttgaaaaacatgttgctcatgaaagcctcaaggatcaaatt

SEQ ID NO: 40305 - DNA, 191 bp, Glycine max
  Clone ID: LIB3139-016-P1-N1-E8
actctttttaccaaaaaaacatttgacatgtgggggtgttattatacaggtgcaactcaatttacaaaatttctacctcattacattagttctccatctaataccttatttatctacatactctctatcttttcttacctcacaaattaaatataagccctatttcacttaaattcattctttccatctta

SEQ ID NO: 40306 - DNA, 250 bp, Glycine max
  Clone ID: LIB3139-016-P1-N1-E9
cttcgattttcctttctctcttgcaaatttcatatgtctctttctttctcagccaagcatttctccctttttcgtttccaatttccccttctcttaactcacctatttcgcctccttcgtgtccctttctcttcaaattaaggctcggtagggttaggttaggataggttttcggtgaggcgagagaaagagagagagtatgaggttgagggaggaggtagcgtgtaaaaacgacgacgtttgtgagaaa

SEQ ID NO: 40307 - DNA, 364 bp, Glycine max
  Clone ID: LIB3139-016-P1-N1-F1
gtacgatttcttaagggaaagaaaatcactctctgtgctggccacagacttcgtgaatcattttcttttccactcttagtttatttgctgaacactctcctatttgatataggacttcgtgtcagatttaaacttcttctgtttccttctcagttctctgtttaatttcaagttcaagctggtgaaatcttggattagtgctcccactctcctatctggtataggacttcgtgggtagacttttctatttctctcctttctttcactctcttcttctcactgatccgcattgccgttcaaagtggtcttatttgaaaaacacttgggcgttggtgcaaatgtttgcttcattcattttctctgg

SEQ ID NO: 40308 - DNA, 148 bp, Glycine max
  Clone ID: LIB3139-016-P1-N1-F10
tattaacataaggattcgtacagcacttgggaagggtaagaaaattggtttgcttactacagtagaaccttttccagtcgctatactggctgatcttttggctgttaagaatgcacttttgtgttcataactcgcttactccatatgc

SEQ ID NO: 40309 - DNA, 368 bp, Glycine max
  Clone ID: LIB3139-016-P1-N1-F11
atctcatctcatagatgtctctctgacccatgatgcaaatcttaactgtcattaatcttctcttcgtgggttaagcctaaggaaaaccacaccccatcactgttcaaggtccttttcttctataacacaggtgtgaaaggtgaaagcagagtgtgaatatcaggtcttgtccttttttcgaaggtgattcactatgtcgattattcttgtgcataggctaataccaagcttctatatcagcacctaacagattacggcctattgcgttttggcattttaatctatgccatctgacatgatttctctgtttgtttgagctcagttgtaattaaaaaaaccccactcttgtcaaggtacgctctctcact

SEQ ID NO: 40310 - DNA, 371 bp, Glycine max
  Clone ID: LIB3139-016-P1-N1-F12
ggtttgcgcagatccctacctctcctttcaagatgcagatcttcgtcaagaccctaaccggaaagaccatcacccttagaggaggaaagcggtggcaccatcaatagcgtcaaggccaccatccaatacatggcaggccttcccctggagcagcaccgtcttatcttatacggagagcaattagaggtcggccgaaccctggccatctacaacatccagaaggagtcaacccttcatcacgttctccgactacatggtggcctgcaagatcttagtgaagactctcactggcccaaccatgaccgtagacgtccatagatttgacaccattgactgccccatggccaagatccaagacaaggaggccatcc

SEQ ID NO: 40311 - DNA, 341 bp, Glycine max
  Clone ID: LIB3139-016-P1-N1-F2
tggctattgaaatagcagaagctgttgttggggcattgaaaggggagcttgctgctactgcagtcaatgcaccaatggttccctcagaggtgttaacagaattgaaaccattcattgatcttgcagagaaattgggtaggctagctgtccagctggtagcaggaggaagcggtgtgaaaacagtgaaggtcacttatgccacctctaggggccctgatgatctggacactcgtcttctccgtgccatgataaccaagggtctgattgagcccatatctagtgtttttgtgaacttggttaatgctgatttcactgccaagcaaagagggatcaggataact

SEQ ID NO: 40312 - DNA, 368 bp, Glycine max
  Clone ID: LIB3139-016-P1-N1-F3
ggtgattttgtcattggtgttaagttgacaaccatagacaatatgtgtgcatatgggctcaatcctggtatttcaggttctcgtcttttgggcaccattcctcagtccatttcacagcaaactgtttggaatcaaatggcaacagcgagaacaccattgaattttgattctagcaagcagagcttttgtcaattttctattgaccttctcggtggaggaattttagtggacaaaactggagattggatcacacttatacaaaattcttcaattacgaacttggtgagagttgctgcttggaagaaaggttgtttaatggtcaagattgtgatgcctgggaatgcagcagtcaaaaggagtgattgggc

SEQ ID NO: 40313 - DNA, 268 bp, Glycine max
  Clone ID: LIB3139-016-P1-N1-F7
gaaagacacagccattgtttgtttactttcgattgattgagcgaaagctttgttttttctgcgatcattttccattgggtggaagaaagtctcaacctttagtcgaaagagcaaggatctgagtgagtgagcgatcatttcttgtggttcgattcttttcttttatattccaactggttctatctacttttttgtctttccccccttttttttctttattctttatttggggtacctcttttttttatactctcttgggggggggggg

SEQ ID NO: 40314 - DNA, 367 bp, Glycine max
  Clone ID: LIB3139-016-P1-N1-F8
ctctgatctcactcaccattcaccaacctgcttctctgttctcttctttcccttcccaagaagaagaagaagaagatgccttcttcagaatcatcaacaggcttctccgaaaccatttgtgtgaccggcgctggtggcttcatcgcctcttggatggtcaaactcctcttggagaaaggctacactgtccgaggaaccctcagaaacccagatgatcccaagaacgggcacttaaaagagtttgaaggagcttcccagagactaactctgcataaggttgacctccttcatcttgactccgttagatctgttattaacggctgtcatggtgtctttcacactgcttctcccgtcaccgataaccccg

SEQ ID NO: 40315 - DNA, 348 bp, Glycine max
  Clone ID: LIB3139-016-P1-N1-F9
caattgcacacattcatcttttatgacagtgcttttggtgaaatcagaatagatctggttcttgcaatactagcctaacatgacacatccaaggtatagattattgttgatgaacaatgggattaatactagcacactggttttctaagtgattcttgcatcgagaaagcaggcaaggggcatgagcgggacatgggatttttgttatcacaaagtgaaattcttctgagagaaaacgtttctacatatgaactatacctgaatctgtaatcatcagacacatgggttgctgaatacaggaggtggatggacaaaggggtgcaggtaaagccatatcataaagctaca

SEQ ID NO: 40316 - DNA, 295 bp, Glycine max
  Clone ID: LIB3139-016-P1-N1-G1
ctgaatcctggtattccaggcactagtctttagagcaccatatctaagtcaatttcacagaggactgtttgtaatcagacggcaacaggggggacagcattgaatttcgaatctagcaagccgagcttcaggcaataaactattgaccttaactgtagaggaatgttaacggacataactggagattgcatcacacttatgccaagatcttcaattagtgactcgacgcgagttgctgattggaaaaaaggaccgttaacggtcaagactgggatgtctgcgaatgcatgaatca

SEQ ID NO: 40317 - DNA, 294 bp, Glycine max
  Clone ID: LIB3139-016-P1-N1-G10
ctcgagccggctcgagcggctcgagaaaaaggagggaaaaaaaaaaaaaaaaaaaaaaaaaaaaaaaaaaaaaaaaaaaaaaaaaaaaaaaaaaaaaaaaaaaaaaaaaaaaaaaaaaaaaaaaaaaaaaaaaaaaaaaaaaaaaaaaaaaaaaaaaaaaaaaaaaaaaaaaaaaaaaaaaaaaaaaaaaaaaaaaaaaaaaaaaaaaaggggggggtgctaacaatggggtgtttaacccctaaaaaaaaaatcccatcccttcccgggggggggggggggtttcccataaag

SEQ ID NO: 40318 - DNA, 364 bp, Glycine max
  Clone ID: LIB3139-016-P1-N1-G11
gaatttcctgaggatgaggtaattgttgaggccaatatagactataatgcaagagaaggaaggagcacagcagaggtcagaggctctgcaaaggggaaggctgcctctacaaaatttacccggattagtactaatggaactcaaagtattgttttatgtgaaccaatcactggccgtactcatcagatacgcgttcatttacagtattcagggcacccaatagccaatgacatgctgtacatctcagaacaaactgttgatcgatctgttaaagggttgagtgctgatagatcagctcgcatttctggtgtttcactgacatcaaattttaatgaaaaagtgctcaatgaatgtgaagaaaatt

SEQ ID NO: 40319 - DNA, 216 bp, Glycine max
  Clone ID: LIB3139-016-P1-N1-G12
tttatatagacagaacatatactaatcgatagtatgtgatgtctgactagaaggaaagagaccgaggttagtggatttgtcattgttttgcactgtcgaggatgctgctgagggaattgatggtgctgacgtgactgctattagcaacaggggcgtgtaggggcattgtagctgagactaccattgtatctagctatgcgtggtgttacatgtgca

SEQ ID NO: 40320 - DNA, 360 bp, Glycine max
  Clone ID: LIB3139-016-P1-N1-G2
ctttctgggtctttacttcttcaggtcaaggtcaccaattcatggaaggtctgaacctacaaatcctggtgacacactttatgtaactggtctatcttcgagggtcaccgaaagagacctagaggagcatttctccaaggaaggaaaggtttcttcatgttttcttgtggtggagccccgtacacggatttctcgcggttttgcttttgttacaatggaatctgctgaagatgcggagcgctgtatcaagtatctcaatcaatcagttttagagggtcgttacatcactgttgagcgggtaatggatttttctatggtagtcgatgttaaaacaattgcactcgtcatttttttcttgac

SEQ ID NO: 40321 - DNA, 328 bp, Glycine max
  Clone ID: LIB3139-016-P1-N1-G7
ctcgagccgcaaaggctggtctccagcgtattgaagagaagtacacatggcaaatttactcacagaggcttctcactctcactggtgtctatggcttctggaagcatgtgtctaaccttgaccgccgtgagagccgccgctatctcgagatgttctatgctctcaagtaccgcaaattggccgagtctgtgccccttgctgttgagtaaactgaggatgaagagttggataaagaaatggaggaaccggctttttgtttctcatttggagtttgtcttacttgagttctataaataatatgttcctgatgattttaatctcgtgatta

SEQ ID NO: 40322 - DNA, 351 bp, Glycine max
  Clone ID: LIB3139-016-P1-N1-G8
aaggagcgtcaggtcatgctcccagcgctcgcgtcggcggatttcgagtcgcacaatgtctcgctcgacggggatttcagcttccagatatttttgagggtcacccatagagacctaaaggagcatttctccaaagaaggaaaagtttctttatgtttttttgtggtggagccccgtacaccgatttctcgcggttttgctttttttacaatggaatcttcttaagattcccagcgctttaataaagatctcaatcaatcagttttagagggtcgttacatcactgttgagcgggtaatggatttttctatggtagtagatgttaaaacaaatgcactcgtcatttttttc

SEQ ID NO: 40323 - DNA, 238 bp, Glycine max
  Clone ID: LIB3139-016-P1-N1-G9
cgttggtaacaaaatcaatgctgtagggtacctgctgagcccggctgttttggatcgaattgaactgaggcccacttctatcgagaaagaggtgtttccaaagattgcttccgagaaaaagctatatgcaatggtcctgccaggattttggatggacattggacaaccgagggattatattgctggcctgaggctttacctggactcattgaggaagaagtcattttctaagttgttc

SEQ ID NO: 40324 - DNA, 367 bp, Glycine max
  Clone ID: LIB3139-016-P1-N1-H10
cactactactcactcactgcagatctcaattgcatcgctgtccatggctaccatcgttagcatcaaggcccgccagatcttcgacagtcgtggcaatccaactgtcgaggtggatttgacttgctccgatggtacttttgccagagctgctgttccaagtggtgcatccactgggatttatgaggcccttgaattgagagatggaggatctgactaccttggaaagggtgtatcaaaggctgttgacaatgtgaacaccgtcattggccctgctttgattggcaaggacccaactgagcagactgctattgacaacttaatggttcaacagcttgatggaactgttaacgaatggggttggtgcaag

SEQ ID NO: 40325 - DNA, 363 bp, Glycine max
  Clone ID: LIB3139-016-P1-N1-H11
tcaaggatggcaatttgtaagaaagatgtttggagagttgaatgtggaatcccttctggatttccgctcacagttatttgcaatagcatttttaatgagatgctcattagatatagctatgaaaaattactgcgccaggctaaagctccaagtatgtttttacaatccttcaaaaattttgtttctttgtgtgtgtatggtgatgataacttaattagtgttcatgaatatgtcaagccttattttagtggttctaaattgaaaagctttctagctggtcataatatcaccattactgatggtattgataaaactagtgcaactttgcaatttagaaagttagcagattgtgattttctcaag

SEQ ID NO: 40326 - DNA, 301 bp, Glycine max
  Clone ID: LIB3139-016-P1-N1-H12
ataaatgccatgtttctgaagttaccaaagtggaaatgggaaaaaggcaatctttgcgcaacaaagccacccatctcgtatctgtccttctcaaccccatctccgattccgacactctcaatcccaaaacctccaaacacccccaaccgacaccaacacttgaacttctttttggagaagtgggtgtggggggctcagacacaagtggtaaagggggaacccggggtaaatgagggggccgagactttataccttacagtgggtctctatatcctatagtgttcctctgacactggagata

SEQ ID NO: 40327 - DNA, 364 bp, Glycine max
  Clone ID: LIB3139-016-P1-N1-H4
tgcaccgtaagggttgtgaagcaggcagagaagagccatggtgcacgtttctttctaccgaaactatgggaaaacgttcaagaagcctcgtcgtccctacgagaaggagcgtttggacgccgagttgaagctggtcggtgagtacgggcttcgctgcaagagggagttatggagggtccagtacgccctgagccgcatccgtaacaacgccagaaacctattgacccttgatgagaagaaccctcgccgtatcttcgagggtgaagcccttctccgaagaatgttccgttacggactcctcgacgagacacagaacaagctggattatgtgttggctctcaccgacgagaactttctcgaacgc

SEQ ID NO: 40328 - DNA, 369 bp, Glycine max
  Clone ID: LIB3139-016-P1-N1-H8
tgcagcctccccaaattttcatcacactggagctattcaaggattgcacaatattcatgggagctttaatgttcccaacatgcccggtacactcacatcaagaaactcaactataaataatgtaccatcggggggtgttcaacaacccactggaagcctttctagtggaagatttacatccaacaatctcccagttgcattgtctcagctatctcatggaagctcccattcaggaatcaccaatagaggaggtataagtgttgtaggaaaccctggatttagtagtagcacaaatggagttggtggttctattcctgggattcttcctacatctgctgcagttggtaaccgaaatgctgttccaggatt

SEQ ID NO: 40329 - DNA, 371 bp, Glycine max
  Clone ID: LIB3139-017-P1-N1-A10
aattgctcccaagggtttaacctttctggctgtgttaatatgcgtttcagcactgtcactgagtccttctgttgcgggggaagggcaaaataatggccttgttatgaacttctacaaggaatcatgccctcaggctgaagacatcatcacagaacaagtcaagcttctctacaagcgccacaagaacactgctttctcctggctcaggaacatcttccatgactgtgctgttcagagttgtgatgcttcactgttgctggactccacaagaaggagcttgtctgagaaggaaacagatagaagctttgggttgagaaatttcaggtacattgagaccatcaaagaagctttggaaagagaatgccctggag

SEQ ID NO: 40330 - DNA, 362 bp, Glycine max
  unsure at all n locations
  Clone ID: LIB3139-017-P1-N1-A11
tcccactccaaaaataacccaaactctcttttaaaggggaactttatacacatagaaacagagaaagtgtgagtatcgccgccgtagccctaccctctcttcatattattctattgcctttctttaactccctcactttttcagttttgaagcgcttccagtggcgtatttacggttatacccttcttgttatgatagcttccaatcggcgtcagccacagagccgaagctcttggcttccacacatattttcggtgctgtcgattgagatacaaagccgccaagccagccgagccaatctttaaattccaactttacccctaccggntaatattctcctcttttaacggctatttcgatca

SEQ ID NO: 40331 - DNA, 367 bp, Glycine max
  Clone ID: LIB3139-017-P1-N1-A12
gattggtttatttcctctcaggagtgtgttcccaggacctattgtgttttaaatccacaaaatccttttgtgttaaataggtggatgggaaaactgactttccctcagggcacttcccgaagtgttaagagaatgcctctttctatagggggaggagctggtgcaaagaatgctattctcatgaatatgccaaatgctgttctttcaatgtggagatattttgttggagatctcgtctttgaagtttctaagatgacttctccctacattaaatgtacaggctctttcttcatagcatttggaaatttggctgatgacaccatcaattttgaggctttttcccacaagctggtgcagtttggagaga

SEQ ID NO: 40332 - DNA, 134 bp, Glycine max
  unsure at all n locations
  Clone ID: LIB3139-017-P1-N1-A2
atagaagagnnacgacgncgcatgcacgtactacaaattcgaatttcgcttcaaggccaataggttttcttaaggtcccttttagaacaccgggggaaggaacttggcaaggggttgatgtatggaatgccctt

SEQ ID NO: 40333 - DNA, 133 bp, Glycine max
  Clone ID: LIB3139-017-P1-N1-A4
attaaaaaaggtgtggaaattttcaaatacccccgccattctcaacacgcggggcatacccaattttctttattgaatgaaacaaaacacatattccagatcattttaatttccttattgactatcccaaaca

SEQ ID NO: 40334 - DNA, 251 bp, Glycine max
  Clone ID: LIB3139-017-P1-N1-A8
attcggttctagctctatttatacaatcacaaaattttacatatacccggcctaattaataaccccgccgcaccatacattctcattcaataaaacatttataaacacaacttatcctcaaatcttcaaaatctatgctcatcaaaccttattcttttttcaactataacaacacaaccaatttcattctaatctaattattttacataaattattcaattctatactatcctccattaaataacttaatt

SEQ ID NO: 40335 - DNA, 174 bp, Glycine max
  Clone ID: LIB3139-017-P1-N1-A9
tatctacagacatcattgtggaacaaccttcatccagatcaagtcgtaggagctgctggtataataaaggaaattgattgtttaactgccacggtggctgacatagagaaagtcagatcagatttttcaatgtcaataaccgtggataacacaaagttatgtggatttggaggg

SEQ ID NO: 40336 - DNA, 297 bp, Glycine max
  Clone ID: LIB3139-017-P1-N1-B10
cagagatacgggccagttatatccaccattcctgagcagctatccagattgcagtgtaaaatgatcactaattgaacataaatttgaagcttacatgctgataattactactttcatttgtaattttcgtaactaggaattatcattgcatagactggctagaaaactgagttttgaagtgagttgctgagtagagtagttatgttgtgacatggtttgtctgtatttcattcattgtactgggggttgatgtcggttattaacaatcaacccaagagggaatcaagtaatcaacta

SEQ ID NO: 40337 - DNA, 385 bp, Glycine max
  Clone ID: LIB3139-017-P1-N1-B11
cgaaactgtgcctgttaggaccgttaataggcaatgttcatctgggctccaggctgtcgctgatgtagctgctgctataagggctgggttctatgacattggtattggtgccggtttggaatctatgaccactaatccaatgggatgggatggatcagtgaatcctaaggtaaaaatgtttgaacaagcacaaaactgccttcttcctatgggaattacctctgaaaatgttgcacagcgctttggggtttcaaggaaggaacaagaccaggctgcagttgagtctcacaggcgagctgctgcagctactgctgctggtaaatttaaagatgaaattgtcccagttaccaccaagattgtggacccaaaaaccggtgaggagaaa

SEQ ID NO: 40338 - DNA, 379 bp, Glycine max
  Clone ID: LIB3139-017-P1-N1-B12
ctcgagccgttgcaatagcatttttaatgagatgctcattagatatagctatgaaaaattactgcgccaggctaaagctccaagtatgtttttacaatccttcaaaaattttgtttctttgtgtgtgtatggggatgataacttaattagtgttcatgaatatgtcaagccttactttagtggttctaaattgaaaagctttctagctagtcataacatcaccattactgatggtattgacaaaactagtgcaactttgcaattttagaaagttagcagattgtgattttctcaagagaaactttaagcagatgtctaatgttttgtgggtggctcctgaggacaaggcgagtttatggtcacaacttcattatgtttc

SEQ ID NO: 40339 - DNA, 257 bp, Glycine max
  unsure at all n locations
  Clone ID: LIB3139-017-P1-N1-B6
tggtaacatcatcaacagcagcatgaatgggggtagacgccaacagtaacagggggaggctcaggtttacaacataagcaagaatgatttcagggatattgttcagcagcttacagggtcttcctctcagtctcaggatcattctcaatccaaacctcctcagaatcagaacaatttcccaaaaccttaaagtatgaggttgcagaaaattaggcctncccctttgccctatgtgaggccttcattgcacaccacct

SEQ ID NO: 40340 - DNA, 385 bp, Glycine max
  Clone ID: LIB3139-017-P1-N1-B7
gatgctttgcattttcaaaagaactgataatgattggggaagctcctgttgaatcacagggtgtaagatttcttcagctagctcctggtgaatttttcttcactactttaaaggtgtctggatactgtggccttctcttgggaattcctgtcatcctctatgaaatcatagcctttgtacttccaggacttacaaaagctgaaagaaggtttctagggccaattgttttaggctcatcggttcttttctatgccggaataactttctcctacttagttctgacacctgcagcattaaatttctttgttacctacgctgaaagtgctgttgaatcattatggtccattgatcaatactttgaatttgttctggtgcttatgttcag

SEQ ID NO: 40341 - DNA, 387 bp, Glycine max
  Clone ID: LIB3139-017-P1-N1-B8
gacaaaatggcgccattggagtcactggagaaagaggatccactcattgactctaattttcaaagcttctgcgcctcccacggcattttctctgttgaagattttcttctgcacgatctcgacgcattactttcctttacggataatcattccacttcacagaccctgaagcagggaattgaccagctgatctcaataatagacgctcttcatccaccattgctaaacggtttgcagctcttggaagatgctcagcgtaataaacatgttttgtccactggatgtgaagggattgatgcattgctcagaggtggattacgtgaagggcaattaactgaacttgttgggtcatcctcgtctggaaagacacaggcatgcctactgtct

SEQ ID NO: 40342 - DNA, 382 bp, Glycine max
  Clone ID: LIB3139-017-P1-N1-B9
cgtgaaaggacacacctgctgttggcttgttgttcaaggatggcaatttgtaagaaagatgtttggagagttgaatgtggaatcccttctggatttccgctcacagttatttgcaatagcatttttaatgagatgctcattagatatagctatgaaaaattactgcgccaggctaaagctccaagtatgtttttacaatctttcaaaaattttgtttctttgtgtgtgtatggggatgataacttaattagtgttcatgaatatgtcaagccttactttagtggttctaaattgaaaagctttctagctggtcataatatcaccattactgatggtattgacaaaactagtgcaactttgcaatttagaaagttagcagatt

SEQ ID NO: 40343 - DNA, 386 bp, Glycine max
  unsure at all n locations
  Clone ID: LIB3139-017-P1-N1-C10
ctcgagccgtctcgatacaaaaatacatagaaatggcctcttctcttgcatcctcatcaactgttctctggatcctttttctaaccattgcaactcttcatttgagttcagccaggaagttgtccgggtcagacccgcagttgcagtttcaataccacagaggccctctcctcaaaggcaaaatctcagtaaacctcatttggtacggtaaattcaaaccttctcaaaaagccatcgttgctgatttcatcacctcgctctcctctcccaaacccgtcnaccgccaaccatncgttgccacgtggtggaaagccaccgataaatactacaaaaactcgtnccccaaactcgcttctttcctcggcaccacccaaattctggacgag

SEQ ID NO: 40344 - DNA, 383 bp, Glycine max
  Clone ID: LIB3139-017-P1-N1-C11
ttcttttcttgttctccttcttcctttcccaaccaaaacatttcttttgtgttatttactgattcctctcagcattcagcaatcagcatcattattacttttccttgtagccatatcaatttgttttctgtttcaaaaaccaatatgccttatgcctttctctttttctagctttattttcctgtagaagtaagtaatttacagtttgttctattttctcagtgatttataatcagaaaacaagggacagccacacagaagttatcttgaatcagaaaacatgatgctaagaagctcttcaacaccagttcttggatccctcctctcatccttcccagatagtcctaacaacaatattcactcagaaacctgtcatgcactta

SEQ ID NO: 40345 - DNA, 387 bp, Glycine max
  Clone ID: LIB3139-017-P1-N1-C12
caataaaattgcttttgtggttcctgtttttgtcatggtgccactttgccatcccatgctgcgaggccaaccaacaaggggaatatctctataagtttattcgatcaaggagggctcaaaaacgctcttatggagaagcttcttcaatggccacaaatcttggtggtgatggaaaattttcgaaggtttatgttgttaaggaacaatctgggttgatggaaggtgacaaagtgaaggctttgccgggacaaccagcacaaggggtggattttgatcaatatgctggctatgtcacggtggatgccaaggcagggagagcactggtctattactttgtggagtcacctcacaatgctttcaacaagccccttggtctatggctaaatg

SEQ ID NO: 40346 - DNA, 69 bp, Glycine max
  Clone ID: LIB3139-017-P1-N1-C2
cttccgtctttcttaattcacatgtcactgcccttcttagtcggttgcagcaacatcaaacaactgtct

SEQ ID NO: 40347 - DNA, 237 bp, Glycine max
  Clone ID: LIB3139-017-P1-N1-C5
tttcaagaatttctcaatttcttcctacttctttgcttactatttcttaaattaaataaaattactttttattcttttcacagacttcctcaatcatcttcttttccatttctagtttatttcctcaacactctcctattttatatttctattttctcttatttttaaattattaatacaaccttcatccacacacaatttatctttcaatttttaccctttatattttttatcttt

SEQ ID NO: 40348 - DNA, 307 bp, Glycine max
  Clone ID: LIB3139-017-P1-N1-C7
gttttatagagaaatggcttcgtcttgttctagcttgatgatcactttggccgggggggtccttttgttggggactagtagtgccaatgccaatccaacacttcacacaaacttctactacagttcttgcccaaaactctttgacactgtgaaacgcacagtggaatcggccatatcaaaggagacccgcatgggtgcttctctcctacgtttgttcttccacgattgctttgtcaatgggtgtgatgggtcaattctacttgatgacacatcaagcttcaccggagagaaaaacgcatgacctaac

SEQ ID NO: 40349 - DNA, 377 bp, Glycine max
  unsure at all n locations
  Clone ID: LIB3139-017-P1-N1-C8
ccttatttctctcttgcaaccagagcatgcacatcagaaaccatgcgttttattacgcttttgtcccttccgtctttcttaattcacatgtcactgcccttcttagtcgtctgcagcaacaacaacaacgtttctgagttggccttgtcgtgtccatggctgtgtccaacggcgtcgaagctgtgttagagtttctaaggaagaatggattgtcggaagctgagtccgctctccgagaagacatcatcgagaacaccgacctcggaacctttgactacgagaagttcttcttncccatggtcccgccgncgncgncggtcagagtccgatctttctcccggccgtcggggctctccgccgccggcaactgctccata

SEQ ID NO: 40350 - DNA, 342 bp, Glycine max
  Clone ID: LIB3139-017-P1-N1-C9
gtaatttctgccagcctcaaaaaagacttgctctgcgctctgccactctctgagtaggactacactgccatggctgcctcagtctccactgttggagctgtcaacggagctccactgagcttgaacagctctggagctggagcttcagttcccagttcagccttctttggcaccagcttgaagaaggttattgcctcaagggtccctaacgtcaagatttcttctggaagtttcaaaatcgttgccgcggaaaaagagattgatgagaaacaacagacagacaaggacagatggaaaggtcttgcctatgatgtttcagacgaccagcaagacatcacaaga

SEQ ID NO: 40351 - DNA, 386 bp, Glycine max
  Clone ID: LIB3139-017-P1-N1-D1
tccatcgaatccaaataataccaaaaaacaccatgatgcttggggagacccaccgcccaaatccaaccgtacacgtgccaccgtgggcgccggagatcttctcaccatacaccggcaatgccgattactctccgtactccatgcaagaagcacttagtgcacttcagcactacgaatccaccgatgctgagtcagactcggaggttccgtctcgggaaccggaagtcccggtggacgcttactcctgcgaccatttccgcatgttcgagttcaaggttcggagatgcgcacgttgcaggtcgcatgactggaccgactgtccgtacgcccaccccggcgagaaggcacgccgccgtgatccccggaagtaccattactccggcacg

SEQ ID NO: 40352 - DNA, 388 bp, Glycine max
  Clone ID: LIB3139-017-P1-N1-D10
gtcgtcgctgtttttgtgtgtcgcttcttcgtaggtgcagctgcaatggtgaagggacgccaaggagaacgtgtcagactctacgtgaggggtacaatccttggatacaaaaggtccaagtcaaaccagtatccaaatacatccctgatccaaattgagggtgtgaatgccaaagaagaagtagcatggtatgctggcaagaaaatggcctatatctacaaggctaaggtgaagaagaatggaagccattaccgctgcatatggggcaaggttacaaggcctcatggtaacagtggtattgtccgtgcaaaattcaagtcgaaccttccacccaaatcaatgggagcccgagtaagagtattcatgtatccaagcaacatatgagatt

SEQ ID NO: 40353 - DNA, 386 bp, Glycine max
  Clone ID: LIB3139-017-P1-N1-D11
tgccaagccgcggccacgctgaatcttctcagagcttttgccaccggtggttatgctgctatgcagagggttactcagtggaatttggacttcacggatcacagcgaacagggagataggtaccgagagcttgctaaccgagttgatgaggcccttggattcatggctgctgctgggctcacggtggaccatcccataatgagaacaactgaattctggacatctcatgagtgcttattgttgccttatgaacaatccctcacaaggttggattcaacttctggtctctactatgactgttcagcccatatgatctgggttggagaacgaaccaggcagcttgatggtgcccatgttgagtttctaagaggagttgctaatccctt

SEQ ID NO: 40354 - DNA, 139 bp, Glycine max
  Clone ID: LIB3139-017-P1-N1-D3
ggtttttgttgccaaagggttttttggacagaaccaaaaaaaaggggttagtcgggaaaaactgggtccaacaagcgccgatgctaaaacatatatcagtggaacaatctgcacagatcaggaacaacctatagacaca

SEQ ID NO: 40355 - DNA, 381 bp, Glycine max
  Clone ID: LIB3139-017-P1-N1-D8
tgcagctctaccacttcttccaaaacccctccattatgaagaacgctaacagcaacacaaaactaatccttctccacccttatatccaaaaacaaggaagctccaatcgcctatggcttttagccttcatatccttctttacattagccttccttgccacccttatttacacaagagacacaacctcatcttcctctaccactacctcttccaccccattatctagtttcgctaacacccctttaccatccactgtaatcaacaccctcctccactatgcctccaaatccaacgacaccttccacatgccccactcagacctaaaaaccatctctgacgtgctccgaaagtgtccctcaccatgcaacttcctcatctttc

SEQ ID NO: 40356 - DNA, 381 bp, Glycine max
  Clone ID: LIB3139-017-P1-N1-D9
tggaatcagcaactatgaatatgatgcggaggttgaagagcattgcttctgggaggacttccatttcttcagatcctggaggggattctaactcaaaaagggccaagtttgaaccagaaactgaagggaaggccgatgagaaaacaaataccattgaaacaatctgcacagatcaggaacaacctatagacacatcaaaagaaacttccaatgtaggcacatccgatgtatctacagtagctagaactgagaagtcaggtttcgatgagcttcctaaagaattaaatgaaatgaaaattagagatgagaaaagcaaaaacaacaatgaaaaggatatagaagctactgtagtgagtggtaatggaacagaaacaggacaaa

SEQ ID NO: 40357 - DNA, 417 bp, Glycine max
  Clone ID: LIB3139-017-P1-N1-E1
gctatgacgtccatgcaccctcctagcttggaattcggttgggacccccctttttttttggcgtcattctgtctcctgtgaattctttcctagacatcgctccctatcggagacccggattacaggctagcgtgagaggcttgtgaatccctcactgacgcaggaatgaaacttgctcctatggaagaggatcgagacaaaggcaagggcatactgcaacaccaccaggtcattgctgagtttgaggaaatccctgaggagaacagacagaagctcactgatggtgcctttggagaagtcttgagatctacacaggaagccatagttttgccaccatgggttgctctggctgttcgttcaagacctggtgtgtgggagtacctgagagtgaatgtgcacgcttctttgtgtgaggag

SEQ ID NO: 40358 - DNA, 383 bp, Glycine max
  Clone ID: LIB3139-017-P1-N1-E10
gttggatcttaaaatttctcaatctaaaattgcactgcccaagaacacagttggaggaaccattctgcgtagtgatctattggcaaattttttgacagagggcaattttagagcaagtgttgatttgcagcgcactcatcgtattaaaggaatgattaaaatggtggccacagttggtattcctgagaatacaggtatagcattggcctgtgctatgaatagttcttttagggggcgcgccagttctgatatttacaccatctgctctcaagactgtgaattatggaatcctgcttgcacaaaagcaatgactatgtcatttaatccaaacccgtgttctgatgcatggagtttggaatttctgaagcgtaccggatttcatt

SEQ ID NO: 40359 - DNA, 126 bp, Glycine max
  Clone ID: LIB3139-017-P1-N1-E11
gctagaagcaggaagagaagcgaaacagagaaacaacaaaatagtcaattgagccacttaccatcagatttagatctcccaacagagagtttctcaaaattgccaagtacccttttcaggatcaag

SEQ ID NO: 40360 - DNA, 74 bp, Glycine max
  Clone ID: LIB3139-017-P1-N1-E12
ctcgagccgaaagcatgtccaaaagagcatgatgatgtatggtacagaggcaacaggaggccttgcatcatcgt

SEQ ID NO: 40361 - DNA, 389 bp, Glycine max
  Clone ID: LIB3139-017-P1-N1-E4
tatggtgcatgatagttcagtgtctacaataccaggtgattttgtcattggtgttaagttgacaaccataaacaatatgtgtgcatatgggctcaatcctggtatttcaggttctcgtcttttgggcaccattcctcagtccatttcacagcaaactgtttggaatcaaatggcaacagtgagaacaccattgaattttgattctagcaagcagagcttttgtcaattttctattgaccttctcggtggaggaattttagtggacaaaactggagattggatcacacttatacaaaattctccaattagtaacttgttgagagttgctgcttggaagaaaggttgtttaatggtcaagattgtgatgtctgggaatgcagcagtcaaat

SEQ ID NO: 40362 - DNA, 436 bp, Glycine max
  unsure at all n locations
  Clone ID: LIB3139-017-P1-N1-E5
aagaggtcgacgacgcatgcagcacgaccacagcttcgaaattcgcttcgagccaaactattttttctaacacttttcctctctctcttctgggntccgccggagaaatcagaacccaccggcggcatcacacgacgagccacttcacagtaaaccctaaacacttaacagagaaagagagactcacgttgatactctagaaaggtcactatgggaaactgcaacgcctgtgcgaaagctgatgtcgtagaagacagcaccaacaacaggaacangaagtctaatgaaacgaaccgcggtggtaggaagaaagagcagaaccagaaaaaaccgaacccgttctcagacgaaccggcccggtcggcggctccgatccgggtcttgaaggacgtgattccaatgagccaccggacgcgcataagcgacaagtacatac

SEQ ID NO: 40363 - DNA, 358 bp, Glycine max
  Clone ID: LIB3139-017-P1-N1-E6
ctcgagctcttcgagccgtttccataaccttagtcgtgggtttctttcatcgggggccgtaaccgtatccagggaaaaatatggcggaagaacacagatgccaggcaccgcgcttctgcgccaacaattgcggtttctttggcagccctgccacgcagaatatgtgctccaagtgctaccgcgatttccagctcaaggagcagcaatcttccaacgccaagatggttctcaatcagtcgctggttccttcaccgccaccggcggtgatttctcagccgtcgtcttcttcttttgccgcagaagaaacgtgattagccagggctgaagacgcgatgaacgaggccatcgaggatatggc

SEQ ID NO: 40364 - DNA, 266 bp, Glycine max
  Clone ID: LIB3139-017-P1-N1-E9
ctgcctctccatggtccattaggatgaaaattgcgcttgtagctgcaaaggggtggcttttcttatgaggaagctgaacgaccagtaatatatagggatttcaaaacttccaatatactattggatgcagaatacaattctaagctctcagattttggacttgcaaaagatggtccagagggtgataaaacccatgtgtctactcgagtgatgggaacctatggttatgcagcaccacaatatgtctatgaccgtacatcttacat

SEQ ID NO: 40365 - DNA, 117 bp, Glycine max
  unsure at all n locations
  Clone ID: LIB3139-017-P1-N1-F10
gatttttataccatcaacaagataggattatcaaagcggtatatcgtggggagctggtgcttttctttangatgttcacatccttaacacaaaattcatacgtctttctacaatgtg

SEQ ID NO: 40366 - DNA, 378 bp, Glycine max
  Clone ID: LIB3139-017-P1-N1-F11
ggcaagtaccatttttttcaacctaataacctttttgattaaaagggccaccccttcttcttcttcccttctcaacttgaactacaatttctggattgaattatcttcaaaatgagagaaatccttcatgttcaagctggtcaatgtggaaaccaaattggaggcaagttttgggaggtgatgtgtgatgaacatgggatggatgccactggaaattacgtaggtaactttcatcttcaacttgagagggttaacgtgtactacaatgaagcaagtgggggacggtatgttcctcgagctgtgcttatggaccttgaaccagggaccatggatagcttgcgttctggtccttttggaaaaatattcagacccgataac

SEQ ID NO: 40367 - DNA, 387 bp, Glycine max
  Clone ID: LIB3139-017-P1-N1-F12
gtacttcagtaatgtcatcttgtaaaccttgctacctatacatttattgtacactgtatatatacaagtaaaatgtaaaacatgaactgccactacaggtagcacatattttgggtgtccaaatatggatcttacctagatggatctgggtaatgagaattattggtgaacgttaccaaggttggatgcatttgacattcagaaacagctggcatggctggtaggcattgagcctgatactggcaccttccacttgaggacttagcaggtcaaagcttttggaaaacatcttggtgaagggctatccaaagaaaaacttttggaaaacatcttggtgaagggctatccaaagaaatgcatgctgcttgcttctcaacgtgtttcttt

SEQ ID NO: 40368 - DNA, 332 bp, Glycine max
  Clone ID: LIB3139-017-P1-N1-F9
atttccataaccttagtcatcttcttctttcatctggctccctaacggtatcgagggaaaaatatggcggaagaacacagatgccaggcaccgcgcttctgcgccaacaattgcggtttctttggcagccctgccacgcagaatatgtgctccaagtgctaccgcgatttccagctcaaggagcagcaatcttccaacgccaagatggttctcaatcagtcgctggttccttcaccgccaccggcggtgatttctcagccgtcgtcttcttcttcggccgcggtagatccgtcatcggcggtggttgatgacgcgccacgcgaggcggagga

SEQ ID NO: 40369 - DNA, 390 bp, Glycine max
  Clone ID: LIB3139-017-P1-N1-G10
gttgcctcaaactcaaaggatgaccctgcaaaggaggctgctaacttcacagcccaagtcatcatcatgaaccaccctggtcagattggaaatggctatgcccctgtcctcgactgccacacttctcacattgctgtcaagtttgctgaactcatgaccaagattgacaggcgatccggcaaagagcttgagaaggagcccaagtttttgaagaacggtgatgctggttttgttaagatgattccaaccaaacccatggttgttgaaactttctccgagtatcctccacttggtaggtttgctgttagggacatgcgtcaaactgttgctgtgggagtcatcaagaacgttgagaagaaggatcctaccggagccaaggtcaccaaggct

SEQ ID NO: 40370 - DNA, 349 bp, Glycine max
  Clone ID: LIB3139-017-P1-N1-G11
gcacaatggactaccttctacttcttccactaataatcaccatagtatggataaacattcatgtattcatctctagcttcaaaccactcaaatcctctaaaaatcccccgggtcctcgcccttttccaatcataggaaacatcttggagcttggcaaccagcctcaccaagcacttgccaagctttctcaaatttatggccctataatgagtctcaagcttggtaagactaccaccattgtcatttcctctccacaagttgccaaagaagtgctacaaaaacatgatcaaatttttgctaataggacagtccctgatactctccgagcacttgatcatcacatactttc

SEQ ID NO: 40371 - DNA, 381 bp, Glycine max
  Clone ID: LIB3139-017-P1-N1-G12
atccccttcctcttcttcccctcaccgcatcgtcttcctcttcactggatcaatattcctcccgctgtgcttgaattggataatcaaccttaaagctatatgttctgaggttgatgtgttacgtataatcttgttactgttctgagcgtatggaggggtgatacctgattgatctgggatgttgcgtagtaatctattctgattgattatgcatatctggaatgagttcaatggtcatattcttttattaatactgtgaactgtgctttatactttagtactggaaagaaagtacaaccaccagaggatttcctgtatccatgctgtcagagagcatgcgtggaatctgtacatcgggtaatgcccctgtcgagattttct

SEQ ID NO: 40372 - DNA, 283 bp, Glycine max
  Clone ID: LIB3139-017-P1-N1-G8
acagagtacagtttttgatattctctcgggaatctgtgatgattttgaaattgctggtaatactcttatgccagatatgtctggtccacaggctactgccagatcttgtgaaaatgcggaatcctttgcatgatctggaattcgtgttgtctctcgcttggtcgcttgtttaattcaatataggaaattaggcatgaccctcttgttgggtatgctctgcctatctgaaaatttccacacctcttttaattgtcgtaatgatgtgtgaagcgtgtgatatttt

SEQ ID NO: 40373 - DNA, 329 bp, Glycine max
  Clone ID: LIB3139-017-P1-N1-G9
taaggggataaggtcagatgtttcgaatgttgttcacggtgatgaatttgagtacaatgatcctgtggatggttccatctcatcacatcagggaatccgatatttgtttgaggatggatcacgattgattttccgcctatctggaactggatcagaaggtgcaacaattcgactatacattgagcaatatgagaaggatccatcaaagattgggagactttcaaatgaagcccttgctcctcttgtggaagttgcattgaaactttcgaagatggaagaattcactggtcgatccgctccaacagtcattacatgaacacatacaggtg

SEQ ID NO: 40374 - DNA, 391 bp, Glycine max
  unsure at all n locations
  Clone ID: LIB3139-017-P1-N1-H1
agaagagtacgacgngcatgcacccggtacctaaggttcgaatttcggttcgggggataaacttgaatttctctccttaaaacccgacctcggcgtttgcctctctcaggctcagtctcagtttcagtttcggatctctctcttctttcacaccaatttccagcatttgaaacatggcagattcaaaatcaggattgaggaaaccagtgttcaccaaggttgatcagctttgcccggggaccagtgggcacactttaactgtgaaggtggtcaatgctaagatggtgatgcagagaggtcgctctgatggtcctcaatctcgtcaaatgcgaattgctgagtgcttggttggtgatgagactggaatgatcatattcaccgccagaaatga

SEQ ID NO: 40375 - DNA, 386 bp, Glycine max
  Clone ID: LIB3139-017-P1-N1-H10
gcagtttggagagattcaggaaaaagttgtattgaaattttcacaagaggaatttcttacagcttggtcaactcaggtgcgtcctgcaacaactctgttggctgatgggtgtccatatttgtatgcaatggtgcatgatagttcagtgtctacaataccaggtgattttgtcattggtgtcaagttgacaaccataaacaatatgtgtgcatatgggctcaatcctggtatttcaggttctcgtcttttgggcaccattcctcagtccatttcacagcaaactgtttggaatcaaatggcaacagtgagaacaccattgaattttgattctagcaagcagagcttttgtcagttttctattgaccttctcggtggaggaatcttag

SEQ ID NO: 40376 - DNA, 383 bp, Glycine max
  Clone ID: LIB3139-017-P1-N1-H11
ctcgagccgaatcggctcgagcttttccccacaagctggtgcagtttggagagattcaggaaaaagttgtgttgaaattttcacaagaggaatttcttacagcttggtcaactcaggtgcgtcccgcaacgactctgttggctgatgggtgcccatatttgtatgctatggtgcatgatagttcagtgtctacaataccaggtgattttgtcattggtgttaagttgacaaccataaacaatatgtgtgcatatgggctcaatcctggtatttcaggttctcgtcttttgggcaccattcctcagtccatttcacagcaaactgtttggaatcaaatggcaacagtgagaacaccattgaattttgattctagcaagcaaagc

SEQ ID NO: 40377 - DNA, 381 bp, Glycine max
  Clone ID: LIB3139-017-P1-N1-H12
gagagagactactcacctttaggatacttgtgaatgtgtcttttgtttttgatatagcttcaatttgtttctcctttgtccttaaataattttgatatctgttgctttcagcatacagtgaagcccggctcttacacatggatacatcacaggccaccacctcaacgtagacagaaccattttgatgtgcatgacatgttgaacatgctccaggatgttgacttaacaagtgcagaatatttttccatcatgagggactcggacctttatgatgatatggatccattcgagatgatggtatctgataggcttgctggtgattcaggtccttgtttaggtccttttgattctgatgaggaggacttggatatttttcagatg

SEQ ID NO: 40378 - DNA, 84 bp, Glycine max
  Clone ID: LIB3139-017-P1-N1-H2
aaccgctaaccaaaccaaagctctctcaatggcttcggagcaacacgacaccgtgtttcgcgaaaaaaacatggacgacgacga

SEQ ID NO: 40379 - DNA, 113 bp, Glycine max
  Clone ID: LIB3139-017-P1-N1-H3
ctagaaaataaagacttttatattcacaaaaggcttgggcgttttatacgcggttgggaaaattgatttaccccgaaaggagttccagaaggggtgagagaaaacactctttt

SEQ ID NO: 40380 - DNA, 239 bp, Glycine max
  Clone ID: LIB3139-017-P1-N1-H5
atagaagtggacgacgatgcaccgccgtcctaaggttcgaaattcggttcgggggaaaacaaattagtgatgtgtcataggcttaaatttgcagagctgcacaagttgtgcgtgccatgaaatccgtgaaacaacagctttcatggatcaattgtgggctgtggatggaaccaaggctcaggcacttgctatttgccactcacatacttttgaattgcagcatgaaatgctatagcaac

SEQ ID NO: 40381 - DNA, 386 bp, Glycine max
  Clone ID: LIB3139-017-P1-N1-H7
cttcttctccctttcttagattctcccttttttctctgtaccctccgccatggctgaggataaggagatgtcttcctctgtcaccaatggcgatgattctctcactggccacatcatatctacaactattggaggcaaaaatggggaacccaaacagactattagttacatggctgaacgggttgtaggaactggatcatttggaattgttttccaggcaaaatgtttggaaactggggaagcagtggccattaaaaaggttttacaagacagaagatacaagaatcgtgaactacagttaatgccgggtttgggaacatccaaatggcatctctctgaagcattgtttcttttcaactacaagtacagatgagctttttcttaat

SEQ ID NO: 40382 - DNA, 361 bp, Glycine max
  Clone ID: LIB3139-017-P1-N1-H8
ccaggacctattgtgttttaaatccacaaaatccttgggtgttaaataggtggatgggaaaattgactttcccccagggcacttcccgaagtgttaagagaatgcctctttctatagggggaggagctggtgcaaagaatgctattctcatgaatatgccaaatcctgttctttcaatgtggagatattttgttggagatctcgtctttgaagtttctaagatgacttctccctacattaaatgtacagtctctttcttcatagcatttggaaatttggctgatgataccatcaattttgaggcttttccccacaagctggtgcagtttggagagattcaggaaaaagttgtattgaaatt

SEQ ID NO: 40383 - DNA, 385 bp, Glycine max
  Clone ID: LIB3139-017-P1-N1-H9
ctagagagcgagtacgtatctgctcattagagccttgcggtgcttatgaataaaatcaacaggattttcagcccaagcaccggaaggctctagagagcgagtacgtatctgctcatttgcatgagtggattgacctcatatttgggtataagcaacgaggcaaggaagctgttacagcaaataatgttttcttttatactacctatgaagggacagtggatcttgataaaatctctgacccagtacaacagcgtgccatacaagatcagattgcttattttggacaaacaccatcccaacttctgactgttcctcacttgaagaaaatgccattagcagaagttctgcatttgcagacaatattccgcaacccaaaagaagtcaa

SEQ ID NO: 40384 - DNA, 351 bp, Glycine max
  Clone ID: LIB3139-018-P1-N1-A1
ggagagaagggataaaagtgtatggtatgggggcgtggtgaccgagggctcgaaaggaggaaacttttggctacagaaagtagtttctttagtcgggtttctttcaaaaaatggtgcagagtctctgtttgatggcttctcatggttaccctcctggccttgtcttgcatccacaagtactgggcttgccctgcagtaccatgaagggctaccaaacattctttccttctccagtagcaaaagcagacctgatcagatatcagtctccttgtcttgatccaagtccatgtgaggagtcaacgaaatctcaaaatgaatggtttgattataagaagtttgtcaatgttgact

SEQ ID NO: 40385 - DNA, 316 bp, Glycine max
  Clone ID: LIB3139-018-P1-N1-A10
ctcgagccgaatcggctcgagcggctcgagtgggttattcgaaacctttcatcttccataatcccgcaaggtaaacgacggtgacgattggtgggtggcgccgaacgcctcatcccatccatcgccatcggcaccttccttaaacgacatcgcgtccatcaccccttttctcttcctcacagtcacagcagtggtagcttcccaaaaaagagtgccaatggcatcttcttcagactcatgggtgaaggaatataatgaggcgcgtgggctggctgatgatatcagcggcatgatttctgcgcagagtttatttcct

SEQ ID NO: 40386 - DNA, 355 bp, Glycine max
  Clone ID: LIB3139-018-P1-N1-A11
gtagcgtgtacataatggaccatattcatctgtcggctacaattacaccattgtgaggtccgtactgcccagatagcctaatgatgtatgaaaggaaagaggtttagcatgctagatgtcacaagacaagaatgtttgactatagtacacatgcctggtacctactcaccgaagctcattggacgaggatgctagtgcttaagcactggtcgatgcataattggcccacgaaacaaataggctgtcaattatcaggaatcgtactctatcctatgatgtaataatagagcactttgtgtgattaattatcgtgggaatgagtatgcaaagcgtatatctacacatctattgacca

SEQ ID NO: 40387 - DNA, 356 bp, Glycine max
  Clone ID: LIB3139-018-P1-N1-A12
tgaaattttaataaaccgcgatcacaggttgccgcaccttaaaaccggaaacaaaagcaatcgttacttgatttcaagaatttctcaatttcttcctacttctttgtgtacgatttcttaagggaaagaaaatcactctctgtgctggtcacagacttcgtgaatcattttcttttccactcctagtttatttgctgaacactctcctatttgatataggacttcgtgtcagatttaaactttttctgtttctttctcagttctctgtttaatttcaagttcaagctggtgaaattttggattagtgctcccactctcctatctggtataggacttcgtgggtagacttttctact

SEQ ID NO: 40388 - DNA, 363 bp, Glycine max
  Clone ID: LIB3139-018-P1-N1-A2
gtcttccaaggttgtttcggtttctccagcgaccattggcaaaattgatttctgtacttcggtctcctaaatccaaggaagggtatgctgctattggtggtggctctcctttacgcaaaattacagatgaccaggcactcgcaattaaaatggctttggaagcaaagggcatctcttcaaatgtctatgttgggatgcggtactggtacccatttactgaagaagcaattcaacaaattaagagggacagaataacaaggcttgtggtactacccctttatccccagttttctatatccacaactggttcaagcatccgcattcttgagcatatattcagggaagatgcctatttgtccaagc

SEQ ID NO: 40389 - DNA, 363 bp, Glycine max
  Clone ID: LIB3139-018-P1-N1-A5
tggttaacggatattaaagacacctctaaagaaggatgtagttttgaagagatatgcatcaagaaagaagcgtttgagggagaagagaagttttgtgcaaaatccttgggaacagtaattggttttgccatttcaaagctgggaaagaacattcaagtactttcaagttcctttgtcaataagcaagagcaatacactgtggaaggagtgcagaatcttggagacaaagcagtgatgtgtcatgggctaaatttcagaactgcagtattttactgccataaagtccgtgaaacaacagctttcatggttccattggtggctggtgatggaaccaaaactcaggcacttgctgtttgccactca

SEQ ID NO: 40390 - DNA, 229 bp, Glycine max
  Clone ID: LIB3139-018-P1-N1-A6
ggagatttgtctctggggatggtgaagagatgacgtggggtccaggaaccagtggtgaagaggcttacaacaagctaatagttgaacttgagaaaagtgtttctacattggttggcattgaatgtcccaaggatgagaaacttacttgcattaaaatttttgacaaacctaagatgcgctggttaactattttccctatggagtttaatcttgtggttcgacataagtt

SEQ ID NO: 40391 - DNA, 359 bp, Glycine max
  Clone ID: LIB3139-018-P1-N1-A7
agcaaaagaagccagcaatggccaagtccaagaacaatgccaagaagttgtcctacatctcagttccatctcagatcatcaactccatctcatcttcatctcttcaatctctgcttgaatctcccaagaagtgtgcaaggcactccaaattcttcacctttgtcaagtgcatgaggccaagactcttcttccttttcaccctctttttccttgctttctttgccatgctcaagtttggcctcaatcttgacaccccttttcctccattcccatgtgcaccctcaataggccccacaaaatccaatcttggagctttggatggtggtgatgttagtgtttcagaggctatgattagcagt

SEQ ID NO: 40392 - DNA, 360 bp, Glycine max
  Clone ID: LIB3139-018-P1-N1-A8
aaaaagtttcctctacaaaagcacaatttgttagtggaaaaaccttcaaatatgatataattggtgctggttcacattcttcagaagattttcctgaaaaggaagatcaagaaaaacccaaaaagattgatgccagattgagacaaagaatagatcctcaatacaatgaggttcaggctcagatggaaacaaatttgtttaaattgtctcttgatgatgttgaaactcctaaaggttccatgttggatctgaaaatttctcaatctaaaattgcacttcccaagaacacagttggaggaaccattctgcgtagtgatctattggcaaattttttgacagagggcaattttagagcaagtg

SEQ ID NO: 40393 - DNA, 357 bp, Glycine max
  Clone ID: LIB3139-018-P1-N1-A9
cgtctattcccaattccaaattcaagaaatggggggaacttgacatatctgctatcaccttttccgtttcttgcgattcgacaatggccgatcaaaagctttcagaaccggcgcttaaacgtgagcagcttgatgaattcgacagtagactatatcttgaacaacgaattcttgaactccgacttattcaagacctcgagaacaatgatgaatgtaggaaaaacggcagcctgaaacgggtaaatgaccagagtgatgcatgcggatatagcacttcctaagaacacaattataggaaccattctgcgtagtgatctatgggcaaattttttgacagagggcaattttagagcaagt

SEQ ID NO: 40394 - DNA, 204 bp, Glycine max
  unsure at all n locations
  Clone ID: LIB3139-018-P1-N1-B1
gtttgatcgttcggtgacatcaataaagtgaaattaggcgtgatcctctaggtgagtgtgctctggctatctgaaaatggacacacctcttttaattgtcgtaatgatgtgtgaagtgtgtgttattttaaaaaaaaaagaacaaatncaaaaaatgcattacctgaggggggcgattcataaggggatgtggctgccccgaaa

SEQ ID NO: 40395 - DNA, 359 bp, Glycine max
  Clone ID: LIB3139-018-P1-N1-B10
ctcgcaatggttaaagttaatgtagcatgtgctgctgttggcttgacatcaagttacactccaactccattgttggaatctggtttgcaaaaagacagagggttaattgtggagtattttggaaggatgtcttacgttgctcataacgttaatcagccccaagagaaagatttgttagagggaaatttttcctttgatattaaatctcgctctagattggaaaaagtttcctctacaaaagcacaatttgttagtggaaaaaccttcaaatatgatataattggtgctggttcacattcttcaggagattttcctgaaaaggaagatcaagaaaaacccaaaaagattgataccagatt

SEQ ID NO: 40396 - DNA, 180 bp, Glycine max
  unsure at all n locations
  Clone ID: LIB3139-018-P1-N1-B11
gctatgcctagcaattccagaagcaggctcctcaagtngccgctggttcaaccacagctcaagaggagaatgatgacaacctcccacatctagatacaggccaggaattttagacagctgctgaggagaccaaggctgtttcttagattgcgcctaaacttaatattttactgtgtttta

SEQ ID NO: 40397 - DNA, 245 bp, Glycine max
  Clone ID: LIB3139-018-P1-N1-B12
aacaattttctcttcttccattttccttctgaagccaccactctaaccgtgggacgcttcgttcaattacaaaaatggacagatcaactggccgtggtggtggtggaagtttttccttttattatcttttttcttctttaattttttcctttttattttactctttttttttttatttttttccccttttttttttcttttttttttatatctattttctctcttcttttttcattttttatttt

SEQ ID NO: 40398 - DNA, 364 bp, Glycine max
  Clone ID: LIB3139-018-P1-N1-B3
gctcaaccctagtaagccgcaatggtgaagtactcaagggagcctgacaatccaactaagtcttgcaaggctagaggcgccgaccttagggttcattttaagaacacaagggaaactgcctttgcaatcaggaagttgcccttggtcaaggctaaaaggtacttggaagatgttcttgcccacaagcaggcaattccattcagacgtttttgtcgaggtgttggaaggacagcccaggctaagaatagacactctaatggccaaggacggtggcctgtcaagtcagcaaaattcattcttgatttgctcaaaaatgctgagagcaatgctgaagtgaaaggtttggatgttgatgcactgtaca

SEQ ID NO: 40399 - DNA, 318 bp, Glycine max
  Clone ID: LIB3139-018-P1-N1-B4
cattgccagggttggaaagacctctttgatgaatcagtgtcctcacgcggcgagcgtcgcactttctcaccgcttttctgattcgctttgattcattataatgatttattataattatattagtgcatctgtaaagatgattagatttgtgtttgtggttaatttgatgatatttttttatagctttttatttttataattttatatgtcctttattttttttattttatttggaatttagttctgtgtggaccttagctaactgggtagatacgtgcacaagaagtttagtcagcaatataaggctaccattggggc

SEQ ID NO: 40400 - DNA, 358 bp, Glycine max
  Clone ID: LIB3139-018-P1-N1-B5
gcacgggtcagtttaaacgacgccgcgctgatcaaggagtccttacgtaaacgacgacggtgtcagacaaacggtgccggttggtggtgccgccacgctattacgctaatcgtatccatcaccctcatcaaaacccctcctttctcttaatttagaaaccctaattcagaagaaaaaagtcaccttctccagaatttgcgcggtaatggcatcttcttcagactcatggatgaaggaatataatgaagctgtgaaacttgctggggggtcactggcatgatttctgaacgtagttcattccctgcatttgtgccagaaacccagcgacatgcatttgctataagaaggaagatcacga

SEQ ID NO: 40401 - DNA, 363 bp, Glycine max
  Clone ID: LIB3139-018-P1-N1-B6
gagaacacgtgggacctttcaatcttggaaatcccggagaatttaccatgcttgaacttgccaaggtggttcaagaaacaatagaccctgatgctaggatagagtacaggcccaacacagaggatgacccgcacaagagaaagcctgatataagtagggctaaggatcaacttggctgggaacccaaggttgacctgcgcaagggcctcccactaatggtttctgacttccggcaacgcatttttggtgaccagaaggaaaaggcatccgtagcctaattctagcatgtcatgtatcttagagccagaaagagaaaaaataatagttcgaggataaccctggcccgcaaaggcccattagtcg

SEQ ID NO: 40402 - DNA, 360 bp, Glycine max
  Clone ID: LIB3139-018-P1-N1-B7
cagaatcagaatcagaagaagcgagcaaagatgtcgggtcgtggaaagggaggcaagggtttgggtaagggaggagccaagaggcacaggaaggtgctccgcgataacatccagggaatcacaaaacccgccattcgccgtttggctcgcagaggcggcgtcaagagaatcagtggcctcatctatgaagaaacccgcggcgtccttaagatcttcctcgagaacgttattcgcgacgctgttacctacaccgagcatgctaggaggaagactgttaccgctatggatgttgtttatgctctcaagaggcagggcaggactctctatggtttcggtggttaaattttatgggtttttatt

SEQ ID NO: 40403 - DNA, 359 bp, Glycine max
  Clone ID: LIB3139-018-P1-N1-B8
caagattgaaagcagagcgtgctgcagtagaaagagcaactgcagaggctcaagaccaagccatggaaaaattaaagaatgaaaggactgcatttgagtccagagaacagttagagagatctgtatctgacaagttttgtagaagacaagactcttcatcctccgatatgctggatccacagtttcagaacttaagctcttccacaggttccagacatccatattcactttatggtgctgcctctttttctgagagatcagaaagagaaggtgaatcagctcagaggtgtagagctagactggagaggcatcgccgaacagctgagcgtgcagcgaaagctttggcagaaaagaacatg

SEQ ID NO: 40404 - DNA, 360 bp, Glycine max
  Clone ID: LIB3139-018-P1-N1-B9
cctgcactgtgtttctgccaggaatatactaaatccagagcaaccttttatggtacctctgatggctatgggactccaaccggagcttgtggctttggtgaatatggaagagcgatgaattggtatgatggaagagtcgcaggggtgtctgatctatggaggaatggagctggctgtggaacatgttatcaggtaaggtgcctagtaccagaattatgtgatacgaatggagcatacctggtggcaacagaccaaggttatggagacagaacagactttgtcatgagcccacgcgccttcttgaaattgggacgtgatgaatattcatctgaagagcttaagaaatacggcacagtggat

SEQ ID NO: 40405 - DNA, 364 bp, Glycine max
  unsure at all n locations
  Clone ID: LIB3139-018-P1-N1-C1
aagacatggacgacgacgacgacgagtctcaggaggacggagactacgaagaagaagacgacgacgttttggccgacgacgaagaaaacgagccctctccctccacggctcttgccgtcaccgtcgccgtccccggttcctccgtctccaacggcggtgccgctccaatttcgacgcccaccgncaccaccatcgtcgtcgcagactcctccgatccgaagcggcggcgcctcgagccagtcgaggagaaaaagccgccgccgacgccggacgactcgcggcggctgtttcagcggctgtggaccgacgaggacgagatcgagctcttgcaaggcttcctagactacacctcgcagcgaggatc

SEQ ID NO: 40406 - DNA, 356 bp, Glycine max
  Clone ID: LIB3139-018-P1-N1-C10
tgggtgtccatatttgtatgctatggtgcatgatggttcagtgtctacaataccaggtgattttgtcattggtgttaagttgacaaccataaacaatatgtgtgcatatgggctcaatcctggtatttcaggttctcgtcttttgggcaccattcctcagtccatttcacagcaaactgtttggaatcaaatggcaacagtgagaacaccattgaattttgattctagcaagcagagcttttgtcaattttctattgaccttctcggtggaggaattttagtggacaaaactggagattggatcacacttatacaaaattctccaattagtaacttgttgagagttgctgcttgga

SEQ ID NO: 40407 - DNA, 359 bp, Glycine max
  Clone ID: LIB3139-018-P1-N1-C11
atctcagcttgttagcactttctttttcttcatttcattatttttctcaaaatgtcaactttcatgttgaaaatcttccttctaatttccatctttcaaatctctttcgccactaggaggttgaatgagttagttcaggaccaaactcagcttcttcgttaccacaatggccctcttctctctggcaaaatctccattaacctcatttggtacggccacttcaaaccttcccagaaggcaatagtctccgatttcatcacctcgctgtcaccctcatcccctcacagcacccaaccatccgtcgccacgtggtggaaaaccacagaaaaatactaccaccacctcagtaatactaaaaa

SEQ ID NO: 40408 - DNA, 358 bp, Glycine max
  Clone ID: LIB3139-018-P1-N1-C12
gaaaggaggattctgaatatggatccgggtatggtagaaaacaagaagatgaatttgggtccgggtatggtggaaggaaggaggagtctgaatatggatctgggcatggggggagcaggcttggctatgaatatggatcccttggtcaggggtaagaaggacttggaagatgttcttgcccacaatcgagcaatgccattcagacctttttgtcgaggaggtggaaggacaggccaggctaagagttgacactctaatggccatggacggtggcctgtcaagtcagcaaaattcattcttgatttgctcaaaaatgctgagagcaatgcttaaatgaaaggtttggatgttgattcac

SEQ ID NO: 40409 - DNA, 359 bp, Glycine max
  Clone ID: LIB3139-018-P1-N1-C2
gtggagatattttgttggagatctcgtctttgaagtttctaagatgacttgtgcctacattaaatgtacagtctctttcttcatagcatttggaaatttggctgatgacaccatcaattttgaggcttttccccacaagctggtgcagtttggagagattcaggaaaaagttgtgttgaaattctcacaagaggaatttcttacagcttggtcaactcaggtgcgtcccgcaacgactctgttggctgatgggtgcccatatttgtatgctatggtgcatgatagttcagtgtctacaataccaggtgattttgtcattggtgttaagttgacaaccataaacaatatgtgtgcatatg

SEQ ID NO: 40410 - DNA, 195 bp, Glycine max
  Clone ID: LIB3139-018-P1-N1-C3
caaggagcaggcaaagcttttccaaacaagattgtttttgatgataagcttgtgttggctaacacacaagaattctttgatggaaattttccagtggattcttggttaccaatttttgtgaattgtctttatcctgtaagtcaattaccttcagaagctgtcgttgtaaatgtcacatgtggtagtggacgtgtg

SEQ ID NO: 40411 - DNA, 243 bp, Glycine max
  Clone ID: LIB3139-018-P1-N1-C7
ccttaactaaatcaacacacctaaattaaggttcgagcatttagatctgttgcatatccactataaaccttttcttttaaagactaattatttttcatattccattttttatttttttcattttctcattattttttcttttttatctttattatttaatttaaatatattttaaaatattttacttttaatctttataatatttttatacaatataatattttctttatcttatttttctta

SEQ ID NO: 40412 - DNA, 385 bp, Glycine max
  Clone ID: LIB3139-018-P1-N1-C8
gagaatgtagaaagagaagagaataataatttgtcgggaaaattcaagttccaatcggaatcggaatcggaatctgaaatgagtagtagggtttggttttttttatttttttctttttttctttttttttctttttttctttttttttttttctcactttttcttttttttttttttttttccttttattttatttttatattttttttttttttcatttttttttttttttatatttcttttttttttttttatttttaaatttattagaggtggggtggggtttctttatatttcttttttttttcttttttttttattttttattttttttattttttttttattctctttcttttttttactttttttctatttttttttt

SEQ ID NO: 40413 - DNA, 359 bp, Glycine max
  Clone ID: LIB3139-018-P1-N1-C9
cccaagaacacagttggaggaaccattctgcgtagtgatctattggcaaattttttgacagagggcaattttagagcaagtgttgatttgcagcgcactcatcgtattaaaggaatgattaaaatggtggccacagttggtattcctgagaatacaggtatagcattggcctgtgctatgaatagttcttttagggggcgcgccagttctgatatttacaccatctgctctcaagactgtgaattatggaatcctgcttgcacaaaagcaatgactatgtcatttaatccaaacccgtgttctgatgcatggagtttggaatttctgaagcgtaccggatttcattgtgatatcatttg

SEQ ID NO: 40414 - DNA, 317 bp, Glycine max
  Clone ID: LIB3139-018-P1-N1-D1
aaacacattgaataatgtgcaacaaaataggactgcattccaacttcggtctctgctaatgtttgccttatcagataattcactcgagaatttttctatacgtgcattatgttccactggttataagttactcagggtgttagacttgcaagatgcgcctttggaggtttttcctgctgaaattggcagtctataccttctcaagtatctgagtttgaagaatacaaaggtgaaaagcattccaggttccattaagaagctgcagcagttggagacattagatcttaaacacactcatgtcacttgattggcaggtg

SEQ ID NO: 40415 - DNA, 358 bp, Glycine max
  Clone ID: LIB3139-018-P1-N1-D10
attcctcagtccatttcacagcaaactgtttggaatcaaatggcaacagtgagaacaccattgaattttgattctagcaagcagagcttttgtcaattttctattgaccttctcggtggaggaattttagtggacaaaactggagattggatcacacttatacaaaattctccaattagtaacttgttgagagttgctgcttggaagaaaggttgtttaatggtcaagattgtgatgtctgggaatgcagcagtcaaaaggagtgattgggcctcattggtacaagtgtttttaacaaacagcaacagtacagagcattttgatgcatgtaagtggacaaaatcagaaccacattcct

SEQ ID NO: 40416 - DNA, 360 bp, Glycine max
  Clone ID: LIB3139-018-P1-N1-D11
atttcttaactcatttcacagcaaactgtctggggggaaatgtcaacagggagaacaccatagaattttgattctagcaagcagagcttttgtcaattatctattgaccttatcggacgaggaattttagtgcacaaaactggagattgcatcacacttatacaaaactctccaataagtaacttgctgacagtcgctcgctactaagaaagagttgcttaatggtcaacattgtgatgtctgataatgcagcagataaaaggagtgagtgttcctcattggtacaagtgtgtataacaaacatctacagtacagagcatggtgaggcatgtaagtggacaaattcagaaccacattcct

SEQ ID NO: 40417 - DNA, 357 bp, Glycine max
  Clone ID: LIB3139-018-P1-N1-D12
caatttgtaagaaagatgtttggagagttgaatgtggaatcccttctggatttccgctcacagttatttgcaatagcatttttaatgagatgctcattagatatagctatgaaaaattactgcgccaggctagagctccaagcatgtttttacaatccttcaaaaattttgtttctttgtgtgtgtatggtgatgataacttaattagtgttcatgaatatgtcaagccttactttagtggttctaaattgaaaagctttctagctggtcataatatcaccattactgatggtattgacaaaactagtgcaactttgcaatttagaaagttagcagattgtgattttctcaagagaa

SEQ ID NO: 40418 - DNA, 215 bp, Glycine max
  Clone ID: LIB3139-018-P1-N1-D2
aactatttctgcttcttacaccaaagtggcatcagagaaccaaaaatggggtgtggcaatttattcttcacaattctgataactttctcagtggcactcataacatacaatatcataatgtcaggcaatgcccctctcaagcaggactttccggggccctcacgccctttcatcaaggtggatcctctcatgaagatgccactgcacagaaaatc

SEQ ID NO: 40419 - DNA, 362 bp, Glycine max
  Clone ID: LIB3139-018-P1-N1-D4
ctctacaaaagcacaatttgttagtggaaaaaccttcaaatatgatataattggtgctggttcacattcttcaggagattttcctgaaaaggaagatcaagaaaaacccaaaaagattgataccagattgagacaaagaatagatcctcaatacaatgaggttcaggctcagatggaaacaaatttgtttaaattgtctcttgatgatgttgaaactcctaaaggttctatgttggatcttaaaatttctcaatctaaaattgcacttcccaagaacacagttggaggaaccattctgcgtagtgatctattggcaaattttttgacagagggcaattttagagcaagtgttgatttgcagc

SEQ ID NO: 40420 - DNA, 359 bp, Glycine max
  Clone ID: LIB3139-018-P1-N1-D5
ctctacaatatcacagtgttggtaatgtaaaaaccgtggggtttatataattggtgctggttcacattcttcaggagattttcctgaaaaggaagatcaagaaaaacccaaaaagattgataccagattgagacaaagaatagatcctcaatacaatgaggttcaggctcagatggaaacaaatttgtttaaattgtctcttgatgatgttgaaactcctaaaggttctatgttggatcttaaaatttctcaatctaaaattgcgcttcccaagaacacagttggaggaaccattctgcgtagtgatctattggcaaattttttgacagagggcaattttagagcaagtgttgatttgc

SEQ ID NO: 40421 - DNA, 277 bp, Glycine max
  Clone ID: LIB3139-018-P1-N1-D6
gcgccgtcctcaccaaccaggacacctgcgcggagggggttactgacgccgtcggcacagtgaaggaccatatgtccagcaacctcagggacttatccgagctcgtgagcaattgtctcgcgatattctccggcgccggtgccggcgacgacttcgccggcgtccccattcagaataggaggcggttaatggaaatgcgagaggataatttcccgacatggttgagtcgacgagataggaaattgctgatcttgcctgtgtgggggatcaggcatat

SEQ ID NO: 40422 - DNA, 359 bp, Glycine max
  Clone ID: LIB3139-018-P1-N1-D7
caacaactggcagcattattgttgctgtatgtcagtggaatattattgcagtgggatttactacgctgagcttgctaaccctctccaatggccacagctcaggaaaaaacgacgccatgttgcgccacccaaaataacaacaaggtcgcactcgcagcacctccaacttcttcttcttctgcgccacaacaacaatcacaatcacaacaacggccctctgttgccaccttcatttccgccatcgattctcctcccaaaaccgcttctgccaaaggtatcactgtcatggtgagagctcaaaccagccaccctttggatccactaactgctgctgaaatatcagtagctgtagcgaccgt

SEQ ID NO: 40423 - DNA, 360 bp, Glycine max
  Clone ID: LIB3139-018-P1-N1-D8
gaaaacccaatcaacagatcaaattcctccttttgtttcttatggtgctaagaaaacccaatcaacagatcaagttcctccttttttttatggtgctaagaaaacccaatcaacagatcaagttcctatcttttatggtgctaagaaaactcaatcaacagatcaagttcctatcttttatggtgctaagaaaatccaatcaacagatcaaactcctctttttttatatggtgctaagaaaacccaatccgaagatcaagttcctattttttggtacggtattaagaaaactcaatccgaagatcaacctcctctttggtacggtgttaagaaaacctatgttgcaaaaagaagtctttc

SEQ ID NO: 40424 - DNA, 351 bp, Glycine max
  Clone ID: LIB3139-018-P1-N1-D9
gacttaaatacttcttatgcaactatggtgaggctaagagttggtgcatcactaatcaaaatgttggccatattccacaaagcttttgctcatccacctgaagagctgaacagtcctgcatcttacaaaggttccaagaagcctaaggttcctgaggaaactctcaaagatttcctttcccaccatcctcacaacacttgctccatgagctttggtgaagctgctgcgctagcttatgttcctcctgatcaatccttctgtcgtcatcaaaggttgctttgagggactgataacatatactgtctcttcttgcggagcttgaacaatttgtccctactcaacaagccatat

SEQ ID NO: 40425 - DNA, 357 bp, Glycine max
  Clone ID: LIB3139-018-P1-N1-E11
cgatattctgtgttgcgattatgctagttttgatggtttgattaccaagcaagttatgagcaagatggcagaaatgataaacagtctttgtggtggtgatggaaaattgatgcgtgaaaggacacacctgctgttggcttgttgttcaaggatggcaatttgtaagaaagatatttggagagttgaatgtggaatcccttctggatttccgctcacagttatttgcaatagcatttttaatgagatgctcattagatatagctatgaaaaattactgcgccaggctaaagctccaagtatgtttttacaatccttcaaaaattttgtttctttgtgtgtgtatggtgatgataactt

SEQ ID NO: 40426 - DNA, 353 bp, Glycine max
  Clone ID: LIB3139-018-P1-N1-E12
tgaatcgtagcgaatcggagtgggcctttcagcagttcctacaggaagctgctgcttcttcttcctctaattctgatcatcatcatcttaaattcaaaaacgaattcaacatcaacatccctgttactactacttctattcaaaatattaatgttgattcccaagactaccatgctattcttaagaccaagcttaatctcgcatgcgctgctgttgctatgactcggggatctttggtcaaatctcaaaaccctgccactttctctgacagtggaccacaagcatctaattcttctgaagatggattgcaagctaccttaaaaggatctggcccttctggaaatgatccctct

SEQ ID NO: 40427 - DNA, 351 bp, Glycine max
  Clone ID: LIB3139-018-P1-N1-E2
acacaacacatcacaacacaattacacacacgaatggccttagttaggcattgctttgcgatggaaaaaatggaactggcagagacacctctacctttgctttcactaaaccacgtttcttttgtatgtaagagtgtgagtgagtcagtgaaattctatgaggatgtccttggatttttgctcatcaagaggccatcttctttcaaatttgaaggggcctggttattcaattatggcattggcattcacctgttggagtcagagagggttccggttaaataaagagagatcaactccaaagaaaatcatatattgttttaatgctcagacatgaaagatataatgcttaaa

SEQ ID NO: 40428 - DNA, 272 bp, Glycine max
  Clone ID: LIB3139-018-P1-N1-E3
aaggaatggcaactggatctaccttgtgacaaaattcctagtgtcttgactacaactgatgagagattggtaggcacagaacatgagggatatgatccttttcttggtggaattcaaaaatatgccactcccatgatgcccctagatgaagaaattctttctaagggtgcacaagatatggttgaggaatggtttgattgtgttgatgaggaggattcctttgaggaagtttctttaagtgcagcacttaatggggttgagggtttggacta

SEQ ID NO: 40429 - DNA, 350 bp, Glycine max
  Clone ID: LIB3139-018-P1-N1-E4
actgcactaagttgctgcagctcttcctttttctttgtaacatgtacaggctgcctaactgtttatttctggaatgattaccgagtcctatactcccatgccatatcactgtatgaaccagaatgtttatttacattgtttgttgggttctgcctcagtcattgcaagtgttgcttttttcagaaatccagttgctccagaggtgcagggcaatggaagaggaaatgagaggatagtagacctacatgggttgcacgcaagtgaagccattcatgtgctgaaacaatgagttgagtgtgctgaaaagcactgccatagctgccgagcagcgtttgcaggtttatattctt

SEQ ID NO: 40430 - DNA, 167 bp, Glycine max
  Clone ID: LIB3139-018-P1-N1-E5
ccgacattaatttttgtacacacacacagattcccgggtgtcgaatttcgatgctgtgatcagatccacaacacttcttcatccatgacgcttggttcttcaggatccagtgttgaggctccaaggaactttacattgctggtggagcttgggatgggtgataacgg

SEQ ID NO: 40431 - DNA, 206 bp, Glycine max
  Clone ID: LIB3139-018-P1-N1-E7
cgcatattgacttaatcctggtatttcagggggtggctttttgggcaccattccttactccattttacagcaaactgtttccaatcacatgacaacagtgccaacaccattgaactacgattctagcaagcaacgcttctgctaaaactctatctaactcatcgcaagtggctctttcttgagcaacactgtttctaccactcact

SEQ ID NO: 40432 - DNA, 353 bp, Glycine max
  Clone ID: LIB3139-018-P1-N1-E8
aaaattgtctcttcgtatgtgtaatacaaggcaggcttttgaaaactgttctatccaaatctcaaatgcaatgccatatcttgaggaaatgagcattgactattgcaatgatttgattacattacctgatggactgtgtgagattagcccattgaagaaacttagtatcactaactgccacaaactttctgcactgccacaaggtattggaaaactggagaatctggaagtgctaaggctatgttcctgctctgatttgctagagatgccaaattcttttgaagggcttaacaagctaagctgtcttgacatctcagactgtgtaagtcttaccaaattaccagatgatattg

SEQ ID NO: 40433 - DNA, 359 bp, Glycine max
  Clone ID: LIB3139-018-P1-N1-E9
gagaacaccattgaattttgattctagcaagcagagcttttgtcaattttctattgaccttctcggtggaggaattttagtggacaaaactggagattggatcacacttatacaaaattctccaattagtaacttgttgagagttgctgcttggaagaaaggttgtttaatggtcaagattgtgatgtctgggaatgcagcagtcaaaaggagtgattgggcctcattggtacaagtgtttttaacaaacagcaacagtacagagcattttgatgcatgtaagtggacaaaatcagaaccacattcctgggaattaatcttcccaatagaggtatgtggtcctaataatggttttgaaa

SEQ ID NO: 40434 - DNA, 340 bp, Glycine max
  Clone ID: LIB3139-018-P1-N1-F1
gttcactcacgaagaggtggctaacatggtcgtgaggtcacctgggttgttgactcttagtgtggagaagaatttgaggcccaaggtggagtttttcttgagggagatgaatggggatgttgctgagctcaagaggtttccgcagtatttttcttttagcttggaacggaggattaagccgcggtacgggatgctgagacgggttggcgtgtcgatggatttggaagatatgttgaaggttagtgatggcgggtttaaggctaggttgcttgatttgaggtttaagaaacttgagataggagtaggacaacatttgtagtagtaggttaccgaggagtag

SEQ ID NO: 40435 - DNA, 355 bp, Glycine max
  Clone ID: LIB3139-018-P1-N1-F10
ggaatacattacctccttggattttactcaaggggggcaccacttatgaggaaagagtcaagaatgtccactccttattgttgcaatgctaagaagctcaaatccagggatgttacaacagattgtgagcttggaagtaatgagaaatttgggttggagaagaaactatgtatacaagacaggattgagttgggtcggttgtttcagagtgcagtgagttcccattactgggaacttgctgaaagtttgattttggttgcggagccacagactcttaatgatgccttgtgtatcacactggatttcttctggttcttgagcacatagctagagcttaatggattaatgggattta

SEQ ID NO: 40436 - DNA, 318 bp, Glycine max
  Clone ID: LIB3139-018-P1-N1-F11
ctaaaaggtatcaacgattacataaattaatttttgaagaggatggattgcctaatggagctgaagtagcttattatgcacgtggacagaaattgcttgagggtatcaaaacatgctctggaattgtctgtcgatgctgcaacactgagatcagcccctcacaatttgaggtccatgcaggctgggcttctcgcaggaaaccttatgcattcatctacacgtcaaatggggtgtcactccatgagttagcgatatttctcttaaaagatcacaaatgcactacaaagcaaaatgattatgtatgtgttggttggtggg

SEQ ID NO: 40437 - DNA, 283 bp, Glycine max
  Clone ID: LIB3139-018-P1-N1-F12
gtacccattccaaataactcaacaactcttacagctacataggaagactattttgcattgatgatggccaaattggggattgaaatttgattgttttggggacaactgcatatacatcaaagagtgatgtctccctactttttggtgtctttttgctaattcatttgctataagtcatatcttgttttaaattatgaatggagaaaaaattatgatcttttatgacaattttatcttctcaatgctgattgtccttgttaatgtaagttgtcttattatgtct

SEQ ID NO: 40438 - DNA, 360 bp, Glycine max
  Clone ID: LIB3139-018-P1-N1-F2
gttttaaatccacaaaatccttttgtgttaaataggtggatgggaaaactgactttcccccagggtacttcccgaagtgttaagagaatgcctctttctatagggggaggagctggtgcaaagaatgctattctcatgaatatgccaaatgctgttctttcaatgtggagatattttgttggagatctcgtctttgaagtttctaagatgacttctccctaccttaaatgtacagtctctttcttcatagcatttggaaatttggctgatgacaccatcaattttgaggcttttccccacaagctggtgcagtttggagagattcaggaaaaagttgtattgaaattttcacaagaggaa

SEQ ID NO: 40439 - DNA, 358 bp, Glycine max
  Clone ID: LIB3139-018-P1-N1-F3
caaaaagactgcgtaccggcgttaacctaaactaagagagagagaggtcgtagactgccactcgaatcgcttactcatcactcttatactgggacggaaagtgaacaatagatatggtctgaatcgagcttattggatgcacataccacaaagctcttattgtgataaataggatatctgggagaacagctcgtctttcaaggccctaagctgactgctacgatacatgaaaatttcaatcggtttcgtcatagcatctacaaatgggggtgacgacaccatcaattttgaggcttttccatacaagctggttcactttggagagattcaagaaaaagttgtattgtaactttcacaa

SEQ ID NO: 40440 - DNA, 249 bp, Glycine max
  Clone ID: LIB3139-018-P1-N1-F7
gaaagaccgcacctgctgcatgcttggagagcgagggttataatttgtccgaaagctgcttgtagagcagcaaatttgatctaccatgaatcaacatcatcagtgcccccttttttcctgcggcataatcaccaacataacttacccatttcgattaaagggccaccctaaaaacttccccgacaataggtatcagctagcttgtgaaaacaatgttactgatgtacacttgtactctggaaaatatta

SEQ ID NO: 40441 - DNA, 360 bp, Glycine max
  Clone ID: LIB3139-018-P1-N1-F8
tgatgatacacagtacccaaaaacattcttctataaagaagaccttcatccaggcaaaacaatgaaagtacaattcaccaagcgtccctatgcacaaccttatggtgtatatacatggttaacggatattaaagacacctctaaagaaggatatagttttgaagagatatgcatcaagaaagaagcgtttgagggagaagagaagttttgtgcaaaatccttgggaacagtaattggttttgccatttcaaagctgggaaagaacattcaagtactttcaagttcctttgtcaataagcaagagcaatacactgtggaaggagtgcagaatcttggagacaaagcagtgatgtgtcatgg

SEQ ID NO: 40442 - DNA, 360 bp, Glycine max
  Clone ID: LIB3139-018-P1-N1-F9
aaaggagaaggtagcagtgttgttttctcaagagaagcaccacttatgaggaaagagtcaagaatgtccactccttattgttgcaatgctaagaagctcaaatccagggatgttacaacagattgtgagcttggaagtaatgagaaatttgggttggagaagaaactatgtagacaagacaggattgagttgggtcggttgtttcagagtgcagtgagttcccatgactgggaacttgctgaaagtttgattttggttgctgatccacagacgctcaatgatgccttgtgtatcacactggattccatctggttcttgagcacagagctagagcttaatggaataatgggatttatcaag

SEQ ID NO: 40443 - DNA, 363 bp, Glycine max
  Clone ID: LIB3139-018-P1-N1-G1
ctctctctcatacacaaagaggccatgggttacttggacgatgatcatgatcatgacacattccacgaccacaacgacttcaacagaaggatactcatcatggctatagtttccttatcagtggtattggttcttgtctttacacttcacctctacgcaaggtttttcctccgccgcagagccgccatataccaactcagcctcaacgtggcacacgcacacgccgagccagacaacaacacagggctcgaccctgtcctcatcaccaccctccccaccttccccttcaaacaaccaaacaacgattctgtggagtgtaccgtgtgcttgagcgttctagaagatggagaacaagtgaggctt

SEQ ID NO: 40444 - DNA, 358 bp, Glycine max
  Clone ID: LIB3139-018-P1-N1-G10
agaagttggtggatgttgtagctactcacacggtggagaccaaatattattgattagacattcacaacttacaatcttattgtgggctaataaggggcgaacactcgcccacagtctattacatggcgagagctacactcgtcacatccaaaactctaacaagcactgatatctttcactacagtaacttccaacaatctaggtttggcccaattcctagtggtccaaccactcaaatcgattggtcaatcaaacatgctgggtcaataaggacaaacttgacagcgagtggaccaagggcaaatccacaaggctcctaccactatggattaataaacattagtaggacaattacctt

SEQ ID NO: 40445 - DNA, 358 bp, Glycine max
  Clone ID: LIB3139-018-P1-N1-G11
atcggatatcacaagcttagctccatcttcaccttcaaggtcaccaaagcgccctgtgtactatgtgcaaagtccttcaagggattctcatgatggggacaagtcatcttcaatgcaggcaactccaatatcaaacagtcctatggagtctccctcacatccttcgtttgggcgtcactcgaggaactcttctgcgagccgcttttcggggattttccggtcatcttctggaaggaaagggagtaggaagaggaatgataaggggtggcctgagtgtgatgtaattctggaagaagggtcttatcatgagtttcaggacaagggtttcacaaggcgcttccaggctttgattgctgtc

SEQ ID NO: 40446 - DNA, 359 bp, Glycine max
  Clone ID: LIB3139-018-P1-N1-G12
ctacaacactggatggccttcaaaattaacagcttgtgtcaatccaagcttagactatggattcaaaggagctgcaattgcaatggcatcctattgaggagaactccaatacctagccaatcctgttaccactcatgtccagagcgctgagcaacataaccaacatgtgaactctttaggcttaatttcctctagaaagacagctgtagcaatagatgtattaaagctcatgtcatacactttcttagttgctttacagccaagccattgatttgaggcatttggaggaaaacttgaagaacactgttaagaataccgttagtcaagtggccaaaagagttctcacagctggcatcaat

SEQ ID NO: 40447 - DNA, 361 bp, Glycine max
  Clone ID: LIB3139-018-P1-N1-G2
ggctctccagaaccctcgtcaccgcctcaccattttgaggatggagctggagatccagaagtttttgaataatgctgatcagctgcattttgagtttcatcatttcccttcttcctatctccgactggctgcacaccgtgttgctcaacactacaacatgcaaacaatggttcaagataatggcttagatggccagggaagtaaaattctggttaggaagttacctgaaagcaagtaccctgtagttcgattatccgaaatacctgctaagcagttggaaaatgataaatctgagcagaaaaaaattgttattagacctaggcctaataaaaacagtttgaatgatgctaacggagttggg

SEQ ID NO: 40448 - DNA, 362 bp, Glycine max
  Clone ID: LIB3139-018-P1-N1-G4
tagagaagcagtgatagcgagaggggcagtgcggggacgtcgagaacgaggcgcaggcacgtagatactggcagcagcagttcggcgaggccagtagagtgctcgccataacccgccagcaggctgaaagcacgccattggttcttgccttaatcgacggcgacggcgctatattcacggagggcctgctgagggcgggcgctgagggcgggcgctgagggcggctcagacgcggcacacaagcttcagagtgagataaggaaccatatattggacgtttatggggggggaggcgggtgactggtccgtcatggtgcatatctatgccaacctagagggtttaagcaggaagctagcttccg

SEQ ID NO: 40449 - DNA, 363 bp, Glycine max
  Clone ID: LIB3139-018-P1-N1-G5
cacaagctggtgcagtttggagagattcaggaaaaagttgtgttgaaattttcacaagaggaatttcttacagcttggtcaactcaggtgcgtcccgcaacgactctgttggctgatgggtgcccatatttgtatgctatggtgcatgatagttcagtgtctacaataccaggtgattttgtcattggtgttaagttgacaaccataaacaatatgtgtggcatatgggctcaatcctggtatttcaggttctcgacttttgggcaccattcctcagtccatttcacagcaaactgtttggaatcaaatggcaacagtgagaacaccattgaattttgattctagcaagcagagcttttgtca

SEQ ID NO: 40450 - DNA, 358 bp, Glycine max
  Clone ID: LIB3139-018-P1-N1-G7
atctagggctggaaatgctggaagcaagccccctggaagtcacaccagaggtggaaaggcgtgttaatgaagggtttaaggcatggatgggtccatcccttctttcttctgatgaagaagacgaacctaacagctatgatgaggcacctcattcagcacgtactaactcaaacaggcaaagactctgaactggataaattcagtgtgaagagcctcgcatcatcttttccagcctttcatgccttgaataatgctgtatggtttggaaatcagttttggacaaaaaatgttgacacgtatcatatgacaaaaacaaatgttgattaaagaagtatggatttgatgctcaactttgaac

SEQ ID NO: 40451 - DNA, 363 bp, Glycine max
  Clone ID: LIB3139-018-P1-N1-G8
aactaattaagcaacacacacttcaatttatcgggagtggcctccgttcagtgccacaaaacctgcaaagtgagctgccaacaggaaaaccagcacgcctcgtttgggcagaaagtttctgacttgttcaaagggcatcaacataatgaccacagctccaattatgccacccaaaccaaagtgctttcccagtcagggtcagggttaggccccttcaccaccaaaactcaaacacaatgcggttgcccccaaacacatctcagtaccactcatggctccaacacaaaaggccatggccatggccaagggagaattaagagggagcacaagagagggatgctgcagaacatcaaggatcgctta

SEQ ID NO: 40452 - DNA, 361 bp, Glycine max
  Clone ID: LIB3139-018-P1-N1-G9
aaaaatttgtatgtatataaaaaaataaacacggagacattttttatatgatgaataatttatttgagctgtgcttccatcagggaaaccagcacgcctcgtttgggcagaaagtttctgacttgctcaaagggcatcaacataatgaccacagctccaattatgccacccaaaccaaagtgctttcccagtcagggtcagggttaggccccttcaccaccaaaactcaaacacaatgcggttgcccccaaacacatcgcggggccgcggagggctccaacacaaaaggccatggccatggccaagggagaattaagagggagcacaagagagggatgctgctgaacatcaaggatcgctt

SEQ ID NO: 40453 - DNA, 303 bp, Glycine max
  Clone ID: LIB3139-018-P1-N1-H1
ctcgagcctaatcggctcgagttcggcaatatggcggaaaatggttcaattgagctgaacaagtttgtgttgttttgtttggtgctgctaatacaagaggcctgttttgaactcatccttgtagagcgacacgctgatgtataatgaaggacttgcaagctcgcattcagatacctaagacttggccgatgcgcctccttctaccactccgctcttaaatcgcgcatggtgccagatcccacaggtattgacacatcgctagttgacttagactctaacgtttttgcgaaggtgccagttttc

SEQ ID NO: 40454 - DNA, 359 bp, Glycine max
  Clone ID: LIB3139-018-P1-N1-H10
gcccgaatagctcatgatcagcattttctttatcgttaagttttttctcctcctcactagtctttgaatttcttctgtccgggtattaggaagaaaaaaaaaggctttagagtttagtggtgaaggtagaggatcttgagattaataaataaagggtgatatttatggctgatgcatttgatgaagagtgtgattatctcttcaaggctgttttgatcggagactctggagttgggaaatcaaatatgctctcaaggtttgcaaaagatgaattccgcttggattccaaacccaccataggagttgaattcgcttaccggaacatcagggttggagacaaactcatcaaagctcaaata

SEQ ID NO: 40455 - DNA, 215 bp, Glycine max
  Clone ID: LIB3139-018-P1-N1-H11
gtctttatagctcatgagcagcattgcatttgtggggaatttttatcttgtgcgcactactctttaatattatttcttactaattttaggaagaaaaaaataggctttagactttatgtgctgatggttgagtatcttgacattcatttattctggtttatactaatttctgttgcattttattaaaagtgttgatttttttttttaggcttttt

SEQ ID NO: 40456 - DNA, 356 bp, Glycine max
  Clone ID: LIB3139-018-P1-N1-H2
gtttttgttcccactttcctaagtttccttctcgctcccgtctctgaaatttcgagggtttcatcgttgctgaatcaacaattcggaaccagttagcaatgttcagattctggggatcacaagagcaacaatcacaggatggttcttcgcagtcacagtcgtggtatccgccgtcggtggtgagttcaccaacttcgtcgaggcctgttacaccgactgcatcttcttcttcattatcacagaggccttcgtctcatgttccaccttctgaagctgctgcagttattgccgttttgaaggacaagagtgttgatgagttgcggaagcttttatctgacaaagaagcgtatcaacag

SEQ ID NO: 40457 - DNA, 354 bp, Glycine max
  Clone ID: LIB3139-018-P1-N1-H3
attgttgttctttctgtgtttggttgctattctctgctcctgttttgatagtgttgtagttgcagctccaaacgtcgttttataagttgcctcttagtacctgatgcaattgatggacacgtgctctaataccaatgttgtgcatgacgacaacttcataagtaatcttggaaggacttttagtgagtcattacacattcaagatgctcagaaatctttacttgcttctgaggggagtgacatctataatgtgaatgaggaaaaaatatgtaaagcaatgaaagatcaagcgacaaaagtaaatatggcgtgcttgaaaaaatctgcaacctttccaattcctaataccatgtt

SEQ ID NO: 40458 - DNA, 362 bp, Glycine max
  Clone ID: LIB3139-018-P1-N1-H4
gacaaacctaagacgcgctgcttcactattctccctatggagtttaatcttgtggttcgtcagaagtttttaaattttgtgaggttcattatgaagaaaagggacaagcttagttgtcaagttggaatcaacccatactccatggaatggactggtttggccaatagattactgagtaagggcaacgatattctgtgttgcgattatgctagttttgatggtttgattaccaagcaagttatgagcaagatggcagaaatgataaacagtctttgtggtggtgatgaaaaattgatgcgtgaaaggacacacctgctgttggcttgttgttcaaggatggcaatttgtaagaaagatgtttg

SEQ ID NO: 40459 - DNA, 319 bp, Glycine max
  unsure at all n locations
  Clone ID: LIB3139-018-P1-N1-H5
accataccttttacgcgctgctnaactattctccctatggagttaaatcttgggggtcgccagaagttttaaaatcttgtgagcgggattatgaagaaaagggacaagcttagttgtcaagttggaatcaacccatacttcatggaaaggactggtttggccaatatattactgaggaaggtcaacaatattctgagttgcgattatgctaggtttggtgggttgactaccaagcaagttattaacatattctctcaagggatgcacaagatgaattccgcttggattccaaacccaccataaatggacacacctgctt

SEQ ID NO: 40460 - DNA, 356 bp, Glycine max
  Clone ID: LIB3139-018-P1-N1-H7
ctcgagccgaatcggctcgagctctctctccttctcgctctttcagctttgacttttgttggaaactaaggcctaatcaaaatggtgaagttcacagctgaagagctacgtcgtattatggactataagcataatatccgtaatatgtctgtcattgctcatgttgatcacggaaaatcaaccctcactgattctcttgtggctgctgctggtattattgctcaagaagttgccggtgatgtccgtatgactgatacccgtgcagatgaagctgagcgtggtattaccatcaagtctacaggtatctcactctactatgaaatgactgatgaagctctcaagagttttaagggaga

SEQ ID NO: 40461 - DNA, 347 bp, Glycine max
  Clone ID: LIB3139-018-P1-N1-H8
aatgcctctgctgctaaggacagacttgaacgcgagagcctcacagacaccagccagcttcattctcacgaccagtacataattcacattattactatcaagaccaacaacacatgcgctataaacgacagggctatcggcattactaaagaacgagtggataataacactctaactattgcaaggtctgtgaccaaggaatacatggaagccctggctgctggtgctgatgtgagcatgattggacagtttgctgatggatcctactatgcttatcttgtaactgacaaggctattgctaccacaaagcacaatgatgatgagcagtatgtctgtgagtcccatgc

SEQ ID NO: 40462 - DNA, 225 bp, Glycine max
  Clone ID: LIB3139-018-P1-N1-H9
cggttcttgcggctcgagacaaaatcagaaccgcattcctgggaattgatcttcccaatagaggtatgtggtcctaataatggttttgaaatgtggagttctgagtgggcaaatcaaacttcatggcatttgagtttccttattgacaatcccaaacagtacacagatttcgatactatctcgggaatttgtcaagattgtgaaattgctggtaatactgttatg

SEQ ID NO: 40463 - DNA, 342 bp, Glycine max
  Clone ID: LIB3139-020-P1-N1-A1
ggatggtgctgcccaagttctctccgttctaacggctgttctttctttccttggggatcttttaaataggctttccagttaaatgtgccaataatgaggaaaccattcttaatcagggtatcaacaggtttcgagcatcgttaaacttgaaggctctaacaaggaatgacaatgcagattgccttgctgaaaaaatagctgaccaattaaagaaacaaccctgcacaaataccacaggtgctaacactgtacctggcacaaagcctcagttttctaactatccagaccttttatctaagtgtgacttggctatttccaacacaagggatggaaatgtaatgc

SEQ ID NO: 40464 - DNA, 364 bp, Glycine max
  Clone ID: LIB3139-020-P1-N1-A10
ggctcgaggtgaccacaaggttcaacttgtgagggggatcaaaacattcctagattggaatatggcaaaacttggttgttctagtcgtaggaaagcaattgaggagctccttagagggcgtgattgtgccaaacaacttaggagtgtcatcaatgggagttgtgaagatggatcatcaacaaccccatcatttgctgaacaacttgtgaaggaggtgctcatgtccttcaccaactccctctcgttcttgaagaacaaccccacttctgaatcccatgatgtttccaatgttcaagtttgtgaatctcccaagtctgaagactcccaagagagcaattgcaagagctccatcattaaggaacgt

SEQ ID NO: 40465 - DNA, 364 bp, Glycine max
  Clone ID: LIB3139-020-P1-N1-A11
gcgccgacgacgggattctcgtactatcggcgacaatgtacacgtgtgcggtgaactataaacgacgtcgcgtggcggttcaagcagtgtcgtgtgaagaaagaactaaaatggcctaaacaaccacttgaccattacattacatgtttggataatcaatctccttcaaagaacgaccaccgaatttttccccttcaaccttgtacttctacacacgcaatctcatcccattttttctttttcttctcccgatatcgcgtatccttccattagaatattcctcccttcaactatttttggaatcctagggtttcacattccggatcccaatccgcggttctagctgcacttgtatttcagattt

SEQ ID NO: 40466 - DNA, 324 bp, Glycine max
  Clone ID: LIB3139-020-P1-N1-A12
ctccagcctaattccgatggatcctattctcgactgggtttatgtgatgtgcgtaatctcattgacagggttgaccttttgatcagttgtatggtttagatcgatttagaaatgtaaaacgcatgagtggatgaaagcatctacaccggtgaaattcctatgccacggggagagcatgacggagcttctacatgtcatgagatactacgatatttatgctttcaatggataataattttgacagactctaagcatctttatagcgttaaaaatgtaaacagtgtggactctcttaggaggacagcattgctttggatgatgtat

SEQ ID NO: 40467 - DNA, 264 bp, Glycine max
  Clone ID: LIB3139-020-P1-N1-A3
ttttgatttgtgaaaggaaagcaaacatggttgatcaggtccaacaccctacaatcatggacaaggttgctggtcagctccatctccgttctggtctttcatctggtattagaagttatgatggagcctaccgccacccagctatgtaccaaagaccctcttttgggaattactcgaatgctgcattgcagtttcctgtgatgcccacatgcaaagctaccatggatttgtctgctactgcaacatctgcctcacccgtctttg

SEQ ID NO: 40468 - DNA, 366 bp, Glycine max
  Clone ID: LIB3139-020-P1-N1-A4
cacgtctctctctctctctcgccatggctatggctatgcaaagcggaatcggagtctccaagatcctcatcatagcaggagcaggttacaccggcaccgtcctcatcaaaaacggaaaactctcggatttaatcggcgagcttcagttgctggtgaagggattggaaaaatctggggagcatgctgaaggtgaaggtgaatatgctgatgccatagctgctcaggtgcgtcgcctggcgaatgaagttcggcagctagcatcaaacaggccaatcacagtactgaatgggggttctgaacaaagtaatttatcatcccttgtcgttccagctgctgccttgggcgctctgggttatggctacatgt

SEQ ID NO: 40469 - DNA, 354 bp, Glycine max
  Clone ID: LIB3139-020-P1-N1-A5
aaagcattgaattcaaaaacttaagttcattccttgggtttggctttcttcctcaaaaccaaacatgtcgaacacatgcggcaactgcgactgcgctgacaagactagctgcaccaagggaaacagctatggtgttattgtagagactgagaagagttacatcgagactgttgtcatggatgttccagcagctgagcatgatgggaagtgcaagtgtggcactaactgcacttgcacggactgcacctgtggccattaaagaatatgtatgaaaatgtaattgccatgtgtttggcaatacaaatatccaaataatgtaatcttcgtatgaataaatgtgtgtgctgttatcct

SEQ ID NO: 40470 - DNA, 364 bp, Glycine max
  Clone ID: LIB3139-020-P1-N1-A6
ctccctacaacgaagacagggagggaatgaacgaacctaagaacagatctcactttatgtccttttcaattcacatacacagaccaacccctaaatctccataacacattcattctctctttctctctaactctctggataagatcttcagatacagagggaccccacttcctccattaacataataacaatatccataacttctcaataccaaaactcagaagaacccatatgatctgggttgttcccgtgatgaagacgaatcctcgtttcttttgaggactatgctttggtctgatcctcctcccctcggcgccgattctgggtgtgagccaaaaagctttcttttttttcgctccattac

SEQ ID NO: 40471 - DNA, 364 bp, Glycine max
  Clone ID: LIB3139-020-P1-N1-A7
aggttgcattcctgtcgttatccatagagacttaaaaagcagcaatattcttctcgacaagcacatgagagccaaggtttcagattttggtctttcaaaacttgctgttgatggagtttcccatgtttcaagcatagttcgggggacagtaggatatttggatcctgagtactatatttcccagcagctgactgacaagagtgatgtttatagttttggtgtaattcttcttgaactcatatctggtcaagaagcaatatcgaatgaaagctttggtgtaaattgccgaaacatagtccaatgggcaaaattacacattgagagtggagatatacagggtattatcgaccccttgctgcggaat

SEQ ID NO: 40472 - DNA, 362 bp, Glycine max
  Clone ID: LIB3139-020-P1-N1-A8
ttcatttctcggtgttgttgttcttcatccatggctgttcctcagcaccacttccaacagcactaccaaacccaacagcaacaacagccacaaaacaaatccttcagaaatctgcaaacaatcgatggtcagatgtcacagcaggtggcgttttacaaccctactgatttgcaagatcaatcccaacatccaccctacattcctccatttcatgttgttgggtttgctccgggtcctgttcctcctgctgatggcagtgatggtggagttgatttgcaattgcaatggaattatggtttggagccagagaggaagagactaaaagaacaggattttttggagaacaattctcagatatcttc

SEQ ID NO: 40473 - DNA, 362 bp, Glycine max
  Clone ID: LIB3139-020-P1-N1-A9
gccaaatctcgctatgcttctcttctaacctctcaccctcgctctctttctctctagggtttcgttctcattctagattcccacatagaaactgtttctgcgttatttgattcttctcccaacctttccttgatccggattaagattcctggcacgtttttgaaccgatccacttcatatcggatccgaattcgaacattcaacatctgattccgcaattctctccgaattttgctttgaatttgcttttcgaatagatgattacagttccttagacagttcaattattaaaaaaaggtacatcatttagatggtatgccgcagttgtgtaaggtctttggttgttcaagctggaaccttcg

SEQ ID NO: 40474 - DNA, 363 bp, Glycine max
  Clone ID: LIB3139-020-P1-N1-B10
ctaccttcttcttcttcacttaactttctctctcttctctgttctccgtgccggtgctgtaactgcacgcgtgtttttctgtctttttgttttttttcctccgcctctcatttgcgaaggtgagaaccctaaattttagagagagaggttcgatttggccggaggtgattctccggcgagattttgcggtggatcagggtggggccggacactttcttgaagagagagagagagagagaaagtgcggttttgagagttatagagagagagaggggaaaatgtataagaaccagctgcaggagctggcacagcggagctgcttcaacctgccttcgtacacgtgcattcgggaaggtcctgatc

SEQ ID NO: 40475 - DNA, 363 bp, Glycine max
  Clone ID: LIB3139-020-P1-N1-B11
gaggaattttagtggacaaaactggagattggatcacacttatacaaaattctccaattagtaacttgttgagagttgctgcttggaagaaaggttgtttaatggtcaagattgtgatgtctgggaatgcagcagtcaaaaggagtgattgggcctcattggtacaagtgtttttaacaaacagcaacagtacagagcattttgatgcatgtaagtggacaaaatcagaaccacattcctgggaattaatcttcccaatagaggtatgtggtcctaataatggttttgaaatgtggagttctgagtgggcaaatcaaacttcatggcatttgagtttccttattgacaatcccaaacagtcta

SEQ ID NO: 40476 - DNA, 364 bp, Glycine max
  Clone ID: LIB3139-020-P1-N1-B12
ggatccgtgccccttcgtgcggatcctcgtcggaagcctcgccgtcaagtccccggcatcatcaaagccctcttctttctccggcaaagtccacccttcgagttcccccttcttctgcaagatcctactccagggacttgattcgaattccacttctcctagagtgtccagtgtccctctgatatcagactccgacccacaccctcactccttcgccgcctcctttgatttctccaaagcccaaatcttgaaagcctcgaagaagcccctgatgaagatctccgtctacaagggccccaccactccctcctgcgtcttcacctccgccaaactattgggcaaagtttcaatacccctcgatctc

SEQ ID NO: 40477 - DNA, 384 bp, Glycine max
  Clone ID: LIB3139-020-P1-N1-B3
ggatttcggttcgggaatggaaaggctttttgcctggccataatatcaccattccggatggtatggccaaaactggtgcaactttgcaatttaaaaggttagcagattgtgattttctcaagagaaactttaagcagatgtctaatgttttgtgggtggctcctgaggacaaggcgagtttatggtcacaacttcattatgtttcgtgtaataatctggaaatgcagaagcttatcttgtcaatctcgtaaatgtgttacgagaattgtatttgcacagtccagaggaagctcgccaattgagaaggaaagctctctctcgtattgaatggctgcaaaaagctgatgtgcctaccatagcacagattgaagagtttcattcgat

SEQ ID NO: 40478 - DNA, 367 bp, Glycine max
  Clone ID: LIB3139-020-P1-N1-B4
ccacatttattcatcagtttttcgttcccttcacaaaactcagaaccctaactatatccatggcatcgggtggaacagaagcttttccagatttgggtaaacactgccagcaccgcgattgcaaccagctcgattttcttcctttcacctgcgacggttgccaacagatcttttgtttggaacacagatcctacaagtcccacgcgtgcctgaaatccgaccacaacagcagaaaggttgttgtttgcgaagcatgttccatgtccatcgagaccaccggccatgtgggacaagacgaggaggcaatcttgcagaagcacctcaagtctggtaattgtgaccctaccaagaagaagaaaccaatttg

SEQ ID NO: 40479 - DNA, 366 bp, Glycine max
  Clone ID: LIB3139-020-P1-N1-B7
ctcgagccgattcggctcgagcagcgtcgggttcgggttcagcttcggcggtgacggagcgaagaggaataccaggggctcagttcgtggaggatgtccaaacttaccttactcaatcgggtctcgatgttggttcagccctcgcttttctccaagaaagacttcagcaatacaaggtagtagaaatgaagcttcttgctcagcaaagagatcttcaggcaaagataccagatattgaaaagtgcctagatgttgttgctacattgaaagctaagaagggtactggaacttattgctgattttgaagtatcagaaggcatctattcacaagcacgtatagaagaaactgattccgtgtgtttatgg

SEQ ID NO: 40480 - DNA, 365 bp, Glycine max
  Clone ID: LIB3139-020-P1-N1-B8
ggcgaagcaagagggcgtcactagcctgtggagaggctcatcgcttacggtgaaccgcgccatgctcgtgacggcgtcgcagctggcttcctacgaccagttcaaagaaatgattctcgagaacggcgtgatgcgcgacggcctcgggacccacgtcacggcgagcttcgcggcggggttcgtggcggcggtggcgtccaaccccatcgacgtgatcaagaccagggtgatgaacatgagggtggagcccggggaggcgccgccgtacgccggcgcgttggattgtgctctgaagacggtgcgcgcggagggtcccatggcgctttataagggttttattcctacgatctcaaggcagggaccgt

SEQ ID NO: 40481 - DNA, 371 bp, Glycine max
  Clone ID: LIB3139-020-P1-N1-B9
gccacagccccagcaggagccctagggaagatgacaggagccccattgatgaagatgatgacaacaaccgtcctcagggtcaccttgaaaaaagaactttctgataaaatgagatcaggatgtgacccaatttgtatctgctttgtttataaaatgcactccaggttaattatgtgacaattatttatgaaaacattttatatatgctatttttcagattcttgcggtcaaaaaaaaaaaaaaaaaaaaaaaaaaaaaaaaaaaaaaaaaaaaaaaaaaaaaaaaaaaaaaaaaaaaaaaaaaaaaaaaaaaaaaaaaaaaaaaaaaaaaaaaaaaaaaaaaaaaaaaaaaaaaaaaaaaaaaaagggggg

SEQ ID NO: 40482 - DNA, 326 bp, Glycine max
  Clone ID: LIB3139-020-P1-N1-C1
cgtaggttgggaattgggttggaggaaaagagtggcgggaccaaatggccgggcaaatccgtttcattttccttttaaattaatctttattatttacacccataaaatggatttaaatcaaaccaacctataagcaaaactaatatatcactgaattagaaaaaaaaaatggggaagaagaagagaagtagggtttccgaagacgaggaaatcgaatctgacaccaaccctttcgatcaaaacgaacacactttttaccagggtcttggtggggagaaaacagcattttaacagggaataaagaagggattctacaaggtggcatt

SEQ ID NO: 40483 - DNA, 360 bp, Glycine max
  unsure at all n locations
  Clone ID: LIB3139-020-P1-N1-C10
catttttcccggctaccttactcggattccctcaaactgctagaggctgatatacagcatgcaaatgctttggctgctgcaattcccagagccaagggtgggactcttctccaaatgaaattggtgtacaaccacttggctcctctctttctgttgttgctacagtggatggaatgttcttgtacatgctttctacacagatatcttgacctcttccacatagttgtatacaaggtacacaatgatggtagatcaaatatgacttctcatggaaggaaagcaagcatccgggacttttatgccgntatccttccatccctcgagcggcttcatggtagcttggagaagttgaacatttgt

SEQ ID NO: 40484 - DNA, 363 bp, Glycine max
  Clone ID: LIB3139-020-P1-N1-C11
ctcaaatccatctcttccggaagcgaaacaaataagcggtgcatggaggcttctggcgctgttgagtttctagcatcaattgtaatcaacaccaaccgcaacattgattcttcacatgaggctgactcaaacgacggatctggattcgagttgaaaacaagtgcatgcgatgaagcgttgagtttgcttcataatcttcatttatccgaacaagggttgaagactctcttaagcttcagaaacggcgagtttattgagtctttaacaagagtcatgcaaaaggggttctttgaatcacgcgcttatgctgtgttcttgttgaaatctatttccgaagtggctgaaccagtgcaactattgcat

SEQ ID NO: 40485 - DNA, 356 bp, Glycine max
  Clone ID: LIB3139-020-P1-N1-C12
gtcgttcaccgataagatgtcgtattcaaggagatcaaggtattctcgttctccttctccatacaagcgatacagtaggtctgtgtccaggtctctctcaaggacaagctccagaagccgttcaaggagtttatcaagagatgcagaaaatccaggaaacaatttgtatgtgacaggattgtctcctaggatcaccaagagagaactggagaaacatttttctgctgagggaaaagtgatagatgtccatctggtagttgatccttggacaagggaatcccgtgggtttggctttgtgacaatggagactcttgaggaggcagatcgatgtgtaaagtatctgaatcgctcagtac

SEQ ID NO: 40486 - DNA, 369 bp, Glycine max
  Clone ID: LIB3139-020-P1-N1-C4
tgaaaatgtgatgagaatttacagcaagtctttcaaagccgattatgcattccccgaatggatttcccctgcggccaaaaacttgatctccaatttactcgttgtggacccgcaaaagaggtattccattccagacatcatgaaggacccttggtttcaaattggcttcttgaggcccattgcgttttccatgaaggagtctgcgcttgaagataacattgatttcagcggggatgatgttcctagtcctggtagtgatgatggtaatagcagcagcaacaacgaggatggggagttgacgggggctaagcctgctcgtccgtcttacaacgcttttgagataatctcgtccttgtcgcatgggttcga

SEQ ID NO: 40487 - DNA, 344 bp, Glycine max
  Clone ID: LIB3139-020-P1-N1-C5
cattttatccggctacctgactcggattacctcaaactgatagaggctgatatacggcatgcagatgctttggctgctgcaattcccagagccgagggtgggactcttctgcaaatgaaattggtgtacaaccacttggctcctctctttctgttgatgctacagaggatggaatgttcttgtacatgctttctacacagatatcttgacctcttccacatagttgtatacaaggtacacaatgatggtagatcaaatatgacttctcatggaaggaaagcaagcatccgggacttttatgccgttatccttccatccctcgagcggcttcatggtagcttgga

SEQ ID NO: 40488 - DNA, 364 bp, Glycine max
  Clone ID: LIB3139-020-P1-N1-C7
atttgcaacacctttcatcacttccaaaaatcttccagcttgaagatgatccaaatgaaaatgttcggcggaagtcttatgataggagattttatgagaaggttcaatggaagaatttctctcatgtgtgcactgctccggtggaatctgaggaggatctttcaatagtaaccggagcacaattgcaagttgagaattatggcataaaaaatatactcttcttaagacttcgattctcaactgtgttgggagctaaagcagtgaagcatcctgagtgggaggggtcgcccaagttgggagccaagtcaggactcatatccactttaatcagccaacatttcacgacaacatttcagaagccacc

SEQ ID NO: 40489 - DNA, 354 bp, Glycine max
  Clone ID: LIB3139-020-P1-N1-C8
ggggacaacaagtccactgctgagtcactttgccgcaagataggtgcttttgatcaattgatagattttgctgaacattcttacactgcttctgagtttgaagaacttccagcactgcaacaaactatagcattgcaacgtatggcactttttaccagggttgagccttctcataaaaggatgctggttgaagcattacagcaccagaatgaagtggttgcaatgacgggtgatggagttaatgatgcacctgcactaaagaaggcagatataggaattgctatgggttcagggacagctgttgctaagagtgcttcagacatggtgctggctgatgacaactttgcctcaatt

SEQ ID NO: 40490 - DNA, 361 bp, Glycine max
  Clone ID: LIB3139-020-P1-N1-C9
caaaaataagacattgtttggtttggttacttgctcgaatttcctcgaatcgcttaatttgtatttgattagttaaaccgcaacgcggaatctcttttctcgaactggctaactctcaggcaagtggttcggacgctgattccagcaacaagcggctggtgctcgcactgtatgacgccctaaactccggcgactccgacgccgtcgtcaagatcgtcgccgccgacctcgagtggtggttccatggtccgccctcacaccagtttttgatgcgcatgctcaccggcgactccgctgccgacaactccttccgcttccttccgcagtccatcgccgccttcggctccaccgtcatcgtcga

SEQ ID NO: 40491 - DNA, 366 bp, Glycine max
  Clone ID: LIB3139-020-P1-N1-D1
aacatagtcatcattcttataggaaacaaatgtgatcttgagagccagcgtgatgtacccaccgaggatgcaaaagaatttgctgagaaagaaggtttatttttcttagagacctcagcactagaagcaactaatgttgaaacagccttcataactgtcttgacagaaatatacaacattgtcaacaagaagaacctaactgctgatgaaaatcagggaaatgggaactcggcatctttgtctggccagaagattattgttccaggccctgcacaagaaatccctgccaagaggaatatgtgttgtcaatcatcttgactttatttataatttgtttctatttagtgtatttcaatggtgtgttct

SEQ ID NO: 40492 - DNA, 364 bp, Glycine max
  Clone ID: LIB3139-020-P1-N1-D10
gtccgtcaaaagtttttaaattttgtgaggttcattatgaagaaaagggacaagcttagttgtcaagttggaatcaacccatactccatggaatggactggtttggccaatagattactgagtaagggcaacgatattctgtgttgcgattatgctagttttgatggtttgattaccaagcaagttatgagcaagatggcagaaatgataaacagtctttgtggtggtgatgaaaaattgatgcgtgaaaggacacacctgctgttggcttgttgttcaagaatggcaatttgtaagaaagatgtttggagagttgaatgtggaatcccttctggatttccgctcacagttatttgtaatagca

SEQ ID NO: 40493 - DNA, 365 bp, Glycine max
  Clone ID: LIB3139-020-P1-N1-D11
caatccttcaaaaattttgtttctttgtgtgtgtatggtgatgataacttaattagtgttcatgaatatgtcaagccttactttagtggttctaaattgaaaagctttctagctggtcataatatcaccattactgatggtattgacaaaactagtgcaactttgcaatttagaaagttagcagattgtgattttctcaagagaaactttaagcagatgtctaatgttttatgggtggctcctgaggacaaggcgagtttatggtcacaacttcattatgtttcgtgcaataatctggaaatgcaagaagcttatcttgtcaatctcgtaaatgtgttacgagaattgtatttgcacagtccaga

SEQ ID NO: 40494 - DNA, 367 bp, Glycine max
  Clone ID: LIB3139-020-P1-N1-D12
tctgcatccatcggaaaagcgcaggccagcgagttcgggactcactctattgagtcctccggcaacgagttcgccgcgttctccggtggcacaaccggaaccttgtcgctcgccgttgcactgagctccgagaaggccgttgtcgcggcggagtccaatagctcgaagaagatcgtggataccttcggccagcggacttctatttacagaggtgttactaggcaccgatggacaggaagatatgaagcgcatctatgggacaatagttgcagaagggagggtcaagccagaaaagggcgtcaagtttatttgggtggatatgataaggaagaaaaggccgcgagagcttatgatttggcagctctaa

SEQ ID NO: 40495 - DNA, 365 bp, Glycine max
  Clone ID: LIB3139-020-P1-N1-D4
gttgcttccaattaagatggttctgctagagaagctctgggatgatgttgtggctggccctcaacctgagcgtggccttggcaagctcagaaaactcaccaccctcaaaactattgatgaaggagaaagtagcaagctgcagaagacgttgtcgatgccgtcgacaccaacaaccccgatgactccgacgactccaacgacaccgggatcggcccgtaaagctgacaacgtttggaggagcgtcttccatcctgggagcaactccgccacaaagaccatcggtgctcagatgtttgacaaaccacttcccaacactcccactgtctatgactggctgtacagtggggagaccagaagcaggcacc

SEQ ID NO: 40496 - DNA, 369 bp, Glycine max
  Clone ID: LIB3139-020-P1-N1-D5
ctgcaatgcaggtatgcgctggatgtgaatgtggaaagggcggcagatgttctcatgcacaagagattgctgcatttggcgcatgatcctgctaataggccttcaattgaagttcgattagttcaggtttatcccataaccgatggaaactcagctgacacttttgaatcagatgatcctgggatagaatctggacaaagttcttcaaagtactcaagcagacagagtatacatccacctcctgcttttggttcttctcctaatcttgaagcactggctcttgaagcaaataattctgaagaagacatagaagaggaacaatctgtacatgccaatgttcaatattcacggcccatgcatgaaatcacc

SEQ ID NO: 40497 - DNA, 357 bp, Glycine max
  Clone ID: LIB3139-020-P1-N1-D6
cgataaactccttaagcagatggaggctgcacaggcccaaaaaccattctattatagagaacaccttcatacaggcaaatcaatgaaagtacaagtcaccaagcgtccataggcacaacctgatcgagggtatacatggctaacggatattaatgacacctatcaagaaggatatagatgtgaagagatatgcatcaagaaagaagcgtttgagggagaagagaatgacttgagcaaaatctctaggaacaagaactgattttagcatttgaaagctgcgaaagaacattccagtactactacgttgctgagccaagaagcatgagcaatacactgacgcacgagtgcagaatcttg

SEQ ID NO: 40498 - DNA, 363 bp, Glycine max
  Clone ID: LIB3139-020-P1-N1-D7
gcaagccaaggtgataattgctgcacggagcaacaacgagatggatgcatccaaactgaagaacgagttccctgagcttctttccatcaaggaatcactgatcaagtatgtctttgagccaaacaagaaaactgcttaaatatattaaagcggtttcatgttttagacatcacagattatgcatttttgtggcgggctacatagatcactcattatttcattgttattttgttgggttttgataagaaccatactacaaaagctagccatgtagttcttgttctcttagctataagcgattcctgtttcagcatatttccattatattaccgtgtttagagggtgacaagtattataactggg

SEQ ID NO: 40499 - DNA, 360 bp, Glycine max
  Clone ID: LIB3139-020-P1-N1-D8
ctagggttttagcgcagcttcttctagatttaaggaagatgggtaaggaaaaggttcacatcagtattgtggtcattggccatgtcgactctgggaaatccactaccactggtcacctgatttacaagcttggaggcattgacaagcgtgttattgagaggtttgagaaggaagctgctgagatgaacaagaggtctttcaagtatgcctgggtgctggacaaacttaaggctgagcgtgaaagaggaatcaccattgatattgctttgtggaagtttgaaacaacaaagtattattgcacagttattgatgcgcctggacataaggatttcattaagaatatgattactgggacatccc

SEQ ID NO: 40500 - DNA, 362 bp, Glycine max
  Clone ID: LIB3139-020-P1-N1-D9
cggagatcagagatcccggcaagaagagccgcgtctggctcggaaccttcgacacggcggaggaggcagcgcgtgcctacgacgccgcagcacgagagtttcgcggccctaaggccaagacaaacttccctctccctttggaaaatgttaagaactcgagccccagccagagcagcaccgtcgagtcctccagccgcgaccgcgacgtcgccgccgattcctcgcctctagacctcaacctcgcccctgccgccgccgcatccgctcgattccccttccagcaccagttcccggtttttaccggcgcggtgcctgcggcaaatcaggttttgtacttcgacgctgtcctacgcgccggcatg

SEQ ID NO: 40501 - DNA, 368 bp, Glycine max
  Clone ID: LIB3139-020-P1-N1-E10
caaggttcaaagccaaggcctatcatctttttcttcttcttcttcctatgtgagaatagaggaagagatcatgaagcaaggcatcatcaccatattgaacacaaacacaccttcttctctgagaagaactctctccgcagacatgtcctcaaagaactactggctctctcagaacattgctccctcagaagaacaagacttgcatgcaaaaaccattgctccctcagaagaagatgaagaggccaacaacaacaacaaggagcttgaagaagaagatgaagctgaaagagagaggcttgagatttggagctccatccagcggaacaagaaggaggagcaagagaaatcaagagcctttgacacgtgga

SEQ ID NO: 40502 - DNA, 367 bp, Glycine max
  Clone ID: LIB3139-020-P1-N1-E11
atttgccatgaaccacacagatttcattatcaccagtaccttccaggagattgctggaagcaagaacactgttggacagtatgagtctcacacagcctttacccttcctggactctaccgtgttgtgcacggcattgatgtctttgatccaaaattcaacattgtctcccctggagctgatcaaaccatttacttcccccccaccgaaactagccgtaggttgacctccttccaccccgaaatcgaagaacttctttacagctctgtggagaatgaagaacacatatgcgtgctgaaggaccgcagcaagccgattatcttcaccatggcaaggttggaccgtgtgaagaacatcacaggactcgtg

SEQ ID NO: 40503 - DNA, 364 bp, Glycine max
  Clone ID: LIB3139-020-P1-N1-E12
gaaatggagagcaatttgaagaaatgactttaaatctttgtgtactgacccccaatcgaattgtttgggattcggaagtgaaggaaatcattttatctactaatagcggacaaattggagtattaccaaatcatgcgcctattgccacagccgtagatataggtattttgagaatacgtcttcttaaagaccaatggttaacgatggctctgatgggcggttttgctagaataaacaataatgagatcactgttttagtaaatgatgcggaaaagggtagtgacattgatccacaagaagcacagcaaactcttgaaatagcagaagctaatttgaataaggcggaaggcaagagacaaacaat

SEQ ID NO: 40504 - DNA, 366 bp, Glycine max
  Clone ID: LIB3139-020-P1-N1-E2
ggagaaggtttcaaccaccatgggcttggtgggaatcatctccgagtatcctccacttggtcgttttgctgtgagagacatgcgtcaaactgtggctgtgggagtcatcaagagcgtcgagaagaaggaccctactggagctaaggtcaccaaggctgcacagaagaaggccaaatgaattgtgctggatggtttatcaaggaaactctattattatgactacaataaatggtttcttgttcgtagtacttcattttttcgtgtagggaacttgtttatcagattttgtgtcaggtttgctccgtcatctcgcaacttttgttcccagaactgggttcttgatcgacggtggcaaggctatttctt

SEQ ID NO: 40505 - DNA, 289 bp, Glycine max
  Clone ID: LIB3139-020-P1-N1-E3
agctgatcggtggcccatatgccacatatggtatggtgcgctttgggcccatctatcatttaacaaatgttgaataaatggacagtgagacaccatgatttgatttagcagcaagtttgcaatttctatgacctttggggagaattttagggacaaactgaatgatcacactatcaaaatctcaatagtactgtggagtgtgttgaagaaggtgttaaggcaagatggagttggaagcacatcaaagagtgatggcctatggtcagtgtttacaacgacagtcagactt

SEQ ID NO: 40506 - DNA, 288 bp, Glycine max
  Clone ID: LIB3139-020-P1-N1-E4
cttagatccactctatgaatggaacagtcaagatcttggactaagatatggccgtatatcgtaggcgagtgtctcttgaatttcgttattaactgtaagatcgggggacgagcgacagacactgaaaccgacacaattgatttacaaggtgactgcaagcacactgattgtccgattatcatccctgcagcgtatcacaagagagatctatcccatatgcactacgctgataggcattcatagcgattgaaccacacccagacgggtggcaccacagatatcatctta

SEQ ID NO: 40507 - DNA, 365 bp, Glycine max
  Clone ID: LIB3139-020-P1-N1-E5
cttcttctataaagaagaccttcatccaggcaaaacaatgaaagtacaattcagcaagcctccctttcaacaaccatggggtgttggtacatggttaaaggaaattaaagacactactaaagaaggatatagttttgaagagctatgcatcaagaaagaagccattgagggagaagagaagttttgtgcaaaatccttgggaacagtaattggttttgccatttcaaagctgggaaagaacattcaagtactttcaagttcctttgtcaataagcaagaccaatacactgtggaaggagtgcagaatcttggagacaaagcagtgatgtgtcataggctaaatttcagaactgcagtattttact

SEQ ID NO: 40508 - DNA, 204 bp, Glycine max
  Clone ID: LIB3139-020-P1-N1-E6
ctggattattatcttgtgaaatgttagatattatgttgtgaaattgaaaattgtttgtactgaactctcaaacaacccaaccatcatttgtatagtgggtaataatccagtatacaaatgatggttgggttgattgagagttcagttcacacccttttcaatttcacatcttactatccatcatttcacatgacaataacccag

SEQ ID NO: 40509 - DNA, 349 bp, Glycine max
  Clone ID: LIB3139-020-P1-N1-E7
ccaatgttcaagtgcttgcttactgggcccaagaaagatggtatatccatggacttcaattctctctgtgaagatgctcgagcaaaaagttacataattgaagagctctcaaagattgcgaaggaaaagaagttgaaaggttttgagtttataaaagcagttcaccttgactcaattccatttgacatggaacgtgaccttatcactccaacatacaagaagaagaggccacagttgcttaaatactatcagaatgccattgacaacatgtataagagtggaagtaaacccagtgcctgagacctgatttgggagataatttattttctgtatgggatggtgtttgtct

SEQ ID NO: 40510 - DNA, 365 bp, Glycine max
  Clone ID: LIB3139-020-P1-N1-E8
gaatttgggttttccaccaaaccagaaccgggttcgtgtttctcctcctgtttctgttccggttcaggttcagtcatctgaaccggaaaagaagatcatggaccacaggcttcttgaattggagaagcagcttctggaagataacgacgaagaaggagaagcagatgctgcgtctgtgataaccacgagcgagtggtccgagacttatcagaatttaatcagtcccggtccggttcagaaaccggttttgacgaccacgtcgccgacttcgtcgacgacgtcatccacgtcatcttcttcctccgtggcttcgcctgcttccggatgctccaagcaaactctcatggaagccgcatctgcaattg

SEQ ID NO: 40511 - DNA, 363 bp, Glycine max
  Clone ID: LIB3139-020-P1-N1-E9
cttcggaagaacgctcgcccgcaccgtccagatcgtaatcaagagaagaggagcgagttttgtttttccttgcagcccaagccatggcgcctctgatcctgcatggtggaaaaaccaacaaaaattcttacaagacactcattgcggcggagtatgccggcgtccaagttgactttgccccaaattttgagatgggtgtctccaataaaactcctgaatttctcaagatcaatcctattggcaaggttcctgtgttggaaacacctgatggtccagtattcgagagcaatgccattgctcgctatgttacccagctgaaaggtgataacactttgtatggatcttctttgattgaacatgccc

SEQ ID NO: 40512 - DNA, 367 bp, Glycine max
  Clone ID: LIB3139-020-P1-N1-F10
ccaggactgaatgacctaatggagtctaaaggtgggaaaaagaagtctagtagtagtagtagtaaatcaattttttacgaagctcccctcggatacagcattgaagacgttagaccaaacggtggaatcaagaaattcagatctgctgcttactctaactgttctcgcaaaccatcctgatacacatccggattgatagttcgttgcatgcaaccatagttttattaggattttttcttctttgttttcaattaggtttttttgttgctctccttcaaactccatctttccaaatcctctctttgcgattgtgttttgatctgcttcctactgcgatagtttctctactgttacatggccatggcgg

SEQ ID NO: 40513 - DNA, 360 bp, Glycine max
  Clone ID: LIB3139-020-P1-N1-F11
ccagagtacatcttgaaacctggagatgaaattgttgacatcaataatctagaggagtacatatccatggtggttgaggcaacggttaagactggaatcatgcgtcaaatggaagcttttagagcagggtttaatcaggtttttgacatctcatctttacaaattttttctccccaagaactggattacttgctttgcggccggagagaattgtggaagactgagacactagctgatcatataaaatttgaccatggttatactgccaagagccctgccatagttaatttactcgaaattatgggagaattcacaccagagcagcagcgtgccttctgtcaatttgttactggtgcacct

SEQ ID NO: 40514 - DNA, 363 bp, Glycine max
  unsure at all n locations
  Clone ID: LIB3139-020-P1-N1-F12
attaaagacttgcttccaagatggttctgctagagaagctctgggatgacgttgttgctggccctcaacctgagcgtggccttggcaagctcagaaaactcaccaccctcaaaactattgatgaaagagacagtagcaagctgcagaagacgttgtcgatgccgtcgacaccgacaaccccgatgactcccacgactccaacgacaccgggatccgcgcgtaaagctgacaacgtttggaggagcgtctttcatcctgggagcaactccgccacaaagaccatcggtgctcagatgtttgacaaaccacttnccaacactcccactgtctacgactggctgtacagtggggagaccagaagca

SEQ ID NO: 40515 - DNA, 259 bp, Glycine max
  Clone ID: LIB3139-020-P1-N1-F5
gtaagaattattatttcggttacattacaacatagggtgggtttttgggtttcgtaggcagctaaacacgctctctgttgacgcatcggttgagactgacatcaaccctcatttggaatcgtcctaacgcaagggtaggcatgactgaagaactctatctctcctgatcttatccatcgaatagaaaagcaactccattaccaccctcagatatatacccgttactatataaatatgcctgtttgtaacaacatgttca

SEQ ID NO: 40516 - DNA, 369 bp, Glycine max
  Clone ID: LIB3139-020-P1-N1-F6
ctcctaaaaaactacccattaacttatgttagtcacacaacacactaaaagttcagtttcttataacccattaactagttagctcatagccgaatttaaatattttcttctgcagaaaacaatgcagctttttgttttcaatttctatggaaccacctttcttgttatttacggtacggtttttattatggggattgtattggaattaggagccgcccctgctcctgcacctgcaccattgctgcctccatcggaagcaaatgctatactcaacagtggatggtggaatctatcacagttagattcacacaatatctgttcatggaatgatatagattgcaacgtcgctggaagtataactggcatcag

SEQ ID NO: 40517 - DNA, 310 bp, Glycine max
  Clone ID: LIB3139-020-P1-N1-F7
ggtacatcaaagaaggtagcacagttagtgtaatgggagttgttcaaagaaatgacaatgtgcttatgattgtccctccacctgagcctttgactaccggatgccaatgggccaaatgtatattccctgctagccttgagggtattgttttgagatgtgaagatacgtcaaagattgacgtcattccagtgtagtcatccttgatgttgttccagtgtagtcatatcctctctggtaacctcttaggtattcttctttaaaagatatgtcttcgcatatccaaaatgatggtggttgggtgtggtgttgt

SEQ ID NO: 40518 - DNA, 363 bp, Glycine max
  unsure at all n locations
  Clone ID: LIB3139-020-P1-N1-F8
catcactctcacaaacggaaactaaactacgttttttattttttccagacaataatactttaatatttgagtgtgatcgatggcatacccaaacccttatccggctcagccctatccctccgcctccgcgccgatgccggcggttccctccgccgtgatcggcccccagttctgcgcgccgtacccggtggatctggcggtggtgaagaaggtgatgaccatctctgacaacttcgttgtcaccgacgtcaacggcaacatcgtattcaaagttaagggatcgctcgcgaccctccgtgaccgccgcgtnctcctcgacgccgccggcaaccccctcgtcacccttcgccggaagataatgac

SEQ ID NO: 40519 - DNA, 365 bp, Glycine max
  unsure at all n locations
  Clone ID: LIB3139-020-P1-N1-F9
gatgctgatcggcactaacgtcgtaagttttacgctattaaacaagccgcattttcatgtttttcatgggaataatataaaaaccctaaaccttcgctttggtgctacactcatcagatctacactacaaacttccaagttcaagcattatgtgtcactagcgatgtccaattccgatcccaaaacgagaccccgtccgggaccgtggccgccggcgccggcgccggtcgtcaaggcaatgccgnctgcttcatgggccaagaaaacgggcttcaagcccaagttctccggcgaggccaatgccagcgactcgggccagataagcctgcagaccaagcccagggagcccgacacaaacgtggatc

SEQ ID NO: 40520 - DNA, 367 bp, Glycine max
  Clone ID: LIB3139-020-P1-N1-G10
attttgttggagatctcgtctttgaagtttctaagatgacttctccctacattaaatgtacagtctctttcttcatagcatttggaaatttggctgatgacaccatcaattttgaggcttttccccacaagctggtgcagtttggagagattcaggaaaaagttgtgttgaaattttcacaagaggaatttcttacagcttggtcaactcaggtgcgtcccgcaacgactctgttggctgatgggtgcccatatttgtatgctatggtgcatgatagttcagtgtctacaataccaggtgattttgtcattggtgttaagttgacaaccataaacaatatgtgtgcatatgggctcaatcctggtat

SEQ ID NO: 40521 - DNA, 367 bp, Glycine max
  Clone ID: LIB3139-020-P1-N1-G11
ctcagttttgactccatcatcggctttctgtgtttgatacttattacaagagatcagaaccgttttgggttcagctgaaccgagtttggtggcatgcgagtggaccgaagaggtgatgaaccggtctggaagtcacgattcgacgctgagccaccagtcggaggcggcgaatgcggtggagagcgagagcatgctgtcggcggagacgccggagacttcgattctcttccgagaagaaccggaaacgaacccgaagcgtgtgagcgatgatgttggtttagagcttacgcttgggttcgaaccggtttcacgtgcgcggcccgtggttccggtgaagaaaagaaggattgagttgaaaaattttagt

SEQ ID NO: 40522 - DNA, 393 bp, Glycine max
  Clone ID: LIB3139-020-P1-N1-G12
gtaagttaggaattaggttcgaggatgcattttttttatcttgtattactatcgatgagaggggatttactggccgtgagtatgtaaagactggccacctgacggctaggattgtcgggcatatgtttgtcatagatcttgaggagctttaaacatgtaggccttatttgttcgataggaaattaggaaggagacagtgataaaatgccatgggcctcaatgttagaacaaacctgttgaagagcatgaagtccctagattagttttggtataataaattcgtagtgcgggccgtgcaaagatcatatagacagtcttattactggttgaggcaaaatgccaaagtgtctgatatagatttatctttttcatgcacatcggggtgggaagaag

SEQ ID NO: 40523 - DNA, 365 bp, Glycine max
  Clone ID: LIB3139-020-P1-N1-G3
gttggactaagtggttggcttcccggatcaaggagcttaaggaacaagatagaagtgtcacatgaggcaagaaggcgagcagcttcattacccattttgctgtgccatggaatcagtgatgatgtagtcctttacaaatacggagaaaaatctgctcaatccttatgttcagcagggtttcgatatgttgcattcaaatcctatgatgggcttggtcattacacggttcctagagagatggatgaggtttgcacttggtttagttcaagattgggacttgatgggtcctcgtaagtgacataattagtatcagtcagggcatgggcgtagaaggtatatggaacaataacagggaaagtggggag

SEQ ID NO: 40524 - DNA, 364 bp, Glycine max
  Clone ID: LIB3139-020-P1-N1-G4
ctggtgcagtttggagaaattcaggaaaaggttgtattgaaattttcacaagaggaatttcttacagcttggtcaactcaggtgcgtcctgcaacaactctgttggctgatgggtgtccatatttgtatgctatggtgcatgatagttcagtgtctacaataccaggtgattttgtcattggtgttaagttgacaaccataaacaatatgtgtgcatatgggctcaatcctggtatttcaggttctcgtcttctgggcaccattcctcagtccatttcacagcaaactgtttggaatcaaatggcaacagtgagaacaccattgaattttgattctagcaagcagagcttttgtcaattttcta

SEQ ID NO: 40525 - DNA, 371 bp, Glycine max
  Clone ID: LIB3139-020-P1-N1-G5
aagatggcggcgaagggggtttcgctgaagaagaagctggagaagttaagatcttcgttgggaacctgcctttcgacttcgacagcgagaaattggcctcgcttttcgaacaggctggcaccgttgaggttgctgaggttatatataatagggccactgaccggagtcgcgggttcggatttgttaccatgagtacaatcgaagagcttgagaaggctgtcaagatgttcagtggttatgaactaaatggaagagtgttgactgttaataaggctgctccaaaaggagcacagcctgaacgcccaccgcgcccaccacaatcctttagagtctatgttggcaacttgccatgggatgttgacaattctcgg

SEQ ID NO: 40526 - DNA, 370 bp, Glycine max
  Clone ID: LIB3139-020-P1-N1-G6
gaacaatcacaggattgttcatttttgcagccatttcagcgtataaaaaccaaaaacccacccaccttgcatgtttgcttgttcctaaattacaattttcaaagccagacagacaaacatgtccgagaatattgagtccaattctccttcgctttccctctttatctgaaaggtatggagtgttttgacttctggaagagataatggtgcagtgcctagacggattaaagcatttgtgtgctgctctggtaaattgttgtgatgccgattcgtcaaagcaacctacaggtttagaaaatccagaagttcttgcaagagaaacagtgtttagtgtaagtgagattgaagcgctatatgaattgttcaagaa

SEQ ID NO: 40527 - DNA, 346 bp, Glycine max
  Clone ID: LIB3139-020-P1-N1-G7
gggaacacctaggaaaccactgactaacgttgaggtaggaaccatccatgtgaggcttgttatgcctaacacaaaagattatggtcgaattgatccatactcatctgatttgaaagcctactttcaagcttatacccaataaacgtaacgctcaatatgtgaatttgggaaggtgttattggcttaaggtaccatacataatcctgtgtgtatcttaatcttgtaatataatgtgtcaaatatagaaaacgaaatactgtccatgtttggtaccctaatacgatcagatcatgattatataaatcttaaaagatgtacgtacgcttgacaaaatactgatggttca

SEQ ID NO: 40528 - DNA, 361 bp, Glycine max
  Clone ID: LIB3139-020-P1-N1-G8
agcttttccaaacaaaattgtttttgatgataagcttgtgttggctaacacacaagaattctttgatggaaattttccagtggattcttggttaccaatttttgtgaattgtctttatcctgtaagtcaattaccttcagaagctgtcgttgtaaatgttacatgtggtagtggacggtgtggtttacccaccactgcttggattagttctgcagttaacaatcgctcctcagatatcaacaaaaggattcgcacagcacttgggaaaggtaagaaaattgtttttcttactagagttgatccttttccagtagctttactggctgttctttttggcgttaagaatgaaattctgagttct

SEQ ID NO: 40529 - DNA, 364 bp, Glycine max
  Clone ID: LIB3139-020-P1-N1-G9
gaaattatcattgatagtttcgcaagtcctgactgcaacatagttggtgcaatgcttttggttgatacttatcataccaatcctgaaaatgcagttcgtagtatttttgttgcgcctttcagaggcggaaggcccattcgggtggttacatttccgaataccattgtgcagattgaaccagacatgaattcaaggtttcagcttttgagtaccactaccaatggtgattttgttcaaggaaaggatctcgcaatggttaaagttaatgtagcatgtgctgctgttggcttgacatcaagttacactccaactccattgttggaatctggtttgcaaaaagacagagggttgattgtggagtatt

SEQ ID NO: 40530 - DNA, 266 bp, Glycine max
  Clone ID: LIB3139-020-P1-N1-H10
gtatagtgtattactatcgatgagagtgaaataacatgtcgttttagtttttggaattataaaagaaaaattgactctaaattagttaatgttggtaatttagcttgacattcgacaacattatttcccttatttgtttgataggaaattaggaaggagaaagtgataaaatgccatgggcctcaatgttagaacaaaactcttgaagagcatgaagtccctagtttagttttggtttgataattttgtaatggctaacatgtttt

SEQ ID NO: 40531 - DNA, 367 bp, Glycine max
  Clone ID: LIB3139-020-P1-N1-H11
tgaacaacttgggattttcaaatatggagggctacgtcattggggtaagaataggaacttggcatttgaaggagccatcaagaagtacaaaaatgcagggagatttttaagggttaaagagaagtatgatttacaagggcttttctcaagtacatggacagaccaaatgcttgggctaaaggatggagtgacaatattgaaggatgggtgtgcattagaaggtttatgcatttgctcacaggatagtcattgcaatccaagcaaagattactattgtaaaccaggcaaagtttacaaggaagcaagggtttgtactcatttgaaatccaaatgagaccaaattttacagaaattaaaggacattttt

SEQ ID NO: 40532 - DNA, 368 bp, Glycine max
  Clone ID: LIB3139-020-P1-N1-H2
ctcgagccgaatcggctcgagaaccattctgcgtagtgatctattggcaaattttttgacagagggcaattttagagcaagtgttgatttgcagcgcactcatcgtattaaaggaatgattaaaatggtggccacagttggtattcctgagaatacaggtatagcattggcctgtgctatgaatagttcttttagggggcgcgccagttctgatatttacaccatctgctctcaagactgtgaattatggaatcctgcttgcacaaaagcaatgactatgtcatttaatccaaacccgtgttctgatgcatggagtttggaatttctgaagcgtaccggatttcattgtgatatcatttgtgtcactg

SEQ ID NO: 40533 - DNA, 359 bp, Glycine max
  Clone ID: LIB3139-020-P1-N1-H4
ccctcttaataccaattttctagggtttatacaatgttcgatggcttcttcagatgttgagtaccgttgctttgtcggtgggctcgcttgggccactgacgaccaagctctcgagagagccttctctcagtacggcgaaatcgttgaaacgaagattatcaacgatcgtgagactggaagatccaggggttttggatttgtgaccttcgcctcggagcagtccatgaaagacgccatcgaagggatgaacggccaaaaccttgacggccgtaacatcactgttaacgaagctcagtcccgtggtggcggtggcggcggaggcggtggaggtggtggatattggtgtggtcgcggtggtg

SEQ ID NO: 40534 - DNA, 186 bp, Glycine max
  Clone ID: LIB3139-020-P1-N1-H5
agacaagctatagttgagaggaacacataaactcatactctatggaatggactgtagtatatcaatatattactgagtaagggcaatgatattctgtgttgcgattatgctagtttagagggaaagattactaagcatgcaatgagcaagatggcataaatgataaacagactttgtgggggtgat

SEQ ID NO: 40535 - DNA, 273 bp, Glycine max
  Clone ID: LIB3139-020-P1-N1-H7
ttcttcttcagagcgtaaaaactgttgatggtaccagtccgaaggatatcactgcagacatgttcaacaaggaggcagggcatgtggttgaggagtgcaaattgagagtgctgtatgtttctccacctcaaccaccgtctcctgtcccagaaggttctgaggaaggatcctcacctagaggttctgtttcagagaatggaaatgccaatggttctgacttcacacaagcagcaggaggatttactgagcggcctgattttaagaccaaatttg

SEQ ID NO: 40536 - DNA, 365 bp, Glycine max
  Clone ID: LIB3139-020-P1-N1-H8
gaaagaattcctcttgccacatctgagggttttcctcatgtgctttcacgcaaaaatggcgaaaaaggcaaaaggagatttgtctctggggatggtgaagagatgacattgattccaggaaccagtgttgaagaggcttacaacaagctaatagttgaacttgagaaaagtgttcctacattggttggcattgaatgtcccaaggatgagaaacttcctcgtcgcaaaatttttgacaaacctaagacgcgctgcttcactattctccctatggagtttaatcttgtggtccgtcaaaagtttttaaattttgtgaggttcattatgaagaaaagggacaagcttagttgtcaagttggaatcaa

SEQ ID NO: 40537 - DNA, 267 bp, Glycine max
  Clone ID: LIB3139-020-P1-N1-H9
cgggtcaaggatgtcggtgagccgaacacgactactgcctatatgtgtgcatgcgggctcatgtctgagacatcacagattatgcattttggcggcgggctacatacaccactcaatattacattgtgaaatcgaagggcatcggtgagaaccctactacataagctagccatgtagcactggttctgtcagctatatacggaccctgtctcagcatgtatccatgatatcaccgcgggtagagggagcccagtaatacaactgggc

SEQ ID NO: 40538 - DNA, 353 bp, Glycine max
  Clone ID: LIB3139-021-P1-N1-A1
agaaagttagcagattgtgattttctcaagagaaactttaagcagatgtctaatgttttgtgggtggctcctgaagacaaggcgagtttatggtcacaacttcattatgtttcgtgtaataatctggaaatgcaagaagcttatcttgtcaatctcgtaaatgtgttacgagaactgtatttgcacagtccagaggaagctcgccaattgagaaggaaagctctctctcgtattgaatggctgcaaaaagctgatgtgcctaccatagcacagattgaagagttccattcgatgcaaaagatgatgaatgctcctgattcaaatgataatattgatctactgttgagcattga

SEQ ID NO: 40539 - DNA, 271 bp, Glycine max
  Clone ID: LIB3139-021-P1-N1-A10
gcattttggtgctgtccaaaggaatagagaggaaggggaagattaaactttatggccattggcaattttagtttctttactaaatctaccattgtccctgaacaaaagtatcagtgtcctctacataaaagaaaaagggatgatcatgagacatgcattatatcatatgcatgtacacttttggataagacatgtacattctttgctagtccctaagttacactttatttcttcaaagatgtatgctatatatttctcattttcttgtggc

SEQ ID NO: 40540 - DNA, 371 bp, Glycine max
  Clone ID: LIB3139-021-P1-N1-A11
gtcaagccttactttagtggttctaaattgaaaagctttctagctggtcataatatcaccattactgatggtattgacaaaactagtgcaactttgcaatttagaaagttagcagattgtgattttctcaagagaaactttaagcagatgtctaatgttttgtgggtggctcctgaggacaaggcgagtttatggtcacaacttcattatgtttcgtgtaataatctggaaatgcaagaagcttatcttgtcaatctcgtaaatgtgttacgagaattgtatttgcacagtccagaggaagctcgccaattgagaaggaaagctctctctcgtattgaatggctgcaaaaagctgatgtgcctaccatagc

SEQ ID NO: 40541 - DNA, 371 bp, Glycine max
  Clone ID: LIB3139-021-P1-N1-A12
atctaagcaagaggcacgctaccaccgtcaaacccttctcctttttaccattctaatggcttggttttttcacatcacactttctttgtgttgtgtgtcgcgcgcgcgcgcgtgtgtgtgtgaatttgtgaagtgagttggagatagagacaacggtttaaggtaaggttaggtcttttttttttttttttgtctttgctttttgggtgaaagttttcttgggcaccctatttgcaaattttcaattttcaattgcagactgagaaattttcaatttttgttgggttttctgagtttcggataaagaatttctggtgtgtttgagagattttgatgattaatttctgggtttgatagtagtggggagtata

SEQ ID NO: 40542 - DNA, 372 bp, Glycine max
  Clone ID: LIB3139-021-P1-N1-A2
gcatttttaatgagatgctcattagatatagctatgaaaaattactgcgccaggctaaagctccaagtatgtttttacaatccttcaaaaattttgtttctttgtgtgtgtatggtgatgataacttaattagtgttcatgaatatgtcaagccttactttagtggttctaaattgaaaagctttctagctggtcataatatcaccattactgatggtattgacaaaactagtgcaactttgcaatttagaaagttagcagattgtgattttctcaagagaaactttaagcagatgtctaatgttttatgggtggctcctgaggacaaggcgagtttatggtcacaacttcattatgtttcgtgcaataatc

SEQ ID NO: 40543 - DNA, 383 bp, Glycine max
  Clone ID: LIB3139-021-P1-N1-A3
gtgatttaaacttagctactaccgatcatttgatgaggttcgtcaacaaagatccagaaggttttgtgcctatatctgttgttgcatctttcaagaagattaaggccctcatagcgagtcattcccaacttgcaactgttttaaggaactcgtcaaagcttgtggttagtgaagatggaaagaaaatcaaacgccagtatcccctgactgagtctgatatagaagagatacaatctcgcattgttgtagctgaaaacctacctgaggatcattgccatcagaatcttatgaaggttttctcagcagttgggagtgtgaagaccatccgtacctgtccacctcaaacttccaatagtggggcttcttctgcttcaagattggga

SEQ ID NO: 40544 - DNA, 374 bp, Glycine max
  Clone ID: LIB3139-021-P1-N1-A4
cgaaagttgattggtgacaatgaatttcatgatccgcatttactctctgatacagctaaaagggcacatacaacatcaaattggctgttagatttgaatctcccagcagaagagaatgaacagaaacaaacaaatgatggaaactctgatcatgttgtctcgactgagaatcaaaagctttggttgcaagatttgtgtgatctggttgatgaaacagttgtttttaaaccttatgattttgatgctcttgcagatagagtgttgaaagtgatcagaagtaacttcaacaaaattctcggatccaagtgtgcattgcagatccagacagaagtcatggaccaatttcttgcagctcaatatgtctcagaccggga

SEQ ID NO: 40545 - DNA, 376 bp, Glycine max
  Clone ID: LIB3139-021-P1-N1-A5
agcaagatggcagaaatgataaacagtctttgtggtggtgatggaaaattgatgcgtgaaaggacacacctgctgttggcttgttgttcaaggatggcaatttgtaagaaagatatttggagagttgaatgtggaatcccttctggatttccgctcacagttatttgcaatagcatttttaatgagatgctcattagatatagctatgaaaaattactgcgccaggctaaagctccaagtatgtttttacaatccttcaaaaattttgtttctttgtgtgtgtatggtgatgataacttaattagtgttcatgaatatgtcaagccttactttagtggttctaaattgaaaagctttctagctggtcataatatca

SEQ ID NO: 40546 - DNA, 375 bp, Glycine max
  Clone ID: LIB3139-021-P1-N1-A6
cctctttcttcctcttcctcagtagtgcgattttcgattctcttctctgcaactatgcctaaccctaaggtcttcttcgacatgaccatcggcggtcaacctgccggccgcatcgtgatggagctctacgccgacgtgactccgagcaccgccgagaacttccgcgcgctctgcaccggcgagaagggcgccgggcggagcggcaagcccctccactacaaaggctcgtccttccaccgcgtgatcccgaacttcatgtgccagggcggcgacttcaccgccggaaacggcaccggaggcgagtcgatctacggcgccaagttcgccgacgagaacttcgtgaagaagcacactggtcccggcatcctctccatg

SEQ ID NO: 40547 - DNA, 287 bp, Glycine max
  Clone ID: LIB3139-021-P1-N1-A7
cagcaattgacaagttggggaagaagcacaaggagcacattgctgcttatggagaaggcaacgaacgtcgtttgacaggacgccacgaaaccgctgacatcaacaccttcttatggggagttgcaaaccgtggagcttctgttagggttgggagagacacagagaaagcagggaagggatattttgaggacagaaggccagcttccaacatggacccatacgtggttacttccatgattgcagacacaaccattctttggaagccatgagcaaaacctgcatgtttc

SEQ ID NO: 40548 - DNA, 163 bp, Glycine max
  Clone ID: LIB3139-021-P1-N1-A8
ggcaaagcaaaagccatcgcaatctcattcttcattcttcagcccacagagagagtcatcaatctaaacaaaattgggttccaaaggaacagacggacaatcaaaggaataggatttgcaacgatgcatgtactctagtacagaaattggatatatataattg

SEQ ID NO: 40549 - DNA, 373 bp, Glycine max
  Clone ID: LIB3139-021-P1-N1-B1
aaaattttgtttctttgtgtgtgtatggtgatgataacttaattagtgttcatgaatatgtcaagccttactttagtggttctaaattgaaaagctttctagctggtcataatatcaccattactgatggtattgacaaaactagtgcaactttgcaatttagaaagttagcagattgtgattttctcaagagaaactttaagcagatgtctaatgttttgtgggtggctcctgaagacaaggcgagtttatggtcacaacttcattatgtttcgtgtaataatctggaaatgcaagaagcttatcttgtcaatctcgtaaatgtgttacgagaactgtatttgcacagtccagaggaagctcgccaattgag

SEQ ID NO: 40550 - DNA, 371 bp, Glycine max
  Clone ID: LIB3139-021-P1-N1-B12
ctcgagccgctcgagccgattcggctcgaggcaaaaactgccagccatgccaacaagacattgagaattactgcagcaagaagatctggtcttacaatgatgtttatgtcgatggaaaacccacacagggtggctttgctgaaaccatgatcgttgagcaaaagtttgtggtgaagattccagagggtttggcgccagagcaagtggcaccattactgtgtgcgggtgtgacagtgtacagtccactggtacactttgggctgaaagagagtgggctaagaggtggaatattggggcttggaggagtgggacacatgggggtgaagatagcaaaggcactgggtcatcatgtgactgtgataagctcttct

SEQ ID NO: 40551 - DNA, 371 bp, Glycine max
  Clone ID: LIB3139-021-P1-N1-B2
ctttgttgttcagttcttatggttttcttgtgaattgttaaagaccaattagcatgggcagtattctgtgtccttctttaaccatagtcacgtcctatgcattcagcaatgaaccaaaacttgtctctaaattcactgcagtaacaggaaactcttactcaccactatggctttcttgcacacgccctggaaatccagctagaaaccattttcagctcaaatcctcaaatgggcttccgcaaaatgctgtttcttctaatgacggtttagctggaagttcattggccaaagaagatggcaagccccaaccacttgaaggaccatttccctttccagattcagaatataccggatccaaccttagtataact

SEQ ID NO: 40552 - DNA, 379 bp, Glycine max
  Clone ID: LIB3139-021-P1-N1-B3
gaagtttctaagatgacttctccctacattaaatgtacagtctctttcttcatagcatttggaaatttggctgatgacaccatcaattttgaggcttttccccacaagctggtgcagtttggagagattcaggaaaaagttgtgttgaaattttcacaagaggaatttcttacagcttggtcaactcaggtgcgtcccgcaacgactctgttggctgatgggtgcccatatttgtatgctatggtgcatgatagttcagtgtctacaataccaggtgattttgtcattggtgttaagttgacaaccataaacaatatgtgtgcatatgggctcaatcctggtatttcaggttctcgtcttttgggcaccattcctcagt

SEQ ID NO: 40553 - DNA, 375 bp, Glycine max
  Clone ID: LIB3139-021-P1-N1-B4
ctaaattgaaaagctttctagctggtcataatatcaccattactgatggtattgacaaaactagtgcaactttgcaatttagaaagttagcagattgtgattttctcaagagaaactttaagcagatgtctaatgttttgtgggtggctcctgaggacaaggcgagtttatggtcacaacttcattatgtttcgtgtaataatctggaaatgcaagaagcttatcttgtcaatctcgtaaatgtgttacgagaattgtatttgcacagtccagaggaagctcgccaattgagaaggaaagctctctctcgtattgaatggctgcaaaaagctgatgtgcctaccatagcacagattgaagagttccattcgatgc

SEQ ID NO: 40554 - DNA, 376 bp, Glycine max
  Clone ID: LIB3139-021-P1-N1-B6
caggctcactgagaaaacaatttttacttgcagagatttggacatcttggttgtttattatacaatagcaactcaatttagaaaatttctaccgcattacattaggtggcatctgtataccttgttgatttacattctcccatcttttctcactgctgaaattaaatataagcggaatctgagtaatattcatatttccggcttattttacgacggcagatacaaattctggactaaacacgagaaaaatcttgctttgacagaagaggaaaagatggaagtgattagaaatagaggtattcctgctgatgttcttgcaaagcgagctcatgaatttgaaaaacatgttgctcatgaaagcctcaaggatcaaatt

SEQ ID NO: 40555 - DNA, 305 bp, Glycine max
  Clone ID: LIB3139-021-P1-N1-B7
cccttctgctgagggtggaggagaagatgagggagttgatgatgcagctgataaggttgatgacattgatgacacattcaaacttcatgagcaccccgcattcgataataagcaatttggaaccttcattaacaggcttatcaagagtctgactaccaatcttgatgctaacctacaagagatggttaagaagcacatcgagcgaacgactaagtaccctctctataaaattgaagatattcaactactggttggcgtgagcatgggtgatgatcctggctcgggctatgcctactacaacgaca

SEQ ID NO: 40556 - DNA, 373 bp, Glycine max
  Clone ID: LIB3139-021-P1-N1-B8
ggcaaagtatgccttagtctacttaacacctggtccggcagcaaaaatgagaagtgggttccaggcatgtcaacaattctccaggttctggtatctatacaaggtctaatcctgaatactaagccttactttaatgaacctggatatgcacacatgagtggttcagcaaatggtgaaaagatgtcttttcagtataatgaggacacattcattctatcattgaggacaatgatgtatatgatacgaaagcctccaaagaatttcgaggaccttgttaaggggcatttctgcaaccgagctagcgatattctggtggcatgtaaggcatacatggaaggtgctcaagttgggtgtttggtcaaaggaggggttc

SEQ ID NO: 40557 - DNA, 377 bp, Glycine max
  Clone ID: LIB3139-021-P1-N1-B9
gaaagaatcccaggcgaggagaaagatggaggggaaggagcaggatgtgtcgttgggagcgaacaagttccccgagagacagccgattgggacggcggcgcagagccaagacgacggcaaggactaccaggagccggcgccggcgccgctggttgacccgacggagtttacgtcatggtcgttttacagagcagggatagcagagtttgtggccacttttctgtttctctacatcaccgtcttaaccgttatgggagtcgccggggctaagtctaagtgtagtaccgttgggattcaaggaatcgcttgggccttcggtggcatgatcttcgccctcgtttactgcaccgctggcatctcagggggacacataaacc

SEQ ID NO: 40558 - DNA, 379 bp, Glycine max
  Clone ID: LIB3139-021-P1-N1-C1
caaacatccatcatcattattattttactccgaacgagttgacaccgattccactcactcaaccatgagccgattcaggcgttttgagctcatagaacaaccacctttcttccactcctgctactctttcccttccttcgtcctccaagactcactctctctcgacctcgacctcttgccacttcccagccacttcgacgctttcgcagatctggtgcacgcgccgtcgttcgcttaccggcgcgtggagaggcatctcgagaatgagttgcgtttgcagagcctctctgaccgtgtggcggagctggagtcgcggttcgaccgtgtgctcggcggagatcggaagtacacgtggacagcggagatcaagggagcggag

SEQ ID NO: 40559 - DNA, 374 bp, Glycine max
  Clone ID: LIB3139-021-P1-N1-C10
caaatatgatataattggtgctggttcacattcttcaggagattttcctgaaaaggaagatcaagaaaaacccaaaaagattgataccagattgagacaaagaatagatcctcaatacaatgaggttcaggctcagatggaaacaaatttgtttaaattgtctcttgatgatgttgaaactcctaaaggttctatgttggatcttaaaatttctcaatctaaaattgcacttcccaagaacacagttggaggaaccattctgcgtagtgatctattggcaaattttttgacagagggcaattttagagcaagtgttgatttgcagcgcactcatcgtattaaaggaatgattaaaatggtggccacagttggta

SEQ ID NO: 40560 - DNA, 373 bp, Glycine max
  Clone ID: LIB3139-021-P1-N1-C11
attttctcacttctcagcactcagcagcgatatcagttgaagaaacagaaacaaacaaaagaggcagaagatgttgtgggtggacaaatatcgtcccaaaaccctcgaccaggttatggtccacaccgacatcgctcgcaatctcaagaaattggtaacggaacaggattgcccccatttactcttctatggcccatctggctccggcaagaaaaccctaatcatggctcttctccgccaaatgttcggacctggtgccgaaaaggtgaaggtggataataggacctggaaagtggatgctgggagtagatctcttgatttagagctgacaacattatcaagtgccaatcacattgaaatgagtccgagtgat

SEQ ID NO: 40561 - DNA, 373 bp, Glycine max
  Clone ID: LIB3139-021-P1-N1-C12
cattaattgcaagaatggcacttcgttgcttggtgatgtccctttctgttctcttcactcttggtcttgcgagagaaagccatgccagagacgaagatttttggcatgctgtttggccaaacactcccattccaagttcattgcgagatcttctaaagcctggccctgcaagtgttgaaatcgatgatcaccctatgcaaattgaagaaacacagtacccgaaaaccttcttctataaagaagaccttcatccaggcaaaacaatgaaagtacaattcagcaagcctccctttcaacaaccatggggtgttggtacatggttaaaggaaattaaagacactactaaagaaggatatagttttgaagagctatg

SEQ ID NO: 40562 - DNA, 228 bp, Glycine max
  Clone ID: LIB3139-021-P1-N1-C2
atttcctccgtaaattattcatagcatatttcaaaccacactcaaaaggcttccctccctgacttggatttgattgatttcattacattgctacactatattctttttattggtgaattgctatttgctacactatattttaaggacaattatacatagactatatggggttgatggctgcgaaccaaactcaattgttgtctaagatggccatcggagatggacatg

SEQ ID NO: 40563 - DNA, 378 bp, Glycine max
  Clone ID: LIB3139-021-P1-N1-C3
aatgagcgtcaacctttgaaaacatcccaatcctcatctgttgactttatggacctttctcagcagccatcagctgcaacctcaagtgagaagtcactggagttgtctgtcccagaaaatgaaggatgggcaacatttgatatgcctcagcacacatctactgcacaagtagaaattcaaccagcagtacaggaaaaatttgatccatttttgaacttaaatgcaaatacgctatggccatgttttgaaacttctagtgctagcgctctttcttcagttacatctaatttatggcgtgatgtcacatggaccagagaagaacaagtttctgttacggcatcaaactctcaatcatggagtgcatttaaggatcctgct

SEQ ID NO: 40564 - DNA, 377 bp, Glycine max
  Clone ID: LIB3139-021-P1-N1-C4
cttgaaacttgaaaagcggcgtttgctccgaccgagtgcttcagaggagaagtaatgactgcgatcgcgggaacgcacgtttttggtgttgtgagttttcagctcaaacaagctgaaatgccttttgcatgttcttgcttaatccgcaagcgtattggagattctcctcagcgcaatgtggctctaagacgcagagtaaatggaacaattcttccccaaatcagagcccagaatcttccagattatgttccaaaatccgagttttacaaagtagaagcgattctcaggccatggcgagttccccaggtttctgcggctttgttgaaaatgggaattcgtggtgtcactgtatctgatgtcaggggctttggtgctca

SEQ ID NO: 40565 - DNA, 376 bp, Glycine max
  Clone ID: LIB3139-021-P1-N1-C5
gatccttttcttggtggaattcaaaaatatgccactcccatgatgcccctagatgaagaaattctttctaaggttgcacaagatatggttgaggaatggtttgattgtgttgatgaggaggattcctttgaggaagtttctttaagtgcagcacttaatggtgttgagggtttggactatatggaaagaattcctcttgccacatctgagggttttcctcatgtgctttcacgcaaaaatggcgaaaaaggcaaaaggagatttgtctctggggatggtgaagagatgacattgattccaggaaccagtgttgaagaggcttacaacaagctaatagttgaacttgagaaaagtgttcctacattggttggcattg

SEQ ID NO: 40566 - DNA, 372 bp, Glycine max
  Clone ID: LIB3139-021-P1-N1-C6
gcgaaggagatagtgaaagagcttcttcctctaattcgagtgtacaaggatggcagcgtggagcgtcttctaagctttgaaaacgtggcagcctcccctgaagatccccaaactggagtctcatccaaagacatagtcatcgcagacaacccctacgtctccgctcgcattttccttcccaaatcccaccacactaacaacaaactccccatcttcctctacttccacggtggcgccttttgcgtcgaatccgccttctcctttttcgtccaccgctatctcaacatcttggcctcagaagccaacataatagccatctccgtcgacttcagactcctcccacaccaccctatccctgctgcctacgaagac

SEQ ID NO: 40567 - DNA, 377 bp, Glycine max
  Clone ID: LIB3139-021-P1-N1-C7
caacaactctcatttctcatcatcacttcccacttacgctcggtaatgtctcatttctcacgcatcaacccctaataataatcccccaaacagaacctttcccacccaatccaaacacagccctaaacccccccaccatcatcatgagtgccgtgaatttgaacacatggccacgccccagcttcattttgaaccaaaccgccacaagaagatccagatcctccccaacctctcatttctttcacggcgtcaataagttaccgtcacccatttcctccctcaccgttgccaaacgctcatttacgctctcggcggtgctgacgaaagaggacaccgtggagacggaagagaagccaccgattttcgacttcaagaac

SEQ ID NO: 40568 - DNA, 373 bp, Glycine max
  Clone ID: LIB3139-021-P1-N1-C8
taaatccacaaaatccttttgtgttaaataggtggatgggaaaactgactttccctcagggcacttcccgaagtgttaagagaatgcctctttctatagggggaggagctggtgcaaagaatgctattctcatgaatatgccaaatgctgttctttcaatgtggagatattttgttggagatctcgtctttgaagtttctaagatgacttctccctacattaaatgtacagtctctttcttcatagcatttggaaatttggctgatgacaccatcaattttgaggcttttccccacaagctggtgcagtttggagagattcaggaaaaagttgtgttgaaattttcacaagaggaatttcttacagcttggtc

SEQ ID NO: 40569 - DNA, 376 bp, Glycine max
  Clone ID: LIB3139-021-P1-N1-C9
ggtggcggttgcttctccaagggacacgaaattcatggactttcaaaaatggcgtgttagagaccacacggaatcaccttgcaggatagaagagggatccatcctggttaccgaatgcgaagcaagccagcactgctgcgaagcggctgaatcgaacaaaatcaggagttccggatatcttggcgacatgattacgctttttctcccgcgtgtgctgctggttctagcgcgtcaaagctctctccttccctttctttttcctctgtgcttttgtgtataacgcatgctgggaggggagatgatgacattcgcatgagcctcctttgctttggctgggggcgaggacccgtttgtagcatcgaggatacctacaaca

SEQ ID NO: 40570 - DNA, 377 bp, Glycine max
  Clone ID: LIB3139-021-P1-N1-D1
gggcgttgttggtcggacgcgaccgagggcggtggcgccgcccaggccgatggtgccaaaaagagaggtgatggcgaaaaaggtggcgttttgtttccggttaagcgaagtagtgctgtgtctgatttcgttttcggttatggccgcggataagacccgtggttggagcggtgattcttttgaccgctacaaggaatacaggtattgtttatcagtgaatgttattgcatttgtatacgcagcgtttcaagcgggtgatctggcgtatcaagtagtaacggggagacgcataatcaatcaccacctgcgttaccactttgatttcttcatggatcaggttttggcgtatcttttgatatcggctgcatcatctgctg

SEQ ID NO: 40571 - DNA, 371 bp, Glycine max
  Clone ID: LIB3139-021-P1-N1-D10
cttgtttcaaacctcttattttcaatcagcctcttttaacattttagttgtcattagtttctagccattttctccttaggtggtgtttgtagacaagtcaaattagtatcttagttttgtgtattgttcaatttgttaaaaccggttttcactactggattgggagggttcagacttcagaatcattgtctctgggaacatagttgttcttccattttgaagggttggaaaagtagttatggtgtgccaagcagcgagtcaaaccagatttcgggcattgaaacacgagaatggatatgcagggagctccaccataatagttagggttatagcatgctttcaacctctcacagattgccaggctgaatact

SEQ ID NO: 40572 - DNA, 374 bp, Glycine max
  Clone ID: LIB3139-021-P1-N1-D11
gggatagggccaagaggccaaagagtccggagaggaaagaggaggttccgccggtggagaaggtagaggaggagccggccccggatatgaatgaaatcaaggcactgccaccaccagagaattatatcccacctcctccgcctgagccagagcctaagccgcagccacaggttacggaggatttggtgaatctgagagacgatgcagttactgcagatgatcagggaaataaattggctttggcactctttgctggtgcacctgctaataatgtaaatggatcatgggaagccttcccatcaaatggacagccagaagtgacttcagcctggcaaaccccagctgcagagcccgggaaagctgattgggaattg

SEQ ID NO: 40573 - DNA, 372 bp, Glycine max
  Clone ID: LIB3139-021-P1-N1-D12
gtttcagttaactgttaatgtggttgcattaatagtgaatttcacatcagcctgcttaacaggaactgcacccctcacagctgttcaactcttgtgggtgaacatgataatggacacactgggagcacttgctcttgctactgaacctccaaatgatgatttaatgaaacgttcacctgttggaaggaagggaaatttcatcagcaatgtcatgtggaggaacatcttaggtcaatccttgtatcagtttatggtgatatggtttcttcagtcaagaggaaaatcaatctttttacttgagggccccaattcagatctagtcttaaacacgcttatttttaacacgtttgtcttctgccaggttttcaatga

SEQ ID NO: 40574 - DNA, 286 bp, Glycine max
  Clone ID: LIB3139-021-P1-N1-D2
aacacaatgtcaaggtcaattcgtgcaggggttgtttggatcaactgttattttgccttcgaaaatgacattccttatggaggatgtaagatgagtggatttggaaaagattctggattggaagccctacacaagtacctacatgttaaatccgttgtaacacccatttacaattctccttggctttgaattcctgtgtcttgggtgtgtgaatggtgtaaactatactattcaagacacgagtttctatcaatatcctttggctaagcaaataaaaatggggaca

SEQ ID NO: 40575 - DNA, 320 bp, Glycine max
  unsure at all n locations
  Clone ID: LIB3139-021-P1-N1-D3
ggctcaccaaggatgcgaggaagagcctccttcctcttcatattcatttaaaggttttacttgatcaactggaagaggatgttggtatcccgcggatgacgtatccaattctttctttgacaaggtaattgtgatcattgaaacatggcgagtagtctccaaaggaagaaggctcaccaaggatgcgaggaagaggacgtggtcgtggaaggggcaggggtagaggattttacaatgggggtatggaatatggtgatgattgggatggtgggcgtggctatggtggaagagggcgtggncgtgcatggtggcgtgctttt

SEQ ID NO: 40576 - DNA, 374 bp, Glycine max
  Clone ID: LIB3139-021-P1-N1-D4
ctcgagccgaatcggctcgagatttcaccaatacacttatactgcctgttataaatgggcctacagagggtcttatgataatatacatctgtcactttttcactgctatcgtgggtgctgagtggtgggttcagcaatttggaaagtctttgccattcttaaattggcttccttatcttgggggaatcccgacattcaaagctatattgtgtttaatgatagcttttggtgttacaccaacagtcacatgcaatgttagtaatgtttacaaggttgtgaagggaaagaatggaagcatgccacttgcattggcaatgctttacccatttgttgtacttgtgggaggagtgcttgtgtgggattatttgtcacca

SEQ ID NO: 40577 - DNA, 375 bp, Glycine max
  Clone ID: LIB3139-021-P1-N1-D5
gactccgattctgagctttcccacacttcaaaaagtgccagtgtctttttctgtggatacaaagttctaactggcaatgacaatgcttctgacttttctgatagtagtgaagaggacgaggaacttgcattggagggacaagataatggaaaacctgaattaaaagctgaaggtgcgaaggttaccaaaccttctaaatctattcccaagattggtgcaccagcaaaagctgctgatcctaagaaagacgaggatgatgattccgatgatgaatcggatgatgatcttgctggtgaagatgaatctggaagttccgatgagatggatgatgatagcaatagtgaagaggagagtgatggagatgatgaagagacc

SEQ ID NO: 40578 - DNA, 375 bp, Glycine max
  Clone ID: LIB3139-021-P1-N1-D6
cttgtgctccaaagcacctttaaccgcgttggtggtagatgtttttgcatttcaggctttggaatatgcaaaggagttcaatgccttgtcctacttttactttcctagttcagctatgatattgtcactgcttatgcacgcgccgaaacttgatgaggaagtttcaggtgagtacaaggacttaactgaacctataaggttaccaggttgtgtaccggtcatgggggttgatcttccggatccggcccaagatcgatcgagcgaaatatacaataattttcttgaacgtgccaaagcaatggctacagctgatggaatcttgatcaacaccttcttagaaatggaaccaggcgctataagagcgttgcaagagtt

SEQ ID NO: 40579 - DNA, 372 bp, Glycine max
  Clone ID: LIB3139-021-P1-N1-D7
caaaagggagaagaaaaggaaagaaaactctcaaaaaactattatagcaatggcagaacaaaaccaaaaccaaacaactgaagctggaaggcaccaagaggttggtcacaagagccttctccagagtgatgctctttaccagtatattctggagacaagtgtctacccaagagaacctgaatccatgaaagaactgagagagttgacagcaaaacacccatggaacatcatgacaacctctgcagacgaagggcagttcttgaacatgctccttaagctcatcaatgccaagaacaccatggaaattggtgtctacactgggtattcacttcttgccaccgctctcgctcttcctgaagatggaaagatctt

SEQ ID NO: 40580 - DNA, 305 bp, Glycine max
  Clone ID: LIB3139-021-P1-N1-D8
gcagcgcactcatcgtattagaggaatgattaaaatggtggccacagttggtattcctgaaataccagtattgcattggcctgtgctattaataggtcttttaaggggcgcgcccggtcttgatatttacaccatctgctctcaagactgtgaatggtggaatcctgcttgcacaaaagcaatgactatgtcatttaatccaaacccgtgttctgatgcatggagtttggaatttttgaagcgcaccggattacattgagatatcatttgtgacactgggtggactgccaccccaatgcaggatg

SEQ ID NO: 40581 - DNA, 373 bp, Glycine max
  Clone ID: LIB3139-021-P1-N1-D9
atttgataagaccctgcgaaggagggggatccattattcatattgtcgatcatatggttctagagccctggagtgtacctgaagttttgcgcccactgtatgagtcatcaatgctgctagctcaaaggacaactatggcggccttacgtcatttgaggcaaatttctcaagaggtttctcagccaagtgtaactggatggggaagaaggcctgcagctttgcgtgcactgagtcagagattgagcaagggctttaatgaagcagtcaatgggtttgcagatgatggctggtccatgttagagagtgatggcattgatgatgtcacccttcttgtgaattcctcacctagcaagatgatgggagttagccttgt

SEQ ID NO: 40582 - DNA, 378 bp, Glycine max
  Clone ID: LIB3139-021-P1-N1-E1
ccacccactcgcggcgaattgtgtaacaaggacagaagcagaggctgcggaaacaatgaagatactggtgaccggcgcattctgttttctcggtggaaaactctgcgacgccctcgcccggcaagggtactctgtcagggttctcgtaagatccaccatcgatatgtccgccctttctacgcacatcgaaatcttctacggtgacatcaccgactacgcctttatgctcgccgactgcttgtcctgcactctcgtattccaccttgccgtcctcgtggaaccctggcttactgatccttacaaattcttgtgcgacaacgtgggatgattgaaaaacgtgttggcggtggtgtaggagactcgcacagaggaaaaact

SEQ ID NO: 40583 - DNA, 375 bp, Glycine max
  Clone ID: LIB3139-021-P1-N1-E10
cacaaacatattttccctcccaaatatttgtgctcaaaaaacacacttctcatcaagacatagttgataaacatatgggcactctagtgggacatgtggctccaggttttggtttcttgttgataggtttgtggcacctctttaaccacatcaagctccacgcccttaacccaaagtcctacaagggcccatcatggttcccaagtgccaagttcagatacatagagcttgtgctcatcatggttggctccacagcctccgtagccatggaactcttcataggccctgagcggcaccaacctcttgacccagatggaaccattccctccaaccatctccacaacttcgagcactcttcaatctccatcaccttct

SEQ ID NO: 40584 - DNA, 374 bp, Glycine max
  Clone ID: LIB3139-021-P1-N1-E11
gtccagtgggtcccaatcttgaataaaatttcctatcttaagtatgtttattgaggtcagaaataagcaatttggtttgtaagggtacaacttactaaggaagagcatttgtcaatagcttgcaagttcatacaatttaattgacagggtaggaccagatgaaacttgcctgtttttctctatttttaggtttagctgattactttctttttgtctctgtgtgtgtgatgaactcttgatgttttacaattctgaaaatatcttgaaagttcaaaatgggaataactcattcagcaccttcgaagacacctggtcttgaagataagactgatccgttacctgaaattctgaagctaagttgttagtactgagaa

SEQ ID NO: 40585 - DNA, 374 bp, Glycine max
  Clone ID: LIB3139-021-P1-N1-E12
gcgatttcgatctcgcatagcattctacaatggccactattccagttaaccccaagcctttcttgaacaatttgactgggaagcccgtaattgtgaaactcaagtggggaatggagtacaagggctatctcgtttccgttgattcctacatgaacttgcagctggccaacactgaagagtacattgagggacagtttactggaaatttgggagagattttaatcagatgtaacaatgttctctaccttcgaggagtaccggaggatgaggaaatcgaagatgttgcagaagactagatagtgataaaagctgctaatggctatgacataaaatgaactcgaattttctactgtttttgtatcttaacttaaatg

SEQ ID NO: 40586 - DNA, 377 bp, Glycine max
  Clone ID: LIB3139-021-P1-N1-E2
attttagtggacaaaactggagattggatcacacttatacaaaattctccaattagtaacttgttgagagttgctgcttggaagaaaggctgtttaatggttaaaattgtgatgtctgggaatgcagcagtcaaaaggagtgattgggcctcattggtacaagtgtttttaacaaacagcaacagtacagagcatttcgatgcatgtaagtggacaaaatcggaaccacattcctgggaattgatcttcccaatagaggtatgtggtcctaataatggttttgaaatgtggagttctgagtgggcaaatcaaacttcatggcacttgagtttccttattgacaatcccaaacagtctacagtttttgatattctctt

SEQ ID NO: 40587 - DNA, 370 bp, Glycine max
  Clone ID: LIB3139-021-P1-N1-E3
ctctgtttctgtctctgtgtttgcggctgaggattccgaacgagcgaccttcttcgtttctcgcaaagtttaagtcatcatgggtaaggaaaagactcacatcaacattgtcgtcattggacatgtcgactctgggaagtcaactaccactggtcatttgatctacaagcttggaggtattgacaagcgtgtgattgagaggttcgagaaggaggctgctgagatgaacaagaggtcattcaagtatgcctgggtgcttgacaagctcaaggctgagcgcgaaagaggaattaccattgatattgctttgtggaagtttgaaaccaccaagtactactgcacagtcatcgatgcccccggacatcgtgac

SEQ ID NO: 40588 - DNA, 377 bp, Glycine max
  Clone ID: LIB3139-021-P1-N1-E6
ccgctttcatcttctcatctcttctcttttccctgctaatcatggcaaccttgtcaactgtgaaggtttccccccattgcatgtttcaaacagcaagcaaaaatccatccactgttgccaccacaatgaagtgcccttcttcttttgggtctgtgaagagcatttccagatcttttggcttgaagtcatcctcttcatttagagtcactgccatggcttcttacaaggttaagctgattggcccagatggaacagagaacgagtttgaagccactgacgatacttacatcttagatgcagcagagagtgctggagttgaacttccttactcttgccgagccggagcatgctctacctgtgctgggaagattgttgct

SEQ ID NO: 40589 - DNA, 357 bp, Glycine max
  Clone ID: LIB3139-021-P1-N1-E7
gcaaacgatccaaactcttttttcatttgcagcatcaaaatgagtggtagcaacgatggtagcggcagctggagctctaggtttttgaaggtggctagtgcagctgccgctacagccgccgttgccggcggtttatatgccattctttcatcctcaacctctgctagctctgagatggaagtgccgtttggcagcgcacggcgtgagagcaaagaacgtgacgatggtggctccgggtctcatcctcgcgagggtgccaccacggtcagtcgttggaagaaacctgagattggttgggtgaagctgaacgtggatggttcacgcgacccatacaaaagttcctccgctggttgtggt

SEQ ID NO: 40590 - DNA, 372 bp, Glycine max
  Clone ID: LIB3139-021-P1-N1-E8
gttatagtcttcctctgcactctccttctcttcttttctccgtcaattcgtgcctccgacgatgacgtggcgctgcacgcgaagaagctcatcagagacctcaacttgttccccgacgctgacgtcaacatcgttcccgttgctaattgcaccctccaaccccgcaggatcgtcgagaagcgcctgaggttcccgaagctgctagcttcggattccgagccttcggttgaggatttgggtcaccacgctggctattaccccattcagcattcacatgccgcaaggatgttctactttttcttcgaatcacgcaataggaaggaggatcctgtcgtaatttggttgactgggggacctgggtgtagcagtgaa

SEQ ID NO: 40591 - DNA, 374 bp, Glycine max
  Clone ID: LIB3139-021-P1-N1-E9
ctcttcctcaccgattgctagaatggaatttcgatgctcagtcatctcttttaccattctcttctctcttgctcttgcaggagagagccatgtccatgcatcgctacctgaggaagattattgggaagctgtttggccaaacactcccattcccactgcactgcgagagcttctaaagcctctccctgcaggtgttgaaatcgatgaactccctaagcaaattgatgatacacagtacccaaaaacattcttctataaagaagaccttcatccaggcaaaacaatgaaagtacaattcaccaagcgtccctatgcacaaccttatggtgtatatacatggttaacggatattaaagacacctctaaagaaggat

SEQ ID NO: 40592 - DNA, 375 bp, Glycine max
  Clone ID: LIB3139-021-P1-N1-F11
gttcttcaattctctccaacgttaacaaccttcattccatcctcgtatcggttattattaattttaattccacgtaatgggcaactacgtttcatgcaccttggcgcctcctttgatgaagaattccaaggccacgagggttatcatccccaccggtgaagtcaagcaattcaaagagatcgtgaaggctgcggaactcatgctcgaacaccccaactattttttggtcaattctcgttctttgcatataggaagaagattctctgctctcggtgctgatgaagagttggagttcggcaacgtgtatatcttcttcccgatgaggagagtgaactctcttgtcaccgcccctgacatggcagtactcttcttggc

SEQ ID NO: 40593 - DNA, 375 bp, Glycine max
  Clone ID: LIB3139-021-P1-N1-F12
tgctgttcttggttgttctgatgactctcgagccaaaagggtccgcgtgcttgagctctctcgcagattgaagcaccgtggccctgactggagtgggctccatcaacatggtgactgctttttagcacatcaacggttagccatagttgatcctgcttctggggatcaacctctctttaacgaggacaaatccgtcattgtcacggtgaatggagagatttacaaccatgaagagctcaggaaacagctgcctaatcacaagttccgtactggatgtgattgtgatgttattgcacacctgtacgaggaacatggagaagactttgtggacatgctggatggtatcttctcatttgttctactggacacccgtga

SEQ ID NO: 40594 - DNA, 376 bp, Glycine max
  Clone ID: LIB3139-021-P1-N1-F2
caggtgattttgtcattggtgttaagttgacaaccataaacaatatgtgtgcatatgggctcaatcctggtatttcaggttctcgtcttttgggcaccattcctcagtccatttcacagcaaactgtttggaatcaaatggcaacagtgagaacaccattgaattttgattctagcaagcagagcttttgtcaattttctattgaccttctcggtggaggaattttagtggacaaaactggagattggatcacacttatacaaaattctccaattagtaacttgttgagagttgctgcttggaagaaaggttgtttaatggtcaagattgtgatgtctgggaatgcagcagtcaaaaggagtgattgggcctcatt

SEQ ID NO: 40595 - DNA, 373 bp, Glycine max
  Clone ID: LIB3139-021-P1-N1-F3
gcaccatgctgttcctgttgacacacacgtgtggcggattgccaccaagtatctcttacctgagcttgcaggttcccagttgacacccaagctctgcgatcgtgttgcagaggcgtttgtaaccaaatatggtaaatatgctggctgggcgcagactctattgttcatagctgaattaccctcacaaaaagccctcctaccttcacatttgttgactgttaaacaacgcaatgctgcaaagatagaaggcagcgaagaagaagttgattgagatctacagttggtgtggttctcatgatataaatggacaagatgtaggtgtgacatgctgttgccaagaattcattaagtagaacatggtgatatcacgctg

SEQ ID NO: 40596 - DNA, 380 bp, Glycine max
  Clone ID: LIB3139-021-P1-N1-F4
gcgcttcctcccaacgggaaaatcgccaaggacgccaaggaaaccgtgcaggaatgcgtctccgagttcatcagcttcgtcaccagcgaagcgagcgataagtgtcagagagagaagaggaagaccatcaacggcgacgatttgctttgggctatgaccactttaggtttcgaggagtatattgatccgctcaaggtttacctcgccgcttacagagagattgagggtgattcaaagggttcggccaagggtggagatgcatctgctaagagagatgtttatcagagtcctaatggccaggttgctcatcaaggttctttctcacaaggtgttaattatacgaattcttagccccaggctcaacatatgatagttccgat

SEQ ID NO: 40597 - DNA, 370 bp, Glycine max
  Clone ID: LIB3139-021-P1-N1-F6
agcttagttgtcaagttggaatcaacccatactccatggaatggactggtttggccaatagattactgagtaagggcaacgatattctgtgttgcgattatgctagttttgatgttttgattaccaagcaagttatgagcaagatggcagaaatgataaacagtctttgtggtggtgatgaaaaattgatgcgtgaaaggacacatttgctgttggcttgttgttcaaggatggcaatttgtaagaaagatgtttggagagttgaatgtggaatcccttctggatttccgctcacagttatttgcaatagcatttttaatgagatgctcattagatatagctatgaaaaattactgcgccaggctagagc

SEQ ID NO: 40598 - DNA, 372 bp, Glycine max
  Clone ID: LIB3139-021-P1-N1-F7
gctttttcggttcttcctttccttccctttttcctcgccaacacggtaaccaaaacccccaaattgcctcagttagggtttcaatccaaattccaattccccaaccctcctcttcagaatccttcaaatcccgaacctttccccaactgggtcctcaaatccgccacggcgagccctcgtagctcgcgatctccgaaaccaacgatgccaaaattctcacgattcctcgccgtcgtcgcgatcgctgtcgccgcgctctgcgtgatcctccccgtcgcggcggcggtggatctcgaggaccccggcgtgctgcagctgccgtcggagagcttgtgcggcaaaacgatgccgttatcgtgcccggcgaaatgc

SEQ ID NO: 40599 - DNA, 367 bp, Glycine max
  Clone ID: LIB3139-021-P1-N1-F8
tagccttcttgagctggttcccaatttcaatatcatccctaatcatgctttggctattagctgcagggtagcagactctatattccgcccaagttctctcttccaacacatgttcatcttattggaaattcttagaaagtgtcaatagaaaagaaagtagagtagatgcttacactcatttaaattgattccttcatttctaccggaaatgggacagtactggcagattgtaaaaactaaaaatgcatacatgatttttccatgcaaagaaattaggctaccaaagtgttatgctgatttcctgatcctgtgattgaaggttaaacttttatgtttaccgggaattgggttgctaacatatgttttt

SEQ ID NO: 40600 - DNA, 370 bp, Glycine max
  Clone ID: LIB3139-021-P1-N1-F9
aaaagaccatgtcggtgaaggagtgcgagcaccacaaggggaagaagaggaagatcttccggcaagtgttctggtgcttagtggtgttccttttcatcgtgctggtcacaattcttttgatatgggcaatccttagacccaccaaacccaccttcacgctccaagacgtcaccgtctacgccttcaacgccaccgtggcgaacttcctcacttcgaattttcaggtcacgctcatctcgcgtaacccgaacgaccgcatcggtgtttactatgatcgcctcgaaaccttcgtgacctaccggagccagcaggtcacgtaccgaaccgccattccttcgacatatcaaggccataaagagatcaatgtttg

SEQ ID NO: 40601 - DNA, 374 bp, Glycine max
  Clone ID: LIB3139-021-P1-N1-G1
tttgcaccaactggactgacaactgaagtcaagtctgtggagatgcaccatgaatctcttacagaggcacatcctggtgacaatgtgggattcaatgttaagaatgttgctgttaaggatttgaagcgtggttatgttgcctcaaactcaaaggatgaccctgcaaaggaggctgctaacttcacagcccaagtcatcatcatgaaccaccctggtcagattggaaatggctatgcccctgtcctcgactgccacacttctcacattgctgtcaagtttgctgaactcatgaccaagattgacaggcgatccggcaaagagcttgagaaggagcccaagtttttgaagaacggtgatgctggttttgttaagat

SEQ ID NO: 40602 - DNA, 375 bp, Glycine max
  Clone ID: LIB3139-021-P1-N1-G10
caacggttagccatagttgatcctgcttctggggatcaacctctctttaacgaggacaaatccgtcattgttacggtaaatggagagatttacaaccatgaagagctcaggaaacagctgcctaatcacaacttccgaactggaagtgattgtgatgttattgcacacctgtacgaggaacatggagaagactttgtggacatgctggatggtatcttctcatttgttctactggacacccgtgacaacagttttatagtggctcgggatgctattggggtcacttccttgtacattggatgggggttagatggctctgtttggatttcatcagaaatgaaaggcctgaatgatgattgtgaacactttgagtgt

SEQ ID NO: 40603 - DNA, 376 bp, Glycine max
  Clone ID: LIB3139-021-P1-N1-G11
ggcaagtttatggtcacaacttcattatgtttcgtgtaataatctggaaatgcaagaagcttatcttgtcaatctcgtaaatgtgttacgagaattgtatctgcacagtccagaggaagctcgccaactgagaaggaaagctctctctcgtattgaatggctgcaaaaagctgatgtgcctaccatagcacagattgaagagttccattcgatgcagaggatgatgaatgctcctgattcaaatgataatattgatctactgttgagcattgatttgttgggtttacaaggagcaggcaaagcttttccaaacaagatcatttttgatgataagcttgtgttggctaacacacaagaattctttgatggaaatttt

SEQ ID NO: 40604 - DNA, 372 bp, Glycine max
  Clone ID: LIB3139-021-P1-N1-G12
cacactctttgtgaaaaaggggagtttcttattctttctagacgcttccattgatcggcgatttcttagacatggcggagcatcacgaacacgaggaagtgaagggtgagtccttgttggagaagatttctgggaagatccacgaccacgattcgtcatcttcgtcggattccgacaacgagaaaaccagcgcttctgactccttgaagtcaaaggttttcaggcttttcggcagagaaaagcccattcaccatgttcttggtggcggaaaaccggccgacgtttttctctggagaaacaagaagatatctgcatcgacactcggagttgcgaccgctatatgggttctgtttgaattgcttgagtaccacc

SEQ ID NO: 40605 - DNA, 371 bp, Glycine max
  Clone ID: LIB3139-021-P1-N1-G2
cagttttggtgcgggttatggcaaattctacacacgttattccgatgtattttctttgcatgatttcccccccccccccagctgtgaaatttatttggtttgcaaatgtgtataattttacctcaattatgtcttaggattgactttttcaatttgttcacccctttttttctgggaggtggtagaccggagctgcatggtctttgtaccgttgtcttagattttcattttggtcgttgggagagttacataatttttgttttctggtcctgtatccagtcaacatacatctaggagagcatgttgtatctttcctattttattggcttattcatcatgtataaacattatgtgaaaattttgctactgga

SEQ ID NO: 40606 - DNA, 373 bp, Glycine max
  Clone ID: LIB3139-021-P1-N1-G3
cttcactcccgcaccatcatcaagaacctcgtcaacgccgaacacgtggacgagatctccctcgtcgacaacgcctccaccgccaccgccatcgtcctccagcaagccgcctgggccttccaggaagcaaaattccagaaaggcgacgtggtcctcgtgctccactacgcctacggcgccgtcaagaaagccatcgaggcctacgtggtgcgcgccggaggcaccgttatcgaagtccccctccccttccccgtcacctccaacgacgacgtagtcaacgaattccgaaaagcccttgagaggggcaagtcccgaggcaacagaattcgcttagcggttatcgaccacgtgacttccatgcccagcgtggtca

SEQ ID NO: 40607 - DNA, 381 bp, Glycine max
  Clone ID: LIB3139-021-P1-N1-G4
aagtcagacaaatgttcaagctgaattggaaaatacagtgtctggtaatgccatgatggaagtaggaagctctagtgtagtatccaatacaagatctcggaggaattttcatccaaagcctggattaaggggccaagaaattaaaagcactggtccagtgacacgtgctggtaccagtaggtatggattgaggaacctcaaatgcaacactatttctgatgtcatccctgctggttgttcaccttcagattcaacccttaacagaaagaaggatgtcataaaaaagagaaattgtgaaggggaaggtagttccactggtagagggaagaaaatgagcgggtcttcattagaagcacgaaattctggctccagaaatggcat

SEQ ID NO: 40608 - DNA, 340 bp, Glycine max
  Clone ID: LIB3139-021-P1-N1-G5
ctcgagccgctcgagccgggaagagtgcattctgtccatttagttgaagaaaatgacagtagctttttaattccaaggtaatgcatttctttgatatcttggatattaaggaatgatgattatatttgccagtctgagagatgatgtctataagccagtgtcactctgtaacatggtctgatgtttaacgtgtatacaaatggctattgcttcaaggaacctattcttttttttatgcaaaattaatagtttaactgtaatttattgattggcgagaattaactgatgttggagtttcttacatataaatctaactggaattaatgattatggacgaatg

SEQ ID NO: 40609 - DNA, 374 bp, Glycine max
  Clone ID: LIB3139-021-P1-N1-G6
cccatttcttcttcttcttcctctttttatttctcacataactcctcttttcctcacctcaatctcactttttgttgttgtggttttctcttttgggtcttcagcttttcaagcgaagtctcaaagctaaaaaatttcaggtataacgtctctcaagttttttctggaagctaattagttattattggcaatgagcaatctcaagctaggtgtggaagttgtgggtgctcatgaccttatgcccaaagatggacagggctcatgtagtacttatgtggaacttcactttggtggtcagaaatttgggactacaactaaagagaaagatttgaatcctgtttggaatgagaaattttacttcaatgttactgatc

SEQ ID NO: 40610 - DNA, 317 bp, Glycine max
  Clone ID: LIB3139-021-P1-N1-G8
cccagaagcacatgccgagcaaaccgggacaggcaaagccgactttgcctctgcgcaacttcctatacatgtaagatgaggactcattcaatagcttgagatccttctgaacagagaaggggatgcccaaacttgcataatgcaatccggtgaataaggagatactatgttatataccgcagtggtggcatctgtaatagcactcgctgctcaaatatagggccaggacagatgttgacctgatttcgaaacctggcttcagacagcataaactctgggggtcgctatcacaggctgcatcgctttagacagataga

SEQ ID NO: 40611 - DNA, 368 bp, Glycine max
  Clone ID: LIB3139-021-P1-N1-G9
atgagggtgtgattgctctttggagaggaaatactgctaatgttatcagatatttccctactcaggctctgaactttgcctttaaggattactttaagaggcttttcaactttaaaaaggataaagatggctactggaagtggtttgctgggaatttggcatctggtggggctgctggggcttcttccctcttatttgtctattctttggattatgcccgtactcgtttagcaaacgatgcaaaggctgcaaagaagggtggcgagaggcagattaatggcttggatgatgtttacaggaaaaccatcaagtctgatgggggtgctggcctttatcgtgggttcaacatctcatggggtggaattata

SEQ ID NO: 40612 - DNA, 377 bp, Glycine max
  Clone ID: LIB3139-021-P1-N1-H1
ggaaatccggcaaaggggctcacccaaggccatgacctttaaaatccaatttttaattagctacattagctctgtcatgacattgtttgaaggggatgtcatactaactggtactcccccgggtgttggccctgtcaaagagggtcaaacaattactgctggcgttacaggccttgtggacgtacagtttaatgttgaaaaaagagctaggcctgttctttcttgataaaaccctcctcgaaggtactacagttctacagaaaatatcttgccaaaaggaaaccaggggacacaataaaaattcagttatatggacttgagagtctacgatatttaacagtttatttttttgtaatggtcgtcgaatccgtactata

SEQ ID NO: 40613 - DNA, 374 bp, Glycine max
  Clone ID: LIB3139-021-P1-N1-H10
caacaactctgttggctgatgggtgtccatatttgtatgcaatggtgcatgatagttcagtgtctacaataccaggtgattttgtcattggtgtcaagttgacaaccataaacaatatgtgtgcatatgggctcaatcctggtatttcaggttctcgtcttttgggcaccattcctcagtccatttcacagcaaactgtttggaatcaaatggcaacagtgagaacaccattgaattttgattctagcaagcagagcttttgtcagttttctattgaccttctcggtggaggaatcttagtggacaaaactggagattggatcacacttatacaaaattctccaattagtaacttgttgagagttgctgcttgg

SEQ ID NO: 40614 - DNA, 227 bp, Glycine max
  Clone ID: LIB3139-021-P1-N1-H11
aatataaaaaaaaaaaaaaaaaaaaaaaaaaaaaaaaaaaaaaaaaaaaaaaaaaaaaaaaaaaaaaaaaaaaaaaaaaaaaaaaaaaaaaaaaaaaaaaaaaaaaaaaaaaaaaaaaaaaaaaaaaaaaaaaaaaaaaaaaaaaaaaaaaaaaaaaaaaaaaaaaaagaaaaaaacaaagaaataaaaaaatttaagagataaaatggggggggggggggaatttt

SEQ ID NO: 40615 - DNA, 378 bp, Glycine max
  Clone ID: LIB3139-021-P1-N1-H12
attgaattatgattctagcaagcagagcttttgtcaattttctattgaccttctcggtggaggaattttagtggacaaaactggagattggatcacacttatacaaaattctccaattagtaacttgttgagagttgctgcttggaagaaaggttgtttaatggtcaagattgtgatgtctgggaatgcagcagtcaaaaggagtgattgggcctcattggtacaagtgtttttaacaaacagcaacagtacagagcattttgatgcatgtaagtggacaaaatcagaaccacattcctgggaattaatcttcccaatagaggtatgtggtcctaataatggttttgaaatgtggagttctgagtgggcaaatcaaac

SEQ ID NO: 40616 - DNA, 372 bp, Glycine max
  Clone ID: LIB3139-021-P1-N1-H2
cggctcgagctcgagccgaatcggctcgagcatcactagaagtgttggatgcatttctatttctaactaattattgtgcttattattattgttgagaaagaaaagaatggcaaagttaataaaattctttgagttgaacacaggggccaagattccttctgttgggttaggcacttggcaagctgagcctggtgttgtagccaaagctgtcaccacagccattctggttggatacaggcatattgattgtgctcaagcgtataacaatcaagcagagattggttctgctcttaagaagctttttgatgatggtgtggtgaagcgtgaggacttatggatcacctccaaactctggtgttcagatcatgcttc

SEQ ID NO: 40617 - DNA, 377 bp, Glycine max
  Clone ID: LIB3139-021-P1-N1-H3
ggcatggaaggagagcacgacgactgacagcagctttcgttgttttacgaatgcggtgtatactacttggatgattcaaacgccggtttcgtcgaccccgttcgcgttctcaatcgttcctaccaccgtttcaccgtttgtccttctacctactattccctgtgcttcaaatccccaacaacccccaacttcggctgctgcaccgttagttcctttctgagaaaacggaaacggaaacccaaagagcctccacctctgtacgaatgagaactaattgctctacagcgtcaccaggaagcgaggcctttgttgttggcggcacacgagtgcttgctgaaatcaactgagctgctgaatgttttgaaaactatacagag

SEQ ID NO: 40618 - DNA, 380 bp, Glycine max
  Clone ID: LIB3139-021-P1-N1-H4
attttattttctcaattttgttcaacaatctcagagcgctcttctgctcccaacgcatatgcatactgcacaatcaccaccaccacccttcgagtaatatggagatcacgagcagccatagcagcggcagcatgatgtggtttttcaaagataagggctttgatgacaacagtgtgcaaggaatgttccgaaagtgccggcgcctcgagggtgtgcatcaggaaagagcaagtgagaattgggactatttgagaagcattggcattgaggaaaggaaactgccctcaattgtttcgaaatgccccaaaattcttgcactagatctttatgggaagattgtgcccactgttgagtgtctcaggacattaggaacaaaacct

SEQ ID NO: 40619 - DNA, 382 bp, Glycine max
  Clone ID: LIB3139-021-P1-N1-H6
gcttctttgttccataggttcgtaccttacattgctgctattgacacaagggtgtgttgttttgtttttatcatcattgagaactaattaaggtacgtgtaaatgggtaagaagcttgatgctctccttggtagaaccttcaaggctgcaaagttcaaggctattgttaaccttgccatctcgcgccttgccgttctcaagaaccagcgccaggctcgccttagacaggcccgttctgatatccttgaactcctccaaattggtcaccttgaacgtgcttcgcttcgagttgagcatgtgatgaaggatcagaacatgttggatgtgtatgtcaggattgaaggatactgcaacctcttgattgagagggtccatctcatcg

SEQ ID NO: 40620 - DNA, 372 bp, Glycine max
  Clone ID: LIB3139-021-P1-N1-H9
cactcttctattttccaactttacaatttcatttcagatagcttcttgactcgttactgactcactcaatggctgaccgagttcaccccagccactcgccttccgtttccgccgattcacaaccgccatcgcctcaagactcccccgtcgttccgaaaccgccgtcgccaccgtcaccggagaagccagtgcctccgcctggaacctacgtcatcaagatccccaaggatcaagtctaccgcgtccctccgccggagaacgctcgccgctacgaccaatacgctcgccgtaaacaccgccggagccgatgctgctgctgcttctgctggctcatcggaatcctcttcattctcgtcgtgctcctcgccatcg

SEQ ID NO: 40621 - DNA, 308 bp, Glycine max
  Clone ID: LIB3139-022-P1-N1-A1
tgtattattttattcacaattgcaaaaggcccctcttcacccggttttttgagactcttacagttctcaggaagtcgcgtcagcttagggttagtggcgttggaactcagaatttcattcttaccgccaaaaagaccagccattaaagctactggaaagggttcaactctggtaagaaaaacatttttcttacctttcccaagtgctgtgcgaatccttttgttgatgtctgaggagcgattgttaactgcagaactaatccaagcagtggtgggtaaaccaccacgtccactaccacatgtaacatt

SEQ ID NO: 40622 - DNA, 356 bp, Glycine max
  Clone ID: LIB3139-022-P1-N1-A10
tgtctctcccctgcggctagggttttgtctttcactcactctcttctctttcttttcttctcatttcccttctctttcgatctgaacaataataattaaccatggaaccgtcgctgagttaacctttttcttctgcgcggtgctgttctcttttgttgtttgggtttttttttttctttctgagaagggcttgttgttgttgtgtttcgaaataatggcgactacgaatccctttgatttgttgggcgacgacgccgaggacccctcacagttgatcgcggcggagcaactgaaggccgcggcagccgcggccaccgcgccacccaagaaggaccaggccaagcccggagctcgca

SEQ ID NO: 40623 - DNA, 359 bp, Glycine max
  Clone ID: LIB3139-022-P1-N1-A11
ctttaagcagatgtctaatgttttgtgggtggctcctgaggacaaggcgagtttatggtcacaacttcattatgtttcgtgtaataatctggaaatgcaagaagcttatcttgtcaatctcgtaaatgtgttacgagaattgtatttgcacagtccagaggaagctcgccaattgagaaggaaagctctctctcgtattgaatggctgcaaaaagctgatgtgcctaccatagcacagattgaagagttccattcgatgcagaggatgatgaatgctcctgattcaaatgataatattgatctactgttgagcattgatttgttgggtttacaaggagcaggtaaagcttttccaaaca

SEQ ID NO: 40624 - DNA, 319 bp, Glycine max
  Clone ID: LIB3139-022-P1-N1-A12
tttcattttccctcactttctcgctccccaaacgcccctctctctcctccaatggccgaccagctcaccgacgaccagatcgccgagttcaaggaggccttcagcctcttcgacaaggacggcgatggttgcattactaccaaggaacttgggactgttatgaggtcacttggtcaaaacccaactgaggcagaactgcaggatatgataaacgaggttgatgctgatggcaacggaaccatcgatttcccagagttcctcaacctgatggctcgcaagatgaaagacaccgactcaaaggaggagcttaaggaggctt

SEQ ID NO: 40625 - DNA, 226 bp, Glycine max
  Clone ID: LIB3139-022-P1-N1-A4
ctcaatataatgacttgaaaagttatcttcttggggatgaggctgagaaagaaaatctgagaaagcaagttttccagctaaagggtgaactaaagaaaaaagacgacgcattaatcaacattgagaagaagttcaaggatagcaatggacgcacacagctttctgagggaactaaaacaaattcaaagaacaaaaagggtgcatcaattcctcagagctcaaaaga

SEQ ID NO: 40626 - DNA, 360 bp, Glycine max
  Clone ID: LIB3139-022-P1-N1-A5
gtaaagtttggttgacttatttggtatttgaagctttgggtttttaatagatatatctagtttaatgaatggatttgtaagttgagtatgttataagtttctccgttaggtcaccttggaagccagactttttatgcaattggcggatggtatcggaactttgtaggttctgcttggtttggtttttccttttattcgattttcatgttgtggccaagaattaggtgcctcgagtttagaggacgatagtctaagcatcttttctcacagggatttttgagtcagtttctgtttatatttattatatgcataattggtttttatgtttgcagtacactcagaaatcagaatgtttttatt

SEQ ID NO: 40627 - DNA, 359 bp, Glycine max
  Clone ID: LIB3139-022-P1-N1-A6
aaaagattgatgccagattgagacaaagaatagatcctcaatacaatgaggttcaggctcagatggaaacaaatttgtttaaattgtctcttgatgatgttgaaactcctaaaggttccatgttggatcttaaaatttctcaatctaaaattgcacttcccaagaacacagttggaggaaccattctgcgtagtgatttattggcaaattttttgacagagggcaattttagagcaagtgttgatttgcagcgcactcatcgtattagaggaatgattaaaatggtggccacagttggtattcctgagaatacaggtatagcattggcctgtgctatgaatagttcttttagggggcgc

SEQ ID NO: 40628 - DNA, 353 bp, Glycine max
  Clone ID: LIB3139-022-P1-N1-A7
cacaaaacccattttactccttctttcacaaaagaacaatatctcttgctatttgccaaactacgaacatcatttagaaccatgtctttctctaccaaattgcctttggtccttttattttcatccctttttatccatgcatctttagctgagatggtgtgtgaggacctgccaaaggaagtgtgtgctttctcattagcttcatcagggaagaggtgtttgttggagaccgagaaggtggccgacggttgcgtcgagtaccaatgccggacgtcggaagtggtggtggagagaatggcagagtacatagagacagaccaatgtgtggaggcatgtggggttgataggaactc

SEQ ID NO: 40629 - DNA, 332 bp, Glycine max
  Clone ID: LIB3139-022-P1-N1-A9
ctcgagccgaaaatttttgacaaacctaagacgcgctgcttcactattctccctatggagtttaatcttgtggtccgtcaaaagtttttaaattttgtgaggttcattatgaagaaaagggacaaacttagttgtcaagttggaatcaacccatactccatggaatggactggtttggccaatagattactgagtaagggcaatgatattctgtgttgcgattatgctagttttgatggtttgattaccaagcaagttatgagcaagatggcagaaatgataaacagtctttgtggtggtgatgaaaaattgatgcgtgaaaggacgcacct

SEQ ID NO: 40630 - DNA, 269 bp, Glycine max
  Clone ID: LIB3139-022-P1-N1-B10
gcatcttttgacgcccaccgccttattgagaaactacttgttcgtacagcacgctgaatcaaaattccccgatcaaaacaaatccgatgacttcactgcggataccggacttctccttagaccggtaagctaggcagctgtactgcccgccgtctcaactggacaataaatgagggatgaggtatacaaggggatctcgcgaggggaagaggaggatgcgtctgccgaacatctcatgcctttttcgcataccctaatgactcccgatc

SEQ ID NO: 40631 - DNA, 351 bp, Glycine max
  Clone ID: LIB3139-022-P1-N1-B12
ctggattcctgagaaagtttcttctgttgatgtatgtcctcaaactgtgtgacaagatggtcatggttgcttgtggttggcggcatacaatttctgtttcatctttgggtggcttatacacatatgggtggagcaaatatggccagttaggacatggaaattttgaggattctcttgtgcctcaaaagcttcaagccttgagtgataagttaatcagtcaggtatcgggtggttggaggcatagtatggcactgacgtctactggactactatatggatggggttggaataagtttggacaggttggagttggtgacaatgttgatcgttgctctcctgtgcaagtgaagt

SEQ ID NO: 40632 - DNA, 346 bp, Glycine max
  Clone ID: LIB3139-022-P1-N1-B2
gttatgagccatatgatgcaaagtgttttgttgttgcttttttcagttattaattttgtatcttattgtactaagtaatttaacggatgtaaatcatgattgataacaggtgaatggagagatttacaaccatgaagagctcaagaaacagctgcctaatcacaagttccgtactggatgtgattgggatgttattgcacacctgtacgaagaacatggagaagactttgtggacatgctggatggtatcttctcatttgttctactggacacccgtgacaacagttttatagtggctcgggatgctattggggtcacttccttgtacattggatggggattagat

SEQ ID NO: 40633 - DNA, 357 bp, Glycine max
  Clone ID: LIB3139-022-P1-N1-B3
gggggagtttcttcttggatcttaccctcttgtttgctaatattctcattcttctgtctctgcttcttctccttctgaactaagagatggggttgtctttcaccaagctttttagccggctctttgctaagaaagagatgcgtattctcatggtaggtcttgatgctgctggtaagactaccatcttgtacaagctcaagctgggagaaattgtcacaaccattcccacaattggattcaatgtggagactgtggaatataagaatattagctttactgtatgggatgtgggtggccaagataagatccgtcctttatggagacactacttccaaaacactcaggggcttatctttg

SEQ ID NO: 40634 - DNA, 362 bp, Glycine max
  Clone ID: LIB3139-022-P1-N1-B4
gggataagcctcaaccttgcaacccaacacaaccaaaagtcgctacttgttaagggctgcactataccagaatgtctcagggaagaggcagtgcatctttgcctattgtggtcactgtggtttcactactgtgccttttggaacgtgctaacgcagcaacttactccgttggaggacctgggggatggaccttcaacactaatgcttggcccaatggaaaaagattcagagctggtgatatcctaatcttcaactatgactcaacgacccacaatgtggttgctgtggacagaagtggatacaacagctgcaagacaccagggggtgctaaagtgttcagttcagggaaggaccaaatcaaa

SEQ ID NO: 40635 - DNA, 364 bp, Glycine max
  unsure at all n locations
  Clone ID: LIB3139-022-P1-N1-B5
atcattgccaccgaacaccaaccttgcttccccttctttctcttcatcctcttcttctcccagggaagaatggaatgttccttctcatgggaaaaattctccggcgaccaccactttacctacttctnctncgncgncgncttctncttcaccgncgncgnagttttgggaaactccggttgataaaagtgttacttttaggaatgagagtgaggagactccaaagccaaagttaaaagctttgcattgggataaagttaaggccagctcggacagggtcatggtttgggatcgcctgagaccaagttcttttcagttgaacgaggacatgattgaaacacttttcatggtaaataatcataat

SEQ ID NO: 40636 - DNA, 359 bp, Glycine max
  Clone ID: LIB3139-022-P1-N1-B6
aaaaagggtggagagagacaattcaatggtctcgttgatgtctacaggaagacattggcatctgatggtgttgccgggctctaccgtggtttcaacatctcatgtgttggaatcatcgtgtatcgtggtctgtactttggattgtatgattctgttaaaccagttgtcctcacagggtcattgcaggatagcttttttgccagctttgcccttggatggctcatcaccaatggtgcaggtcttgcatcatacccaatagacactgttagaagaagaatgatgatgacctctggtgaagctgtcaagtacaagagctccttggatgcattcacacagatcctcaagaatgagggtgccaa

SEQ ID NO: 40637 - DNA, 356 bp, Glycine max
  Clone ID: LIB3139-022-P1-N1-B7
gaatgagttgagagtcttgtgttgttcacctgtaacgtaacaagaaaggctttctaacgtgtcttctaaggtggtttcactgctccacggttgccgaatctagcttcttgcttctttctccttccaagatatcctttgattcaactttggatcttcacctctgatttcctttcatcgttgggtttatacacccttggggtttcccctcctcacccaactgtgtgcaacaaccacaaagtgtataccgtgtgttcttcctagaggggagaaaaaatggccacactttcagatattggggttgcagctggcttaaacattttgagtgcatttattttctttgtggcttttgctatttt

SEQ ID NO: 40638 - DNA, 354 bp, Glycine max
  Clone ID: LIB3139-022-P1-N1-B8
gtcaggttctggaatctgcgcaaagcgggtggtggtggacgcgcgccaccacatgctgggtcgtctagcctccatcgtggcgaaggagcttctgaacggccagaaagtggtggtcgttcgctgtgaagagatttgcatctcgggcgggctggtgaggcagaagatgaaatacttgaggttccttcgcaaacgcatgaacaccaaaccctcccatggccccatccacttccgtgccccctccaagatcttctggcgcaccgttcgtggaatgataccacacaagacaaagcgtggggaagctgctcttgctcgtttgaaggtttatgaaagaatccctcctccatatgacaagac

SEQ ID NO: 40639 - DNA, 350 bp, Glycine max
  unsure at all n locations
  Clone ID: LIB3139-022-P1-N1-B9
gtttttactaataattgcaatataaaaaagaagaatctacttcaacttattgtaattggtgaaagtaagaaataagaacagctaatatattctctaacaaaaaaaaaaaaaaaaaaaaaaaaaaaaaaaaaaaaaaaaaaaaaaaaaaaaaaaaaaaaaaaaaaaaaaaaaaaaaaaaaaaaaaaaaaaaaaaaaaaaagggggggaaaaaaataagaggaaaaaaaaaccccggaattaaatanggacccggacccggaaggagggcgggttttcctaaaagggaaattttttaaccttggggttttactggccaaaagtttttcccgggtgaaaattttttccccttc

SEQ ID NO: 40640 - DNA, 265 bp, Glycine max
  Clone ID: LIB3139-022-P1-N1-C10
cttctttttctttcttctttatctcaattgtttgtggttactgtgcagattaatggggaggttgtttgtggtgaatctggaagggacgatctatagctgcaaacactgccatacccatcttgcgctttacgacgacatctactccaggacattccattgcagacatgggaaagcttatctcttcaataaggttgtgaatgtttctattggcgaaatgggggacagacccatgatgactcgggttcatacccgggctgacattttc

SEQ ID NO: 40641 - DNA, 355 bp, Glycine max
  Clone ID: LIB3139-022-P1-N1-C11
cgcgatcgcttatccaccgtctaatcttagggtactatatgggtggcctgatgtctcgtaccagcagtgctccgatgtcagtgctcttatttactcagaacatcgctcggcatccgattacgtgggatccgacgcaacaacggccgactcaagaggttatccatgctgttcattcagcgcttcatttcgctctcgatacctgcgtcgaccaccccgatgaacctttgagttttgatgtacaggattctgtgctggttattccgaatagaaaagaccttaagcaacgggagtcaccgaaatccgggtgggaggtgaacgccaagttattcatatatacagcaaggaaggagtcgag

SEQ ID NO: 40642 - DNA, 358 bp, Glycine max
  unsure at all n locations
  Clone ID: LIB3139-022-P1-N1-C12
ccagggtgcagctatacagaaaatctggttaaaaaataaacagctaattgtggtcagcattacttggtgtaactcttcaagatcatccaaatgaattgatgtgagcttctgtaataacttcatgtcccagaataaactggtataatctaccggaagaaacgtatcctgccaagcctcaaatacagatttttcacacaacattacaggtgtaaatgaacaacaagcagctgaattttcagcaaaagctgaaaggtctttggatcctgtattcaactgcaacttgtgcttttcatgttcaaaccttcttgatagtatctgtcgaacaaatttaagattaacaatcanatgacgaatgtgc

SEQ ID NO: 40643 - DNA, 341 bp, Glycine max
  Clone ID: LIB3139-022-P1-N1-C2
cccttccttaggttgggaattcggttcgggaaaccttcaaatatgatataattggggctggttcacattcttcaaaaaattttctggaaaggaagatcaagaaaaacccaaaaagattgatgccagattgagacaaagaatagatcctcaatacaatgaggttcaagctcagatggaaacaaatttgtttaaattgtctcttgatgatgttgaaactcctaaaggttccatgttggatcttaaaatttctcaatctaaaattgcacttcccaagaacacagttggaggaaccattctgcgtagtgatttattggcaaattttttgacagagggcaatttta

SEQ ID NO: 40644 - DNA, 359 bp, Glycine max
  Clone ID: LIB3139-022-P1-N1-C3
gacggccccgtgttagaaatttgtggattgaattgtgacgagtcttgaataaagaaaagctgaagaagaaggttagttatttttcagctacactgcagtcatgttgaagaatgtagcacatcatgcttcacaaagttgcacgaattttcggatggaagttttatttttcgggtgtgtagagattaaagagaggaaggggagggggctgacacattgttaccttgtaataggggtttttcatttattctttgattatattttctgtgggttttagtgttattctctttacagtttcatgtattataagaaagaggcattgaatgataaattattccctcttcataatgggggatcctcag

SEQ ID NO: 40645 - DNA, 360 bp, Glycine max
  Clone ID: LIB3139-022-P1-N1-C5
ctcttattcaggaatttggagagactgttgatatagaaaggtaggataaaccagtggccaaggaatatatggcgttttctatggttttcattgttagcaacattatgctgcttttcagttcagcatttgccaaaactgctagtcctccctctctgagcccaactccagcaccagccccggcacccgactacgtgaacctcaccgagttgctcagtgttgctggtccatttcacaccttccttggataccttgagtccaccaaagtgattgacactttccaaaaccaagccaacaacactgaagaaggaattaccatctttgttcctaaggacagtgccttcaatgctgtaaagaaaactg

SEQ ID NO: 40646 - DNA, 309 bp, Glycine max
  Clone ID: LIB3139-022-P1-N1-C7
caccttccctttgttctcaacatcattccccaatttcccctttgattgttttcttatttctctttttcaatccccgatttcccccttcttcgtttgtgtcttcataattcaatcctctttaatctaggtcctggcttaacgaaatcaaatgtttaaggaagaatttctatgacgattccaccccatgcgacaatcgctcctcactccttttcgcgcttcctctctgttctcgcttctataactaacccccttaatccctaattctcacatttcccctttttctaattatcaactgcaaaccctaatttc

SEQ ID NO: 40647 - DNA, 344 bp, Glycine max
  Clone ID: LIB3139-022-P1-N1-C8
catagcaaacgatccaaactcttttttcatttgcagcatcaaaatgagtggtagcaacgatggtagcggcagctggagctctaggtttttgaaggtggctagtgcagctgccgctacagccgccgttgccggcggtttatatgccattctttcatcctcaacctctgctagctctgagatggaagtgccgtttggcagcgcacggcgtgagagcaaagaacgtgacgatggtggctccgggtctcatcctcgcgagggtgccaccacggtcagtcgttggaagaaacctgagattggttgggtgaagctgaacgtggatggttcacgcgacccatacaaaagtt

SEQ ID NO: 40648 - DNA, 358 bp, Glycine max
  Clone ID: LIB3139-022-P1-N1-D11
tatttattagcgtggctttattacgtaacgagtttctctctgtctggctcttcttcccttcgcctcttcttgttcttcttcttcttcaatatttcggagcaactctacatatctttagcctcctcttatatatttcggaagttggtttctgctggaaattttgcaaacaaattcatatactgaaaggactttatgactagggagttctatacaaccagaatcggaatggatctgagcactattgaattggcgaagggctaatgaagcttaatggtttattcacagggagcacgagaagctccagagaactctttacatcattattaagcagtcttatcaaaggtttctttccaagaga

SEQ ID NO: 40649 - DNA, 360 bp, Glycine max
  Clone ID: LIB3139-022-P1-N1-D12
gacaaattgggagcaggatttcaggagtatcgaaagatatatggtgaaaattattgtttagggcaactggttttttggcataatcagagtaatgcggagccagattgtaccctggctagaataagccggggttgtttgtcattaccagacatcagttccttttatgccaaagctcagaagccttcacgacatcgtgtttatggtccaaggactgtcagatctatgctggcaagaatggagaagcagccccagaaaccttggcccaaagaccggatttggtcattcaaaaattctccgaaattttttggtagcccaatgttagacgctgtaattaataactctccacttgacagagagatg

SEQ ID NO: 40650 - DNA, 358 bp, Glycine max
  Clone ID: LIB3139-022-P1-N1-D2
ggagattggatcacacttatacaaaattctccaattagtaacttgttgagagttgctgcttggaagaaaggctgtttaatggtcaagattgtgatgtctgggaatgcagcagtcaaaaggagtgattgggcctcattggtacaagtgtttttaacaaacagcaacagtacagagcattttgatgcatgtaagtggacaaaatcagaaccacattcctgggaattgatcttcccaatagaggtatgtggtcctaataatggttttgaaatgtggagttctgagtgggcaaatcaaacttcatggcatttgagtttccttattgacaatcccaaacagtctacagtttttgatattctct

SEQ ID NO: 40651 - DNA, 356 bp, Glycine max
  Clone ID: LIB3139-022-P1-N1-D3
gaaatgggtaattggaagaaaaaatgcagagagttggggaggccaagagaggtcttggacctcctcaccatcacaatcctcagcctcctcctccctttgtctttcttactcttagccactctctccggtgcccaatactaccttcaagccctcacttattattcctcacaaccctttccctatcttttccaccttgccctcaacatcaacccatgtattctttattttctcgtgtccattgtgagcgtggggaccctgatccaggggctgatgggtaaaatcacactcttgagcgagttaccctccaagtcctcgcgtatctccacagcgcggattttgctatgcgcctttcaagt

SEQ ID NO: 40652 - DNA, 362 bp, Glycine max
  Clone ID: LIB3139-022-P1-N1-D5
ctccgagccagcgagcgagaaccagactcaagaagaaaacgtgttgtgttagtgttacccctttctctctttctctctttcttgaatttggcgcgtgcgtttcgattcttcttccgaatcagagggattctggatttcttgttgaagatgcgacgctcttctgcatccaaaaagtcgggtcaatccaattccactcccaacgccgccgatctcttccgctctgcttcaagtaaggcaagctcgaaggaatcagaacgaattgatagtctattctattcatatgccaatgggtctaccgggttgattgacccagaaggaatcgaaacactttgtgctgatatggaggtggatcatacagatgt

SEQ ID NO: 40653 - DNA, 354 bp, Glycine max
  Clone ID: LIB3139-022-P1-N1-D7
caattaccttgttcctctcaaagtttgattctttttctcttgaattggattgttataatttttgttcatacttacatgttatgcagttatgaatgattgagagacaacacaaatgtcttctccagtgatctccgagatcctcctctctggcttcaccataaactcttccctaagacgcaggacacacttggtgcaatctttctctgttgttttcctccactggttctacgttttctcatgaactaaataaattaacctcgtacatagtataaacatagtacgtaccagtgttcttttttcaaattcaatcattaaacctagctagcagattagggttattattgttcaaatagc

SEQ ID NO: 40654 - DNA, 358 bp, Glycine max
  Clone ID: LIB3139-022-P1-N1-D8
gtaatattcagatttccggcttattttacgacgggggatacaaattctggactaaacacgagaaaaatcttgctttgacagaagaggaaaagatggaagtgattagaaatagaggcattcctgctgatgttcttgcaaagcgagctcatgaatttgaaaaacatgttgctcatgaaagcctcaaggatcaaattcctgctgttgacaagttgtattctactaaggttaataagtttgcaaaaattatgaaccttagacaaagtgttgttggtgatcttaaacttcttactgatgggaagttgtatgagggtaagcatattcctgtatctaatattagtgcaggggaaaatcatgtagt

SEQ ID NO: 40655 - DNA, 254 bp, Glycine max
  Clone ID: LIB3139-022-P1-N1-D9
gcttggaattacggctagcatcactaacgtattgtgttatattgtacacttgacatctgtaataaacgggcaatcgtcgtccaagtactaatgaaggacttcaacagacagaccactcagcaccagaaggcatgtcttgcaggaagtacactacaatgaacggtgagatgcgaccacgtcggatcaagctaagactcaagatcatcagcaccagcttagaaggcaggggatgcatcatgcaattgaactacaca

SEQ ID NO: 40656 - DNA, 354 bp, Glycine max
  Clone ID: LIB3139-022-P1-N1-E10
taaatgggtatcccaaattggtgaatctcaacccagcattttcttcacagataagtcaggacagcattataaagaatgcttgtccctggcagttgataatcttcctgttcttgatgggaagactccagtccaagtgtaccagagtttctgtgagagcttcaagtcttcattctctccattcatgggctctacgatcatgagcatttccatgggtttaggaccggatggtgagctacgttatccatctcacccccagctgccgagtaatggaaaaactcaaggtgctggggaattccagtgttatgaccaaaacatgctcagctttctcaagcaacatgctgaagcatctggaaa

SEQ ID NO: 40657 - DNA, 356 bp, Glycine max
  Clone ID: LIB3139-022-P1-N1-E11
gaaagttagcagattgtgattttctcaagagaaactttaagcagatgtctaatgttttatgggtggctcctgaggacaaggcgagtttatggtcacaacttcattatgtttcgtgcaataatctggaaatgcaagaagcttatcttgtcaatctcgtaaatgtgttacgagaattgtatttgcacagtccagaggaagctcgccaattgagaaggaaagctctctctcgtattgaatggctgcaaaaagctgatgtgcctaccatagcacagattgaagagttccattcgatgcagaggatgatgaatgctcctgattcaaatgataatattgatctactgttgagcattgatttg

SEQ ID NO: 40658 - DNA, 361 bp, Glycine max
  Clone ID: LIB3139-022-P1-N1-E12
gtgtgcagttcctcaaccgccacctttctgccaaactcttccacgacaaggagagcttgcacccacttttggaattcctcaggcttcacagcgtcaagggaaagactttgatgttgaatgacagaattcaaaacccagatgcactccaacatgttctgaggaaagctgaggagtatctgggcacagtgcctcctgaaactccctactcagaatttgagcacaagttccaggagattggtttggagagagggtggggtgacaacgcagagcgtgttcttgagtcaattcaacttctcttggatcttcttgaggcccctgacccttgcacccttgagactttccttggaagaattcctatggt

SEQ ID NO: 40659 - DNA, 360 bp, Glycine max
  Clone ID: LIB3139-022-P1-N1-E2
cacataatataattccaaaatcactcctattgctatagcaatatgatgggtgacactgagatcaaaccatcagttgaagtagtcatatgtgcttccatgaacaataacaatagcgcaaacaaccacaccctcccaaccgacatcaccaagtcatcacaatcacacttaccaatcttgaccaagctccatgctggttactttttcatatgcctttcctttggtgcacaagctttgctctggaagagtttgagtaaacacaacaaggactcacaaactctctggcatggattcaatttgatgccttccattgcgtttctactactttggtgtgtggcactgctcactgccactactttgtct

SEQ ID NO: 40660 - DNA, 351 bp, Glycine max
  unsure at all n locations
  Clone ID: LIB3139-022-P1-N1-E3
ctcgagccgtttaaattcctagccttggagcttatgcgcaccgcgataaaaaaaatgttgcgacttgatgattgcacatcaaacatgcattatcccaatgtttttacctaatttagcagccatagtggctattgaagacttgaagcatttttacccgacacaaaaactgttaactaatagccgttgttgctcggatctcttgtccatgcttggtgcaaacatatgagatgactatagattttccaactgtttaggattcatagcgacttanaaattttcttatgattgaacgtttcgcaattaatgatgttgatgctacattactggaacgaatgccccatttttccttgg

SEQ ID NO: 40661 - DNA, 363 bp, Glycine max
  Clone ID: LIB3139-022-P1-N1-E5
catcaacacttcatttcttactctcactgaaaaaaaatagcttgttcacaccatcctattttttcaactcatatatacaaatatatataacatggcttctaccttctctcgaagcctagcacttgtaagcttttacattgtcgtttgtgctgccggtaacttgaaccaagactttcagcttacgtggggagatggtcgtgctaaaatactcaacaacgaaaatcttctcactctctcccttgacaaggcctctggctctggcttccaatccaaaaacgaatacttatatggcaagattgacatgcagctcaagctcgttcctggaaactctgctggcactgtcaccgcctattatctgtcttc

SEQ ID NO: 40662 - DNA, 361 bp, Glycine max
  Clone ID: LIB3139-022-P1-N1-E6
gcatcaccaagcattctcctcattacaaagtcctgatgttgggccgtattttgggaggtattgccacttcacttctgttttcagcatttgaatcgtggcttgttgccgagcacttcaagaggggctttgatcaacaatggctatcattaacattctcaaaggctatatttcttggaaatggtcttgttgctattttgtctgggctgtttggaaatgtacttgttgatacattggctcttggacctgtggccccctttgatgctgcttcatgttttcttgctattggtatggccatcatactatcttcatggtcagagaatttcggggatccttcagagaacaaggacttgcttacccaatt

SEQ ID NO: 40663 - DNA, 250 bp, Glycine max
  Clone ID: LIB3139-022-P1-N1-E7
atttaataattaaaaaaataatagcattgatgcggcgactcgaacacattggggaaaagataatttattccattctctggcatgccattatttatttgatatcaacgatgtcgctcgaggaggtgcatcagttgctcttatatatattaattatcaatatcaaggtgttatttggacatagcatatggtctcagctggtgcggcggccgacctgtgagctaatgtacccggtaattcattgcgtatattt

SEQ ID NO: 40664 - DNA, 358 bp, Glycine max
  Clone ID: LIB3139-022-P1-N1-E9
ttgcagtgcaatagatcaattcagaaagcactttgcttatcttgaggaaaatcatggtaaaagtggcccagtgatacctccagaaaggaagcatgtctcccttccaaggtccactgttcactctagtacaattcctcctagtacacaaccatcttttacttcatacgagaacaagcatatggcagaagaggcatcaaaggttacgagatcagtagaatcaaattccggaagtcaattaaggagttcgcgacctccgccaagagtgccagcaggtataaactatatatttaatgtgatgctagcctaactctttcaataaagttattagaatttaaaatcaagaatagcgtggaacaac

SEQ ID NO: 40665 - DNA, 362 bp, Glycine max
  Clone ID: LIB3139-022-P1-N1-F11
aaggaaccaaatttacaaaattttgcaggtaggaggaattgagttgaaatcgaaagggaagcggtggtttaggttaggatttggtgagtgagtggggatggcgaagttcaatgtggtgcagaagcgaaggagagctctaatagcagagaagaagagacagcttcacggagaccctttaaccggcaagctcaagatcaaggaccaacccctttccctatccggaaaacgcaaacgcaagctcttcaaaaaatggcgccgggaccaaaaggacgccttacagaatggtttggtaaccatggaagatgttcaaatggcagttgctgaagcaggggataccaaagatacccctagaccttcaccaa

SEQ ID NO: 40666 - DNA, 357 bp, Glycine max
  Clone ID: LIB3139-022-P1-N1-F2
gctggtaatactcttatgccagctttttctgttccacaggctactgccagatcttctgaaaatgcggaatcctctgcatgatctggaattcgtgttttctttcgcttgttcgtttgtttaattcaataaaggaaattaggcatgaccctcttgttgagtatgctctgcctatctgaaaatttccacacctcttttaattgtcgtaatgatgtgtgaagtgtgtgttattttaaaaaaaaaaaaaaaaaaaaaaaataggaaggggggggtttaaaaaaaaaaaataaaaaaaaaaaataaataaaaaaattaaaaataaaaaaaaaaaaaaaaaaaaaaaaataagggggcggcccc

SEQ ID NO: 40667 - DNA, 359 bp, Glycine max
  Clone ID: LIB3139-022-P1-N1-F3
gttgaggattacttattcttgaaagggctagaagatttggtttggaaattaaaagggtctaatttttggattttttgacctatccaagccctacaaatagcaaagatttatttaactgcaaccaagggtactatcaaatcaaacccaggattggttgcactgttgtatgtttttagcattgatgttctctgtatttgccattgctagagatctcaaggtttttgtttgcattacagccgatgagaaagaaaactaagaaagttttgcagggatactggtgtgtagctgggatcaaggaactatgacctgtataagagctccagggtcgctttgtatgatttttaaaatctgaggattga

SEQ ID NO: 40668 - DNA, 311 bp, Glycine max
  Clone ID: LIB3139-022-P1-N1-F4
gtctctctgcgtgtgcgtgaaaaagaagcaaaaatgcattccggtcacttacttctcgaggaacccattcgcatggtttccatcctcgaaccatccaagcctaatttctttccggcaatgacgaagatcgttggtaccctgggtcctaaatctcgatcggtcgaggttatttctgcttgtctcaaagctggaatgtcagtggctcgtttcgacttctcttggggtgaccctgaatatcatcaggaaactttggagaatctgaagaatgctatcaagactactaagaaactctgtgcctgtatgcttgacac

SEQ ID NO: 40669 - DNA, 357 bp, Glycine max
  Clone ID: LIB3139-022-P1-N1-F5
caatcctgaaaatgcagttcgtagtatttttgttgcgcctttcagaggcggaaggcccattcgggtggttacatttccgaataccattgtgcagattgaaccagacatgaattcaaggtttcagcttttgagtaccactaccaatggtgattttgttcaagggaaagatctcgcaatggttaaagttaatgtagcatgtgctgctgttggcttgacatcaagttacactccaactccattgttggaatctggtttgcaaaaagacagagggttaattgtggagtattttggaaagtgtcttacgttgctcataacgttaatcagccccaagagaaagatttgttggagggaaatttt

SEQ ID NO: 40670 - DNA, 190 bp, Glycine max
  Clone ID: LIB3139-022-P1-N1-F6
aactcagaactggtacggacaaggggaatcctctgcatgatctggaattcgtgttttctttcgcttgttcgtttgtttaattcaataaaggaaattaggcatgaccctcttgttgagtatgctctgcctatctgaaaatttccacacctcttttaattgtcgtaatgatgtgtgaagtgtgtgttatttt

SEQ ID NO: 40671 - DNA, 358 bp, Glycine max
  Clone ID: LIB3139-022-P1-N1-F7
ctttaagcagatgtctaatgttttatgggtggctcctgaggacaaggcgagtttatggtcacaacttcattatgtttcgtgcaataatctggaaatgcaagaagcttatcttgtcaatctcgtaaatgtgttacgagaattgtatttgcacagtccagaggaagctcgccaattgagaaggaaagctctctctcgtattgaatggctgcaaaaagctgatgtgcctaccatagcacagattgaagagttccattcgatgcagaggatgatgaatgctcctgattcaaatgataatattgatctactgttgagcattgatttgttgggtttacaaggagcaggtaaagcttttccaaac

SEQ ID NO: 40672 - DNA, 351 bp, Glycine max
  Clone ID: LIB3139-022-P1-N1-F8
cgttgagccagttgtgcaagctcaaagtgctgaagtttactttgacttcttccctgtggaggttgatagtcaagagggagttgctcacattggtgaattgaaatctggtgtctatgttccactgcctacaaaaactaatttggtggaaactcccaaggaatggcaactggatctaccttgtgacaaaattcctagtgtcttgactacaactgatgagagattggtaggcacagaacatgagggatatgatccttttcttggtggaattcaaaaatatgccactcccatgatgcccctagatgaagaaattctttctaaagttgcacaagatatggttgaggaatggtttga

SEQ ID NO: 40673 - DNA, 297 bp, Glycine max
  Clone ID: LIB3139-022-P1-N1-F9
cggctcgagtgcttctcaaatccaacccagttcacaagaaggttccagtgtttattcacaatgagaagcccatagcagagtctcttgtgattgttgaatacattgatgagacatggaagaacaaccccatcttgccttctgatccttaccaaagagccttggctcgtttctggtccaaattcattgatgataaggtttttggtgctgcatggaaatccgttttcacagctgatgagaaagagcgtgagaagaatgttgaggaagcaattgaggctctgcagtttcttgagaatgaga

SEQ ID NO: 40674 - DNA, 363 bp, Glycine max
  unsure at all n locations
  Clone ID: LIB3139-022-P1-N1-G11
ctcacgggcacgcctttcattccattccgatgcgatgacgacgatgagttccctctccctctctcttgactggcacaatgaatcctaccctgcctatcatgatttctaccttctccccattttcgctctcttcttcccctcccttcgcttctttctcgaccgattcatattcgagaaagtggctagacgattgatttttggaaaggggcatgcggcgctggactaccagactgacgagagaagaaaaaagattagcaaatttaaggaatcagcctggaaatgtgtttattatctttccgccgagattcttgctttgtctgtaacatacgatgaaccatggtttacaaatactantaaactttg

SEQ ID NO: 40675 - DNA, 363 bp, Glycine max
  Clone ID: LIB3139-022-P1-N1-G12
tcctgcttgcacaaaagcaatgactatgtcatttaatccaaacccgtgttctgatgcatggagtttggaatttctgaagcgtaccggatttcattgtgatatcatttgtgtcactggatggactgccaccccaatgcaggatgttcaggttacaattgattggtttatttcctctcaggaatgtgttcccaggacctattgtgttttaaatccacaaaatccttttgtgttaaataggtggatgggaaaactgactttccctcagggcacttcccgaagtgttaagagaatgcctctttctatagggggaggagctggtgcaaagaatgctattctcatgaatatgccaaatgctgttctttt

SEQ ID NO: 40676 - DNA, 359 bp, Glycine max
  Clone ID: LIB3139-022-P1-N1-G3
cagtggttgtcatgaggatgaaattggtattacagcagtcacagctccagaacagcaaagagaaggggaaattccgatgttggatatgatatcccaaaatataagctctctggttgttggtgatgaagttttaaccccagaaattgaggaggatgatttgatatcactggaaggtgatccaattattgatagctcttcactttcagtagccagtgaacatagtagtatttgtggagatgagttcatcagttctgaggtttcttcagatttagggacaacaagttccaaagacataggaaagagcatctccactgtcaaaattgcagccagggctactgatttgagtatgtcaaatgtag

SEQ ID NO: 40677 - DNA, 298 bp, Glycine max
  Clone ID: LIB3139-022-P1-N1-G4
ttgttgttctctcacttactcacccttctcagttagttctcatgttatgattcaatctcacagagaatcttatgattctttgagtgagcagagagagagagagagagagcaagacacccctccctctaagaaatgcggtcaattcctctgggaacctcagtatctccaactcctataaacacctcaaagttatcacctttcagtgttaattttaagaaaccaaccactttcccatcttggggttcaactcctcctcatgaattctctctctcccaatcaggattatgtagagcaagtc

SEQ ID NO: 40678 - DNA, 365 bp, Glycine max
  Clone ID: LIB3139-022-P1-N1-G5
tagtcctaatagttatgcaaacgaccctatactaaaaaataaagagaaggtggtgtctgttctgaatgatatcacaatgcttgagaaccaaattccattcattgttctcaagaagttgtataggaaggtctttcccgattccagtgacatcaacaactaccaccgggttgctgatatcgttcgcaaggccttcggttacgacgaggtgaaaaaccctgtccacatacttcacttgatgcacttgtccactgtgcaacagagccagcaagagggtcaacgcgtgaagcaagagctattgcgctgtgccaagaggcttcaagctgcacgagttacaattgaagctgtaaacaccacttctggtcatg

SEQ ID NO: 40679 - DNA, 359 bp, Glycine max
  Clone ID: LIB3139-022-P1-N1-G6
attttgttggagatctcgcctttgaaggttctaagatggctcatccctacatgaaatgtacaggctgtttcttcataacattaggaaatatggctgatgacaccatcaattctgaggcttttccccacaagctggtgcaagttggcgagattcatgaaaaagttgtattggaattttcacaagaggaatttcttacagatcggtcaactcatgtgcgtcctacaacaactctcgtggctgatgggcgtacatatttgtatgctaaggtgcatgatagttcagtgtctacaataccaggtgattatgtgattggtgttaagttgacaaccatacacactatgcgtgcatatgggctcaat

SEQ ID NO: 40680 - DNA, 353 bp, Glycine max
  Clone ID: LIB3139-022-P1-N1-G7
cacacacaactacaagaaagaacttccttataaccaaaaccaacaacaactatggcaagttatcagaagcactacgatgatcagggtcgcaaggtcgacgagtatggcaatgttgagaggcaaactgacgaatatggcaacccggttcatgccactagtgtcacttatgtagccaccaaaagtgttggtggctacaatgatgacgctaataagcaacatgatattactggtgtctatcccgagaaagacaccggtagacatcattttggtcgtggttacgacggtgacactaacaagcaacatgatgctactggtgtttatcccggaatagacattggtagagatcatgggac

SEQ ID NO: 40681 - DNA, 359 bp, Glycine max
  Clone ID: LIB3139-022-P1-N1-G8
gaaaagggtcggccacttcccaaatttggtgaatgggatgtcaatgatccagcctcagctgacgggttcacagtgatttttaataacgccagggatgagaaaaagacaggtggcaacccagagtcaccaggaaagactgctactgatcctcataccaaacctgcagtagagcctggcaaaactcagactaaaaaatggattggctgcatgcaaaacccttctgccaaatcataccatatcaatggttgctcctgtgaaaagcctgaacagaagaacaatgtttatgtgtaactagcgtcacagcattttctcaaagataatgagctgtagagccataagcgaattctacggaatttata

SEQ ID NO: 40682 - DNA, 352 bp, Glycine max
  unsure at all n locations
  Clone ID: LIB3139-022-P1-N1-G9
ggccagaagagtctctcctcccgttgccgttctcctctccttcctcttcctcctcaccctcacacgcgcccgcgatgttccgaaccccttctccgaacccaaacctgactccgaacctggatcccatcatcccgaacctaaaaccgtttcgtttaccatcggcaccatcgatcccgttccgctgacgctcctccgcttccgtccgatcaaccgccacttccagcccggccgtccgttgcctctgtcgctccgcaccgcccaccgccgttgccgccacggccaccgccgcgagatcccctacggcaacgacgccatcctgctcggcgacgccgccgncgcgcgccggattcat

SEQ ID NO: 40683 - DNA, 361 bp, Glycine max
  Clone ID: LIB3139-022-P1-N1-H1
caagcaagttatgagcaagatggcagaaatgataaacagtctttgtggtggtgatgaaaaattgatgcgtgaaaggacgcacctgctgttggcttgttgttcaaggatggcaatttgtaagaaagatgtttggagagttgaatgtggaatcccttctggatttccgctcacagttatttgcaatagcatttttaatgagatgctcattagatatagctatgaaaaattactgcgccaggctaaagctccaagtatgtttttacaatccttcaaaaattttgtttctttgtgtgtgtatggtgatgataacttaattagtgttcatgaatatgtcaagccttactttagtggttctaaattg

SEQ ID NO: 40684 - DNA, 354 bp, Glycine max
  Clone ID: LIB3139-022-P1-N1-H10
aatttgggcatcaggaatcctgctcataacttcttcatcacatctgcacagttttgtgattcaacaagctcgcacgatggaccgtcacctctctccctcgttccaaatttccccagccagcatgtccattttcagcgtgctaaccatgatgtcaggagttgttctatatgaacgcctctttgttccctttgcgcgcagattcacagggaacccttctggaatcacatgtttgcaaagaatgggaataggcttcataatcaatatcatagccactgtgattgctggcctaatggaaatgaaaaggaaatctgttgctgctaagtaccacttattggatgatccaaaagccactat

SEQ ID NO: 40685 - DNA, 333 bp, Glycine max
  Clone ID: LIB3139-022-P1-N1-H11
ctgtttcttcttcttcttccattagttcctgctgaaagtcctaacacaacaccacccttcttcatcttcttatgtttttgacttgtggccaccactgtgacccatttctgtatcttctggcaaggttctatccgtttcttcttttggatcacccttttcactgttcgactccttcttgctatctgcttcgtcaatctgattattcatgggtgaaaagctaatttgttcacttgaataggtgtacagtgctaaagggttaagtttgaaacctagcctgctagttgcatcatcaggtcaaatccataactttctgggaatcaaacgatgatgatg

SEQ ID NO: 40686 - DNA, 382 bp, Glycine max
  Clone ID: LIB3139-022-P1-N1-H12
taacctcggcacgctattcctctctagctctttttttttcttcttccattcaatcctggtgggagttctaacacggcagcaggcttcttcatcttcttatgtttttgacttgtggccaccactgtgacccatttctgtatcttctggcaaggttctatccgtttcttcttttggatcacccttttcactgttcgactccttcttgctatctgcttcgtcaatctgattattcatgggtgaaaagctaatttgttcacttgaataggtgtacagtgctaaagggttaagtttgaaacctagcctgctagttgcatcatcaggtcaaatccataactttctgggaatcaaacgatcatgatgtttgaagatatgggtttttgtg

SEQ ID NO: 40687 - DNA, 351 bp, Glycine max
  Clone ID: LIB3139-022-P1-N1-H4
tcgccaattgagaaggaaagctctctctcgtattgaatggctgcaaaaagctgatgtgcctaccatagcacaaattgaagagttccattcgatgcagaggatgatgaatgctcctgattcaaatgataatattgatctactgttgagcattgatttgttgggtttacaaggagcaggcaaagcttttccaaacaagattgtttttgatgataagcttgtgttggctaacacacaagaattctttgatggaaattttccagtggattcttggttaccaatttttgtgaattgtctttatcctgtaagtcaattaccttcagaagctgtcgttgtaaatgtcacatgtggtag

SEQ ID NO: 40688 - DNA, 358 bp, Glycine max
  Clone ID: LIB3139-022-P1-N1-H7
aagagttccattcgatgcagaggatgatgaatgctcctgattcaaatgataatattgatttactgttgagcattgatttgttgggtttacaaggagcaggtaaagcttttccaaacaaaattgtttttgatgataagcttgtgttggctaacacacaagaattctttgatggaaattttccagtggattcttggttaccaatttttgtgaattgtctttatcctgtaagtcaattaccttcagaagctgtcgttgtaaatgttacatgtggtagtgggaccgtggtttacccaccactgcttggattagttctgcagttaacaatcgctcctcagatatcaacaaaaggattcgcaca

SEQ ID NO: 40689 - DNA, 354 bp, Glycine max
  Clone ID: LIB3139-022-P1-N1-H8
acgggcagcaccaagccagcatatgtagctcacaactggtctagtttgtctcgaccattcagttcaaggcctgctggaaacgatgtcattggtattgatttgggtacaaccaattcatgtgtttccgttatggaaggaaagaaccccaaagttattgagaattctgaaggtgcacgaacaacaccatctgtggttgctttcaaccagaaaggggagctgcttgtaggtaccccagctaagcgtcaagctgtaactaacccaacaaacactctctttggtaccaagcggttgattggtaggcgctttgatgatgctcaaacacaaaaggagatgaaaatggttccattcaagatt

SEQ ID NO: 40690 - DNA, 328 bp, Glycine max
  Clone ID: LIB3139-022-P1-N1-H9
cttaaacccccaaccatcgcgacgccgcgctggggctaacgttcggttcggtgcggtggaccgcgttcccagcgtagcccattgatgaaaggcccaattctgagcattgaaacaattcaaggcattcaaaccttaaaaacgcttcaacggaacaaaccttccaaacttttcttccttgtcttcaacacccttacgcgccttataaaattcgaccttcttgctactctgcgggagcttctacgccagaagcactgcaccatcgcccttcgcgccttcttcacccttcgatccgaatacggcgccgacctcttcctctacgccgagatta

SEQ ID NO: 40691 - DNA, 362 bp, Glycine max
  Clone ID: LIB3139-023-P1-N1-A1
ggtgattttgtcattggtgttaagttgacaaccataaacaatatgtgtgcatatgggctcaatcctggtatttcaggttctcgtcttttgggcaccattcctcagtccatttcacagcaaactgtttggaatcaaatggcaacagtgagaacaccattgaattttgattccagcaagcagagtttttgtcaattttctattgaccttctcggtggaggaattttagtggacaaaactggagattggatcacacttatacaaaattctccaattagtaacttgttgagagttgctgcttggaagaaaggctgtttaatggttaagattgtgatgtctgggaatgcagcagtcaaaaggagtga

SEQ ID NO: 40692 - DNA, 347 bp, Glycine max
  Clone ID: LIB3139-023-P1-N1-A10
caaccctagattgagagaaaaatccccaaaaacaaaacacacatctctttcattctctccctcaccaaaccctagattgaaagaaaccctaacacaccatgggaacacccgagacatcgcgcgaaccctgccccgatcgcatcctcgacgacataggcggcgccttcggcatgggagcggtgggtggctccgccttccattttctcaagggtctctacaattcccccaagggcgatcgcttcgtcggcgccacccaggccgtgcgcctcaacgccccccgcgtcggcggcagcttcgccgtctggggcggcctcttctccgccttcgactgcaccatggtctacgcg

SEQ ID NO: 40693 - DNA, 125 bp, Glycine max
  Clone ID: LIB3139-023-P1-N1-A11
cgattctagattgcaacaatgactaaaagagcccgagggggatccttctggtacaggtgcaacataacacttggcctgacggtagcttcaactgtcaactgggactccttcaacatctcgaagaa

SEQ ID NO: 40694 - DNA, 357 bp, Glycine max
  Clone ID: LIB3139-023-P1-N1-A12
gagaaactttaagcacatgtctaatgttttatgggtggctcctgaggacaaggcgagtttatggtcacaacttcattatgtttcgtgcaataatctggaaatgcaagaagcttatcttgtcaatctcgtaaatgtgttacgagaattgtatttgcacagtccagaggaagctcgccaattgagaaggaaagctctctctcgtattgaatggctgcaaaaagctgatgtgcctaccatagcacagattgaagagttccattcgatgcagaggatgatgaatgctcctgattcaaatgataatattgatctactgttgagcattgatttgttgggtttacaaggagcaggtaaagcttt

SEQ ID NO: 40695 - DNA, 373 bp, Glycine max
  Clone ID: LIB3139-023-P1-N1-A2
gcgttgtgttggaatcccaaattcatttctgtttctcattctcaattcttcttctattctcattctgatttgccacacacgcagaaaggttgaaaatagtgggacttgattcactggaggtggagaaagatggctaacaacgcagctgcttgtgctgagagagcaactagtgatatgctcattggtccagactgggcaatcaacatagacttgtgtgatatcattaatatggaccctgggcaagccaaggatgctttgaagatactcaagaagcgtttgggcagtaaaaatccaaaaatacagcttctggctctttttgtactggagacccttagtaaaaattgtggtgaaagtgtatttcagcagatcgttg

SEQ ID NO: 40696 - DNA, 336 bp, Glycine max
  Clone ID: LIB3139-023-P1-N1-A3
gaaacttgctgctatagaactgggcgctgtgtatacagggactatctttaacataccagctgttactataaaccaactaaaggtcattgagcaaagctaaaagcagaatcagatgaaaataccctccataaggaacacacatcatttgcatatatcaaggataatgatctctttctcaaaatgtacaccacaaatcttggcctatgagtacatgaagaatggagcgcataagaagaccatataacgtgacataacgacataccaaaacattattgtatgtggcatatcaaatcaacaatggcctggacactgctagacgcatcacatacctacatt

SEQ ID NO: 40697 - DNA, 356 bp, Glycine max
  Clone ID: LIB3139-023-P1-N1-A4
ctttttctctttatttctagtcttctctgtctatcatagatcttgaactatcctggcaagaactcagagcactaacatcttgcagccacaaaaatgggcttctttctgttaccaaaagcaactccttgcattttgttcttggctctgctgtcttgtacttgctttacttctacagatgcttatgatccactcgacccaaatgggaatatcacaatcaaatgggatattataagttggaccccagatggatatgtggctgttgttacgatgaacaacttccaacaatatcgtcatatcgcttcacctggctggtcaatgggatggacatgggcaaaaaaagaggtaatatggagcat

SEQ ID NO: 40698 - DNA, 365 bp, Glycine max
  Clone ID: LIB3139-023-P1-N1-A5
tggaaggatgtcttacgttgctcataacgttaatcagccccaagagaaagatttgttagagggaaatttttcctttgatattaaatctcgctctagattggaaaaagtttcctctacaaaagcacaatttgttagtggaaaaaccttcaaatatgatataattggtgctggttcacattcttcaggagattttcctgaaaaggaagatcaagaaaaacccaaaaagattgataccagattgagacaaagaatagatcctcaatacaatgaggttcaggctcagatggaaacaaatttgtttaaattgtctcttgatgatgttgaaactcctaaaggttctatgttggatcttaaaatttctcaat

SEQ ID NO: 40699 - DNA, 365 bp, Glycine max
  Clone ID: LIB3139-023-P1-N1-A6
gttgtcttgggaaaagtgggtagaaatgtagctgctggaatgactggaggattggcttactttcttgatgaggacaatactttcatacccaaggtaaatggagaaattgtaaaaattcaacgggtgtcagcccctgttgggcagatgcaactgaagagcctgattgaagctcatgttgaaaaaaccggtagtacaaaaggtgcggctattctgaaggactgggagaagtatttatcactattttggcagctggttccacctagtgaagaggatacccctgaggcaaatgccaagtacgacacaactacggcagatcaggtcacttatcagtctgcttagggtgacgatgcaaggttacattacat

SEQ ID NO: 40700 - DNA, 350 bp, Glycine max
  Clone ID: LIB3139-023-P1-N1-A7
ctcctcttctgccctccacacaacttctctctcctctctctctctctacaaatccttctttcttctcttcgctgctcactgtagcgtagccatggctttcagagttggaggagcgggaggaggaaatgcctcttctggcatgggtgttgctgagcatagcgtaagcacgttcctggaattgcagaggaagaaagttcatcgctatgtgatttttaaaattgacgagaaaaagaaagaggttgttgttgaaaaaactggaggccctgctgagagctatgatgatttcactgcatccttgcctgaaaatgattgccgatatgctatctttgactttgattttgagacatctg

SEQ ID NO: 40701 - DNA, 362 bp, Glycine max
  Clone ID: LIB3139-023-P1-N1-A8
ctaccatattgctgaagacaatggagaggtgctggatgaaggtgtgcaggggtattctttgattttcaaagggaatggagttgaagaattgactcgaaagttcgaggaagagacagggctagagggaatcattgtgtgtaatcggagtcctttgaatggaaagctttatcctcttcgcttgcagcttcctccaaacactgtcaccatgcgggttgttttggttcttcccatgtcaaatttggcaagagactttgaggcacaaggcttactgtgagaagcctttagagttttgcaacgaaagcctacgtatatgtagttatgtactgatcgaagccagttcagaatttaggaatatgttctag

SEQ ID NO: 40702 - DNA, 252 bp, Glycine max
  Clone ID: LIB3139-023-P1-N1-A9
cccggacagaacgcattagggttatcggcccgaaagcagatcatgcttggcggtcttagcttccttgatttcacgatctggatcgtgaccccaaagctcgaggtgggcaagcctattgcaccttcagggtggctaacttagaccatatctaccttttgtttcggccaaaccacatgtcagtcttcatacttctcgaggacccaggccagagcgattaccggaaataaggacggccatctcaaggatgacctg

SEQ ID NO: 40703 - DNA, 349 bp, Glycine max
  Clone ID: LIB3139-023-P1-N1-B1
attactgagtaagggcaatgatattctgtgttgcgagtatgctagttttgatggtttgattaccaagcaagttatgagcaagatggcagaaatgataaacagtctttgtggtggtgatgaaaaattgatgcgtgaaaggacgcacctgctgttggcttgttgttcaaggatggcaatttgtaagaaagatgtttggagagttgaatgtggaatcccttctggatttccgctcacagttatttgcaatagcatttttaatgagatgctcattagatatagctatgaaaaattactgcgccaggctaaagctccaagtatgtttttacaatccttcaaaaattttggttct

SEQ ID NO: 40704 - DNA, 358 bp, Glycine max
  Clone ID: LIB3139-023-P1-N1-B10
gagcagcccatccatctgaaagtttctgcttccatgccttcttttgctatgacagaaaattgatggtggattttgctggaccagcaggaacctgttaatattttatacgcctctgagcatcatctacatgagataaatgccatttatccttagtgtttttgttttcatttgttgaataaaggaagtgctgctttgtgttccacgggaacaatggagaggtacaagttaattaaggaagttggtgatgggacttttgggagtgtctggagagctattaataagcaaaccggtgaagttgttgctatcaagaaaatgaagaagaaatattactcttgggaggagtgtgtaaacctgagag

SEQ ID NO: 40705 - DNA, 360 bp, Glycine max
  Clone ID: LIB3139-023-P1-N1-B11
gtcacagacacggaaagggaaagagaaaacacagagagaaacaaaacattacttctttgaacttgatgtgtattgtagcaaatgtccttccgcagtattgttcgtgatgttagggacggatttggaagcttatcaaggcggagttttgatgtaaggctttctggtgggggcaagtcgaatagtttggtccatgaggagcacgaatgcctgccagttgtacagaacagccggtgggctagccttccgcctgagcttcttcgtgatgttattaaaagattggaagaaagtgagactacatggcctgctcgtaagcacgtggttgcgtgtgctgctgtgtgcaggtcctggagaggaatgtgc

SEQ ID NO: 40706 - DNA, 353 bp, Glycine max
  Clone ID: LIB3139-023-P1-N1-B12
aatctccccaacaacgggcccgtgcccatgacaggcccaaatttcggttaccggaactcgaatttgggcttaccacagaaccagaaccgggttcgtgtttctctccctgtttctgttccggttcaggttcactcatctgaaccggaaaagaagatcatggaccacaggcttctggaattggagaagcagcttctggaagataacgacgacgaaggagaagctgatgctgcgtctgtgataaccacgagcgagtggtccgagacttatcagaatttaatcagtcccagtccggttcagaaaccggttttgacgacgacgtcgccgacttcttccacgacgtcgtccacgtcatc

SEQ ID NO: 40707 - DNA, 365 bp, Glycine max
  Clone ID: LIB3139-023-P1-N1-B2
caacaaccaaaacccgaaaatccccctcaagaatacgaagaagtcgaagaggaagttgaggaagaagaggtagaggaagaggtcgaagaggaagaagaagaagaagaggaggacgaggaagaagaggaggaggaagaagaagaagaagaagaaaacgacgtcgtcaaacaacagcagcagcaacagcaagacgaagacgacatcccgatatcgaaacttctggaaccgttgggcaaggaccagcttctgaaccttctttgcgacgcggcggcgaagcaccgcgatgtggaggagaggatccgaaaggcggcggatggagatccggtgcaccggaagatatttgtccacggattgggctgggacac

SEQ ID NO: 40708 - DNA, 354 bp, Glycine max
  Clone ID: LIB3139-023-P1-N1-B3
gtttggtagagagcatatgcagcaagcacatctaggaaatatggctgagaatccgattcgtgtaacgatgattccatggtctgcctttggccacttgataccatttttcaaactttccatagccttagccaaagctggtgttcatgtctccttcatatccactcccaaaaacattcaaaggcttcccaaaattccttcgactttatctcatttggttcattttgtggaacttcctttaccatcattggacaatgatatcttgccagaaggtgctgaggccaccgtggacattccatttgaaaaacatgagtacttaaaggcagcattagataagctccaagatgctgtgaagca

SEQ ID NO: 40709 - DNA, 358 bp, Glycine max
  Clone ID: LIB3139-023-P1-N1-B4
gaaattttgataaaccgcgatcacaggttgccgcaccttaaaaccggaaacaaaagcaatcgttacttgatttcaagaatctctcaatttcttcctacttctttgtgtacggtttcttaagggaaagaaaatcactctctgtgctggccacagacttcgtgaatcattttcttttccactcttagtttatttgctgaacactctcctatttgatataggacttcgtgtcagatttaaacttcttctgtctctttctcagttctctgtttaatttcaagttcaagctggtgaaatcttggattagtgctcccactctcctatctggtataagacttcgggggtagacttttctatttct

SEQ ID NO: 40710 - DNA, 363 bp, Glycine max
  Clone ID: LIB3139-023-P1-N1-B5
gttgagaggaggcactgtggcagaagtcctaggagtgtaaaacagagacgcaaaatgaagacgatcttgtcgtctgagaccatgaatattcccgacggcgtgagcatcaaggttcacgctaaggttatcgaggttgagggccctcgtggaaaactcgtgcgagacttccaccatctgaacttggacttccaacttattaccgacgatggcggtaaaaggaagctcaagattgattcttggtttggttctcgtaaaacctccgccgccatccgcaccgccctcagccacgttgagaatttgatcaccggcgtcaccaagggataccgatacaaaatgagattcgtgtacgctcattttcctatc

SEQ ID NO: 40711 - DNA, 348 bp, Glycine max
  Clone ID: LIB3139-023-P1-N1-B6
aatgattaaaatggtggccacagttggtattcctgagaatacaggtatagcattggcctgtgctatgaatagttcttttagggggcgcgccagttctgatatttacaccatctgctctcaagactgtgaattatggaatcctgcttgcacaaaagcaatgactatgtcatttaatccaaacccgtgttctgatgcatggagtttggaatttctgaagcgtaccggatttcattgtgatatcatttgtgtcactggatggactgccaccccaatgcaggatgttcaggttacaattgattggtttatttcctctcaggaatgtgttcccaggacctattgtgttttaaa

SEQ ID NO: 40712 - DNA, 335 bp, Glycine max
  Clone ID: LIB3139-023-P1-N1-B8
gaaagtttttgtcaacaagcggccctgtccgtcggaggccgctaaggatttgagaccgtcccattccgaggctgggaacttgatgaagtgttgctcccaggttttgcagaagctgatgaaacacaaacatggttgggtcttcaacgcccccgtccatatattcgaattgaaactccacgactactgctatataatcaagcatccaattgatctgggtactgtgaagtcaaatctctctaagaacgtgtacgccacgcctgcgtattttgcctctgatgcgagattaactttcaacaatgcactcacattataccctaagggtcacgatttgtaca

SEQ ID NO: 40713 - DNA, 56 bp, Glycine max
  unsure at all n locations
  Clone ID: LIB3139-023-P1-N1-B9
tttaaacctagatgaggtgcaagggttgcatactttggcaatataacctngggggg

SEQ ID NO: 40714 - DNA, 370 bp, Glycine max
  Clone ID: LIB3139-023-P1-N1-C1
ctgaaagtcctgatcagtcttttgtccctgcaagaccaaccaagaggctcaagacattcaatacctccaacacttgtgccagtgacataatttcccacaaggtttctgcctcttcatcctcccaagttatttcctttgaccacttcaatgccccatcagatgcttcttccctgcaatttcatcgaaacctggacttcgatgtgaagccgaaaatcgagaaagcgtctagtgggaacatggattttgcagctttcgtttctcacggttcgtatgtggacaaaacattcctaagttctgatacgaatcaggttggaataacctctaggaacccaatccaagctcaagagcacgtaatagctgaaagaaaacg

SEQ ID NO: 40715 - DNA, 356 bp, Glycine max
  Clone ID: LIB3139-023-P1-N1-C10
ggagttcttatagtactaggatggatctgaagtttgtgttgttcaagatctgtgtggttttttttttcattgttgtttgcttaagatatatttgctttactaaagtaatttttctctttgcgtgtaggattaataattagctcatagtttttttggaagagttgtgaaaatgggacttgtggagctttttggggtggcatctatgcccgtgatcaaagtactactaatcactgctgttggcttgcttcttgcactggacaacgtaaatttgttgggaaaagatgcaaggatacaagtgaatcatcttgtgcattatgtgttcaatcctgcactggtgggtggcaatttggccgaca

SEQ ID NO: 40716 - DNA, 359 bp, Glycine max
  Clone ID: LIB3139-023-P1-N1-C11
ggcagaaatgataaacagtctttgtggtggtgatgaaaaattgatgcgtgaaaggacgcacctgctgttggcttgttgttcaaggatggcaatttgtaagaaagatgtttggagagttgaatgtggaatcccttctggatttccgctcacagttatttgcaatagcatttttaatgagatgctcattagatatagctatgaaaaattactgcgccaggctaaagctccaagtatgtttttacaatccttcaaaaattttgtttctttgtgtgtgtatggtgatgataacttaattagtgttcatgaatatgtcaagccttactttagtggttctaaattgaaaagctttctagctggtc

SEQ ID NO: 40717 - DNA, 359 bp, Glycine max
  Clone ID: LIB3139-023-P1-N1-C12
tacgggaattgtatttgcacagtccagaggaagctcgccaattgagaaggaaagctctctctcgtattgaatggttgcaaaaagctgatgtgcctaccatagcacagattgaagagttccattcgatgcagaggatgatgaatgctcctgattcaaatgataatattgatctactgttgagcattgatttgttgggtttacaaggagcaggtaaagcttttccaaacaagattgtttttgatgataagcttgtgttggctaacacacaagaattctttgatggaaattttccagtggattcttggttaccaatttttgtgaattgtctttatcctgtaagtcaattacctttagaagct

SEQ ID NO: 40718 - DNA, 353 bp, Glycine max
  Clone ID: LIB3139-023-P1-N1-C2
ctttcttcatagcattcggaaatttggctgatgatgccatcaattttttggctttttcccacatgctggtgcagttcggagagattcatgaaaacagcgtattgaaattcttcacaagaggaatttattacagcttggtcaactcaggttcgtgctgcaccaactctggtggctgatgggatggcatatttgtatgcaatggtgcatgatagttcaatgtctacaataccaggtgattttgtcattggtgtcaagttgacaaccataaacaatatgtgtgcatatgggctcaatcctggtatttcaggttctcgtcttttgggcaccattcctcagtccatttcacagcaaac

SEQ ID NO: 40719 - DNA, 369 bp, Glycine max
  Clone ID: LIB3139-023-P1-N1-C3
cgagataactagaaacagtgtgatgaaaatgaaggtccttgttttcttcgttgctacaattttggtagcatggcaatgccatgcgtacgatatgttccctctccgaatgaacactggctatggtgcccgtactccggaggtgaaatgcgcaagttggaggcttgctgtggaagcacacaacatctttggctttgagaccattcctgaagagtgcgttgaagcaacaaaggaatacatccatggcgaacaatatagatcagactccaaaacagttaaccaacaagcttacttttatgccagagacctcgaagtccatcccaaggacacatttgtgttcagtatagatggcaccgtactctctaatattcc

SEQ ID NO: 40720 - DNA, 364 bp, Glycine max
  Clone ID: LIB3139-023-P1-N1-C5
gttggaggaaccattctgcgtagtgatctattggcaaattttttgacagagggcaattttagagcaagtgttgatttgcagcgcactcatcgtattaaaggaatgattaaaatggtggccacagttggtattcctgagaatacaggtatagcattggcctgtgctatgaatagttcttttagggggcgcgccagttctgatatttacaccaatctgctctcaagactgtgaattatggaatcctgcttgcacaaaagcaatgactatgtcatttaatccaaacccgtgttctgatgcatggagtttggaatttctgaagcgtaccggatttcattgtgatatcatttgtgtcactggatggact

SEQ ID NO: 40721 - DNA, 364 bp, Glycine max
  Clone ID: LIB3139-023-P1-N1-C6
ctcaaagagcatcaaatcatgttgggggaaaataccatcacagtcgttcagacagtgcacctacaaggagtctagcttcatttgctcaagattataggaaactggcaattgattgcctcaaggttttacgcatagagatgcaattggagacagtattccatatgcaggaaatggcaaatacagaatacttggatgaccaagatgctgaagagccggatgacttcatcatttcgctcactgcacagataacacgaagagatgaggaaatggctccttttatttcaaatgcaaagcggaattatatatttggtggaatttgtggggttgcagcaaatgcatctgttaaggctttggcagatatgaa

SEQ ID NO: 40722 - DNA, 357 bp, Glycine max
  Clone ID: LIB3139-023-P1-N1-C7
gtttggactatatggaaagaattcctcttgccacatctgagggttttcctcatgtgctttcacgcaaaaatggcgaaaaaggcaaaaggagatttgtctctggggatggtgaagagatgacattgattccaggaaccagtgttgaagaggcttacaacaagctaatagttgaacttgagaaaagtgttcctacattggttggcattgaatgtcccaaggatgagaaacttcctcgtcgcaaaatttttgacaaacctaagacgcgctgcttcactattctccctatggagtttaatcttgtggtccgtcaaaagtttttaaattttgtgaggttcattatgaagaaaagggacaagc

SEQ ID NO: 40723 - DNA, 365 bp, Glycine max
  Clone ID: LIB3139-023-P1-N1-C8
cgtgagtaaatgaaagatggagatggtgactgttgactaatttaagggagcagaaagacaaaacgacagacagattggagagagaatgagtggcggaggagaagagggagcaactctggagttcactccgacgtgggttgtggccgccttttgcacagtcatcgtcgccatttccctcgccgctgagcgcctccttcattatggcggaaagtttctcaaagccaaggaccagaagccgctctacgaagctctccagaagatcaaagaagagctgatgcttttggggttcatttccctgcttttgacggttacacaaaacggcattaccaaaatctgcgttcgaccctctttgacgctccacatgc

SEQ ID NO: 40724 - DNA, 362 bp, Glycine max
  Clone ID: LIB3139-023-P1-N1-C9
agatgctcattagatatagctatgaaaaattactgcgccaggctaaagctccaagtatgtttttacaatccttcaaaaattttgtttctttgtgtgtgtatggtgatgataacttaattagtgttcatgaatatgtcaagccttactttagtggttctaaattgaaaagctttctagctggtcataatatcaccattactgatggtattgacaaaactagtgcaactttgcaatttagaaagttagcagattgtgattttctcaagagaaactttaagcagatgtctaatgttttgtgggtggctcctgaagataaggcgagtttatggtcacaacttcattatgtttcgtgtaataatctg

SEQ ID NO: 40725 - DNA, 362 bp, Glycine max
  Clone ID: LIB3139-023-P1-N1-D10
ggctcgaggttattttactgtgtgagagagaaaattaaacatgggaagaggaagggttgttctggaaagaatagagaacaagatcaaccgtcaagtaacattctcaaaacgcagaagtgggttgctgaagaaggcctttgagctttctgtgctatgtgatgctgaagttggccttatcatcttttctagccgtggcaagctttttcagtacagcagcactgatattaccaaaatcattgagaggtatcgccaatgtcgttacagcaagtcacacactggtgattcattggaacacgattcacagagcgcataccatgaattcttgaaattaagagcgaaatatgaatctcttgagcggacac

SEQ ID NO: 40726 - DNA, 310 bp, Glycine max
  Clone ID: LIB3139-023-P1-N1-D11
gaaatgcacgacgcttacattgccaatctcgacaatgagatacgagaattgtatttgcacagaccaaaggaagctcgccaattgaaaaggaaagctatctctcgtattgaatggctgcaaaaagctgatgtagcctaccatagcacagattgaagaggtccattctatgcagatgatgattaacgctcctgattcaaatgatactatagatctactgaagagcattgatctgaagggtttacaaggagcaggtaacagctttttcaaacaagcatagatgtgatgataagctagtgtaggctaacacaca

SEQ ID NO: 40727 - DNA, 264 bp, Glycine max
  Clone ID: LIB3139-023-P1-N1-D12
ctccattgaaggtaatgagaaaaactgcacctctcctgatgcagttcacaaagtaaggcaaaagatttcagaacatatggacttgtggttatctgaatgcgtcgacacaggcagaagttttatatgattatttacataagatgtgaatgatgtacttttttttctaagttgttaatgatgtactataactccgcatgacttttggtatttctttccttcataagctaattatgacaccgcgaaatatatttagtgacttcgtat

SEQ ID NO: 40728 - DNA, 365 bp, Glycine max
  Clone ID: LIB3139-023-P1-N1-D2
caaaagaacaatatctctattttccaaactacacacatcatttagaaccatgtctttctctaccaaattgcctttggtcctattattttcatcccttttcatccatgcatctttggctgagatggtgtgtgaggacctgccaaaggaagtgtgtgctttctcagtagcttcatcagggaagaggtgtttgttggagactgagaaggcagccgacggtggcgtcgagtaccaatgccggacatcggaagtggtggtggagaggatggcagactacatagagacagaccaatgtgtggaggcatgtggggttgataggaactctgttgggatttcatctgatgccttctttgagcctcaattcaccg

SEQ ID NO: 40729 - DNA, 359 bp, Glycine max
  Clone ID: LIB3139-023-P1-N1-D3
gagacgcttgttgttctctgaacagtacttcaccacagatagtcctcttcgtcaggatcctgcatactacgtacttaaggaggatgagtctccttgtatttttggttcaattgaaaagcagagatggtcctatgcctgtgctaagcagttgattgagaggcttgtttatgctgagggtgctgaaaatggcttggaattcacaattgtgaggccttttaattggattggaccacgaatggatttcattcccggcattgatggcccaagtgagggtgttcctcgggttctggcatgctttagcaataatctcctccgtggagagcccctcaagcttgtggatggtggccaatcccagagga

SEQ ID NO: 40730 - DNA, 344 bp, Glycine max
  Clone ID: LIB3139-023-P1-N1-D4
gagaaggaaagctctctctcgtattgaatggctgcaaaaagctgatgtgcctaccatagcacagattgaagagttccattcgatgcagaggatgatgaatgctcctgattcaaatgataatattgatctactgttgagcattgatttgttgggtttacaaggagcaggtaaagcttttccaaacaagattgtttttgatgataagcttgtgttggctaacacacaagaattctttgatggaaattttccagtggattcttggttaccaatttttgtgaattgtctctatcctgtaagtcaattaccttcagaagctgtcgttgtaaatgttacatgtggtagtg

SEQ ID NO: 40731 - DNA, 335 bp, Glycine max
  Clone ID: LIB3139-023-P1-N1-D5
gcgccctatagtggaaaatggcaggaagcaccattaacagaggagaaagatgggctctcaatggaatgactgctcttggcaccgacggaactcgtgggatcgggcactgcatagtgagtgactcggttgcgtgtggcgctgaagtgcacacctggttcaagacccaaacagagctcatcaaaagcttaccacagtggcagaggctggagagtcaggcaactgtgccgctctgtgacatgtacttaccacccctgagagagaagctcatccacgacgctgcattcgccttcgatggcatgcttaacatgtacatgaacagtgttggtataaacatt

SEQ ID NO: 40732 - DNA, 355 bp, Glycine max
  Clone ID: LIB3139-023-P1-N1-D6
gtcgcaaccgccgcagtctcagccgcaacccgaagttcctcgccggagctccgatgtggagaccgataaggatatgtcagctactgtcattgaggggaatgatgctgtcactggccacataatctccaccacaattggaggcaaaaatggggaacctaaagagaccatcagttacatggcagaacgtgttgttggcactggatcatttggagttgtttttcaggcaaagtgcttggagactggagaagcagtggctattaaaaaggtcttgcaagacaggcggtacaaaaatcgtgaattgcagttaatgcgcttaatggatcaccctaatgtaatttccctgaagcactgtttc

SEQ ID NO: 40733 - DNA, 353 bp, Glycine max
  Clone ID: LIB3139-023-P1-N1-D7
gcttggtcaactcaggtgcgtcctgcaacaactctgttggctgatgggtgtccatatttgtatgcaatggtgcatgatagttcagtgtctacaataccaggtgattttgtcattggtgtcaagttgacaaccataaacaatatgtgtgcatatgggctcaatcctggtatttcaggttctcgtcttttgggcaccattcctcagtccatttcacagcaaactgtttggaatcaaatggcaacagtgagaacaccattgaattttgattctagcaagcagagcttttgtcagttttctattgaccttctcggtggaggaatcttagtggacaaaactggagattggatcacact

SEQ ID NO: 40734 - DNA, 364 bp, Glycine max
  Clone ID: LIB3139-023-P1-N1-D8
aaacgattcgatttggagcaacagttacatctccaagaggcgtgatgaaaggattaattttgacatcaaagttgggggtgagatcaactctttcaagtcaaaggagccagcttgtgattacaatgaaaacatgaatggatctcttcttgccgtgccttacaacaacaataacattttgggtgttggtggagttggtctcaatggaggcttcaacaaaggaatttactccaagcctggttttgccaatcttaacaacaatattaacctgaatatcaatcctaagggacacaagttcaaggatgaagatgagctttttcacccatccaaaccttccaagaaaaacaacaacatcaacaaaaagcat

SEQ ID NO: 40735 - DNA, 365 bp, Glycine max
  Clone ID: LIB3139-023-P1-N1-D9
cgcaacgactctgttggctgatgggtgcccatatttgtatgctatggtgcatgatagttcagtgtctacaataccaggtgattttgtcattggtgttaagttgacaaccataaacaatatgtgtgcatatgggctcaatcctggtatttcaggttctcgtcttttgggcaccattcctcagtccatttcacagcaaactgtttggaatcaaatggcaacagtgagaacaccattgaattttgattctagcaagcagagcttttgtcaattttctattgaccttctcggtggaggaattttagtggacaaaactggagattggatcacacttatacaaaattctccaattagtaacttggtgagag

SEQ ID NO: 40736 - DNA, 364 bp, Glycine max
  Clone ID: LIB3139-023-P1-N1-E1
cttctttccaaatcccaactactactcacactcactgcagatctcaatccatggctaccattgttagcatcaaggcccgccagatctttgacagtcgtggcaatccaaccgtcgaggtggatttgacatgctccgatggtacttttgctagagctgctgttccaagtggtgcatccactgggatttatgaggcccttgaattgagagatggaggatctgactaccttggaaagggtgtatcaaaggctgttgacaatgtgaacaccattattgcccctgctttggttggcaaggacccaactcagcagactgctattgacaacttaatggttcaacaacttgatggaactgttaacgaatgggg

SEQ ID NO: 40737 - DNA, 357 bp, Glycine max
  Clone ID: LIB3139-023-P1-N1-E10
ggatattgtctctggcacgcgtgtaaagtcccactggtgctaacccaattgggggccccttctacaaagcgcattgcggttagtcatccacgatctcgtgttggggtattttactgtggaccaccagcgctaaccaaacagcttggtcagttagcttcggatttctctcacaacacaaacaccaaatatgatttccacaaagaaaatttctaataaggatggacactgtcgagggcaagatggtcttccactttatatcccaccatgtccttgttgataataattgtaggaataataattacggatttgtataattgcgaaagtgaatcacgagatgtgcgagtagtgactagtaag

SEQ ID NO: 40738 - DNA, 357 bp, Glycine max
  unsure at all n locations
  Clone ID: LIB3139-023-P1-N1-E11
ggaggctgatgggcttgagtgcttgcacttgaaagattgtgcactcgagttttttgaactcattggcaaggggaccttgaagcattttaagattgatgatgttagtgttatacatcttgatattggtgagacagttgagaatcttgagactgtggatatcagcaacttcccaattatatggccaaagttttaccagatgatttcaagatcgtcgaatttgaagaggcttcggctttgggatgtaatgtttgatgatgaagattgaggttgtggatttggaaacaatngcgacttgctttccctacctgagccatttatctctgagttatgatgtgagggatggagtgctttactatg

SEQ ID NO: 40739 - DNA, 352 bp, Glycine max
  Clone ID: LIB3139-023-P1-N1-E12
caaggatttcgattggcgagacaaaggagccgtcactaacgtcaaggaccaaggggcgtgtggttcgtgttggtctttcagtacgacgggagcgttggaaggagctcattatctggccactggtgagctcgtgagccttagcgagcaacagcttgtggattgcgatcacgtgtgtgatccagaagaatatggagcgtgtgactcaggctgtaatggtgggttgatgaacaacgcatttgagtacatacttcagtctgggggagtacagaaagaaaaggactatccatacaccgggagagatggcacctgcaaatttgacaaaaccaaagttgcggctactgtatctaattac

SEQ ID NO: 40740 - DNA, 370 bp, Glycine max
  Clone ID: LIB3139-023-P1-N1-E2
cggctcgagaaaaccttagtcaccaagaaattaaaagagcatcatcaccgttgaagctaaacgtgttgtgtgtgtgaagaacaaaacaacatcctctgcacacacacacaaacatcattattttttttcttcctcttcgaaccactaaaaaaaatgtttgatccacgaagaaaccaacccacaatttcgtttccattgtccaatgaaataggacaaataactcatggttatgacacatggggtgccacaaacactgattttatggcatcaaagaaaccacccaaaaattacaagaattgtcacagctacaacgacatggaagtgcaattgggaacaggatcaaaggtggatgataatgaatctggtattt

SEQ ID NO: 40741 - DNA, 367 bp, Glycine max
  Clone ID: LIB3139-023-P1-N1-E3
ctgcgcttcttctctggtctctggcttccttggtacgggaagaactcaatcttgtccatttccctttggtttttctctcttcgatctcttcaccttccattcgaccaccctcttatcacagctcgcgttaacttaagccctctccgttgagggtttctccaggtgtggtttgattttcagtttctgatgctgaagaaataaaaaagcttgaaggctttgctcttctgtgtgaaaaatgttggaaggtggtgcgaaattcccgggaataatagatctcaacaagaataataacaactactatgatttctctcaaggcttttaccataagctgggggaggggtaccaatatgtcaattgacagcgttgg

SEQ ID NO: 40742 - DNA, 364 bp, Glycine max
  Clone ID: LIB3139-023-P1-N1-E4
ctcgagccgtttctatcgaccttctcggtggaggaattttagtggacaaaactggagattggatcacacttatacaaaattctccaattagtaacttgttgagagttgctgcttggaagaaaggctgtttaatggtcaagattgtgatgtctgggaatgcagcagtcaaaaggagtgattgggcctcattggtacaagtgtttttaacaaacagcaacagtacagagcattttgatgcatgtaagtggacaaaatcagaaccacattcctgggaattgatcttcccaatagaggtatgtggtcctaataatggttttgaaatgtggagttctgagtgggcaaatcaaacttcatggcatttgag

SEQ ID NO: 40743 - DNA, 344 bp, Glycine max
  Clone ID: LIB3139-023-P1-N1-E5
gatcgttgttgttctaaagcactcatccacacattctgcggtgccacgacaacaatggctccaaagaaaggtgcgaaaggtggagttgtagcagcaaagaagaaagttcaggagaaggtaacgaaccctttgttcgagaagcgtccgaatcagttcgggatcggaggcgcgctgccgcctaagcgggacctgacgcgcttcgtgaagtggccgaagaacgtccaaatccaacgcaagaagcgcatcctcaagcagaggctcaaggtccctccggctctcaaccagttcaccaaaaccctcgacaaaaatctcgcaacaaatctttttaaaatgctgctgaagta

SEQ ID NO: 40744 - DNA, 365 bp, Glycine max
  Clone ID: LIB3139-023-P1-N1-E6
gagtcaacgaaatcgcgaacagaacagcaacgttaacaatgggttctcgctacgaggtggaactgaagctctcatcggcacgcgctctcaagaacgtgaactggcgccatggcccgaaccgcccatacgtcgtcgtttgggtcgacccaagcaacaagctctcgacgcgcgtggacgaaagcggcgacactgacgcgaattgggaccaaacgctcacaattccgttgccaccaaagcctctcgaggatcaaacgttgtacatcgacgtggtccacgccggctcggaggaggacaccaagccgcttatcggctcggctcggctcaagctggtggacattctcgacgacgttggaatcggcgagcgc

SEQ ID NO: 40745 - DNA, 361 bp, Glycine max
  Clone ID: LIB3139-023-P1-N1-E7
ctcgagccggtttctctttggttcctttctgatgtgccatatttgcatctcatgcaccaattcctctgtaaccgttattatttttgtgaaggggttggagagaaaaaaggacactgatcagtgactactgtttggttgctactactgaaaatggactacagcaatgacaacaaggagccatgggattggcatagggaggattattgtctccaaaggagtttcgattatgaaaattcacaagggctatggaatggagttcctcaaaatgaagatcttttccaatgtgttcaatgatgaaacaaccccagtgaaagcttgtggggactttgcatacaatgtcaataatagtgagttacaaaag

SEQ ID NO: 40746 - DNA, 361 bp, Glycine max
  Clone ID: LIB3139-023-P1-N1-E8
ctggaaatgcaagaagcttatcttgtcaatctcgtaaatgtgttacgagaattgtatttgcacagtccagaggaagctcgccaattgagaaggaaagctctctctcgtattgaatggctgcaaaaagctgatgtgcctaccatagcacagattgaagagtttcattcgatgcagaggatgatgaatgctcctgattcaaatgataatattgatctactgttgagcattgatttgttgggtttacaaggagcaggtaaagcttttccaaacaagattgtttttgatgataagcttgtgttggctaacacacaagaattctttgatggaaattttccagtggattcttggttaccaatttttg

SEQ ID NO: 40747 - DNA, 364 bp, Glycine max
  Clone ID: LIB3139-023-P1-N1-E9
ctgtactgttgctgtttgttaaaaacacttgtacagagcattttgatgcatgtaagtggacaaaatcagaaccacattcctgggaattaatcttcccaatagaggtatgtggtcctaataatggttttgaaatgtggagttctgagtgggcaaatcaaacttcatggcatttgagtttccttattgacaatcccaaacagtctacagtttttgatattctcttgggaatctctcaagattttgaaattgctggtaatactcttatgccagctttttctgttccacaggctactgccagatcttctgaaaatgcggaatcctctgcatgatctggaattcgtgttttctttcgcttgttcgtttg

SEQ ID NO: 40748 - DNA, 369 bp, Glycine max
  Clone ID: LIB3139-023-P1-N1-F1
cctacctctcccttcaagatgcagatcttcgtcaagaccctcaccggcaagaccatcacccttgaggtggaaagctctgacaccatcgacaacgtcaaggccaagatccaggacaaggaaggaatccccccggaccagcaacgtctcattttcgccggaaagcaacttgaggacggccgtacccttgctgactacaacattcagaaggagagtactcttcacctcgtcctccgtctccgtggtggcatgcagatcttcgttaagacactcaccggcaagaccataaccctagaggttgaaagctccgacaccatcgataacgtcaaggccaagatccaggacaaggagggtatccccccggaccagcaa

SEQ ID NO: 40749 - DNA, 364 bp, Glycine max
  Clone ID: LIB3139-023-P1-N1-F10
tgccaccccaatgcaggatgttcaggttacaattgattggtttatttcctctcaggaatgtgttcccaggacctattgtgttttaaatccacaaaatccttttgtgttaaataggtggatgggaaaattgactttcccccagggcacttcccgaagtgttaagagaatgcctctttctatagggggaggagctggtgcaaagaatgctattctcatgaatatgccaaatgctgttctttcaatgtggagatattttgttggagatctcgtctttgaagtttctaagatgacttctccctacattaaatgtacagtctctttcttcatagcatttggaaatttggctgatgataccatcaatttt

SEQ ID NO: 40750 - DNA, 360 bp, Glycine max
  Clone ID: LIB3139-023-P1-N1-F11
tggagggagaatgggaggaaggtcgttttcttcgtcttcttcttcgtctaggagttattcagtgccgaggacgtcaagctcagggttctctttttcggcgccgtattacgggccttctccgttcggtggggtttatgtgggtcccgccgtgggggtcggagtcggtgctggctcgagtttctttctcatcttagtgggattcctggcttttgttttggtttctggctttctttcggatcgctcagagggtagtgtgctcactgctgccgacaaaaccaccgtgctcaagcttcaggttggattgttggggatgggtcgcacacttcaaagggatctgaataggattgcagaagttgctga

SEQ ID NO: 40751 - DNA, 362 bp, Glycine max
  Clone ID: LIB3139-023-P1-N1-F12
gttggctaacacacaagaattctttgatggaaattttccagtggattcttggttaccaatttttgtgaattgtctttatcctgtaagtcaattaccttcagaagctgtcgttgtaaatgtcacatgtggtagtggacggtgtggtttacccaccactgcttggattagttctgcagttaacaatcgctcctcagatatcaacaaacggattcgcgcagcacttgggaaaggtaagaaaatagtttttcttactagagttgatccttttccagtagctttactggctggtctttttggtgttaagaatgaaattgtgagttctaacgccactaatgctatgctgacgcgacttcttgaaaact

SEQ ID NO: 40752 - DNA, 363 bp, Glycine max
  Clone ID: LIB3139-023-P1-N1-F2
gctttctagctggtcataatatcaccattactgatggtattgacaaaactagtgcaactttgcaatttagaaagttagcagattgtgattttctcaagagaaactttaagcagatgtctaatgttttatgggtggctcctgaggacaaggcgagtttatggtcacaacttcattatgtttcgtgcaataatctggaaatgcaagaagcttatcttgtcaatctcgtaaatgtgttacgagaattgtatttgcacagtccagaggaagctcgccaattgagaaggaaagctctctctcgtattgaatggctgcaaaaagctgatgtgcctaccatagcacagatttgagagttccattcgatgc

SEQ ID NO: 40753 - DNA, 364 bp, Glycine max
  Clone ID: LIB3139-023-P1-N1-F3
aaggacctaggttctgaattgaaacgggaggaaattgagcagctcatcttacaccttttactggcacggtttttgaaagaagaatttcagcatacaccttatgccacaaatgcttacattgctgtggggtcattggccaagcaaatattgcaagggaagaaatctgtgaaacttgagatttacactgaacagagaactaaagatggtgtaaggtcagcgaaacagtgtcttgggtcctctggtttggagctaaagcttgatgagctgagaaaagaactgtcctctgctcatggaggaatactcccacactctgtcttgtccactgaacaaatcatccaattagcttctcaaaaaccaaactcgc

SEQ ID NO: 40754 - DNA, 361 bp, Glycine max
  Clone ID: LIB3139-023-P1-N1-F4
aatttctctctttttgctcagtttctgttgtattttctcaattacaacatcgtattctgcaaattcaaaccgggtcttggttttctgaaagatgggaggtggcaaggacaagcatcatgatgaatctggcaaaggaattttttcacaccttgctcatggggtagctggtgcaacacatggtggacatgggtacccacctggggcttacccaccaccacctggggcataccctccacaacaaggatatcctccagctgggtatcctccacaacaagggtatcctccagctgggtaccctccacatcaaggctatcctcctgctggttaccccccagctggttatcctggttcatcacatgca

SEQ ID NO: 40755 - DNA, 366 bp, Glycine max
  Clone ID: LIB3139-023-P1-N1-F5
gcttttgagtaccactaccaatggtgattttgttcaagggaaagatctcgcaatggttaaagttaatgtagcatgtgctgctgttggcttgacatcaagttacactccaactccattgttggaatctggtttgcaaaaagacagagggttaattgtggagtattttggaaggatgtcttacgttgctcataacgttaatcagccccaagagaaagatttgtcagagggaaatttttcctttgatattaaatctcgctctagattggaaaaagtttcctctacaaaagcacaatttgttagtggaaaaaccttcaaatatgatataattggtgctggttcacattcttcaggagattttcctgaaaa

SEQ ID NO: 40756 - DNA, 367 bp, Glycine max
  Clone ID: LIB3139-023-P1-N1-F6
gaaggagcttgatgcagaggttcatcggaaatatgttggtggtggacatgttgctgcctatatgaagatcttggcggaagatgaaccagagaaataccagtcacacttcagtgaatacatcaagcgtgggatagaagctgatggtattgaggcactgtataaaaatgttcatgctgccatccgggctgatcctactctcaagaaatctgataagcagaccccgaaggagcacaagaggtacaacttaaagaagctgacatatgaggagaggaaggctaagttgatttcacgtgtggcagctctcaactctgctgctgataatgatgaagatgatgagtgaaagttcattgcagatgccttctcatgg

SEQ ID NO: 40757 - DNA, 277 bp, Glycine max
  Clone ID: LIB3139-023-P1-N1-F7
cttctttgaaacaaaagtatttcagagtcagcatgggggctcaaaccatttaagggagaaagataatgttaatgctacatttaaagacagaactgcaatacttagaaaaatactttgcgagtaactaactttctaaatgcacggcatgaggcacgcaacatcaacttgactaccctatttcccattatatgtccattaaaatacattgttcaaggactcttcttggaccatcaaggatcaccatgaaatttaacatttttcaaagaaatgaaaggcc

SEQ ID NO: 40758 - DNA, 357 bp, Glycine max
  Clone ID: LIB3139-023-P1-N1-F8
ctttctgattaatttcttcccttgtcttgtgtgtgtcctatctatgcttctctctttctcagtactactactgctctctctgcaactccatgccaatttttcagggctcatgatggtggcctgaactagtgggcaaataaagaccacagtgaaaagagataaccccactagtcataaaagggagagaagagaaaagaaagaaaaaaaaagagaggggctttatgagttatgaattatcatcatcacccgacttgcttttaacttttttttctttgtttgaattttccttctttttttttttttaacgttttgttggtgaaattggatattagggaccagttgtttgggttttagcat

SEQ ID NO: 40759 - DNA, 362 bp, Glycine max
  Clone ID: LIB3139-023-P1-N1-F9
ggtcaactcgctctaaccttttccttccgttcactcgccgccttgctcatcctcgccgtcacagtcacctcaaccgatcatgttctagacttctctctctcagctggagatgattcaacaaagtatagcttctaaattttgtgagtatagtctgggcaattgtaaaatggacttgcctaatcgtgataaacaactgactgttgctgtgaagaagacagcattgagagatctgcaaaatgataataaaatcatggtgccaacctctgttggaagctcttcatttttcaaggataaggatcttggtactgattctagtagagtttctggcaccaagagacccttgtctgactacccattgaatc

SEQ ID NO: 40760 - DNA, 101 bp, Glycine max
  Clone ID: LIB3139-023-P1-N1-G1
caggaacacaaatattccacaacataaaccaatacaatagaagctttaaaagttccttcatttctcatttcggctgttgagtctccaattatttgctaact

SEQ ID NO: 40761 - DNA, 346 bp, Glycine max
  Clone ID: LIB3139-023-P1-N1-G10
gccaagaatgctgttgtcatgaatatgccaaatgctgatctttcaatgaggggatattttgttggaaatctcgtctatcaagttcataagatgacttctcgctacattaaatgtacacgctctttattcattgcatttcataatctggctgatgacaccattaatatcgaggcttattcccacaagctggggcaattggtagcgattcaggaaactgctgaattgacatgttgacaacaggaatttgttacagcttgatcaactcaagtgcgtactgcaacaactgtgctggctgatgggtgcccatattcgtatgctatggtgcactgatatgactaccgtctac

SEQ ID NO: 40762 - DNA, 351 bp, Glycine max
  Clone ID: LIB3139-023-P1-N1-G11
aggagtggttcctgataatggctccttctcattattcactcctatcagttttgcaaacaacttggatctatgtggacctgtcactgggcacccttgtccaggctctcctccattttctcctcctcccccttttgtccctccacctccaatttctgccccaggaggtaatggtgccaccggagcaatagctggaggagttgctgctggtgctgctctattatttgctgcacctgcaattgcatttgcctggtggcgtcgaaggaaaccacaagaatttttctttgatgtgcctgctgaagaggatcctgaagtccatctgggacagcttaagaggttctcactacgagaact

SEQ ID NO: 40763 - DNA, 363 bp, Glycine max
  Clone ID: LIB3139-023-P1-N1-G12
tgggagacgagaataagaccaagtcccctgcttccggcgtgtggtccaccatcaagcctttcgtcaatggcggagcctccggcatgctcgccacctgcgtcattcaacccatcgatatgatcaaggtgaggattcaacttgggcaaggatcagctgcgcaggtcacttccaccatgcttaagaatgagggtgttgctgccttctataagggtctattctgctggattactcaggcaggctacatacaccactgcccgtcttggatcatttaaaatcttgacggccaaagctattgaggctaatgatgggaagcccctgccactgtatcaaaaagctctgtgtgggctgactgctggtgctatc

SEQ ID NO: 40764 - DNA, 366 bp, Glycine max
  Clone ID: LIB3139-023-P1-N1-G2
gttactggccaatattatcctgagtgggctccaattaattgtcgagttcatcgacaaccaattcacatcactgaaggaaattatgtcagaaagcaagatgtcagcattgaatatgatgcatgtacaattccaaatgattgtggttcattggttgttgccaaggttggaaatcacaaacaaattgttggtttccatgttgctggaagcaaaggaagactgggatatgcttcattgataccatatgttgagccagttgtgcaagctcaaagtgctgaagtttactttgacttcttccctgtggaggttgatagtcaagagggagttgctcacattggtgaattgaaatctggtgtctacgttccactg

SEQ ID NO: 40765 - DNA, 362 bp, Glycine max
  Clone ID: LIB3139-023-P1-N1-G3
gtttcctcgttcgaaattcccatctttttggatgcacattaattcggcatccctcgaagaagcgcgtttgatctaaaaccataaacctctgtctcgttagatctccttcttccgttctctaaacctctcctccgatccgatctgatccaaaatggcgacgatgacgagcttgattggtctcatcaataagatccaacgagcctgcaccgttttgggagatcacggtggcgagggcttgtcgctctgggaggctcttccctctgtcgccgtcgtcggtggacagagttcagggaaatcgtcggtgctagaaagtgttgtcgggagagattttctgcctcgtggatctggtattgttacacgga

SEQ ID NO: 40766 - DNA, 358 bp, Glycine max
  Clone ID: LIB3139-023-P1-N1-G4
agaaggtggaggacaaacttgtgagtctacagagaaggtttctatggggtggagattgtgaacaaaagaaaatagcctggatcaaatgggagacaatatgccttccaaaagaagatgtcggcttgggagtcaaagatatcaactcgtttaatttatcattgttgggcacatggaagtgggacttattccagcagcaaggggaattgtgggctagggtacttgaatcaaagtatggtggctggagggcgctaaatgaagcaactagagacaataccggatctatatggtggagggacctaaagagggtggctcaacatctgcaacatgaggccataatgaagaacacaacattatagaa

SEQ ID NO: 40767 - DNA, 365 bp, Glycine max
  Clone ID: LIB3139-023-P1-N1-G6
caccgctccaacacaggggaaaatgagggagatccttcacgttcagggagggcaatgcgggaaccagatcggttcgaagttctgggaagtggtgtgcgacgagcacggcatagatccgacggagaagtacgtcggaaactcagatctacatctcgagcgcgtgaacgtgtactacaacgaagcttcctgcgggcggtttgtcccacgcgcagtgctgatggacctggagcccggaaccatggacagagtgcgggactgggccgtacggacagatatttcggcccgacaactttgtgttcgggcagtccggcgcgggcaacaactgggccaaggggcactacacggagggcgccgagctcatcgac

SEQ ID NO: 40768 - DNA, 362 bp, Glycine max
  Clone ID: LIB3139-023-P1-N1-G7
ggactttccgttcacgacactcccttttatcgtttcacttccgtcgtcgtcgtcttcaattttggatcttcgaatcgaatcgcatcctatgggtagcagcagaggacacacgctcatggaggttggacccgacggggttgccgtcatcaccatcgtcaaccctcccgttaattcactttcctttgatgtattgcgcagtttaaaggagagttttgatcaggcgatacagagagatgatgtcaaggcaattgttgttacaggtgcaaagggaaaattttctggaggttttgatatttctgcatttggtggtattcaagaggcaaaagagcgtccaaaacctggttggatatcagtagaaatca

SEQ ID NO: 40769 - DNA, 364 bp, Glycine max
  Clone ID: LIB3139-023-P1-N1-G8
tttgcaagtactgtaatctttccctgcagcttactaatttcaactctatcaaattctattttcagtccattctaaagaaaatagacagatccagttgatatagagttttcaaatttggaagcatttatgttaaatgaaaattttattcaacccaatttgaattattgatggttcttatttgaaatgtggttatgcaggcttggttcacttacatttaaaactccagataatgtaaattatccatccatgaatcttgcattttctgctggccgtgctggaggcacaatgacaggagttcttagtgcagcaaatgaaaaagctgtagagatgtttattgatgaaaaggaaagtttttgtgttattt

SEQ ID NO: 40770 - DNA, 352 bp, Glycine max
  Clone ID: LIB3139-023-P1-N1-G9
attgtttgctgtcatgtcttattacactactctatcagtagcttattactgcaaactgattcattatgctctccaaaataggcgtctcaataataatagcttgacaggaggcatacccatatctttgacaaatgtttcttcactgcaagttctgtgagtgttactcctatacgtacattttccatgagttaatgccaaaatacattcctatttatactagtgtcatgtatttttataagtgtaacctgacacaactgtcattttggaatatagtgatctctcaaataaccatctaaaaggggaaatcccagtgaatggttcattttcattatttacccccatcaagttagta

SEQ ID NO: 40771 - DNA, 142 bp, Glycine max
  Clone ID: LIB3139-023-P1-N1-H1
cttactttacttggttgctcattcttgttgtccacaggtcataaaaaagcgatgtaaatcatgaaaaccgtacaaaaatatacacgtaggtatgtgtagatatattattctcttgtaatatcgtggatggatgattggttgt

SEQ ID NO: 40772 - DNA, 352 bp, Glycine max
  Clone ID: LIB3139-023-P1-N1-H11
cccttaacaacacatccatcactgggcgcacgtgagagactttcttgttgcgaacctccttattcttcttctgccccaacaaatgaaaacacacacacaacttccaaacccaccataacagaccctgcaatcactccttccaaatgagggcttattacgaagctatgtatctttttggtacgttacttgttcctaatatctgaccactaccctatctagcccgaactccgaagctcgatcctcatgaacgactgaatgagcctagcggtgctcttcatgacggacaagatgatccccgaagcgtcccgctacgtccagaagctgaacctgtttgggtatgacatcaacaaga

SEQ ID NO: 40773 - DNA, 366 bp, Glycine max
  Clone ID: LIB3139-023-P1-N1-H12
tgcgggtcaggaacgtttccggacaatcactagcagctactatcgtggggctcatggcattattgttgtttatgatgtcactgaccaagagagcttcaacaatgttaagcagtggctgaatgaaattgaccgttatgcaagtgaaaatgttaacaagcttctagttggaaacaagtgtgatcttacggcaaataaagttgtgtcctctgagacagcaaaggcatttgctgatgaaattggaattcctttcatggaaactagtgctaaaaatgccaccaatgttgaacaggctttcatggccatggctgctgaaattaaaaacagaatggcaagccaaccagtgaacaatgccaggcctccaacagt

SEQ ID NO: 40774 - DNA, 364 bp, Glycine max
  Clone ID: LIB3139-023-P1-N1-H2
cttgctctatctgtgacgagcatcatggcctcaagagcagcgttattgttggctatgtgtgtgcttccggcgatggttgtggccattcgcccagcaaagaaccctttttgcgtgaagggtcgtgtctactgtgacccttgccgtgctggttttgagacctcagctaccacctacattgctggtgctgagattatgtcgcaatgcaagagcagggttagcaacgaggttgtgtacactaagaaggggttcaccgactcaaccggagcatacacaatgtacgtggatgaggatcacgcatatcagatctgcagtgccaagcttgtaagcagccctgaccctcaatgcaaggaagtcaccccaggcc

SEQ ID NO: 40775 - DNA, 365 bp, Glycine max
  Clone ID: LIB3139-023-P1-N1-H4
ctggtccaatcacgaaatcagataaactttctccacaattatgccataaaggcagtgcaagaagctgggaatacaaggacttttcaagtagagatggacaaacaaagctgaaaaccaatgtgttttttgcttcctttgaccaaatgagtgaacgagcctctggtgagagtgcgtgcacggttttagttgcactcatagcacactggctccacaccaaccatggcatgccaaacaagagcacaattcgaaagactcatcacacaaggttcatctgaatggagaaagctatgcaacggtgattactactcaaagctcttcccggataagcattttgatctagagacaatcatagaagccaatctgag

SEQ ID NO: 40776 - DNA, 370 bp, Glycine max
  Clone ID: LIB3139-023-P1-N1-H5
atgaatatgatcacttgaagaaagaaaacactgagaaaaaagtggaattgcttgcatctcgcaaaggccacacacaccgcaaatacaataacactccatcttccaaaacaaagacttcgcgtccaagcaatttctgagtgataacaaaacaaaacaaatattatcaaaaggggcaaactttgaaaccaaaatcagattttattttttatttttttgctgaatctgaatagatcagaaggtgatgtcgtgttcgtcgtcatctgggtcggaggaagacgatgagggattcgactcttaccggaaaggaggctaccacgccgtcagagtcgccgatcagttcgccgccggcaggtacatagcgcagagaaag

SEQ ID NO: 40777 - DNA, 368 bp, Glycine max
  Clone ID: LIB3139-023-P1-N1-H6
aggaggttgagtagttcttcatcatagtcttaaacattaaaccttagcaaaactcaacaatgctagacatcaaaggctacctcgtactcttcttcctatggttcatatcaaccattctgatacgttccatcttcaagaaaccacagcgtctaagactcccaccgggtcctgcaatcataatacccttgctgggacaccgcgccatatctccgttcactgctccaccaagcattgtacaagctatcactgcgctatggacccttgatccacgtcatgatcggttcgaagcacgtggtggtggcgtcgtcggcggagacggccaagcagatcctcaaaacctcggaggaggcattctgcaaccgtccctt

SEQ ID NO: 40778 - DNA, 359 bp, Glycine max
  Clone ID: LIB3139-023-P1-N1-H7
ggggcgcgccagttctgatatttacaccatctgctctcaagactgtgaattatggaatcctgcttgcacaaaagcaatgactatgtcatttaatccaaacccgtgttctgatgcatggagtttggaatttctgaagcgtaccggatttcattgtgatatcatttgtgtcactggatggactgccaccccaatgcaggatgttcaggttacaattgattggtttatttcctctcaggaatgtgttcccaggacctattgtgttttaaatccacaaaatccttttgtgttaaataggtggatgggaaaactgactttccctcagggcacttcccgaagtgttaagagaatgcctctttcta

SEQ ID NO: 40779 - DNA, 362 bp, Glycine max
  Clone ID: LIB3139-023-P1-N1-H9
atcaccttcttctcttctctgcttttccactccttctgctcactcacccctcccttttatttccattgttattctgcctaagcagtttcttccaaacttccttttacatttccaatttctctattctatcaaaagggtttgaactttgaagggaaaggaagaaagatatgatgacgaaccaaaatgtggtgactcatgaggttattaacacgttgattgccgtggcagcttccatttcaaactcaaccgcgttgccaagtgcaacagtgccagaatccatggctgtgcttggtgggttttgggggctgccccataataaaaatcttgtgaaaaggttggaaggagctaaagttagtgcttgg

SEQ ID NO: 40780 - DNA, 358 bp, Glycine max
  Clone ID: LIB3139-024-P1-N1-A1
ccggatttcattgtgatatcatttgtgtcactggatggactgccactccaatgcaggatgttcaggttacaattgattggtttatttcctctcaggaatgtgttcccaggacttattgtgttttaaatccacaaaatccttttgtgttgaataggtggatggggaaactgactttcccccagggcacttcccgaagtgttaagagaatgcctctttctatagggggaggagctggtgcaaagaatgctattctcatgaatatgccaaatgctgttctttcaatgtggagatattttgttggagatctcgtctttgaagtttctaagatgacttctccctacattaaatgtacagtctc

SEQ ID NO: 40781 - DNA, 358 bp, Glycine max
  Clone ID: LIB3139-024-P1-N1-A10
attaaaaccgagcctcttccccaaaggagacacagagcgagagagaatcgtaacaaaagcggtaaccggaataagttgtctctacgatttgagccatggcaacaacaacaccctcaaaccgatcatcagaggcgtttgctctcatggcaatcctcagcactctgctttgcacggcggtggcggcgaaggagagcgtgtacgagatactccccaagtacggcctcccgagcggtctgttaccggacaccgtcaccgactacacgctcgacgaggacgggcaattcgtcgtcgttttggcgaagccctgctacatacagttcgattacttaatttactacgagaccaagatcttcggcaa

SEQ ID NO: 40782 - DNA, 314 bp, Glycine max
  Clone ID: LIB3139-024-P1-N1-A11
atggctgcaaaaagctgatgtgcctaccatagcacagattgaagagttccattcgatgcagaggatgatgaatgctcctgattcaaatgataatattgatttactgttgagcattgatttgttgggtttacaaggagcaggtaaagcttttccaaacaaaattgtttttgatgataagcttgtgttggctaacacacaagaattctttgatggaaattttccagtggattcttggttaccaatttttgtgaattgtctttatcctgtaagtcaattaccttcagaagctgtcgttgtaaatgttacatgtggta

SEQ ID NO: 40783 - DNA, 352 bp, Glycine max
  Clone ID: LIB3139-024-P1-N1-A12
aacttgcagtaatggcttcaatgaataaccaaaaagaaattgagctctttgagggccaatctcttctgtacatgcagctatatgggcacctaagacctatgtgtcttaagtgggctgttcaactaggtattccagacataatacagaaccatgccaaacccatttctctttctgacttggtctctactcttcaaattccaccagctaacgctgcttttgtgcagcggttcatgcgcttcttggcacacaatggaatctttgagatccatgagagccaagaagatcatgaactaacatatgctctaacccctgcatcaaagcttcttgtcaatagtagtgatcattgtctatc

SEQ ID NO: 40784 - DNA, 366 bp, Glycine max
  Clone ID: LIB3139-024-P1-N1-A2
gaagagcctgacgtgcactgcacgcgtacgctagctattcggctcgaggtgatcatgttggcacataatccaggtgggaaagagagaacagagaaagagtttgaggctctggccaaagggtctggattccaaggtttccgagtcctgtgctgtgctttcaatacctacgtcatggagtttctcaaaaaggtttaagttctttggcgtggattcataagttgcatttgagttttgactttgagactctgcatgtggtgctacttacaaaagctttcccggaaaaatgtaaatttctcttaattcattaggaaaagaataataaacaagttcaatgtatactgccttttatataataacaagtttcat

SEQ ID NO: 40785 - DNA, 353 bp, Glycine max
  Clone ID: LIB3139-024-P1-N1-A3
cacacttattactctccgtccttccttcttcgatccagatgtctcttcttctccctcaaatggcttcccttctgcaatgttccatgcccctcgtctctctttccaatcgagctctggtacccggtaccaggatctccaacccaagttcagtttccctttcaattaagggaagaagtttcccatccgttacattgcagcccagagggcgttggttttagcttagatgagcggcaaaaccagacacagtgcacaccgtgtgcgaccccgacaagaagcaattggcactgccagatgaatcagctgttactggagagcctaaatttgctgcgctcggagccccctctttcgacacg

SEQ ID NO: 40786 - DNA, 265 bp, Glycine max
  Clone ID: LIB3139-024-P1-N1-A4
ctccgcattagtttcaccgcacgaatatcttgttgtttggagcgatccgagaaaaactctgtaaacatgttggtttaccaggacctccttacaggtgatgagcttctctctgactccttccgttacaaggaaattgagaatggaatgctgtgggaagttgaggggaagtgggttgttaaaggagcagttgatgtagacattggtgcaaacccttctgctgagggtggaggagaagatgagggagttgatgatgcatctgttaagg

SEQ ID NO: 40787 - DNA, 349 bp, Glycine max
  Clone ID: LIB3139-024-P1-N1-A6
gtcaagggcagtgctcataattcaaacaacaacaacagcgacaacaacacaagccggactaccattagcagcttttcaggaaactgaacattttctttttgggttcaattttttggttaatattgttattattccttaaactttttatttttgtacatgggtactataagggaaaatgaaaccataaatgttcatattctttttagtccatgtcttgggagggatatatatgatatattagatcagaaaaaaacgtttattgcatcaatctctgtatgaataattaatatcgttgtatatttgatgaaaaaagccctctacggagtcacttgacacaatgtccttaaga

SEQ ID NO: 40788 - DNA, 348 bp, Glycine max
  Clone ID: LIB3139-024-P1-N1-A7
catcaatcttccaaaagattgcaacatttgaggactatgcattggccaatggagagaacgagaagaacacaaacacatcaatcttccaaaagattgcaacatttgaggaagagttgaagacccttttgcctaaggaagtggaaggtgcaagagttgcatatgagaatgaccaatgtgcaattccaaacaagatcaaggaatgcaggtcttaccccttgtacaagtttgtgagagaggagttggggacagcattgctaactggtgaaagggttatctcaccgggtgaagagtgtgacaaagtgttcactgctttgtgccaagggaagatcattgatccacttttggaat

SEQ ID NO: 40789 - DNA, 365 bp, Glycine max
  Clone ID: LIB3139-024-P1-N1-A8
aatttattttaaaaaaaataaaaacaataaaaaaggcggtgaattttaaaaatagaagataacaaaaaaaacaacaaacacatcaatcttacaaaaaaattgcaacatttaaagaaaagtttgaatacccttttgcctatagaaattgtattgtgcaatttgtttcttattataattactctttttcaatttcaaacatgatcatcgtatgcaggttttaccccttttacaagtttgtgagacctgtgttttttacattatttcttacttgtgaatggtttatctctccttttgtatagtgttactatagttttactttttttttcctattttttatcatttatccattttttcaattccttttc

SEQ ID NO: 40790 - DNA, 61 bp, Glycine max
  Clone ID: LIB3139-024-P1-N1-B1
ggacgaaccaaacgtcacttctaaacaaggatatatgtttgacgagctatacatcacgaaa

SEQ ID NO: 40791 - DNA, 361 bp, Glycine max
  Clone ID: LIB3139-024-P1-N1-B10
gcttcctctggactgtgcaaattgagaaggaaagctctctctcgtattgaatggctgcaaaaagctgatgtgcctaccatagcacagattgaagagttccattcgatgcagaggatgatgaatgctcctgattcaaatgataatattgatctactgttgagcattgatttgttgggtttacaaggagcaggtaaagcttttccaaacaagattgtttttgatgataagcttgtgttggctaacacacaagaattctttgatggaaattttccagtggattcttggttaccaatttttgtgaattgtctctatcctgtaagtcaattaccttcagaagctgtcgttgtaaatgttacatgtg

SEQ ID NO: 40792 - DNA, 365 bp, Glycine max
  Clone ID: LIB3139-024-P1-N1-B11
tgagtttgaggacaaggagttgtacaacaagacattgtgggacgaggagaagaggaacacgttgataaggtggatgattcattccatggagaagagcgtgcgaagccttgacttctgttcgacaggcatatcgacaatagtgcaggtgaacgaccttaagaactctcctgggcttggcaagagggagctgaggcaggccaccaatcaggtccttcaattgtttcaggataactaccctgagtttgtggccaagcagatattcatcaatgttccctggtggtaccttgccttttctaggatgatcagccccttcttcacacagaggaccaagagcaaatttctctttgctggcccatccaaatctg

SEQ ID NO: 40793 - DNA, 350 bp, Glycine max
  Clone ID: LIB3139-024-P1-N1-B12
acgaaacccagtagacatggcgaaatcggcgtcgaagtctctgatgcagagcctgaagcggttcataaagaagccatgggagatcacgggcccgtgcgcggaccctgagtacaaatccgcattgcccttggccgtggagtaccgcctcagctgccccgccaccgtcaaggagaagcccatcatccccaactccctcccggagaccgtctacgacatcaagtacttcacccgcgaccagcgccgcaaccgccctcccatacgacgcaccgtcttgaagaagcccgacgtcgagaagctcatgaaggaacagaccttcgccgtctccgactttcccgccgtttatctcaatt

SEQ ID NO: 40794 - DNA, 361 bp, Glycine max
  Clone ID: LIB3139-024-P1-N1-B2
ctctcaacctcaaaggaaaaaagaaaaggcatttaggtatgtggataacaaatcaccaagcaaggagtccaaggaggagacacgtgagtcgcttatcgctatctctaactctttacctgataaaactctggaatcaaagtctgccttggagagcaagaaatcagatggggttgcgatgcaaaaccgtgatcaagatgacaagtttaggtctgaactgatttcaatttcttatgctgaatcccctgatgaaaaaatttgatcagtttcaatggtaaactagttcatgtgtaactcctggattatcgtttggttgatctttctctatgtcaatgttgtgacttgactgtttatatactgtctc

SEQ ID NO: 40795 - DNA, 361 bp, Glycine max
  Clone ID: LIB3139-024-P1-N1-B3
ccgctacttgtcccttgctttgacctcaagagctctgcgcgcgttcgtgttctcccgagccgacgcgtccgagtcaccgagtttcaacttcgagctttggaaggcgtgccgcgccacgtcagcgactcctggcgttttcgcgccctttcacttctcctccgtcgacggaaaaacctcgtgcgccgccgtcgacggcggcttagtgatgaacaatccggccgcggcggcggtcacgcacgtcctccacaacaagcgcgacttcccgtcggtgaacggcgtggaggatctccttgttctctccatcggaaacggagctccggcgaagagaatgaacaatgccggcgagtgctctacgtcaatg

SEQ ID NO: 40796 - DNA, 241 bp, Glycine max
  Clone ID: LIB3139-024-P1-N1-B4
cacccttcctagtgatcaattcaacgatgctagagcgggtgctgatattcacgcgcgggagggctcatcctatgaacctgcaaccacctcagcaactccctgaggggatctccgatcgacacgtacatccgatcctgcctcctgcaggaacaatccgaaacgagctggtttaactacgacgcacctggagccagataccctgttaaagggacctctcacaacaacctatgactctgaattg

SEQ ID NO: 40797 - DNA, 339 bp, Glycine max
  Clone ID: LIB3139-024-P1-N1-B5
acaaattaaaaaataaaaatattatatatacatatatatagatatatatattctctgcgagtccgtcgaaaaagaaaacaatggcgaaacccagcagcgaaaagccagaggagcatagcgattccaagtactacaaaggggtccgaaagagaaaatggggcaaatgggtatccgaaataagactacccaacagccgtcagaggatttggttgggatcctacgacacccccgagaaggccgcgcgtgccttcgacgcggcaatgttctgcttacgtggccgcaacgccaagtttaatttccccgacaacccacccgacatcgccggcggaacgtccatga

SEQ ID NO: 40798 - DNA, 129 bp, Glycine max
  Clone ID: LIB3139-024-P1-N1-B6
tgaaaatgttttaaatgatgtaaaaactactggagaaagcggcctaaggcactcacgtaaaaagaaccggagattcatgatttatgttcattcaaaaggaatgatagtggatgatgaatatgtgttact

SEQ ID NO: 40799 - DNA, 351 bp, Glycine max
  Clone ID: LIB3139-024-P1-N1-B7
cccattttactccttttagagagagaaaagattgagctttcaggagagagaaagaggaaaaagacttggaatttttttttttggggtgttccaatggttgaactggaaatccaaagaagggtgtgaaaaaaattgcatctttgtttggtgggtgtctctgaaactatgatcttgtgaaaacccagaaaggaaaccttcgatgcgcgttggtagatagagattgctgttgggattttcagagaaccgttgattgacaaatgaacggtggtgatgaggtcgtggcagctccggcgggtccaccgcagccgctggagtggaaattctcgcaggttttcggggaacgtacggcgg

SEQ ID NO: 40800 - DNA, 360 bp, Glycine max
  Clone ID: LIB3139-024-P1-N1-B9
aagttactcaccttcaccttcaccttcaactgccaactgcaaacatctaactactttcaggttcacttagccgagaatcagagactaatcactagagataccgagacctacttttcctcacatcaccaccaacatgcgttccagcaacggtacatcaagcagcagggcctccaacggtaacacagggcgccaccctgtttaccgtggagtgaggcgtaggagtagtggtaaatgggtttctgaaatccgtgagcccaaaaaacctaacaggatttggttagggacatttgccacccctgaaatggctgctattgcctatgacgtggcagcgcttgctcttaagggtaaggatgctgagct

SEQ ID NO: 40801 - DNA, 362 bp, Glycine max
  Clone ID: LIB3139-024-P1-N1-C1
attccttaatttaaaacctccactcattccataaatctctgtttactctcctcgattttaccgcaacatgacacaagaaggaaatggcaacaccaacttctgtatgagtgttaacaacaacggctacattagcgctaatgacccgttgaactggggcgcggcggcggaggcgatggccgggagccacctcgacgaggtcaagcgcatggtggaggagtaccggaggccggtcgtgaagctcggcggcgagaccctgacgatctcgcaggtggcggcgatcgcggcgcacgaccagggggtgaaggtggagctggcggagtcctccagggccggggttaaggccagcagcgactgggtgatgg

SEQ ID NO: 40802 - DNA, 269 bp, Glycine max
  Clone ID: LIB3139-024-P1-N1-C10
gccaagtaaagtttagctcgaattggaaaccgcgtgttatcagcaatgtttcaattgatcttgcaaaaatgaagtatgaatatgtggctcgggatattgattacttcgattttatattggcttctatctgataattttacaggttggttagctggcttgatgtgctaatattttttctctgacacgcaacagatgggtagtagtacatcaattatgctagttggttggtcggcttacactaaattgcattatttttttttcttttctag

SEQ ID NO: 40803 - DNA, 362 bp, Glycine max
  Clone ID: LIB3139-024-P1-N1-C12
cttggacttggattccaaaataagtcagtgagacaagtcacaccagtgtggtacaatatgatagaacaagggctcgtgactcaaaagattttctccctttggctaaaccaagacccagtggcaaagctagggggtgagattgtctttggtgggattgactggaggcactttaagggtgaacacacttatgttccacttactcaaaaggattattggcagattgaggtgggagatattcaaatagcaaacaatccaacagggctatgtgaggggtgtgtgctgctattattgactcaaggacctctttgattgccggtccaacaaaaattgtgactcaaattaaccatgccattggagcagaa

SEQ ID NO: 40804 - DNA, 360 bp, Glycine max
  Clone ID: LIB3139-024-P1-N1-C2
ttccactcccaccgaccaaaacgcgcaacacgttgtgattaaaacgacaccgaaactaatgggcgtcttcagcgaaaacccgaatccggacccggttgtgatccgccaggtttgggcttcaaatctcgaatccgaattccaactcatccgcgaactcatcgaccactatccttttatctcgatggacacagaattccccggtgttgttttccgaccacacctggaccccacaaaaccctacaaccaccgcaacaacaatcgcaaccgccactccgaccactaccgccttctcaagtccaacgtcgacgctctcaacctcatccaggtcggcctcactctcaccgacgccgccggcaacct

SEQ ID NO: 40805 - DNA, 357 bp, Glycine max
  Clone ID: LIB3139-024-P1-N1-C3
gtgatgataacttaattagtgttcatgaatatgtcaagccttactttagtggttctaaattgaaaagctttctagctggtcataatatcaccattactgatggtattgacaaaactagtgcaactttgcaatttagaaagttagcagattgtgattttctcaagagaaactttaagcagatgtctaatgttttgtgggtggctcctgaggacaaggcgagtttatggtcacaacttcattatgtttcgtgtaataatctggaaatgcaagaagcttatcttgtcaatctcgtaaatgtgttacgagaattgtatttgcacagtccagaggaagctcgccaattgagaaggaaagctc

SEQ ID NO: 40806 - DNA, 112 bp, Glycine max
  Clone ID: LIB3139-024-P1-N1-C4
acaccattgaattcctattctagcaagcacagctcaggtggattttatatagaccttctcgcagaaggcctttaaatggacaaaacttgcaattggatcacactcatacaaa

SEQ ID NO: 40807 - DNA, 168 bp, Glycine max
  Clone ID: LIB3139-024-P1-N1-C5
acaaaaataaattactattcataacaaaaaaaacacaggaggattttaataaagaactactataaaaaaaaaatttaaataaacataaactaaaaaattatatctcaatcatacaaaaaatctacaaataaaaccctctccccccctttctgattctcccaaccccta

SEQ ID NO: 40808 - DNA, 368 bp, Glycine max
  Clone ID: LIB3139-024-P1-N1-C6
aattttctgattcagggatgttgaaatcatgaatcttgaacaacaacaaagttggcttcagattgttaaaggagaagaaatcaatcatttagctaaaggtgctcttcatctacaagaggatttaaactacaataaatggctttaactcattccaaaccaatcaggcttttgtcactctcaaaggctttaacagttacatgcagtgctaatatgtatcagaaaggaataatagcacaagaatatgcagtaattggtgaatcaaataggacatgtgctgtcttcagcacatttttcatgcaagttgtacaaattgacagtgcgtggtgatgcttttcttatatacttttcttttcaatctgcccatatag

SEQ ID NO: 40809 - DNA, 345 bp, Glycine max
  Clone ID: LIB3139-024-P1-N1-C8
ctggtgggggccttcccatatcatccgagacagcgtggtatacagcatattcatggagtgtatgaaggattgtagacgaacagatggcaatggtggtggttagctctgacttatactatttggaagcacagaaacaacatcattttctccaatgccactttcaacgctaataaactaatggacgatgtggtgtttcttctatggacatggctcaaatgcttagaaaagaatttcactcttcatttcaatcagtggtcttcaaatctgaaaattggtttttttaggacacgaatataggaatatagtctacattcctgttcatttaccttgctatgggatctttca

SEQ ID NO: 40810 - DNA, 321 bp, Glycine max
  Clone ID: LIB3139-024-P1-N1-C9
aaaaaaaaaaaaaaaaaaaaaaaaaaaaaaaaagcaggggataaaaaaaaaggaaaggaaaaaaaaaaaaaaaaaaaaaaaaaaaaaaaaaaaaaaaaaaaaaaaaaaaaaaaaaaaaaaaaaaaaaaaaaaaaaaaaaaaaaaaaaaaaaaaaaagggggccccccccccataagaatcaactaacccccgaattaaatctccccccggtccctaagggttaaccatttttccttaaatggacctatataaaaatttgccaaaaaaagaaaaaaaaggtttcctttgtataaaatttttaaccctaaaaaaatcccaaaa

SEQ ID NO: 40811 - DNA, 358 bp, Glycine max
  Clone ID: LIB3139-024-P1-N1-D1
agcgagtgagcgagcgagcgaggtagggttttcgttggtcccccgtctttgaattcagttcgcgacgatggggtccatccccgatccaggcgagttgagcgagttgactcagccgagcttcgacgagttccagcgccaaacttccctcatgaccagctgcaccctcctctggaaggagctctccgaccacttctcctccctcgagcaagacctcaaccacaaatccgaagccctcaaacgcaagattcgcaccctcgacaacactacttccgactccctccgcctcctcgatcgccgcgaaacctccctcgacgccacgctccagatcgccctccgcacgctcgacacgcgccgcacc

SEQ ID NO: 40812 - DNA, 362 bp, Glycine max
  Clone ID: LIB3139-024-P1-N1-D10
ttcctctacaaaagcacaatttgttagtggaaaaacgttcaaatatgatataattggtgctggttcacattcttcaggagattttcctgaaaaggaagatcaagaaaaacccaaaaagattgataccagattgagacaaagaatagatcctcaatacaatgaggttcaggctcagatggaaacaaatttgtttaaattgtctcttgatgatgttgaaactcctaaaggttctatgttggatcttaaaatttctcaatctaaaattgcacttcccaagaacacagttggaggaaccattctgcgtagtgatctattggcaaattttttgacagagggcaattttagagcaagtgttgatttgc

SEQ ID NO: 40813 - DNA, 354 bp, Glycine max
  Clone ID: LIB3139-024-P1-N1-D11
agcataccataaggggagacacctacactttgttcgggcattttctgatcatgaccaatcaacaacagcatggctaatttgcaaggagggcctgactttgacaaaagcttccacttcctctccatttgcatccttgctttcatcaatgaaggctcttcctgcctctcaagtgcattcatgaacgagccatggtcatggggcataagcattcccattagtttgtacgtgaaatttgcacttgagatccacactcaccttggaatctgtgttggggttggagtaccctctttggtctattggggtgccacacgtggtgccattgattggtactgggaagcaacattgaagttcaac

SEQ ID NO: 40814 - DNA, 353 bp, Glycine max
  Clone ID: LIB3139-024-P1-N1-D12
taattacaaaattaacctctccgcttccctccgatccattcactccctccctcttaaaacctccttgcggatcaaatgctcccaaacagatgggaatggaagtcctgcaaagaggacagtgcttcatgatctttatgagaaagaagggcagagtccatggtatgataatctctgcagacctgttacagaccttcttcctcttatagcaagtggtgtcagaggcgtcactagcaaccctgcgatttttcagaaagctatctcatcatcgaatgcttacaatgatcagttcagggaacttgtgcaagcagggaaagacattgaaagtgcatattgggaacttgtagtgaaggata

SEQ ID NO: 40815 - DNA, 364 bp, Glycine max
  Clone ID: LIB3139-024-P1-N1-D2
tgtgttttaaatccacaaaatccttttgtgttaaataggtggatgggaaaactgactttcccccagggcacttcccgaagtgttaagagaatgcctctttctatagggggaggagctggtgcaaagaatgctattctcatgaatatgccaaatgctgttctttcaatgtggagatattttgttggagatctcgtctttgaagtttctaagatgacttctccctacattaaatgtacagtctctttcttcatagcatttggaaatttggctgatgacaccatcaattttgaggcttttccccacaagctggtgcagtttggagagattcaggaaaaagttgtattgaaattttcacaagaggaat

SEQ ID NO: 40816 - DNA, 362 bp, Glycine max
  Clone ID: LIB3139-024-P1-N1-D3
caaaaattgtatgctatcttgttatgaaaaaatgaaaaaaatttggtccggttacttgcaaccttttctaattagttcaatatgtttagtagttaacacagtgtgaagaagatggctggtattaagagaagattatgtagtgattcagatattcatgctcttcacaaagaattggatgaagtttcatgtcctatctgcatggaccatccacataatgctgttctcctcctttgcagctctcatgagaagggctgcagatcttacatttgtgatacaagttatagacattcaaattgcctggaccgatttaaaaaaatgagggacaattctaaggagaaccaaaatttacccagttctttagt

SEQ ID NO: 40817 - DNA, 366 bp, Glycine max
  Clone ID: LIB3139-024-P1-N1-D4
caaccccgaccaaaaatctcataaatttcgcgggcagcattttctgctacggttctgcattcctaacctagaactttaagtctcattagtaaattattcattttgagcaatcaccacacccctaagaagctatgcatcctctaatggctctctccacaacatttaagccctcttcatgcccaaacatgaacctttacttcaaaatatgaagaccctgttaccctcactctgtcagattccttaaccccctaaagattcgggcttcaactacactggattattccaacgtctatacgaacgacaaatcccccccttttgagactagcaattggcgatggccattcaaggacaaccttataaacattt

SEQ ID NO: 40818 - DNA, 364 bp, Glycine max
  Clone ID: LIB3139-024-P1-N1-D5
ggcaattttagagcaagtgttgatttgcagcgcactcatggtattagaggaatgattaaaatggtggccacagttggtattcctgagaatacaggtatatcattggcctgtgctatgaatagttcttttagggggcgcgccagttctgatatttacaccatctgctctcaagactgtgaattgtggaatcctgcttgcacaaaagcaatgactatgtcatttaatccaaacccgtgttctgatgcatggagtttggaatttctgaagcgtactggatttcattgcgatatcatttgtgtcactggatggactgccaccccaatgcaggatgttcaggttacaattgattggtttatttcctctc

SEQ ID NO: 40819 - DNA, 351 bp, Glycine max
  Clone ID: LIB3139-024-P1-N1-D6
acacaacacaacacagcataccgtgtttcattttctctcggacacaaacctccttcgttttcatttacttctcaggaggtataactactatttttcgctttttttttaaaaaaaaaattgattaaatcttttgccatgggaacccagattttgcgacctcaggactgcttggtagaacgaatcagggctcctccggctgacttttcccggcggaggagttccggtaattactgtaattattattactacaacaacaacaacaaccatgtcgccactttcaggtcgtgcctgaagcctgttagccgacccgaccaaaggaaacgggctgctcccggttctgcccagccggtg

SEQ ID NO: 40820 - DNA, 337 bp, Glycine max
  Clone ID: LIB3139-024-P1-N1-D7
gggaggtgtaagaaactggaaggagtaggtgttgggggcattctgacctaaagcttgtgtctttctgcttcgtttgtatcttctgctgcgtaaagaggatccctttctgattcttccgtaaatttcgtctctgaaactagggctaatacttcatctaccgatctctatattctggtttttccaagttcttggaaggaaaatgatgaaggtttgcttttgatcctgcttgggagttttgatcgacttgatattaactccaacttttaaggccatctgctcacagtggttggatttttctcgtctgaagctcacaccaagatatttatataattattta

SEQ ID NO: 40821 - DNA, 359 bp, Glycine max
  Clone ID: LIB3139-024-P1-N1-D8
tgaaattttgataaaccgcgatcacaggttgccgggggttaaaaccggaaacaagaagcaatcgttacttgatttcaagaatttctcaatttcttcctacttctttgtgtacgatttcttaagggaaagaaaatcactctctgtgctggccacagacttcgtgaatcattttcttttccactcttagtttatttgctgaacactctcctatttgatataggacttcgtgtcagatttaaacttcttctgtttccttctcagttctctgtttaatttcaagttcaagctggtgaaatcttggattagtgcttccactctcctatctggtataggacttcgtgggtagacttttctatttt

SEQ ID NO: 40822 - DNA, 184 bp, Glycine max
  Clone ID: LIB3139-024-P1-N1-D9
atcaccattactgatggtattgacaaaactagtccgactttgcaatttagaaagtgagcatattgtgattttctcaagagaaactttaagcagatgtctaatgttttgtgggtggctcctgaggacaaggcgagtttatgggcacaacttcattatgtttcgcgtaataatctggaaatgcatg

SEQ ID NO: 40823 - DNA, 367 bp, Glycine max
  Clone ID: LIB3139-024-P1-N1-E1
tacggaagctggaagaaagtttcgttgcaacgtctgtgacgcttgcttaatgatgtgcctagtgagtattatgcacaattagatgcaactggaaaaagagttgacataaatcaacgacctgaacttacaaaggggactgtagaatttgttgcccctgctgagtacatggtgcggcctcctatgccaccagtgtatttcttcctcatcgatgtttccatatctgctgttagaagtggcatgattgaggttgtggccaatacaattaagtcatgcttagatgagctgcccggctttccacgtacgcaaatagggtttgcaacttttgacagcacaatacatttttataacatgaagtcttccttgactc

SEQ ID NO: 40824 - DNA, 358 bp, Glycine max
  Clone ID: LIB3139-024-P1-N1-E10
ggaagctcgccaattgagaaggaaagctctctctcgtattgaatggctgcaaaaagctgatgtgcctaccatagcacagattgaagagttccattcgatgcagaggatgatgaatgctcctgattcaaatgataatattgatctactgttgagcattgatttgttgggtttacaaggagcaggtaaagcttttccaaacaagattgtttttgatgataagcttgtgttggctaacacacaagaattctttgatggaaattttccagtggattcttggttaccaatttttgtgaattgtctttatcctgtaagtcaattaccttcagaagctgtcgttgtaaatgttacatgtggtagt

SEQ ID NO: 40825 - DNA, 431 bp, Glycine max
  unsure at all n locations
  Clone ID: LIB3139-024-P1-N1-E11
agggagagacaangcttgcantgcctgcagnngtcgactcttagaggatccctctcgngtggaattcccaattccatccattttcaagaaatanaggaggcaagaaatgttcatatatgaatntggaattattntgttttcttattnaggcctatccntgaagccaaaggannaatgagatcggaattcctcggggaattccaattccacattttcaagaaataaggaggcaaaaatgttcatatatgaattggaattatttgttttcttattaggcctatcctgaagccaaaggaaatgagatcggaattcctcggggaattccaattccacattttcaagaaataaggaggcaaaaatgttcatatatgaattggaattatttgttttcttattaggcctatcctgaagccaaaggaaatgagatcgga

SEQ ID NO: 40826 - DNA, 363 bp, Glycine max
  Clone ID: LIB3139-024-P1-N1-E12
gaacgggcacttaaaagagtttgaaggagcttcccagagactaactctgcataaggttgacctccttcatcttgactccgttagatctgttattaacggctgtcatggtgtctttcacactgcttctcccgtcaccgataaccccgaagaaatggtggagcctgcggtgaatggagctaagaatgtgatcatagcagctgcagaggctaaagttagacgcgtggtgttcacctcatccattggtgccgtttacatggaccccaaaaggagcatcgatttggtggttgacgagtcctgttggagtgatttagaattttgcaagaacaccaagaattggtattgctatgggaaggcttgggctga

SEQ ID NO: 40827 - DNA, 366 bp, Glycine max
  Clone ID: LIB3139-024-P1-N1-E2
cttatccctctaatcactctagctgttgcaaatttctacgtatttttcaatggcttctgcagatgttgagttccgttgctttgttggtgggcttgcttgggtcaccggcaacgatgccctcgagaaagccttttcaatctacggcgacatcgttgaatcgaaggttatcaacgaccgtgagactggaaggtccagaggattcggatttgtgaccttcgcctcagagcagtcaatgaaagatgcgatcgcaggaatgaacggccaggaccttgacggtcgtaacatcactgtcaacgaagctcagacccgcgccagccgtggtggtggtggaggcggtggtttcggaagtggtggtggatacaaccg

SEQ ID NO: 40828 - DNA, 313 bp, Glycine max
  Clone ID: LIB3139-024-P1-N1-E3
tagaaagtataaaagaaagactcagttcttatccttggcgttgattgcgagtcgaaatctgaatcttaatcatatcgctgcgtatagggtatgagattggctctgacagcatgccgtataatgggaggggctcttaccgacacctcgatgacaggagatgaacgaccgtcatcaccacagagaaccgacagctctatctgtggtgagcctgcaccatcaccaggtgcctgtgggccttcttcttaatcgctctcactgctttctatattagctaccatagctagatggattcctgtggacgttaattgaccga

SEQ ID NO: 40829 - DNA, 361 bp, Glycine max
  Clone ID: LIB3139-024-P1-N1-E4
gacacaagtaactgttgagtactacaatgacaatggtgccatggttccagttcgtgtccacactgtcctaatttccacccaacatgatgagactgtgagcaatgaccaaattgctgctgaccttaaagagcatgttatcaagcctgtcattcctgagaagtacctggatgagaagaccatcttccaccttaacccttctggccgttttgtcattggtggccctcatggtgatgctggtctcactggaagaaagatcatcattgatacctatggtgggtggggtgctcatggtggaggtgccttttcagggaaggaccctaccaaggttgacagaagtggtgcctatatcgtgaggcaggct

SEQ ID NO: 40830 - DNA, 352 bp, Glycine max
  Clone ID: LIB3139-024-P1-N1-E5
attttggctggagatttggtcgaaattttggattcgggggttggaccacccgatttgaaagaagcagaggcactgaagatcctggcccatacagctatacgttgtgtggaagaggaaccgaggcaaagaccaaccatgaatgacattgtggtcgatttggatcgggcttttgctatttgtggtagtagcctatatgatgagaacttttcctattccattgcattaccatcacatgagtccaatcatatgactccggatcctcttgatacggactcatgtgatattccaatctacgaagagaatacgaactcatgatatttcaataaacgaagaggatgcggactcatgtgat

SEQ ID NO: 40831 - DNA, 296 bp, Glycine max
  Clone ID: LIB3139-024-P1-N1-E8
catgtgctgctgttggcttgacatcaagttacactcgaactccattgttggaatctggtttgcaaaaagacagagggttaattgtggagtattttggaaggatgtcttacgttgctcataacgttaatcagccccaagagaaagatttgttagagggaaatttttcctttgatattaaatctcgctctagattggaaaaagtttcctctacaaaagcacaatttgttagtggaaaaaccttcaaatatgatttaattggtgctggttcacatttcttatgagattttccttaatat

SEQ ID NO: 40832 - DNA, 359 bp, Glycine max
  Clone ID: LIB3139-024-P1-N1-E9
gcgcccttcggcattctctacaggatagactaagcgagggttcatctggtaggagtcgtgatgaaatatatctcaaactacgtaccagtacagcacctccattgaaattgattgacttgcctggattggaccagcggatagtggatgacaaaatgatcagtgaatatgttgagcacaatgatgctattttgctgctagtagtccctgctgctcaggcgccagaaatttcaacatcacgagcccttagagtagcaaaggagtatgacgcagaatccaccagaactgttggcgttatcagtaaaattgatcaagcttcttcggaaccaaaagcccttgcagcggtgcaggctctcctattg

SEQ ID NO: 40833 - DNA, 366 bp, Glycine max
  Clone ID: LIB3139-024-P1-N1-F1
gttgagttgatttctgatcccaaattgagtttgagtttcagccatggtatctgtttctctgctcttattcctatctttctttgccttctttgcaccctctgaatctcacgacaaagtctcgttggaattgtactacgaaagcttatgcccctacagcgccaacttcatcgtgaatcacctcccaaaaatcttcaccccagatcttgccccaatcgttcacctcaaactcgttccttggggcaatgccaaactccgtgccaacgccacctttgactgccagcatgggccatatgagtgcttgctgaacacagttgaagcctgtgcaattcacatctggcctcaactcagcaaacattttcctttcat

SEQ ID NO: 40834 - DNA, 208 bp, Glycine max
  Clone ID: LIB3139-024-P1-N1-F10
ctgttgagcattgatttgttgggtttacaaggagcaggtaaagcttttccaaacaagatcgtttttgatgataaacttgtgttggctaacacacaggaattctttgatggaaattttccagtggattcttggttaccaatttttgtgaattgtctttatcctgtaagtcaattacctccagaagctgttgttgtaaatgttacatgtg

SEQ ID NO: 40835 - DNA, 288 bp, Glycine max
  Clone ID: LIB3139-024-P1-N1-F11
cccaaacagtctacagtttttgatattctcttgggaatctctcaagattttgaaattgctggtaatactcttatgccagctttttctgttccacaggctactgccagatcttctgaaaatgcggaatcctctgcatgatctggaattcgtgttttctttcgcttgttcgtttgtttaattcaataaaggaaattaggcatgaccctcttgttgagtatgctctgcctatctgaaaatttccacacctcttttaattgtcgtaatgatgtgtgaagtgtgtgttatttt

SEQ ID NO: 40836 - DNA, 356 bp, Glycine max
  Clone ID: LIB3139-024-P1-N1-F12
gttcattaaacttgttttttgctagaagcaggaagagaagcgaaacaaacaaacaacaaaataatcaattgagccacttaccatcagatttagatctcccaacagagagtttctcaaaattgccaagtacccttttcaggatcaaggaagagaatcaagaaccaccaaaaggtgttgttctttgttgtagttgtttgtaactgtagcaacatgaagatggttagaaagttggttgtggtgaggcttgtgttggccatatctgtgttgagctctctccttctgacaacctcggcacagacagcatgcaggggccaggccttcaccgaaaacaaggttttctcctcatgccgtgatct

SEQ ID NO: 40837 - DNA, 360 bp, Glycine max
  Clone ID: LIB3139-024-P1-N1-F2
gagagagagagagagagagagagagagagaaatggcttgcaggcaattgtgggcttcaagagctgcctcttacctgaggatctctgtgtttcacagaggcttttctaatgttgttaaagatttgaagtatgctgattctcatgagtgggtgaaagttgatgaaaattctgcaaccgtcggcataactgatcatgcccaagatcatttaggtgatgttgtatatgttgaattgccagaagtgggagcagctgtaacacaaggaggtagttttggtgcagttgaaagtgtgaaggcaactagtgacattaactctcctgtttcaggaaaagtttgtgaagttaatgaagcgcttaacagctc

SEQ ID NO: 40838 - DNA, 365 bp, Glycine max
  Clone ID: LIB3139-024-P1-N1-F3
gcgagaccgagcgatccgatcctaaccccgcgatgctgcgccgcgcaaccacctgcctcatctccggcgcctcccgccgccgcctctccaccgacgtgccggcgacgccggcggcggattccgtcttcgcggaggcgtggaagaaagtgagccccaacatcgacccgccgaagacgccgctggcgtacatgaagccccgaccacccactccttcgactctcccctccaaactcaccgtcaacttcgtcttgccctacgcttctcaattggccgcaaaagaggttgatatggtcattgtaccagcaacaactgggcagatgggtgttctcccaggacatgtagcaacaattgcagagttgaaacct

SEQ ID NO: 40839 - DNA, 320 bp, Glycine max
  Clone ID: LIB3139-024-P1-N1-F4
gctagagcagctattgctgtctttgcttctctatggagggcccactatctatctagagcaagaccgcctcttcctgctgcaagccaaactccaactctccgaccaccaaaacgccctattcgactggaaccaccgcgacgccacccgatgcaactggaccgccgtcacgtgcgacgccgcaaccggaggcgaagccactatcgacttctccaacctccaactcttcggacctgaccgcgacaccaccctttgccgactcccctcgctcgcctgcctcaactttttctacaacaaccttaacgccaccctccccgccgacg

SEQ ID NO: 40840 - DNA, 365 bp, Glycine max
  Clone ID: LIB3139-024-P1-N1-F5
ctctttgcatatcttcaatgaaaacctgagtgtcaccaactccatctttcagtttcatctttcacacatacacacttaaaaaaccacttcttcttctagtgcttctgatccaaaccaccaccatacacaaaattcatattgaaactgtgttctgtttgtttgtttgttactctactaatctttagaacaattcagtctttggatttgtttgtgtcctttttatcaatcaaggccacactcaaaatcccaagttttataaatcaagcataatggaatctgaaaatggagttgctatggaggacgagaaacatgtcattggggaaacaaccaaggagaacataaacaaagaagctgaaaacagttgt

SEQ ID NO: 40841 - DNA, 341 bp, Glycine max
  Clone ID: LIB3139-024-P1-N1-F7
ccaatttctccttcacgaaccctaattcactcttgccattcgaaatctcgatcaccttttcgattcaacctttctctcctcgctaatctcttcgttcgcctcgcacatcaaggtgagggattgaaattgaatcctcaagatgccagctacagcaggaagggttcgcatgcctgcgaacaatagggttcacagcagtgcagcgcttcaaacccatggtatatggcaaagtgccatcggctatgatccttatgcacccaataaggaagacaagaaggattcttctcaaaatctgccaaatgcagagcctgatgctgagaatgcatatgctagctttcaggggc

SEQ ID NO: 40842 - DNA, 361 bp, Glycine max
  Clone ID: LIB3139-024-P1-N1-F8
ctcagctgtgtctgtttgcaatatataactctcacctttctaccattgctgtgcacctctttctccttttgtcaaattcttctgttcaacaggtctttgccaatggatactaagtcggctgtagaattaatggagtcttccgcagaggttcatttttctggatttcacatggatggttttgagcaaagaaaggctagcatagaacaaccaacaacctcagaaactgacatgtataaacaaccttttgtcataggtgttgctgggggtgcagcatctggcaagacaacagtttgtgatatgattattcagcagcttcatgatcaacgagttgtacttgttaatcaagattctttttacaata

SEQ ID NO: 40843 - DNA, 359 bp, Glycine max
  Clone ID: LIB3139-024-P1-N1-F9
tctacatgtgcacacatgtagaaatcataattccgaggatgacacactaccatgttctgttagacgagattggcttttcacctgatgatctacaggagcttgtgcattcattatcatatgtgtatcagaggagcacaactgccatttctgtcgttgctccaatatgctatgctcatctggctgcaactcagatgggtcaatttatgaaatttgaggacaaatctgagacatcttcaagtcatggtggttctggtatacctgctcctcccgtccctcagttgccaagattgcaggacaaagtttcgagctcaatgttcttttgttgaaggatctgtttctagggataggcgatgactgat

SEQ ID NO: 40844 - DNA, 365 bp, Glycine max
  Clone ID: LIB3139-024-P1-N1-G1
tgggagacgagaataagaccaagtcccctgcttccggcgtgtggtccaccatcaagcctttcgtcaatggcggagcctccggcatgctcgccacctgcgtcattcaacccatcgatatgatcaaggtgaggattcaacttgggcaaggatcagctgcgcaggtcacttccaccatgcttaagaatgagggtgttgctgccttctataagggtctatctgctggattactcaggcaggctacatacaccactgcccgtcttggatcatttaaaatcttgacggccaaagctattgaggctaatgatgggaagcccctgccactgtatcagaaagctctgtgtgggctgactgctggtgctatcgga

SEQ ID NO: 40845 - DNA, 362 bp, Glycine max
  Clone ID: LIB3139-024-P1-N1-G10
aaatcgatgaactccctaagcaaattgatgatacacagtacccaaaaacattcttctataaagaagaccttcatccaggcaaaacaatgaaagtacaattcaccaagcgtccctatgcacaaccttatggtgtatatacatggttaacggatattaaagacacctctaaagaaggatatagttttgaagagatatgcatcaagaaagaagcgtttgagggagaagagaagttttgtgcaaaatccttgggaacagtaattggttttgccatttcaaagctgggaaagaacattcaagtactttcaagttcctttgtcaataagcaagagcaatacactgtggaaggagtgcagaatcttgga

SEQ ID NO: 40846 - DNA, 359 bp, Glycine max
  Clone ID: LIB3139-024-P1-N1-G11
gacacagatgactcaagtctcattggatatgcctggcacctttggagtgagcagagagtaatggagcttgttgatccttcccttggtgattcaattcctaagactaaagcgttgaggttcatacaaatagggatgttatgcgtgcaagattcagcatctcgtagaccaaacatgtcatctgtgttgttgatgctgggaagtgaatcaacagctctacctttgcctaagcaacctttgctcactacttccatgaggatacttgatgatggagaatcttatagcgaaggccttgatgtgtcaaatgatttgacagtttcaatggtgacaacagggagaatagagtgttaattacatttttt

SEQ ID NO: 40847 - DNA, 309 bp, Glycine max
  Clone ID: LIB3139-024-P1-N1-G12
cgcacacaaagccatttccttattcatatctctgatggcttcattcacctatccattgttctatgctccttcatcgataataagccatggccttcacttccactctctctctctactctcacccgcaggttcgcctccgctgccagcggctgcaatcgctggccttcaccgccgccggcgtcgctcaatttgcgccgcttccgcctctgaactgccggagaacgtgttctccgagaagcttcgtggttagggcttcttcgagcgtggaaggaagtcgcgcgcgtgcccggggttctcgcagagtctatc

SEQ ID NO: 40848 - DNA, 326 bp, Glycine max
  Clone ID: LIB3139-024-P1-N1-G2
gacggatattctagactcttccctattattatatatgtggatgtagtagcatgctggataaactcttccctaaatatatttttagtataaaatacagatatcttatccaataaaaaaaaacaaaagagaggatacaactagaacaaagaacaaaatgacaaagacacttacaccatgcttaaaaaatgaaggtgaagctgacttatataaaaaaaatataggggggaccactcactggaggcttcatacaccacggaataaatttggaacacgtacaatctggacacccaattttccttaaaggtaatgatattaaacccctgcca

SEQ ID NO: 40849 - DNA, 342 bp, Glycine max
  Clone ID: LIB3139-024-P1-N1-G4
atcaccattactgatggcattgacaaaactagcacacctgtgtaattaataaagcgggtagattgctatcctctcatgagaaactctaagcagatgcctaatgttttatgattggctcctgaggacaacgccagtttatggtcacaacttcattatgatacgtgcaatactctgaaaatgcaagatgcttatcttgtcaatctcataaatgtgttacgagaattggatatgcacagtccagaagaagctcgccaattgagaatgaaagctctctctcgcattgaatggctgcaaacagctgatgtgcctaccatagcacagattgaagagctccattccctg

SEQ ID NO: 40850 - DNA, 362 bp, Glycine max
  Clone ID: LIB3139-024-P1-N1-G5
gaaattgggtgcaaattttaattcctttgtctcgaagaagttgactctggtacccggggacatctctcgtgaagacttgggattggaggattccattctaagggaagagatttatgatcaaacagatgtcattattaacttagctgcaacaactaactttgatgaaaggtatgatatatcgttgggtctaaatacctttggtgttaagtatgtcatcaacttcgccaaaaaatgtaccaaactcgaggttcttgtgcatgtatcaacagcctatgtatgtggtgagggaggccgagaagggctcatattagagaaaccatatcatttgggtgattcactgaatggagtgtctggattagaca

SEQ ID NO: 40851 - DNA, 357 bp, Glycine max; identical to SEQ ID NO: 39727
  Clone ID: LIB3139-024-P1-N1-G7

SEQ ID NO: 40852 - DNA, 335 bp, Glycine max
  Clone ID: LIB3139-024-P1-N1-G8
aacttttcgggtcggatacctggttcgttatccgcatccaagttcatggggcatttggatctgagctacaaccacttatgtggaaccatcccaattgggtctccgtttgaacaccttgatgcggcgtcgtttagtaacaatgattgtttgtgtggaaaccccttgaaggcttgttgatgggtgacccgaataagtacgtattgggttgttgtcggggaatattccaagatataatgatttggttatagtgaatgagcccaagggtgaatttaatgttatgtgataggatactgtgatgtgaactgtgaagtaatgtaatatatatagggcatgtt

SEQ ID NO: 40853 - DNA, 355 bp, Glycine max
  Clone ID: LIB3139-024-P1-N1-G9
tgaaattctaataaaccgcgatcacaggttgccgcgcgttaaaaccggaaacaaaagcaatcgttacttgatttcaagaatttctcaatttcttcctacttctttgtgtacgatttcttaagggaaagaaaatcactctctgtgctggtcacagacttcctgaatcattttcttttccactcctagtttatttgctgaacactctcctatttgatataggacttcgtgtcagatttaaactttttctgtttctttctcagttctctgtttaatttcaagttcaagctggtgaaattttggattagtgctcccactctcctatctggtataggacttcgtgggtagactttactac

SEQ ID NO: 40854 - DNA, 331 bp, Glycine max
  Clone ID: LIB3139-024-P1-N1-H1
ccagacacaattctctctagacgctttctatcacaagacggtgatggtgatgttcctgcacctgctcctgcacctaataactcacagaagaagaaatccaatgcttctactcatgctgctgctgctgcacctggtcctgcacctaaccatacccatacgcacaagcacagtcagagaaaactcttggggtggattctggggtttgtagcaggcgcactggggggaaccttatcaggattcgagttctcttagatgaacaagctcgctctcgcgctgctcaaaggaagaggcaggaatgcgcatcccgatttctatagaccactgatcaaga

SEQ ID NO: 40855 - DNA, 366 bp, Glycine max
  Clone ID: LIB3139-024-P1-N1-H10
aagagaggaagttttggggtttgaatctatagaatagaatcaaaccaaattgaaagaagatcgatcgatcgatctatggctctggtcggagttgaagtgaagcatgcggcggagggcgcaccggaggagaattgctccgccaagcccaccaagcagggcgagggcctccgccactactattctcacaacatccacgagcatcagctccttctccgtcaaaagacgcataacctcaaccgtcttgaggctcagagaaacgagctcaattccagggtgaggatgctgcgcgaagaattacagcttttgcaggaaccaggctcttatgttggtgaagttgtcaaagtcatgggcaagaacaaagtcctt

SEQ ID NO: 40856 - DNA, 345 bp, Glycine max
  Clone ID: LIB3139-024-P1-N1-H11
gggttgtactctatctgtcatcgaccatatcactttggtcaccttcagatacattcgtcgcattcatccatttaacttccacaaattcctacaaattctaaccaaacccttcactactccaaatcccacaacttctctcttttttttccctccttcttttccctttttctgttgtccgatcttctgcctcctagatcttggtatttgggattgatcacctggagttggaaatggttaaaagttatggagtgttctgatttgcgaaagatatcatgttgcagtgcttaaaaggacttaagcctttatttgcgtccatattgcgatgttgtgacctggatatatata

SEQ ID NO: 40857 - DNA, 322 bp, Glycine max
  Clone ID: LIB3139-024-P1-N1-H12
gcacgcactgatctcacagcatagcgcttgggctgaggaagaaggaagagaagaagaagcatggcggtgcgggccactgtgtcgcgtttcccgatggacacggacgcccccgagggctcgggccttctctggggagtaaccgtcacgccgttctccgccgccgacgagaatgcccgcgctccgtcgtacggcttcggcggcgacctcttgccccggtgcgagaactgctgggcctacttcaacacctactgcgagctggagcagtggtcctggtcctgcttcctctgcgggaaccttaacgggctcttctccgacgccattg

SEQ ID NO: 40858 - DNA, 298 bp, Glycine max
  Clone ID: LIB3139-024-P1-N1-H2
acctcgaattcgtctcgagcccaactcattaacctctacacacaatcactaacaggggggatttttataactcatgggctcctacatatttaccatatcactgaccaaaaaatcttcaacattcttaaacacatgctgaatcaaattcacctttatccaaaccaaaatgttcacatactctcagtcacaaacaaatataaccttactgcaaataaatattgttcctctcatacacacaattcatttccttatcaaaattcaattcctttcatataaactatctctaaatatcccacca

SEQ ID NO: 40859 - DNA, 274 bp, Glycine max
  Clone ID: LIB3139-024-P1-N1-H4
ctccaacaccaacaataagaacagaacaagagttaagaaagagagcatagagtgatttggtgggtggagagaggaacagaacagagcaacatgaagccaccaacgaaacccatttcgagccctggtcgaaccgagaagtttccaccaccgttgatgagattcttgagaaacaatgccttaagcagaagcagaggaaggtcaagaaccaccaccggcatgtttctgagaaagaagaacacccacaatattgaaacacaagaaccctcttccccca

SEQ ID NO: 40860 - DNA, 168 bp, Glycine max
  Clone ID: LIB3139-024-P1-N1-H5
atgcggcgtacgtaacgctcgaattcactcgatctctaacatcaataattttaacagatcaccatatcagaaagaaatcatacacagttggggagccaacactcatccaaatatcagcccatcttcaaacccacatcaacacccattataagccctactcgaacccaa

SEQ ID NO: 40861 - DNA, 333 bp, Glycine max
  unsure at all n locations
  Clone ID: LIB3139-024-P1-N1-H6
ccaggatcacaggttgtcgcaccttaaaaccggaaacaaaagcaatcgttacttgatttcaagaatttctcaatatcttactactactttgtgtacgatttcttaagggaaagaaaattactctctgtgctggtcacagacttcgtgaatcattttcttttccactcctagtttatttgctgaacactctcctatttgatataggacttcgtgtcagatttaaactttttctgtttctttctcagntctctgtttaatttcaagttcaagctggtgaaattttggattagtgctcccactctcctatctggtataggacttcgtgggtagact

SEQ ID NO: 40862 - DNA, 335 bp, Glycine max
  Clone ID: LIB3139-024-P1-N1-H7
gttgtgttgaaattttcacaagaggaatttcttacgaggttggtcaactcaggtgcgtcccgcaacgactctgttggctgatgggtgcccatatttgtatgctatggtgcatgatagttcagtgtctacaataccaggtgattttgtcattggtgttaagttgacaaccataaacaatatgtgtgcatatgggctcaatcctggtatctcagggtctcgtcttttgggcaccattcctcagtccatttcacagcaaactgtttggaatcaaatggcaacagtgagaacaccattgaattttgattttagcaagcatagcttttgtcaattttcta

SEQ ID NO: 40863 - DNA, 355 bp, Glycine max
  Clone ID: LIB3139-024-P1-N1-H9
gcagaatcgcaactcacgagagtcacatctacgccgtgaacaaatcgcagtcgaagaactccaagtcctcgactcagttcgactcgccgctcagcttctactccccgatgcacggggacggtaccgagtcgccggagtaccggtcgccggaaaactggccggagaagcgcgacaactccatggccatcgtgaccgccggcaagctcaagcagttcacgccggagaagcgcgcagagcaccggaagccgccggaaaatccgccgtcgacggcggtgatggtgttcaacgcctcgtcggcggaggaggctcaaaggccggcggcgaaggcggctccggtgatcggaggagaacggag

SEQ ID NO: 40864 - DNA, 261 bp, Glycine max
  unsure at all n locations
  Clone ID: LIB3139-025-P1-N1-A1
atccaaacactttgggagcaaagtatagctatgagattgtagattactatataatcataaagaaccatntcaagtttgaattcattcattttattcttttctcaattcatcaacaatgacccttatgaaaaccctatggaaatcaatcttcccccgttgttacaagggtgaatatcccttccaaagccaaagaaagtggtggctacaaagccaaattcttcacacagaatttctgtgacggatttgagttatccaagcacg

SEQ ID NO: 40865 - DNA, 373 bp, Glycine max
  Clone ID: LIB3139-025-P1-N1-A10
gcaccagtttcaccgcacgaatatcttgttgtttggagcgatccgagaaaaactctgtaaacatgttggtttaccaggacctccttacaggtgatgagcttctctctgactccttccgttacaaggaaattgagaatggaatgctgtgggaagttgaggggaagtgggttgttaaaggagcagttgatgtagacattggtgcaaacccttctgctgagggtggaggagaagatgagggagttgatgatgcagctgttaaggttgttgacattgttgacacattcagacttcaggagcaacccgcattcgataagaagcagtttgttaccttcatgaagaggtttatcaagaatttgactcccaagctcgatgc

SEQ ID NO: 40866 - DNA, 377 bp, Glycine max
  Clone ID: LIB3139-025-P1-N1-A11
aaaaaaaataaaaaaaaaaaaaaaaaaaaaaaaaaggggaaaaaaaaaaaaaaaaaaaaaaaaaaaaaaaaaaaaaaaaaaaaaaaaaaaaaaaaaaaaaaaaaaaaaaaaaaaaaaaaaaaaaaaaaaaaaaaaggggggcccccccctttgtgggctcttcaccccggaaataaattccggcccggtccctgaaggctacccagttttccttttagggggtctttttaaactttggcgaaaaaatggcaaaagctttttcctggggaaaatttttttccgttaaaaattccaaaaaaaatacgacccgaaagcataaagtgaaaaccctggggtccctaatggggggcctaccccacattaattgggtggccctc

SEQ ID NO: 40867 - DNA, 374 bp, Glycine max
  Clone ID: LIB3139-025-P1-N1-A12
acctctctgattttgtaattgagttcgatcaaatagctcccagtactttaattgatttctgaatatcatcacttaatttgaaggaaagatggtgagcgtagctgagatccgccaggcacaaagggcagaaggcccagcaaccatccttgccattggaactgcaaacccaccaaactgtgttgatcagagcacctatcctgactactacttcagaatcaccaacagtgagcacatgaccgagctcaaagagaaattccagcgcatgtgtgacaagtctatgatcaagaggagatatatgtacctaaacgaagagatcttgaaagagaatccaaacatgtgtgcttacatggcaccttctttggatgctaggcaag

SEQ ID NO: 40868 - DNA, 344 bp, Glycine max
  unsure at all n locations
  Clone ID: LIB3139-025-P1-N1-A2
aacttaactaccgatgaacttaaatattcagtgtttgtaactggcacgaaaagaaaacaaagcacacgttgctgagatgacagagcttcctagtgtgctgcccctccaaataatgttaatccttctccttatcaaaagtggcagcagcaacaatgagtgtggggaatggtcttgcggctctggccaaccacctatcagatttcccttcaaactcatcaagggaattaaagatgaatgtggttatccggggttttgtctatattgtactcaaaaacatgagactatgcttgctctctcctncgaaaaacttcagtcaggtacataaactacgaaaatcatgaaat

SEQ ID NO: 40869 - DNA, 377 bp, Glycine max
  Clone ID: LIB3139-025-P1-N1-A4
caatctcgtaaatgtgttacgagaattgtatttgcacagtgcagaggaagctcgccaattgagaaggaaagctctctctcgtattgaatggctgcaaaaagctgatgtgcctaccatagcacagattgaagagttccattcgatgcagaggatgatgaatgctcctgattcaaatgataatattgatttactgttgagcattgatttgttgggtttacaaggagcaggtaaagcttttccaaacaaaattgtttttgatgataagcttgtgttggctaacacacaagaattctttgatggaaattttccagtggattcttggttaccaatttttgtgaattgtctttatcctgtaagtcaattaccttcagaagctg

SEQ ID NO: 40870 - DNA, 373 bp, Glycine max
  Clone ID: LIB3139-025-P1-N1-A7
gtccgaaactcctaccctttttttcatttccttgccatttcatcacttataaacctttctttggatcattgcaccctttttgcccctctctcataaataaatttctttcttgttttccaactatggatgttaaaatgaagggaataacagcattgcacacgcttttgcaatttcttctgttttctgccattttcccactctctttctcagctcaaccccgcaacgccaagaagctatcttctgataatcatcatcgcctttcctcctcagctgttttcaaagttcagggaaatgtttaccctcttgggcattacacagtgtctctcaacattggctatccccccaagctttatgaccttgacattgactcggg

SEQ ID NO: 40871 - DNA, 369 bp, Glycine max
  Clone ID: LIB3139-025-P1-N1-A8
gcgtagtgatctattggcaaattttttgacagagggcgaattttagagcaagtgttgatttgcagcgcactcatcgtattagaggaatgattaaaatggtggccacagttggtattcctgagaatacaggtatatcattggcctgtgctatgaatagttcttttagggggcgcgccagttctgatatttacaccatctgctctcaagactgtgaattgtggaatcctgcttgcacaaaagcaatgactatgtcatttaatccaaacccgtgttctgatgcatggagtttggaatttctgaagcgtactggatttcattgcgatatcatttgtgtcactggatggactgccaccccaatgcaggatgttc

SEQ ID NO: 40872 - DNA, 354 bp, Glycine max
  Clone ID: LIB3139-025-P1-N1-A9
ggactcgacgtttcagtctccgccaacgcggctaaacgcgattgattcgcttgttcttcccacatatcctccaaaacaaccacaaaaatgaagcacctcgctgcctacctcctccttggcctcggtggcaacaccagcccctctgccgccgacgtcaaggccgtccttgagtccgtgggtgttgaggctgactctgagcgtctcgacaagctcatctctgagctcgagggcaaggacatccaggagctgatctccagcggctccgagaagcttgcttccgtcccctctgccggtgccggtggtgctgccgccgctggtggtgctgccgctggcggtgctgcccccgccgaggag

SEQ ID NO: 40873 - DNA, 376 bp, Glycine max
  Clone ID: LIB3139-025-P1-N1-B11
gcagcttctgtgcgatcaatcaagtccaggacaactggtgcttctgctcctgtgtttcggtccagtcaacgtgcagaaaaacggaaggagttttatacaaaattagaggaaaagcagcaagcaatggaagctgagaagaatcaaagtgaagctaggaccaaggaagagatggaggaagctatcaagcagctaaggaagagtctaacttttaaagcaagccctatgccaagcttttaccatgaagggccccctcctaaggttgaattgaagaagctaccagcaacgcgagcaaaatctccaaagctgggccggcgaaagagcaacaatggtgcagttaatttatctgaaggggacaaggagatgagctggaatcagg

SEQ ID NO: 40874 - DNA, 373 bp, Glycine max
  Clone ID: LIB3139-025-P1-N1-B12
gaaagagaccaaccagccaacggaggcatcagaactgaggccttgcaaaccattgatgacatcagagctattatccataaggagtgtggaaggatcgtttcttgcgcagatatcactgttttggcagcacgtgattcagttttcctgacaggaggtcccgattatgcagtgccactaggaagacgagatggcctgagcttcagcacatcaggaacaagtgatctccccaaacccttcaacaccaccggcgtgacccttgacgctttcgccgccaaaaactttgatgtcaccgacgttgtcgccttatccggcgcacacacctttggtcgtgcccattgcggcacattcttcaacaggctctcccctctcgacc

SEQ ID NO: 40875 - DNA, 364 bp, Glycine max
  Clone ID: LIB3139-025-P1-N1-B2
aaaataacacacacttcacacgtgattacgacaattaaaagaggtgtggaaattttcagataggcagagcatactcaacaagagggtcatgcctaatttcctttattgaattaaacaaacgaacaagcgaaagaaaacacgaattccagatcatgcagaggattccgcattttcagaagatctggcagtagcctgtggaacagaaaaagctggcataagagtattaccagcaatttcaaaatcttgagagattcccaagagaatatcaaaaactgtagactgtttgggattgtcaataaggaaactcaaatgccatgaagtttgatttgcccactcagaactccacatttcaaaaccattatta

SEQ ID NO: 40876 - DNA, 273 bp, Glycine max
  Clone ID: LIB3139-025-P1-N1-B3
attttcctctaatctatggatcccgaaacagcgttagaagttgtcaagcacggtgtcactctcctcttactcgatgttcctcagtacacccttgtcgccgtcgatactcagatgttctctgtggggcctgcttttaagggtattaagatgattcctccaggcgttcattttgtgtattatagttcatcaagcagggatgggaaggagttctcatcaattattggattttttattgatgctggcccttcagaggtaattgttcgtaaatgggat

SEQ ID NO: 40877 - DNA, 376 bp, Glycine max
  Clone ID: LIB3139-025-P1-N1-B4
gttgtccgctgcagaagatgtcgcacatatgtgaatccttatatgacatttacggaagctggaagaaagttccgttgcaacatctgtaccttgcttaacgatgttcctagtgaatattatgctcaattagatgcaactggaaaaagagttgatataaatcaacgacctgagcttacaaaggggaccgtagaatttgttgcccctgctgagtacatggtgcggcctcctatgccaccagtgtatttcttcctcattgatgtttccatatctgctgttagaagtggcatgattgaggttgtagccaatacaataaagtcatgcttagatgagctgcccggctttccacgtacgcaaatagggtttgcaacttttgaca

SEQ ID NO: 40878 - DNA, 375 bp, Glycine max
  Clone ID: LIB3139-025-P1-N1-B5
cttcaaccttgctttcttttctgctcaacatggctgggagtatctccaagaagagaagaagcgagttcggaacccttttgtccccattggtgcacttgttactgctggtgtgctaacggctggcttaatcagctttagacaaggtaattctcagttaggccagaagttaacgagggctcgtgtggttgtacaaggttcaacattgtcactacatggtgccacttccttttattatagagaatatctttctcaatcaggttaacatatgtgctgctctgaagacgcatgattgagtgttttatccaattcaattaatgtcatgcttagatgaactgtcctgctttttaattactctaatatggtttgcaacttttg

SEQ ID NO: 40879 - DNA, 373 bp, Glycine max
  Clone ID: LIB3139-025-P1-N1-B7
cggctcgagagcgactcaagcacttgttcgactcggggatcctacgcactcctccctgcttatcctgcgcatctttcacctagatcctccccttcactccttcactttcctatttcagtgggaaagaatcatgagttgtttcagctgttgcgaagaggatgacctccataaggctgctgaaagtggaggaccctatgttgtaaaaaatccagcagggaatgatggaaattatcatgcttctcaaactgcaaagcagggcactcagcctgttaaacctcagcccattgaagttcctaatatatcagcagatgaactgaaagaagttacggataactttggtcaagattctctgattggagagggatcctatgga

SEQ ID NO: 40880 - DNA, 374 bp, Glycine max
  Clone ID: LIB3139-025-P1-N1-B8
ccttcctcaagatgcccgccatcaagtttaccaagctcttcatcaatggagattttgttgattccatatcaggaaggacatttgagactatagaccccagaaaagaagaggtaattgcaagagttagtgagggagataaagaagacattgatattgctgttaaagcagcacgtcaggcatttgactcgggtccatggcctcgcttgccaggctctgaaagggcaaaaattatgatgaaatgggcagacctagttgatgaaaatatagaagaactagcagcattagataccattgatgctggaaagctatactatattaataaggtagcggaaattccttcagctacaaatgcgttacggtactatgcaggtgct

SEQ ID NO: 40881 - DNA, 194 bp, Glycine max
  Clone ID: LIB3139-025-P1-N1-B9
gctttaggaaagatgagagcaaaaaaagcttcttggagaatatctaatgaaaggggtttgaagctcacaactatttgtgccgctctaattacaggtcctgaattttgtcataggaatccaacaccaacgattgcttatctcaaaagtgcacaagaaatgtactctcaaggttttctagcatcagtgggtgtgac

SEQ ID NO: 40882 - DNA, 362 bp, Glycine max
  Clone ID: LIB3139-025-P1-N1-C10
gagtgagtgaactcaattcaactcaacattcttcaatgaaatcagccatggcagcagaacccacccgccccgtaaaaatcatcgccgccgccgatgacttcggcactcctctcaaagacgccctcgtcgctcacttgcgcactctcaacatccaagtcgaagatctcggaacctcttcctactactccgccggagccgaggtcggtcgccgagtctcccaatcctcctcctccgacatccgtggcctcgtcgcctgcggcaccggcgccggcgtctccatcttcgccaacaaatatcccggcgtctacgccgccacgtgcctctccccctccgacgccgtcaacgcccgctccatcaacaac

SEQ ID NO: 40883 - DNA, 372 bp, Glycine max
  Clone ID: LIB3139-025-P1-N1-C11
gtatgatccttgggatttgccagggaattgtgatctagcaagagaggcactttttcagcccgaaggaagcaaaatatcgaaatggtaatcgcatgaaccgaacaacaaagtgtggctattggaaggcaacaggatcagacaaaagaatatcatcttcaacgtgtaacaatggtattgtcggggtacgaaaaacattgatattttatgaaggcaaattaccaaaaggcttcagaactcactgggtcttgcacgaatatcgtctcgtcagtgtagaaactggtgctgccaactcatactataataactatgtgaacgagataggagattgggttctgcgtcgcttatcgatgaagaaaagaagtctagaaagtg

SEQ ID NO: 40884 - DNA, 372 bp, Glycine max
  Clone ID: LIB3139-025-P1-N1-C12
cgtctatcccaaagagagtgagcgagtcagtactgaggggggtttcaaatttccaatcggaatcggaaaaaatgggcggcggcggcggcgatcacggccatggacacggacacggcgatttcaggaacaaggtctggagtatgagcggtggcccttactgccgtcccaagcactggaagcgcaacaccgccattgccatggtcggcgtcgttctcatctgcatccccatcgctatgaaatccgctgaactcgagcaacggccacatcaccctgttcgccccatcccttctcaactctggtgcaagaactttggaactaaagactataatgatccatgattcatcaattgcataacttgagtggatgttcaca

SEQ ID NO: 40885 - DNA, 376 bp, Glycine max
  Clone ID: LIB3139-025-P1-N1-C3
agccaaccacattattgccttcaacaaggtcatgggaaatggagcactatgagtgcatcagttgtggcggttttattgggttcaagagaaaccaagtgatagattgcagcagcgagataggagattctgatacagaggagttgtttgagataaatctgaaggagaaggagcctttggctttggatgcaataagagaagactgcgagatcagcactgtgttctcgcttgatattgatattcacgacggcggtagcggcaacgatgatgatgttgtttatgtggcagtaggcaaggatggagattcgagcatggaagctctttcatgggcattgaagcacgccgtgacaccctctgccaccgtttgtatcgtacacgt

SEQ ID NO: 40886 - DNA, 377 bp, Glycine max
  Clone ID: LIB3139-025-P1-N1-C4
aaatcatttgaggctgaaagaacaagtgtatttgatcgccttatccagatgattggttctgcaattgagaatcaagatgacaatgatcttatggcctattggctgtcaaatttgtctgcactattgtttttgctccagcaaagtctaaaatccggtggtgcagctgatgccactcctgtaaaaaaaccaccaaatccgacatccctctttggaagaatgactatgggttttcgttcatctccttcttctgccaaccttcctaccccaccattggacgttgtacgcaaagtagaagctaaatatcctgctttgcttttcaagcaacagctcacagcctatgtggagaaaatatacggtatccttcgggacaacttgaa

SEQ ID NO: 40887 - DNA, 361 bp, Glycine max
  Clone ID: LIB3139-025-P1-N1-C5
gagtgagtgtactgatttgaaaggaactttcgatctgcaaaaaaggcactttttcagccccaacgaagcaaaatataaaaatggtaatcgcatgaacttcggcactcctctcaaagacgccctcgtcgctcacttgcgcactctcaacatccaagtcgaagatctcggaacctcttcctactactccgccggagccgaagtcgatcgacgagtatcccaatactgctcctgcgacatccgtggcctggacgactgcggcaccggcggcggcgaatccatctttgccaacaaatatcccggagtctacgccgacacgagcctataccgcttcgacgccggcaacgcccggtacatcaacaac

SEQ ID NO: 40888 - DNA, 374 bp, Glycine max
  Clone ID: LIB3139-025-P1-N1-C7
tgtagttctacacccttcttccgtctcctttcataggcgctttcttcacgttcgggctccgcgggccattgggcccgatgggaagttctacccaagcccagccgacgacgacccaccggaagctgacgaggattcctcccacggcttctccaccttccagcaaatccagcgccaagcagaacgcgcgcgccaaatcgaagaagacgactacaagaagaaccaatccacgtacctcgccgccatcgccgacgtcgaagacgcccccgacaacgcccccttcgactcctctgaggatgacctctttggcgaaatcgacaaagccttagctctcaagcgcaaagaattcgtctcccaaggccttctccaacccaatc

SEQ ID NO: 40889 - DNA, 374 bp, Glycine max
  Clone ID: LIB3139-025-P1-N1-C9
cccaggacctattgtgttttaaatccacaaaatcctgttgtgttaaataggtggatgggaaaactgactttccctcagggcacttcccgaagtgttaagagaatgcctctttctatagggggaggagctggtgcaaagaatgctattctcatgaatatgccaaatgctgttctttcaatgtggagatattttgttggagatctcgtctttgaagtttctaagatgacttctccctacattaaatgtacagtctctttcttcatagcatttggaaatttggctgatgacaccatcaattttgaggcttttccccacaagctggtgcagtttggagagattcaggaaaaagttgtgttgaaattttcacaagagga

SEQ ID NO: 40890 - DNA, 374 bp, Glycine max
  Clone ID: LIB3139-025-P1-N1-D11
aagtgagaagagaaaaatggcaatctccatacccaggagacaacttttcatagatggagagtggaaagtccctcttctcaacaatcggtttccgatcatcaaccccgctactgaagacatcatagggcatattccagccgctactaaggaagatgttgaccttgcggtggatgctgctaaaagagccttttcccataacaaaggcaaagattggtcttcagctcctggctctgttcgtgctcgctatcttcgagccatcgcttcaaagataacagagaaaaaggatgaactaggaaagcttgaagcaattgattgtggaaaaccactagatgaagcactggcagacctggatgatgttattgggtgttttaact

SEQ ID NO: 40891 - DNA, 371 bp, Glycine max
  Clone ID: LIB3139-025-P1-N1-D12
ttatcattgatagtttcgcaagtcctgactgcaacatagttggtgcaatgcttttggttgatacttatcataccaatcctgaaaatgcagttcgtagtatttttgttgcgcctttcagaggcggaaggcccattcgggtggttacatttccaaataccatcgtgcagattgaaccagacatgaattcaaggtttcagcttttgagtaccactaccaatggtgattttgttcaaggaaaagatctcgcaatggttaaagttaatgtagcatgtgctgctgttggcttgacatcaagttacactccaactccattgttggaatctggtttgcaaaaagacagagggttaattgtggagtattttggaaggatg

SEQ ID NO: 40892 - DNA, 376 bp, Glycine max
  Clone ID: LIB3139-025-P1-N1-D2
cggctcgagtaaccataaccatgtcagacgaggaacaccacttcgagtcaaaggctgatgctggggcatcaaagacatttccccagcaagctggaaccatccgcaaaaatggttacattgtcatcaagaacaggccatgcaaggttcctttttctttttctctttttctttttaaataaatatgatatattgacatctctttgaattttggagtttgatcgagtttacactgaatttaattgaaagttttgtttttgttaagtggattataacaattgatgtgaataatcagaccccatttggtgattttttatgaaattgagtttcatgtgaaagttgtctctctctgtggtttttccacttgtggggggatttt

SEQ ID NO: 40893 - DNA, 377 bp, Glycine max
  Clone ID: LIB3139-025-P1-N1-D3
atctggtttgcaaaaagacagagggttaattgtggagtattttggaaggatgtcttacgttgctcataacgttaatcagccccaagagaaagatttgttagagggaaatttttcctttgatattaaatctcgctctagattggaaaaagtttcctctacaaaagcacaatttgttagtggaaaaaccttcaaatatgatataattggtgctggttcacattcttcaggagattttcctgaaaaggaagatcaagaaaaacccaaaaagattgataccagattgagacaaagaatagatcctcaatacaatgaggttcaggctcagatggaaacaaatttgtttaaattgtctcttgatgatgttgaaactcctaaag

SEQ ID NO: 40894 - DNA, 372 bp, Glycine max
  Clone ID: LIB3139-025-P1-N1-D4
ctcgagccgattcggctcgagatcaaaagaaaggatgaaagagaagctcttgtatgccattacggagggtcaaggatctttccacctttcataattgcactctcttgactggtccatatttgaatcatccaaatgtaattattagggtaattgatagttatgtagataagggtgctagtgacttgctggcagtggtctaaaggagtttattgcagtggtggccacacgagttacttggggatgaagctactatcgtcacttgactacaaaaattgttgggggtgtgtacatagcacgctgatagtttaagttgattgactagtatcagctatagagacatggagggcattttcaagggtcacgcttggatgt

SEQ ID NO: 40895 - DNA, 375 bp, Glycine max
  Clone ID: LIB3139-025-P1-N1-D5
cttagttctaaacaccacaacaattggagttggtgttggttctctgatcctcttatacttgtttttgtgtcgtcgttcctcgaagagtggcgaagagggtcctcccacagttgcaggtgcgtggccaataattggtcacctcccattgttgcttggttcaaagacacctcataaaacattgggtgacttggctgacaagtatggacccatattctccatcaagcttggtgcaaaaaatgctgtggtgattagcaactgggaaatggctaaagaatgctataccacaaacgacatcgccgtttcctccctccccaatcttatctctgctaacctcttgtgctacaaccgatccatgatactcgtagcaccctacgg

SEQ ID NO: 40896 - DNA, 372 bp, Glycine max
  unsure at all n locations
  Clone ID: LIB3139-025-P1-N1-D6
ctccttggccaccattcttttttatgtggtgcttctgagtccccttcacgcccattggctcttccaaaacacacttatccctttccatccaccaaaccaatactcccaaatctcacaaacaccacctccattggcgctatcacgctacgccgtcgtttagcacctccttctccacccttcgtctctcaatccacacaccctcttatcgtttttgtccttctctccctctcgtttttcgccaaatttgtcttctttttgcaccttctccctgatttttcctcgcctcaaataatattctgcggctccttccccccccccgnnnnnnnnnnntttaaatnttttgaggagctgaacagattttgggggttcctt

SEQ ID NO: 40897 - DNA, 374 bp, Glycine max
  Clone ID: LIB3139-025-P1-N1-D7
ggaaaaagttgtgttgaaattttcacaagaggaattgtgttacagcttggtcaactcaggtgcgtcccgcaacgactctgttggctgatgggtgcccatatttgtatgctatggtgcatgatagttcagtgtctacaataccaggtgattttgtcattggtgttaagttgacaaccataaacaatatgtgtgcatatgggctcaatcctggtatttcaggttctcgtcttttgggcaccattcctcagtccatttcacagcaaactgtttggaatcaaatggcaacagtgagaacaccattgaattttgattctagcaagcagagcttttgtcaattttctattgaccttctcggtggaggaattttagtggac

SEQ ID NO: 40898 - DNA, 375 bp, Glycine max
  Clone ID: LIB3139-025-P1-N1-D8
ctctctctcttctcttttcctcttcaacattcttctgtctcacaaagcaacaacacaaacaccgagcgaggggaattcaactttcagcaatggcggtttcttcttctgcaacaaaatgggtcctcttcttgcttctggcgctgctcattcgagaagaagccatggccatggctactaccccacagatctctgacctcaggaatgttgaagttgaaagacacaggttgccgagcttgacgaactcgtcaatggtggagagggcaaaagaggctgacaaattaaatgaacaagctgctgtggctaacccagaggaagtggtttcaatggttgagatgagcatccagaacagcacagagagaaggaagttgggatatt

SEQ ID NO: 40899 - DNA, 182 bp, Glycine max
  Clone ID: LIB3139-025-P1-N1-E11
tagaggcatagtaaggcatatatattttgttcagtgtgaacagttttccaaatgatagtttggataagtattttgtttctatttatatcttctgagaaaaatctttgtgcgttctagcttaagattttcgaaacttctatgcatcctcttctatttgaatgtgatgtttgctaattatggtt

SEQ ID NO: 40900 - DNA, 377 bp, Glycine max
  Clone ID: LIB3139-025-P1-N1-E2
aaccactttcttttttcccgcagtcatgggcaaggtcaagatcggaatcaacggatttggaagaattggccgtttggtggccagggtggctctgcagagagacgatgttgaactcgttgccgttaacgatcctttcattaccaccgattacatgacatacatgtttaaatacgacagtgttcacgggcactggaagcatcacgatgtcaccgttaaggatgagaagacccttctcttcggtgacaagccagtcactgtttttggacacaggaaccctgaagagatcccatggaagtcgactggagctgacatcattgttgagtccaccggagttttcaccgataaggataaggctgccgcacatttgaagggtggtg

SEQ ID NO: 40901 - DNA, 370 bp, Glycine max
  Clone ID: LIB3139-025-P1-N1-E4
cttattttctcaacaaaacaaccgagagttcgtcatatcgggatctgtatatatacctatacctatacctatatcgtatccgcatttccgaaaggatatatcttatttagggtttttgtgactgtgctccacaaccgagtcgccatggcgtcgcaggagagtatcgaaaagatgcaggcacggcagaattaccggaatttatggcacaccgatctcatgagatccattcaggccgatactccttattgttgcctcgcgttgtggtgtgcaccatgtgtgtcttaccttcttcgcaaacgagctctctatgatgatatgtcaaggtacacatgttgtgctggctacatgccttgcagtggtaggtgtggag

SEQ ID NO: 40902 - DNA, 170 bp, Glycine max
  Clone ID: LIB3139-025-P1-N1-E5
aaacaagattgtttttgatgataagcttgtgttggctagcacacaagaattctttgatggaaattttccagtggattcttggttaccaatttttgtgaattgtctctatcctgtaagtcaattaccttcagaagctgtcgttgtaaatgttacatgtggtagtggacgtg

SEQ ID NO: 40903 - DNA, 372 bp, Glycine max
  Clone ID: LIB3139-025-P1-N1-E6
gatgatttcatgtttctgcccttggtttcatagggttgctatgaacctatgaactgaggcgattattcttaacaggatgggcgttgtttttcatgcatacatttttgtcacaggttccatcttcctttatctgactaatgggtcaagcttctgctttgccagtgtaatgtgctttgcatgccaagggaatgcatttaggcaaaatcacttcttgacgtataatttttctgatactatacctgatgtacgatatacctgcctttttattacttttttaatctgcccttaataaaacatggacatcagtgtttcatcgagtctctgggtgggacactagcttccgcgacctgtgagctactaaggatagccctg

SEQ ID NO: 40904 - DNA, 370 bp, Glycine max
  Clone ID: LIB3139-025-P1-N1-E7
ctttcatttctacatccctggctctgttccgtcggtgacgatggcgtttagggtgcgaaaccctgacctccgctttctcattcttctctctctcttgtccatcacttccgccaaggtcttcttcgaggagcgtttcgatgacggatggggaaatcgttgggttaaatcagattggaaaaaagatgagaacctggctggggagtggaaccacacctctggccaatggaatggagacgctaacgacaaaggtattcaaaccagtgaggattacagattctacgctatttcagctcagtaccctgaattcagcaacaaggataagacactagtcttccaattttctgtcaagcatgaacagaagcttgactgc

SEQ ID NO: 40905 - DNA, 349 bp, Glycine max
  Clone ID: LIB3139-025-P1-N1-E8
ggcacatacacacacccaactactacatccacattaggcacaactctagctacctgagcacaaatttgtagccatggcggggaagaggcacgaggcacaggattggaaaaatatgcggattattgatcttcggagacggcacaaccaagattatggaagccattggaagaagtcctagaagcccgttggacatgatgaactcggagaagcaatcaccgacgggtcctagaaagctatgacctcggaggagtaggtctaggaacagcggtggaactcgatataccaggaatatgcgcggaacacagccatgccggtgctccaatagacaccgagatcggcacgaaacatt

SEQ ID NO: 40906 - DNA, 370 bp, Glycine max
  Clone ID: LIB3139-025-P1-N1-E9
gaataatcgtttagcttccaataatgtgcaagatatagccaagcctgttagactaaatggatcctcccatgagttgcagaatggcttagattcagcaatgcgtcatactcacagaattttagcaattttagaggcattattttcattgaagccatcttctgttggcacgccttggagttacagctcaaatgagatagttgcagcagctatggttgctgcacatgtttctgaactatttagaaggtcaaaaacttgcatgcatgctctgtctgttcttattcgttgcaaatgggacaatgaaattcattccagggcgtcatcattgtataatctcatagatattcacagcaaagctgttgcatctatagtg

SEQ ID NO: 40907 - DNA, 82 bp, Glycine max
  unsure at all n locations
  Clone ID: LIB3139-025-P1-N1-F1
tattaaaatcttttcatatataagaaactntggtcgaaaccatggacatgttgtggttttaaaacatgtcattttaagattg

SEQ ID NO: 40908 - DNA, 376 bp, Glycine max
  Clone ID: LIB3139-025-P1-N1-F2
atgataacttaattagtgttcatgaatatgtcaagccttactttagtggttctaaattgaaaagctttctagctggtcataatatcaccattactgatggtattgacaaaactagtgcaactttgcaatttagaaagttagcagattgtgattttctcaagagaaactttaagcagatgtctaatgttttgtgggtggctcctgaagacaaggcgagtttatggtcacaacttcattatgtttcgtgtaataatctggaaatgcaagaagcttatcttgtcaatctcgtaaatgtgttacgagaactgtatttgcacagtccagaggaagctcgccaattgagaaggaaagctctctctcgtattgaatggctgca

SEQ ID NO: 40909 - DNA, 374 bp, Glycine max
  Clone ID: LIB3139-025-P1-N1-F4
tttgggtaaagatgttattgacaaagaagtggtggagaaggtcagccaagagtttttgtgaaatcaactctggttgtctccaaatgaattgctatatgatttgatttattgctttaacaattgtcaattgacaatgcatggtaccatgatacgtatcccagaattgctagttattcacccactgggcacaatttccatctagagctttgttcttctagttctaaactgttgtcggtggatactatatactgatcacaaaattttatatttctgatcaggtgtgggacagaatagctcctggtttagcttcccaatttgattcaccctattcaattccaactatcgcaccaccgtccattgcttattcttggtgg

SEQ ID NO: 40910 - DNA, 372 bp, Glycine max
  Clone ID: LIB3139-025-P1-N1-F6
atctaaactaaaattgcgctctcaatcgaaacaatggaaggcacaattaatccagagccttatgaccaagaaattgcataggaggcatcgaccattatgactgagcgctatgtacaaccagatcatgaacgttctatattatataactttacacctttacctcaaatggctgtcattgacttgagcaaacagttgactgaagaccacatggagcatgaactctacaggcttcactatgcatgcaaagaatgggtgatcttttcagctcattaatcacagagtggactctacattggtggaaaaagtgaagagaggagctcaaggattattctatcttccaatggaagagaagaaaaagtctgggcagagaga

SEQ ID NO: 40911 - DNA, 371 bp, Glycine max
  Clone ID: LIB3139-025-P1-N1-F7
gcggacaagaatgaatggttattttggaaagttaattgcgttttttgatggtctcattgaagaaaggttgcgtttaaaggcatcagacaatgaatccaaagcatgcaatgatgtgttagatactgtgctggaactcatgcttgaagagaattcacaagtgacccgccctcatgttttgcatttggttcttgatttatttggggctggaatagacacaacatcaagcacgatagaatgggcaatggctgagttgctacgcaaccctgaaaaactagaaatagttagaaaagagcttcaacaagtccttgccaaaggtgaacaactagaagaatcacatatctcgaaccttgcttacctacaagcagtggtga

SEQ ID NO: 40912 - DNA, 368 bp, Glycine max
  Clone ID: LIB3139-025-P1-N1-F9
atttactggtccaccggaaaatgtcagagatcatgggatggctgccacaaggattcttcgcaagggagacttccagaaggcttttgacattattgtgtctcttgatgtatggaaatttgtgagaaatcgagacacggtacttgaaatgctaaaggacaaaatcaaggaggaggcattgaggacatacctctttaccttttcttcatcttatgaatcgttgagcctggatcagctcacaaaattttttgatctctctgtttcgcgcactcatagcattgtcagtaggatgatgatcaatgaggagcttcatgcaagctgggaccagccaactgggtgcattcttttccaagatgtcgaacactccaagc

SEQ ID NO: 40913 - DNA, 378 bp, Glycine max
  Clone ID: LIB3139-025-P1-N1-G1
ggttggtggttccatttttggtttctggctttcttttttgaccatgtaactggctgggaaaatcaccactgaaaatcggggttcatgccacccgtaccaagggggtcaacctttttgcaacacaactccatcatgttcaaaacctaactggtagagtgcatggaaccaagctgcatcaaggtgaagactggcatcacaacgagacagtcaagcactggacttataccatagatggtaaggttacaacatgtctggagagtattgaatccattgatgaacagagcaaaacaatcacctacaagctcttcagtggtgacattgatcataattataagaactttaagttcatctttcaagccattgatgataatgatcatg

SEQ ID NO: 40914 - DNA, 332 bp, Glycine max
  Clone ID: LIB3139-025-P1-N1-G10
ccccttccttaacttcgaatttcggttcgggaaaaaatttaaaaaaaaaaaaaaaaaaaaaaagggcgggataaaatataaaaaaggggaataaaaaataaaattaaaacatggatgcataaaaaattaaaaatataaccgtgtcctgtaaaatattcgctctttttcatccatttacgatgtctatggtttccaattcatatcgcgttcacactttcgcacgactttctgcacatataccttaaaagctacaacattcttttgctcttcaatatgatagccaaaattccctatttttgtctttagtgaccttttttcaattgccattacct

SEQ ID NO: 40915 - DNA, 373 bp, Glycine max
  Clone ID: LIB3139-025-P1-N1-G11
gttgtatgagggtaagcatattcctgtatctaatatgagtgcaggggaaaatcatgtagttcaaatacccttaatggcacaggaggaaattctgtcttctagtgcaagtgacttcagaactgcaatggtgagtaaaaatagcaagcctcaagctactgcaatgcatgtgggagctatagaaattatcattgatagtttcgcaagtcctgactgcaacatagttggtgcaatgcttttggttgatacttatcataccaatcctgaaaatgcagttcgtagtatttttgttgcgcctttcagaggcggaaggcccattcgggtggttacatttccgaataccattgtgcagattgaaccagacatgaattcaagg

SEQ ID NO: 40916 - DNA, 372 bp, Glycine max
  Clone ID: LIB3139-025-P1-N1-G12
gtttgttttttctctcacctgaaaatgtcttgctgcggtggtaactgtggttgcggaagcgcctgcaagtgcggcaacggctgcggaggctgcaagatgtacccagacttgagctacaccgagtcaaccaccaccgagaccttggtcatgggagtggcaccagttaaggctcaattcgagagtgctgaaatgggtgttcccgctgagaacgatggctgcaaatgtggagctaactgcacctgcaacccctgcacttgcaagtgaggtgttggagagctaaagcttcaagcagaaatggcccttagaaataatgataaaaactatatgtagtttcaaaacttcaaaattatgtagtatgtattatgttgcact

SEQ ID NO: 40917 - DNA, 166 bp, Glycine max
  Clone ID: LIB3139-025-P1-N1-G2
ttggcagattttgtcaaatccaaatttggaaacttgaattctgataacaatgcaggattggggagtgaattgatgacctgattaatactacagcatatgatcggggcttccaagatatggacaaaggatactatacatacatactgaaaagtgcaataattactat

SEQ ID NO: 40918 - DNA, 374 bp, Glycine max
  Clone ID: LIB3139-025-P1-N1-G6
ctcaaatggaaacaaatttgtttaaattgtctcttgatgaggttgaaactcctaaaggttctatgttggatcttaaaatttctcaatctaaaattgcacttcccaagaacacagttggaggaaccattctgcgtagtgatctattggcaaattttttgacagagggcaattttagagcaagtgttgatttgcagcgcactcatcgtattaaaggaatgattaaaatggtggccacagctggtattcctgagaatacaggtatagcattggcctgtgctatgaatagttcttttagggggcgcgccagttctgatatttacaccatctgctctcaagactgtgaattatggaatcctgcttgcacaaaagcaatg

SEQ ID NO: 40919 - DNA, 375 bp, Glycine max
  Clone ID: LIB3139-025-P1-N1-G7
aaagaatggctctactcaaacaatggccttacgaagggttttcttctaccttctatatatctctttctttctttatcagtgtgcttttattgtttaagctcacaaaaagaaccaaacccaaaaccaatctgaatctgcctccatctctaccaaaactaccaatcatcggtaacattcatcagtttggaacactgccacatcgatctcttcgagacctctctctcaaatatggtgatatgatgatgttgcagttggggcagatgcaaactccaaccctagtggtttcatctgtagatgtggccatggaaataatcaaaactcatgacctagccttttctgacagaccccacaacactgctgcaaagatcttgctct

SEQ ID NO: 40920 - DNA, 376 bp, Glycine max
  Clone ID: LIB3139-025-P1-N1-G9
agggattttgcatagacccagaagaagcaaattgctggctagtctatgaatatgtagagaatggatctctatactcatggctgcatgagggcaaaaaagaaaagttgagctggaaaataaggctaagaatagccattgacattgccaatggtctccaatacatccacgagcacacaaggccacgggttgtgcacaaagacatcaagagcagcaacattctcttggactccaacatgagagccaaaattgccaattttgggcttgcaaagtctggaatgaatgccattaccatgcacattgtgggaacacagggctatattgcccctgaatatcttgctgatggtgtggtctctacaaagatggatgtgttcgcatt

SEQ ID NO: 40921 - DNA, 371 bp, Glycine max
  Clone ID: LIB3139-025-P1-N1-H11
gaagaagctgacactttgattgagcagatgactcgggatcaagatccaatattgcgttatggtggcatgtatgctttggccttggcgtataggggaacagcaaacaataaggccattcgccagttactgcactttgctgtgtctgatgtgagtgatgatgtcaggaggactgcagttctagcattagggtttgtgttgtactctgatccagagcagactccacgaattgtttccctcctatcagaatcttacaatccacatgttcgatatggagcagctcttgctgtgggtatttcctgtgcgggtacaggtctcagcgaggctatctctttattggagcctttgacatcggatgttgttgattttgttcg

SEQ ID NO: 40922 - DNA, 371 bp, Glycine max
  Clone ID: LIB3139-025-P1-N1-H12
gagccccatttcatggctgggaaactctcattagcgctggggctttcctctctaaccctatccccccaagttcttgcaaactatgagaatcccccagtgtacaagcctcccactgagaaaccaccagtttataagcccccagttgagaagcctcctgtttacaaacctccagttgaaaaccccccaatttataagcctccagtagagaagccaccagtgtacaagcccccagttgagaaacccccagtgtacaagcccccagttgaaaaaccaccagtgtacaagcccccaggtgagaaaccaccagtgtacaagcccccagttgaaaaacccccagtttacaagcccccagctgaaaaacccccagcgta

SEQ ID NO: 40923 - DNA, 425 bp, Glycine max
  unsure at all n locations
  Clone ID: LIB3139-025-P1-N1-H4
atagaagagnnangacgnngcatgcggtccgtaagttgggaattaggttcgaggtcggaggttgttatggggtctgggaacagtgggaggatgtgtaagaagaacttgatggggagagtgagggatatgggtggggccaagattgctaatagatgtacccagacttgagctacattcttgactaggaaggatcaacaatgtgtataggagtggcaccagtttatgctcaagtctagagggctgaaatactttctttcttattttattccaaaaaattgaagaatagttactttgacaaaaagggttggacttgctagagtggtgtagaagaacttaagctttcatcaacaatggtcctgagaaataatgataaaaactatatgtagtttcaaaacttcaaaattatgtagtatgtattatgttgc

SEQ ID NO: 40924 - DNA, 372 bp, Glycine max
  Clone ID: LIB3139-025-P1-N1-H5
caaaatttaatccagttcctgttggccttcctgggattctgatcatagatgtcagcaattcaaaggaactgatagattattataatatcactacaccaagagactggactgggcgtgtaaagagtttcgaaggtaaaggtaaaatcggtgatggtttgatgcctattctgcataaatctgcaccacaggtagcattattctctgctcgagggccaaatataaaggacttcagcttccaagaggcagatcttctcaaaccagatatattagctcctggttcattgatttgggctgcttggtgtccaaatggaactgatgagccaaattatgttggtgaagcgtttgccatgatatctggaaccagcatggctg

SEQ ID NO: 40925 - DNA, 342 bp, Glycine max
  Clone ID: LIB3139-025-P1-N1-H6
aagtgcgacgacgatgcacgcccgcgtaaggctgggaattgggctggaggaaacccatttctagagagagaaactctcagtcgcagacttgtcttccttcgatgccttcgccgaccacttgaacgttaactcttgttccactcgccagcacgacgatgacgaggacaacttctctggctacggcgggtactcctccttcaccggaggattcttcgccgacggagatgtcgacgtcgatcactcctgcgccgtgttgccggacatctacggatggactgatggtaatcccagttactcttagtctcacttccaatcgtacaccgtagataaccaaaacggaaa

SEQ ID NO: 40926 - DNA, 376 bp, Glycine max
  Clone ID: LIB3139-025-P1-N1-H7
caaagatgccgatggacgaattaatgaagaagaaggggaagagattatcaccttaagcgcttcagccaataagctgtcaaaattaaaagatcgtgcagaggaatatgctgcccttatcatggaggaactggatccggacaaccttggatacattgagttatacaacttggaaatgcttcttctgcaagccccagcacaatcaacccacataaccacagatagcagggtactgagccaaatgctaagccagaaactagtccctacaaaagagtacaaccccatcaagcgaggctttcgggcactggcatacttcgtgcaggacaattggaaacgcctctgggtcatagccctgtggctttccatttgcgctggtctt

SEQ ID NO: 40927 - DNA, 346 bp, Glycine max
  Clone ID: LIB3139-025-P1-N1-H9
aagacatttttcatgcttgctgatcaaattatcagcgtggtttttttcattcattcaaaatcgcttcttcatcgctatatcaaaccggataattttctaatggtattaggaaggcttgcaaaccagttttatgctattgattttggtttggctaataaatacatatatagttcaacacatcaacacattccttacagtgaaaataataattttactgaaacttcaaggtatgccatcatgaacactcaccttgtcattgaacaaagcataatagatgatcttgattctcttgattatgttttgacgtacttcttgagaggaattctctcttggctgtttcttaaat

SEQ ID NO: 40928 - DNA, 364 bp, Glycine max
  Clone ID: LIB3139-026-P1-N1-A1
gcttctgctggctcatcggaatcctcttcattctcgtcgtgctcctcgccatcgccgccggcgtcctctacctcgttttccgtcccgaggcgccgaaatactccatcgaaaacatcaccgtcagaggaattaacctcacctcgccgtcgtccgtggcggcgatctcgccggagttcaacgtcaccgtcaaggccgataaccctaacgacaagatcgggatccgttacttgaaggatagctccgccgaggtgttttataaggacgcgaggctgtgtaacggcgctctgccggcgttttatcagccgtcaaacaacgtgacggtgtttgggacggcgttaaggggtgacggaatcgagctgaggag

SEQ ID NO: 40929 - DNA, 359 bp, Glycine max
  Clone ID: LIB3139-026-P1-N1-A11
gggcgagcaaggaatcttatgatccctcctatggacaacattcgcaatacagataataacccgtattgggttcgaccatcaatgtcgaggatggaagctcggccatcagttttgccagcaccttttgaaatgaggccttctgtaaatgtgaatgtaactagaccgcccatcataaatccaataaatccattgcaaaaacatgttaggagtcagttcaatgcaataaatactagtaatcctattgcaaaccatgtaaataaatcttcatttatgccaaaacagtcatttgacagtgttgagaacaaggatgcaagtatttcaaagatacatcagttgcctaatcagcttcctggagtaat

SEQ ID NO: 40930 - DNA, 356 bp, Glycine max
  Clone ID: LIB3139-026-P1-N1-A12
ttttaatggtgttatcaggtctttgagaagcttggaccaagcttatttgattttctaaagagaaataaatactgcccattccctgtggatcttgttcgggaatttggacgtcagcttttggaatctgtagcatatatgcatgaactacgcctaatccacactgacctaaagccagaaaatatacttcttgtttcctctgaatatgtaaagctccctagctataagagaatttcctcagatgaaatgcaattcaggtgcttgcccaagtctagtgctattaagctgattgattttggtagtactgcatatgataatcagaatcatagctccattgtttctacaaggcattacagagc

SEQ ID NO: 40931 - DNA, 340 bp, Glycine max
  Clone ID: LIB3139-026-P1-N1-A3
cggctcgagcggctcgagcagaaatccaaggacgtggcgcagaggattctcaattcggtggactacgagatggggaggtgcacctacaccttaggtttaggagaggcgaatatcgcgggaaagaagatatttctcttcgacgcggtttgcaggccgagggagattcactcgttggagacgacgccgtttgatgattacgtggggaaccacgagaacaagacgctgcacgccacgcagcatatcgccgagtgttggacgcgctcggtgaagaagctgctggagagagtaacggagtcggcggagaaaaaagcgttggagaacgccgcgagtgagtgccatg

SEQ ID NO: 40932 - DNA, 361 bp, Glycine max
  Clone ID: LIB3139-026-P1-N1-A4
ttcattgtgatatcatttgtgtcactggatggactgccacgccaatgcaggatgttcaggttacaattgattggtttatttcctctcaggaatgtgttcccaggacctattgtgttttaaatccacaaaatccttttgtgttaaataggtggatgggaaaactgactttccctcagggcacttcccgaagtgttaagagaatgcctctttctatagggggaggagctggtgcaaagaatgctattctcatgaatatgccaaatgctgttctttcaatgtggagatattttgttggagatctcgtctttgaagtttctaagatgacttctccctacattaaatgtacagtctctttcttcat

SEQ ID NO: 40933 - DNA, 363 bp, Glycine max
  Clone ID: LIB3139-026-P1-N1-A5
ctcgagccgaatcggctcgagcccagtcctcgcctgcaaacccttcctccactgcttcttcctccctctcctgcctaagctcccttcctgcaccggtgtcgacgctccctccaccgtcgacgaccaattcgagttcatctacctctcctggctgagtttgggatcagcctggaggcaggcggggccaccaacgttggggaggaagaagtagagagggtcaatgaagagggtgaggaggctcgtaacaaggaacacctggttccaataggccacgatgtcgctatcggggttcaggatctggtaatgccataggatctggaacgagtgctcctcctctctcgctgtcactgccttcgatcaaga

SEQ ID NO: 40934 - DNA, 311 bp, Glycine max
  Clone ID: LIB3139-026-P1-N1-A6
aaccaagggtaaagggccatgatgcataaactcattgcacttgtgaaggcatacactaacgtgtaatcaaaggtggacgattgtgttctacgtgaagggaaggcactagatgttgacccgcttactgcgatgcatgaaaccacataaaggacatctataaccttgcaaaccaagttaattgctgttagtgctaatataggaccacttaaggagtgcatgtatatcgatccaaaaagggcctaagctattcctacataaaaagactctatgacaagaacagcatctacaaaggctatatatcgcacaacaac

SEQ ID NO: 40935 - DNA, 286 bp, Glycine max
  Clone ID: LIB3139-026-P1-N1-A7
ctcggatgctgtaacattcgcccatgatgtgaagctgtggagaggaccatatgccgatgaaatacatattgcatcatcatcatcatcaacaaaccgcattacaaaaaaaagatcccgccccctgtatagccccatattggttcccaaaccccccaaccaaccaaaacaaaaacaaaccaacccttggaaaattaaagaaataagaaacccccccaatagggtctcacatctctctaacctctaaaacacaccaatactaccaaaatatatcaatgttccctgaaac

SEQ ID NO: 40936 - DNA, 337 bp, Glycine max
  Clone ID: LIB3139-026-P1-N1-A9
taccaatatttcttacataacataacataccatactgtaacattacttttactaaccttacataaccttgcttgtagctttgtgttaggaagctatgcaggatgtgtctattgatgttgctgcgccgttgctcgcttatgatgcctttatgggcctcgttagcgttttcaacagcactttttgcaatgtcggcagtgatttgcgcgttcctcctgttgagactttggaagagtgtcctggtgcgtgggttgacgcccttgctaggaggggattccgtctcgttgatgggggaaggaaatcagactgcggaggatgtgagcgatgtggttgtaccgtt

SEQ ID NO: 40937 - DNA, 363 bp, Glycine max
  Clone ID: LIB3139-026-P1-N1-B1
tactacttcttcactcaaaaaagagatagaaagagaaggaaaaaaaaggctattatggcaggaggaggagctccagctaaagcagatgagccacagccacatccaccaaaggatcagttaccaaatatttcttactgtattactagtcctcctccatggcctgaggccatacttcttggttttcaacattttcttgtgatgcttggcacaactgtgttgattcccactgctcttgttccccagatgggaggtggcaataatgagaaggcaagagttatcgaaaccctgctttttgtagctggtattaacacattgttgcaaacaatgtttggaactcgattgcctgcagtaattggagggtct

SEQ ID NO: 40938 - DNA, 355 bp, Glycine max
  Clone ID: LIB3139-026-P1-N1-B10
gaaactttaagcagatgtctaatgttttatgggtgggtcctgaggacaaggcgagtttatggtcacaacttcattatgtttcgtgcaataatctggaaatgcaagaagcttatcttgtcaatctcgtaaatgtgttacgagaattgtatttgcacagtccagaggaagctcgccaattgagaaggaaagctctctctcgtattgaatggctgcaaaaagctgatgtgcctaccatagcacagattgaagagttccattcgatgcagaggatgatgaatgctcctgattcaaatgataatattgatctactgttgagcattgatttgttgggtttacaaggagcaagtaaagcttt

SEQ ID NO: 40939 - DNA, 359 bp, Glycine max
  Clone ID: LIB3139-026-P1-N1-B11
gctgtggcaactgcagtgatgaattctaggtctgctgccttcgcaaagcgaagccaaagtttcattgatcgtggagctgcaacccaccatcttgggctgtcttcagcttccaactcttcttgcagggtatcctctaccctttcagattggagttcccctaccgggaaactggattggggtgtaaacggagacaagctgaacaagctgaggaaatctacttcctttggattcagaaacagtggggtaactgcatcccccatagcacagcctgaatttggtgctgagccggatgtctcaggggttcattcattggttaaagatgttccctccgagaggtctgagatatttggtgctgagaa

SEQ ID NO: 40940 - DNA, 359 bp, Glycine max
  Clone ID: LIB3139-026-P1-N1-B12
ggcagaaatgataaacagtctttgtggtggtgatgcaaaattgatgcgtgaaaggacacacctgctgttggcttgttgttcaaggatggcaatttgtaagaaagatgtttggagagttgaatgtggaatcccttctggatttccgctcacagttatttgcaatagcatttttaatgagatgctcattagatatagctatgaaaaattactgcgccaggctagagctccaagcatgtttttacaatccttcaaaaattttgtttctttgtgtgtgtatggtgatgataacttaattagtgttcatgaatatgtcaagccttactttagtggttctaaattgaaaagctttctagctggtc

SEQ ID NO: 40941 - DNA, 362 bp, Glycine max
  Clone ID: LIB3139-026-P1-N1-B2
ctcgagccgctcgagccgatcaagtggaatccaagagtgtgtgaggctctttcaccatattatacatacaagttctttaggcttacaggaaaagatggttggactaatcttggaggagtatttctgtgtgttacaggaactgatgctatgtttgcagaccttgggtactacagacaaacacctgttagggttgcatttttttgtatcatttacccatgtctagatcttcaatacatggggcaagctgcttttctttcaaagaatttatctgcagtgcctataagctgttatgcttctattccagatattctattttggccagtatttgtggtggctgctttggcagaaatagtggcaagtca

SEQ ID NO: 40942 - DNA, 364 bp, Glycine max
  Clone ID: LIB3139-026-P1-N1-B4
ctcaccgattgctagaatggaatttcgatgctcagggatcgcttttaccattctctggtctcttgctcttgcaggagagagccatgtccatgcatcgctacctgaggaagattattgggaagctgtttggccaaacactcccattcccactgcactgcgagagcttctaaagcctctccctgcaggtgttgaaatcgatgaactccctaagcaaattgatgatacacagtacccaaaaacattcttctataaagaagaccttcatccaggcaaaacaatgaaagtacaattcaccaagcgtccctatgcacaaccttatggtgtatatacatggttaacggatattaaagacacctctaaagaa

SEQ ID NO: 40943 - DNA, 362 bp, Glycine max
  Clone ID: LIB3139-026-P1-N1-B5
ggctgagacgaaccagacccaacaaacgtgattaccgagttgttatagctgttgatgattcacatagtatgtcagagaatggctgtggtgacgttgctattgaggcattggttacagtatgtcgtgctgtttcgcaattggaaatgggcagcttggctgttgctagttttggaacgaagggaaacataaaattattgcacgactttgacaggccctttactggagagtctggtgttaagatgatctccaatttgacattcaagcaagaaaatactattgcggatgagccagttgttgacctgttgaagtacttgactaacaagctagatactgcagttgcaaaagctcgacttccatctgga

SEQ ID NO: 40944 - DNA, 363 bp, Glycine max
  Clone ID: LIB3139-026-P1-N1-B6
gatggatgctgctgggcttcacaaattcatatctgacaaccgtaagaaccttgctgctgtaagggaggaaataccacatgcattaagagcagctcctaacgccgcctgtttagttttagattctctgaaggggttttactgtacagaagtgtcaaatcaggacgtaaagaaggatgctaacttactgggtgttcgccgaacatgtatcatgctgatggaatgtctatgtgatttcctgagcaactcaggttgtgtttctaatgtaatttcagaagatatcaaggaccgggctaaggcagttgctgaagaatggaaacccagattggatgctcttgacatcgatgctagcaatgtgaattcctt

SEQ ID NO: 40945 - DNA, 362 bp, Glycine max
  Clone ID: LIB3139-026-P1-N1-B7
cttagaaacttcaaagacgagatctccaacaaaatagctccacattgaaagaacagtctctttcttcatagcatttggaaatttggctgatgacaccatcaattttgaggcttttccccacaagctggtgcagtttggagagattcaggaaaaagttgtgttgaaattttcacaagaggaatttcttacagcttggtcaactcaggtgcgtcccgcaacgactctgttggctgatgggtgcccatatttgtatgctatggtgcatgatagttcagtgtctacaataccaggtgattttgtcattggtgttaagttgacaaccataaacaatatgtgtgcatatgggctcaatcctggtattt

SEQ ID NO: 40946 - DNA, 351 bp, Glycine max
  Clone ID: LIB3139-026-P1-N1-B9
ctcgagccgattcggctcgaggagtcacactggcttgacccttccaggactctaccgtgttgttcacggtattgatccctttgatccaaagttcaacatcgtctctcccggtgccgacatgagcatatacttcccatacactgaaactgagcgtaggttaacagagttccaccccgacattgaagagcttctttacagctcagtggagaatgaagaacacatatgtgtattgaaggaccgcaacaagccgatcatcttcaccatggcaagacttgaccgtgtgaagaacatcacgggacttgtggagtggtatggcaagaatgcgcgcctccgcgagttggtaaacctcgt

SEQ ID NO: 40947 - DNA, 365 bp, Glycine max
  Clone ID: LIB3139-026-P1-N1-C1
ggctcgagttttatcggtcgagcatctgtcaaaaataagggccgaatagctcgctatcttgctaacaaatgttcaaatgcttcacggattgactgcttttctgaaaggggtactactacttttggggagaaactccgtgagcaagttgaggagcgacttgttttttatgacaagggagttgccccttgtaagaacatagatgtcatgaagtctgctattgaaagtgttgaaaccgaatatacagcgatggaaacagaagcaccagttgaagtttcaggcaagaaagccaataagaagaagcctaaagctttcgttacagatgatggtgataatatggctgtagataagatcacagagactacaaa

SEQ ID NO: 40948 - DNA, 356 bp, Glycine max
  Clone ID: LIB3139-026-P1-N1-C10
ctcgagccgaatcggctcgagtgttgttggtgttgttcagttcttcttcctctctttgaacaacatctcacaattcattcaccttttaattcatctcactcacaaatcacaatgctcttcctttcttccttaataataataccataataatctgttacgttacggggcccaaatgtctgttacggagctcaaggagcgtcactctgctgccaccgacaccgtcaacaatctcagacaccgtttaaagcagaagcgcctttcgttgctcgacacagatatttctgggtatgcaaggtctcaaggtagaacgcctgtgacctttggacctacggatctggtttgctgtagaaccttgc

SEQ ID NO: 40949 - DNA, 360 bp, Glycine max
  Clone ID: LIB3139-026-P1-N1-C11
caaaggctctgcaattgcaaattcagaggatgtcgatcttcgagtacaacgaagcgccgtggtggctatggtcggcaagaactgcttcgccattgccagcgaccgaaggctcggcgttcagctccaaactatagccacggattttcaacgcatttccaagattcacgacaagctcttcatcgctctctctggcctcgccaccgatgctcaaacattgtatcagcgtcttgttttccggcacaaactgtaccagctgcgtgaagagagggatatgaaaccagagacctttgccagtttagtctctgctctgctctatgagaaaaggattggtccatatttttgccagcctgtaattgctgg

SEQ ID NO: 40950 - DNA, 359 bp, Glycine max
  Clone ID: LIB3139-026-P1-N1-C12
caattctctgtgtagaagccatgtcaaagggtcctggtctctactctgacattggcaagaaagcccgagatctcctcttcaaggactaccacagtgaccagaagttcaccatcactacctactcacccactggagttgctataacatcctcagggaccaagaaaggtgatctttttgtggctgatgttaacacccagttgaagaacaagaacatcaccactgatatcaaattagacactaattccaatcttctcacaactatcactgtcaatgagcctgctcctggtctcaagactatttttagcttcagagttcctgatcaaaggtctggaaaggtggaagttcagtacttgcatgac

SEQ ID NO: 40951 - DNA, 363 bp, Glycine max
  Clone ID: LIB3139-026-P1-N1-C2
gtgctcccactctcctatctggtataggacttcgtgggtagacttttctatttctctcctttctttcactctcttcttctcactgatccgcattgccgttcaaagtggtcttatttgaaaaacacttgggcgttggtgcaaatgtttgcttcattcattttctctggagacaacaggctcactgagaaaacaatttttacttgcagagatttggacatcttggttgtttattatacaatagcaactcaatttagaaaatttctaccgcattacattaggtggcatctgtataccttgttgatttacattctcccatcttttctcactgctgaaattaaatataagcggaatctgagtcatatt

SEQ ID NO: 40952 - DNA, 356 bp, Glycine max
  Clone ID: LIB3139-026-P1-N1-C3
tgttctttatttttcaaaggaaagtaaaggtaagaggagagaggaaaaagaagagagtgttggttaacagaatcacacactacacagttaccaaaatcaggttcaaacgcacagatctgggagacgagaagaagaagaagaagaagatgggacaggatcagaaccagagatcgctgctctacgccttcgagtatagcggtaccgtgattatagtcgagtacacttgattgagtggcatactttaacacaatcgcgttccagagcctttagaagattactgcctgcaacatcaagttaacctacaactgtgactgccacacctttaactacctcgtcgacaacggattcacttattg

SEQ ID NO: 40953 - DNA, 356 bp, Glycine max
  Clone ID: LIB3139-026-P1-N1-C4
catatgtctcaaaggcccacgattcctcactcttctggcagagcctgcggccttcactctcatctcctggtctccagtgagatgaaccctagctccaattggtcccattagttacctctttcctgcatctcatatatcccattctttctcattcacacagcatcatgggcgtcaaaggttttgttgaaggaggcatcgcttccatcatcgcaggatgttccacacacccacttgatctcatcaaggtccgcatgcagctccagggtgaaaacaatttgcccaaaccggttcaaaatctccgacccgcactcgccttccaaaccggttcgaccctacacgtggcagctgcagttccg

SEQ ID NO: 40954 - DNA, 361 bp, Glycine max
  Clone ID: LIB3139-026-P1-N1-C5
gtttgattaccaagcaagttatgagcaagatggcagaaatgataaacagtctttgtggtggtgatgaaaaattgatgcgtgaaaggacacacctgctgttggcttgttgttcaaggatggcaatttgtaagaaagatgtttggagagttgaatgtggaatcccttctggatttccgctcacagttatttgtaatagcatttttaatgagatgctcattagatatagctatgaaaaattactgcgccaggctaaagctccaagtatgtttttacaatccttcaaaaattttgtttctttgtgtgtgtatggtgatgataacttaattagtgttcatgaatatgtcaagccttactttagtgg

SEQ ID NO: 40955 - DNA, 363 bp, Glycine max
  Clone ID: LIB3139-026-P1-N1-C6
gcaaaagatgcaaactcgtgaagagttggttgaagctgtccgctatcctcatatggattgcttcagcccttcatgctgctgttaactttggacagtatccatatggaggtttaatcctaaacaggccaactattagcaggagattcatgcctgaaaaggggtctcctgaatatgatgcgttggctaagaaccctgagaaggagtttttgaagactattactggcaagaaggagaccctcattgaccttacagttatagaaatcttgtcaaggcacgcatctgatgagttctaccttgggcagagagatggtggtgactactggacttctgatgccggtccattagaggcatttaagaggtttg

SEQ ID NO: 40956 - DNA, 361 bp, Glycine max
  Clone ID: LIB3139-026-P1-N1-C7
caatattattctcctcattccttcatttttaaaccgagctccatctccctccactcaccataacatggcatcagaagcaaatgctgccaacaccaacttctgtgtaaatgttagcaacaatggctacattagtgctaatgaccccttgaactggggtgcggcggcggaggctatggctgggagccacctcgacgaggtcaagcgcatgctagaggagtaccggaggcccgtcgtcaagctcggtggagagaccctgaccatctcgcaggtcgcggcgatcgcggcccacgaccagggggtgaaggtggagctggcggagtcctccagggccggtgttaaggccagcagtgactgggtgatg

SEQ ID NO: 40957 - DNA, 306 bp, Glycine max
  Clone ID: LIB3139-026-P1-N1-C8
gaagcattaatcttcaaccatggccacaccctgggcgtaccaagagcaccttccggcggcacccagttggctgaacaaaggtgacaacgcatggcagttaacagcagccaccctcgttggtcttcaaagcatgccgggtctcgtgatcctctacgcaagcatagtgaagaagaaatgggcagtgaattcagctttcatggctctctatgcctttgcagcagttctaatatgttgggtgcttgtgtgttaccgcatggcctttggagaagagcttttacccttatggtgtaagggtgcttcagcact

SEQ ID NO: 40958 - DNA, 358 bp, Glycine max
  Clone ID: LIB3139-026-P1-N1-C9
cgaggcgcgggcaccgtgaagttcctgaagcataaggctacgggcaaggttaggcttctcatgaggcaatccaagacgctcaagatctgcgccaatcatctcattttgcctactatgagtgtgcaagagcacgctgggaacgagaaatcttgcgtttggcacgctagggattttgctgatggtgaactcaaggacgagcttttctgcatccgttttccttctattgaaaattgcaaaagcttcatggaaacattccaagaagttgctgaatcccagaaggcagaggatgagaaggaatcagctgatgcagctggtcttattgagaaattaagtgttgaagaaaaggctgatgcagaga

SEQ ID NO: 40959 - DNA, 357 bp, Glycine max
  unsure at all n locations
  Clone ID: LIB3139-026-P1-N1-D10
ccacaatcaaacctcttctttcaggtccaattgactggcttattcttttctttccatacacatgcagacaataagttcgaacaagttcaggactggcatggacttctttcaccgcgcgaaggcggtgcgcctccgcagccaccacgacaagtacctcctcgcggaggacgacgaggattcggtgacgcaggaccgcaaaggctcctcgaaaagcgcgcggtggacggtagaatacgtggctgaatacgataacataattcgcctgaagagctgttacggcaagtacctcaccgncttcaaccaccgcttnctcttgggcatgaccggccaccaggtcctccagacgcttccttcgag

SEQ ID NO: 40960 - DNA, 359 bp, Glycine max
  Clone ID: LIB3139-026-P1-N1-D11
gagtctttcttcctttgtaatagaaagcacgcgtttggctctctccctctctcaacgaatatttgtgtacttcctcttttgtgggtagattcaatttaccatgtcgagttcatcggaatactctcaattttccggccagaaaccggcgaggtcgccggagaaatcgagcttctctcagacttgtagcctgttgagtcaatacatcaaggagaagggtagcttcggagatcttaccctcggaatgacatcatgtgggtcacctgagacatcttgtcaatctgctacaaccatgaacttgtttcctaccaaggaaaacaacgtgacaccaaaggacctgacagctatggatttgttctctc

SEQ ID NO: 40961 - DNA, 359 bp, Glycine max
  Clone ID: LIB3139-026-P1-N1-D12
tgaaaaattgatgcgtgaaaggacgcacctgctgttggcttgttgttcaaggatggcaatttgtaagaaagatgtttggagagttgaatgtggaatcccttctggatttccgctcacagttatttgcaatagcatttttaatgagatgctcattagatatagctatgaaaaattactgcgccaggctaaagctccaagtatgtttttacaatccttcaaaaattttgtttctttgtgtgtgtatggtgatgataacttaattagtgttcatgaatatgtcaagccttactttagtggttctaaattgaaaagctttctagctggtcataatatcaccattactgatggtattgacaaaa

SEQ ID NO: 40962 - DNA, 362 bp, Glycine max
  Clone ID: LIB3139-026-P1-N1-D2
ggaaaatgttgctgccgcaagagaactcaacttctggaattgatgaagagactctgtctgaagtcgaagctattctgaagcctgttaaaaaccagtcgtggccaagtggaatccagcagagctgatgtttattttaccacctggtattacctatggagacatccattcctgttgttgacaatgttcttcactcaaataatccgattcaataagagaaattgctttgaaagtattaggatccactgtctcaataatttttgtttgtaatctagagtgtccaataatacatttctcactagaatgctattcatcttcggcttctggagagtaagagcctgtcttctaggtgaacccgtaaatag

SEQ ID NO: 40963 - DNA, 361 bp, Glycine max
  Clone ID: LIB3139-026-P1-N1-D3
catttttcgtagctgctgttcttgcgcgtgaacaagcctcaggtaagccaaaaccatggttaagcataacaatgttatcccaaacggacacttccgtaagcactggcagaactatgtgaagacttggttcaatcagccagcacggaagacaaggagacgattggctcgtcagaagaaagctgtgaagatattccccagacctacggctggacctctcaggcccattgtacatggtcaaactttgaaatacaacatgaaagtgagaggtggaaggggattttctcttgaagaactcaaggcagcagggattcccaaaaagcttgcaccaaccataggtattgctgttgatcatcgtcgcaag

SEQ ID NO: 40964 - DNA, 365 bp, Glycine max
  unsure at all n locations
  Clone ID: LIB3139-026-P1-N1-D4
cacgcagtctcgcctcgcgcagtctcttctccgtttggaagcttcattagcacacagacacagctttcgccaccactcggacatggcgagcgagggcggcaacaagagcttcgcgcggcgtgatcgtctccgcgagatcgaatcgaaggtccagaaatggtgggaagagaaagatgtcttcagagccgaaccgggcgagaagcccccttcttcgcctggcgagaaattcttcggtaacttccctttcccttacatgaacggctacctgcacctcggccacgccttctccctctccaaactcgagttcgccgccgnctaccaccgnctatgcggcgccaacgtnctcctccccttcgccttgcact

SEQ ID NO: 40965 - DNA, 367 bp, Glycine max
  Clone ID: LIB3139-026-P1-N1-D5
ctctcatttgacatggctgcttccaactcgaccctgcgactgacccaccactcccaacaccaccttcgtccaagccaacccttccaacttgcgcgccgtcgtccagaagctcaccggcgcctccgatgacccctccgcccataaactccccctcactctccccacgcgcctcgcggcagcgcagtcccaccgccccgcctacgccggcgaggtgatcggccccaagaagccgaacttcaagctccacgagcgccgcaacgccgccgccaagaggctggagctccccatcgacacagccatgagcatgatgatgatgagcgtctcgcccacgtcctcgctggttcgaagcagaacaacgacgacaacg

SEQ ID NO: 40966 - DNA, 360 bp, Glycine max
  Clone ID: LIB3139-026-P1-N1-D7
ccagtattggagatggcagccacataactgcaatttgaagagatggaacgtgaaagaaatgtgggagaagttgagaggtaaaaggctaatgtttgttagattcactaaatagagggcaatggatatctatggtatgtttgttacaatcagtaattcctgctgataagagatcaatgtcaccaaatgcccatctcaccattttcagagcagaggagtacaatgcgactgtggaatttctctgggctcctcttcttgctgaatctaattctgatgatccagtaaatcacagactagatgaacggataattcgtcctgatacggttcttagacatgcatcactgtgggaaaatgctgatatac

SEQ ID NO: 40967 - DNA, 315 bp, Glycine max
  Clone ID: LIB3139-026-P1-N1-D8
ttcaaccacaactatggcaaccatctagtggaatactgatgactaatgatataagtgatactaacccagaggatgctgtgtcatgttttgcactgtcaaagaatgactcatatgttatgtctgcttcaggggggaaaatttctctattcaatatgatgacatttaagacaatgacaactttcatgccacctccaccagctgcgacatttcttgcatttcatcctcaagacaataatattattgctattggcatggaggactcttccatacaaatctataatgttagagtggacgaggtcaaaaccaagctaaaag

SEQ ID NO: 40968 - DNA, 147 bp, Glycine max
  Clone ID: LIB3139-026-P1-N1-D9
ctcgagccgctaacacacaagaattctttgatggaaattttccagtggattcttggttaccaatttttgtgaattgtctttatcctgtaagtcaattaccttcagaagctgtcgttgtaaatgtcacatgtggtagtggacgtggtg

SEQ ID NO: 40969 - DNA, 358 bp, Glycine max
  Clone ID: LIB3139-026-P1-N1-E10
tgatactgaggactcaaatcaggagacgcaacaagggaatctggatgcttggcacgatcttgcctttggtcaagaatagaagtttcatcattaaccagtgttgtgttttgtacttagtgagtagatggtccctgttatttggacttggcatcttcctttctatttccccgatagattgtaacttatcaactactagtacctgttaaggttatattaaggaattgtggtgtcattgctgaatgttaatgtttgctgtgcctgtcaggaaagcacttttgtatttttgcttcaaggttgaagtaagtttagggcaaccagtgcctactggtatgctctggagtctgacacctgtattaag

SEQ ID NO: 40970 - DNA, 359 bp, Glycine max
  Clone ID: LIB3139-026-P1-N1-E11
cgatattctgtgttgcgattatgctagttttgatgggttgattaccaagcaagttatgagcaagatggcagaaatgataaacagtctttgtggtggtgatgaaaaattgatgcgtgaaaggacacacctgctgttggcttgttgttcaaggatggcaatttgtaagaaagatgtttggagagttgaatgtggaatcccttctggatttccgctcacagttatttgtaatagcatttttaatgagatgctcattagatatagctatgaaaaattactgcgccaggctaaagctccaagtatgtttttacaatccttcaaaaattttgtttctttgtgtgtgtatggtgatgataacttaa

SEQ ID NO: 40971 - DNA, 356 bp, Glycine max
  Clone ID: LIB3139-026-P1-N1-E12
tcttactccatcatgtaccctaaacaacctctgtacgctgtcctttgtgtctttggctgcacttgttatgtccatgatcttacaccaggtaaagataagctttttgctaggtccttgaagtgtcttttccttggttactctcgtcttcaaaaaggttattgttgttttttcctcaacttcaacagtatattgcctttgcttatgctaccttctttgagactactatgggttgtcgttggatttatacaatgaagatcagaccaaatggtagtattgatcgctataaggctcacttggtggacaaaggatacactcagatttttggccctgactacagggacaccttttccccaatg

SEQ ID NO: 40972 - DNA, 363 bp, Glycine max
  Clone ID: LIB3139-026-P1-N1-E2
caaaaacagagtagcctacacgtatcacagagagtgagagaagagagagaatatttctgttcgtgcagatagatagatagatggctcggagctccacaagaatgaaatgggtctccatcttcacacttctattcctctcccactcgcccctcacaaccttcgcagaagatgggctagtggcgaatggagattttgaggttagcccatcaagtgggttccctaacgaggcgattgtggagggccccagcgaggtcccaaactggaagtcaaacggcaacgttgagctagtggaatcggggcaaaaacagggtgggatgatcctcattgtaccgcagggtagacacgcggtgaggctcggcaacg

SEQ ID NO: 40973 - DNA, 293 bp, Glycine max
  Clone ID: LIB3139-026-P1-N1-E3
cagatggaacactttctgtggacggacaagaaattggggggggttacttacgggctggctacacaccaaaggactatccttcagaatcagaatggagagctaggctactgatggaacaatcttatgctatcaaatgccctaccatatcttatcattcggttggcaccaaaaagattcaacaggaacttgcaaagcctggtgctcttgagaggtttgtagaaaacaaagaccacattggcaaattgcgtgcatgctttgcatgattgtggagtttggaagactcctatattgct

SEQ ID NO: 40974 - DNA, 331 bp, Glycine max
  Clone ID: LIB3139-026-P1-N1-E5
tggaagctgattgttaccacgaaaccgctttcgtcgcagcggccggcacttggagactccactgcgtcatgggaagccgctcctgcgattgccgcatcgctgttcccgtgagccaccagggttcaattctaggtgttgaggtcagcgtttctagaaaatcatattctactcaactggttggcatgggagatgagaatgggaaccaaaatttcgcgccacctcaaaacggagggttgctcatcccgaatatatttactttaacaataccgtaggttgatggaggctccattttagtcaattaaagttctgctggtctcagaaaatagtgtac

SEQ ID NO: 40975 - DNA, 359 bp, Glycine max
  Clone ID: LIB3139-026-P1-N1-E6
agacaaagtgttgttggtgatcttaaacttcttactgatgggaagttgtatgagggtaagcatattcctgtatctaatattagtgcaggggaaaatcatgtagttcaaatacccttaatggcacaggaggaaattctgtcttctagtgcaagtgatttcagagctgcaatggtgagtaaaaatagcaagcctcaagctactgcaatgcatgtgggagctatagaaattatcattgatagtttcgcaagtcctgattgcaacatagttggtgcaatgcttttggttgatacttatcataccaatcctgaaaatgcagttcgtagtatttttgttgcgcctttcagaggcggaaggcccat

SEQ ID NO: 40976 - DNA, 358 bp, Glycine max
  Clone ID: LIB3139-026-P1-N1-E8
tacacacaccacctcgcactcgcagggacagagagtggggaaggaaaaacacagactaaatggcgccaaatgctctctttctcttctctttcctcgccatgctcctccttctgctccgctcaaccgccgccggccacaactaccgcgacgccctccgcaaaagcattctcttcttcgaaggccagcgctccggcaaactccccgccgaccagcgcctccgctggcgccacgactctgcattgcacgacggcgccaccgccggagtggacttgagtggagggtactacgacgccggggataacataaagttcgggtttccgatggcgttcacgacgacgatgctgtcgtggagcgtgat

SEQ ID NO: 40977 - DNA, 357 bp, Glycine max
  Clone ID: LIB3139-026-P1-N1-E9
acagaaacaccctttctagcatagggatttgagctcgccaccttggtgaaagccttgtgacccataaggcttttacagaaggtgggattttgactagctgggtgtttggctgttgagtttatggagggccaagttccttgttgaacagtgtttgtgttgcctttatctgcagcttttaattgaaccaatcctaccctctttgtttccatatgaaaagatcggttttttgtgattcctccgctcattgttgttgaagggtctcgtgaaatcaatctagttttgagacctgtttactggcagaagtgacggagtttcagttttgtaagtgcatgatcataataataaggtttttataga

SEQ ID NO: 40978 - DNA, 363 bp, Glycine max
  Clone ID: LIB3139-026-P1-N1-F1
gggctatcgcttcctctttctctctttaaatacacacggacagacactcactttcttgcttgttctaactaccatgacaacccacattgataacctgtgggtgttggccttggtctcaaaatgcacacaagagaacattgcatggtcactcttgaccatcatggtcactctctggctctccatgaccttcttctgctggtctcatcccggtggtcctgcttggggcaagtactactcctttcattactggaaaaaaacaaccacaaccacaacctcaacctcaaacaacacaaactccaacaaccttaaaatgattcccggtcccaaaggctatcctttcattggaagcatgagcctcatgac

SEQ ID NO: 40979 - DNA, 361 bp, Glycine max
  Clone ID: LIB3139-026-P1-N1-F10
gaaaaatcagagttgaacccacccacttcaccctcaacttgggagttgaaaaaatccaaaaataataataccaaaacattactattaatcaatcccatgatcacgataaatggatcaatcgatcacggatcgttgatttttagaacaagatcatcatcatagtataaaagctcaaaagctgtttgtgtgtatgttacggttgggccatcttgtccatctatccaaatttccccatcccgcaactaatttatttatttatttttcctttatttatcttctttctctggctcgagcatccaaaagggttgttttttttttttataagaagaagaggagagggaagatgatgatgatgacaatg

SEQ ID NO: 40980 - DNA, 360 bp, Glycine max
  Clone ID: LIB3139-026-P1-N1-F11
cgaaaaaggcaaaaggagatttgtctctggggatggtgaagagatgacattgattccaggaaccagtgttgaagaggcttacaacaagctaatagttgaacttgagaaaagtgttcctacattggttggcattgaatgtcccaaggatgagaaacttcctcgtcgcaaaatttttgacaaacctaagacgcgctgcttcactattctccctatggagtttaatcttgtggtccgtcaaaagtttttaaattttgtgaggttcattatgaagaaaagggacaagcttagttgtcaagttggaatcaacccatactccatggaatggactggtttggccaatagattactgagtaagggcaa

SEQ ID NO: 40981 - DNA, 364 bp, Glycine max
  Clone ID: LIB3139-026-P1-N1-F2
cttccaaggcgatgagcgtggcagcggagaagatagcgacggcggcgcgacgccaagccgtgtcgctaacggacgccgccgcctcgcgaatacggcagctgctacagcagcgtcagaggcccttcttgaagctgggagtcaaggctcgcggctgcaacggcttatcctacaccctcaattacgcagatcggaatttattttcgtcaatccaaattctaaaggtcagtgtggttgtggtgaatctttcatgacaacaggcagtagtggatcttctaagccatgaaatagttaaaattgctattcaacttgctgtggatcctcacgtaatgaagtcgtcctttcacgatttaattgatagatagac

SEQ ID NO: 40982 - DNA, 362 bp, Glycine max
  Clone ID: LIB3139-026-P1-N1-F3
ggcgtcttcataaacgccgcccaaaacttctcatacccttgtattcattccattcgtttctagggttttcttttctttgccgagaaaatgagagagtgcatttcgatccacattggccaggccggtatccaggttggaaacgcctgctgggaactctattgccttgaacacggcattcagcccgatggacagatgccgagtgacaagaccgttggcggaggagacgacgccttcaacacatttttcagcgagaccggcgccggaaagcacgtgccccgcgccgtcttcgtggatcttgaacccaccgtgatcgacgaagtccgaaccggtgcgtaccggcagctcttccacccggagcagct

SEQ ID NO: 40983 - DNA, 363 bp, Glycine max
  Clone ID: LIB3139-026-P1-N1-F4
gagaaatataaagagaggagatgtcgtctacaaggtcgtagaatgatgaggaagaataattataatatgcccaaatggatatctggaagtacatatttggatttgtataactgtttgtcataaatttttccattgagcttttccttgtttaaaacttttttaatctattatatttcctttatacttttttatatatttttaattttctgttttttattttatttttttatctttttatacttttttatttattcatttttttttttttgtttggctgctctttctttttatattttttttacttttttttatctattttttctttaattttttttatcttttttttctttttttctttttttc

SEQ ID NO: 40984 - DNA, 363 bp, Glycine max
  Clone ID: LIB3139-026-P1-N1-F5
gtcaatgtctaaactaaattccacaacagcggaagaagccagactaagtgagaaaacatcagaggggccacaacctggtgaaagatttaagctaataaaagagcaagaggcaagaagaaaacaacaaagagaagaagaagaagaaaaaaggaaagccttggaagcagcagctagagaaactaaagtagacaagacacttgaggaaacagttgaagtggagaatcaaactggaggtgatttagttgttgaaaaatctcggtctttggcttcagatactgatccctccatatctggagtagtaaatggtaatccaattaagtaagacttggagggaaatcagaattctacatttacatctgagac

SEQ ID NO: 40985 - DNA, 227 bp, Glycine max
  Clone ID: LIB3139-026-P1-N1-F6
ggctcgaggttggatttatgggcatgcctattgctggtccgttaaagaagattcctgtttgaaccacctcaatggataaaaagttgtagttgtttatcggtacttgatacatgatgaattcatccaagagacgactattacttttcattcgtctgccttataagcatctgctagagtcactaatttatacaatacactttatgaaacaatttaagttgatcaatcaa

SEQ ID NO: 40986 - DNA, 360 bp, Glycine max
  Clone ID: LIB3139-026-P1-N1-F7
ctcgagccgctcgagccgctcgagcggctcgagaatgtctgaacctgaaaaattgttattattttgatagggtttataggaaaagcagcatacccgagttcacaaacactgaacgccgctgctccgtagtttcgatcgacgcattcttcacttcaagatatcacaatgtctataacgcacagcctcactactccactctcttcttcttcctctgctttcttagctccttcttccttcaattgcaggggacaggtttcgttgcctgtgaagagcgtgagcatttgcaaatgcgttgccacacccgaagctgagactgcctacaagacaggggtcaatcgcaatccaaatatggggaaactt

SEQ ID NO: 40987 - DNA, 357 bp, Glycine max
  Clone ID: LIB3139-026-P1-N1-F8
ccaaattctatcagtctaacatgagaatcttgattacgggaggagctggattcattggttctcacctagttgatagattgatggaaaatgaaaaaaatgaggtcattgttgctgacaactacttcactggatcaaaggacaacctcaaaaaatggattggtcatccaagatttgagcttatccgtcatgatgtcactgaacctttgacgattgaggttgatcagatctaccatcttgcatgccccgcatctcctattttctacaaatataatcctgtgaagacaataaagacaaatgtgattggcacactgaacatgcttgggcttgcaaaacgagttggggcaaggattttactca

SEQ ID NO: 40988 - DNA, 359 bp, Glycine max
  Clone ID: LIB3139-026-P1-N1-F9
cacctgctgttggcttgttgttcaaggatggcaatttgtaagaaagatgtttggagagttgaatgtggaatcccttctggatttccgctcacagttatttgcaatagcatttttaatgagatgctcattagatatagctatgaaaaattactgcgccaggctaaagctccaagtatgtttttacaatccttcaaaaattttgtttctttgtgtgtgtatggtgatgataacttaattagtgttcatgaatatgtcaagccttactttagtggttctaaattgaaaagctttctagctggtcataatatcaccattactgatggtattgacaaaactagtgcaactttgcaatttagaaa

SEQ ID NO: 40989 - DNA, 355 bp, Glycine max
  Clone ID: LIB3139-026-P1-N1-G1
ctttgttccacacaataggccacatatcagcctgtgtttcattctccaaggttgctgtttcctttacacatgtcatcaaatctgcagaaccagttttctctgtcatgttttcttcagtccttggagataagtaccccattcaggtttggctttcaattctgcccattgtgcttggttgttctttagctgctgttactgaggtgtctttcaatgtacaaggattgtggtgtgcccttattagcaatgttggttttgtgttgaggaacatctactctaaaagaagtctacagaatttcaaggaagttgatggcttgaacttgtatggatggattaccatactttcattgctttatct

SEQ ID NO: 40990 - DNA, 354 bp, Glycine max
  Clone ID: LIB3139-026-P1-N1-G10
gctaattcccacagattgggttcttcctacggcggcgctgccccttaccgatcaagagatgggcttagcacccgtcccgttggtgcctcggaggagatccaattgcgaattgatcccctggacttggacgatgagatcaccggtcttcatcgccaagttagaaggttgaaacatgtatgtatctattcactttgtacttgttaattctttgtttttgttggtgggcatgtatgaaatttcaaaaaggtgttactttttttatgaagatgagaccttttagtatctgaaatatgtttatcacgggagtggagtggatgcatttgaagaaatgaggtttcgttgattagacaagac

SEQ ID NO: 40991 - DNA, 352 bp, Glycine max
  Clone ID: LIB3139-026-P1-N1-G12
caaacattgtttgttgtaggaagaggaatcttgagagatggcaggggacagcaagagcaagattctgttcatcggagggactggttacatcggaaaattcatcgtggaagccagcgccaaagctggccacccaactttccttttggtgagggagtccactctctccaaccccgcaaaatcacccctcatcgacaatttcaaaggcctcggtgtcaatcttgttttaggagatctatacgatcaccaaagtttggtgagtgctataaagcaggtcgatgtggtaatttctactgtaggacacctgcagctagctgatcaagataagatcatttctgcaattaatgaagcagga

SEQ ID NO: 40992 - DNA, 363 bp, Glycine max
  Clone ID: LIB3139-026-P1-N1-G2
gttctttcaatgtggagatattttgttggagatctcgtctgtgaagtttctaagatgacttctccctacattaaatgtacagtctctttcttcatagcatttggaaatttggctgatgacaccatcaattttgaggcttttccccacaagctggtgcaatttggagagattcaggaaaaagttgtattgaaattttcacaagaggaatttcttacagcttggtcaactcaggtgcgtcctacaacaactctgttggctgatgggtgtccatatttgtatgctatggtgcatgatagttcagtgtctacaataccaggtgattttgtcattggtgttaagttgacaaccataaacaatatgtgt

SEQ ID NO: 40993 - DNA, 320 bp, Glycine max
  Clone ID: LIB3139-026-P1-N1-G4
aagatacatactccaatccattagccttctttccagggttcgtcccctctctctggtcaccaggctctaacataaaacagaagcctttgtgaaaaaaaagagaagagaatgctccctccacaacagcagtcacgggttggaggactacaaacctctctatctctagtttcttcagatccccgcctttctcccgaggagcctagatcaaactctgacaatctccgtgaatctcctactgaaagtgccagttctcgagaaacttggcctactgctgatgcaattgctgcaaagaagatggaaaatggaaaagcagaaatgga

SEQ ID NO: 40994 - DNA, 357 bp, Glycine max
  Clone ID: LIB3139-026-P1-N1-G5
gtgctggttcacattcttcaggagattttcctgaaaaggaagatcaagaaaaacccaaaaagattgataccagattgagacaaagaatagatcctcaatacaatgaggttcaggctcagatggaaacaaatttgtttaaattgtctcttgatgatgttgaaactcctaaaggttctatgttggatcttaaaatttctcaatctaaaattgcacttcccaagaacacagttggaggaaccattctgcgtagtgatctattggcaaattttttgacagagggcaattttagagcaagtgttgatttgcagcgcactcatcgtattaaaggaatgattaaaatggtggccacagttggta

SEQ ID NO: 40995 - DNA, 328 bp, Glycine max
  unsure at all n locations
  Clone ID: LIB3139-026-P1-N1-G6
tgaaattatcgaatccttcaatcaatcccaattcggggggggcctttcacaacaagcaccttttggttcctcttttgtcgtagagcgcataatacacactatgcaccactggttccatctgtgacacatccaattacaaccacacacttatatgtgtnctgcaccatccaaaccaacaaggacaatcaaatctcaactgtaccagctgctcttaggctgaagctattacactggactgtaatcccaatggttcttactctcagattgtgggcggcagccggttcctgtgcgctttatgaccggcggcttattccatctacgtcatggg

SEQ ID NO: 40996 - DNA, 357 bp, Glycine max
  Clone ID: LIB3139-026-P1-N1-G7
ctattcgctacgtcgtcgttagggtcgtcttcggatcggtggaacttgactgcgccggcgtgaattccgacgctgcgagtggcaccgaattgcgatagcggtgacgaatatgaaggttttcgttaagactctcaaaggcactcacttcgaaatcgaagtgacgccgcaagacacggtttctgaagtgaagaaaaatatagaaactgttcagggtgcagatgtctatcctgctgcacagcaaatgctaattcatcaagggaaagttcttagggatgcttctaccttggaggagaataaagtagttgaaaatactttcattgtaattatgctatcaaagagtaagagcccatccggtga

SEQ ID NO: 40997 - DNA, 364 bp, Glycine max
  Clone ID: LIB3139-026-P1-N1-H1
cttaagcttgctactgagtttccacactgcatacctgaggtcttccgaattcgaagttaatttgcaagatggctaaggaaaaggctcagatcaacattgtggtggttggtcatgtggaccctgaggaggcaaccaccattaacgagctgaagaagcctgttgtggagaaagaagctccagggcatgccatatgagggcatgcacgtacggcctcggaggggaaccagaaaattatgttaacaaaataatctggaaccctaatgtatcagtgtcatcatcagtgtgtagtttaagctagctttgctatggttacgttctttgagatgagagtcttgatgaacagtaccattctgatgtattgctt

SEQ ID NO: 40998 - DNA, 334 bp, Glycine max
  Clone ID: LIB3139-026-P1-N1-H10
caattcgtgaaggttacacgaggtacacgcccaatggcgggaccatggaactgcgccaagcgatttgtcacaagctaaaagaagagaatgggattacttatactcctgaccaggttgtggttagtaacggagccaaacagagtattgctcaggcagtgcttgcagtttcctcccctggagatgaggttattattccagctccattctgggttagttacccagaaatggcaaggttggctgatgcaacacctgtgattcttccaaccttaatatctgataatttccttttggatcccaaactcctcgaatccaaaattactgaaagatcaagact

SEQ ID NO: 40999 - DNA, 358 bp, Glycine max
  Clone ID: LIB3139-026-P1-N1-H11
cagggtttcagtggtgctgatatcacggagatttgccagcgtgcgtgcaagtatgccattagagagaacattgagaaggacattgagagagaaaggaggaaaagagataaccctgaagcaatggaagaggatgatgttgaagatgaaatagcagaaatcaaggctgctcattttgaggaatcaatgaaatatgctcgaaggagtgttagcgatgctgacattcgcaagtaccaggcattcgcccaaacattacagcagtctagaggatttggaagtgagttcaggtttgcagattccacctccgccggtggtacagctgctgcatctgacccattttcctctgctggtggagctgacg

SEQ ID NO: 41000 - DNA, 362 bp, Glycine max
  Clone ID: LIB3139-026-P1-N1-H12
ccctagtttagctacttacctcaatctttctcatgggaaagtttgccctagccaatatcctcttggtccttctcttgaacttgagcactttgctcaatgttcttgcttgtccctattgcccttacccttctcccaagcctccaaaaaagcctcccgttgtgaaaccaccggttcacaaaccaccaaaaccatgtccaccacccaagtcatctgcaaaaccaccccatgtacacccttcctatgttccaaaacctcctcactaccctaaaccaccagttcatccacatgcaccccatgtcccaaaacctcatccaaagccttcagtgcatccccatccaccttatgtcccaaaaccaccagtt

SEQ ID NO: 41001 - DNA, 364 bp, Glycine max
  Clone ID: LIB3139-026-P1-N1-H2
cttgcttctattatttacttgtttttctctagtattgatggtgctcgctggtaaacttagtactgaacttggggtgaaagcatccgctaccaaatggttcaacctcttaaccacgcaacttcaccatgttcagaacctttgtgaaagagtgcatgaaaccaagctgcatgatggtgatgactggcacggtgttggtaattcggttaaacactggacttatgtcatagacggcaaggtacacacatgtcaggagagtattgaagccattgatgaagagaacaaaacaatcaaattcatgctcttcggtggagatattagtcagcactacaagagctttaagctgatctttgaagtgactgataag

SEQ ID NO: 41002 - DNA, 348 bp, Glycine max
  Clone ID: LIB3139-026-P1-N1-H4
aaacccgtgtctgtgtttgtttccactttgcaaatcagtgtgtacccaggaatctcttgattgagaaagtgtgttagggtaagagttgtgtcgtgtccacgagacactgggagaaagaaagtgtgtgtgagttgttgtaaactgaattttcatttttctttagccatgagcacacttgttcgcaacaccaccctcaccttcaggcgcagaaacagatacgagcttcttggtttgcagggcaaagacaagatggtcaagtccatcagctacagacgcagaacggcaaagcaaaggcaaatctttctcacaacctacaagttatcttctttgaatagtaacacttttggg

SEQ ID NO: 41003 - DNA, 360 bp, Glycine max
  Clone ID: LIB3139-026-P1-N1-H5
cactcatatccttatcctgtttctttcaatggaagtcatttgtgcttctagcttgaatcccaacgctccgatgttcgtgccactcgcctatcggacggtggaggatttctccgaccagtggtgggacctcgttcactcctccccctggttccgcgactactggctccgcgagtgcttccaagatccccagttccaaaacgacgacgctttcgacttcgactttgacctagatctccgtaactcacttacttaacttctctccatttactactttatgtcttctttttttggttaattaatttattttatttggatggatgcagaagatgaagatgaaagggaacgaaaggaagggaagga

SEQ ID NO: 41004 - DNA, 353 bp, Glycine max
  Clone ID: LIB3139-026-P1-N1-H6
cgccaacgccaacgccaattccattcagatcacagtcccttcaattcctgctgcagcatactgtgtgcaacaaagccctaaaatggaggggactgtcttcactcctgcactgcaagaaattgagcatgtaaagtctgatcaaggagaaattctgagcaagcctttcttggatgcgtgcaagcacatattgcctgtaatagataagtttggagctgctatggcccttgttaaatctgacataggtggtaacatatcgagattggaaactatgtattcttccaatccatccagatttaactacctgtacagtttggtacaggtcgaggttgaaactaaaacagctaaatcatgat

SEQ ID NO: 41005 - DNA, 205 bp, Glycine max
  Clone ID: LIB3139-026-P1-N1-H7
ctcgagcctaattcggttctactgtcaactgggaggggttattttgatgatggtattcacaaacactccaaaaatacaactactactaaaaaggtcaatcttattatcgattactatgactatgcaaaaaattcttatgaactattcattctaaccataccctattaatttaatttctatcacttcttctatctttttgttaacc

SEQ ID NO: 41006 - DNA, 344 bp, Glycine max
  Clone ID: LIB3139-026-P1-N1-H8
gcattgttaatcacccaaatttggttaaactgttgggatactgctccgtggatgcagaaagaggaatccaacggttgttagtgtacgagttcatgcccaacacgagcttggaggatcaccttttcaacaaaaacttaccaaccctgccttggaaaacaagattggagatcatgcttggtgctgctcaaggactagcttatctacatgaaggactggaaattcaggtgatctaccgagattttaaatcttcaaatgttctattagatgcggacttgcacccaaagctctcagattttggtctggctagagaaggaccacaaggtgatcagactcatgtatccact

SEQ ID NO: 41007 - DNA, 115 bp, Glycine max
  Clone ID: LIB3139-026-P1-N1-H9
gccacggtgggctgttgcggatcgagccatggcggcgtgggaagacagggcacataatgttcattttcttggtcgtttgtcttctcacaatagaaagactgaattttctctcatg

SEQ ID NO: 41008 - DNA, 356 bp, Glycine max
  Clone ID: LIB3139-027-P1-N1-A1
gtattctactaaggttaataagtttgcaaaaattatgaaccttagacaaagtgttgttggtgatcttaaacttcttactgatgggaagttgtatgagggtaagcatattcctgtatctaatattagtgcaggggaaaatcatgtagttcaaatacccttaatggcacaggaggaaattctgtcttctagtgcaagtgatttcagaactgcaatggtgagtaaaaatagcaaacctcaagctactgcaatgcatgtgggagctatagaaattatcattgatagtttcgcaagtcctgattgcaacatagttggtgcaatgcttttggttgatacttatcataccaatcctgaaaatg

SEQ ID NO: 41009 - DNA, 335 bp, Glycine max
  Clone ID: LIB3139-027-P1-N1-A10
gaaaaggaagatcaagaaaaacccaaaaagattgataccagattgagacaaagaatagatcctcaatacaatgaggttcaggctcagatggaaacaaatttgtttaaattgtctcttgatgatgttgaaactcctaaaggttctatgttggatcttaaaatttctcaatctaaaattgcacttcccaagaacacagttggaggaaccattctgcgtagtgatctattggcaaattttttgacagagggcaattttagagcaagtgttgatttgcagcgcactcatcgtattaaaggaatgattaaaatggtggccacagttggtattcctgagaa

SEQ ID NO: 41010 - DNA, 344 bp, Glycine max
  Clone ID: LIB3139-027-P1-N1-A12
gattggaggatcaatccttgcatccctcagcaccttccagcagatgtggatatcgaagggtgaatgatgagtctggtccatccattgtccacaggaagtgcttctaagtccaaaagaaatgctttaatggtgagttatgtttttgctatggcttttttggtgtctgtgtcatgtcgtgcgaactatgttgtcatggataagaggtgggataggattggagggtatattcggagagcttgatgtatcatatattgtgtggcatccctctggatgtggcgggcacagaattgttgagaagcatttttcatcttggaattcatctgtcttcgtaagtaggtttgtct

SEQ ID NO: 41011 - DNA, 151 bp, Glycine max
  Clone ID: LIB3139-027-P1-N1-A3
cgcgacttcttgagaactgtaagagtctcaaatatctggttgatgagtgtgcttttgcatttgtgaactagtatgtaatattttattcacttaaataaagcgcattactatgtgcaatgagtgtgtttaaatattacaaaaaaaaaaacaa

SEQ ID NO: 41012 - DNA, 353 bp, Glycine max
  Clone ID: LIB3139-027-P1-N1-A4
ctaaccactttgcttcagctatggagtttcgctgcgttccattggttttcgctctcaatctgatcctgatgacagctcatgctgccatacctccagaagtttactgggaaaggatgcttacaaataccccaatgcccaaagcaatcatagactttctaaaccttgatcaacttcctctttggtatggtgctaaggaaacccaatctacagatcaaatattcctgtatgatgctaagaaaacccaatcaacagatcaagttcctcctatcttttatggtgataagaaaacccaatcaacagatgaagttcctcctatcttttatggtgctaagaaaactcaatcaatagatgga

SEQ ID NO: 41013 - DNA, 344 bp, Glycine max
  Clone ID: LIB3139-027-P1-N1-A7
attctctaatatattttttctgacatactttctattgatagaaattcgcgtgagtcttgctaaaaatgtgagtctcatccacaaacaagtgaaactcacatgaatttcagtcaatgaaagaaagcagataaaaaaatgtattgaaaaatgtgttgttagcattcttctttaacttatccccctttgacttaggcattctataaattcgtctgaacttccatgtttttcagtagaagggtcagtgtgttcgattatcagcattgtaggtttcaactttcaatgaacgtggcataatcttactttacatctgaatgatgaaacatgaaatcggcccctcttggacc

SEQ ID NO: 41014 - DNA, 341 bp, Glycine max
  Clone ID: LIB3139-027-P1-N1-A8
ccactgtggaatggtacttggtgttcacctgtgtaggtgtggtgctatcacagttgccaaacttgaattccattgctggggtgtcactcattggagctgtcactgctgtagggtattgtactgccatttgggtaacctctgtggcacggggtgccctaccggatgtgagctataaccctgtgaggactggaaacagtgttgaagatgcctttagtgtgctcaatgcattgggtatcattgcctttgctttcaggggccacaatctcatccttgaaattcagtctactatgccttcaagcgagaagcatccatcacacgtgccaatgtggaaaggggtcaag

SEQ ID NO: 41015 - DNA, 342 bp, Glycine max
  Clone ID: LIB3139-027-P1-N1-A9
gccttgtgtttcaacagcaatactatgctgatgatggcacatggatggagactcatcaggctcagcaacatggctatgccttccacgaagagtcgtcttggagctctgataacaactacggccacaagcgattcccagcagccatgcacatgaacaagcttggtgcttttgctgtggactctgatctctcaatgtcaaaacagaagcataccaagttaggaggagccatgcgcatgaacaggcttgctgcttttgctatggactctgacatctcaatgtcaaagcaaaggcatggcaagttaggaagaggcatgcacatgaacatgaacatgcttggtgatt

SEQ ID NO: 41016 - DNA, 359 bp, Glycine max
  Clone ID: LIB3139-027-P1-N1-B1
ctcaatttgcttaattatagaggtgtgaattgttgtttgaaagtcacaagcaatggtgaaggacactgcgtattatgacatattaggtgtcaattatgatgcatctgctgcagagatcaagaaagcttattatgtcaaggctagaattgttcaccccgataaaaatcctgaggatcctaaggccgcagaaaactttcagagattccatgatggaccctacaactgtatttggaatgatttttggaagtgaattttttgaagaatatattggacaacttgcactggcttctttagcatctatagaaattgaggaagactcacaggatcctgaagttttgaggcagagaattcaagaaaag

SEQ ID NO: 41017 - DNA, 346 bp, Glycine max
  Clone ID: LIB3139-027-P1-N1-B10
atatgatactgggctaggggagcttgtataaatatatatgatgtgaaccatatctgtctgtacaaactcaaatacttttcatatatggtctggaaactattcatatcatgcaccctatgaagtatgctatcaggtactcttactgatgagactaagctctgctgactaccacaatgcccacattataggaatcctcatcacctgcttctttcctcataaattctagatcaaactccactgcctgatcctaccttttacttcttatgccgcatgtatgaactcaaatcatcacatgaatatgaccctttaatctatgaagaggaaaaaaacacacacatacacacac

SEQ ID NO: 41018 - DNA, 339 bp, Glycine max
  Clone ID: LIB3139-027-P1-N1-B12
ctcgagccgattcggctcgagtgttgtaactcgttcttcttcttttgttgttctgtgtttgtgtttgttttttctctcacctgaaaatgtcttgctgcggtggtaactgtggttgcggaagctcctgcaagtgcggcaacggctgcggaggctgcaagatgtacccagacttgagctacactgagtcaaccaccaccgagaccttggtcatgggagtggcacctgttaaggctcaatttgagggtgctgaaatgggtgtgcccgctgagaacgatggctgcaaatgtggaccaaactgctcctgcaacccctgcacttgcaagtgaggtgttgggagag

SEQ ID NO: 41019 - DNA, 347 bp, Glycine max
  unsure at all n locations
  Clone ID: LIB3139-027-P1-N1-B4
gaaattttgataaaccgcgatcacaggttgccgcaccttaaaaccggaaacaaaagcaatcgttacttgatttcaagaatctctcaatttcttcctacttctttgtgcacgatttcttaagggaaagaaaatcactctctgtgctggtcacagacttcgtgaatcattttcttttccattcttagtttatttgctgaacactctcctatttgatataggacttcgtgtcagatttaaacttcttctgtttctttctcagntttctggttaatttcaagttcaagctggtgaaatcttggattagtgctcccactctcctatctggtataggacttcgtgggtagact

SEQ ID NO: 41020 - DNA, 360 bp, Glycine max
  Clone ID: LIB3139-027-P1-N1-B5
aaggaatatgagaaggccatggaagcattctaagaacaaacatgatctctgtgaatgtcttccggacgatctcgttgttcttattctttccaagctcagcgccaccgcttcatctccttccgatttcatcaacatcatcttaacatgcaagaggctaaaccgctcaggcctgcaccgtcttgtgttgtctaaagctgggcccaaagtattcgccataaagccgaaaaattggtcagaatatgctcactcttttctcaaacactgcgtcaatgccggtaacgtggatgcctgttacactctcggaatgatccgattttactgtttgaaaaaccgagggagcgggctctcgttaatggcgaa

SEQ ID NO: 41021 - DNA, 353 bp, Glycine max
  Clone ID: LIB3139-027-P1-N1-B6
cgacaaacaaatattattattcaatagaaaagaaagatgagtccaacatgggtttttgtgttaggtgttgcagcaatgttggtggttgtgagtggacaatcatcagtgaagcctttggtgaagacagtgaaggggaagaaggtgtgtgacaaagggtgggagtgcaaaggttggtctgcatattgctgcaatgagactatctccgactacttccagacataccagtttgagaacctattcgcgaagcgcaattctccggtggcacatgctgttggtttctgggactaccgttctttcatcaccgatgctgcactgttccagtctgacggatttggcaccactgggggaaagac

SEQ ID NO: 41022 - DNA, 168 bp, Glycine max
  Clone ID: LIB3139-027-P1-N1-B7
gccacgtttataatatagacgagaagggagcacgtgtatatatgccggcgggagaggaggtcgtcgtacctattagggttaaggagatgtatactggcatacctgagaatcgactctctgtcacaattatagagtgtattatagcgaatggaaggacaataccccctg

SEQ ID NO: 41023 - DNA, 344 bp, Glycine max
  Clone ID: LIB3139-027-P1-N1-B8
ctcagttctctcgttagtattcttccaatctccgtcgatcaccactaacaccaccatgtcgtggctcctccgatccaccaagtcaaaactcctctcttcctcatcttcactttctagaaccttcccctctctctcacgctccggccccacacttgacctccctcagatcggagccatctctcccctccccgatctcttccaccgcaacaccgctaccatgcctttcgcgaaggaaaacgcttccggtggaaacttggccggtcttcccaaagttcctgcgaatacgcttggcagtgactctaatgcgatcaattctccgaggtacaaagcttctggactggaca

SEQ ID NO: 41024 - DNA, 338 bp, Glycine max
  Clone ID: LIB3139-027-P1-N1-B9
ctcgagcctgcaaagcgagctcatgaatttgaaaaacatgttgctcatgaaagcctcaaggatcaaattcctgctgttgacaagttgtattctactaaggttaataagtttgcaaaaattatgaaccttagacaaagtgttgttggtgatcttaaacttcttactgatgggaagttgtatgagggtaagcatattcctgtatctaatattagtgcaggggaaaatcatgtagttcaaatacccttaatggcacaggaggaaattctgtcttctagtgcaagtgatttcagaactgcaatggtgagcaaaaatagcaaaccgtacgctactgcaatgca

SEQ ID NO: 41025 - DNA, 240 bp, Glycine max
  Clone ID: LIB3139-027-P1-N1-C1
agctatagctgctagcttattggatggacatgtatgaagaattagtaacatgtactcttgttgagtaagctctcaggtgcatgtgctttcagtaattacatggtttggctttcttaagttaattaatatatgtatcaatgcttctctatatgtaataatgatatgacatgtgtgttgtacctgattttagaggcaaaagcgatgtgtaaggattgaataaatatatgtggagtgctattt

SEQ ID NO: 41026 - DNA, 327 bp, Glycine max
  Clone ID: LIB3139-027-P1-N1-C10
aaaaaaaaaaacgggaaaaatgtaaaaagtgaacaacaaacatccataaagtcaccagacagaggagctcgttgccgccggcagccgtacaccgtcaccgaagatgacggcggcggcgctgcggaagtggttcgaggagaagaacccctccgcagtgtcggtggaggtcggagagcatgtccagctcgcttatacccaccagaacgagtcgccgcttcagcccatatcctttgctgtgaaggatgaggtattctgcttgtttgagggagcccttgacaatttgggcaacttgagacaacaatatggattggccaagtcaaccaatga

SEQ ID NO: 41027 - DNA, 346 bp, Glycine max
  Clone ID: LIB3139-027-P1-N1-C11
caacaacaccatcctcaaaatctccaaactcgcgatcctcctcgttttgttcgcttcagtctgcaacgtcgctatgtcggactccaccgccaaacccctcgaccagcacgccaccacgggctctgaccctactgcgccagcggttcacatcgtgtacaccgagagaccacagaacgaggagcctgaggcctaccacatcagaaccctcacttcagtccttggcagtgaggaggctgcaaaggaagctttgttgtatagttacaagtctgcagccagtgggttctcagctaagcttactccggagcaggttgaacagatttcaaagctaccaggtgttctttaagtt

SEQ ID NO: 41028 - DNA, 310 bp, Glycine max
  Clone ID: LIB3139-027-P1-N1-C12
tccaagaacacaaatgggggaaccattctgcggagtgatctatttgcaaattttttgacagaaggcaattttagagcaagtgttgatttgcagcgcactcatcgtattaaaggaatgatttaaatggtggccacaggtggtattcctgagaatacaagtatagcattggcctgtgctatgaatagtttttttagggggcgcgccagttctgatatttacaccatctgctctcaagactgtgaattatggaatactgcttgcacaaaagccatgactatgtcatttaatccaaacccgcgttctgatgcat

SEQ ID NO: 41029 - DNA, 355 bp, Glycine max
  Clone ID: LIB3139-027-P1-N1-C2
gctaagaatctctttgaaaacataatttctcatcgaagcttccataacaaaaaatttctcctagtattgactaaatttgatctgcttgaggagaagattgaacacattcctctagcacaatgtgaatggtttagcgacttccaaccatttatcagtcccaatcagaagaaaggctgtagcaatggcaataataactcttcattagcacaatgtgcttttcaatacattgctgtcaagtttaagagattgttcctttccatcactggccgaattctctttgtttcactggttaatggattggaacctgatactattgatgaagctctcagatatggaagggaggttattgagtggg

SEQ ID NO: 41030 - DNA, 356 bp, Glycine max
  Clone ID: LIB3139-027-P1-N1-C3
ctcagggcacttcccgaagtgttaagagaatgcctctttctatagggggaggagctggtgcaaagaatgctattctcatgaatatgccaaatgctgttctttcaatgtggagatattttgttggagatctcgtctttgaagcttctaagatgacttctccctacattaaatggacagtctctttcttcatagcacttggaaatttggctgatgacaccatcaattttgaggcttttccccacaagctggtgcagtttggagagattcaggaaaaagttgtgttgcaattttcacaagaggaacctcttacagcttggtcaactcatgtgcgtcccgcaacgactctgttggctgat

SEQ ID NO: 41031 - DNA, 354 bp, Glycine max
  Clone ID: LIB3139-027-P1-N1-C4
gttgacaaccataaacaatatgtgtgcatatgggctcaatcctggtatttgaggttctcgtcttttgggcaccattcctcagtccatttcacagcaaactgtttggaatcaaatggcaacagtgagaacaccattgaattttgattctagcaagcagagcttttgtcaattttctattgaccttctcggtggaggaattttagtggacaaaactggagattggatcacacttatacaaaattctccaattagtaacttgttgagagttgcttcttggaagaaaggctgtttaatggtcaagattgtgatgtctgggaatgcagcagtcaaaaggagtgattgggcctcattggt

SEQ ID NO: 41032 - DNA, 357 bp, Glycine max
  Clone ID: LIB3139-027-P1-N1-C5
cggctcgagcaacaggttcgcacattgatgctataccttactcgggaaaatatgatggagttgttggtgttttaggtgctattgaagccatcagagtcctgaaaaggtctggttttaaacctagaagaccattggaagtcatatcattcacatcagaagaaccaacacgctttggaataggttgcttgggaagccgcctattggctggaagtgaggatcttgcaaattctctaaagacatcaactgatattcaaaacatatctttcctagatgctgcgggatctgctgggtattcaaaaaatgaagatgacttatccagtgtatttttaaagaaaggaacatattctgcttttgtag

SEQ ID NO: 41033 - DNA, 357 bp, Glycine max
  Clone ID: LIB3139-027-P1-N1-C6
gtgctgtgtgttgtgcaagtactaccttctctagctagattgctagagctagaatttcaacctacctatgtgtactgataagatctgcttccctacttaaagagagcatcatcctgtgatcagtgtgcttcgtattctctctctctatatatatatggtaaaaagtggttatctcgtgcctcgccttgagctatccatcacttttttttttttatcaaatagcaaaaaatttaaacacaaaaactgaaatacaaaacatatataaagcaaaaagctgaaagaactgctagataattgaaaaaaagaagatgacttatccaagtgcaatttaaaaaaaaaagaaaaaggggcggcccc

SEQ ID NO: 41034 - DNA, 343 bp, Glycine max
  Clone ID: LIB3139-027-P1-N1-C7
ctttctgcaaaccaccagcgcttccttgctactggtatccgggtggctttgggttctaattgcaccaaaggcaatgaaaaaggtcacgtggaaccatctaaaccaaaagcacaagaagttcctgcgaaaattccttctcagcaagtgcctagcttcacatcctcttgggcagttgatgacttgctggaattaacagactttgaatcaccagacaaagtaaggcagttttgtttcataattctagctgcatatattagctaaaaaattagagtgattttgataaaggaacctagtatggttatgatggaccatttctgtttgttgccacccaaaatatacattt

SEQ ID NO: 41035 - DNA, 278 bp, Glycine max
  Clone ID: LIB3139-027-P1-N1-C8
attcaatagaaaagaaagaaagatgagtccaacatgggtttttgtgttaggtattattgcagcaatgttggtggttgtgaatggacaatcatcagtgaagccattggtgaagacagtgaaggggaagaaggtgtgtgacaaaaggtgggagtgcaagggttgtgttgcttattgatgactgggactaatttacgatactttcatacataccaatttgagaacctcttcgcgaatcgcaattcgccggtggcacatgcagacagattctgggactaccg

SEQ ID NO: 41036 - DNA, 345 bp, Glycine max
  Clone ID: LIB3139-027-P1-N1-C9
tgaatgcgtagaaaaggaaaataaagaaattagcgtgaaaaatgttgggtgtgttcagcagctccatagtgtcgccgccggaggagctcgttgccgccggcagccgtacaccgtcgccgaagatgacggcggcggcgctgcggaagtggttcgaggagaagaacccctccgcagtgtcggtggaggtcggagagcatgtccagctcgcttatacccaccagaacgagtcgccgtttcagcccagatcctttgctgtgaaggatgaggtattctgcttgtttgagggagcccttgacaatttgggcaacttgagacaacaatatggattggccaagtcaaccaatg

SEQ ID NO: 41037 - DNA, 359 bp, Glycine max
  Clone ID: LIB3139-027-P1-N1-D1
caggatcttgcagttacagatattgcatgtgctgctctaaatggaataaagatgggagataagactcttacagttagacgagctaatcaaggtgcaaacccacagcagcctaaacccgagcaagagagcattttaatgcacgcacaacagcagattgcactgcagaaacttatgttgcagccagccttagtggcaacaaaggtggtgtgtttaactcatgcagtttcttctgatgagctcaaagatgatgaagactatgaagagattcttgatgatatgagacaggagtgctccaaatttggtactttggtgaatgtggtgatcccacgaccaccgtctgatggtgaacctgccgctgg

SEQ ID NO: 41038 - DNA, 346 bp, Glycine max
  Clone ID: LIB3139-027-P1-N1-D10
aagcattccaatcgctcccaaaatcttttctaattggttcataactcaataattctcatcatgggctccttgattgttccaggtgaacatgatcacaaactaaagcttgtttctcttccctttgtatcaaccagtcacctcattcccgtagtagacatagctaggctctttgccattcatggtgttgatgtcaccataatcaccaccacagccactgccgccattttccaaagctctatcgatcgcgaccgtgaccgcggccacgctattagaacccacgttgtcaagttcccatgtgaacaagttgggttgccagaaggagtagagagcttcaactccaacactt

SEQ ID NO: 41039 - DNA, 338 bp, Glycine max
  unsure at all n locations
  Clone ID: LIB3139-027-P1-N1-D11
cttcttnccaaccactactactcactcactgcagagctcaattgcatcgctgtccatggctaccatcgttagcatcaaggcccgccagatcttcgacagtcgtggcaatccaactgtcgaggtggatttgacttgctccgatggtacttttgccagagctgctgttccaagtggtgcatccactgggatttatgaggcccttgaattgagagatggaggatctgactaccttggaaagggtgtatcaaaggcttgtgacaatgtgaacaccgtcattggccctgctttgattggcaaggacccaactgagcagactgctattgacaacttaatgggtc

SEQ ID NO: 41040 - DNA, 346 bp, Glycine max
  Clone ID: LIB3139-027-P1-N1-D12
cgagagcgaggaggatcccatcttccagaggctaagagccttgaacggagagaggagtcgcttggcgcagagctttgagtataactatggtgattttattcccatcttgagacccttcttgaagggttacttgaagatttgcaaggaggtgaaggagacgaggttgaagcttttcaaggattacttcgttgacgagaggaagaagcttggaagcaccaagagcaccaacaacaataatgaacttaaatgcgctattgaccacattttggatgcccagagaaaaggcgagatcaacgaagacaacgtcctctacattgttgaaaacatcaacgttgctgcaattgaa

SEQ ID NO: 41041 - DNA, 358 bp, Glycine max
  Clone ID: LIB3139-027-P1-N1-D2
tcctcagtccatttcacagcaaactgtttggaatcaaatggcaacagtgagaacaccattgaattttgattttagcaagcagagcttttgtcaattttctattgaccttctcggtggaggaattttagtggacaaaactggagattggatcacacttatacaaaattctccaattagtaacttgttgagagttgctgcttggaagaaaggctgtttaatggtcaagattgtgatgtctgggaatgcagcagtcaaaaggagtgattgggcctcattggtacaagtgtttttaacaaacagcaacagtacagagcattttgatgcatgtaagtggacaaaatcagaaccacattcctgg

SEQ ID NO: 41042 - DNA, 355 bp, Glycine max
  Clone ID: LIB3139-027-P1-N1-D3
gcttggtcaactcaggtgcgtcctgcaacaactctgttagctgatgggtgtccatatttgtatgctatggtgcatgatagttcagtgtctacaataccaggtgattttgttattggtgttaagttgacaaccataaacaatatgtgtgcatatgggctcaatcctggtatttcaggttctcgtcttttgggcaccattcctcagtccatttcacagcaaactgtttggaatcaaatggcaacagtgagaacaccattgaattttgattctagcaagcagagcttttgtcaattttctattgaccttctcggtggaggaattttagtggacaaaactggagattggatcacactta

SEQ ID NO: 41043 - DNA, 363 bp, Glycine max
  Clone ID: LIB3139-027-P1-N1-D4
aaattgttcattgaaaaaaaaaaaaataaaggatcttaatgctaaaagaaaagcagttataaaaaaaattgaaaaaattaaaaaggggcttgtaatttcagagacaaatattcattcaaacaaaacaacttactgaatttatcgattgaattgaaatggttgtttcagtaaattgttcattgaaaaaaaaaaaaataaaggatcttaatgctaaaagaaaagcagttataaaaaaaattgaaaaaattaaaaaggggcttgtaatttcagagacaaatattcattcaaacaaaacaacttatgatagtaaaagggtagaattcgaaaaaaaaaaattgccgatattacaaagaagaagaaatg

SEQ ID NO: 41044 - DNA, 359 bp, Glycine max
  Clone ID: LIB3139-027-P1-N1-D5
actctttctctttctgtctctctctctcagaatttgctcctctctccggggcgcttttattaattggagttttctcgctcctttttctttccctgaaaacatttcatcttcgtattgatgtcggaaaagggtcggccacttcccaaatttggtgaatgggatgtcaatgatccagcctcagctgaggggttcacagtgatttttaataaggccagggatgagaaacagacaggtggctacccaaagtcaccaggaaagactgctactgatcctcatagcaaacctgcagtagagcctggcaaaactcagactaaaaaatggttttgctgcatgcaaaacccttctgccgaatcatagca

SEQ ID NO: 41045 - DNA, 382 bp, Glycine max
  Clone ID: LIB3139-027-P1-N1-D6
gaagcatgcgcacttacgtcgagcaaatggcaacagtgagaacaccatagacactcgtatctctatcactgaaagctttagttgcatttctattgaccttctcggtggaggaattttagtggacaaaactggagattggatcacacttatacaaaattctccaattagtaacttgttgagagttgctgcttggaagaaaggttgtttaatggtcaagattgtgatgtctgggaatgcagcagtcaaaaggagtgattgggcctcattggtacaagtgtttttaacaaacagcaacagtacagagcattttgatgcatgtaagtggacaaaatcagaaccacattcctgggaattaatcttcccaatagaggtatgtggtcct

SEQ ID NO: 41046 - DNA, 238 bp, Glycine max
  unsure at all n locations
  Clone ID: LIB3139-027-P1-N1-D7
cggctctagctcgagccgggggnngntngaaccggggggagattcaaaaaaaactaacatcaaactccaagaatccaaacaaactacataaaattttgacaagatgaaatataatactacaaagaatcattctcaaataaaaccaaaactaaaaattacctacaagacactatctatatcagagttctgatttttaaaaaaaaagccagatttaaaaaagccaaaaaaaaatgggaat

SEQ ID NO: 41047 - DNA, 340 bp, Glycine max
  Clone ID: LIB3139-027-P1-N1-D8
acagaagttgtagaagctaaggctggaaagggttctgcaactttgtcaatggcctatgctggtgccctttttgctgatgcttgcctcaagggcctcaatggagtcccagatgttgtcgagtgctctttcgtgcaatccactgttactgaacttcccttctttgcttccaaggtgaggcttgggacggttggtgtggaggaagttctgggcttggggcacctctcagattttgagcaacaaggcctcgaaagccttaagcctgaactcaaatcatcaattgagaagggaatcaaatttgccaaccagtaattgaacatgttatcacatacatgtctggtag

SEQ ID NO: 41048 - DNA, 341 bp, Glycine max
  Clone ID: LIB3139-027-P1-N1-D9
cctcaatacaatgaggttcaggctcagatggaaacaaatttgtttaaattgtctcttgatgatgttgaaactcctaaaggttctatgttggatcttaaaatttctcaatctaaaattgcacttcccaagaacacagttggaggaaccattctgcgtagtgatctattggcaaattttttgacagagggcaattttagagcaagtgttgatttgcagcgcactcatcgtattaaaggaatgattaaaatggtggccacagttggtattcctgagaatacaggtatagcattggcctgtgctatgaatagttcttttagggggcgcgccagttctgatattta

SEQ ID NO: 41049 - DNA, 256 bp, Glycine max
  Clone ID: LIB3139-027-P1-N1-E1
gtaaccgcacacttccactcaacctattatatatgttcttgaagatttaaaataatgggggcattttatataaggaggttttcaagaatgatgcatatatcatttcaagtattttattattatcacacattatctatttattttttttcattaccaaattactctttacctcatatattttacaattttttttatcaaattattaaaataaatttttttcttttctaatcattattatttattcatattatttata

SEQ ID NO: 41050 - DNA, 341 bp, Glycine max
  Clone ID: LIB3139-027-P1-N1-E10
ctgagatggaggccagagtcgcagattttggtgtcgccaagttgattcagaccgacgagtccatgtctgtcattgccggttcctatggctacattgctccagaatatgcttacacccttcaagtcgatgaaaagagtgacatttacagctacggagtggtgttgatggagatcctaagtggaaaacgttcggttgatgcagaatttggcgatgggaacagcgttgttgattgggttaggtctaagataaagtctaaagatggcattgatgacatattggacaagaatgcacgggcagggtgcacctcagtgagagaagagatgatacaaatgcttagaatt

SEQ ID NO: 41051 - DNA, 346 bp, Glycine max
  Clone ID: LIB3139-027-P1-N1-E11
aaatggcaacagtgagaacaccattgaattttgattccaaacagtttgctgtgaaatggactgaggaatggtgcccaaaagacgagaacctgaaataccaggattaagcccatatgcacacatattgtttggaatcaaatggcaacagtgagaacaccattgaattttgattctagcaagcagagcttttgtcaattttctatcgaccttctcggtggaggaattttagtggacaaaactggagattggatcacacttatacaaaattctccaattagtaacttgttgagagttgctgcttggaagaaaggctgtttaatggtcaagattgtgatgtctgggaatg

SEQ ID NO: 41052 - DNA, 319 bp, Glycine max
  Clone ID: LIB3139-027-P1-N1-E12
aaatagctgcagggagaagggcgttttattttgatggcgagcagtttgctgtgaaattgactgatgaatggtgcccaatagtactagaacctgaaataccatgattaagcccatatgcacacatattgtttggaattaaatggcaacagagagaacaccattgaattttgattctagcaagcagagcttttgtcaattttctattgacctttttggtggatgaattttagtttacaaaactggagattggatctcacttatacataattcttcaattagtaacttgtatagagttgttgcttggatgaaaggctgttta

SEQ ID NO: 41053 - DNA, 358 bp, Glycine max
  Clone ID: LIB3139-027-P1-N1-E2
accaaatccacttctccaactaatgggcgtgttcagcgaagatccgaatcccaacccgaacccgatcgtgatccgagaggtttgggcctccaatctcgaatccgaattcgaactcatccgcgaactcatcgatcgctacccttttatctcaatggacacagaatttcccggtgttattttccgaccacatgtggaccccaccaaacccttcaaccaccgcaaccgtccctccgaccactaccgcctcctcaagtccaacgttgacgctctcaacctcatccaggtcggcctcaccctcaccgacgccgccggcaaccttcccgacctcgccggaaaccgctccatctgggaattcaac

SEQ ID NO: 41054 - DNA, 353 bp, Glycine max
  Clone ID: LIB3139-027-P1-N1-E3
caacaacgaactccgcggccacgtccccgattccatgctcaccaaattcggcgaatgtaagcttctccggaaaccacgccctctgtgggtccaccccgctacccaaatgctccgaaacagagccagacacagagactaccacgataaccgttcctgcaaaaccgagctcgttcccgcaaacaagtagcgtaaccgttcctgacactccgagaaagaaagggttgagcgccggtgtcatcgtggcgatcgtggtggcggtttgcgtggcggtgctggtggcgacgtcagtcgctgtggcccattgttgcactcgatgatccacctgtagttccttgattccgagtgagaccccc

SEQ ID NO: 41055 - DNA, 402 bp, Glycine max
  Clone ID: LIB3139-027-P1-N1-E4
gaccctatatagagagctatgacgaagcatgcgcacttgcgtaagagtcggaatgctcatccgagaccggaagcaggaatggggatcgaactgactgagcgcagtgtgaacggagagaggaccaaaataacacaacccaagtgcaatgatatctatcttaagctcttggtcaagctttatcgcttccttgttcggagaactggcagcaaattcaatgccgttatactcaagagattgttcatgagcaaggttaacaagcccccattgtctttgtcaaggttgattaagtataccaaggggaaggaagataagattgctgtggtggtgggcaatataaccgatgatattcgtgtttatgaagttccagccttaaaggtcacagcacttaggtttacagagact

SEQ ID NO: 41056 - DNA, 361 bp, Glycine max
  Clone ID: LIB3139-027-P1-N1-E6
ccatgtcacaaaaaacgaaaggagatattccttttacccactcctcgtcagggaagatctgaagcagcgctagcagcacacgtcctctaatggacgccgactcctctggagaagaagtggttattaaaacaagaaaaccatatactatcacaaagcaaagagaacgatggacagaggaggaacataacagatttctagaagccttgaagctatacgggcgagcatggcagcgcatagaagagcatataggaacaaagactgctgtacaaatcaggagtcatgctcagaaattctttacaaagttggagaaagaggcctttgtaaaaggcgttccaataggacaagctcttgatatagacat

SEQ ID NO: 41057 - DNA, 343 bp, Glycine max
  Clone ID: LIB3139-027-P1-N1-E7
caacatatgaacaacaacgccgccatgtagaacacaaccgcttcctttttcttcttcagaaactcttctctttctcattttcctcttctttgaattcaaagggctctagatggatacagctgaccaaagaaaaggcaagtatgctcctaccagggatacagagaacccactgttgggaaaatttgacaagccgcttccatgttttggctgtggaattggatggttctctcttctgctaggatttgtttgcccgccgatgtggtattatgctacaattctctatttcggaaattactatcataaggatccgagagagcgggctgggcttgctgcttctgcaatt

SEQ ID NO: 41058 - DNA, 357 bp, Glycine max
  Clone ID: LIB3139-027-P1-N1-F1
gaaagagaatatctgagactctgattctgagagtcgagacgagtgagtgagtgctgcttcttcttctgaatcaaatcattcatcactctctggttctgatttttctgacaccaaaatggtgaatcctcgaattccacgttcaaggatcccaactttcacacttttcacttctgctatctccatcgttctgtgcattttcttcgttctctcttttctcttcactgcccattcttattcctcccatcaacaccacaacgcgggttctgacggtggtgttgcacatggatttgagtcgattaggagatccgtcctagctctgaaaacagatcctctcaagcctcggttggaccagattcg

SEQ ID NO: 41059 - DNA, 347 bp, Glycine max
  Clone ID: LIB3139-027-P1-N1-F10
ggtggctcctgaagacaaggcgagtttatggtcacaacttcattatgtttcgtgtaataatctggaaatgcaagaagcttatcttgtcaatctcgtaaatgtgttacgagaactgtatttgcacagtccagaggaagctcgccaattgagaaggaaagctctctctcgtattgaatggctgcaaaaagctgatgtgcctaccatagcacagattgaagagttccattcgatgcagaggatgatgaatgctcctgattcaaatgataatattgatctactgttgagcattgatttgttgggtttacaaggagcaggcaaagcttttccaaacaagattgtttttgatg

SEQ ID NO: 41060 - DNA, 349 bp, Glycine max
  Clone ID: LIB3139-027-P1-N1-F11
caagatttgttcattgttgggtcaattgaagtctaagaaagaaaacagagagcgaagaaggagaagagatcagaaaaatggcgtccaaagctccaaagaaggccaatctcctcgatcaccactccatcaagcacatcctcgacgagtcagtctccgaggtggtaacgagtcgtgggtttgtggaagacgtgagattgagcaatgtgaggcttctcattggggcaatcatcatcgtcattgctctcttcgcccaattctacaagaagaagttccctgaaaatagggattttctcatcgcctgcatcgccttgtatgtgatcttcaatgggttggtgcagctgatcatata

SEQ ID NO: 41061 - DNA, 348 bp, Glycine max
  unsure at all n locations
  Clone ID: LIB3139-027-P1-N1-F12
gcgatatcgattccattcaataatnaataacacaacgacgacattcgattcctcgtccaaaccctattcccctatttcgattcctattccaacgagatcccaagtaacacagcagatccctaaaattaaaattccgtttcggagagatccaagtctcttcatggcgcctcgtggagccacgctgttgttccttctatgcgctctctgctattctctcatcgccattgctggaaagagctattacgatatacttcaactttctaagggtgcgtcggacgaacagataaagagagcgtataggaagctagcattgaagtaccatcctgataagaacccgggcaatgaaga

SEQ ID NO: 41062 - DNA, 354 bp, Glycine max
  Clone ID: LIB3139-027-P1-N1-F2
tggagaaagattcagagtgcatcagctagtttttctaaaacaattattgttcacaaacagttgcatctttcttacagatgaatttgttttatgaaatgtctagctaaaaacaaaaaaagagggagaagatatttctgtagaagggtacccttgatgttcaaacatcaaaggattgtaaagttagcgttttttaagttgtattagtacttttcaacttaccatactttcatgtgtgtgattctataatgatgcttatgtccttagttcccattgaatatatcccttgtcaccttctaaattctaatcactaattccatctaccacaaaattaatttgcaaacccataatgattta

SEQ ID NO: 41063 - DNA, 346 bp, Glycine max
  Clone ID: LIB3139-027-P1-N1-F3
gcagcgccacgtcagcagcggaactactaatcccgtgctccgcttccccacggtgcgccccctccccttcgcgcgcctcgtcgccgcctcccgccgccgcctcttcctctccgactgcgccgaccgccgatccgacgacgacggagatggtgacggcgactccggcgagtgcgcgtactcgcgggcggtgctcgtgctcgacatggtctggaacctcgccttcgtcgtcgtcgccgccggcgtcctcctctccacgctccgcgagcggccgtcgacgccgctgaggctctggctctgcggctacgccttcgagtgcgtccttcacatggccttcgtctactttgag

SEQ ID NO: 41064 - DNA, 361 bp, Glycine max
  Clone ID: LIB3139-027-P1-N1-F4
cagctttgcacacactctcctttgtgaacaacccgggttcttcacccttctgcacttccaccccaaccttatttgtagccatagtccttgcattaaggatatgatcagcatctacctgcggcagcaacactatctgacacttatttactagtgcctcggttaatgaaccagcaccacaatgcgtaatgaagcagcctactgaagggtgttccaaaatcaattgttgttgtatccatccactgtggacaattcctctcccttcaactctttctttgaacccttctggtagagcagcttcaattgtctcaaacccaattggaacttttagaacagccaaaaaaggaagccctgtaagttcaag

SEQ ID NO: 41065 - DNA, 355 bp, Glycine max
  Clone ID: LIB3139-027-P1-N1-F5
taagttgacaaccataaacagtatgcgagcatatgggctcaatcctggtatatcaggttctcggcttttgggcaccattcctcagtccatttcacagcaaactgtttggaatcaaatggcaacagtgagaacaccattgaattttgattctagcaagcagagcttttgtcaattttctattgaccttctcggaggaggaattttagtggacaaaactggagattggatcacacttatacaaacttctgcaattagtaacttgttgagagttgctgcttggaagaaaggttgtttaatgggcaagattgtgatgactgggaatgcagcagtcaaaaggagcgatagggcctcattg

SEQ ID NO: 41066 - DNA, 362 bp, Glycine max
  Clone ID: LIB3139-027-P1-N1-F6
gttggtattcacataggtcagctccaatcagtcatgagtcatcccgagacagaaagcaaggttgcggagttaaaaaaacagttcagagatcagactgtgctgcttggggtcgatgacatggatatattcaaaggaatcagcttaaaacttttggccatggaacaattgcttttacaacatcctgataagaggggcagagttgttctggtccaaattgctaaccctgcaagaggtcgcggaaaagatgtgcaggaggtacaaagtgaaacttatgccacggtgaagaggataaataatacatttggaaggcctggatacacacctgtagtcttgattgatacaccacttcagagttatgagcg

SEQ ID NO: 41067 - DNA, 345 bp, Glycine max
  Clone ID: LIB3139-027-P1-N1-F7
ctcacgcgagtgatttcgcatccgcaggcactcgcgcagtgcgagcacactctcaccaaactcggcctgaacgtggcgcgcgaggccgtggacgacaccgccggcgccgccgagttcgtcgccacgaataacctccgcgataccgccgccatcgcgagcgcacgagcggcggagctctacggcctgaacgtgatggcggacggaatccaagacgatccgagcaacgtcacgcggttcgtgatgctggcgagagagcctatcattccgcgcacggaccgtcctttcaagacgagcattgttttcgcacacgacaagggaacttcggtgctcttcaaagtgctttcc

SEQ ID NO: 41068 - DNA, 342 bp, Glycine max
  Clone ID: LIB3139-027-P1-N1-F8
ggccgattcaacctcaagcgattcactctctttagacatcgattccttatctccttcacctcaggaacatatcatcagaacacgtcatggttccgtatctgttgctgtatatggagaccaggataagccagctcttatcacatacccagatttggctttaaattatgtctcctgctttcaggggttattattttgtcccgaggcatattaccttctgctccataatttctgcatttatcatattagtccacctggacatgagagttattgcagttgggagctgctgaaatcgatccagattaccctattctttctgtagatgacttagctgatcaaatagct

SEQ ID NO: 41069 - DNA, 349 bp, Glycine max
  Clone ID: LIB3139-027-P1-N1-F9
aaaaaaaaaaaaaaaaaaaaggaaaaaaaaaaaaaggaaaaaaaaaaaaaaaaaaaaaaaaaaaaaaaaaaaaaaaaaaaaaaaaaaaaaaaaaaaaaaaaaaaaaaaaaaaaaaaaaaaaaaaaaaggggggggccccctattaagaggctcttcaccccggaattaaatttgggaccggttcttgggggggaacaaattttccttatggggggggaatttaaggttgggggaaaaaagggtaataatttttccctgggggaaaatgatatccgttaaaaattccaaaaaaaataaaacccggaagattaaagtgtaaaccctggggggccaaaagggggggctacct

SEQ ID NO: 41070 - DNA, 361 bp, Glycine max
  Clone ID: LIB3139-027-P1-N1-G1
ggtgggtgtatgtttgagaagtaagaagcatggctgagtatggttacgcatgccgaagcgctcaaatatccacctacaacactagcaatgtgagaaacattgaaactggtgcaaagccatttgctccctacgtccccaaatttagtaacggtaatggttactcagacgggatcgttaccaagaaaaaaataattccagttgctagcaggccttattatgaggacgagagtgacaacgaccatgatgacgatgaagggaagcatccacatcaaacaagcccacgtaaatttgatgacttcctcaccaaggtgcacaatgaagctaaccgtagtccaccaaggtccttcggtcacgtgacttc

SEQ ID NO: 41071 - DNA, 346 bp, Glycine max
  Clone ID: LIB3139-027-P1-N1-G10
ctcaatcctggtatttcaggttctcgtcttttgggcaccattcctcagtccatttcacagcaaactgtttggaatcaaatggcaacagtgagaacaccattgaattttgattctagcaagcagagcttttgtcagttttctattgaccttctcggtggaggaatcttagtggacaaaactggagattggatcacacttatacaaaattctccaattagtaacttgttgagagttgctgcttggaagaaaggctgtttaatggtcaagattgtgatgtctgggaatgcagcagtcaaaaggagtgattgggcctcattggtacaagtgtttttaacaaacagcaaca

SEQ ID NO: 41072 - DNA, 343 bp, Glycine max
  Clone ID: LIB3139-027-P1-N1-G12
cactcttctcctctatttaacaacgcccgaaaaaaaattagggttttcaatttggggaaataaaaatagggggaaatattctggagagagtgtgtagaaaatatggttgtcgatgatatgacgctgtgcatcatcgtcggctatggaggttcctcttcttctcgtttctccgatgcttatcccaaaaggggtttgatggaggggagatatagtggggattgatatgatgaaggtgtttataaggttgttttgttgaattgtgtttttgagatggcaatattgtacgaaccagcaataaaactcatccaccagatgagctagcatgggcgattcttgtcttact

SEQ ID NO: 41073 - DNA, 360 bp, Glycine max
  Clone ID: LIB3139-027-P1-N1-G2
agagagttgacagcaaaacacccatggaacatcatgacaacctctgcagacgaagggcaattcttgaacatgctccttaagctcatcaatgccaagaacaccatggaaattggtgtctacactggatattcacttcttgccaccgctctcgctcttcctgaagatggaaagatcttggccatggatattaacagggagaattatgaattgggtttgccagtaattaagaaagctggtgttgaccacaaaattgaattcagagaaggtcctgctctcccagttcttgatgaaatggttaaagatgagaagaaccatgggagctatgacttcatctttgtggacgcagacaaggacaactac

SEQ ID NO: 41074 - DNA, 304 bp, Glycine max
  Clone ID: LIB3139-027-P1-N1-G3
gtcccactttcttctccttttagggtttcctttttggttctcctttccagatctgcatcttccattttttaggattaagcggtgagattcgtgaatctgagaaatgtcggattcttctcgggaggagaatgtttacatggcgaaattggcggagcaggccgagcgttacgaggagatggttgagttcatggagaaggtagcaaagactgtggaggttgaggagttgaccgtggaggagagaaatcttctctctgtggcttacaagaacgtgattggtgcgaggagggcttcgtggaggatcata

SEQ ID NO: 41075 - DNA, 359 bp, Glycine max
  Clone ID: LIB3139-027-P1-N1-G4
cgcgtcgaagccttcatacaaaagttcaaccaagagatgaggctgcaaagacaacaatccttagaacagtacatgcagatgattaaccgcggtgccgcttaatctcaacctcaacataatcaatattttcattttacagaacaaaaaaacatatatagtgtaagtatttctgcaggtgtagacagtaggggtatttattttattgccatatattagtttatggttgggttaggctcatcatcattatttctttaatttgtttgttttgtgcctttatatgctccacataccaaaaatgtggttcatgttcaatatcaattagctagctagctagaaaacaaacacaccaaaaaaacact

SEQ ID NO: 41076 - DNA, 334 bp, Glycine max
  Clone ID: LIB3139-027-P1-N1-G5
aaaatggcgcattcttctgttatagtcttcctctgcactctccttctcttgttttctccgtcaattcgtgcctccgacgatgacgtggcgctgcacgcgaagaagctcatcagagacctcaacttgttccccgacgctgacgtcaacatcgttcccgttgctaattgcaccctccaaccccgcaggatcgtcgagaagcgcctgaggttcccgaagctgctagcttcggattccgagccttcggttgaggatttgggtcaccacgctggctattaccccattcagcattcacatgccgcaaggatgttctactttttcttcgaatcacgcaata

SEQ ID NO: 41077 - DNA, 366 bp, Glycine max
  Clone ID: LIB3139-027-P1-N1-G6
ccaagcgcagccacaacatgcactacggttatttactattacaccctatggcaggattcaccagcgcagacgctttagatggctctggacgctctccaatcacccagaactggcactgcatcgtttagtccctttgaagaaaccaacctaagtgacttggagacaccgcggaccaaagagaaagcgtgctaagcgtagccgcatggaccagcaactgcgacactcttcatgcaccgaggaagagtacctcgctctctgtgtcatcatgctcgctcacggcggcgccggcggtgtccccgccgccaagcctgctgtctccgacaacaattacgcgccgctacccgccgacaaactgagctacaaatg

SEQ ID NO: 41078 - DNA, 343 bp, Glycine max
  Clone ID: LIB3139-027-P1-N1-G7
aaaggacacacctgctgttggcttgttgttcaaggatggcaatttgtaagaaagatgtttggagagttgaatgtggaatcccttctggatttccgctcacagttatttgcaatagcatttttaatgagatgctcattagatatagctatgaaaaattactgcgccaggctagagctccaagcatgtttttacaatccttcaaaaattttgtttctttgtgtgtgtatggtgatgataacttaattagtgttcatgaatatgtcaagccttactttagtggttctaaattgaaaagctttctagctggtcataatatcaccattactgatggtattgacaaaac

SEQ ID NO: 41079 - DNA, 335 bp, Glycine max
  Clone ID: LIB3139-027-P1-N1-G8
cttttgaacacacaacaaaaccagagttaccaacagagccaattctaatcctttgaaattcactaaccccctatttctattctctcttagttccagtttttcactttgctagtgtcttctgcatttgcttccacagttgcttcgccaggaagaaataacaaaaggaaacaccttcttgcttttcctacctgattgtaaagaatctctcttttctcatttgggacatcactgttcactttctgcatcaactcgctgttggattttaatatttatctctgctatcaatattattaaggtctcacttctgggattctgaattctatgccccttggacc

SEQ ID NO: 41080 - DNA, 342 bp, Glycine max
  Clone ID: LIB3139-027-P1-N1-G9
gaaaaggcgtcttcataaacgccgcccaaaacttgggatacccttttattcattccattcgtttctagggttttcttttctttgccgagaaaatgagagagtgcatttcgatccacattggccaggccggtatccaggttggaaacgcctgctgggaactctattgccttgaacacggcattcagcccgatggacagatgccgagtgacaagaccgttggcggaggagacgacgccttcaacacatttttcagcgagaccggcgccggaaagcacgtgccccgcgccgtcttcgtggatcttgaacccaccgtgatcgacgaagtccgaaccggtgcgtacc

SEQ ID NO: 41081 - DNA, 348 bp, Glycine max
  Clone ID: LIB3139-027-P1-N1-H1
ctcgccaattgagaaggaaagctctctctcgtattgaatggttgcaaaaagctgatgtgcctaccatagcacagattgaagagttccattcgatgcagaggatgatgaatgctcctgattcaaatgataatattgatctactgttgagcattgatttgttgggtttacaaggagcaggtaaagcttttccaaacaagattgtttttgatgataagcttgtgttggctaacacacaagaattctttgatggaaattttccagtggattcttggttaccaatttttgtgaattgtctttatcctgtaagtcaattacctttagaagctgtcgttgtaaatgttacatgtg

SEQ ID NO: 41082 - DNA, 346 bp, Glycine max
  Clone ID: LIB3139-027-P1-N1-H10
caattttgaggcttttccccacaagttggtgcagtttggagagattcaggaaaaagttgtattgaaattttcacaagaggaatttcttacagcttggtcaactcaggtgcgtcctacaacaactctgttggctgatgggtgtccatatttgtatgctatggtgcatgatagttcagtgtctacaataccaggtgattttgtaattggtgttaagttgacaaccataaacaatatgtgtgcatatgggctcaatcctggtatttcaggttctcgtcttttgggcaccattcctcagtctatttcacagcaaactgtttggaatcaaatggcaacagtgagaacacca

SEQ ID NO: 41083 - DNA, 346 bp, Glycine max
  Clone ID: LIB3139-027-P1-N1-H11
cagaaggaaggaaaaggtgactgcacagaggtatcgaataaagtcaaaagtcggaatggtttcactctgatcaaactgaggaatcgaggaaggaagggttaggattagggtaaggattgggaagccataggagaagagaacaagaggaagaagaggtcaattcaaaatgccggaagaggatttggtggacatcaaatttaggttgtacgatggttccgatatcggacccttcaggtactcctccgccgccaccgtcgatatgcttaagcaaaggattgtctccgattggcccaaaggtaaaactgtcgtgccaaagtcagctaatgaagtgaaattgattagctct

SEQ ID NO: 41084 - DNA, 344 bp, Glycine max
  Clone ID: LIB3139-027-P1-N1-H12
cgtattcctatctcggcatacgaggtttccgacacgtgtaccaggatcttgtcggcttgccagcgtggagatgacaagaggtgtcaggagttggtcgggaagattaaggtttggagtagagagagtgagaggaacaagaggtgcatagttggtgctggtgctggtgctgttcttgcatatgcctttgattgtttctcaagtaactctattgaaaaacatgtggtgcttttggaggaggttttggaggtgatgacatggatggtcccacttggggaagagggtgtttctaaattgagttcaggagcttctttgaattcgttggtatggtttctagaggggaaaga

SEQ ID NO: 41085 - DNA, 361 bp, Glycine max
  Clone ID: LIB3139-027-P1-N1-H2
gccttttcgggaacccagatttacaccattctgagtaacttcacacaccatataacagaaaatgaggtggggcttgcggcaacttgcgcaatcaatccctcgccgtacttgctcacggtaataataaagctgctgcttgtcgatattttgcctcagacgctgagctgaaaaagacagccctttatgacttccatgttgctaatggagggaagatggtgccatttgctggatggagcatgccaatccaatacaaggactcaattatggactcaacccttaactgtagggagaatggtagcctctttgatgtttcccatatgtgcgggctaagcctcaagggaaaggactctgtcccatttct

SEQ ID NO: 41086 - DNA, 289 bp, Glycine max
  Clone ID: LIB3139-027-P1-N1-H3
attagatatagctatgaaaaattactgcgccaggctaaagctccaagtatgtttttacaatccttcaaaaattttgtttctttgtgtgtgtatggtgatgataacttaattagtgttcatgaatatgtcaagccttactttagtggttctaaattgaaaagctttctagctggtcataatatcaccattactgatggtattgacaaaactagtgcaactttgcaatttagaaaggtagcagattgtgattttctcaagagaaactttaagcagatgtctaatggtttat

SEQ ID NO: 41087 - DNA, 358 bp, Glycine max
  Clone ID: LIB3139-027-P1-N1-H5
aaccaaagggctcaaaacttgccattttcacaagtatttttggggcaattagagattcttcttcgggtggttttgacagataggtcattttgtgccgtgcatggtgatggtcttctctgattgaaattccacacactgcctcctctctccaatttggtacaccggttagatggtatgcagcagttgtgtaaggtctttggttgttcaagctggaaccttcgtcaacagagtgagaatcaacgaatttgggaggagtttgctggcggttcagagtttttctcattggccgattcgtgaatacaagacaatcacagggatgatggttgatacgggttctatgtcaagtgctggacccctt

SEQ ID NO: 41088 - DNA, 363 bp, Glycine max
  Clone ID: LIB3139-027-P1-N1-H6
attgactgtgacagaacatacaacaatggttgcaatgggggtctcatggactatgcattctcctttattgtagaaaacggtggactccacaaagaggaagattatccttacattatggaggaaggtacttgcgagatgactaaggaagaaaccgaagttgtcaccattagcgggtaccatgatgtgccacaaaacaatgaacagagcctattgaaggcacttgcaaaccaacccctcagtgtggccatagaggcttcaggcagagatttccaattttacagtgggggtgttttcgacgggcattgcggaagtgacttagatcatggtgtggcagctgttggatacggaactgcgaaaggtgtg

SEQ ID NO: 41089 - DNA, 345 bp, Glycine max
  Clone ID: LIB3139-027-P1-N1-H7
gagctcaagaagcagatatcatgctctcttatattggcaaataagaccgatagctatatagctttcaaggtgaaaacaaccaatcccaagaagtattgtgttcgtccaaacaccggagtagtcatgccacaatctacatgtgatgttattgttaccatgcaagcgcaaaaggatgctccggctgatatgcaatgcaaggacaagtttcttcttcaaagcgtaaaagtagatgatggaaccaccgcaaaggatatcacagcagaaatgttcaacaaggaagcagggcacgtggttgaggaatgtaaattgagagtggtgtatgtctctcctactcaacctccatct

SEQ ID NO: 41090 - DNA, 336 bp, Glycine max
  Clone ID: LIB3139-027-P1-N1-H8
ctcgagccgctcgagcggctcgagcggctcgagaaagggtgtcaaaaaagcgaacagtgctaattaccggacagggaagcataggaggcaccttggtttgaaggcgatcgaggagcgtattgctgcagggttagataatcctgacttgggaccatttttgctgaagcaaacaagagatatgatctcctcaggtgagaatccccgaaaaacgcttgatttcgctcttagagctttgaaatcatttgagatttgtgcagatgggaaaccaagtttagatatggtaatgtgcctgcatgtcttggctacaatatactgtaatttaggacagtacaatga

SEQ ID NO: 41091 - DNA, 346 bp, Glycine max
  Clone ID: LIB3139-027-P1-N1-H9
gaagaagaatggtagtacttcttgttcctctacccttgtaacgccaaaccaaccaaaaacataacataaccaatgttccatttccacatacaacaacattcattgacaatccaataacgccaataacccccccttttggcctttgttttgttcctcgcaatccctccattattttcccttaggattgggattgggtgttgttgagtcaaaatctgttaacctcacccagatgcagactctgggtttgttggttgctcctgttctcggtttctacctgaggttccttcgtttctctcttcgcttccttcttctcatgttcatggatttcccttccaccttcaagttc

SEQ ID NO: 41092 - DNA, 353 bp, Glycine max
  unsure at all n locations
  Clone ID: LIB3139-028-P1-N1-A1
cagaatcagaatcttgctcccttctctggtgtaatggcacatacaaattctttgcccagtgctctgttgtcttcaccagttcaaacagcaagagaagatatcccatacttacccttccctgcaacacaatcgatgcctacaaaatatagtgacattgcttcttcaattggtggttccaccataaccatgtcagaggctctaagggctagcggcatttctgcacctcaacctaatgcacaaaccctgtctggtgcaggtgttgccactggacccacacttnctcagcaccttgctatgcatccctactcccaacctagtcttcctctgggacattttgctaacatgattagcta

SEQ ID NO: 41093 - DNA, 358 bp, Glycine max
  Clone ID: LIB3139-028-P1-N1-A10
gaaaatacaaagccgtagaagagggctcgctcttttgtgtttgtccgcgaaggaaagaaactctatccttagctatcgcgatggatcggtaccagaaggtagagaagccaagagctgaaactccaatcgatgaaaacgagatccggattactagtcagggaaggatgcgtaactacattacttacgccatgagcttgcttcaggagaaaggttctaatgaaattgttttcaaagcaatggggagagctatcaacaaaaccgtgacaattgtggagttgatcaagaggaggattgtgggcctccaccagaatacagcaattggatccactgatatcactgatacttgggagcccctaga

SEQ ID NO: 41094 - DNA, 280 bp, Glycine max
  Clone ID: LIB3139-028-P1-N1-A11
gaaatagtataaactttgtcagttagtactcgtaggttttcatgaggaaaaatacttgtacttcggggcatgccactcggtttggaacttacttgagacttgtgttgatcaccatggggggtgtgggagcggcctgtgcataacagggtgacctggacactagttgcctctttacctaggtgcgagcgacatgtggatatgctgaggctatttactgcttgacggaaccatggtcattgctagagtctgtgcaaaatcgtgcttcgttgacagcatcaca

SEQ ID NO: 41095 - DNA, 352 bp, Glycine max
  Clone ID: LIB3139-028-P1-N1-A2
gaagaaacttaatcgatcatcacttcacttcactaatacatcatggcagacgagacccagaacaagtatgagagctctgaggttgaggtccaggatcgtggtgtttttgactttctcggtaagaaaaaggatgaagaagacaagcctcatcctcaggaggaggtcatcgccaccgagtttcaaaaagtcactgtctcagaccaaggagagaacaagcacagcctcttagaaaagcttcaccgatctgacagcagctctagctcttcaagtgaggaggaaggagaagatggagagaaaaggaagaagaagaagaaggaaaagaaagggctgaaagagaagatcgaggagaaaa

SEQ ID NO: 41096 - DNA, 360 bp, Glycine max
  Clone ID: LIB3139-028-P1-N1-A3
agcataatgagtcatgtccaacaatacaaggactatgaagtactgttacataacccggtgcaacatggcaacaacaggctcagaaccttggttcttttgtctcatgttcgtcttactgagactttttctttctttcaaacataaaaaaacaaacttttgagtcttgcttttttattgtttccttgggctttctttgtttcttggggccagaaaaaatgggtataggggagacgagttcgagccagagtttcaatctgcaccatcgtgaagtgaagaataagcaggaagcgttcataggggtatccaaaagtgggcatggcaatcaaggctgggcaaggtgaagagcaacataagttcgtg

SEQ ID NO: 41097 - DNA, 261 bp, Glycine max
  Clone ID: LIB3139-028-P1-N1-A4
gagagttgctgcttggaagaaaggctgtttaatgggtaagattgtgatgtctggagatgcatcagtcaaaaggagtgattgtgcctcattggtacaagtctttttaacatacagcaacagtacatagcattttgatgcttcgcagtggacaaaatcggaaccacattcctgagaattgatcttcctaataaaggtatgtactcctaataatggctttgaaatgactggcctcttttcaggcaaaaaaaactttatgccatt

SEQ ID NO: 41098 - DNA, 359 bp, Glycine max
  Clone ID: LIB3139-028-P1-N1-A5
ctttccattcctttcttccttcgtcccattctcgaattggcgtgtgcctcttgcaatcccccaaaggttttttgaagcagaagaatggacttctttactagagacataaatgaggattctatgcttagatgcccattcttgaggaacatcaatgagcctactaacttctcattctcttcacctttggctttaccaatgcctgttcgtggagctaaaggtccaatttttgaagatggtcccaattttgatttggcatttaggcttttccacgggagtgatggtgtagtacccttatctgacagatcttttcggccttcagagaagaaagtacaggcagaacctcccaaatcccaattcaa

SEQ ID NO: 41099 - DNA, 111 bp, Glycine max
  Clone ID: LIB3139-028-P1-N1-A6
taatcacaaggtaaaatgactgcatgattttgtatgtagtaaaagtatcagatcgcttatactgttcattttaaaggtttcacagtatgatataagaatgcttttggaagt

SEQ ID NO: 41100 - DNA, 357 bp, Glycine max
  Clone ID: LIB3139-028-P1-N1-B1
cagatgatcaactccaatttccgcgaacgataaatcaaaatggcacctttctttgttctgtttctattagcctcttcattgactcaagggtatgctcaatttcaaccaaaaaacgaagcttttatatccttgttgattacccaaaatggccttgactttgtgaaggagttgctggtgaacaaggcaatttcctcactggtctcacttcgattgccgaatattgaaaagactgcgaaaatcccagttgtgggtaatgtctacatggtgctctccaacatcacaatttatcatattgatgttccttcctcgcatgtcaagccaggggagacaggaatttccattatagcttctggggtt

SEQ ID NO: 41101 - DNA, 356 bp, Glycine max
  Clone ID: LIB3139-028-P1-N1-B10
gagtaattgcggaatcagctagaattttctaataatggccaaagacgttgagcaggttacagagcaaggtgaatactccgcgaaggattaccatgacccacctccggcgccgttgatcgacccagatgagctcactaagtggtccttgtacagagccgccatagctgagttcatagcaacactccttttcctttacatcaccgtgttgaccattattggctacaagagacagagtgacaccaaaatccccggtaacaccgagtgcgacggcgttggcattttgggcatcgcttgggccttcggtggcatgatcttcatccttgtttactgcaccgccggcatctctgggggacaca

SEQ ID NO: 41102 - DNA, 355 bp, Glycine max
  Clone ID: LIB3139-028-P1-N1-B11
gtttgcgaattgtgcaattttcaagatctgaatcagagaatagataataatggctacaccggaccacctgttcaacctccgcaacaacttgtatctcggggcgtaccaagccgccatcaacagcggcgacgtcaccaacctctcccaagaagactccctcgagcgcgacaccctcgtccaccgctgctacatcgccctcggccagcttcagttcgtcatctccgagatccatgacgacgctcccacacctctccaagccgtcaaactcctcgctctctatttctcctcccccgacaccaaggattccgccatcgcgagtctcaaggagtggcttgccgatcccgccattgcaaac

SEQ ID NO: 41103 - DNA, 357 bp, Glycine max
  Clone ID: LIB3139-028-P1-N1-B12
cactccaaggagcacccaagacggcgagagacgggattctcaggctccagactatttggagctggggaagacggcggaagagctgtcgacgacgcggcacccgcgtttatcagccattacgccaggccgaattttgagtttgctacacgcgggggaggcctcgttcccggacgactaccagtatacgtggagggagagggagagcatcctgcggtacgcggcgggcagacaggtcgcgcagggcgtggatgaaccgctggcgctcgtccctgcgccgtcgattgttggagacgagatctggctcctgagaggatgcccggcaccggttgtgctgcgtcgggacactagaacggtaga

SEQ ID NO: 41104 - DNA, 358 bp, Glycine max
  unsure at all n locations
  Clone ID: LIB3139-028-P1-N1-B2
gattgaagagtttcattcgatgcagaggatgatgaatgctcctgattcaaatgataatattgatctactgttgagcattgatttgttgggtttacaaggagcaggtaaagcttttccaaacaagattgtttttgatgataagcttgtgttggctaacacacaagaattctttgatggaaattttccagtggattcttggttaccaatttttgtgaattgtctttatcctgtaagtcaattacctccagaagctgtcgttgtaaatgttacatgtggtagntggacgntgggtttacccaccactgcttggattagttctgcagttaacaatcgctcctcagatattaacaaaaagatt

SEQ ID NO: 41105 - DNA, 356 bp, Glycine max
  Clone ID: LIB3139-028-P1-N1-B4
cctcaccccactttcagtcgtgaccctgttcgtttgtcattgtctccaagattgagtaataagatggggttggaggccgcagtggaggcagcggcggaattccttaacaaggcagtgaaaccagtgctggtaggtggtcctaaactgagggtggcaacagcatctgatgcctttgtcgaactggctgatgcgtgtggttatgcgcttgctgtgatgccgtcggctaaagggcaggttccagagcaccatccccattttatcggaacttattggggtgctgtgagcactgccttctgtgctgagattgtggagtctgcggatgcatacttgtttgctggtccaatttttaatgacta

SEQ ID NO: 41106 - DNA, 362 bp, Glycine max
  Clone ID: LIB3139-028-P1-N1-B6
cttttaatggcaggaaagtacaagaacataccaatattgcggcatctacgtacaactaccaccaagaggatggaagcaattgaaagagagatacgagattcaattgagggtatcataaaaaaacgagagaaagccatggagaatggtgaaacctctaatgaagatttattaagcatacttttggaatcaaatcacaaggaaatccagggacatggaaacagtagggctgttggaatgaccaagcaagaagtaattgaggaatgcaagctattttacctggcagggcaagagaccacttcatctctgctggtttggacaatggtcttattggctaggtatccagaatggcaagcacgagcaag

SEQ ID NO: 41107 - DNA, 358 bp, Glycine max
  Clone ID: LIB3139-028-P1-N1-C1
caactaagaaaaacatatcacacaatatggcattcaagggctatttccttctcggcctcgttactcttgttcttgttaaatcttccaaagttacatgcgaagaagaatcagttaatacagtttcacccattattgacatttcactcaatcggaagagtttcccagaagggttcatatttggggcgggatcttcctcgtaccagttcgaaggggcagcaaaggaaggtggtagaggaccaagtgtatgggataccttcacccataattatccaggaaagatcatggatagaagcaacggagacatggcaattgactcatatcacaactacaagaaagatgttgggatgatgaaggatat

SEQ ID NO: 41108 - DNA, 358 bp, Glycine max
  Clone ID: LIB3139-028-P1-N1-C10
atccaaacccaaaaatcatatcttccactccacaacctcaaacttctctctctctctcttcctattctaaaaatcccacaaacccctttctctattccatctaaagattcattctttctgcaatttcgatacacgggtcttcattaattcactaagattctgcgtaaataatcgttttcactgaattttctgttccgatggagctaatttcaggattaccggaggacgtagcccgagactgtttaattcgggtttcgtatcagcagttcccaacggtggcgtcggtgtgcaaactctggaaatcggagattcacgcgccggagttccgccgtcaacggcgtagcacaaagcacgccca

SEQ ID NO: 41109 - DNA, 358 bp, Glycine max
  Clone ID: LIB3139-028-P1-N1-C11
ctttatcctgtaagtcaattaccttcagaagctgtcgttgtaaatgttacatgtggtagtggacgtggtggtttacccaccactgcttggattagttctgcagttaacaatcgctcctcagatatcaacaaaaagattcgcacagcacttgggaaaggtaagaaaattgtttttcttaccagagttgatccttttccagtagctttactggctgttctttttggcgttaagaatgaaattctgagttctaacgccactaaccctatgctgacgcgacttcttgagaactgtaagagtctcaaatatctggttgatgagtgtccttttgcatttgtgaactagtatgtaatattttatt

SEQ ID NO: 41110 - DNA, 223 bp, Glycine max
  Clone ID: LIB3139-028-P1-N1-C4
gacgaggcgagttacagaagacaatggaaatgctccggggtgctaggattagcgaattcactgaaattaggaacactttttaagaggctttcaaatatggtcaacatagatattctctctattcatgggtactttgggccagcagatttcctcaggatggccgacacttaagggccggggggatttattcttggaccaagaaggggcttatagggagagcttc

SEQ ID NO: 41111 - DNA, 363 bp, Glycine max
  Clone ID: LIB3139-028-P1-N1-C6
gtccggcgaagaaggcgcgaaactaacggagaaagaaatcaacaaggcctaccgatggaaagctctcgaattgcaccccgacaagaggcccgacgaccccaacgccgccgccaacttccaacagctccgcacctcgtacgacatcctcagggacgacaaggcccgcaagttgttcgacgacctcttgcgcgtcaagcgagagcgcgagctccgcaatttgcagcgcgacggaaagcgccgcaagatggtctccgatctcgagcgccgggagcgcgacgccaacgcccccgaccccgccgcgaaggagcgcgaagaggaggccaggattgcgaggcaactcaaggaggagatcgcgaggattcg

SEQ ID NO: 41112 - DNA, 332 bp, Glycine max
  Clone ID: LIB3139-028-P1-N1-C7
ctcgtttttctcgagccgattgccgttcttctgccgctacactctcttcccgcgctccccagattttaaaaacccatttccgttttcgccttccgatcaaacccttttggtctcaccgcgagtttttgcgcaatgccgttaccctgaatctaacacccaattagatttcacacactatctatctactaccacatcgcccgaaaaaaaaaaacccttacttcttcgaatggggtccggcgcccttaacccctctcatgcgccgcgcattctcgcccgacgaccttcatcatctcatccgaacttttgtccggcacaccccctttcccctctca

SEQ ID NO: 41113 - DNA, 355 bp, Glycine max
  Clone ID: LIB3139-028-P1-N1-C8
ggaatcatatgttgatttggcagaaaagttagctgggtcaggagtgaaggttgcaaaattcagagcggatggagaccagaaggaatatgcaaagactgaactgcagttgggaagcttccccacaatactactcttccccaaacactcttctcaaccaattaagtacccttcggaaaagagagatgttgattcattgacggcattcgtgaatgctttacggtgatggttaattgagtatcttgctcaatgttccgtcgtacaataccggcaataaatttcttcacagttttggcaattcactgaaaatgggaatggcagttttgacagcaaaacgaagattctcagctagaagtat

SEQ ID NO: 41114 - DNA, 354 bp, Glycine max
  Clone ID: LIB3139-028-P1-N1-C9
accacagttccaagtggttattaccttcaacatcaacaacggcgtggccctgagcagatgcagcgaccgggctcttcccctgccttaaacaatgtgaaaggcagcagtgccttacctacacagggtcttttgcatcctgcacaggttgctgcaatgcaaccctctgggagccaccctcagtttgttcctactggcttttcttatgcttcttatcatgttcattctgtgccctcagttcaagtgaagccagcggagcagaaacaacctgcgggtgagtagaatgatataatatcctttatttgctgcacccctgtgcttgcggttatcaaagaagaaaggtatatagcttgagtg

SEQ ID NO: 41115 - DNA, 360 bp, Glycine max
  Clone ID: LIB3139-028-P1-N1-D10
ctcgagccgcatcaataaagaaaaattcagaacaggcgaagacccaagcacagaaagaaaaatacagaacgaaaagatccttccagaattactcacagaactaacccaaagggcaccaatacgaacgcatccacgagtaagaatccagacaccagacatcgaactaccagacgcaccaatcaaggaagaaagccccacaccatctcacaccaaacaccaagaactgccaagagacttatacatcatgacggcagtgatcctattcgacggaaagaacccaagaggtcttagcgaactttttcaagtagccgaagcagaatttaaactcagcccagttttccaatcaaacaatgaagaaag

SEQ ID NO: 41116 - DNA, 355 bp, Glycine max
  Clone ID: LIB3139-028-P1-N1-D11
gataatattgatctactgttgagcattgatttgttgggtttacaaggagcaggtaaagcttttccaaacaagattgtttttgatgataagcttgtgttggctaacacacaagaattctttgatggaaattttccagtggattcttggttaccaatttttgtgaattgtctctatcctgtaagtcaattaccttcagaagctgtcgttgtaaatgttacatgtggtacttggacggtgggtttacccaccactgcttggattagttctgcagttaacaatcgctcctcagacatcaacaaaaggattcgcacagcacttgggaaaggtaagaaaattgtttttcttactagagttg

SEQ ID NO: 41117 - DNA, 358 bp, Glycine max
  Clone ID: LIB3139-028-P1-N1-D12
ctcgagccgaagaaagaaagatgagtccaacatgggtttttgtgttaggtattattgcagcaatgttggtggttgtgaatggacaatcatcagtgaagccattggtgaagacagtgaaggggaagaaggtgtgtgacaaagggtgggagtgcaagggttggtctgcttattgctgcaatgagactatctccgattactttcagacataccagtttgagaacctcttcgcgaagcgcaattcgccggtggcacatgcagtcggattctgggactaccgttctttcatcactgctgcagcactgtatcagcctcttggctttggcaccactggaggaaagaccagtggccagaaggagct

SEQ ID NO: 41118 - DNA, 357 bp, Glycine max
  Clone ID: LIB3139-028-P1-N1-D2
ctggaattacagacatcaggctgatgtttgtcacgcctatcaaatattgaggaaaggtggtctgaaagaagaaaatattattgtttttatgtatgatgacattgcattcaatggggaaaacccaaggcctggagtcatcattaacaaaccagatggaggtgatgtttataaaggagttccaaaggattacaccggcgaagatgttactgttgataacttttttgctgctttacttggaaataagtcagcactgactggtggcagtgggaaggttgtggacagtggtcctgatgatcatatatttgtatactatactgaccatggaggtcctggggtgctcgggatgcctgctggtcc

SEQ ID NO: 41119 - DNA, 339 bp, Glycine max
  Clone ID: LIB3139-028-P1-N1-D4
aaacagtctttgtggtggtgatgaaaaattgatgcgggagaggacgcacctgctgttggcttgttgttcaaggatggcaatttgtaagaaagatgtttggagagttgaatgtggaatcccttctggatttccgctcacagttatttgcaatagcatttttaatgagatgctcattagatatagctatgaaaaattactgcgccaggctaaagctccaagtatgtttttacaatccttcaaaaattttgtttctttgtgtgcgtgtggcgagggtaacttaattagtgctcatgaatatgttatgctttattttagtgagtactaaattttttagttttt

SEQ ID NO: 41120 - DNA, 362 bp, Glycine max
  Clone ID: LIB3139-028-P1-N1-D6
cacaagctcatgcacttctctaattccctttcacactcgattacagatttcacacgggcttacacttcaaatggctttggaagctcttcaatcacccaccacagccactccatcgtttagtccctttgaagaaaccagtctcagttacttagagacaccgtggacgaaaggaaagcgttctaagcgtagccgcacggagcaacaactgcaacacccttcatgcaccgaggaagagtacctcgctctttgtctcatcatgctcgctcgcggcggcgccggcagtgtctccaccgccaaacccgctgtcttcgacaacaattctgcgtcgctatccgccgccaaactgagctacaaatgttcgg

SEQ ID NO: 41121 - DNA, 142 bp, Glycine max
  Clone ID: LIB3139-028-P1-N1-D7
cttactttacttggttgctcattcttgttgtccacagttcataaaaaagcgatgtaaatcatgaaaaccgtacaaaaatatacacgtaggtatgtgtagatatattattctcttgtaatatcgtggatggatgattggttgt

SEQ ID NO: 41122 - DNA, 258 bp, Glycine max
  Clone ID: LIB3139-028-P1-N1-D8
caattatgtaaagattcgaggcttggcatcacctcgtttacttgttggatgggtagctcacagtgcaagtcttggtatgaaagattccttgggacccttgaaagctttagctgctgctacagttataaatgtcgctggttgtgtacttttgtgcacctatttaggttatggaattgtacgggctgcgccgggctacaatggttccacaagttgctgcttcttacatgaacatgcaaaatctaaatatgtaactatata

SEQ ID NO: 41123 - DNA, 352 bp, Glycine max
  Clone ID: LIB3139-028-P1-N1-D9
gattgaaccagacatgaattcaaggtttcagcttttgagtaccactaccaatggtgattttgttcaagggaaagatctcgcaatggttaaagttaatgtagcatgtgctgctgttggcttgacatcaagttacactccaactccattgttggaatctggtttgcaaaaagacagagggttaattgtggagtattttggaaggatgtcttacgttgctcataacgttaatcagccccaagagaaagatttgttagagggaaatttttcctttgatattaaatctcgctctagattggaaaaagtttcctctacaaaagcacaatttgttagtggaaaaaccttcaaatatgat

SEQ ID NO: 41124 - DNA, 356 bp, Glycine max
  Clone ID: LIB3139-028-P1-N1-E10
tgaggaagtggtgtatgaaactgaaaagaattttgctgatgagaagcctgcaggcgaggaagatgcacctgaaggaaacaaggactgtcctgccaatgaaaatgaagaaaaggagcctgaggacaaggagatgacactggaagagtatgagaaggtgctggaagagaaaagaaaggccctgcaggcacaaaaaactgaagtaagaaaggtggacatcaaggagtttgcatccatgcagccactgtctaacaagaaagaaaatgatgagatctttattaaattgggatctgacaaggataaacgcaaagatgctctagagaaggaggagaagtctaagaagtctgtcaacatcactg

SEQ ID NO: 41125 - DNA, 354 bp, Glycine max
  Clone ID: LIB3139-028-P1-N1-E11
gtgacttgactctctttctcacacctccttttttccccgatgctaactctacaagcttcgtctcgtaaagaaaattcgaaagctcaatagagagaactcaattgaatcatcaaatgaggacagtgatttcgcgcttgatccattccacgccttccatttccaggctcaatgccacggtagtgtcaatcagcgggagaaatctctgcacagattctaacaaagttgatgggccattcaaagttgaagaagcagagactgtaaatgtgcctccactcccaacagaaaagttgcttgtgttgggagggaatggggtgttggatcacacatttgtagagaagccttagaccgtgattt

SEQ ID NO: 41126 - DNA, 357 bp, Glycine max
  Clone ID: LIB3139-028-P1-N1-E12
ttacaactcaagttctctctctttccttccttccttcccatcttcttccccaaacttccttgaaacttcaaaccctaaactaaataaaacttttaattcccccatcaacccctcatctaattactattattttattcaaataataattattaaaaaaagcattactcaaactcactcatttttttctgaaattttctttctttctttctctggttcttaaaaatgggcacaccaaacccaacccaacccgacaatgggccctgattcattccgccggcaatgggaaagcccggagaacaccaccttctgccttccggtgtcgccgccgaggatccgcggcggaatgcggcgtctccg

SEQ ID NO: 41127 - DNA, 345 bp, Glycine max
  Clone ID: LIB3139-028-P1-N1-E2
ccgatggatactggaacctgcagatcgtgatgctggtttggccaatgttgccatcaagagtggcaaaaactacaatgtcattgtggaaattgccactatcctctccccggaagagcttttggcggttagacgcgcctatctcaaccgctacaagcactccttggaagaagatgttgcagctcatacctctggccatctacgccagcttttagtggggttggtgaccgcattcaggcatgttggtgatgagatcaatccaaaattggcacaatctgaggctgaaattcttcatgatgctgtaaaagagaagaagggtagctatgaaaagaccattagggtcttgac

SEQ ID NO: 41128 - DNA, 361 bp, Glycine max
  Clone ID: LIB3139-028-P1-N1-E6
ccacgattcctcactcttcttccatagcctgcggtctgcgactctaatcttctgggctgcagtgagatgaaccctagctccaattggctccattagatacctctttcctgcatcttatatatcccattctttctcattcacacagcatcatgggcgtcaaacgttttgctgaaggtggcatagcttacatcatcgcctgatgtcacacacacccacttgatctcatcaaggtccgcatgcagctacagggggaaaacaatcagcccaaaccgctgcataatctacgacccggactcgccttacaaaccggctcgaccctacacgtggcagctgcacatacgccgacccgtgagggccccat

SEQ ID NO: 41129 - DNA, 352 bp, Glycine max
  Clone ID: LIB3139-028-P1-N1-E9
ctcgagccgctctattgtaaatttgtaataccgttatcttggttccatataaagcagaaaatggctgtatctctgagatgcagaaacagctcctcccacctcctcctaactcgcttcctccactcagtgagtctccctcgtcgaaggtggttgcaaaccgtagcctacgaagaattgcgagctcaccctgacaaaccctacacctcaacggccgttttcatccatggctttttgggatcctccagaaactggagatctttctctcgcaacctcttggcctctctctccaactcctctccctcttccaattggaggacggtgatgttggatctgaggaaccacggacaatcga

SEQ ID NO: 41130 - DNA, 359 bp, Glycine max
  Clone ID: LIB3139-028-P1-N1-F12
ggccaggcaagccccactcaaccaccacacctctcctcgttcacgctacccctttctgctcttcttctacctttcaagttttaaaagtataaagatggcagagacattcctatttacctcagagtcggtgaacgagggacaccctgacaagctctgcgaccaaatctccgatgctgtcctcgacgcttgcctcgagcaggacccagacagcaaagttgcctgcgaaacatgcaccaaaaccaacttggtcatggtcttcggagaaatcacgaccaaggccaacgttgactacgagaagatagtgcgtgacacctgcaggaacatcggcttcgtctcaaatgatgtgggactggatgccg

SEQ ID NO: 41131 - DNA, 360 bp, Glycine max
  Clone ID: LIB3139-028-P1-N1-F2
agcgagtgagagtgagtgagtggttctcttgcagcagcaaggtttagtgacaccaaacagacgggaaatgggtcgtggggtcagtgctggtggtggacagagttccttggattatctctttggcagtggggtacctgccagcagtgcaaatggtgctcgcactcaaaatgcaagtgctccttcaccaccggttgataagcaaagtccagcaccagcaccagcaccagcacctgcacctgcagcagcagcagcaccagcacctgcaccagcaccagcaccagcaccagctgataagcaaattccagctggaattcctggaagtctcaaaaacaattaccatcgcgctgatgggcaaaactg

SEQ ID NO: 41132 - DNA, 89 bp, Glycine max
  Clone ID: LIB3139-028-P1-N1-F3
gagctatgacggcgcatgcacccctacctaaacttcgaaattcgcttcaagaacaaaaagttccaattttgtccattgcatataaggcg

SEQ ID NO: 41133 - DNA, 267 bp, Glycine max
  Clone ID: LIB3139-028-P1-N1-F4
ctcgagccgaatcggctcgagaaatgataatattgatcggactgttgagcattgatgggttgggtttacaaggagcaggtaaagcttttccaaacaagattgtttttgatgataagcttgtgttggctaacacacaagaattctttgatggaaattttccagtggattcttggttaccaatttttgtgaattgtctttatcctgtaagtcaattacctttagaagctgttgttgtaaatgttacatgtgatagtctacggggggggg

SEQ ID NO: 41134 - DNA, 359 bp, Glycine max
  Clone ID: LIB3139-028-P1-N1-F5
gaagccaaagccgtgggcctttggcggctttacctggcctgcaacggtaagttactgtatccaacgaaactcccaacttgtttcccctgtcttctagatccttccctcggtccaccccgaaaccactttcacgtttcccttttatttttttgttttcccacttcgctggaatttcccatatatagtcacattgattctggaaccttctaaactctccatacccatcctcaactaccattattattgccacccccactcgcgagtgtattggattgagatcttaaaagaatattttggcagaaaaaactcccgcgtggatctttgctcatttgaaattcgatggcgaagttcggcgaggg

SEQ ID NO: 41135 - DNA, 192 bp, Glycine max
  Clone ID: LIB3139-028-P1-N1-F7
gtttgcctatactgcaatgaagtgcgtggctggccgcggcattgatagggcgggcatgcctgatgtcttgtggaaccttgaatttgctttgcagctgcaagaaagtgccgaggaaagtggcaacggctttggtgacattcactgtgaagcggacgtcattttacacacattctaaaggaaaggactccaatc

SEQ ID NO: 41136 - DNA, 336 bp, Glycine max
  Clone ID: LIB3139-028-P1-N1-F8
aaaggctgtttaatggttaaaattgtgatgtctgggaatgcagcagtcaaaaggagtgattgggcctcattggtacaagtgtttttaacaaacagcaacagtacagagcatttcgatgcatgtaagtggacaaaatcggaaccacattcctgggaattgatcttcccaatagaggtatgtggtcctaataatggttttgaaatgtggaggttcttgagtgggcaaatcaaacttcatggcacttgagttttcttattgacaatcccgaacagtgtacaattttttgtttttttttggggaatttctcaagattttggaaattgctggtaattcttt

SEQ ID NO: 41137 - DNA, 350 bp, Glycine max
  unsure at all n locations
  Clone ID: LIB3139-028-P1-N1-F9
gaaaatgccaaacaatctagcatagcatgaaaacattcattgctcagtcgtcatacttctacaactaacatatatatgtcgaaacaaaaaagtctaacatgtgttgaatctcaatatccaatagtattatttaccagaagctgcagcgaactcaaaactaaccacgatcacctgcctccaaacctgtcgattctccggcggcgcaactcatccaaaggaagcccatcagaacgggagctcctctgaaaagaggacactccattgacaaccctaatcgtnccacacatctcacacactctcagggaaccaatgntgttgtcataggtacacgtctggcatctncacgccct

SEQ ID NO: 41138 - DNA, 360 bp, Glycine max
  Clone ID: LIB3139-028-P1-N1-G10
atcatcaaacccctcgaaataggaacactacagaattagaagcacagcagagacagactcactcacacacacacaacgttgttactttgtgagagagagagagaaagagattggttgtgttctgctactatggcgagcaacagagagagagaagaatcgctgacattcacaatcccttcttcctcttcccattcttcccccatcaccgtctccgaccaactcgacagttacctcgccgaccccagaagcgcctccggaagcttccagaacgacggccttctctcctccggagacgcctccgccgccgatcccgacttcggtttctcccgccccgatttccggcagagccccctcgtcggc

SEQ ID NO: 41139 - DNA, 359 bp, Glycine max
  unsure at all n locations
  Clone ID: LIB3139-028-P1-N1-G11
ctgaaacaatgaaacattgagttgcaagttactgtgtggaatgttcttctgataataataatgaagtgtttctatttctcaaacggaggagaagacgaggattccgtggcgggagcggcgccgccgagttcgcgcggcggcggctccacctcgcgggtgtcgtgggcgcgttcgctgagcctcatggacacgcgcagcaccagccgctcccacttcgactccgaatcaacggagttctccgacacggtggacttccaccacttcctggcgcagcgccgcgccaaccacctncgcctcttctctttctccgacctaaaatccgccacgcgcgccttcagccgcgccctcctcgtcggcga

SEQ ID NO: 41140 - DNA, 360 bp, Glycine max
  Clone ID: LIB3139-028-P1-N1-G12
gagcacgcttgaccacatattccttcccttgaaagttcccgtttgctcaacaacacttccaccgcaaccatgaaggccaccaccctcgctacttttgctctttccgccgtgagcgctctggcagcgcccaccaagaccttcgccaagcgtgccgccatcactgacggccccgacgtcggctatgccaccctgaacggtggcaccactggcggtgctggcggttccaccaccaccgtctccagcctggcccagttcaccgctgccgccgaggctgatggcgccgccgtcattgtcgtctccggcaacatctctggcgccgccaaggtccgcgtcggcagcgacaagaccatcatcggcaag

SEQ ID NO: 41141 - DNA, 362 bp, Glycine max
  Clone ID: LIB3139-028-P1-N1-G4
aaaaaaaaacgtgattcgctcttctcttcgaataaaccacaaaaccaacaaacgagaagaggagtgagagaagatggggttgtcgttcacgaagctgttcagcaggttgtttgcgaagaaggaaatgaggattctgatggtaggtctcgatgctgctggtaagacaaccatcttgtacaagctcaagcttggagaaatcgtcaccaccatccccaccatcggatttaatgttgagactgtggagtacaagaacatcagcttcactgtgtgggatgttggtggtcaggacaagatccgtcctctgtggaggcattatttccagaacactcagggtctcatttttgtggttgatagcaatgata

SEQ ID NO: 41142 - DNA, 353 bp, Glycine max
  Clone ID: LIB3139-028-P1-N1-G6
cattggttccctgactgaaacgtagccattctcctaggggatcgatattacaaaaatatacactacctaaaaaaaaaaaaaaaaaaaaaaaaaaaaaaaaaaaaaaaaaaaaaaaaaaaaaaaaaaaaaaaaaaaaaaaaaaaaaaaaaagggggggcccccctttttttttttttttttttttttaaaaaaaaaaaaaagggcccattaaaaaaaaaaaatttaaaaaaacccaaaaaacataaaaagggttaaaaagggaaaaaaagggtttaaaaaaaaaaaaaatttttgtaaaatttaaaccataaggaaaaaggctcccctatattaagggaatcaaatgcctgcac

SEQ ID NO: 41143 - DNA, 356 bp, Glycine max
  Clone ID: LIB3139-028-P1-N1-G7
gattttgaagaagaaaggggttgtgatcctcccagacatatttgcaaattcaggaggcgttacagttagctactttgagtgggttcagaacatccaaggtttcatgtgggatgaggagaaagtgaacaatgagctaaagacctacatgaccaaaggtttcatagatgtgaaggaaatgtgcaaaacccatgaatgtgatcttcgtatgggagccttcaccctggcagttaaccgtgtcgcacgtgctactgtccttaggggctgggaagcttgacatccattgcttctgctttcaataaattaattaaagagctcccactctcagcaacacttcacaaagtttttgttgctttcaa

SEQ ID NO: 41144 - DNA, 353 bp, Glycine max
  Clone ID: LIB3139-028-P1-N1-G9
attatttctttgtgattctctctctctacactatccttgctctagtcttccttttctatgccttgccctttcttcgggcaaagttgtgtttccattttgtttccgagttgacttgctcaatatcccaggataagtgtgtgttcttatgaaggttgcagtgctatggagtctatagatttcatgctgcagcttcattagataccaattttggtgaatcatcttgatagcttgttcttggatttttgttttggggtgttgatggagatgtttatgggtggccaaattttcggtgctggtgttattattgctagtttctttctgctgatcctctgcggcatgggttgggggactga

SEQ ID NO: 41145 - DNA, 359 bp, Glycine max
  Clone ID: LIB3139-028-P1-N1-H10
gagcgagcagtttcaaagagaggatttgggattgggaaggcgagggattgcgctgcgtctcttcctcttctctttcgattcatccctcattcataatcttccaatccaacaacctcagcctcacactcacacatacacacatctgaacgcgtatcgtccctcccatggcttcaaagcgcatcctcaaggagctcaaggacttgcagaaagacccaccaacttcttgcagcgctggtccagtagctgaggacatgttccattggcaagcaacgattatgggtcctgctgatagtccttatgctggaggtgtattcctagtcactattcactttcctccggattatcctttcaaacctccc

SEQ ID NO: 41146 - DNA, 359 bp, Glycine max
  Clone ID: LIB3139-028-P1-N1-H11
aattcttctaagctctactaaaaaaagatacatagaaacaatcgaaattatttattattattaaagcaacatggttttgtcatggacaaaagggagagtgttccggcgtgccagaaagggtaaggagttgaaatattctggtggcgacatggagatagagattgcgatccccacccacttccggtgcccggtaaccttggacatgatgaaggaccccgtgaccgtttccacgggcataacctatgaccgcgacagcatcgagaagtggatcgagtccgggaaccgcacgtgcccggtcaccaaaaccgagctgaccagcctcgacgacatgatcccgaaccacgccatccgtaggatga

SEQ ID NO: 41147 - DNA, 357 bp, Glycine max
  Clone ID: LIB3139-028-P1-N1-H12
ctcatccctattatatatttgagtgcagggattgtagcaaccatgccatctatcacaagctatctgaggcgtggattggggtggcactttcccaaagtggtcggttttgagctcttcacatccctggtgatggcttttataagctggcaactgttttctgtatgtcagagaccttcagtgtgagaaagctcattacatactgatcgaatcctgcttaactattttctggctagagttttgatccagggtcatctgcttttttggcagctgcaatgctgtttctttaaattccataaatgtttttatcaattttagtttctttttcttaccagtttgatttaattaatttaacacgct

SEQ ID NO: 41148 - DNA, 352 bp, Glycine max
  Clone ID: LIB3139-028-P1-N1-H2
ccttcgacttcaacactcctactcctactccactcactctctttctctttcccttgctagcttccttcctttaattttttccaaatttatctttccttaccatcaatgcctatggcaccgccaatattgctgccattctttctgtcctttctttctctctgcctcctcatcaatgcaaacggagtgatgcgttcttttcaagagaagaagatattcaacgtgcaaacgttgcagaacaaacaccaacttggtaaccaggcttgcctcctcccggaatcaagaaaggagaaaggtgctattgtactggaaatgaaggacagaggacattgctcagagaagaaaattgattgga

SEQ ID NO: 41149 - DNA, 360 bp, Glycine max
  Clone ID: LIB3139-028-P1-N1-H4
cctgctgttggcttgttgttcaaggatggcaatttgtaagaaagatgtttggagagttgaatgtggaatcccttctggatttccgctcacagttatttgcaatagcatttttaatgagatgctcattagatatagctatgaaaaattactgcgccaggctaaagctccaagtatgtttttacaatccttcaaaaattttgtttctttgtgtgtgtatggtgatgataacttaattagtgttcatgaatatgtcaagccttattttagtggttctaaattgaaaagctttctagctggtcataatatcaccattactgatggtattgataaaactagtgcaactttgcaatttagaaagtt

SEQ ID NO: 41150 - DNA, 362 bp, Glycine max
  Clone ID: LIB3139-028-P1-N1-H5
gtgattgttgtgactcgttcttcttcgtcgttatcttctgtcttttgttgtttgcgtgtttgttttttctctcacctgaaaatgtcttgctgcggtggtaactgcggttgcggaagcgcctgcaagtgcggcaacggctgcggaggctgcaagatgtacccagacttgagctacaccgagtcaaccaccaccgagaccttggtcatgggagtggcaccagttaaggctcaattcgagagtcgctgaaatgggtcatcccgctgtgaacgatggctgcaaatgtggagctaactgcacctgcaacccctgcacttgcaagtgaggtgttggagagctaaagcttcaagcagaaatggccctta

SEQ ID NO: 41151 - DNA, 363 bp, Glycine max
  unsure at all n locations
  Clone ID: LIB3139-028-P1-N1-H6
atagaagagcnatgacggggcgggggcgcgtaagtaaaggnnnnatttngtttgagaattcttttaagctctactaaaaaaagatacgtagggactttttnnaaaggtgggggggttatttaaaaaaacattgtttttgtaattgaaaaaaggagagggtttcggcgtggcaaaaagggtaaggagttgaaatattcttgtggcgacatggagatagagattgcgatcctcacccactttcggtgcccggtaaccttggacatgatgaaggaccccgtgaccgtttccacgggcataacctatgaccgcgacagcatcgagaagtggatcgagttcgggaaccgcacgttgccggtcaccaaa

SEQ ID NO: 41152 - DNA, 346 bp, Glycine max
  Clone ID: LIB3139-028-P1-N1-H7
ctagagattgtaacgcgcttctcaattctgtaggcggctactattaaaggagacatggtgactgctcaatttgttttcgggcttaccagcaaccacacaattacttggtgtggcccccacgcccacatctacatcggtaaccttaacttggattcgaggatggagtatgtgaactttggtgccaccgttgtaatgagttcaaggttggataatgctgaagaccagagagaagccatgaaccaaaccatgtaccatcattaccactctgatgactactagtaactagtgttactggacttaaactcttcacatacatgactgatctatatatatatatatatatata

SEQ ID NO: 41153 - DNA, 354 bp, Glycine max
  Clone ID: LIB3139-028-P1-N1-H8
agctggtgcagtttggagagattcaggaaaaagttgtattgaaattttcacaagaggaatttcttacagcttggtcaactcaggtgcgtcctgcaacaactctgttggctgatgggtgtccatatttgtatgctatggtgcatgatagttcagtgtctacaataccaggtgattttgtcattggtgttaagttgacaaccataaacaatatgtgtgcatatgggcttaatcctggtatttcaggttctcgtcttttgggcaccattcctcagtccatttcacagcaaactgtttggaatcaaatggcaacagtgagaacaccattgaattttgattctagcaagcagagctttt

SEQ ID NO: 41154 - DNA, 204 bp, Glycine max
  Clone ID: LIB3139-029-P1-N1-A1
gtctcacttcaagggcaagtaccatgatgagcttagcgccaatgctacgtacattggcgctcctgcaaagggtattcttgctgctgatgagtcaacagggacaattggcaagcgtttggccagcatcagggtatagaacattgaatccaacatgcgtgctcttatggagctgcttttcactgctcctggtgttctcaatatctc

SEQ ID NO: 41155 - DNA, 351 bp, Glycine max
  Clone ID: LIB3139-029-P1-N1-A10
gcatttcctcgtttttttcttcccttttctctttcgccggcgacgatctcagattgcggccactcctctcgccggcgagcccttactcttccctcctccgtcgagccctctccgattcgaatcgttcccagcctcgcaccaccatgaatcccgaatacgattatttgttcaagcttttgctgatggagattctggtgtaggcaagtcatgtttctcctgaggtttgctgatgattcataccttgacagctatatcagtaccattggagtggactttaaaatccgcactgtggagcaggatgggaagactattaaacttcaaatttgggacactgcgggtcaggaacgtttc

SEQ ID NO: 41156 - DNA, 345 bp, Glycine max
  Clone ID: LIB3139-029-P1-N1-A11
ctcgagccgattcggctcgaggatgataacttaattagtgttcatgaatatgttaagccttactttagtggttctaaattgaaaagctttctagctggtcataatatcaccattactgatggtattgacaaaactagtgcaactttgcaatttagaaagttagcagattgtgattttctcaaggaaactttaagcagatgtctaatgttttggggtggctcctgaggacaaggcgagtttatggtcacaacttcattatgtttcgtgtaataatctggaaatgcaggaagcttatcttgtcaatctcgtaaatgtgttacgagaattgtatttgcatagtccaga

SEQ ID NO: 41157 - DNA, 296 bp, Glycine max
  unsure at all n locations
  Clone ID: LIB3139-029-P1-N1-A5
gaatgctcctgattcaaatgataatattgatctactgttgagcattgatttgttgggtttacaaggagcaggtaaagcttttccaaacaagattgtttttgatgataagcttgtgttggctaacacacaagaattctttgatggaaattttccagtggattcttggttaccaatttttgtgaattgctctatcctgtaagtcaattaccttcagagctgtcgttgtaaatgttacatgtggtagtggacgtggtggnttttcagctagtcattacattaccattactgttggtatt

SEQ ID NO: 41158 - DNA, 359 bp, Glycine max
  Clone ID: LIB3139-029-P1-N1-A6
gccagtaattgataatgcaaacgcgtatccagagatgaaggccatttccactgaaaatgggagtcatgttggaactcaggataaggatgttgtcattgaaggctttggctcagttggagtatatgaccaatgggttgcacctccagtgtctggtcaacgtccaaaagccagatatgagcatggagctcagtcgtgcaagataaattgtacatatatgtggaaaccacaatgggcggtaccctaatgatctccacgttctagaaatttgaagaaggacttctgggaagaatatagaacttgaggttgttgaatctactacctcatcctcaataacattcctttgggcgggacattctttg

SEQ ID NO: 41159 - DNA, 365 bp, Glycine max
  Clone ID: LIB3139-029-P1-N1-A7
ctcacgcgctcctatattcgctcctccaccggcgctgtctcgaacaaccacagcacgatcttcatcacatggcaaacgcagcatctggtatggcagtccatgatgactgcaagttgaggtttttggagctgaaggcaaaaaggacacaccgtttcatagtttttaagattgaggagcagcagaagcaggtattgtggagaagcttggtgagcctgcccaggctatgaagatttcactgccagccttcctgctgacgagtgccgttatgctgtttatgattttgagtatctgactgaagggaatgtccctaaaagcagaatttttttcattgcgtgggcccctgacacatcaagggtgaggagcaa

SEQ ID NO: 41160 - DNA, 273 bp, Glycine max
  Clone ID: LIB3139-029-P1-N1-A8
atttgtttctggggatggtgaagagatgacattgattccgggaaccagtgttgaagaggcttacaacaagctaatagttgaacttgagaaaagtgttcccacattttgttggcattgaatgtcccaaggatgaaaaacttcctcgtcgcaaaatttttgacaaacctaagacgcgctgcttcactatttccctatggagtttaatcttgtggtccgtagaagtttttaaattttgtgaggttcattatgaagaaaagggacaagcttagttgt

SEQ ID NO: 41161 - DNA, 355 bp, Glycine max
  Clone ID: LIB3139-029-P1-N1-A9
agactgtgaatattggagctgtaatctaatacacgagactagcagttctttggcgatggatccttttgagtgaaaaaaaccttgtcttctcatcagctttctttggagagatcttaaagacgacattgactgctaacaacaataaagtggatcaatcattaaaggcttacttcttcttcttgttctcttcttcttcttcttcttctaacaacaatagatcccatctttcccactcatgaagagacttaacagctcagattcttccactgccctcatgacaatttttccatcatcatcaacagaggaacatagtccgaggaacagccaccacatgtatggcagggagttccgatcg

SEQ ID NO: 41162 - DNA, 308 bp, Glycine max
  Clone ID: LIB3139-029-P1-N1-B1
aatgaagtcatggaaatagctttagataggaaattggagcagcaaatttataatgccataaatcctcgcttccttctgcaactgacaaatatactatttaaagagatttcatctgtcaatggttcagattatggacccaacgatagagatgttacagctgttgatggggtttgtgggtttttgaatgttacttcaacaaactgccacttgaacggattatacagtgctagcttacagaactgaacttgttccaacactttggaattttatgaagcggtgtcatgagaaccaaaaatggtcattacact

SEQ ID NO: 41163 - DNA, 350 bp, Glycine max
  Clone ID: LIB3139-029-P1-N1-B11
cctgcttgcacaaaagcaatgactatgtcatttaatccaaacccgtgttctgatgcatggagtttggaatttctgaagcgtaccggatttcattgtgatatcatttgtgtcactggatggactgccaccccaatgcaggatgttcaggttacaattgattggtttatttcctctcaggaatggttcccaggacctattgtgttttaaatcccaaaatccttttgtgttaaataggtggatgggaaaactgactttccctcaggcacttcccgaagtgttaagagaatgcctttttctatagggggaggagctggtgccaagaatgctattcttatgaatatgccaaatgc

SEQ ID NO: 41164 - DNA, 353 bp, Glycine max
  Clone ID: LIB3139-029-P1-N1-B12
gagtggttctagtaattcagtgctgctagaagatggaaactagtgaatggcatatcgagcgaagatctagcttcggctctgaatcccccttagcaagagaggcaggaaatgtgcctgaaactgggtcactctctattgtggtgcttggtgcttctggtgatcttgctaagaagaagacatttctgcacttttccacctatacctgcagggttcttaccaccagatgaagttcatatttttggctatgcaaggacaaaaatctctgatgatgaattgagaaaccggttgcgcggctatcttgttccaaagaaaggtgcttccccccaacagttggaggatgtagagaagttttt

SEQ ID NO: 41165 - DNA, 363 bp, Glycine max
  Clone ID: LIB3139-029-P1-N1-B3
acgaatcgagccggtgatggtgctccgtgtcgacaaggaaaagggttacatcgatctcagcaagcgcagggtctccgaagaagacatccaggcctgcgaggagaggtacaacaagagcaagctcgtccactccatcatgcgccacgtcgccgaaaccctcaacatcgatttggaggaactttatattcacatggatggcctttgtatcgcaaatatggtctgcttttgaggctttcaaaataattgtgactgatcctgatactgttttaagtactctcactcgtgaagttaaggaagttggccctgacgggcaagaggtgactaaggtggtgccagctgtatcagaagaagtgaaggattctc

SEQ ID NO: 41166 - DNA, 355 bp, Glycine max
  Clone ID: LIB3139-029-P1-N1-B4
ctcgagccgaatcggctcgagttttgttggagatctcgtgtttgaagtttctaagatgagttctccctacattaaatgtacagtctctttcttcatagcatttggaaatttggctgatgacaccatcaattttgaggcttttccccacaagctggtgcagtttggagagattcaggaaaaagttgattgaaattttcacaagaggaatttcttaagcttggtcaactcaggtgcgtcctgcaacaactctgttagctgatgggtgtccatatttgtatgctatggtgcatgatagttcagtgtctacaataccaggtgattttgttattggtgttaagttgacaaccataaacaa

SEQ ID NO: 41167 - DNA, 357 bp, Glycine max
  Clone ID: LIB3139-029-P1-N1-B5
gaatgaatcacatggacttatagttccccttatttaggtaacagcacaggatatttcaacaatgattcgctgtggacaaaagaccatcatctttctcatcaataatggaggttatacaattgaagttgagattcatgatggtccatacaatgtgataaagaattgggactacactcgctttgtggagctatccataatgggcaaggcaaatgctgactgccaaggttagtataaatttaataatgattaaatatggtttagtccttataaatatggttaaatttggttttagttctctaatttttttttcattgattttgttcttaaacaaaatttaaattttatatactatgataa

SEQ ID NO: 41168 - DNA, 329 bp, Glycine max
  Clone ID: LIB3139-029-P1-N1-B6
ctgaacctttacacacgagcactagaacagatttatgcgatggcgcttgctaagaaggtggctgccttcgatcctcatgacctgttaaggtttttgagttagagctacaccttacctaatttccgcagaatcaactctgggaaccaatctgtttaagaaaaaacatatggcttcgaacagaatggcagcgatgtcaacggtaacgggaccgtagcaacggactggctaagattcagacgcacactatgcatagcggaatatgtcacgactacagcagaccaaccgcaaaggctcaaaccatagatgagctaaactcgctgcagaagaag

SEQ ID NO: 41169 - DNA, 356 bp, Glycine max
  Clone ID: LIB3139-029-P1-N1-B8
atttggcacagtggcaaattaaggaataagttaaacaattaaaaactcaaccaaagaataaatagtagattttgtagcctttgtagacaaccacacctaatgtgtacaatggaccgatggagaaaccgaatttaattgtttaacttattccttaatttggcacagtggcaaatttgtgccttggtgacagttggtcatagattcgaatctagaaaagtctctttgcatatgcaagggtaaggttgtgaataatgacccttttccataacttcgcatagcgaggagccttcagacattggggtatactaattttatcccttaatttgggacctcattgtcactttttaaccttgcac

SEQ ID NO: 41170 - DNA, 359 bp, Glycine max
  Clone ID: LIB3139-029-P1-N1-B9
ctcaactcaaaactcaaattatttggtttctgctctgtaaattccctctgctgcttaacaacatccatcttctccaaaacaaaaacaaagaaatatctaaaatctggaacttacgctgatccataatttgttgcttttcttccttcgtacaatgtcagaactttagcatcacctttttgcctttcctcttactaactcagataactaccgccacctgacttcaaaatctagacccaatctatctgaaaattccaacaaaggatcgatggcaactcctagagccagtaaagctagcaaagttgtatccaaatcagaatctgagtcaccatcaccactgcaaaattcgcgactttctgtgg

SEQ ID NO: 41171 - DNA, 362 bp, Glycine max
  Clone ID: LIB3139-029-P1-N1-C1
cctcgctcagcgggccctgggtcgtcgtcgcggccggcgccgtccagtgcttcgctggcttcatcttcatctgggcctccgtcgtgggcctcgtgagcccgccgcccgtgccggtcatgtgcttcttcgcgtggctcgcgtctaacggtcagaccttcttgaacaccaccaatgtcgttaccggcttgcccattttccctgagtccagcgcacccatatggtattatggaaggatttctgggactgagtggagctatcttggtccaaatctaccatacgttttttgatggggacccagcaacctaccttttgatgcttgctgtgttgccttccgtgatctgtgtgttgcttatgttctttct

SEQ ID NO: 41172 - DNA, 340 bp, Glycine max
  Clone ID: LIB3139-029-P1-N1-C10
tgacactctggaggctttctttctgttgcctatacccatgcatgcagatttgctggctggattgatgtctggtctcgacaaatctctccaacagtacattttgaaagccaaatctggctgtggtagccatagtagcttcatcccaactttgcctgcattgactaggtgttcaacaagatcaaaaatggtgtttttaggaaaaatgaaaagcacaagtgactcagaggaggaaagcccatgttggaaccactaatggagacaattcagttgataaaacccagatgtgtgtttgcatcaatactatgcagcgcattcgcatggagttaggggttttggaaaa

SEQ ID NO: 41173 - DNA, 349 bp, Glycine max
  Clone ID: LIB3139-029-P1-N1-C11
ctcgagccgaatcggctcgaggaactgcaaagggcgtctccagcctagtttgttctcagatcttcttcttccatggaccagtacgagaaggtggagaagataggcgagggaacatacggcgtcgtttacaaggctcgcgaccgcgccaccaatgagacaatcgctctgaagaagattcgcctgagcaggaggacgaaggcgttcccagcccgccattcgcgagatttctcttctcaaagagatgcagcataggaacattgttaggttgcaggatgtagtgcacagtgagaagcgattgtatctggtttttgagtatctggacttggatctaaaaaaacacatggattca

SEQ ID NO: 41174 - DNA, 351 bp, Glycine max
  Clone ID: LIB3139-029-P1-N1-C12
ctcggtggaggaatcttagtggacaaaactggagattggatcacacttatacaaaattctccaattagtaacttgttgagagttgctgcttggaagaaaggctgtttaatggtcaagattgtgatgtctgggaatgcagcagtcaaaaggagtgattgggcctcattggtacaagtgttttaacaaacagcaacagtacagagcattttatgcatgtaagtggacaaaatcagaaccacattcctgggaattgatcttcccaatagaggtatgtggtcctaataatggttttgaaatgtggagttctgagtgggcaaatcaaacttcatggcatttgagtttccttattga

SEQ ID NO: 41175 - DNA, 352 bp, Glycine max
  Clone ID: LIB3139-029-P1-N1-C3
gttccctggttcatccatttaatgtgaaccaaacaaaatcacaaagcgtttttgcgttcttcatcttcttctacctttcgccaattcaggaatccccaaaaccctagatcgaacgctgccactaccgtttcgcgattctcggtggtggaaaatttccggtctctgttccgaaattcgaatatctgcgattttcctttctctcgctctgatttcgtttcagtttctagggtttctgtgtttctgatttggtatttcggaaatgggaagcagaaaggaagaagagaggaacgagaaaattatcagaggtctcatgaagcttccgccgaatcgaagatgtatcaactgcaacagc

SEQ ID NO: 41176 - DNA, 354 bp, Glycine max
  Clone ID: LIB3139-029-P1-N1-C4
tggaggagtgacagtgtggaaggtcttctcttgtcttgctcgcgatcggagactttgaaaccctcccttccttctcctttcacctattcatcccaagcattcgacaatgtctccgttctcgaagctcttgtttctgatactgatggtgttcgtctcatccgcgatcgcctccgacgacgaaagaggagcgaattggtgtccctgcaatcgagaccaaatcgggcctaatccggctgaacgaccaatccctggcccgcttcctcaccgccgtgaaaacccctcgcccttactccatcctcctcttcttcgacgcggcgcagctccacgacaagccggagctccgcctcacggagc

SEQ ID NO: 41177 - DNA, 353 bp, Glycine max
  Clone ID: LIB3139-029-P1-N1-C5
gaagtagaaggatacttttcattggttgtggtacaagttataatgctgctttggcagctagacccatcttggaagaactttctggtgttcctgttactatggaaattgctagtgatctattggatcgggagggaccaatataccgggaggatactgccgtttttgttagtcaatctggtgaaactgcagacactttacttgcactgcaatatgtttagacaatggtgcattgtgtgttgggataacaaacactgttggtagtgcaatagcaaggaatacacattgtggtgttcatataaatgctggtgctgagattggtgtggcaagtaccaaggcatatacaagtcaaatag

SEQ ID NO: 41178 - DNA, 352 bp, Glycine max
  Clone ID: LIB3139-029-P1-N1-C6
accactttcttttttcccgcagtcatgggcaaggtcaagatcggaatcaacggatttggaagaattggccgtttggtggccagggtggctctgcagagagacgatgttgaactcgttgccgttaacgatcctttcattaccaccgattacatgacatacatgtttaaatacgacagtgttcacggcactggaagcatcacgatgtcaccgttaggatgagaagacccttctcttcggtgacaagccagtcactgtttttggacacaggaaccctgaagagatcccatggaagtcgactggagctgacatcattgttgagtccaccggagttttcaccgataaggataaggct

SEQ ID NO: 41179 - DNA, 301 bp, Glycine max
  Clone ID: LIB3139-029-P1-N1-C7
ccttttgttatatgcagttcttccctgcgccctataatgatgaaggatggggtccatatgcatatttccgggcaatggaggaatcacgagcgaatgcaaatattaatcgggaattaccagttgggcaggccatggaggatcgggtaacgaatcaagaaccaaggagaaatggtgataccacctttacccttactcttaccgtagcccaaccttggagccatggaaatgggacagaagtaatagtcttctatagcactaatcttctccctagctacctagttccttacttttgtgtatactt

SEQ ID NO: 41180 - DNA, 302 bp, Glycine max
  Clone ID: LIB3139-029-P1-N1-C8
aaaaaatttaaatttaaaaaaaaaaaaaaaaaaaaagaaaaaaaaaaatttttttttgggctataatatttattataaacctaaaaatataaaaataatataaaatatattaatttaatatttaataaatatttaaaaaaaaaaaaggggccgccccccccctttttgtcctctccccccttaatttattttggtcccgtccttttggtgttcccattttttcttttagtggtttcttttaaactttgccgaatcctatgtaaaactttttttccttgggaataatttttttacccccttcc

SEQ ID NO: 41181 - DNA, 316 bp, Glycine max
  Clone ID: LIB3139-029-P1-N1-C9
ggatgattaatgctcctgattcaaatgataatattgatctactgttgagcattgatttgttgggtttacaaggagcaggtaaagcttttccaaacaagattgtttttgatgataagcttgtgttggctaacacacaagaattctttgatggaaattttccagtggattcttggttaccaatttttggaattgtctctatcctgtaagtcaattacttcaaaaagctgtcgttgtaaatgttacatgttgtaatgggacgtgggggtttccccccccattttttggttttttttgtagttaaaaaatttttttttta

SEQ ID NO: 41182 - DNA, 140 bp, Glycine max
  Clone ID: LIB3139-029-P1-N1-D1
ttaagattttatctaaaagcaattatggtgaccaagatgcagttgcatggactgatttagcagcaactttagactgatcggcagcgtacatagataaatggggtaccatacgactgcatctacaacaaattctggcgtgt

SEQ ID NO: 41183 - DNA, 347 bp, Glycine max
  Clone ID: LIB3139-029-P1-N1-D11
ccttcaatacccaaaacatcttgttttgtgtctttcgttctttttctctcaacaatggatttccacaccctctcaaggaagcaactccagaccctctgcaagaagaacaagatccccgccaacatcgccaacgttgccatggctgacgctctcgctgctctcaacaaagttgaaggattggtgattttttgaatccaatcgagggggatctggaaccccaagtgttaatcatcgtacggctgttagaacctcaactcaaaggaaaacagtcagagaagaagcagaaggttcgaaggtggaggcctcgacccggcgggttagagttgcagaagaagtggttgagctag

SEQ ID NO: 41184 - DNA, 349 bp, Glycine max
  Clone ID: LIB3139-029-P1-N1-D12
cggtgactgagtcgcggtctcttcccaactcggaactcagtccattccgcatgtctcttcaaaccaaatttcttctgaagaaggagatttgaattcagaattgagtgagaagaagagaatagaaatgggctccgaattgattttcagaggccacgaggctcagcccgtggacgactcgtaccgccgaagccccacaagccctggttcacgtgactcgcccgattcactacatgctccgcgagcagcgactcgtcttcgtcctcgtcggcgtcatcatagcaaccctcttcttcacactcgtcccttcctcatcctcttcaagcgttccgtacgagtctctcccgatctc

SEQ ID NO: 41185 - DNA, 114 bp, Glycine max
  Clone ID: LIB3139-029-P1-N1-D2
aagctgcaagcacaaaaggcactaagcgagaatacccgagcttgtcacacctgccagaaggaatcagacacactcctaaaatgcacacgatgcggcattagttggactgcaata

SEQ ID NO: 41186 - DNA, 347 bp, Glycine max
  Clone ID: LIB3139-029-P1-N1-D3
ggagtttcgttgccttccattggttttctctctcaatctgatcctgatgacagctgatgctgccatacctccagaagtttactgggaaaggatgcttccaaataccccaatgcccaaagcaatcatagactttctaaaccttgatcaacttcctctttggtatggtgctaaggaaacccaatctacgatcaaatattcctgtatgatgctaagaaacccaatcaacagatcaagttcctcctatcttttatggtgataagaaaacccaatcaacagatgaagttccttctatcttttatggtgctaagaaaactcaatcaatagatggagttcctcctatcttttat

SEQ ID NO: 41187 - DNA, 351 bp, Glycine max
  Clone ID: LIB3139-029-P1-N1-D4
aacaaatattattattcaatagaaaagaaagatgagtccaacatgggtttttgtgtgaggtgttgcagcaatgttggtggttgtgagtggacaatcatcagtgaagcctttggtgaagacagtgaaggggaagaaggtgtgtgacaaagggtgggagtgcaaaggttggtctgcatattgctgcatgagactatctccgactacttccagactaccagtttgagaacctcttcgcgaagcgcaattcgccggtggcacatgctgttggtttctgggactaccgttctttcatcaccgctgctgcactgtaccagcctcacggctttggcaccactgggggaaagaccagtg

SEQ ID NO: 41188 - DNA, 351 bp, Glycine max
  Clone ID: LIB3139-029-P1-N1-D5
aaaaacttttatgagatattgggattggagaagacttgcactgttgaggatgtgaggaaatcgtacaggaaactgtctcttaaggttcatcccgataagaacaaagcccctggtgccgaggaagcattcaaggccgtttcaaaggcgtttcagtgtcttagtaatgaagagagtaagagaaagttgatgtttcgggtgaggatgaagcggttacgagcagcgtgcggcaaggccggcggcccgaggttataatggttactatgaggctgatattgatgctgaggagatattcaggaacttctttggaggaatggcccctgcagccaattttggaggattcagttttggacc

SEQ ID NO: 41189 - DNA, 348 bp, Glycine max
  Clone ID: LIB3139-029-P1-N1-D6
caacagttcatagcattttgatgcatgtaagtggacaaaatcagaaccacattcctgggaattaatcttcccaatagaggtatgtggtcctaataatggttttgaaatgtggagttctgagtgggcaaatcaaacttcatggcatttgagtttccttattgacaatcccaaacagtctacaggtttgatattctcttgggaatctctcaagatttgaaattgctggtaatactcttatgccagctttttctgttccacaggctactgccagatcttctgaaaatgcggaatcctctgcatgatctggaattcgtgttttctttcacttgttcgggatgttaattcaat

SEQ ID NO: 41190 - DNA, 353 bp, Glycine max
  Clone ID: LIB3139-029-P1-N1-D7
caaattctggactaaacacgagaaaaatcttgctttgacagaagaggaaaagatggaagtgattagaaatagaggcattcctgctgatgttcttgcaaagcgagctcatgaatttgaaaaacatgttgctcatgaaagcctcaaggatcaaattcctgctgttgacaagttgtattctactaaggtaataagtttgcaaaaattatgaaccttaacaaagtgttgttggtgatcttaaacttcttactgatgggaagttgtatgagggtaagcatattcctgtatctaatattagtgcaggggaaaatcatgtagttcaaatacccttaatggcacaggaggaaattctgtct

SEQ ID NO: 41191 - DNA, 237 bp, Glycine max
  Clone ID: LIB3139-029-P1-N1-D8
aattggtatagaatagtgttttagaaagaagtgtctagcattttgaataaatatgtgatccaagtccattaataggccaaattggtattgggtgggtggattcaatgtggggaagaggaccaaagtttattaaaaggaaagacagggatgcttgccatgccggtaaagcactggaagaactcaaagttttctctacaatgagatcccgacattaaaggagcccagcgcccacagcaa

SEQ ID NO: 41192 - DNA, 228 bp, Glycine max
  Clone ID: LIB3139-029-P1-N1-D9
gtctttgaagtttctaagatgacttctccctacattaaatgtacagtctctttcttcatagcatttggaaatttggctgatgataccatcaattttgagggcttttcccacaagctggtgcaggttggaaaggattaaggaaaaagtggattggaaattttcccagaaggaatttttaccagcttgtcaaattaagggccgtctggaacaaccttggtggctggatgg

SEQ ID NO: 41193 - DNA, 169 bp, Glycine max
  Clone ID: LIB3139-029-P1-N1-E1
gttcggatgcccagagaaaaggcgagatcaacgaagacaacgtcctttacattgttgaaagcatcaacgttgctgcaattgaaacaactctatggtcgattgagtggggcattgctgagcttgtgaaccacccagagatccagcaaaagttaagggatgagattgacag

SEQ ID NO: 41194 - DNA, 351 bp, Glycine max
  Clone ID: LIB3139-029-P1-N1-E11
ccaatatattccattctctctgtgtatttccctacctctcccttcaagatgcagatcttcgtcaagaccctcaccggcaagaccatcacccttgaggtggaaagctctgacaccatcgacaacgtcaaggccaagatccaggacaaggaaggaatccccccggaccagcaacgtctcatttcgccggaaagcaacttgaggacggccgacccttgctgactacaacattcagaaggagagtactcttcacctcgtcctccgtctccgtggtggcatgcagatcttcgttaagacactcaccggcaagaccataaccctagaggttgaaagctccgacaccatcgataacgt

SEQ ID NO: 41195 - DNA, 222 bp, Glycine max
  Clone ID: LIB3139-029-P1-N1-E12
cttggaagaaaggctgcttaatgataaaaattgtggtgtctgtgaatgcagcagggaaaaggagtgattgtgcctcattgaaaccaggagttttaacaaacagcaacattgcacatcattattccaatgaatgtattacaaaattcttaccacattcaccatgataggggagttgaatgatgtatgtttgttctaataactggtttaaaatctgtttttttt

SEQ ID NO: 41196 - DNA, 356 bp, Glycine max
  Clone ID: LIB3139-029-P1-N1-E2
tgttaaccaggtcctcaccagcttttaaatacttaaatttcaatcaatcccaattttctcacattccctttttgccctttctatctctctcgtctttctcccacaatgaacgatcttctaacggcatgcctatcccctaatgtttcacgccaaagctaagggaagtcctattttaatatttacaaacttatgagatttttacagaagctgtattagaaattctttatttgcaatatgtattgaatgcagttagacccttaactttgatttgtacaacgaattgggctgtaaattcaatccttcaattgactgttactgggtcacaaaaactgaatacctgtgcactaatgaaaatt

SEQ ID NO: 41197 - DNA, 349 bp, Glycine max
  Clone ID: LIB3139-029-P1-N1-E3
atctccttctttacttagttcaactcaacccaaggagataattaatatggctctgggaagaggcagtgcagtggttctactactttgcttcttggtgcttcagtctgagatggctcgtgctgccacttatagagttggagattctaggggttggacctttaacaccgttacctggccccaaggaaacgctttagggcaggtgacacacttgcgtcaattatagtcctggggctcacaatgtggtggcggtgagcaaggctgggtatgatagctgcaagacaccaagaggagccaaagtgtatcggtcagggaaggatcagatcagacttgcttggggacaaaactactt

SEQ ID NO: 41198 - DNA, 354 bp, Glycine max
  Clone ID: LIB3139-029-P1-N1-E4
ggcagaaagcaggctcatcctagagttttaaaaatggcagcagcctcctccatgggtctctcttccccatccttggctggcaaggccgtgaagctgggcccatcagcccccgaagtcgggagggtcagcatgaggaagaccgtcaccaagcaggcctcctccggaagcccatggtacggcccagccgcgtcaagtacttgggcccattctctgcgagcccccgtcctacctcactggcgagttcccaggtgactacggctgggacactgctgggctttcggccgacccagaaaccttcgccagaaaccgtgagctcgaagtgatccactccaggtgggccatgctcggggcctt

SEQ ID NO: 41199 - DNA, 354 bp, Glycine max
  Clone ID: LIB3139-029-P1-N1-E6
aaaaatgacccaggtggaccctctggaagaagccaattttgatcaggagctcaaggctgtagtacaggagagtatggaacagcgaaggcaggagctacgaggtcgtcctacattgaacatgatgattccaatgaatgtatttgagggatctgccaaggatcaccatgggaggggagttggtgggaaagtggtgatgaggccctggatgaggaactggaggaaacaaagaggttcaggtgagagttcttgtgaagcgtggaaacaagcagcaaacaaagcatatgttcatcccacggaattcctcactggtgcagagtacaaaacagaaagaagcagcagagcttcaagagaaag

SEQ ID NO: 41200 - DNA, 216 bp, Glycine max
  Clone ID: LIB3139-029-P1-N1-E7
caaatagcaatcaaacacacaaacatggaagaaacatgtagtcgtgctggttttgggaagaaatttactaaagcaaagccttatttgttaaccgggggacttcaatttggtttcgccggaggatacatcttcttcgtcgctagtctcaaccatggaatgagagcgtatgtgttcggtggctatacaatgccattgctgcattggcccttgctcttt

SEQ ID NO: 41201 - DNA, 336 bp, Glycine max
  Clone ID: LIB3139-029-P1-N1-E8
gatttccatgtctcggcccaaaattgttgggttcgcaaaggtggtgcttatactggagaggttagtgctgaaatgcttgttaatttgggaattccttgggttattattggtcactctgaacggaggcagcttttgaatgaatcaaatgagtttgtgggagataaagttgcctatgcacttcaaaaggtctgaaagttatagcatgcattgggaaactcttgaacagcgtgaagctggtacaacaacggctgttgttgctgagcaaacaaaagcaattgcagctaaaatatcaaattgggacaatgtcgttttggcctatgagccagtttgggccat

SEQ ID NO: 41202 - DNA, 354 bp, Glycine max
  Clone ID: LIB3139-029-P1-N1-E9
atttctgagtccaaggaggtcgctaatgatttgatcaccgatgccgtcattgatcaggtttttggtgagaaagcttttgagaaatttggaaaaggtttaatttcattgcatttctccgaccagcaccctggtatacacaaaaagatattgttgttcaagtttgtgcttccagctgctaaggaatggctgatatgactcgactggtggctctgttccgtattatattgacttgatcggacgatacaaattaagttctcaggctcggtctaaaacagaggctgcacgacaaaaggctgctctagaagcacagaaagaactccgaaatgcgcagcaagaagccatgcagagaagaaa

SEQ ID NO: 41203 - DNA, 347 bp, Glycine max
  Clone ID: LIB3139-029-P1-N1-F1
gaaggtttatgttctgctttgaacctgtctggaaccatgcttggatattacccgttgagagtgctaccttcaaaaactgctattgcccctgttaatccaacatttttgcccaggtctgaagatgaaagggagatgtgttcaagaacaatttattgcacaaatattgacaagaagcttactcaagccatgtcaaacacttctttgaatctatttgtgagaggttcaacggttgaggcttcttggagattaccatcattcaactcgaattgcttttgttgagttcacagtgactcatagtgcacatgcagctctaagctgttgtggcgtgattctgggttcactgccca

SEQ ID NO: 41204 - DNA, 280 bp, Glycine max
  Clone ID: LIB3139-029-P1-N1-F10
gcagactatcccaaaccaaaaccaatgttcagaacgtaacaaacaaaagaaaaaacctctggttctccctttgttttctcaattgcccctcctattctcagccttttctgtctctccttcctcttgccatgattggaagtaaagatcgtgttgttgactctgaaggtgaaaactccaggagcagctctcaaggcacaattttgaggccaacaggagtacccagatgaaaaaggtgttgaatttctgagagattcaaaagtgggtggtggtggtgttgatg

SEQ ID NO: 41205 - DNA, 259 bp, Glycine max
  Clone ID: LIB3139-029-P1-N1-F11
aaataagtagagagagagagagggaggatgaggggaggggaggcgagatccacgaccggtatttgcttgatgggaagcgtatttcggcattttcttactcttttctgcacaatatattcaggggtggagaatgcctctatgcactccctcctgactcgtacaatcattttctctcgcgatctagtattatttgctctacactgtcctacccatctaccactttgtgctagatttaaacttcttttttatctttcttaac

SEQ ID NO: 41206 - DNA, 354 bp, Glycine max
  Clone ID: LIB3139-029-P1-N1-F12
ctcgagccgattcggctcgaggcttctaaagcctctccctgcaggtgttgaaatcgatgaactccctaagcaaattgatgatacacagtacccaaaaacattcttctataaagaagaccttcatccaggcaaaacaatgaaagtacaattcaccaagcgtccctatgcacaaccttatggtgttatacatggttaacggatattaaagacactctaaagaaggatatagttttgaagagatatgcatcaagaaagaagcgtttgagggagaagagaagttttgtgcaaaatccttgggaacagtaattggttttgccatttcaaagctgggaaagaacattcaagtactttcaa

SEQ ID NO: 41207 - DNA, 357 bp, Glycine max
  Clone ID: LIB3139-029-P1-N1-F2
ctcgagccgaatcggctcgagcggctcgagggaggttgagtagttcttcatcatagtctgaaacattaaaccttagcaaaactcaacaatgctagacatcaaaggctacctcgtactcttcttcctatggttcatatcaaccattctgatacgttccatcttcaagaaaccacagcgtctaagactccaccgggtcctccaatttcaatacccttttgggacacgcgccatatctccgttcactgctccaccaagcattgtacaagctatcactgcgctatggacccttgatccacgtcatgatcggttcgaagcacgtggtggtggcgtcgtcggcggagacggccaagcagatcc

SEQ ID NO: 41208 - DNA, 150 bp, Glycine max
  Clone ID: LIB3139-029-P1-N1-F3
cgcattagttaattatatgttttatatgtcaatcacaagacattcgattgtgctgaagatccctaacgctccctcccccaatgctctcggctagattggtattcataattatctagctttattatgaaatttaataaacatatttttggt

SEQ ID NO: 41209 - DNA, 356 bp, Glycine max
  Clone ID: LIB3139-029-P1-N1-F4
atgaatttcctgttgcagcagcaacagaatgatacccaaagagcggcagctgcagctctgatgatgagtgaggatttgcataaatttggacgatccaggcttgaaagaaatgatttttctttgaacagtcctggcatggtaaacccagcttccaggcagatctacttgactttcccagcagatagactttcagggaggaagatgtttcaaattcttcagcatatatggtccagtccaagacgtgaggatcccataccagcagaagcgaatgtttggttttgttacctttgtttatccagagaccgtgaagcttattctatctaaaggaaaccctcattttgtgtgtgatgcacgag

SEQ ID NO: 41210 - DNA, 356 bp, Glycine max
  Clone ID: LIB3139-029-P1-N1-F5
cagaggcagaggccagagagtgtggtgtgtgtgtgtgtctctctctttctctgcttttgagtaattaaatgagagcaaaaatgacgctcaaaacagcggcggtggctgtggctatagtgtgcatttctgcctttagcatcactgtggtggctgaagatccatacaggttcttcaactggaatgttcatacggagacatttatccacttggtgtcgccaacagggaatacttatcaacggtcaattcccaggtccagacattcattctgttaccaacgacaacctcatcatcaatgtcttcaacagcttggaccagccatttctcctctcctggaacggggtacagcagagaaggaa

SEQ ID NO: 41211 - DNA, 354 bp, Glycine max
  Clone ID: LIB3139-029-P1-N1-F6
aatgaaaagaagcactcactcgtgaaccccacgcagtgttcgataatcaaatcttctttctttttcttccgcagtcccaaccttcatggattctcactcacacatcattgcttggggctctggtgaagatggtcagctaggaatcggaagcaacgaagagaaagaatgggtctgcctcgtcaaagcctccagccccaccgtattcgctccgtcgcgccggcagcagaaactccctcgccatcgctgacgacggcaaattgttcacttggggttggaaccaaagggccacacttgggcaccctgctgagaccaagtctgagaacaagactgagaacactcccagccaggtcaagg

SEQ ID NO: 41212 - DNA, 356 bp, Glycine max
  Clone ID: LIB3139-029-P1-N1-F7
gaagatttagcaaaacaatggaagaagtgaagctgattgctacacatcaaagcttgccttgtgccagggtagaatgggctttaaggataaaaggtgttgaatatgagtacttaaaagaagacttagcaaataagagttctttgcttcttcaatctaaccctgtccacaagaaagttccagtgctctacataataacaagcctatagctgaatccttgtcatcctggagtacatagatgagacatggaagaagaaccctttgctaccacttgatccatatgagagagcacacgctcgcttctgggctaggtttattgatgagaagtgtgtgttagctgtatggggagctaccgtggc

SEQ ID NO: 41213 - DNA, 327 bp, Glycine max
  Clone ID: LIB3139-029-P1-N1-F8
ctcggacaagggcaagtaattaaaggatgggatgaaggtattaaaaccatgaagaaaggtgaaaatgctattttcaccatccctcccgagctagcttatggtgaatctggttcccctcctactattcctcctaatgctacactccaatttgatgttgagctgctgtcatggactagtgtaaaggcatatgcaaggatggcggtatatttaagagataattactgagggggagaaatgggagaaccctaaggatcctgatgaagcattggttaagtatgaaagtcattctagaaaatggaaagcttttagcaaagtctgatggggagg

SEQ ID NO: 41214 - DNA, 354 bp, Glycine max
  Clone ID: LIB3139-029-P1-N1-F9
atcaaatggcaacagtgagaacaccattgaattttgattctagcaagcagagcttttgtcaattttctattgaccttctcggtggaggaattttagtggacaaaactggagattggatcacacttatacaaaattctccaattagtaacttgttgagagttgctgcttggaagaaaggttgttaatggtcaagattgtgatgtctgggaatgagcagtcaaaaggagtgattgggcctcattggtacaagtgtttttaacaaacagcaacagtacagagcattttgatgcatgtaagtggacaaaatcagaaccacattcctgggaattaatcttcccaatagaggtatgtggt

SEQ ID NO: 41215 - DNA, 344 bp, Glycine max
  Clone ID: LIB3139-029-P1-N1-G1
tgcaatttcaaatctctctgctttctcagccaagcattgccccctttttcgtttcgaatctccccttagacaacaccgatttcgccttcttctttctctttaaactttaggctcgctagggttagggttagggttagggttaggttttcggtgaggcgagagactatgaggttgatgtaggactagctggtttaaacactgacattgtgagaagtggttgtcaaaatcgataactatgtaacctaatccaaaacccatgttctggatgcgtggagattggaacttctgttgctgactgagtgtcattgcgatatgatacgtttcactcgatggactgccacccc

SEQ ID NO: 41216 - DNA, 353 bp, Glycine max
  Clone ID: LIB3139-029-P1-N1-G10
accgctactacggcggcaatgaatacatcgaccagagcgaaaacctctgccggtcgcgcgccctccaagccttccacctcgacgcccaatcctggggcgtcaacgtccagccctactccggctccccggccaacttcgccgcctacaccgccgtcctcaacccccacgaccgcatcatggggcagatctcccctccggcggccacctcaccacggctactacacctccggcggaaagaagatctccgccacctccatttacttcgagagtctcccttacaaggtaaactccaccaccggctacatcgactacgaccgcttggaagaaaaagccctagacttcaggccaaaact

SEQ ID NO: 41217 - DNA, 353 bp, Glycine max
  Clone ID: LIB3139-029-P1-N1-G11
cgcacattttcacggatctaactaagttatcgccatgaatcgccaccacgatcccaatcccttcgaagaagaagaagtcaatcctttttcgaatggcactactgctcctgcatcaaagtcacgtattccaccattagcatctgagtcactgggctttggtcaaaggcatgatgctacagttgaattcctttggatactacaaatgactccaaaaaaaaggtcaagagctagcagcttgggaagcagatttaaaacggagagagaaggaaataaaaagaagagaagaggctgtttctagagctggtgttcctgttgatgataagaattggcctccatttttcccaatcattcac

SEQ ID NO: 41218 - DNA, 358 bp, Glycine max
  Clone ID: LIB3139-029-P1-N1-G2
ctccatttccagctgggtgtatgtttcatagtgaacacggtctcatgaactttgagcatccaacacagaagatgaaagcaatgcctcggattgacagcgagggggttatgtgcggggccaacttcaatgttgactctcagtcaaagatccaggtgatgccacgtgttggaagtgaagctaattgggcacttggggctaacaagcttagctgattctagtccagcatttttctttctaagtggttaaaagtgtaacctaatatgatgagtgtgtgactctttgcttttagcccgtttggatatctgcttttctcgtttggttccattgttgtgtacatattcatacttcaatattgaac

SEQ ID NO: 41219 - DNA, 358 bp, Glycine max
  Clone ID: LIB3139-029-P1-N1-G3
tagatatcgatcattggctgatgagggtttcatgattgttgatcgcacttcactgaatggatctaggaatatgcttgatcagcatagagacatgaggatggacatagacaacatgagttatgaggaactacttgcacttggagagagaataggccatgtgagcacaggattgtctgaggatttgattccaagtatttgacagaaacaatatactgtcatctgagcaaagtcaagaagaagaaacttgtgcaatctgtctggaagaatacaagaacatggacgatgttgggacgctgaaagcttgtggacatgattaccatgtgggttgcataagaaagtggttgtctatgaagaaagt

SEQ ID NO: 41220 - DNA, 354 bp, Glycine max
  Clone ID: LIB3139-029-P1-N1-G4
ctcgagccgctcgagccgattcggctcgagtttctttctgtcaaagtgttgaacttgaagttgcagagagaaaatggattgagaattctctctcttttctctttctcttcccaactttccttccttgggatcattctgcttctttgctatggaagactcagattcagttgctacgctgatagattcacaacttctaagatacagcagctgcaaaggcatttgctgaacttgaaagttaccgagctgttactctgaacttgaaatggaaagaactcgaggaacattttcatggtctggagaaatccttgaagaggcgctttcatgaattggaagaccaggaaaaagagtttgaga

SEQ ID NO: 41221 - DNA, 356 bp, Glycine max
  Clone ID: LIB3139-029-P1-N1-G5
gtagaccatctccaagacggtttacatctatctactaggagctttcttccacaggatgcaagttatgaccatgaaactagacatgcattgctggaattagaaacagctttgatggcacctgatggtgaagatcaaatcaccacatcaagcacttctttgggtgttggcagtagaccaacaacatctgccaaagaaataggtcctggagctctgaggccagtcaagtgatgttgcacatgtagagaagcaccacaaatcagtggaggaagaatcgctgcaaggatttccatcatgcaatttgaaacaattgctgattgtatgtgccaaagccttgtctgaaaacaacatgcaacatt

SEQ ID NO: 41222 - DNA, 353 bp, Glycine max
  Clone ID: LIB3139-029-P1-N1-G6
ctctttctttctgctttgtccaataactcataacatgcccacttggtggggtaaagagtccagcaagagcaaggaccaacaaccgcaagaagaccaccaccacccccctcatggcggaggaggaggcgccgccaccagtgtccttaacttcaatttcaacaagctcaacaagcccaggcccgacaggcctccaagagcttcgacgacgtcgtcagaactcccctcgctgcagccgcgatttcagttcctccgccgccgccgccgtcgaccaaggcctccccttgcctcgcccctctgtctcctccacgcaaagcttcggcatcgagcaaggccttgttttcggatctggctct

SEQ ID NO: 41223 - DNA, 355 bp, Glycine max
  Clone ID: LIB3139-029-P1-N1-G7
ggccaggtatgatgaaattgtgaaggaagtctcttcctacttgaagaaagtaggatacaaccctgacaagattccttttgttcctatctctggttttgagggagacaacatgattgagaggtccacaaaccttgactggtacaagggtccaactctgcttgatgcacttgaccagattagtgacccaagaggccctctgacaagcccctcagcttccccttcaggatgtgtacaagattggaggtattggaactgtgccagtgggacgtgttgagaccggtgtcttgaagcctggaatggtggtgacttttgcaccaactggactgacaactgaagtcaagtctgtggagatgca

SEQ ID NO: 41224 - DNA, 356 bp, Glycine max
  Clone ID: LIB3139-029-P1-N1-G8
taaaatttctcaatctaaaattgcacttcccaagaacacagttggaggaaccattctgcgtagtgatctattggcaaattttttgacagagggcaattttagagcaagtgttgatttgcagcgcactcatcgtattaaaggaatgattaaaatggtggccacagttggtattcctgagaatacaggtatagcattggcctgtgctatgaatagttttttagggggcgcgccagttctgatatttacaccatctgctctcaagactgtgaattatggaatcctgcttgcacaaaagcaatgactatgtcatttaatccaaacccgtgttctgatgcatggagtttggaatttctgaa

SEQ ID NO: 41225 - DNA, 355 bp, Glycine max
  Clone ID: LIB3139-029-P1-N1-G9
ttgcaatatgtggaattgtatcagagagaaaacaggctcaaacccatgcctattatactctgtggtgactggaatggaagcaagcgtgggcatgtttacaagttcctaaggtcacaggggtttgtatcatcatatgacattgctaatcaatacagtgacagttatgcagattctcacaagtggttagtcaccgaaatcataggggaaatattgtggtgttgacttcatttggctttgcaatcccaaccaagcacgtaaacctttaaagacaagttgggctgaagctgtatttagtatactaaaattccagttacgaaaagcatcgttatctgaagatgatgcatttgcctttctg

SEQ ID NO: 41226 - DNA, 356 bp, Glycine max
  Clone ID: LIB3139-029-P1-N1-H1
attttgaactcaatggaaggtagcacaacaagctctgaactccctcctggctttaggtttcacccaacggacgaggaactgattgtgtattacctttgtaaccaagccacctcaaagccatgccctgcatctatcatcccagaagtggatctctataagtttgatccttgggaattgccagataaacagaatttggagaaaatgaatggtattttttagtccaagagacaggaagtacccaaatggggtgaggcctaaccgagcaactgtgtctgggtattggaaggctactggcacagacaaggcaatctatagtggatctaagaatgttggggtgaagaaatctttagtctttt

SEQ ID NO: 41227 - DNA, 354 bp, Glycine max
  Clone ID: LIB3139-029-P1-N1-H10
ctaaggaccttctccaagtccaccccaattcctatgcattggttgttagcactgagaacatcactttgaattggtactctgggaatgaccgatcgaagcttgtttccaattgtttgttccgtatgggaggggctgccattctgctttcaaacaaaggctctgataggagaagatcaaaataccactggttgacaccgttcgcactaataagggtctgatgacaagtgctttggctgcgttgtccaagaggaagattccaatggcaagattggtgtcactttgtcaaaagatttgatggcagttgctggcgatgctttgaaaaccaacatcaccacattggggcctcttgtcctt

SEQ ID NO: 41228 - DNA, 338 bp, Glycine max
  Clone ID: LIB3139-029-P1-N1-H11
gctggggaagtcactaaccagcaagaacctcgtcgagctggcatccaaagggggacagaggaacgccatcaacgttgttctgacatccggttacgtggcagtcgaaggtttatgtatgagcctatgtgggacccacggatactgctcttctgcatttcacgtgatgaaggacaacaacggcaagactacaagttcggttacatctgggtcggaactccgaaacccaatgcccggagcaatgcgcttggtcattccaccaacccatttattggccccagagcccacccttggctgcttccaacaacgatgtgggacttgacggaatggtcataaacctc

SEQ ID NO: 41229 - DNA, 236 bp, Glycine max
  Clone ID: LIB3139-029-P1-N1-H12
gcgagtttctcgcagggactcggcgcgagccgagccgattggcaaagctcgtgcgccatcttagccagtaaggtcgtatcgcagcgggaagattctcccgccgacggggacgacaacgacaacaacgtcggcgacgtgaacggccacaacgccgccgtaacgaatctaaatatcgtacctgtcaaagtgatggtgaaaacatcaagccgattccgcgaagccactcacgatcttcg

SEQ ID NO: 41230 - DNA, 345 bp, Glycine max
  Clone ID: LIB3139-029-P1-N1-H2
aaatatttttagttcctaagtaaaatcaaacaactacacacgtgtttatttatttgtttgttcagaaaaatgatgaggggtgcggaatacgagcgtgtgctaaggtacttcgatgaagacggtgatggaaagatttcaccctcagagctaaggaacagaatagcaatgatgggtggtgaggttatgtgaaggaggctgagatggcgatcgaggcgtggattcggacggcgacgggttgttgtgtttggacgatttgatgaatctgatggaggctgctggagaagaagagaagttgaaggatttgagagaagcctttgatatgtatgatacggagaggtgtgggtt

SEQ ID NO: 41231 - DNA, 356 bp, Glycine max
  Clone ID: LIB3139-029-P1-N1-H3
cggctcgagcggctcgagtgttaacagagtgatttgggagcttttgatatgtcgagtggatccgtgagacgggtttcccgtcaagatatccagctggtgcaaaatctcatagaacgatgtctacaactgtatatgagccagaaagaagttgtggaaacactattagctcaagcaaaaatagagcctgtttcactgaactagtttggcaaaagcttaagaagaaaatgaagaattcttcaaggcttattatgcaagattggttttgaagcagcaaataatgcaattcaacaaattgctggatcagcaagtgcaattaatgcagttacactcaagtactgttgcatcactacctacat

SEQ ID NO: 41232 - DNA, 346 bp, Glycine max
  Clone ID: LIB3139-029-P1-N1-H4
gtttctttctctctctctctctctcccgacattatgtctctttatatcagttgtcggaggctgagtttctaaagcaaaagaaaaagaaagcaaagggttggcattgacccctttgcacaaaggaaaagagggtggtgctgtgttaaaaaaatattgaacttggttggttcaaagttgaaacaagattttattttcccatttccacattttttgggtttgggaggggaagcagaatcctagaattaagaaatgggttgctccataagagagtgttgtgtcttatttttggttttgttggtgtcatgtgctagaggggaagacccttatagattctacacttgggatg

SEQ ID NO: 41233 - DNA, 360 bp, Glycine max
  Clone ID: LIB3139-029-P1-N1-H5
ttgcaaaaagacagagggttaattgtagagtattttggaaggatgtcttacgttgctcataacgttaatcagccccaagagaaagatttgttggagggaaatttttcctttgatattaaatctcgctctagattggaaaaagtttcctctacaaaagctcaatttgttagtggaaaaaccttcaaatatatataattggtgctggttcacattcttcaaagattttcctgaaaaggaagatcaagaaaaacccaaaaagattgatgccagattgagacaaagaatagatcctcaatacaatgaggttcaggctcagatggaaacaaatttgtttaaattgtctcttgatgatgttgaaac

SEQ ID NO: 41234 - DNA, 355 bp, Glycine max
  Clone ID: LIB3139-029-P1-N1-H6
gcgagatctttgtctcttctcttgcttccttcttcaattcatctccgaaccgcgtttctctttttgactcttcccctctctctttctctctactcagtaagaatgtatactaatattggtatgccaccgggggtacctcagcatcatcctcaacctccaatgagctcgcaacctaatctgttcgggaagcatttaattcttctggttcaggactcatcgaggtggattgggtgcgtatggagaaaaaatattaggatcaagctctgagtacgtccaaagcaatataagccggtatttctctgatccccaatactactttcaagtgaatgaccactatgttaagaacaagttaaag

SEQ ID NO: 41235 - DNA, 352 bp, Glycine max
  Clone ID: LIB3139-029-P1-N1-H7
caatccttcaaaaattttgtttctttgtgtgtgtatggtgatgataacttaattagtgttcatgaatatgtcaagccttactttagtggttctaaattgaaaagctttctagctagtcataacatcaccattactgatggtattgacaaaactagtgcaactttgcaatttagaaagttagcaattgtgattttctcaagagaaactttaacagatgtctaatgttttgtgggtggctcctgaggacaaggcgagtttatggtcacaacttcattatgtttcgtgtaataatctggaaatgcaagaagcttatcttgtcaatctcgtaaatgtgttacgagaattgtatttg

SEQ ID NO: 41236 - DNA, 354 bp, Glycine max
  Clone ID: LIB3139-029-P1-N1-H8
ctctccaatacaaaataaccactcactgaatattcggtcgaagatgtccgccgccgaagaagctaaagttcccgccgtcgaaaagccggtggaggaggtgaaggcgccgaagcttgccaaggagaagaaacctaaggctccgaaggaaaagaagccgaaacaggccaaaactgcttctcatcctcatatctccagatgattaaggacgctttgttgctctgaacgagaaaggaggatcgagtccatatgcgatagcgaagtacatggaggagaagcacaaggcggtgcttcctgcgaatttcaagaagatactaggtctgcaactgaagaaccaagctgcgagagggaaactcg

SEQ ID NO: 41237 - DNA, 359 bp, Glycine max
  Clone ID: LIB3139-029-P1-N1-H9
tcagttaataattatttgggtttctcacggaatggtagtgatctggggataaacagaagaataatggaattggaaactgagcttcgtgaggtaaaagaaaagctatggatgcaggaagaagaacatgtagatggatcatctaggggatcaagaagtgagaatactgaagatgtttataccaaatataaatgcatatgaacaagaactgatgactgagaatgagaagttaagactttcagaagaagaaactacttaactgcagattgagctgggaaaatacagactattcgatacagtatatttgcaggctggttttgagtgatcatctatgaaagaacacatcaatgaaggatgagaag

SEQ ID NO: 41238 - DNA, 347 bp, Glycine max
  unsure at all n locations
  Clone ID: LIB3139-030-P1-N1-A10
ctccttgaactcgaatattcactatggcagatgaggtggttctgctagatttctggccaagtccatttgggatgagggtcaggattgcacttgctgaaaagggtatcaaatatgagtccaaagaagaggacttgcagaacaagagccctttgctcctcaaaatgaacccggttcacaagaaaatcccggttctcatccacaatggcaaacccatttgtgaatctctcgttgctgttcagtacattgaggaggtctggaatgacagaaatcccttgttgccttctgacccttaccagagagctcaggctagattctgggctgactttgntgacaataagatatttgat

SEQ ID NO: 41239 - DNA, 318 bp, Glycine max
  Clone ID: LIB3139-030-P1-N1-A12
ctttgttgggagctataagctagtgtatcgggaggagaatatgaaatgcttagggagcttagtggctgcagtactttcacaaacacgggcatgccatcatgcatgctaccaaaggcttcctctcctgaagaaaactagctattgggagacggattcggaggtaaaatgctcaagttataggctcgcgtgggaagcacacaacatccgagcctttaaaaccattcctgaagagtgcgttgaaccaacaaaggactacattaatggcgaacaatttagatcagactctaaaacagttaaccaacaagctttcttttatgc

SEQ ID NO: 41240 - DNA, 376 bp, Glycine max
  Clone ID: LIB3139-030-P1-N1-A3
gaggttcattatgaagaaaagggacaagcttagttgtcaagttggaatcaacccatactccatggaatggactggtttggccaataggttactgagtaagggcaacgatattctgtgttgcgattatgctagttttgatggtttgattaccaagcaagttatgagcaagatggcagaaatgataaacagtctttgtggtggtgatgaaaaattgatgcgtgaaaggacacacctgctgttggcttgttgttcaaggatggcaatttgtaagaaagatgtttggagagttgaatgtggaatcccttctggatttccgctcacagttatttgtaatagcatttttaatgagatgctcattagatatagctatgaaaaa

SEQ ID NO: 41241 - DNA, 65 bp, Glycine max
  Clone ID: LIB3139-030-P1-N1-A5
cacaaaaattcttaaagggttcaacctcaaccggtccttccaaaaaaaaaaaaaggccgaaccga

SEQ ID NO: 41242 - DNA, 314 bp, Glycine max
  Clone ID: LIB3139-030-P1-N1-A6
gagcttgacgtccatgccgcgcccaacgctggattcggctaggccatataattccaccgcttcgaaaagggctcgtgctttcgggttttcgttcgcgaaggaaactctttccttagttatcgcgatggatcggtcccagagggtggagaagccaagagctgaaactccaatcgatgaaaactagatccggattactagtcagggaaggatgcccacctacattacttatgccatcagcttgcttcaggagaaaggttctaatgaaattgttttcaaagcaatggggagagctatcaacagaaccgcgacaattg

SEQ ID NO: 41243 - DNA, 151 bp, Glycine max
  Clone ID: LIB3139-030-P1-N1-A8
ctcgagccgagacaatttacaaggctttggttgaggcagggcttgaagcagcattttctccacaagaatatttggacctttttttgtcttggtaatcgagaggccggaaatttggatgataatgtcagcatgaccggagctcctccccaac

SEQ ID NO: 41244 - DNA, 374 bp, Glycine max
  Clone ID: LIB3139-030-P1-N1-A9
gacggataccgccccattgcaaggatgctgtctcgccatcatgccattttgaactttacatgtcttgagatgagggactcagagcaaccctcagatgccaaaagtggaccacaggagcttgttcagcaggtattgagtggaggttggagagaagacatcagagttgctggagaaaatgcacttccaaggtatgatgccacagcttacaaccaaatcatactgaatgcaagaccgcaaggtgtcaacaacaatggccctccaaaactaagcatgttcggagtaacataccttcgtctatcagatgatctactgcaaaaatcaaattttaatatattcaaaaaatttgtgctaaagatgcatgcagatcaggatta

SEQ ID NO: 41245 - DNA, 357 bp, Glycine max
  Clone ID: LIB3139-030-P1-N1-B1
gcagcatcagtgatgtatggttattttcttagacgagttgaccaaaggttccagttggagaagacaatgaaagttcttccaaatgcaacagaaaaagagaatagtgctcatcaaactacaatggacaatgcaagacccagtattgaagaggacacttctcaagtgatgtctcatcctgaagtatctacctggcctggtggtgatgtccgtcccggtggatttggctatggtgtaaaggcaaccaggttgcgtaactacgtgatgtcctttgatggtgatacactacaaagatatgcaacaattagatccaaagaggctgtcagcatcatcgagaagcacacagaagcattgtttgga

SEQ ID NO: 41246 - DNA, 366 bp, Glycine max
  Clone ID: LIB3139-030-P1-N1-B10
ggaatttcttacagcttggtcaactcaggtgcgtcctgcaacaactctgttagctgatgggtgtccatatttgtatgctatggtgcatgatagttcagtgtctacaataccaggtgattttgttattggtgttaagttgacaaccataaacaatatgtgtgcatatgggctcaatcctggtatttcaggttctcgtcttttgggcaccattcctcagtccatttcacagcaaactgtttggaatcaaatggcaacagtgagaacaccattgaattttgattctagcaagcagagcttttgtcaattttctattgaccttctcggtggaggaattttagtggacaaaactggagattggatcacact

SEQ ID NO: 41247 - DNA, 365 bp, Glycine max
  Clone ID: LIB3139-030-P1-N1-B11
attgcaagaaccattcacatttcttccagaatcatcaaagccatcaacgggcttgacttggcaactagctggaagatgaagcaagcaactcttttcttcttctcactcttcctactcctttcctccaccaccatggccatttcaccagcacctgcagcagcaccaaaagccacagcaaaaactcctcctaccccaaaggcaacagcaccatcaccaaaaccattagttcccacaatacctcagtctccagactctcctgactcggtccccgacgacatcaccagaatcctgaaaaaggccaaaatgttctcagtcctaatccgcctcctcaaaaccaccgaaatcatgaacaacatcaactcaca

SEQ ID NO: 41248 - DNA, 240 bp, Glycine max
  Clone ID: LIB3139-030-P1-N1-B12
gccgtcatatgccaggagaatggtctggtacctattgtagagccagagatcctggtggatggacctcatgacatcaacaagtgtgctgaggtgaccgagcgcgttcttgcagcatgctacaaggctctaaatgatcaccatgttctgcttgagggcactctgttgaagcccaacatggtcacccctggttcagagtctaagaaggtcaccccagaggtgattgctcaatacactgttaca

SEQ ID NO: 41249 - DNA, 65 bp, Glycine max
  Clone ID: LIB3139-030-P1-N1-B2
ctgcaatgcgagtgtcggtagcttcgcagtactttgttgttcatagatcgctgctgggtttgtct

SEQ ID NO: 41250 - DNA, 353 bp, Glycine max
  Clone ID: LIB3139-030-P1-N1-B3
tctctctctctctctctctctctctctctctctctctgtcttttcctttgcctgtgcgtgtgaaagatcgcagcaactccaccaccatcacaacaggaccgtaaccgatttccaaggttgagttatttgctggtctaacttaaccatactgtctattttgactcctgagattgctagtgagtcatggggcatagacatttatatagctcatctccaatatttgagggtgaacctgaccagaactggaatcatatgcatatggatcaacaatatgtgaaccatggtaggagtaccacttcagacaatggttcttttatttatcctttggaaaatatgtccatagatagcatttc

SEQ ID NO: 41251 - DNA, 357 bp, Glycine max
  Clone ID: LIB3139-030-P1-N1-B5
gggaaagttggttgagctacgacgttataagatatatagtgtaaccacgtcgccaaagttcgagagaaaccctctttcgtttcggtaaagggaactaatcgcttttgtcttgtgttatatatgttgctgttgttacaatgatcttctctaagtttaggtaatcaagaaagaaacgagattgctagctagagattgtgttggatctcaaagggtagagaagagaagagaaacgagaaagaaagaaagaaaagataatcaagaaatgatgtcaacaactaatgttaaccatagcttgtttgaagaacaagatcagatccctacgcagatggggctgttcaatattattccttttccacc

SEQ ID NO: 41252 - DNA, 349 bp, Glycine max
  Clone ID: LIB3139-030-P1-N1-B6
attgagtggtattccaacgtcgaaagcagagaggagaaacaataaggtttctcctaaagtgctctgttttgttttctctctctctgtctatatgtgactccgccctcaacactctgacctgtggtgtccctcatgtgacaattcgggagctgcaaggtttcggtcttgggttggaatattgggagaacccctccttcgaaaaatcaaggaaaacgaaaaagctcgttgattggagaagttggttaatggctaaagtttgttggccatattttgatcctgagtatgagaacttcagcaatagaatgaaacccttcaagggtctctgtggacaatgctagttgccatgatt

SEQ ID NO: 41253 - DNA, 366 bp, Glycine max
  Clone ID: LIB3139-030-P1-N1-B8
caacccatactccatggaatggactggtttggccaatagattactgagtaagggcaatgatattctgtgttgcgattatgctagttttgatggtttgattaccaagcaagttatgagcaagatggcagaaatgataaacagtctttgtggtggtgatgaaaaaatggatgcgtgaaaggacccacctgctgttggcttgttgttcaaggatggcaatttgtaagaaagatgtttggagagttgaatgtggaatcccttctggatttccgctcacagttatttgcaatagcatttttaatgagatgctcattagatatagctatgaaaaattactgcgccaggctaaagctccaagtatgtttttac

SEQ ID NO: 41254 - DNA, 372 bp, Glycine max
  unsure at all n locations
  Clone ID: LIB3139-030-P1-N1-B9
tgaaattgaatgattttattcaggttttaggttctttggggtctttcacgaaacctgatgccaatggaatccttagattgaattacaagttagaggtgaaggagttcgagtttgttgctcaaaggtctggttatctaggcgacaagaaattggaatctgttgaagatgctggcatgcaaaaaaatcaaaatcggcttcacctttggcaagtgtttttttccaatccaaatgagtggtgggatcaaagaaagagcaagcgaaatccaaaacagcctgattttaagcacaaggataccggcgaagctctgtggctaagtgagtatgatcctccatgggttaaaaggcaactncaattgtttgactcaaaaattg

SEQ ID NO: 41255 - DNA, 375 bp, Glycine max
  Clone ID: LIB3139-030-P1-N1-C1
ataaccatgggtatctccaccatcgcttctccttttgactccatcatcttcgatttggacgacaccttgtacccctccagcaccggaattgacaagtgcgtcaagaaaaacatccaactctttctcatccagaaatgcggattctcagaatccaaagccttgacccaacgagttgagctcttcaaaacctacggaagcacccttgccggcttaagagcacaaggcctcgatatcactgcagaggactaccacggtttcgtgcacggaaggctaccttacgactccatcgacactgatcatcagttacggaacctcctcttgagcatcaaacaaagaaaaattgtttttactaattctgacaggattcacgcgatg

SEQ ID NO: 41256 - DNA, 364 bp, Glycine max
  Clone ID: LIB3139-030-P1-N1-C10
gcaatgatgaccctatatttggccatgtaagtcttgagaattctgatgagctgtggtcttccaaagacgtgagtaacagtgcagtacccatactcttggaagctccaaacccaacaagtgctttaagcaacagatctgagcctttggaaattaaagcagaatatgttcaacagaatgatcaatcattttcccctagatttaagaagattggcaattcttcatctcatgatattgcgaatgctcctgcaaacacattcaatgtaggatatgatagagatagaattgccccagctgataaggagcaacaagtatgtcaagccatattggagaatgaccagtgatgtaaaatggaaacaaagagcca

SEQ ID NO: 41257 - DNA, 361 bp, Glycine max
  Clone ID: LIB3139-030-P1-N1-C11
cactgctttcgatggtgttgcattgggaattgtctctggggtgcaacaaacataccatcaatttcaccatgccaatgttcctcgtttgttctcgtcagagctgactatacctgtatttctgggaaggatgctattgggaatacctacaattctaattgtgaagttctgcagtaagactctcgcaaaatggaccattcctgtggtagcgaacaccttgggcatcccaataaaatcaaccggctatatacctacactgaatggatctgtgacaggtaaaatgtctgataagcttaaacaaggttacttgcaaaagctcctttcccagcacaaggcattcgatgttgataccggaattagattt

SEQ ID NO: 41258 - DNA, 363 bp, Glycine max
  unsure at all n locations
  Clone ID: LIB3139-030-P1-N1-C12
aggatttgttccccaagcagttggagaacatgatgtctctggtctctcctcgtactggcaggcatttgcagcgctatgacaaaggctgtcgccaagttgtgggatgcattccttacagatacaagaacaatggaacacaggataaggaattagaggttcttgtgattagtgctcagaagggtcatggaatgcagttcccaaagggtggttgggaaactgatgaatccatggaacaagctgctttaaggggaaaccatagaagaagctgnggttgttggcagtgttgaaggtaaattgggaaaatggtattacaagagcaaacgccaacccataatgcatgagggatacatgttccctttgctt

SEQ ID NO: 41259 - DNA, 367 bp, Glycine max
  Clone ID: LIB3139-030-P1-N1-C3
ccccactttattcttctctctacgcgttcgaatatgttcttcttcactttcctcttttcaacgctctccactcctttcctttcttaacctcttctactagacacacaactctaaacaaaagggtcttctcttcttatttgaatttgacttaaagctacttctctctttattctctattttgttttcaacatgatcattgccgatatatagacaacatcagacttcctttattatcttggctacctactacctctttcctttcactttgttgtttgtttgtgttatcttgacttttgaaacgtgagactgagaatggaacgtggggttcttgatagtatcattaataggctgcttgaagtcagaggca

SEQ ID NO: 41260 - DNA, 370 bp, Glycine max
  Clone ID: LIB3139-030-P1-N1-C7
aaaattttaaaaaaaaaaaaaaaaaaaaaaaaaaagaaaaaaaaaaaaaaaaaaggggaaaaaaaaaaaaaaaaaaaaaaaaaaaaaaaaaaaaaaaaaaaaaaaaaaaaaaaaaaaaaaaaaaaaaaaaaaaaaaaaaaaaaaaaaaaaggggggccccccattttggggccttccccccccggaattaaattcgggccagcacccttggcggcttaagatttcacatactgggggttatttgaaaagagggccaaaaaaggggaaaagcttttcccggggaaaaatttttttcctttcaaaattccaaaaaaaaaaaagcccggaaaaaaaaagggaaaacccgggggcccctaagggggggccaacc

SEQ ID NO: 41261 - DNA, 338 bp, Glycine max
  Clone ID: LIB3139-030-P1-N1-C8
atttctcttaagagaaagcgcagtgtgtttaatgaccaatcttgttatgatgagcatgccagttcttctggattacattgtaataataatgtataccttgatgttgacgaggaaaatatgaccaaagagaatgctagaggcaccgcatattctggtcccaccaatggtgaatatgttaaggagaatcaatcttccttttctgttaagggtgatagtcaagtagatgggatttgttttaataatggggcaaaaaattctttcaaggattctgatgagaaagttgagtgggagacttttaaatcttctttgtttgaatccacagaggaaatgcaatcatt

SEQ ID NO: 41262 - DNA, 363 bp, Glycine max
  Clone ID: LIB3139-030-P1-N1-C9
ggaggaggagatgaggggtgagattgaggaacgactgataaacgaagagtacaagatatggaagaagaacagtcctttcttgtatgatctggtcattacgcatgccctcgagtggccttctctcactgtggagtggcttcctgaccgccacgaaccacctggcaaagactattccctccagaaggtcatcttgggcacccacacttctgagaatgagcccaattacctcatgctggcccaggtccaactccctcttgatgatgctgagaatgatgcccgccactatgacgatgatcgccccgacattggtggctttggctgcgccaatggcaaggtccagatcatccagcagatcaaccatga

SEQ ID NO: 41263 - DNA, 367 bp, Glycine max
  Clone ID: LIB3139-030-P1-N1-D10
gtttgattttctcgttgataaaacaatattttaaatttcaacaattttcttttcacggtaacaagaatcaaatctaataatatcttagtagatattactcaaatctcctcctcacttggaccacactagtgggtacaattttgtgacataggataaaaaaactagtactgggttcaattccgaaccaactaattccttgtgaaaaatgtttttgatctttcaacgagtattattttaatactcgggatagcatagaatataatataggcggcactagacgttgtcaagtctgtctctctctcacagtcaccttaatggtatctgtacactttcagaccaacacaacacaacatctcaaaactctgtc

SEQ ID NO: 41264 - DNA, 349 bp, Glycine max
  unsure at all n locations
  Clone ID: LIB3139-030-P1-N1-D11
caatttttgtgaattgtctttatcctgtaagtcaattaccttcagaagctgtcgttgtaaatgttacatgtggtagtggacgtggtggtttacccaccactgcttggattagttctgcngttaacaatcgctcctcagatatcaacaaaaggattcgcacagcacttgggaaaggtaagaaaattgtttttcttactagagttgatccttttccagtagctttactggctgttctttttggcgttaagaatgaaattctgagtgctaacgccactaatcctatgctgacgcgacttcttgagaactgtaagagtctcaaatatctggttgatgagtgatcttttgcatt

SEQ ID NO: 41265 - DNA, 367 bp, Glycine max
  Clone ID: LIB3139-030-P1-N1-D12
aaagaagcattctgaattcattagctatccaatttctctttggattgagaagaccactgaaaaggagatttctgatgatgaggacgaggaagagaagaaggatgaggagggtaaagttgaagatgtggatgaagataaggagaaggaggagaagaaaaagaagaccattaaggaggtatctcatgagtggtcattggtgaacaagcagaagcctatttggatgaggaaacctgaagagatcacaaaagaagaatatgctgctttctacaagagtcttaccaatgattgggaagagcatttggctgttaagcacttttctgttgagggtcagctggagtttaaagctgtcctctttatccccaagagg

SEQ ID NO: 41266 - DNA, 409 bp, Glycine max
  Clone ID: LIB3139-030-P1-N1-D2
cgtcatgtgcacgcgcacatcatctcattatgcttctgggataatttttgttaaacttgttgatcagttggacgaaggaaaaatttcatggaaaaggttcagctccaaggtaaaaaagcttcacacagaccggattggtgctccatatccaagggagactggagaatttccaaaactggaggaaagtttttatgcaaatcctctaccaggatgtatttgtgaaacaagatagtagtagagactcccctgaagattgtctgtcttatgatggcactgcaaatgctatcaaaagacattgtggctgtgctgcgatatttttttaatccttctgccttgaggagatagcaatgtgctgggctatctggtaaggtgctattgattgtctgactgttgggataaggtgacaaat

SEQ ID NO: 41267 - DNA, 274 bp, Glycine max
  Clone ID: LIB3139-030-P1-N1-D3
acttatcataccaatcctgaaaatgcagttcgtagtatttttgttgcgcctttcagaggcggaaggcccattcgggtggttacatttccgaataccattgtgcagattgaaccagacatgaattcaaggtttcagcttttgagtaccactaccaatggtgattttgttcaaggaaaagatctcgcaatggttaaagttaatgtagcatgtgctgctgttggcttgacatcaagttacactccaactccattggtggaatctggtctggaaaaag

SEQ ID NO: 41268 - DNA, 369 bp, Glycine max
  Clone ID: LIB3139-030-P1-N1-D4
gggcccaattttgcacagttaacacctaacacaaacccacttcctctcttttccggcggcttttccggccaccatgctcctccgcctccaccacccaacctccctcgcctagatctactcagatcacaatcccaaatctctcaaatccggcgtcgtcgttttagctcaccttatataaaaaaagcagaaaggatgtcgtttcctctataattcgcttactcgcgctgtgtgctgtgtttctttctaacattcgtgttcgcgtgtgtgcgtttctttttttgttcctttgttcttttcggagcttctttgatttttccggcgagaagaggatgacgtccgtcgcgaggcagccaacgtggaaggagcggg

SEQ ID NO: 41269 - DNA, 424 bp, Glycine max
  Clone ID: LIB3139-030-P1-N1-D6
agaagtatcatgacggcccatgcacccctaccttaggttcggaattcggtttgagcgctaggctttttctgcttcaccgccttcggttgcgtagcttccaagggttcaccgtcgcggcgcccaagggccaccgtctctggtgcagtgccacgtcagcaccggaggaagcagcttccaacgcggaggtggatgaccccgagtggaggaagaaagaagagaagatcgtgagggacgttgagccaatcgtttcgttaaccatgcaaattctctactcatcaaggtacatgaatggggagatactgactatggaggatgaaagagccgtggtagagaacattctcatttaccatccggattatgaagataagataggaagtgggctgaactccattatggttgatcaacatcccctatatctattccc

SEQ ID NO: 41270 - DNA, 362 bp, Glycine max
  Clone ID: LIB3139-030-P1-N1-D7
gtacaagctcaagcttggagaaatcgtcaccactatccccaccatcggatttaatgttgagactgtggagtacaagaacatcagcttcactgtgtgggatgttggtggtcaggacaagatccgtccactgtggaggcattatttccagaacactcagggtctcatttttgtggttgatagcaatgatagagatcgagtggttgaggcaagggatgagctgcacagaatgttgaatgaggatgaacttagagatgctgttttgcttgtttttgccaacaagcaagatcttcctaatgcaatgaatgctgcagaaataactgacaagcttggacttcattcactccgtcaacgccactggtata

SEQ ID NO: 41271 - DNA, 368 bp, Glycine max
  Clone ID: LIB3139-030-P1-N1-D8
cactaaccaacttctttctttgttccgttctacttgcccttcccaacaacaacaagaagatgccttctgcagaagcttcctccgaaaccatttgtgtcaccggcgctggtggcttcatcgcctcttggatggtcaaactcctcttggaaaaaggctacactgtccgaggaaccctcagaaatccagatgatcccaagaacgggcacttgaaggagtttgaaggagcctccgagaggttaactctgcataaggttgacctccttcatcttgactccgttagatcagttattaacggttgccatggtgtctttcacactgcttctcccgtcaccgataaccccgaagaaatggtggagccagcggtgagt

SEQ ID NO: 41272 - DNA, 371 bp, Glycine max
  Clone ID: LIB3139-030-P1-N1-E10
gggatagtggcaagcgaggaaggaagtgaagtttcaaggttgacgcaaagaattgaattgaagtgataagtattatatagcatgcaaagaaaatggtaaggtaaggtaagatcgatagcagaaaaggaaaaaatgacgatggacgatgatagctccatatatgtagggggtcttccctacgacgccaccgaagaaaccattcgcaccgtcttcaatttgtatggcgctatccttgatgttaagataatcaacgacccacgcaccaggggcaagtgctattgttttgttactttcacaaatcctaggtctgcaattgatgccatcaacgacatgaatggcagaaccattgacggccgtgtggttaaagttaa

SEQ ID NO: 41273 - DNA, 360 bp, Glycine max
  unsure at all n locations
  Clone ID: LIB3139-030-P1-N1-E12
ttttccttcgaacctcctaatctctccctccagcttctgggttctccattttccctcgttttctgcatctgcatttcgtagattcagttctcatcggaaaatggacgttcaccgaagacccattccttcttccggcgaacaccgacaaacccagaagctgaagaccaccaccaccaccaccaccgattcgaaatcgcaatcgcaggcgcttctgcctctctacctcaccaacgccctcttcttcggggtgttcttctccgtcgcgtacttcctcctccaccgctggcgcgagaagatccgnaccgncacttcccttcacgccgtcagccccgccgagaccgccgccatagtctccctcgt

SEQ ID NO: 41274 - DNA, 370 bp, Glycine max
  Clone ID: LIB3139-030-P1-N1-E3
gctgtctttcactaaaaaccaaacccacccctcattttccattctctctattttctctcctctatctaaacttaacttccattccagtataagcagataggcagatacatcgtattcacgtgggtctgcatgcccctaacaaaactctccttccactatccattaataccatccccctccttaccctaatttaacatcacacatccaatacatttcgtttacccacgctcccccctctctctctctctctacactatcatactaccactcagctcaaaaaaaaaaatatatatatatatatcttttccttttaattttataattttggtgaaaatagcaagagagaaagggttggaattggaaatatctt

SEQ ID NO: 41275 - DNA, 372 bp, Glycine max
  Clone ID: LIB3139-030-P1-N1-E4
cttgttttttgcaaattcgcaacccacacagcaagggaaggtgcgagtgagtgagtatggcgtctccattatcagctcaattggttcaatgtcagaactcacttccacctcttcagggtaattttagccaagatgtgtctaaggttcaaaggtcgcgtgtggtatgttacggtaccagatcaccgcttggttattatggtaaagcattgacatcaagatcacataacgccctgaggttttctgtcacgcgacaatctgaagcacggtcaattggatataggagaatgacatgtgtcaatgctgcagacaatgttgtagagcttcaagccaaggtgacaaccaagtgtttctttgatgtagaagttgggggtg

SEQ ID NO: 41276 - DNA, 371 bp, Glycine max
  Clone ID: LIB3139-030-P1-N1-E6
ctcgagccgctcttacggaagagtcactgtgcttttcctgcttaaagtgtagtggggttgtgctttttggtttcatctgctgtttgattttttttctgaacaaggaaaacagctgcacttgcatcacagctcaagccttaaagctttagttctgaaaaatatagaaaaaaagaaagatggaaacacgagtgtcttccaccaagatcattcttctgccattacctggctgtttttaatgctttggttgacattattgagggtatgctttaattgaagactttgttgtgcttgtccttggatgtgacacgcaagttttgcttcaacatgtgctgctgcttccaccgaattctcttcaattttactctccatgc

SEQ ID NO: 41277 - DNA, 363 bp, Glycine max
  Clone ID: LIB3139-030-P1-N1-E7
gtttctcatcatagccactggggaactcccaaattctttatctgtattatttgcaaaggtcagaatcttaacctggttcttggtattggaattgattcatgattaccctaccatgaataggatttttagacattttagatcttgtctttttatatactcaatcaaataaattcaattgtttcacaaggaactgccaaaagcctcagtgatactatagttaatcccaaaccgcaaatatgttagttaagtactcattcatttccttataattgctttcctgtgttgttggacatttcaagaagaattttatcatcacttttattcccttcctctaactgataatgtccgccgagtagttttgtg

SEQ ID NO: 41278 - DNA, 349 bp, Glycine max
  Clone ID: LIB3139-030-P1-N1-E8
cgccctttctctcacatcatcaccatttcacctatgtttctctctctctctctctgtctctcgcatcacaatttcatcaaaaccttttaagtcttcatagttttccttctttctttctttgtgaaaaaacaaaaagtccaaaccatggctcagaaaaccgagaaagaagaaaccgacttcaaggttcccgaaacgattacgctttgcgttaacaactgcggcgtcaccggaaaccctgctacgaataacatgtgtcagaagtgcttcaccgccttcaccacctctaccgccaccacgtccggcgccggaggtgccggaatagcttcttcggctaccagatcccgcattt

SEQ ID NO: 41279 - DNA, 305 bp, Glycine max
  Clone ID: LIB3139-030-P1-N1-F1
gtgaaagaatgggtgagaaaagcaagattttgatcataggaggcaccggctacatcggcaaacatatagtggaagcaagcgcaaaggctggaaatcccacttttgctttggtgagggaatccacactctctgacccctccaaggcacaactcatccacaattttgaggctttgggcgttaatttggtccgcggggatctgtacgatcatgagaagttggtgaaagctatcaagcaagtagatgtcgtcatatccacgctgggtcacctgcagcttgccgatcagctcaagatcatcgctgccatt

SEQ ID NO: 41280 - DNA, 375 bp, Glycine max
  Clone ID: LIB3139-030-P1-N1-F10
gcttccttaagctccttagtgctgctccttgcagctctaattctatcccctcaagttcttgcaaactatgagaatcccccagtgtacaagcctcccactgagaaaccaccagtttataagcccccagttgagaagcctcctgtttacaaacctccagttgaaaaccccccaatttataagcctccagtagagaagccaccagtgtacaagcccccagttgagaaacccccagtgtacaagcccccagttgaaaaaccaccagtgtacaagcccccagttgagaaaccaccagtgtacaagcccccagttgaaaaacccccagtttacaagcccccagttgaaaaacccccagtgtacaagcccccagttgaaaaa

SEQ ID NO: 41281 - DNA, 375 bp, Glycine max
  Clone ID: LIB3139-030-P1-N1-F11
ttctcactagtcaaaaaccctctgagagagagagctcacaacaaagatgaccgacgaagacaaacccaaagccttctccggccaccaccatcaccctcctccaccgcagccacaaccctttcccgccgcccagtacggcaccttccaaggcgtcgccaactaccctcctccgccgcagccgcaccccgccatcggcttccctcaccccgttccgccgccaggcgccgccgactcctccgcccctcctccgccgtactacccggggtaccaagccgttcccggttatgcagttgctgaaggaagacctgtaagagaacgccaccttggttgctgtggccttggttgtggctggtgtctgtttatattaggcttctt

SEQ ID NO: 41282 - DNA, 375 bp, Glycine max
  Clone ID: LIB3139-030-P1-N1-F12
tacagacctaagaagttgtacctacccttaagccgaattatcaccaccatcatcatgtcactgtccaatggagctgattcaactgccacttccaagcagcaaaaacctcagctcccgaacccctttgatctcactgactctgagatccttgagaaagtttatctgacccacctccatgatgaagacaagtgcgatgtagaagtccttttggacattgtgtccagtattgtacttaagacaaggttagctgaaggcaaagcttctcagaccattttccagccagaatttcgtacaatgaagctgatttcttgtcagatgataaccacacctcatggtgaacgctacgtgcaccaaacaacaatgtgcattcttcag

SEQ ID NO: 41283 - DNA, 374 bp, Glycine max
  Clone ID: LIB3139-030-P1-N1-F5
ctttgttctccgctaggttcgtcattcacttgcattgcacgccgccacctctgcggcttcgctgtagtcaatgaaccagaggtccctctgtaaaaagggtttattgtgttttggtgacacattgaagctgagatagaaagagggatggagggttcgcgacggctacggggacattctataggagttttcagtgaagggattggtttagttttatttcgctggtcgactcttctaacggctgttgagaatgaatggggtggccacgagtcccgtgtcaaagccgatcaacttgccagtgacattctttcctggttcactcaatccaaagagccactttatattgatgacttagaagacatactggatcaaggtat

SEQ ID NO: 41284 - DNA, 213 bp, Glycine max
  Clone ID: LIB3139-030-P1-N1-F6
tgatgcacttgttaatgagcaagccaatattcaggaacggtagggtattccgccatgcgcagtacatgttaatctttagacgtgaagcagattgaagatcgaagaacacttgctgattataacatgcacgagggatatactgtccagttgcggttgcgactttgcggtgctatgcacatctcttggatgacttagaccgcaaacaccatagct

SEQ ID NO: 41285 - DNA, 330 bp, Glycine max
  Clone ID: LIB3139-030-P1-N1-F7
cggctcgagctttcttcctttgtaatagaaagcacgcgtttctctctctccctctgtcaacgaatatttgtgtacttcctcttttgtgggtagattcaatttaccatgtcgagttcatcggaatactctcaattttccggccagaaaccggcgaggtcgccggagaaatcgagcttctctcagacttgtagcctgttgagtcaatacatcaaggagaagggtagcttcggagatcttaccctcggaatgacatcatgtgggtcacctgagacatcttgtcaatctgctacaaccatgaacttgtttcctaccaaggaaaacaacgtgaca

SEQ ID NO: 41286 - DNA, 324 bp, Glycine max
  Clone ID: LIB3139-030-P1-N1-F8
ctcctcttatatttctatattttggtgctctgtgtgtctacgatctggatccaacggtccaaaatgttcggggcttgtgctgcttgttttcccaggttttagagctccaaaccttcagatccacctcattcgtctccagatcttccttccttgataacgttttcgggttcgagaaggcacttgtttgtttgtcgtacgaaatggagactaaaccgagttcggtgatggttacgctcagttacggcgcgttgacgtgcgccgcggaagttctcgcgactttgctagcttttgctgtcggcaaagccacgcttttggccccggatc

SEQ ID NO: 41287 - DNA, 364 bp, Glycine max
  Clone ID: LIB3139-030-P1-N1-F9
tacagtagctaccaacatcaccatttatgcaacccactgtctatcctcatctgatagcatagcatataatagactctgactcactccctatcattttcatcctgcttgaacaaccaaaaagagttccactctccgaaaagtgaaaacactttcatggagattaacttagattattccaagatgctctttttactcctccttggttccacttcattgatttttttcttcccacaattggcttctgctgccactcccaagctcaacactcaagaggtgaaggcattgaaggagatagggagcaagattgggaagaaagactgggactttggggtggatccttgcagtggaaaaggaaattggaatg

SEQ ID NO: 41288 - DNA, 361 bp, Glycine max
  Clone ID: LIB3139-030-P1-N1-G1
cttcgtgtcagatttaaactttttctgtttctttctcagttctctgtttaatttcaagttcaagctggtgaaattttggattagtgctcccactctcctatctggtataggacttcgtgggtagacttttctacttctctcctttctttcactctcttcttctcactgatccgcattgccgttcaaagtggtcttatttgaaaaacacttgggcgttggtgcaaatgtttgcttcgttaattttctctggagacaacaggctcactgagaaaacaatttttacttgcagagatttggacatcttggttgtctattatacaatagcaactcaatttagaaaatttctaccgcattacattag

SEQ ID NO: 41289 - DNA, 373 bp, Glycine max
  Clone ID: LIB3139-030-P1-N1-G10
attaaagacttgcttccaagatggttctgctagagaagctctgggatgacgttgttgctggccctcaacctgagcgtggccttggcaagctcagaaaactcaccaccctcaaaactattgatgaaggagacagtagcaagctgcagaagacgttgtcgatgccgtcgacaccgacaaccccgatgactcccacgactccaacgacaccgggatccgcgcgtaaagctgacaacgtttggaggagcgtcttccatcctgggagcaactccgccacaaagaccatcggtgctcagatgtttgacaaaccacttcccaacactcccactgtctacgactggctgtacagtggggagaccagaagcaggcaccgctg

SEQ ID NO: 41290 - DNA, 374 bp, Glycine max
  Clone ID: LIB3139-030-P1-N1-G11
ctctctaccttgaacttccacaatacaactctctgcctataaacgctcttgtttaacgtgagaacttgggtgatcttttggagttgtaggagcccttacaccttgcagagtcatctcaacattcccaagggctcctactacgcaataacgccaagctcgatctcaaattaatatatcatttattcctcttaatcaaatattaaataagaaaagatgggagagatgtcaaacttccaattgggtgtgattggtgcactatttctctcggtggcttcttctgtctccattgtcatctgcaacaaagccttgatgagcaatcttggcttccctttcgccacaacgcttactagttggcatttgatggtcacattttg

SEQ ID NO: 41291 - DNA, 378 bp, Glycine max
  Clone ID: LIB3139-030-P1-N1-G12
aagagttcaaagataggactgttgtcacaatagctcatagaatccacacagttattgatagcgatttggttttggttctcagtgatggaagagttgctgagtatgatgaaccatcaaagttacttgagagagaagattccttcttctttaaacttataaaggagtattctggaagatcacataacttcagcaacttggcaactcaacatgtccaaagcaaggagctattataggacttcaatgatattaattaatatattggagaggtaattcttgggaaaacaaaggctccatctaaactatttgaaccacagcttcaataaaaccaccaatgatacatataaaggggtttcaggccccgaatgtgatgtgaaataa

SEQ ID NO: 41292 - DNA, 376 bp, Glycine max
  Clone ID: LIB3139-030-P1-N1-G4
tggaggttagttaactattgatcacaccaaggacacttttacctatgagctcacattgcacgtgttttgcactcttcggcactagcaggtgttggcagcattcacatgccaggaatgggtaatcctgctttcaacacgaacacgtttggttatccatctgcacaaaggtcatctgcactacttaatcacagttttattatgtggaagttgattgcttctaactccgataaagcacattttccaaacttatagcgttattttgagcttctgttgcggaactcttccgattagaagaaaaactaatgtgtttgaagtaccgttattttttcttttgggagcagcctttgtatttcttgatatctcatctgattattta

SEQ ID NO: 41293 - DNA, 377 bp, Glycine max
  Clone ID: LIB3139-030-P1-N1-G5
catccaccatcaaccaatcatggatcgggttgatttgttttatggttgttggattttttgcagtatctgcttgttcttaaatgatttaatacaaagatcaatcttcggtttgagcttaatcaaacttaaactttctcgtccttccccagaaatctactgtgtgaaaattgaatacagttctctcccataaatttagtgtgtttacattaattggaattcggtgcagtgttttaatttgtttattgttattttatttatttatttatcttctatatgtttctttaaaactatttttcatttttaatataatccatagtattataaaaatcatctatccacaaaccacgtgtcaacatattatcaattttatatgggat

SEQ ID NO: 41294 - DNA, 353 bp, Glycine max
  Clone ID: LIB3139-030-P1-N1-G7
gtggattctcttttggatttccgctcacaggtatgggcaatagcatttttaatgagatgctcattagatatagctatgaaaaattactgcgccaggctagagctccaagcatgtttttacaatccttcaaaaattttgtttctttgtgtgtgtatggtgatgataacttaattagtgttcatgaatatgtcaagccttactttagtggatctaaattgaaaagctttctagctggacataatatcaccattactgatggcattgacaaaactagtgcaactttgcaatttagaaagttagcagattgggattttctcaagagaaactttttgcacatgtctaatgttttgtgg

SEQ ID NO: 41295 - DNA, 355 bp, Glycine max
  Clone ID: LIB3139-030-P1-N1-G8
ggaaatgaacccggaagacgaagctgaagaagatggtgccaatattgatcttgactcacaaaggaagggaaagtgtgttgtgctaaagacttctactcgacagacaatctttctacctgttgttgggcttgttgaccctgacaagttaaaacccggtgatctggttggtgttaacaaggatagttacttaatcttggataccctgccttccgagtatgattctagagttaaggccatggaagttgatgaaaagccaacagaggattacaatgacattggcgggatagagaagcagattcaagaattagttgaagccattgttttgcccatgacccacaaggagcggtttcaaaag

SEQ ID NO: 41296 - DNA, 198 bp, Glycine max
  Clone ID: LIB3139-030-P1-N1-G9
accacatagggtgtgggttggggttagcttcgcgagtctgatttctctctcactctttcgtcttcgcggttgaagagagagagagagcggtggttggtggttttggtttggtgaagttcgattcgatgtgatgtcctgcgaaagcttttggggatattgttcctttttgccttactgcgcagtttctaattcttttgg

SEQ ID NO: 41297 - DNA, 378 bp, Glycine max
  Clone ID: LIB3139-030-P1-N1-H10
attctcttcaacctaacgcagcatcgctatactcttcattccatggctttgcccaatcagcaaaccgtggattaccctagtttcaaactcgttatcgtcggtgatggtggcacaggaaagacaacctttgtgaaaaggcatctcaccggagaattcgagaagaaatatgagccaaccatcggtgtggaggttcacccattggattttttcacaaactgtggaaagattcgattctactgctgggatactgctggacaggagaagtttggtggcctcagagatggatactatatccatgggcaatgtgctattataatgtttgatgttactgcccggctaacatacaaaaatgttcccacctggcaccgtgatctttgc

SEQ ID NO: 41298 - DNA, 375 bp, Glycine max
  Clone ID: LIB3139-030-P1-N1-H11
gtaattgacttacaggatagagacaattaccttctgaaggtaattgacttacaggatagagacaattaccttcagaagctgtcgttgtaaatgttacatgtggtagtggacgtggtggtttacccacctctgcttggatttgttatgcggattacaatcgataataaagcgtcaacaaatggattcgcactgcacttgggaaaggtttgaaaattgtgtttcttactagagttgatccttttccagtagctttattggctgttcttttgggggttaagaatgagattctgtgttctgacctcactaaccatatgatgtctcgactttttgagaactgtacgaacctaaaatatcttgacggtgagcgttcttttg

SEQ ID NO: 41299 - DNA, 378 bp, Glycine max
  Clone ID: LIB3139-030-P1-N1-H4
ggaagatcaagaaaaacccaaaaagattgatgccagattgagacaaagaatagatcctcaatacaatgaggttcaggctcagatggaaacaaatttgtttaaattgtctcttgatgatgttgaaactcctaaaggttccatgttggatctgaaaatttctcaatctaaaattgcacttcccaagaacacagttggaggaaccattctgcgtagtgatctattggcaaattttttgacagagggcaattttagagcaagtgttgatttgcagcgcactcatcgtattagaggaatgattaaaatggtggccacagttggtattcctgagaatacaggtatatcattggcctgtgctatgaatagttcttttagggggcg

SEQ ID NO: 41300 - DNA, 371 bp, Glycine max
  Clone ID: LIB3139-030-P1-N1-H5
ggttgctcctttctctctcttttatcttctgtctccctttcttctccttcgctttgatccaaattttaatccttttttcatttgctcaattatttgcaccgatattcttcttcttcttcttccccttttgcttcggtttaagtttcaagttttaatcaaagaaagaaaatagtgtttcaagattcaaactttttcgtattgggttctcttttctctttgagtttttttgcttttctttctgggctttctgttttcatggtggatacggatgggtttggaactgggggcgatgttgggggaactcccaagacaggggatcttaggcaactgggaaatgttcccacagtttttgatgcatcacagtatgcatt

SEQ ID NO: 41301 - DNA, 382 bp, Glycine max
  Clone ID: LIB3139-030-P1-N1-H6
ctcgcactctctctacgcacgcctcaacatcccttctctgctccattcattatgtctccgtcgttggatcttccccccaagggtggcttcagttttgatctatgccgaagaaacgcaatgcttcaaaacaagggcctcaaagccccaacctttctcaaaactggcaccactattgtcggtttagttttccaggatggtgtcattcttggggctgatactagggcaactgaaggacctatagtggctgataaaaactgtgagaaaattcattatatggcacccaacatatattgctgtggagcaggcacagctgctgatacagaggctgtaacagacatggttagctcacagctgcaactacatcgctaccatactggtcggg

SEQ ID NO: 41302 - DNA, 287 bp, Glycine max
  Clone ID: LIB3139-030-P1-N1-H7
gtactttgaaacatacattttaatctgtttaggagataaacggcggtggagcaagagagagcaagagagagagagaaggtttggaagaatcgcgatggagggtgaggaaggaggaggcataaggctgagcaagcgaatcgcaaacggagaggttgactacaagacgaaatccggcaccgcctggagccactcctatctcaaccagaagccatggcaccctctttcttaccccaaccaacgccgcaagtggatcgccgaacagacccacgccaatcgccaacgccgca

SEQ ID NO: 41303 - DNA, 363 bp, Glycine max
  Clone ID: LIB3139-030-P1-N1-H8
caatttgtaagaaagatgtttggagagttgaatgtggaatcccttctggatttccgctcacagttatttgcaatagcatttttaatgagatgctcattagatatagctatgaaaaattactgcgccaggctaaagctccaagtatgtttttacaatccttcaaaaattttgtttctttgtgtgtgtatggtgatgataacttaattagtgttcatgaatatgtcaagccttactttagtggttctaaattgaaaagctttctagctagtcataacatcaccattactgatggtattgacaaaactagtgcaactttgcaatttagaaagttagcagattgtgattttctcaagagaaacttta

SEQ ID NO: 41304 - DNA, 357 bp, Glycine max
  Clone ID: LIB3139-030-P1-N1-H9
ctaatccctatttttcttcctcagtagtgtcatttacgcttctcttctctgcagcaactatgcctaaccctaaggtcttcttcgacatgaccatcggcggtcaatctgctggccgcatcgtgatggagctctacgccgacgtcactccccgcaccgccgagaacttccgcgcgctttgcaccggcgagaagggcgtagggcggagcggcaagcccctccactacaagggctcgtccttccaccgcgtgatcccgagtttcatgtgtcagggtggcgacttcaccgccggaaacggaaccggcggcgagtcgatttatggcgccaagttcgccgacgagaacttcgtgaagaagcaca

SEQ ID NO: 41305 - DNA, 226 bp, Glycine max
  Clone ID: LIB3139-031-P1-N1-A1
atttttctctgcctcgcactggagaaccctctccaatttccttcaaaacccatcaaataagtttctcttataccctctgaatattcttcatcatcatcatcaataatcatggctctcttgaagtaatttgtgctttttcttgccctcgctggccattcaagggctctttactgtgtatgcaaagaagttgggggtgatcaagctccttataaagcaaaagactatg

SEQ ID NO: 41306 - DNA, 374 bp, Glycine max
  Clone ID: LIB3139-031-P1-N1-A10
aaaattatacatatccaacaatgacgaccacccgtgttgctctctgccttttatttgcattcctcttctacgcggctgaaggagccaaggttagtttcaataacaagtgcacatacacggtatggccaggaaccctaaccggtgaccaaaagccccaattatcaacaactggtttcgagttgggtccaggagcatccaactctgtggaccttccatctccatggtccggtcggttctgggcccgaacaggatgctccaacaacaacggaaggttcagctgcgccaccgccgattgcgcctccggtcaagtcgcatgcaacggtgccggtgcaatcccgccagctactttggtagaaatcacagttgcagcaaac

SEQ ID NO: 41307 - DNA, 374 bp, Glycine max
  Clone ID: LIB3139-031-P1-N1-A11
gactcgactcgactcgacttcaacccaatccatctcaactcggctcgaccaagtcaccgactcggctttgaatactcacctcggcctcgcttgaccaccatgcgattcgccctcgccctcctcggcctcatcgccgtgccgttcgcgtctgccgcggcggtcccgcgtgagcaacacgacatcgccaaacgctcgcccgacgagcttgacgcccggctgctgggcgacctcctcggcgacctcaaggacaagtgggacaacaggcactgcggctggaaaatcgacgactgttccaagaaggggcagaagtgcaacaacaagtgcgaatgcgagcacgagccagcgccgacgtgcaacaagtgggagaaggacga

SEQ ID NO: 41308 - DNA, 373 bp, Glycine max
  Clone ID: LIB3139-031-P1-N1-A12
aaacggttatgatagcttctgaagtttgtcgtgggtggagagaggcaatttgctttggcctgactcggttatcactctcatggtgtagcaagaacatgaataatttggtcctatccctagctcctaaattcacaaaattacagactttaatccttcgtcaagacaagcctcaactagaggacaatgctgttgaaactatttcaaatttttgtcatgacctccaaatcttggacctcagcaaaagtttcaagcttaccgatcattcgttgtatgccatagcccttggttgtcaggatcttacaaaactgaacatcagtggttgttcagcctttagtgacaatgctctggcttacctggccagtttttgtagaaa

SEQ ID NO: 41309 - DNA, 376 bp, Glycine max
  Clone ID: LIB3139-031-P1-N1-A4
gaaaatagagagtggactcctttgtcgaccatggcatctaacataccagaaagaagcaattggcccacatctggtacttccatgcatgttccaaggaatcaaatatctggttttgaaactgcccagacaagtggatcagattctccattacccatagctccggtgcttttaggtcctggttctcgccaaagagagaattctggggttgttccatttacattttatcctactgggccacctgttccctttgttacaatgcttcctttatataattttccaactgagtcttctgacacttcaacaagcaacttcaatttggaagaaggggcagataacagtgattcaagtcagaattttgattcatctgagggatatg

SEQ ID NO: 41310 - DNA, 373 bp, Glycine max
  Clone ID: LIB3139-031-P1-N1-A5
ctcgagccgctcgagccgcattcgatgcagaggatgatgaatgctcctgattcaaatgaaactcttcaatctgtgctatggtaggcacagattgaagagttccattcgatgcagaggatgatgaatgctcctgattcaaatgataatattgatctactgttgagcattgatttgttgggtttacaaggagcaggcaaagcttttccaaacaagattgtttttgatgataagcttgtgttggctaacacacaagaattctttgatggaaattttccagtggattcttggttaccaatttttgtgaattgtctttatcctgtaagtcaattaccttcagaagctgtcgttgtaaatgtcacatgtggtagtggac

SEQ ID NO: 41311 - DNA, 72 bp, Glycine max
  Clone ID: LIB3139-031-P1-N1-A6
agagaagctatgaaagaggagaacctggacactttgatgggcaggggagattgagcgtcggatcacatgggc

SEQ ID NO: 41312 - DNA, 382 bp, Glycine max
  Clone ID: LIB3139-031-P1-N1-A7
accagacaggctcccaccacctcccccttgtactgaaatctccattctccaaaactgcttcaactcttctcattttctttctctctctctctgcctcgcactggagtaccctctccaatttccttcaaatcccatcaaataagtttctcttataccctctgaatattcttcatcatcatcatcattaatcatggctcttttgatgtattttgtgctttttcttgccctcgctggccattcaagtgctctttactgtgtatgcaaagatgttgtgggtgatcaagctcttcagaaagcaatagactatgcatgtggtgctggagctgactgtacccctattctccaaaatggagcctgtttttaacccaacactgtgaaggat

SEQ ID NO: 41313 - DNA, 190 bp, Glycine max
  Clone ID: LIB3139-031-P1-N1-A8
gtagatttttttttatatgggctcaatcctggtatttcagggtctcgtattttgggcaccgggcctcagtctatttcacagcaaactgtttggaatcaaatggcaacagtgagaacaccattgaactttgtttatagcctgcattgttcttgttatctccctatttcctcttttttgtgtaggttattat

SEQ ID NO: 41314 - DNA, 301 bp, Glycine max
  Clone ID: LIB3139-031-P1-N1-A9
gtgggccagttaaactaaacggaacttggggttgcttattctcaatgccgaacagtctacagttattgatattgtatagggaatctgtgaagaggatgtaatcgctgccaatactaatatgccagctatatgtggtccacaggctactggccgatcttatcaacatgcggtgtgccatgcatgatcaggaatcatggagttctatcgcttgcaccagagacaaatgccaataaggagactgggcacgaccctataggtgagtggctctggctatgtgaaagtgagcacacctattttaatt

SEQ ID NO: 41315 - DNA, 429 bp, Glycine max
  Clone ID: LIB3139-031-P1-N1-B1
taagagagccggacgtgcacgcaccgtacgcacgcttgcaactcgagggtttttgctgtggtcgttgaggatttattagcaaaaggaatgaaaaatgctcaaaatgcaattatctccggatgttcagctggaggattggcttctattctaaattgcgatcgattcaaatcactactacctgcaacaactaaagtgaaatgccttgcagatgctggtttttttatcaatgtaaaggatgtctctggagcacagcgcattgaagagttctacagtcaagttgttcaaacacatggctcagcaaagaatttgcctacatcctgcacttcaagactcagaccagggctgtgctttttccctcaaaatgtcgtgtcccaaatcagtaccccaatcttctttgtaaatgcagcctatgactcatggcagatcaaa

SEQ ID NO: 41316 - DNA, 374 bp, Glycine max
  Clone ID: LIB3139-031-P1-N1-B10
agccgttgctctgcttcaacattgcggaagcagaagaagcgccgcagctatggtgaagtactccagagaacccgacaatcccaccaagtcctgcaaggccagaggcgctgacctcagagttcattttaagaacactagggagactgcctttgccatcaggaagttgccccttgttaaagctaaacgatacttagaggatgttttggcccacaaacaggctattcctttccgacgcttttgtggtggtgttgggaggacggcccaggctaagaacagacactccaatgggcaaggacgctggcccgtcaaatcagctaagttcattctagatttgctgaagaatgctgagagtaatgctgaagtgaaaggtttgg

SEQ ID NO: 41317 - DNA, 374 bp, Glycine max
  Clone ID: LIB3139-031-P1-N1-B11
gtgaaagagaggagatagagaaacagagagcccatgagcgctatatgaggctgcaagagcaaggaaaaacagaacaagcaaagaaggatttagaacgtttagctcttatacgtcagcaaagggaagatgctgctaaaaagcgagaagaagagaaagctgcgaaagagcagaagaaggctgaggcgcgcaagtgagtttcctggaaaatgtcatgccaccaaaaatttgctccaattagtaaggtggaacggttgctcctactacacttaaaacattatgtccatttggctttatattatggtattaccacaccaagctggtaacatgtaatgcaattatattttcatattctgtggtttaaaatcgtgattata

SEQ ID NO: 41318 - DNA, 371 bp, Glycine max
  Clone ID: LIB3139-031-P1-N1-B12
ctgacggggtccttccttttcttcttctccttcatattttctctctcaccattctcttcttcttctccctttcttagattctccctcttttctctctgccctccgccatgactgaggataaggagatgtcttcctctgtcaccaatggcgatgattccctcactggtcacatcatatctacaactattggaggcaaaaatggggaacccaaacagactattagttacatggcagaacgggttgtaggaactggatcatttggaattgttttccaggcaaaatgcttggaaactggggaagcagtggctattaaaaaggttttacaggacagaagatacaagaatcgcgaactacagttaatgcgtgttttg

SEQ ID NO: 41319 - DNA, 382 bp, Glycine max
  Clone ID: LIB3139-031-P1-N1-B2
taagttttcacctgatcctgacttagtgggaatcaagccacttataatttcacctctaaacaaaggacaagatgaagttgggaacctagataataaggctgacagtgttgaatctgaatctgatacaggataacaagaggaaggcattgtttcatgtaaaataaattaatttacttcttctctcaatggaagcttttgaaagacaaagaggtcaacaaatttggacggaggtccaggcaaaataggtttagggggcttgtttttaattttattaattctagtatcgcatgtgtttaattttcacaggtgacttttcttaaatctgcatccaatcaaaattgtttatggtttgaaggatcaaatgctatgtgcctatgtgtga

SEQ ID NO: 41320 - DNA, 374 bp, Glycine max
  Clone ID: LIB3139-031-P1-N1-B4
cacaatgtgtggtattcttgctgttcttggttgttctgatgactctcgagccaaaagggtccgcgtgcttgagctctctcgcagattgaagcaccgtggccctgactggagtgggctccatcaacatggtgactgctttttggcacatcaacggttagccatagttgatcctgcttctggggatcaacctctctttaacgaggacaaatccgtcattgttacggtaaatggagagatttacaaccatgaagagctcaggaaacagctgcctaatcacaacttccgaactggaagtgattgtgatgttattgcacacctgtacgaggaacatggagaagactttgtggacatgctggatggtatcttctcatttg

SEQ ID NO: 41321 - DNA, 375 bp, Glycine max
  Clone ID: LIB3139-031-P1-N1-B5
gaagaaatgctaagatggagaaagctgcaaagtcaatctcagcaatcagcttggaagtagataggcttgcaggacgggtatcagcctttgagtccattattagcaaaggtgggagagttgtggaaacagatttgcttaatctgattgagttattgatgaatcaattgcttaaattggatggtatagtggctgatggggatgtgaaactacagaggaaaatgcaggtaaaaagaattcaaaagtatgttgaaacacttgatgtgctgaaggttaagaattctatgtctaagagcaatggagaccatgccacagtgcagcttcaacagaagcattcaaatgggcaacaacaaaagcattcaaatggacatcatagat

SEQ ID NO: 41322 - DNA, 162 bp, Glycine max
  Clone ID: LIB3139-031-P1-N1-B6
atttttggcttatgtaatagagtgagtatcctaaggacgttaggcatctgtccttgtttttggcctagtaaaccgtggtggtgtcaaggtgaatgcatgtttcggaagttttgtttgatattttattgggaacttcaattattatctaagattattgcggtt

SEQ ID NO: 41323 - DNA, 353 bp, Glycine max
  Clone ID: LIB3139-031-P1-N1-B7
aaaaattgatgagcactatgtagaacccgtataccagagtcttaatgatgcacatgtgccacatattacttgatcagaaagtgcacacgatgaagttttcaaagcagtggctggggacaatgtaactgacgctgaacccgacactgaagatttggaagatggtcctggtacatgtgaagaacagaatgtcaaggaaactcaagaacctgatgatgtacaaaacacagcacagagggttccaggcaaaagaaagctacgaattcaaggcaaatggaggggtgtcgaccctgttgcctttttcaaagatgaaacagttgttaatggtatgagggatttctatggaattgatgagc

SEQ ID NO: 41324 - DNA, 345 bp, Glycine max
  Clone ID: LIB3139-031-P1-N1-B8
caaggccaacacaaagcagagaaagcaaaaaaaaaaaaaaagagagggttagagagataataaagtgaaggaagaagaaagggtttgtttgtgtgaaagaaaggatgcagagtgagaaccataacaaccagctggtagtgcagaattcggggagcctgagcttcagcagccatttgtcgaaggaagatgaagagatttcacggtctgctctctccaccttcatggcaaaggaggaagagattgaatggaagaagatggaggtcagagaaaagggtcagcttcagcttggtcgtgtcgaagaagaaactaagcgtcttgcaaccatttttgaggagcttgaagccc

SEQ ID NO: 41325 - DNA, 379 bp, Glycine max
  Clone ID: LIB3139-031-P1-N1-B9
caaatattattattcaatagaaaagaaagatgagtccaacatgggtttttgtgttaggtgttgcagcaatgttggtggttgtgagtggacaatcatcagtgaagcctttggtgaagacagtgaaggggaagaaggtgtgtgacaaagggtgggagtgcaaaggttggtctgcatattgctgcaatgagactattttcgactacttccagacataccagtttgagaaccttttcgtgaagcgcaattcgccggttgcacatgctgttggttgctgggactaccgttctttcattaacgtttctgctctttaccatccttatcgtttttctcatctctgttggttatgaccattgtttcttaatgtatttagttttttttt

SEQ ID NO: 41326 - DNA, 378 bp, Glycine max
  Clone ID: LIB3139-031-P1-N1-C1
gaggcttttccccacaagctggtgcagtttggagagattcaggaaaaagttgtgttgaaattttcacaagaggaatttcttacagcttggtcaactcaggtgcgtcccgcaacgactctgttggctgatgggtgcccatatttgtatgctatggtgcatgatagttcagtgtctacaataccaggtgattttgtcattggtgttaagttgacaaccataaacaatatgtgtgcatatgggctcaatcctggtatttcaggttctcgtcttttgggcaccattcctcagtccatttcacagcaaactgtttggaatcaaatggcaacagtgagaacaccattgaattttgattctagcaagcagagcttttgtcaattt

SEQ ID NO: 41327 - DNA, 371 bp, Glycine max
  Clone ID: LIB3139-031-P1-N1-C10
gaaaaattgatgcgtgaaaggacgcacctgctgttggcttgttgttcaaggatggcaatttgtaagaaagatgtttggagagttgaatgtggaatcccttctggatttccgctcacagttatttgcaatagcatttttaatgagatgctcattagatatagctatgaaaaattactgcgccaggctaaagctccaagtatgtttttacaatccttcaaaaattttgtttctttgtgtgtgtatggtgatgataacttaattagtgttcatgaatatgtcaagccttactttagtggttctaaattgaaaagctttctagctggtcataatatcaccattactgatggtattgacaaaactagtgcaacttt

SEQ ID NO: 41328 - DNA, 371 bp, Glycine max
  Clone ID: LIB3139-031-P1-N1-C11
tcaggctcagatggaaacaaatttgtttaaattgtctcttgatgatgttgaaactcctaaaggttctatgttggatcttaaaatttctcaatctaaaattgcacttcccaagaacacagttggaggaaccattctgcgtagtgatctattggcaaattttttgacagagggcaattttagagcaagtgttgatttgcagcgcactcatcgtattaaaggaatgattaaaatggtggccacagttggtattcctgagaatacaggtatagcattggcctgtgctatgaatagttcttttagggggcgcgccagttctgatatttacaccatctgctctcaagactgtgaattatggaatcctgcttgcacaa

SEQ ID NO: 41329 - DNA, 371 bp, Glycine max
  Clone ID: LIB3139-031-P1-N1-C12
ctcgagccgtccgtcgccggctaagctcgcaaacgtaaacgaacttgagttggaacttctccgacgagtacaaccaattggtctcaaaccctatcgccttttgcttcaattcaccgcattctcgaatttccccttctctgtgacgcgtggcaaaaattttccccttaatttcttttctttaggagagaacatggcatcgaaaagggaaagggaagcgagtgatagagtagaggatgaaggggttgataatgagtcgaaaaggcagaggctggatgaggattcttccccctctcctcctcctgtgtccattgcaaatcctctttctgggttggccaataattatgctgacattgatgaggaggaagattatg

SEQ ID NO: 41330 - DNA, 323 bp, Glycine max
  Clone ID: LIB3139-031-P1-N1-C2
gctttctgcagtcctttggagttcactggtgcccttttggtaacttgacccgacttccttcatctttcgaggaaggggatttttcttcaactgcgtatcatgatgtactgggacaacatgctatatttgctgaacatacggctgtatcatctgctagtcatccttgcccatatattgcctactttggaccaatacatccctccaccttcaattctggtggaactgtttccgaagcttctaatttcaaccactggaatggtccacctgtacctggtgacatgccaacctcctacacatttcctgcagtggatcttcaattatac

SEQ ID NO: 41331 - DNA, 370 bp, Glycine max
  Clone ID: LIB3139-031-P1-N1-C4
gggcaacgatattctgtgttgcgattatgctagttttgatggtttgattaccaagcaagttatgagcaagatggcagaaatgataaacagtctttgtggtggtgatgaaaaattgatgcgtgaaaggacacacctgctgttggcttgttgttcaaggatggcaatttgtaagaaagatgtttggagagttgaatgtggaatcccttctggatttccgctcacagttatttgtaatagcatttttaatgagatgctcattagatatagctatgaaaaattactgcgccaggctaaagctccaagtatgtttttacaatccttcaaaaattttgtttctttgtgtgtgtatggtgatgataacttaattagt

SEQ ID NO: 41332 - DNA, 376 bp, Glycine max
  Clone ID: LIB3139-031-P1-N1-C5
caaatttgtttaaattgtctcttgatgatgttgaaactcctaaaggttctatgttggatcttaaaatttctcaatctaaaattgcacttcccaagaacacagttggaggaaccattctgcgtagtgatctattggcaaattttttgacagagggcaattttagagcaagtgttgatttgcagcgcactcatcgtattaaaggaatgattaaaatggtggccacagttggtattcctgagaatacaggtatagcattggcctgtgctatgaatagttcttttagggggcgcgccagttctgatatttacaccatctgctctcaagactgtgaattatggaatcctgcttgcacaaaagcaatgactatgtcatttat

SEQ ID NO: 41333 - DNA, 365 bp, Glycine max
  Clone ID: LIB3139-031-P1-N1-C6
gttggtttagcatagatgttgggtcctgttgattttggtaaaactgtagattattggcagcaggacaggtggactggttgtttttctgtgaagtggcacgtcataaaggatattccaaatagcgtgttgaggcacataacgcttgaaaacaatgaaaacaaacctgtaacaaatagcagggatactcaggaggttaagtttgagaagggtgttcaaattgccaaaattttcaaggagcattcaagccaaacatgcatcttggatgattttgggttctatgaggctcgtgaaaaggcgactcaggagaaaaagtccaaggaacagcagttaccaaaacaggtcagcacgcccagtgatttcacatt

SEQ ID NO: 41334 - DNA, 378 bp, Glycine max
  Clone ID: LIB3139-031-P1-N1-C7
attctcatgaatatgccaaatgctgttctttcaatgtggagatattttgttggagatctcgtctttgaagtttctaagatgacttctccctacattaaatgtacagtctctttcttcatagcatttggaaatttggctgatgacaccatcaattttgaggcttttccccacaagctggtgcagtttggagagattcaggaaaaagttgtattgaaattttcacaagaggaatttcttacagcttggtcaactcaggtgcgtcctgcaacaactctgttggctgatgggtgtccatatttgtatgctatggtgcatgatagttcagtgtctacaataccaggtgattttgtcattggtgttaagttgacaaccataaac

SEQ ID NO: 41335 - DNA, 367 bp, Glycine max
  Clone ID: LIB3139-031-P1-N1-C8
gtgcggtttcctttgttggtgttgctgggaactgttttcctggcatcagtttgtgtctcattaaaggtgagagaggatgagaataaccctttctacttgagaagctctaacagcttccaaactctctttgagaaccaaaacggtcgcattcgtctcctccagagattcaacaaacgctccccacaacttgagaaccttcgagactaccggattgtccagtttcagtcaaaacccaacacaatccttctcccccaccatgctgacgccgatttcctcctctttgtccttagcgggagagccatacttaccttggtgaacaacgacgacagagactcctacaaccttcaccctggcgatgcccagagaa

SEQ ID NO: 41336 - DNA, 375 bp, Glycine max
  Clone ID: LIB3139-031-P1-N1-C9
gttcacattcttcagaagatttttctgaaaaggaagatcaagaaaaacccaaaaagattgatgccagattgagacaaagaatagatcctcaatacaatgaggttcaggctcagatggaaacaaatttgtttaaattgtctcttgatgatgttgaaactcctaaaggttccatgttggatcttaaaatttctcaatctaaaattgcacttcccaaaaacacagttggaggaaccattctgcgtagtgacctattggcaaattttttgacagagggcaattttagagcaagtgttgatttgcagcgcactcatcgtatcaaaggaatgattaaaatggtggccacagttggtattcctgagaatacaggtatagcat

SEQ ID NO: 41337 - DNA, 355 bp, Glycine max
  Clone ID: LIB3139-031-P1-N1-D1
ctcttgaagccttttcttcttcgatctctttgatctaattcattgcaagagaggaaaatatgaagcaggattcggttcaggcaccaaattgcgacgatttccgacatgtatcttcaaccgccaagttcaaacgccaagacgcaccaaattggaaagcttaccggccactcgtcaatagcatttctcctatgtcagtggtgcgcttcattatcagagctctatcatttgtctgtgaggtgctactcttgctgcttgcagtcgcaactcgtcttgtcaagatcatcggtgttgctctaacagcttatggaggatcaggtaagaagaaagtcaacagcagcaagccgggaagagatca

SEQ ID NO: 41338 - DNA, 259 bp, Glycine max
  Clone ID: LIB3139-031-P1-N1-D10
gatgaatgctcctgattcaaatgataatattgatctactgttgagcattgatttgttgggtttacaaggagcaggtaaagcttttccaaacaagattgtttttgatgataagcttgtgttggctaacacacaagaattctttgatggaaattttccagtggattcttggttaccaatttttgtgaattgtctttaccctgtaagtcaattaccttcagaagctgtcgtcgtaaatgttacatgtggtagtggacgtgtg

SEQ ID NO: 41339 - DNA, 370 bp, Glycine max
  Clone ID: LIB3139-031-P1-N1-D11
ccctgcttcgctgttctcacattttctacgtattgaatctcaagattctaagagagattttgctgctctttgaagaagggtgtttgcttgattttggagatgtcgctgctctcagatctcatcaaccttaacctctcagacactactgagaaggtgatcgcagagtacatatggatcggtggatcaggaatggacctgaggagcaaagcaaggactctcccaggaccagttagcgacccttcaaagcttcccaagtggaactatgatggttccagcacaggccaagctcctggagaagacagtgaagtgattatatacccacaagccattttcagggatccattcagaaggggcaacaatatcttggtta

SEQ ID NO: 41340 - DNA, 147 bp, Glycine max
  Clone ID: LIB3139-031-P1-N1-D12
ggaattcgtgttttctttcgcttgttcgtttgtttaattcaataaaggaaattaggcatgaccctcttgttgagtatgctctgcctatctgaaaatttccacacctcttttaattgtcgtaatgatgtgtgaagtgtgtgttatttt

SEQ ID NO: 41341 - DNA, 322 bp, Glycine max
  unsure at all n locations
  Clone ID: LIB3139-031-P1-N1-D2
agttgacagccattaacaatatgtgtgcatatgcgctcaatcctgagattgtaggttctcggattcagggcaccattgctgagtgcatttcacagcaaactggttggaatcaaatggctacagcgagaacaccattgaattttgattctagcaagcagagcttttgtcaactttgtattgaccttctcggtggaggaattttagtggacataactggagattggatcacgctcatacaaaattctccaattagtaacttggtgagagttgctgcttggaaaaaaagcntgttaatggacaaaattgtgatgtctgggaatgc

SEQ ID NO: 41342 - DNA, 124 bp, Glycine max
  Clone ID: LIB3139-031-P1-N1-D3
cgaatttgttgtatattggctattatttcagtcatgatgtggctgtttgcaaatgtaatttggtatatagttgtatacattaacgattctgtgaaatgtacacggctctgctatatgttacacc

SEQ ID NO: 41343 - DNA, 372 bp, Glycine max
  Clone ID: LIB3139-031-P1-N1-D4
cgcactcatcgtattaaaggaatgattaaaatggtggccacagttggtattcctgagaatacaggtatagcattggcctgtgctatgaatagttcttttagggggcgtgccagttctgatatttacaccatctgctctcaagactgtgaattatggaatcctgcttgcacaaaagcaatgactatgtcatttaatccaaacccgtgttctgatgcatggagtttggaatttctgaagcgtaccggatttcattgtgatatcatttgtgtcactggatggactgccactccaatgcaggatgttcaggttacaattgattggtttatttcctctcaggaatgtgttcccaggacttattgtgttttaaatcca

SEQ ID NO: 41344 - DNA, 338 bp, Glycine max
  Clone ID: LIB3139-031-P1-N1-D5
aaaggttgtagattttggtcttgcaaaggtttcttctgatgtcaatacccatgtttctactcgagtgatggggacttttgggtatttggctccagaatatgcttctagtggaaaactcacagacaaatcagatgttttctcctatggaatcatgctccttgagttaataaccggacgacggccagctgatacacatcaaacttacatggagtgatgtaaggtagactgtgctagggctctgctcacacgagctatggaagaggatgagtaagattctattattgccccaaagcttcagactggctatgagcccaatgcgattgcacgagtggttggtt

SEQ ID NO: 41345 - DNA, 376 bp, Glycine max
  Clone ID: LIB3139-031-P1-N1-D6
gtaagcactatagtaaaaaaaggacattcattcatctatggctacccttattgctcccagcaaccactctccccaagaagatgctgaagctctcagaaaggcttttgaaggatggggaactgatgagaacactgtcatagtaattttgggtcatagaactgtgtatcagaggcagcaaatcagaagagtttatgaggaaatttaccaggaggatcttgtgaagcgcctagagtctgagatcaaaggagactttgagaaagccgtgtaccgatggatactggaacctgcagatcgtgatgctgttttggccaatgttgccatcaagagtggcaaaaactacaatgtcattgtggaaattgccactatcctctccccg

SEQ ID NO: 41346 - DNA, 323 bp, Glycine max
  Clone ID: LIB3139-031-P1-N1-D7
actcttccctgtcactactgatgtggcatcattctttagactattcactgtagttcctgtgtttgtgactgcatatatctgccactacaatgttcacagcatagacaatgaacttgaggactcctcacagatgcgaggggtagtacaaaccgcccttgttctatgctcttcagtgtacgtaatgataagcttctttgggttcctcctatttggcgaaggaactcttgatgatgtgctggccaatttcgataccaatcttggaattcctttcggttctgtgctcaatgatgctgttcgtataagctacgccgcacacctgatgc

SEQ ID NO: 41347 - DNA, 377 bp, Glycine max
  Clone ID: LIB3139-031-P1-N1-D8
ctgatatagtgaatagaaatggctaaaaacgagttgaggcttttgggtgcttggttcagtccatatgccctgagggtgcagattgcccttaacctcaagggtctagattatgaggttgttgaagagaccttgaatcccaaaagtgatctgcttcttaagtccaaccctgtgcacaagaaaatcccagttctactccatggagataaagtcatatgtgaatctgcaatcatagtagagtacatagatgaggtttggtccaacaatgctctctccatccttccacaaaatgcttatgaccgagctaatgcccgattttggggttcttacatcgatgacaagtggtatacgtccataaggaatactattttggctgaagc

SEQ ID NO: 41348 - DNA, 377 bp, Glycine max
  Clone ID: LIB3139-031-P1-N1-E1
agacaacttgagaatcagcatcagatctggtgtggtggctgttactgtttagcagcgatggccaaagcgtcgattttcatttacatactcgtcgcagcggcgcttctcatattcctctcccattccccggataagcactccggccaccgccaccgccgcctcaagctgcgctccaacttcaccctcgccccctcgcgccaccacgccgtcgccttcgacccgctcgtcgccgaactcgagcggcaccgcgaagacaaggagtgggagaagaagataatccaccaggccctgcccgaactggagtcggacccggccccggcccacgagtcccagcccgagtgggaggacttcatggacgccgaggattacctcaatga

SEQ ID NO: 41349 - DNA, 210 bp, Glycine max
  Clone ID: LIB3139-031-P1-N1-E10
atttgttgggtttacaaggagcaggcaaagcttttccaaacaagattgtttttgatgataagcttgtgttggctaacacacaagaattctttgatggaaattttccagtggattcttggttaccaatttttgtgaattgtctttatcctgtaagtcaattaccttcagaagctgtcgttgtaaatgtcacatgtggtagtggacgtggtg

SEQ ID NO: 41350 - DNA, 370 bp, Glycine max
  Clone ID: LIB3139-031-P1-N1-E11
ggccaagaagccacggctcgaattagggtagaacatattataagagaggagaacatgatggctgctcaagaaatcattgaactcttttgcgaacttattgcggtccgccttccaataattgaatctcaaagggaatgcccccttgacttgaaggaagccatatccagtgtatgttttgctgcaccaaggtgtgcagatttgcctgagttgttgcaggttcagatgctatttgctgccaaatatgggaaggaatttttatctgctgcaactgagctcaagccagactgtggtgttaatcgccagttaatagagctgctttcaattcgtgctccttcaccagaaaagaaactgaaccttctaaaagaaattg

SEQ ID NO: 41351 - DNA, 320 bp, Glycine max
  unsure at all n locations
  Clone ID: LIB3139-031-P1-N1-E12
ctttccccttacccttcttctgtgtgtgatgatgtagatagagaataaaaagagaccagtgtgcagtgagaaagaggttggtcacttcttgtgtggctttgttttgttctttgtgttggaatttgttgatgggtgaagagggagaagaggtgtcaagagataaggaacagcaacacatgggagtttatggaaatgagtggttgtttagtatgttttgtgtaaattgtgtnngttttttgatatataatttttgttttatttgtttgttttgggtgaaatttttataatttttgtaaaataattaacttgtttattttttt

SEQ ID NO: 41352 - DNA, 363 bp, Glycine max
  Clone ID: LIB3139-031-P1-N1-E2
ctcaacttctgctcttccaactcctacaacgcttttctctgcactcatgggcaaggtcaagatcggaatcaacggatttggaagaattggccgtttggttgccagagtcgctctgcaaagagacgatgttgaactcgttgccgttaacgaccctttcattaccaccgattacatgacatacatgtttaaatacgacagtgttcacggacactggaagcatcacgatgtcaccgttaaggacgagaagacccttctcttcggtgacaaggcagtcactgtttttggacacagaaaccctgaagagatcccatgggggtcaactggagctgacatcatttgtgagtccaccggagttttcaccga

SEQ ID NO: 41353 - DNA, 360 bp, Glycine max
  Clone ID: LIB3139-031-P1-N1-E3
ccaacaccaaaccttaaaattattttgcccctctgcttctctctctgtctttctcagaagacaactcaaaaaaaccatggacgtgggtcagatgcagagacagtggatcgactacaccaaatccctcttccttgagggcttcctggatggtcagtttctgcaacttcagcagcttcaagatgagaacaaccctgactttgtggtcgaagttgtctctctcttctttgaagattctgaaaggcttctcaaagatctcacctttgccctagatcagaatggtgttgacttcaaaaaagttgatgctcatgtgcaccagttaaagggtagcagttcaagcataggcgcgcaaagggtgaaaaa

SEQ ID NO: 41354 - DNA, 372 bp, Glycine max
  Clone ID: LIB3139-031-P1-N1-E4
aaactacacacaacctttctctctcttttacacaaacctaagctataaaccagatcaaccttacctctctccacttcttactactgtgaagtttgagtttgtggtgtgcaagatatgaaggattttaccatttaaagagatcaacttgttaggtatatggagaagaaagagatggctgtgaaaactgaggatgcggttgggtcctcttctttcccttgttataattattcaaacctttatccattctcgaacgcgtttgatttctctgaggttgaaaagagctctttagggtttatggagttactgggtgtgcaggactatagtcctctgcttgagttgcctcaactttcaactgtgtccgtgcaatctcat

SEQ ID NO: 41355 - DNA, 363 bp, Glycine max
  Clone ID: LIB3139-031-P1-N1-E6
ctgaacgagaagctgaagcgaaacgtggaagtggtgcctcctccgaagaaagacgacgataagaaagagaaagaaggtgacggtggcgaaaagaaagagaaagagaaagacggtgccggtgagaagaaagagaaagacgttgctgcagcggcggaggttattaacaaaatggaatatatgcaccagatggcacctccgtcgttctggtacgacggaggacactttccaggtcaaacaaattacgctatggaggttcacccaggatatggtgctagtgctaataatcattacgtggagccagggtacgtgaaccagggttatcctctgcagccacctctaccgtactacatgcacccgcacgca

SEQ ID NO: 41356 - DNA, 171 bp, Glycine max
  Clone ID: LIB3139-031-P1-N1-E7
cgtttccttccgtaataagtgaaagaatcagaaaagcaataatggtaataaagcagtgaagctttggacaagaggcagtgttgaggcttaaatgtgttcatggtggatgtacagattaacaagcagcttctcaagtgctagctgatttgtttgtttgctaacatcaatgag

SEQ ID NO: 41357 - DNA, 332 bp, Glycine max
  Clone ID: LIB3139-031-P1-N1-E8
ggattccagtgggcatcaaaagaaggtgctttggctgaagaaaacatgagagccatcggctttgaagtatgtgatgttgtgctgcacgctgatgctatccacagaggaggtggtcaaatcattcctactgccaggagagtcttgtatgcttcccagattactgccaaacccaggcttcttgagcctgtctacctggttgaaatacaggcttctgaacaagctcttggtggaatctacagggtttttaaccaaaaacttggacaccggttcgaggtaattcataagtcttgtaccccattttacaacatcaaggcatttccttccttgtcatc

SEQ ID NO: 41358 - DNA, 318 bp, Glycine max
  Clone ID: LIB3139-031-P1-N1-E9
cggatccgaatctggttgttgctccttgaattggatcagagcatacccttttgctcaaatttgatttttttttggcacacttttaccctttcaatcaaggttgtttcatttcctgttttcgtgaattttgcagatggttctgtctctgtagctcggaatcagacgacaggagaatttgctgggggagagtttcaatttttcaaatcctgtcgttgattcatttggtattgcactcgcgtttctctctttctattttcgtcagagattatggtttttcgtttctagagggaggggtgggttgtttttattaagtttaga

SEQ ID NO: 41359 - DNA, 296 bp, Glycine max
  unsure at all n locations
  Clone ID: LIB3139-031-P1-N1-F1
gtcccttttctgaaattctcctaactctctctctctctcaacaatggctcgtacttttgttcttatgttggttgctgctgctgcattgttgttgagctccacgatggctcaatctccagcttcttcgccggctttatcaccgaccaacacgccggtggccactccaccgaggagggcgttgtctccgtctcctgttcctgctgcggtgccaccgtcgtcttcttcttcggctccacctacttcttctccttcggagcccccaaatgcagctgctactccgaacatnccttccttga

SEQ ID NO: 41360 - DNA, 375 bp, Glycine max
  Clone ID: LIB3139-031-P1-N1-F10
ctcgagccctaaatttcaaacaaaaaaaaaagcaacgaaaacaaaatctctctttctctctcctccccagaaacaaatttgtcaagcttttctctctgtcaaaaccgaaacgcagaaaacaaaacaaacacacacaacacagcacaacccaaacgactagccaacagcaaaacgcaaacactctcctcaaaacgacaaccgccacaaaacaacacaaccaccgcccctcaccgccttcatcttctctctctctctttagggtcgatggctgaattcggaaacaacaacaacaacggcgccaacacgacgtcgtcgaggttctccttcttcaaccgttccctcacgacgctccgcaacgaaaaaccgccgcagctg

SEQ ID NO: 41361 - DNA, 370 bp, Glycine max
  Clone ID: LIB3139-031-P1-N1-F11
ccccaacaatgtgaaatccactgtctgtgacatccctccaactgggttgaaaatggcatcaaccttcattggcaattctacctctattcaagaaatgttcaggagggtgagcgagcaattcacggctatgttccgcagaaaggccttcttgcattggtatactggagaaggtatggatgaaatggagttcactgaagctgagagcaacatgaatgaccttgtgtctgagtaccagcaataccaagatgcaactgctgatgacgagggctatgagtatgaagatgaggaagaacctcaagaagatgaggcttaaaacagtgtagtagtgttttgcagggtgttcttgtttgtgtgttttgttgtgatactc

SEQ ID NO: 41362 - DNA, 381 bp, Glycine max
  Clone ID: LIB3139-031-P1-N1-F2
caaaactcagggtcttggagctggcaaagcagcagatttgacatattgggagagtgcagctcgcatgattgctgatgtctcgaagtctgacaagatcgtggtggagaaatccacagtccctgtcaaaactgctgaagccatagagaagattctgacccacaatagcaagggaatcaaattccagattctatcaaaccctgaattccttgcagagggaactgcaatcaaagatctctttaacccagaccgtgttcttattggaggcagggaaaccccagagggccaaaaagctattcaaacattgaaggatgtttatgcctcaatgggtccccgaagaaagaatactgaccacaaatcttttggtcggcagaactgtctaag

SEQ ID NO: 41363 - DNA, 374 bp, Glycine max
  Clone ID: LIB3139-031-P1-N1-F4
caactgcaacacttaaaggctctcaatttatcagggaatagactctcaggtgaaattccttcacttctcaaggaaagatcaaataatggttcacttttgctgagtgtggatggaaatctggatctctgccgggagggcccatgtgaagaggataaaatgaatattgccccacttgttgcaggcattctttcagttgtagtctttttcattgtattgggtattgtactgaatatcatttggagaaggagatgcaacagaaaaccagcatcaaagcaagctgtgagattaaatgaagaggttgtgctgaagacaaacaatacacagttcacatactctcagatatcgactattaccaataacttcgacaaaatgat

SEQ ID NO: 41364 - DNA, 373 bp, Glycine max
  Clone ID: LIB3139-031-P1-N1-F5
attagtgttcatgaatatgtcaagccttactttagtggttctaaattgaaaagctttctagctggtcataatatcaccattactgatggtattgacaaaactagtgcaactttgcaatttagaaagttagcagattgtgattttctcaagagaaactttaagcagatgtctaatgttttgtgggtggctcctgaagacaaggcgagtttatggtcacaacttcattatgtttcgtgtaataatctggaaatgcaagaagcttatcttgtcaatctcgtaaatgtgttacgagaactgtatttgcacagtccagaggaagctcgccaattgagaaggaaagctctctctcgtattgaatggctgcaaaaagctg

SEQ ID NO: 41365 - DNA, 342 bp, Glycine max
  Clone ID: LIB3139-031-P1-N1-F6
cagtgccgtctctgcctaatatgttttggaagaaagaagaaagagtcagtgcgttgcgcgtgtaatggaagctgagcggaagcgcttgaagccacgccttgagcgtcggaacgctatgaagaacatcgactaccaattgaaggacgaggacgcagacgcagacgcagacgcagcttatttgaatcaacggagtttccgagtcaaaggaatcgacggcgaattcgaccgcatccttcgcagcctgggcctctctgggcccgaggactttgccatccctgctgcagcctgggaagaagcccgggcccataaagcccgcagcagcgtccaaccgagagagggggg

SEQ ID NO: 41366 - DNA, 360 bp, Glycine max
  Clone ID: LIB3139-031-P1-N1-F7
taagagatggtgtgccttacggctcctcgtggtaggtgagttgggacttgtggcggcgagattgctgctgctccaaacgttacaggagagaaagccttctttgccgtgaattcggatcgagatcaatgggttcagcggagaaagagccactgttaacagcggagggaactcgatcaaactcaaagcacgagtcctcctcccatgggcaacttgagagaattctctccgacgacaccctacccttcctcaaccgtgtgggacccgccacctggatcgagttgaagctccttttttttcctgccgcccctgccgtcatcgtctaccttatcaactacctcatgtccatgtccacccaaatct

SEQ ID NO: 41367 - DNA, 370 bp, Glycine max
  Clone ID: LIB3139-031-P1-N1-F8
ccaataaccctttatttttctcgtttttttttttttttataaaaaaaaagaaaaaagaaacatattcttgcaatttcgttgtacaaacaaaattcccctattttcggcacgcctttgttgaatttccaatctctatttttctttctttctatttatacgtaataattccaaaaagcctaacgcgagagattcatcagtttttcaattattcctcgaattttgaaggaatcatacaaacgcttgaaatattcgtcatcaacaacaacctcacgctgctatagattttttttttctcttcttacagatccaaacatggccgaagaacaccgatgccaagctcccgaaggtcacagactctgcttcaacaact

SEQ ID NO: 41368 - DNA, 376 bp, Glycine max
  Clone ID: LIB3139-031-P1-N1-F9
cacacacaaaagaatcagcatggctttcaatcaagagttagaagctgtaacccaagctttctcagggcatggagtggatgagaaatcattggtaacattactgggaaaatgggatcctctggagagagaatctttcaggaagaagacaccacatttgttcagtgaagatcatgaacgccattttcagaggtgggatgatcaatatgtccgtcttctcaagcatgaattcgtgcgttttaagaatgctgtggtgctttggtccatgcacccttgggaaagagatgcccgtttagtaaaagaggccctaaagaagggtccaaatgcatatggagtgctgattgaggtttcatgcactagatcctcagaagagctattg

SEQ ID NO: 41369 - DNA, 377 bp, Glycine max
  Clone ID: LIB3139-031-P1-N1-G1
aaatgctgttctttcaatgtggagatattttgttggagatctcgtctttgaagtttctaagatgacttctccctacattaaatgtacagtctctttcttcatagcatttggaaatttggctgatgataccatcaattttgaggcttttccccacaagctggtgcagtttggagagattcaagaaaaagttgtattgaaattttcacaagaggaatttcttacagcttggtcaactcaggtgcgtcctgcaacaactctgttggctgatgggtgtccatatttgtatgcaatggtgcatgatagttcagtgtctacaataccaagtgattttgtcattggtgtcaagttgacaaccataaacaatatgtgtgcatatg

SEQ ID NO: 41370 - DNA, 370 bp, Glycine max
  Clone ID: LIB3139-031-P1-N1-G10
ggaccctacatcgttgagtacggtgcagattacagaatgataagcatcttcaactctccattccaagttggtttctacaacaccaccccaaatgccttcactctagctttgcgtgtagggctccaacgctcggagcagctatttcgttgggtttgggaggccaatagggccaacccagttggagaaaatgccactttttcacttggcactgatgggaaccttgtgttggcagatgctgatggcagaattgcatggcaaactaacactgccaacaagggtgttgtggccttcaggcttctttcaaatggtaacatggtccttcttgatgcacaaggcgggttcgtttggcagagttttgatcaccccacaa

SEQ ID NO: 41371 - DNA, 370 bp, Glycine max
  Clone ID: LIB3139-031-P1-N1-G11
gtttaaggcacacacattgttccattattctctttctcttttttctgtctaagacccacaatggctctttcaaactccgaaggagtctttcacttcatcctctcttctttcagctaccctttgcaacacaaaaggtaggaagtagatattgactgcttcctgggttcacatacaatgaaatcaggtttaaaaaatggttggccctctgttgtgcgtcttcgtctccgagacaaatcagtgacacccttttgcatattctctaaagtgaaatcagctggcaacatacctgggaatacacctgtctatctcaatgtctatgacttgacaacagtaaatggctatatgtattgggcaggcattggtattttcc

SEQ ID NO: 41372 - DNA, 362 bp, Glycine max
  Clone ID: LIB3139-031-P1-N1-G12
tgggcaagcagcatttctacggaagttccctgagaaagtggccaatactttctatgatagtataccggatcccttatattggccaacatttgttgttgctgttgctgctgccattatagctagccaggcaatgatttcgggagcattctctattatatctcaggccctaagtctaggttgtttcccaagagttagggtagtgcacacttccattaaacatcagggtcaggtgtatattcctgaggtcaactacatgttcatgattgcatgtattgtggtctgtgctgccttcaagaccacagaaaagattagccatgcatatgggattgcagttattggtgatatgatgatcacaacaacac

SEQ ID NO: 41373 - DNA, 369 bp, Glycine max
  Clone ID: LIB3139-031-P1-N1-G3
ccatcctttcgcattctcaatacccttttgatttgtgaaaggaaagcaaacatggttgatcaggtccaacaccctacaatcatggacaaggttgctggtcagctccatctccgttctggtctttcatctggtattagaagttatgatggagcctaccgccacccagctatgtaccaaagaccctcttttgggaattactcgaatgctgcattgcagtttcctgtgatgcccacatgcaaagctaccatggatttgtctgctactgcaacatctgcctcacccgtctttgttgctgctccagcagagaaaggccattttcttttagactttctcatgggaggtgtttcagcagctgtctccaaaactgct

SEQ ID NO: 41374 - DNA, 309 bp, Glycine max
  Clone ID: LIB3139-031-P1-N1-G4
attaagagtgtacatataaatgatttatccagtgaagaaagaaaaagttgttcatgccaaatcgaacaatttgattatgtttttcttgacaggtatggcctccgggttcacttgaagaaaaggtgcagactttagtgaagaattgggagatggaaatgttccacaaggaggatttcaaggataacagatcagtggacccagagaaatacactttcagcctaaacggaaggaagcctattagtttgtgagagaaaagggagctttggaggagggtttattccacttgttcaaaccttttaccagagaaac

SEQ ID NO: 41375 - DNA, 349 bp, Glycine max
  Clone ID: LIB3139-031-P1-N1-G5
cataaacaaggttttgaggtacttctcttacgagcatttttatgttatatactgcaagttttgggagctggatacagatcatgatttcttgatagacaaagagaatctcatcagatatggtaaccatgcgcttacctatcgaattgttgatagaatattttctcaggttcctagaaggtttaccagtaaggttgagggaaagatgggttatgaagattttgtttacttcatactgtcagaagaggataaatcatccgagccaagtcttgagtattggttcaagtgcattgatttggatggaaatggagttctgacacggaatgaaactgcaattttttatgaggagcaa

SEQ ID NO: 41376 - DNA, 344 bp, Glycine max
  Clone ID: LIB3139-031-P1-N1-G6
gttcggagtactagaaaagaaaaccataattaagatgagaacaagcaaccacttgatcggtcttctgaacttcctaacgttcctgctgtcgattccgatcctaggtggcggaatatggctgagcagcagggccaacaacaccgactgcctcaagttcctgcagtggccgctcatcatcatcggagtcagcatcatggtcgtgtccctcgcggggttcgccggcgcgtgctaccgcaacaccttcctcatgcgcctctacctcgtcgtcatgttcctcgtcatcgccgtcctcatcgggttcatcatattcgcctacgttgtcactgacaaaggctccggtcgga

SEQ ID NO: 41377 - DNA, 372 bp, Glycine max
  Clone ID: LIB3139-031-P1-N1-G7
ctcgagccgattcggctcgagctctttcattcaattctcttctctgctcttctcttctgttcccaccttctgatccatcatccctcgttttctccgaacaatggctgctggtgtcactgtcaagtccgaggttctagaatcttctccccctgaaggagtatgttccaacacggaggaaaaccacctggttcagaccaatttgtctgatgggtcacccaacaagtctgtgccagcatctggacttaatgcagtgattcctagtgcaaatcagcttaccatcttctataatgggagtggttgtgtctatgatggaatccctgcagagaaagtgcatgaaataatgcttattgctgctgctgctgccaagtctac

SEQ ID NO: 41378 - DNA, 375 bp, Glycine max
  Clone ID: LIB3139-031-P1-N1-G8
cttccaaactcgaacgaccatctcctcaccgtcgtgtctctccgccgctgccaccacacctccggcatccccaacagagtgatggaagaaaaagtgaaattggctcattacaaagtcgggtctttgccaactctattttatgttcctgacttcatcacagacagtgaccaaagccttctactcaacaacatttatggagcccctgcatcaaagtggaagatattgaagaatagaaggctacaaaattggggtggtgttgtccatgagaagggccttctacctcaaattttgcctccatggttaacaaatctcacgcaaaaaatatatgaagaatctgggctattcccatcagcactcaatcatgttcttatcaat

SEQ ID NO: 41379 - DNA, 375 bp, Glycine max
  Clone ID: LIB3139-031-P1-N1-G9
tataaaccgaaccaaacgcaccctacgcacctactccatcctccgcttcgtgacttgcagcaattcccaatggcttccgtttccaagctctcaacgccaaatccacttgcttccttatcagaagcgcttcgcccccgagattctcgcttcctcaccttcaaaccttcttccatcgcttttaatcacaaaactaacctatccgcttccctccgatccattcactcgctccctcttaaaacctccttacggatcaaatgctcccaaacagatgggaatggaagtcctgcaaagaggacagtgcttcatgatctttatgagaaagaagggcagagtccatggtatgataatctctgcagacctgttacagacctgctt

SEQ ID NO: 41380 - DNA, 374 bp, Glycine max
  Clone ID: LIB3139-031-P1-N1-H1
atgaaaagtttgaatagccaactcaaatcatctggtgtatggaccagatgttttgttgatggatctgacataatacataaagcacgcttctgtattccagatagtcaaacatgggaatcactgcccctgacttctttatttaatgccacaagcaatgctgacaatgtagggagcaaccaaattcttcttttgggggcatgttgtggaagtttatgcaagtatttgatggtggcctctggtagagcatctattttcattctccgagcaaaagagaagactattataaaggcatgggaccatgctgttggcattatatgtgttcatgaagctggtgggaaggtaacagactggaaaggcagcgacatagatcttgc

SEQ ID NO: 41381 - DNA, 341 bp, Glycine max
  Clone ID: LIB3139-031-P1-N1-H10
attctaaacagacagtagtagcaccatcatccccaataatggcatcatccccaacctttgctttgagaaccatctcctctttctctgtgaaacctgttaccaccacaagatcatcactcaccacctcatccaccacaaccctcttaccatttacttcaacaaactcatctctccccagaactctcaaactcaacacctcttccccacatcctcacctttcactaccccacaagtctttcacttgtagaagccaggctgagccatcttctgattcagccaaagtccaagaactgagtgtgtatgagatcaatgagagagatcgtggaagccctgcttatctt

SEQ ID NO: 41382 - DNA, 295 bp, Glycine max
  Clone ID: LIB3139-031-P1-N1-H11
ctccactctagcgttgttgcattgcagaagcgtctccattttctttcgcgatggccgcgcgagccctgttgaccagaaaaaccctagccaccgttctccgcaacgacgcgaagcccataatcggagctggcatagctgcagctactcattctcgtgggttgcacgtgtacacgctccccgatctggattacgactatggcgctctggagccagccatcagcggcgaaatcatgcagctgcaccaccagaagcaccaccagacttacatcaccaacttcaacaaggccctcgagca

SEQ ID NO: 41383 - DNA, 338 bp, Glycine max
  Clone ID: LIB3139-031-P1-N1-H12
tatacaagagctatgacgtgactgcactcgtcccatacctaggcttggaattcgggtggaggttctgagattgagctcatgtagggtgtaggtgagaaagaactcacaatagagaacaacaacacaattccatggctgattttgactcaacttatagtcctccttctcctctttgcgctcctctttttcttcaccctcctcccattgggtgccgacgaccaccaccacaacaaccttgttaccgtcgacacgcccccttcttcgacaacctttttcagtgtcttctttttcgacgatattcaaattcagcagattgactccccgtttactaatcacga

SEQ ID NO: 41384 - DNA, 361 bp, Glycine max
  Clone ID: LIB3139-031-P1-N1-H2
gttccatctgaattgtggagttctgagtgggcaaatcaaacgtcatggcatttgagtttccgtattgacaatcccaaacagtctacagtttttgatattctcttgggaatctctcaagattttgaaattgctggtaatactcttatgccagctttttctgttccacaggctactgccagatcttctgaaaatgcggaatcctctgcatgatctggaattcgtgttttctttcgcttgttcgtttgtttaattcaataaaggaaattaggcatgaccctcttgttgagtatgctctgcctatctgaaaattttcacacctctttttaattgtcgtaatgatgtgtgaagtgtgtgttatttt

SEQ ID NO: 41385 - DNA, 375 bp, Glycine max
  Clone ID: LIB3139-031-P1-N1-H3
ctccaaggtttttccataactccaatccctcatcgcccaagtcgccatcgagtttttcacttctcaaatcaactctacgactatccaaaagtcgatgtggaatctgtatgcagagcgcgaggagtgggcaaggaacagcaattttcacagcggaatgctctcacacgtttcacttcccttgcatagtgaagaagcacccgatcgtcacgtgccccgtgtgcaacactagctggaaggagcttccggtgctctccatcaacaacaacaacaacgacaagagcgacaagagaggcttcaaggtctacaacgacgacgagcctctcatgtctccaacttcactctctcgcttcaatcctattcccgagtcagaaaacg

SEQ ID NO: 41386 - DNA, 342 bp, Glycine max
  Clone ID: LIB3139-031-P1-N1-H4
ggaacaaccttcatccacatcaagtcgtaggaactgctggtataataaaggaaattgattgtttaactgccacggtggctgacatagagaaagtcagatcagatttttcaatgtcaataaccgtggataacacaaagttatgtggatttggagggtggtttgatgtacattttcggggaagatgtgaggatccagctgaacaagagattgagttaaccacagctcccagtgtaaattatggtacacactggggccaacaggttttcctcttgcattcttccatgcatctgagtgaaggtgatgatttaagggttttttttctaatgagtcgctcaaaggaaa

SEQ ID NO: 41387 - DNA, 372 bp, Glycine max
  Clone ID: LIB3139-031-P1-N1-H5
tctgcgtagtgatttattggcaaattttttgacagagggcaattttagagcaagtgttgatttgcagcgcactcatcgtattagaggaatgattaaaatggtggccacagttggtattcctgagaatacaggtatagcattggcctgtgctatgaatagttcttttagggggcgcgccagttctgatatttacaccatctgctctcaagactgtgaattgtggaatcctgcttgcacaaaagcaatgactatgtcatttaatccaaacccgtgttctgatgcatggagtttggaatttttgaagcgtaccggatttcattgtgatatcatttgtgtcactgggtggactgccaccccaatgcaggatgttca

SEQ ID NO: 41388 - DNA, 349 bp, Glycine max
  Clone ID: LIB3139-031-P1-N1-H7
cggctcgagcggctcgaggagctggcagggaatgctagcaaggatctcaaggtcaaacgtattactccccggcatttacaactagcaatccgcggggatgaagagttggataccctgataaaaggaacaattgctggaggaggagtgattcctcacattcacaagtctcttatcaacaagtcttccaaggagtagattactagtgaataatagcttgcttgatggaaaatttctctctactaattgtgtaatttttgcatggcacttgaaaaacaaagtagggccttttatttatgactttgttgcctgttgttgatcatggatataatatttagtctttctctttgtt

SEQ ID NO: 41389 - DNA, 356 bp, Glycine max
  Clone ID: LIB3139-031-P1-N1-H8
gttttgaaatgtggagttctgagtgggcaaatcaaacttcatggcatttgagtttccttattgacaatcccaaacagtctacagtttttgatattctcttgggaatctctcaagattttgaaattgctggtaatactcttatgccagctttttctgttccacaggctactgccagatcttctgaaaatgcggaatcctctgcatgatctggaattcgtgttttctttcgcttgttcgtttgtttaattcaataaaggaaattaggcatgaccctcttgttgagtatgctctgcctatctgaaaatttccacacctcttttaattgtcgtaatgatgtgtgaagtgtgtgttatttt

SEQ ID NO: 41390 - DNA, 374 bp, Glycine max
  Clone ID: LIB3139-031-P1-N1-H9
ctgcactctcaacctaaatcaacagttggaactcctgcatacattgctccagaggttctgtcacgaaaggagtatgatggaaagatttcagatgtttggtcctgtggtgtgactctttatgtcatgttagttggtgcatacccatttgaagatccagaagatcctagaaatttcagaaagactattgggagaataataggtgttcagtactccatacccgactatgttcgagtttcttctgactgtaggaatcttctctctcgcatctttgttgctgatcctgccaagaggatcaccatcccggagataaaacagtattcttggtttctgaagaatatgcctaaagagatcattgaagccgaaagaaaaggatt

SEQ ID NO: 41391 - DNA, 169 bp, Glycine max
  Clone ID: LIB3139-032-P1-N1-A1
gcaagacgccggatcgccgcagtgcaccgcccggaactcggatcgaggatagaggtttagcaatgagcattcctctgccctttaaggaggcggatatgtcaaagacgcgatgtcttaaaagactcaggattattggaaggatgaagatgccaactcacttgcttcctaa

SEQ ID NO: 41392 - DNA, 368 bp, Glycine max
  Clone ID: LIB3139-032-P1-N1-A11
tgtggttctgttgaagtttttgagggctagggaatgtaaagttaatgatgcattggagatgctgaagaagacccttaagtggaggaaggaatcaaagattgattctgctgtggatgaggattttggctctgacttggcctctgctgcttacatgaatggtgttgaccacgaggggcaccctgtgtgctacaacatctttggtgcatttgaaagtgaagagctttaccagaagacttttgggaccgaggagaagcgcaatgagttcttgaggtggaggtgccaagtgatggagaagggtattcaaaagctcaatttgaagccaggggggggggcttcaattgctcaaatcaatgaccttaaaaactccc

SEQ ID NO: 41393 - DNA, 373 bp, Glycine max
  Clone ID: LIB3139-032-P1-N1-A12
gatccatctcttgtttcttgctttctttcttcaccaggtcacttgctgggaaaatgaccactgaaatcggggttcatgcaaccgctacaaagtggttcaacctcttcgcaacacaactccatcatgttcaaaacctaactgatagagtgcatggaaccaagctgcatcaaggtgaagactggcatcacaacgagacagtcaagcactggacttataccatagatggtaaggttacaacatgtctggagagtattgaatccattgatgaacagagcaaaacaatcacctacaagctcttcagtggtgacattgatcataattataagaactttaagttcatctttcaagccattgatgataatgatcatggcgg

SEQ ID NO: 41394 - DNA, 373 bp, Glycine max
  Clone ID: LIB3139-032-P1-N1-A2
gtgcaagatctttacctcaatggcaccaagttctgcagtgccagatgaacaggttgttgttggagaggagattgagcatgtaagagtggtcactttgaacaggccaaggcaattgaatgccatctcaccagaactggtttctcagctagcaacatatttggaaaagtgggagaaggatgagaaagcagaactagttattataaagggagctggtcgggctttttgtgctggaggagatttgagagtcttctatgatggatgaaatataaaggatgcctgccttgaagtggtctacagattttactggctttgctatcacattagtacctataagaaaacccatgttgcgcttgttcatggaatttcaatgggt

SEQ ID NO: 41395 - DNA, 377 bp, Glycine max
  Clone ID: LIB3139-032-P1-N1-A3
gaagagctatgatccacgcagtgcacgcagtccgtgagttcggcattgagcctcgagctcaaaattaaattgacaaaaatccgcgatttagaagtgagagatgatggggttgagggtcaccaaactgttcagcaggttgcttgcgaagaacgaaatgaggattctgatggtaggtctggatgctcctggtaagacaaccatctcgtacaagctcaagctgggtgaaatcgtgaccactatccccaccatctgatttaatgttgagactgcggagtacaagaacatcagcttgactgtgtggaatgttgctgtgcaagacaagatccgaccactgtgaaagcattttttccagaacacttacgggctgatttttgtgg

SEQ ID NO: 41396 - DNA, 357 bp, Glycine max
  Clone ID: LIB3139-032-P1-N1-A6
cggctcgaggaaaaggcgtcttcaggaacccctcccaaaacttctgatacccttttattcattccattcgtttctagggttttcttttctttgccgagaaaatgagagagtgcatttcgatccacattggccaggccggtatccaggttggaaacgcctgctgggaactctattgccttgaacacggcattcagcccgatggacagatgccgagtgacaagaccgttggcggaggagacgacgccttcaacacatttttgagcgagaccggcgccggaaagcacgtgccccgcgccgtcttcgtggatcttgaacccaccgtgatcgacgaagtcccaaccggtgcgtaccggcagc

SEQ ID NO: 41397 - DNA, 166 bp, Glycine max
  Clone ID: LIB3139-032-P1-N1-A8
cgcgaagagatcttgactgattcttaaaggtaggaacttgagacttgtttctctcagagatcgcttttcctaatgctgatttcgaggtcgcttctgacggaggtgctgttgtcactaggggcggcgcagccgtatttgctctgtgcattcccattatcatggggct

SEQ ID NO: 41398 - DNA, 253 bp, Glycine max
  Clone ID: LIB3139-032-P1-N1-A9
cctttgttcactcttcttctcttgcggctagggttttagcgcagcttcttgtagatttaaggaagatggctaaggaaaaggttcacatcaatattgtggtcattggccatgtcaactctgggaaatccactaccactggtcacctgatttacaagcttggaggcattgacaagcgtgtctattgagaggtttgagaaggatgctgctgacgacgatcaagaagtctctcaagtctgcctgggtgctatgcaac

SEQ ID NO: 41399 - DNA, 322 bp, Glycine max
  Clone ID: LIB3139-032-P1-N1-B1
agaagagctatgaccacgcatgacacacagccgtaaccttttttttttgtgtctcgagcctttgttcactcttcttctcttgcaactagggttttagcacaacttatggggagggaaaccccctctccaaagaaaaatttcccattagggcaccaggccttcacccatttaacagttgacagttcccaaccaaatgtccacatccaaaacaccataaaatttttattctttcaaccctagctaatgacaagttcctatcaaccttttctgaaaaagaaatttaccagcctaaactggagatgggatcacacttcttcacaat

SEQ ID NO: 41400 - DNA, 370 bp, Glycine max
  unsure at all n locations
  Clone ID: LIB3139-032-P1-N1-B12
gctgaatgtggcgaataacgagttgtctggtgagagtgctgagagtgtttgcatgtggccgaggttggagaatttcacgtactcttataactacttctgcagtgagtcaccaacgtgtctcaagttgaaggataaggatgataccaagaattgtattccttataggccattgcaaaggtcactggatgagtgtaaggctttttatgcacatcctgttcattgtagtgcctttggttgtgcatagacgccgccgtcaccttcttcttcttcggcgacgccgncaccggcaacttaccaccactatccctgaggagccatggcagaaatataagtttggaatatttaatttgcttttttttgttctgagttt

SEQ ID NO: 41401 - DNA, 381 bp, Glycine max
  Clone ID: LIB3139-032-P1-N1-B3
ttgaagtgaagcaattgataaatttattgcgattgagaatcggagaagagaagcaaaataaaagggatgcgagtggcgcgagaagaagcaatgggtggtggaaagcggaacacggtggagacattcttcttagccactctaattctctggttcgcttccctttgtttccagattttgttgaacaagcgctgggagcttctctctgtcatcgcgggttctatcttctaccagacatctaactgcctcatccgattcttctccccacataaagacaaagacgctctcttcgttaacacctccgtctctcttctccactctctcctcacctcctcctcagagatcttcatcttgttcagagagttgttaagtaatgggccaagt

SEQ ID NO: 41402 - DNA, 324 bp, Glycine max
  Clone ID: LIB3139-032-P1-N1-B4
atggaatggctcttcggcttccaccacttcctggccgggccatgcgcttcaactcaagcgtgtgctcccttcctgcacgaaaatctagcacctttgccactctgtcacaaccccgaagcgactgggttgaagccactaacagtttcttcgaccaagacaaacgacccatcatgttatttgacggagtatgcaacttgtgcaacgggggtgtgaagttcgttcgtgataacgatcgaaataagacaattagatatgaacctcttcagagtgaaacgggtaaaatcttactcaggagatcaggaagagctcctgatgatatctcaa

SEQ ID NO: 41403 - DNA, 344 bp, Glycine max
  Clone ID: LIB3139-032-P1-N1-B6
cctctctctcccttctctcatcgaccaccttcgccctgtcttccctcatatggatgaccaggtcctcgagagagcgctccaagaatgtggcaacgacctagatgcggccatcaagagcctccacggcctctgtttgggatctgctgatgataattctcaacctgctccacaacctgaccaccctaacctcgtcgtcgacacaggtgcgttggaagagaatggggatgcttctgcttctggggatcagcccgctgctgccaattttcctgccggtggagcagaatggattgacttatttgttagagagatgacgtgtgctactagtgttgatgatgccaggtccc

SEQ ID NO: 41404 - DNA, 368 bp, Glycine max
  Clone ID: LIB3139-032-P1-N1-B7
aggtgattttgtcattggtgttaagttgacaaccataaacaatatgtgtgcatatgggctcaatcctggtatttcaggttctcgtcttttgggcaccattcctcagtccatttcacagcaaactgtttggaatcaaatggcaacagtgagaacaccattgaattttgattctagcaagcagagcttttgtcaattttctattgaccttctcggtggaggaattttagtggacaaaactggagattggatcacacttatacaaaattctccaattagtaacttgttgagagttgctgcttggaagaaagtttgtttaatggtcaagattgtgatgtctgggaatgcaccagtcaaaaagagtgattggg

SEQ ID NO: 41405 - DNA, 335 bp, Glycine max
  Clone ID: LIB3139-032-P1-N1-B8
cattgttgttggagtgagcgaagaatatgtattctagagattcatggggtggaccgttggagataaacgcgacggactcggcgacggaggacgagcggagccggaacctgcaggacgttgacagggcagcgctgtcgcgtcccttggatgagacgcagcagagctggctccttggccccggcgagcagaagaagaagaagtacgtcgatctcggctgcatcatcgtcagccgcaagatcttcaagtggaccctcggcacaatccttttcgccgcctttctcgccggcctcatcgccctcatcgtcaacaccgtcccccgtcaccggcacaaacac

SEQ ID NO: 41406 - DNA, 376 bp, Glycine max
  Clone ID: LIB3139-032-P1-N1-B9
aaggaacaaaacaaccacccaactaaccctaattcaacttttccgatctgatcacttcgagtaaaaattccaaatgagtcgggcacaggatgcaaaccaatcattcttcccttttggaaatccttttaggatgatatcacctaaaagccctaaaatttcttcacagctgttgttaattctacatgcttttgaagcaactttggaagagaggctgaaaaagcttattcccaagagcaaggatgagatcctcagcttgtcttggatgactttggctatgcagtcactttgtgagagccataatgacattaaaaccatcataacagagcttgagcttcctgtacatgattgggatgagaaatggatagacgtgtacttg

SEQ ID NO: 41407 - DNA, 247 bp, Glycine max
  Clone ID: LIB3139-032-P1-N1-C1
ctttgttttttctgcgatcattttccattgggtggaagaaagtctcaacctttagtggaaagagcaaggatctgagtgagtgagcgatcatgtgtggtggtgcgattatcttcgacttcattccatcggttcccgccgtctgagcgcaacgcgtgaccgtcgacatactgtggccgaatttgatgcatcgtttctagaagtctttggtagacaggcttttaaaggctattttcatagacatggatga

SEQ ID NO: 41408 - DNA, 372 bp, Glycine max
  Clone ID: LIB3139-032-P1-N1-C10
gcctgctcccctggtgccaaacttctcatcaagagggccttcatcgctttcaagcaagattctcaagcctgatattgcagctccgggagttaacattctcgctgcatggattggaaatggcacagaagtggttcccaaaggaaaaaagccctcactatacaagataatctcagggacttccatggcttgcccgcatgtttcagggcttgcaagcagtgtcaaaacacgcaaccccacttggagtgcctcctcaatcaaatctgccatcatgacttcagcaattcaaagcaacaacttgaaggctcccataacaacggaatcagggtcggtagccacaccttatgactattgagcaggggaaatgacaacatc

SEQ ID NO: 41409 - DNA, 367 bp, Glycine max
  Clone ID: LIB3139-032-P1-N1-C11
ctcccaccctcaaaccctcactcacaagacccacacgcttcttacctctcaaatcgaagaagaaccctcaaaacggcgccgttgggactcgcatgtcgaacaccgcaactccaccaccgacggagcggctaatctcaatcgcatcctacgcactcccattcttcaactccctccagtacggccgctacctcctggcgcagaaccctaccctcgccgtcctcttcgaccccatcgtgcccctcctcgccttctacagatccatcccttactcctccttcgtcgccttcttcgcgctctacttggggatcgtcagaaaccctagtttcccccgctacgtcaggttcaacgccatgcaggccgtcaccct

SEQ ID NO: 41410 - DNA, 371 bp, Glycine max
  Clone ID: LIB3139-032-P1-N1-C12
cggaaatgaaaataaaggtggtgatgtgatacttgatgtagagagaggagcatttgaatccacaacatctcatacagcagataatattccagctgaagatgctattataacagaactacaaactcaagtacaaaatggtgaacaaccaagagatgaagttggtgaaccccaaggatgggaaatacttaaaagcattgtctatggtggtttagttgagtcaattactagcctaggaattgtgtcatctgcagttagttcgggtgctaccccattgaatattatagcattgggatttgcaaatatcatcggtggacttttcatccttggtgataatcttattgacttgaaaaaagataactctggagaggatc

SEQ ID NO: 41411 - DNA, 377 bp, Glycine max
  Clone ID: LIB3139-032-P1-N1-C2
ccaacctcagttctatggggatattttgcttacatggcaattgatagtctcccagggaatcagttctgggaaaggatattgcttctcttcgtcacctcaagccggcgttacaaaattttggaaggttctcatgcctcttttgtggagacagtaccattcaagaccatagctgcatttacagccttacagttagtatattttgcgttatgtttcggggtgacttggatacctataggtggaatattgttccccgtaccattcttccttctcataattataagagaacacttgcttccaaagatgttcaagcctaaccatcttcaagaactagatgcttctggttatgaggaaattattggtgctccacatggttcact

SEQ ID NO: 41412 - DNA, 382 bp, Glycine max
  Clone ID: LIB3139-032-P1-N1-C3
tccttaagctccttagtgctgctccttgcagctctaagtctatcccctcaagttcttgcaaactatgagaatcccccagtgtacaagcctcccactgagaaaccaccagtttataagcccccagttgagaagcctcctgtttacaaacctccagttgaaaaccccccaatttataagcctccagtagagaagccaccagtgtacaagcccccagttgagaaacccccagtgtacaagcccccagttgaaaaaccaccagtgttcaagcccccagttgagaaaccaccagtgtacaagcccccagttgaaaaacccccagtttacaagcccccagttgaaaaacccccagtgtacaagcccccagttgaaaaaccaccagtgt

SEQ ID NO: 41413 - DNA, 372 bp, Glycine max
  Clone ID: LIB3139-032-P1-N1-C5
gttcgtgacaaaagcggcattggaaggagaagagggttcccagcagccacagttggtgctcggggacaagctattccttcttcgacaacccgatgttcaagacattgacaaggttcgctacaaggaggatgttttcactcacatcaaccaaaacgatatggtccccttgtatgaaaccctagtggccgattccgcgttggacttggatcgtgccctcttggactctatgcgcgctaaaattcacgatgagctcgccaacctcgacgaaaagattgctgatgctgaagaaaacttaggagagagtgaagctcgtgaggctcacttggcaaaatccttgtttttcatccggattatggacaaagagaaagcctt

SEQ ID NO: 41414 - DNA, 349 bp, Glycine max
  Clone ID: LIB3139-032-P1-N1-C6
cttaacgcaccaagggaagcgaaaagcgctttctagcttaagtgatggctaacgcagctgaagtttcagccttgaaccgcatcaaactgcatcttttgggtgaactctctccactggccactcccctaaactattttgatgaatcaaaccctagcccctctgaatcttccaattcccaatcttcttctgtttctcttaaccactacttcactgacctcttcgaattcgactccaaaccccaaataatcgacctccaaactcccaaaacactaacttcagctcagaagaaacctcaattgaatcggaaaccgtcgctgctaatcgctgttccaaagaagaccgagtggat

SEQ ID NO: 41415 - DNA, 373 bp, Glycine max
  Clone ID: LIB3139-032-P1-N1-C7
cagatgtcattgtgtcaccaacaacaggtgtgactgcatactcgatacaagatgatgcattgaagactggtgaacttgactacgtaaatggagctacagttgttcggtattccatatcaggaaacttcctaggacttcctgttgtgactgtaccagtgaacctgcaagaactgttggctagcgtgaccctagttttatacacacaagtttcctaaaagaactttggccaaatttgaggtacacttacaagttagagcatatgctgtctaacggttagcgtgtggagtaagaagttctcgtttaagacatccccatatcctggacagaactctttgcaacgtgttatcatatttggtgacatgggaaagaccaa

SEQ ID NO: 41416 - DNA, 373 bp, Glycine max
  Clone ID: LIB3139-032-P1-N1-C8
cctggacctagtggaaaatttctcgctgccggtcccttcgtataccatctatgaaatcttgggcgttccatccgaggatctgaagttcttgacgaagcaagccgccgtccgcagcaacgggagcgcaactgccgctgaggcttcaaacgccaatcaagagctcctcaactacatggcttctctggtggacaagcgcatccagaagcctcaggatgaccttataagtcacctccttctcgtcgctggcaacgcaaccatggtcaacatgatcaacctgggcataatcgagctcctccaccatcccacccaactcgccgacctccgtgccaaccccaccggcctcgcccccgccttcgtcgaagagctttgccgc

SEQ ID NO: 41417 - DNA, 332 bp, Glycine max
  Clone ID: LIB3139-032-P1-N1-C9
gtcaaaaaggacatgttatggaattctggtttgttatggaggctttcagataaaaaaattctctgctttcttcctcctttggagagtggatctcacttgatgttcttgaaattatgagggattttttttttggtttattaaaaaaaattattttgttttgctgaacaatttttctgggtattttgaggggttttgacccaattttttttaccatggcggatcctcttaatcaatcgactcctaggactaaaaatatgttacacatgcgcaatccggttcttgtctcgctaatgacccggacactgcacatcttttgccttgatcctaatcct

SEQ ID NO: 41418 - DNA, 369 bp, Glycine max
  Clone ID: LIB3139-032-P1-N1-D1
acgcaagacgaaaaaatctctaatataatgaaagttgagtacaaggtataaacacaagcaaaagccgtccgagcaaattttagcacaaaaaattcttatatcctccttattaggataaaattctcacagttgaaatcttcatcaccaattcctatctagtcttcttcctcttctcataaccctataaaccactagatgagatgctccaacaggaagaactatgaaagaacttgggttgctgcagctgttaaagaaaattaaaccttatgtttattgtaaaggagtacactcagacaacttgcagatgttcaaatacataaaacattctgagaattattccttctagagatgcttggcaaatatggcctc

SEQ ID NO: 41419 - DNA, 372 bp, Glycine max
  Clone ID: LIB3139-032-P1-N1-D10
atttcatttatggatggagtgacgctgtcagagatggagcaagggtgcacaaaatggttgaacctcttctgcctctgtttcaacgccagaaatcatcatgtccctctgctttgttctctatcgccatcattgtgcccacatcatcctcctcctcctcttttctctttcaaccacccccacacaccccacatacctaaacccaccaccatcattactactcctcacacctcactacaccaaaaagaaaaaaaaggtaaagaaaattatttagaagatgaacaagatctcaatattccttccactctcatgtgttgttgttgattgaagaaagaaaaaaaaaaagctagccaacatcatcgatatcactttctt

SEQ ID NO: 41420 - DNA, 372 bp, Glycine max
  Clone ID: LIB3139-032-P1-N1-D12
gtcaattttctatcgaccttctcggtggaggaattttagtggacaaaactggagattggatcacacttatacaaaattctccaattagtaacttgttgagagttgctgcttggaagaaaggctgtttaatggtcaagattgtgatgtctgggaatgcagcagtcaaaaggagtgattgggcctcattggtacaagtgtttttaacaaacagcaacagtacagagcattttgatgcatgtaagtggacaaaatcagaaccacattcctgggaattgatcttcccaatagaggtatgtggtcctaataatggttttgaaatgtggagttctgagtgggcaaatcaaacttcatggcatttgagtttccttattg

SEQ ID NO: 41421 - DNA, 379 bp, Glycine max
  Clone ID: LIB3139-032-P1-N1-D2
ctttctctctctaaagaatataatactcaaaattcatccatttttattttatttttcttaaaaaacaaagcgcgtatagtctcacgcgcccgacgatgggttttcccgtagggtacccggagctgctggttccgaaaatgttcctccacgcgctctccctcctcgcgtggctgcgctccctcgtcttcgccctcttccgcctcctccgcatcttcgacctcctcgacaccgattccgccgcctctgaccttccttcgccgccttcgccacgcgagccgactctcttcgccctcctcattcgcgagttcctccccgtggcggcgttccgcgacctggcagccgccgacggggatcctccgccgtcgggctgcgccgtgtg

SEQ ID NO: 41422 - DNA, 378 bp, Glycine max
  unsure at all n locations
  Clone ID: LIB3139-032-P1-N1-D3
gttttcatgtgtctgacggtgagcttcttcgctcgcattgaatcgctatccgtgacggtgaacgacatcnagtgcgtctacgagtacgtactttacgagggcgacaccgtttcggggaactttgttgtcgtcgaccatgacattttctggagctctgatcaccccggcattgatttcacggtgacaactgctgcagggaatactgtccacagtatcaagggaacctctggtgacaagttcagttttaaagccccatcacatggaatgtataaattttgttttcataacccttactcaacacctgagactgtttctttctacattcatgttggtcacatcccctctgagcatgatcttgccaaagatgagcatttggac

SEQ ID NO: 41423 - DNA, 369 bp, Glycine max
  Clone ID: LIB3139-032-P1-N1-D6
gtttatttttgatgaaattcggctcgcgtagcttggagttagggtttttggtcagttgttatatttacccttgggatcggtgtgccttcataacattgttggattcatcgagctttagttgttgacatttagtttttcgcgaacttcgtagcttagctacttataaatattgaatatccgtcactttagtctagctgatttgttacagtaaattttaggaaccaatttgaagggtttttaatattttggggactacatagtacttagcatgatttctcatagttttaggactattcaagtaatttttatgctgtaaggactacttaatagagtgagtaataattcaagaataaaattggtggtttacta

SEQ ID NO: 41424 - DNA, 372 bp, Glycine max
  Clone ID: LIB3139-032-P1-N1-D7
ctcgagccgttgctttcaattttctccttacaaaaaaatcctttcccttctctagtccccataactagcaaaagaagccaatagaaaactgttccatatagtttcccattcaaacttgttttgattttcattttaactcaatggagaatagaacaagctctgtactcccacctggcttcaggtttcaccccactgatgaggaactaattgtgtactacctttgcaaccaagcctcatcaaggccatgccctgcatcaatcattccagaagtggatatctataagtttgatccatgggaattacctgataaaacagactttggagaaaaggagtggtacttctttagcccacgagagaggaagtatccaaatg

SEQ ID NO: 41425 - DNA, 372 bp, Glycine max
  Clone ID: LIB3139-032-P1-N1-D8
taattgcttgaatggcacttcgttgcttggtgatgtccctttctgttctcttcactcttggtcttgcgagagaaagccatgccagagacgaagatttttggcatgctgtttggccaaacactcccattccaagttcattgcgagatcttctaaagcctggccctgcaagtgttgaaatcgatgatcaccctatgcaaattgaagaaacacagtacccgaaaaccttcttctataaagaagaccttcatccaggcaaaacaatgaaagtacaattcagcaagcctccctttcaacaaccatggggtgttggtacatggttaaaggaaattaaagacactactaaagaaggatatagttttgaagagctatgca

SEQ ID NO: 41426 - DNA, 373 bp, Glycine max
  Clone ID: LIB3139-032-P1-N1-D9
gatcttcaaccagcaagtgatgaagtgatatctcgtagcatcaccggccttaagctggatatggtggccccatttctgatcattgaaatcgtggatttcaatacaccaccctgcaatggctccaaggcccgatttgcctcttaaaggaatttgcgtctggaaagcaaaacccggttctattggaagtagctccacagtaatggatatccagccaacaaaacctgaacctgattctcacacccttgacatggggcctggcaagagctttcggaatttcagatttgatactgccttgattttacaagcaatggaagcttccttttcttcttgaaagtccagcaacctttatgtaaagtttcacgtaactgaattg

SEQ ID NO: 41427 - DNA, 350 bp, Glycine max
  Clone ID: LIB3139-032-P1-N1-E1
gctacattgaaggaagtgtggacttcatctttggcaacagcactgctcttttggagcactgtgatatccactgcaagtctgcaggcttcataaccgcacagagcagaaaatcatcacaggaaacaactggttatgtattcttaagatgtgttatcacaggcaatggaggaaattcatatgcatatcttggacgaccgtggggcccttttggaagggtggtctttgcatacacttacatggatcaatgtataaggcatgttggctgggataactgggggaaaatggagaatgaaagaagtgcttgcttttatgaatacaggtgttttggacctggttgctgtccatcaaaa

SEQ ID NO: 41428 - DNA, 371 bp, Glycine max
  Clone ID: LIB3139-032-P1-N1-E11
acaaaactttaaatggcaggtgcaggaggagggtatggggacgcgaaccagaggatagactacgtgttcaaggtggtgctgataggggactcggcggtggggaagtcgcagatactagctcggtttgcgaggaacgagttcagcttggactccaagtccaccatcggtgttgaatttcagacaaggaccttggtcatagatcacaagaccgttaaggctcagatctgggacactgctggccaagaacgatacagagcagtttcgagtgcatactacaggggtgctgggggggcattgttggttatgacataactaaacgccaaacctttgttcacataccacgttggttagaagaactgcgcaaccatgct

SEQ ID NO: 41429 - DNA, 373 bp, Glycine max
  Clone ID: LIB3139-032-P1-N1-E12
gaaagttcggttgaatcttcatggaattgtatctggcgaatctgcaactctgctggaagaggaagaaattgaggttccagtttccaaagaaccagcaggagaaaataccaagatggaaactgatgaagctcctgccaatgttgctgcacctcctagcaccaatgacaatgatgttaacatgcaagatgctaattccaaggcaactgctgatgcccctgggtccgaaaatgggacccctgaggcaggagataagcctgtgcaaatggatactgataccaaggttgaggctccaaagaaaaaagttaagaaaataaacattcctgtggtggagttagtttatggggcaatggcagctgcagatgtccagaaagct

SEQ ID NO: 41430 - DNA, 374 bp, Glycine max
  Clone ID: LIB3139-032-P1-N1-E2
atccaattccactcccaccgaccaaaacgcgcaacacgttgtatttaaaacgacaccgaaactaatgggcgtcttcagcgaaaacccgaatccggacccggttgtgatccgccaggtttgggcttcaaatctcgaatccgaattccaactcatccgcgaactcatcgaccactatccttttatctcgatggacacagaattccccggtgttgttttccgaccacacctggaccccacaaaaccctacaaccaccgcaacaacaatcgcaaccgccactccgaccactaccggctcctcaagtccaacgtcgacgctctcaacctcatccaggtcggcctcactctcaccgacgccgccggcaaccttcccgatc

SEQ ID NO: 41431 - DNA, 171 bp, Glycine max
  Clone ID: LIB3139-032-P1-N1-E3
attcttctcagtctcagatcagaaccttagccatggcagcgttccagaagatcaaggtcgccaaccccatcgtcgagatggacggagatgaaatgactagggttatctggaagtcaatcaaggacaagctcattttgcccttcttggagttggacatcaagtattatgact

SEQ ID NO: 41432 - DNA, 362 bp, Glycine max
  Clone ID: LIB3139-032-P1-N1-E4
ctctcactgctgcaagaattcccactttccaccaacggcatctcaaacaacacttgacggcaccctcttcctcttccttacgcctcctcaatctcgcaaagatggaaggaagtgagatcagtgagcaagtagtaggggaggatttgggagcaaagaagaaagtttttgtagctggagccactggtagcactggcaaaagaatcgttgagcagttactggcaaagggttttgctgctaaggctggggttagagacatcgacacggccaagacatccctttcctctgccaacccatctcttcaaattgtgaaagctgatgtcacagagggttctgataagctagctgaggccattggtgacgat

SEQ ID NO: 41433 - DNA, 331 bp, Glycine max
  Clone ID: LIB3139-032-P1-N1-E5
acagaaccctaaagaaagacacaggcatagggtactgggcattgattgagccaaagctttgtattttctgcgataattttccattgggtggaagaaagtctcaacctttattcgaaagagcaaggatctgagttgagttgagtgatcatgtgtggtggtgcgattatctccgacttcataccggcaggtcccgccagcggggcgcggcgcgtgaccgccgacatcctgtggccgagtttgaggaagcgcttctcgaagccgctgctggacgatgatttcgaggcttggttcagagaattcaaggatgattcggaaatcgaggatgttgatg

SEQ ID NO: 41434 - DNA, 367 bp, Glycine max
  Clone ID: LIB3139-032-P1-N1-E6
tttctgttcactatgttattactaaagggttcatgacattcgcttgaaaccttggtttggatcaattgtagcactagtttgattttggtgccaagttcttgagctgcggtggtgctgaccctgaaaaggtctccaagtccgacatgagataaggctgctgctgctgctgcttttcaaagatgttggagctggtttcaattagtagacaaatttgggtgctgaatttcgtgttcatgtgtcttcaatagatggtatttttaaattgaaagcatagtgacaatttcttgaatggagattcttgacttttgaatttatctccaagacttcaaataagagggctctcttctacaatttcttaaatgcttat

SEQ ID NO: 41435 - DNA, 373 bp, Glycine max
  Clone ID: LIB3139-032-P1-N1-E7
gaaaggtttagtaatacaaatacatctccggcgatgggtgttttcacctttgaggcggggccaccttaacccacattgggttccagtcttcttagccgtcgtatgaaacacgttcccttctccttgtcatttttctccgctcctaagaccatctgttgttacagacccatcctacgcattcgcgccatcgacgcggcccagcccttcgactacgagtccagaatggcccaacagttccacgactcccagatgctgtagatcgccatcgtgggcttcggcaacttctggcagttcctggcccaaaccctcgtccgccagggccacaccgtcctggcccactcccgctccgaccactccctcgcggcccaacaac

SEQ ID NO: 41436 - DNA, 373 bp, Glycine max
  Clone ID: LIB3139-032-P1-N1-E8
gatgaggagtactattgttttacgattgggaagacgtgcgcgtattccattccaacgagcattagcaacgcagagtaacaataataacactctggtgtttatccctctccctcgctgcctcagcgcaacgcggtcgtttcactttcagcgcaattcaccgtttggattctccagcgggcatgggcaacgcaagagcatgttcatccaaacgcagcccacgccaaatccctcgtctctcatgttttatcccggcaagcccgtcatggaagttggaagctccgacttcccaaaccctcgttctgcaatgaactctcccctcgccaaatcgctcttcgcaatcgacggcgttactcgcgttttctttggatctgat

SEQ ID NO: 41437 - DNA, 368 bp, Glycine max
  Clone ID: LIB3139-032-P1-N1-E9
gcttgaagctcctaccacctgagaagcttgagcaactggatatccctgtggaagaagaatcttctagtgttcctgttggtgaagttttatacatgtcagagagtgataggtcttttgtaggagggagtgttacgttgtctcaattgcgtacagaggacacgaggtttaatttgtttactggaaatcaaacatttgaccagagagatcaaagttttgaggtgaaagaaacattggcggttcattgtgggttctacagtgtgaatggagggtgtaagatatctgttgaaaataaaagtttcatgcaaggttgcaaagttggtgtatctacttttgcatttggtgggggagattaccgttttctttggatt

SEQ ID NO: 41438 - DNA, 378 bp, Glycine max
  Clone ID: LIB3139-032-P1-N1-F1
caacctggtcttactgtgtggtgactgtgctctgctctcatctcattcatattcatttcaatggcaactcaaggtcaagtcattacctgcaaagctgcggtggcctgggaacccaacaagcccttaaccgtccaagacgttcaggttgctccgcctcaagccggcgaggtccgtgtccaaatcctcttcaccgctctctgccacaccgatgcttacacttggggcggcaaggatcccgaaggtctcttcccctgtattctcggccacgaagctgcagggattgtggagagtgttggagaaggtgttactaatgttcagcctggggatcatgtcattccctgttaccaggctgagtgtggggagtgcaagacttgcaaa

SEQ ID NO: 41439 - DNA, 375 bp, Glycine max
  Clone ID: LIB3139-032-P1-N1-F11
ggtaaatgaagtggattactgtggatatgtggaacttagacgtcctattttcaagaaagatcacacatttatcactggagagttcgatttactcactcctagtggtcaaactggcgtaagctattccctcccacgttctttggaaaatgacaccaaccaaacaacgccatgatcaagcatatatactcgtgattctcaattcaagtttgtgagctttatacttgagtggtgtctctttcaaggtttttgattaggtgaattgaaaaacatgtggttgggatttaacatgtataggaacttttcaaatggaagaaggagaaaatgaaagtgaaaatctatgttcctgattgggatgtcataacttaagaatatttc

SEQ ID NO: 41440 - DNA, 377 bp, Glycine max
  Clone ID: LIB3139-032-P1-N1-F12
cattcacctcacaacttcatcaaaccaaaaaacacaacaaaagaaagaaagaaagaaacaaagagttccttgctttgtagtaagatatatcatcaaaaatggttttgtcttggactagaagaaacgttttccgccgtgcatagaaggagaaggaacaaagtcaactattagaagttgaggttgtgattcccaaccactttcgctgtccggtgagtttggagctgatgacagatccggtgactttatcaaccggcattacctacgaccgtgtgagcatcgagaagtggatcgagggagaaaacagaacctgccccgtcaccaaccaggtgctgacaaccttcgacctcattcccaaccatgccattcgcatgatgatt

SEQ ID NO: 41441 - DNA, 376 bp, Glycine max
  Clone ID: LIB3139-032-P1-N1-F2
acttccgctactttctactccaaccactttcttttttcccgcagtcatgggcaaggtcaagatcggaatcaacggatttggaagaattggccgtttggtggccagggtggctctgcagagagacgatgttgaactcgttgccgttaacgatcctttcattaccaccgattacatgacatacatgtttaaatacgacagtgttcacgggcactggaagcatcacgatgtcaccgttaaggatgagaagacccttctcttcggtgacaagccagtcactgtttttggacacaagaaccctgaagagatcccatggaagtcgactggagctgacatcattgttgagtccaccggagttttcaccgataaggataaggct

SEQ ID NO: 41442 - DNA, 376 bp, Glycine max
  Clone ID: LIB3139-032-P1-N1-F3
accgcgatcacaggttgccgcaccttaaaaccggaaacaaaagcaatcgttacttgatttcaagaatttctcaatttcttcctacttctttgtgtacgatttcttaagggaaagaaaatcactctctgtgctggtcacagacttcgtgaatcattttcttttccactcctagtttatttgctgaacactctcctatttgatataggacttcgtgtcagatttaaactttttctgtttctttctcagttctctgtttaatttcaagttcaagctggtgaaattttggattagtgctcccactctcctatctggtataggacttcgtgggtagacttttctacttctctcctttctttcactctcttcttctcactga

SEQ ID NO: 41443 - DNA, 373 bp, Glycine max
  Clone ID: LIB3139-032-P1-N1-F4
gtgttaagttgacaaccataaacaatatgtgtgcatatgggctcaatcctggtattggaggttctcgtcttttgggcaccattcctcagtccatttcacagcaaactgtttggaatcaaatggcaacagtgagaacaccattgaattttgattctagcaagcagagcttttgtcaattttctattgaccttctcggtggaggaattttagtggacaaaactggagattggatcacacttatacaaaattctccaattagtaacttgttgagagttgctgcttggaagaaaggttgtttaatggtcaagattgtgatgtctgggaatgcagcagtcaaaaggagtgattgggcctcattggtacaagtgttttt

SEQ ID NO: 41444 - DNA, 372 bp, Glycine max
  Clone ID: LIB3139-032-P1-N1-F5
ctttagtggttctaaattgaaaagctttctagctggtcataatatcaccattactgatggtattgacaaaactagtgcaactttgcaatttagaaagttagcagattgtgattttctcaagagaaactttaagcagatgtctaatgttttgtgggtggctcctgaagacaaggcgagtttatggtcacaacttcattatgtttcgtgtaataatctggaaatgcaagaagcttatcttgtcaatctcgtaaatgtgttacgagaactgtatttgcacaagccagaggaagctcgccaattgagaaagaaagctctctctcgtatagaatggctgcaaaaagctgatgtgcctaccatagcacagattgaaga

SEQ ID NO: 41445 - DNA, 364 bp, Glycine max
  Clone ID: LIB3139-032-P1-N1-F6
atcttcgtttagacactcaccggcaagaccataaccctagaggttgaaagctccgacaccatcaataacgtcaaggccaagatccaggacaaggagggtatccccccggaccagcaacgtctcatcttcgccggaaagcagctcgaggacggccgcaccctcgccgactacaacatccagaaagaatcaacccttcacctcgtcctccgtctccgtggtggcatgcagatcttcgttaagaccctcaccggcaagactattaccctagaagtcgaaagctccgacaccatcgacaacgtcaaggctaagattcatgacaaggagggaatccccccagaccagcagaggctgatcttcgccggga

SEQ ID NO: 41446 - DNA, 373 bp, Glycine max
  Clone ID: LIB3139-032-P1-N1-F7
ggggagagtcaacattggtgatagattacagagtcgtggttctgctcgggcagctcctgtttggcttgaaactggtgacgcagttgcaaatatgtattctgagctgcgggaggaggctcgtgatcatgcacgcttgcgtaatgcatattttgagcaggcacgacaagcctaccttattggcaacaaggcccttgcaaaggagctaagtgttaaggggcaactgcacaacatgcatatgaaagcagctcatggaaaagctcaagaatctatttaccgccagaggaatcccgttgctccagagaatggaagagggcaccagagaatgatagacctacacggtctgcacgtaagtgaagcgattcacgtgctgaaa

SEQ ID NO: 41447 - DNA, 372 bp, Glycine max
  Clone ID: LIB3139-032-P1-N1-F8
ctgattcgattcatttctctgcaatggatttctagcattcaacccttccttttctccttgcctctgtcctgacccgttcttttcttctccatgcattcccagaaagttgtagagatggaagacaagacagaaagtcatatgagttcagctgcggcctttgttgaaggggggattcaagaatcctgtgatgatgcttgcagcatatgccttgaggagtttggtgcaagtgatccttcgacggtcactacctgcaagcatgagtttcatctgcagtgcattctcgaatggtgtcagagaagctcccagtgtcctatgtgttggcaacctattagcttgaaggatcctactagtcaggaattgtttgaggtagta

SEQ ID NO: 41448 - DNA, 372 bp, Glycine max
  Clone ID: LIB3139-032-P1-N1-F9
gttttctgttaccgccatggatttcgagagtaggagagcttcatttgctcatctccgtggttgccatcattgctcttagcttcacagctgaaaaatgcagggaacttgttggggaggaggggtcatcccagagtggaaagtttacaatcttaaattgctttgatatgggttctggaactgtagcatgtgctgtcaaggaaggtgtgaagctctatttttacaatattaggtcttctcatgctgaaagagcgaggagtcaagcaattgagtctgccctcgttgatgctgttactcaagggatgtccccaacagattcagcaaaacatgcacagaaagaaggttagaaggcagcaaaattggcttcccgtcaag

SEQ ID NO: 41449 - DNA, 374 bp, Glycine max
  Clone ID: LIB3139-032-P1-N1-G1
tacatatacaacactactttcagttttttctgtctctgaatctcaaactcttcggaaagattaacattaatggctccaagggatatcaatagatccaacgttgttgttgttgccggagtatccaacccgacccataaagagatccgttaccgcggcgtgaggaagcggccgtggggccgctacgccgccgagatccgcgacccaagcaagaagacacgcgtgtggctaggaacgtttgacacggcggaagaggcggcgcgtgcgtatgacacggcggcgcgtgagttccgcggcacgaaagcgaagaccaatttccccacccacgcggcggtggcgcgtagtcccagccagagcagcacgctggactcctcgtc

SEQ ID NO: 41450 - DNA, 349 bp, Glycine max
  Clone ID: LIB3139-032-P1-N1-G10
attttgaagcaacactgtgaaaccatctgcgcctggtgctcaacttaccatctgggatgctggtactgtcaatgtctttgatgatatctccgctgagaaggcacaagctatcatgttgttggctggcaatagcttatctgcaggttctaacatggcacagccaaaagttcaagtgcttgtctcgaagctggctgttggtgatagagtgcctgtgagtgaacctgcaaatgcatcacctggctctggtttaccaaaagcttctaactgatgtgattgttggcctttcgaagattactgtggccttcatacgtattctataagatatatattcgtatgtattactatttca

SEQ ID NO: 41451 - DNA, 344 bp, Glycine max
  Clone ID: LIB3139-032-P1-N1-G11
caaacccatttccttgatatcttagttatctaattacgtcaattaatcccttaattgcgagcatcatggctgaggagaaacaccaccaccactttcaccaccacaagggcgatgatgtgcctggcgaggatgattataagaaggtggagacgcaccacatgcatgttgcgcaccttggggaacttggtgctgcagctgccagtgcttatgccttgcatgagaagcatgaggccaagaaagacccagagcatgctcacaggcacatggtagaagaggagattgcggcagcagctactggtggcgctggtggttttgtcttgcatgaacaccatgagaaaaaggaa

SEQ ID NO: 41452 - DNA, 333 bp, Glycine max
  Clone ID: LIB3139-032-P1-N1-G12
ctggtctgttccctgactgatctccccatatgatcggccgtgcttaacgccccagggggcgccgatcgttcccatgccgaggttctcatatgacagagctaatctccctgggcatttaggtgcacgtgtcgtagcttgatccaattgagctagtctcactcctcgggatcttttgcgctctgaccaaatcttgatgaatgactgttatcactaacacacctgctgcaaatatgacgaggaagcttgcgcatgtcatcttatcaatgcaccatgcatgccatagtgcaacttgtgatcatggtgctatacatggtcacaccattcaggctccct

SEQ ID NO: 41453 - DNA, 373 bp, Glycine max
  Clone ID: LIB3139-032-P1-N1-G2
gagaccatggagatcaaaatcaccaaggaccacatcaagggtcttgttgtcgactttttctcggcaggaacagactccacagcggtggcaacagagtgggcattggcagaactcatcaacaatcctaaggtgttggaaaaggctcgtgaggaggtctacagtgttgtgggaaaggacagacttgtggacgaagttgacactcaaaaccttgcttacattagagcaatcgggaaggagacattccgcatgcacccgccactcccagtggtcaaaagaaagtgcacagaatagtgtgagattaatggatatgtgatcccagagggagcattgattctcttcaatgtatggcaagtaggaagagaccccaaatact

SEQ ID NO: 41454 - DNA, 373 bp, Glycine max
  Clone ID: LIB3139-032-P1-N1-G4
aattacaatcaccatgtcctcttcctcttcctccttgggccccgcccatatcaccacggaccaagaattctccctcatcgttgccgccctcaccaacgtcgtctccggctctacctccagctcctccgtccctgaattccgctttccgcactcctccccgcctctttctttcgccagccttatgccgccacccccgcctagcatccacacgtgtcgcgagtgcaacatcgcaggatgcctgggatgcaactttttccccgaggaacaaaggaagaaatacagaggagttaggcagaggccttcgggaaagtgggccgccgagattcgcgatcgtcatcgttcggcccgggtctggctcggtacattcgaaacc

SEQ ID NO: 41455 - DNA, 351 bp, Glycine max
  Clone ID: LIB3139-032-P1-N1-G5
aaagagtttggcgcattgctttctgtacatttaaatttaatttgtttgggttgctgagtaaaaactaaaatgaaagtagatacaaattgttttttttttctttaaaaaaaaataaatataaatcatagggaggtaatttatttttaagaagaaaaaaaccacaatcttattttacaaaaatatagaatttaataattaaaatagaatataaatatgggggggcgtgcaatttttgaggtcttcaaccagggattttatttctaaccggtacatggagggggacgagttttcctttaagagaagggttttaaaatttggggtatttattgaattagcattttccttggtaaa

SEQ ID NO: 41456 - DNA, 367 bp, Glycine max
  Clone ID: LIB3139-032-P1-N1-G6
tagattatgtgagccaaggatatgtgtttaactacatatgggcccccaaaatattgagtagtgtgagggcttacaataaccttataatttcaaaatcttcaatcagctatctctacaaatagcacattttttaccataattggaaaaggatagaaacaatatatatatctggcacatctcttgcctaatatttatgttaaatgttaaatccaattctattaagattttgtcataaaaccaagaagaatgtggaatgcttgtgcaagtatatgaagcagtatattaatttcggttggctcaaggttccttccattcctttctttcggatcacaggggaaataaaaaacaatggagttggacttgacac

SEQ ID NO: 41457 - DNA, 268 bp, Glycine max
  Clone ID: LIB3139-032-P1-N1-G7
caaaatagctctgtactagttagctgtttgtccacttacatgcatcaaaatgctgtggactgttgctgtctgtcaaaaacacttgtacagagcattttgatgcatgttagtggtcaaaatgggacagtcctgagcatgaatggagatccgtattaacagcatatgtacgcgggactgcgtttgcatagcgtagatgtggaagggcaaatcaaactttatggggattgagttttacaaccgacaagctcgaacaatgctcaggcttgga

SEQ ID NO: 41458 - DNA, 370 bp, Glycine max
  Clone ID: LIB3139-032-P1-N1-G8
attttgataaaccgcgatcacaggttgccgcaccttaaaaccggaaacaaaagcaatcgttacttgattttaagaatttttcaatttcttcctacttctttgtgtacgatttcttaagggaaagaaaatcactctctgtgctggccacagacttcgtgaatcattttcttttccactcttagtttatttgctgaacactctcctatttgatataggacttcgtgtcagatttaaacttcttctgtttctttctcagttctctgtttaatttcaagtttaagctggtgaaattttggattagtgctcccactctcctatctggtataggacttcgtgggtagacttttctatttctctcctttctttcact

SEQ ID NO: 41459 - DNA, 163 bp, Glycine max
  Clone ID: LIB3139-032-P1-N1-H10
cgaggatggcaatctgaaagaaagatgtttggagaggggaatgtggaatcccttctggacctccgctcacagctattctctatagcatcttgaatgtgctgctcgttacatgtagcttttgaacattactgcgcctagctatggcttcacgcatgtctctaca

SEQ ID NO: 41460 - DNA, 205 bp, Glycine max
  Clone ID: LIB3139-032-P1-N1-H11
ctcggaccgcgagttgtatggatgttctgggaactgattattcatggatgcatccctgagaagctgttacacatgcacagtgattgctaatatgaaaatatacatagcagacagagctgttgaaatttactgcgccatagctattgttcaacatgctttgacaattacataaaactaacgactcttcgactaggttgagacatga

SEQ ID NO: 41461 - DNA, 206 bp, Glycine max
  Clone ID: LIB3139-032-P1-N1-H12
cgcagaattttttttgcatggatacaaatttgacagcagaaacacaaattattacaagggaccttttgcaaccatgatcttagcgcttcctgccatgttacttgaaggcaatggaatccttgaattggctaatactcatccatatccttagtcggctctcatcattatttttaaattcagggtgttaggctttctgtcttaacttc

SEQ ID NO: 41462 - DNA, 357 bp, Glycine max
  Clone ID: LIB3139-032-P1-N1-H4
ggaagttgttgatctgaaaacgcggtacgtgaaagcgggggtggatgacactgtttgaaactgtttggtgtttggttaaaaggggatacactaacagactaaagaaacaaccacaagagaggccgagaagaccaaatgggcttcggtgggcctagactcaaggagtcaaaacccgtttgtgactttagttgaaatagaatgttgttgcttaatgaaaaatgaaaaggctgagcggtaatcatgtttgggtaaaaagaccaaaagcgcttgcctatgcttgctaaacatgttgaggctgtgtaatttttaatgtacgtaggcaaatgcctttatgaatattgattggggaattcaaca

SEQ ID NO: 41463 - DNA, 245 bp, Glycine max
  Clone ID: LIB3139-032-P1-N1-H5
cacggatggcaatttgtaagaaagatgtttggagaggtgaatgtggaatcccttctggatttccgctcacagttatttgtaatagcatttttaatgagatgctcattagatatagctatgaaaaattactgcgccaggctaaagctccaagtatgtttttacaatccttcaaaaattttgtttctttgtgtgtgtatggtgatgataacttaattagggttcatgaatatgtcaagccttacttt

SEQ ID NO: 41464 - DNA, 194 bp, Glycine max
  Clone ID: LIB3139-032-P1-N1-H6
cgcagaatttcttctgcatggatacaaatttgacagcagaaacacagattattacatggcaccttttgcaaccatgatcttggcgcttcctgccatgttacttgaaggcaatggaatccttgaatggcctaatactcattcatattcttggtcggctctcaccattatttttaactcccgggtgttggctttct

SEQ ID NO: 41465 - DNA, 372 bp, Glycine max
  Clone ID: LIB3139-032-P1-N1-H7
cttcactattctccctatggagtttaatcttgtggtccgtcaaaagtttttaaattttgtgaggttcattatgaagaaaagggacaaacttagttgtcaagttggaatcaacccatactccatggaatggactggtttggccaatagattactgagtaagggcaatgatattctgtgttgcgattatgctagttttgatggtttgattaccaagcaagttatgagcaagatggcagaaatgataaacagtctttgtggtggtgatgaaaaattgatgcgtgaaaggacgcacctgctgttggcttgttgttcaaggatggcaatttgtaagaaagatgtttggagagttgaatgtggaatcccttctggatt

SEQ ID NO: 41466 - DNA, 365 bp, Glycine max
  Clone ID: LIB3139-032-P1-N1-H8
ctaaacccatacaattcaaagactaatgcccagaccggaaaactgggatattgtggtgattttaatggcacaaaaacattaaatagatgctaatagctcttataacaaggattttgacatgcatgcaaaatcacaggcaagataacaataacaagacagcaaataccatcagtgctaatgaagctagtgactcatttgatgcataagaatgatttcactgactcaggcaatacacaacattcgtacttggtttatccaactcagatataactagccaggctgctaaatgtcaatttacccatgaccataccgatatggaaacaactgaaagtgctactggttctgcgagtaattttgactggatg

SEQ ID NO: 41467 - DNA, 372 bp, Glycine max
  Clone ID: LIB3139-032-P1-N1-H9
ctcatcacgaccaccatcattacctttcttcttctacaacacaacctccaatgatcaatttcccgcgagatctgttaagaaccttcgtgggagtgaacaacaacagcaataaaaacaataacaacagtcagcaccacaatttgcctatgccagtggtgaagttagaggatgagaaagaagagctggaactaagtctcggcctttcgatgaatggtagatttggggtggaccctacagcgaagaagataaagagaacaacctcgataccggagtttgtgcgcgacgaggagatgggatatgctgctgcgatggggtgcacggggtctctggtgaggacgtgttcgcttccgacggagacggaggaggagtggc

SEQ ID NO: 41468 - DNA, 360 bp, Glycine max
  Clone ID: LIB3139-033-P1-N1-A10
ccgcatgcagcttcagggcgaaaacaatttgcccaaaccggttcaaaatctccgacccgcactcgccttccaaaccggttcgaccgtccacgtggcagcggctattccgcagacccgcgtgggtcccatcgcggttggggttcgcctcgtccagcaagaaggccttgcggccttgttctccggcgtctccgccactgtcctccgccagacgctctactccaccacccgtatgggcctctacgacgtcctcaagaccaagtggaccgactccgtcaccggcaccatgccgctcagccgcaagatcgaggccggtctcatcgccggtggcatcggcgccgccgtggggaaccccgccgacgt

SEQ ID NO: 41469 - DNA, 323 bp, Glycine max
  Clone ID: LIB3139-033-P1-N1-A11
ctagaacccaaagtttttctctttcaattcttcctcagtcaattcaactccctttcaatttcaaccctatctctgctctcttcttcttcttcttcttcattttttgggtctctctgtttacaagcttttcagttatggcatcgaaacgcatcgtcaaggagctcaaggatttgcagaaggaccctcctacttcctgcagcgcaggtcccgtggcggaggacatgtttcactggcaggcaacaatcatgggacctcctgatagcccatataccggtggtgtattcctattttcaattcattttcctcctgattatccattcaaa

SEQ ID NO: 41470 - DNA, 373 bp, Glycine max
  Clone ID: LIB3139-033-P1-N1-A12
ggcccgatagcccatggataaacagaacaacatggtcactgcccaaggacgagaagatccaaaccagaacacaggaacttcaattcaacaatgtaacctaacaccaagttcggatcttaagcctgtcgtgggctccatcaaaacttttctagggcgcccatggaagaagtactccagaactgttgtgatgcagtcgacattggacagccacattgacccaacaggatgggctgaatgggatgcccaaagtaaagactttttgcaaacgttgtattatggagagtacatgaataatggccccggtgccggtaccagcaagagagtgaattggcctggtaccatatcatcaaaactgcagctgatgccagcaagt

SEQ ID NO: 41471 - DNA, 362 bp, Glycine max
  Clone ID: LIB3139-033-P1-N1-A2
gtcaagggcagtggtggaaagagaggcttctctgaaactgcttctgttgatttgaagcttaatctttcttccagtgatgactctgcctcagattcaccttcatctgcgtctacagagaagactaccactgctgcacctcctcctccttctcgagccaacgaccctgcaaaaccacctgcaaaggcacaagtggtgggttggccaccagttaggtcatttagaaagaacatagttcaaaggaacaagaatgaagaggaagcagctttcgtgaaggtgagcatggatggtgcaccgtatctacgaaaggtggacataaagttgtacaagagctaccaagagctgtcagatgcgctggctaagat

SEQ ID NO: 41472 - DNA, 350 bp, Glycine max
  Clone ID: LIB3139-033-P1-N1-A3
ttcaccgggacttgaagcctgggaatctgctcgtcaatgccaattgcgatttgaagatatgtgactttgggcttgcacgaactaatggagttgatggccagtttatgacagagtatgttgtcactcgctggtatcgtgcaccggagctcttgttatgctgtgacaattatggaacctctattgatgtctggtcagtagggtgcatttttgctgagattcttggtagaaagccaatcttccctggaactgaatgtctcaaccagctgaaactaattataagcgttcttggaagccagcatgaatctcatcttgagtttattgacaatgcaaaagccaggagatttatcaaa

SEQ ID NO: 41473 - DNA, 63 bp, Glycine max
  Clone ID: LIB3139-033-P1-N1-A4
cactttttgcctttttcggttgcgtaatgatgttctatgagattgcttattagtatttgtttc

SEQ ID NO: 41474 - DNA, 366 bp, Glycine max
  Clone ID: LIB3139-033-P1-N1-A5
attacatggtcatagtgtacacctagttaggcaaacacaccaaacaccaaacaccaaactagttggctcaattctctttgaatggctttggaggctttgaattcaccaacagcagccaccactccgttccgtggctaccaagaagaggaggaggacgaggaggctgaccttcacttacgtgagccttgggctaaaaggaaacgctccaaacgaccgcgttttgagacggaggaagagtacctcgctctttgcctcatcatgctcgcacaaagcggtaacaccagaaacatccacaacaacaacacccaattaccgtcttcttcactgtcagacaaagaagcgtcgccgccggtgaaactaacacac

SEQ ID NO: 41475 - DNA, 346 bp, Glycine max
  unsure at all n locations
  Clone ID: LIB3139-033-P1-N1-A6
atttaatactacctttttttgacaatttcacaggatgttcgttgaatcatgcaagcgtcttcgcataatgaaaggctccgaggcaatcggtcttgcgccaagagccgtggaaaagtgcaagaacagaagctgaagaagtgatttcatctgcgtcacaaggaagcaaattgactcgagcaagatcgagtctaatataggaataagagtttaattatcatgtgcctttgttatcttttttgtaattttcttatatgtgtattatatgaatatgagaaaatagttggaaattcgttagggacacgaaataatatagaagatgtttatatgnaaaaaaaaaaatatttta

SEQ ID NO: 41476 - DNA, 279 bp, Glycine max
  Clone ID: LIB3139-033-P1-N1-A7
tcggaatcgatctcggaaccacctactcttgtgtcggtgtgtggcaacatgaccgagttgaaatcatcgccaacgaccaagggaacagaacgacgccgtcttacgtcggcttcactgataccgagcgtctcatcggtgatgcggctaagaaccaagtcgccatgaaccccatcaacaccgtcttcgatgccaagaggttgattggtcgtagattcagtgactcctctgttcagagtgatatcaaattgtggccttttaagtcattgctggtgctgctga

SEQ ID NO: 41477 - DNA, 371 bp, Glycine max
  Clone ID: LIB3139-033-P1-N1-A8
catggctgacgaatctcaatattcggcgaaccccgacagcatccccaccccaccctccctcaagcggaagtacaacgacgaccgccccaccggtttctccgacggccccgactcggtggcgccgccacccccctcctacaacagcgtccctcccccctcctccgccgcctccgacttcgagctcgccaaacagcgcgcccaagaagtcgctgctcgcctcctcagcggcgcccctcccctcgaccccaccaaacgccccaagcacgacaacaacggctcttccttcgactccatcgatgtgaatccgtattcggtaccgtcgatttcgccgtcagcggtgtcgtactcgcaccaggtcggcggtgcgagca

SEQ ID NO: 41478 - DNA, 370 bp, Glycine max
  Clone ID: LIB3139-033-P1-N1-A9
aaaacaaaacagagcaaagagagagtgtgtgaaaagggaaacaaaaaacagaacagcggtggcgacacttaaggttcctcagcctcttccccccgttgcagatgattgtgagcagctccgaaaagccttctcaggttggggaactaacgaggagctgattgtatcgatcttggctcataggaatgctgctcagaggaagcttatcagagaaacttatgcccagacctatggagaagatctcctcaaggccttggacaaagaactcacgagtgattttgagaggctggttcatctttggacacttgattctgctgaacgtgatgcatttttggcaaacgaggcgactaaaaaatggacttcaagcaatcag

SEQ ID NO: 41479 - DNA, 259 bp, Glycine max
  Clone ID: LIB3139-033-P1-N1-B1
cttgggaatctctcaagagaatatcaaaaactgtaggccggttatgccagctttttcggagacacaaactactgccagatcttctgaaaatgcggaatcctctgcatgatctggaattcgtgttttctttcgcttgttcgtttgtttaattcaataaaggaaattaggcatgaccctcttgttgagtatgctctgcctatctgaaaatttccacacctcttttaattgtcgtaatgatgtgtgaagtgtgtgttatttt

SEQ ID NO: 41480 - DNA, 367 bp, Glycine max
  unsure at all n locations
  Clone ID: LIB3139-033-P1-N1-B10
gccaggaacggcttctgggagcttcgttgggagtggtattaacgggggtggttgtgtttgagcaacgcanatacatctacgcttctatttccgattcccaatctcaggttaaagaacctatatttgggaagaagtcgcgttctgaattttcacatttatggaacaaaactgtggatcagacatttggacctttgataaagtctctcagctcacgtggatggtagaaattttatgagtgattttatttttaatacaatctcttgtaattttgatttcaaaacatacaatacttggccttttattttttccttgacattctaaagtgtttgttaaatggttgtgctcatgggcagtgcttacaatgttt

SEQ ID NO: 41481 - DNA, 366 bp, Glycine max
  Clone ID: LIB3139-033-P1-N1-B11
gggtgcggttgctgcgaaaccgagctagaccctgatcggtgtctgcacaccgccggagaacaagatgatcgtctgcgtcgccgtcgtcggtcaccagaacaatccgctgtacattcagagcttcacggaggccgacgatgctcttaagctccaccacatcgtccattgctcgctcgatgtggtcgacgagcgagtgaacaatcctaaaaagtctggaccgatgcttaatgagacgtttttgggactgctttatcctattgaaaactacaaagtatatggatatctgactaatacgaaggtgaaatttatcttggtgaccacggatctggatgttaaagatgcggatgtaaggaattttttcaggag

SEQ ID NO: 41482 - DNA, 367 bp, Glycine max
  Clone ID: LIB3139-033-P1-N1-B12
ctcgagccgagtggttctaaattgaaaagctttctagctggtcataatatcaccattactgatggtattgacaaaactagtgcaactttgcaatttagaaagttagcagattgtgattttctcaagagaaactttaagcagatgtttaatgttttgtgggtggctcctgaggacaaggcgagtttatggtcacaacttcattatgtttcgtgtaataatctggaaatgcaagaagcttatcttgtcaatctcgtaaatgtgttacgagaattgtatttgcacagtccagaggaagctcgccaattgagaaggaaagctctctctcgtattgaatggctgcaaaaagctgatgtgcctaccatagcac

SEQ ID NO: 41483 - DNA, 201 bp, Glycine max
  Clone ID: LIB3139-033-P1-N1-B3
ctcgagccgcttcaaattcattcaactttctctcatgcagtccaatcaacaacgcacgcgtgcatcttttccttttaactcattctttgtccccctttttcttaacgccaactctctcttctgggtttctttcattttcagaatctaataataacctaactgggatattctcttaattccaaatggtggttgggtggcgtg

SEQ ID NO: 41484 - DNA, 361 bp, Glycine max
  Clone ID: LIB3139-033-P1-N1-B4
ctcagggcttgcatcttctcaggtaagttgtgaagatgtacacatcaaggaagaaaatccacaaggataaggatgctgaaccaactgagtttgaagagtcagttggacaggcattgtttgatctggaaaataccaaccaggagcttaaaagtgatctgaaggatttatacataaactcagctgtgcaagttgatgtttctgggaaccgcaaggctgttgttattcatgtcccttacagattaaggaaaggtttccgtaagattcatgtcaggcttgtcagggagcttgagaaaaagtttagtggcaaggatgtaatcttggttgccacccgaaggattttgaggccaccaaagaagggttc

SEQ ID NO: 41485 - DNA, 339 bp, Glycine max
  Clone ID: LIB3139-033-P1-N1-B5
aatatgccaaatgctgttctttcaatgtggagatattttgttggagatctcgtctttgaagtttctaagatgacttctccctacattaaatgtacagtctctttcttcatagcatttggaaatttggctgatgacaccatcaattttgaggcttttccccacaagctggtgcagtttggagagattcaggaaaaagttgtattgaaattttcacaagaggaatttcttacagcttggtcaactcaggtgcgtcctgcaacaactctgttagctgatgggtgtccatatttgtatgctatggtgcatgatagttcagtgtctacaataccaggtgatttt

SEQ ID NO: 41486 - DNA, 372 bp, Glycine max
  Clone ID: LIB3139-033-P1-N1-B6
atttcaaagaagataaacatgtgattctctttcagttccttgccttctatggggttgaacgggggagcacaaccataaccataacaatttcatcatttcatgcacagtagtagtagttattatcctctgctcagctcaccctatataaatccccgaattacggcaacttgaaaacccaccaaagtttccttacgcattctcattgggttcagtgagagttttttcttttttgttgtaaaactcattaaagttaatgcctttcaagtccattcacactgttgtcagtttctcatagagagatctagacactttaaccatttggggtgtgaagaacaatcaaactaacttgtgggggtgtgtgaggttcagcaa

SEQ ID NO: 41487 - DNA, 368 bp, Glycine max
  Clone ID: LIB3139-033-P1-N1-B7
tggaatttcgatgctcagtcatctcttttaccattcgcttctctcttgctcttgcaggagagagccatgtccatgcatcgctacctgaggaagattattgggaagctgtttggccaaacactcccattcccactgcactgcgagagcttctaaagcctctccctgcaggtgttgaaatcgatgaactccctaagcaaattgatgatacacagtacccaaaaacattcttctataaagaagaccttcatccaggcaaaacaatgaaagtacaattcaccaagcgtccctatgcacaaccttatggtgtatatacatggttaacggatattaaagacacctctaaagaaggatatagttttgaagagata

SEQ ID NO: 41488 - DNA, 367 bp, Glycine max
  Clone ID: LIB3139-033-P1-N1-B8
cttcaatactactctcaactcattcttctctctcaaaaaccattagaaacgaaaatggccaaataagaagaaagaaacaatgaacgacttgttctcaggttccttctctcgcttccgcagcgaccagtcatccccggaccgccaccacgacatcgagatgggcgccgccgccggtggcccccgcggcggcgaggtgaacctcgacaagttcttcgaggacgtggaaggcgtgaatgaggaactaaaggaattagaaggcttagcgcagagtttaagaagcagccacgagcagagcaagacgctgcacaacgcgaaggcggtgagggacctgcggtcaggcatggacggcgacgtttcggcggcgctg

SEQ ID NO: 41489 - DNA, 367 bp, Glycine max
  Clone ID: LIB3139-033-P1-N1-B9
tttgttttccctctcacttttctcattggaggaaaaaaatccaaaaaaatttcggacagtgaagaatatatcttcttcttcttcttcttcttccaccagtgaacaaatctagggttttagtctcttccttcagcttatttactaaattaatcagcttgtcaaacattcttcttgaagtggacatgcaaactaagaaaaaaacctccaggcgaaatgccagtcaagagcgtggcagtcctaaagtttcaagagcacagaggaaggtctctcaaaatggtcaagctgctgaaaagaaagtcacagacttaattacatcatctgctagaaagaataaatctcttagcacccttgagaataaaactagaga

SEQ ID NO: 41490 - DNA, 372 bp, Glycine max
  Clone ID: LIB3139-033-P1-N1-C1
gagagacgtagaagtgttggaatttagaaccccacaacacccatctttgggaacaaataattggggtggttcatctcctttgctagcaaggaacgtacccaaggaatcacttgaacaaaagtattcaagactcaactcagttcggaccaaagatgagatctttccagctgattatgagtactatgttgtgaacccttcgaatgagaccggtgcaagtgcaagtagtgccaagagatggaacaaagttagaggagttctgttgaagctaatatttgtgaggaaagagaacaaaacaacagttacattaggttcacgtttaaggaagagaagatggataccgagaatggatcctacaactaggtggccacaagc

SEQ ID NO: 41491 - DNA, 366 bp, Glycine max
  Clone ID: LIB3139-033-P1-N1-C10
gaagattttgtcagtaaattatcagggcacaaatcagaggtttgtggactgaagtgggcttatgataaccgtgagttggcatctggaggaaatgacaacagattgtttgtttggaatcaacactcaactcagcctgtcctaaagtactgtgagcatacagcagctgttaaagctattgcatggtctcctcatcttcatggacttcttgcatctgggggaggaactgcagaccgatgcatacgtttctggaatacaaccacaaactcacacttaagctgcatggacactggaagccaggtttgcaatcttgtctggtccaaaaatgtcaatgaactagtaagtacacatggctattcccaaaatcag

SEQ ID NO: 41492 - DNA, 235 bp, Glycine max
  Clone ID: LIB3139-033-P1-N1-C11
ctcgatcctaatcggctcgagctgcgtttgaaaaaaaaaaaaaaaaaaaaaaaggggggaaaaaaaaaaaaaaaaaaaaaaaaaaaaaaaaaaaaaaaaaaaaaaaaaaaaaaaaaaaaaaaaaaaaaaaaaaaaaaaaaaaaaaaaaaaaaaaaaaaaaaaaaaaaaaaaaaaaaaaaaaaataaaaaaaaaaaaaaaaaatggggggccccccctttattaaaatcttccccc

SEQ ID NO: 41493 - DNA, 92 bp, Glycine max
  Clone ID: LIB3139-033-P1-N1-C2
cgcataatttattaaagccacgaaagagaaaacaacatagtgaagtctcttacatggcgttgaataaattatgcgcccttgttccatacttt

SEQ ID NO: 41494 - DNA, 370 bp, Glycine max
  Clone ID: LIB3139-033-P1-N1-C3
caacaaaaccccaatctgtttcctttgccttctactgcctacaacaaacaacaacagcgactcctttttccctttcgtattctcttctctttcattgacgatctccacgaagttctttcacctcaaacacacccttaattacatcgcattctcttcctctttctcttaccgtttgaattagattgcacctactcctctctctttcactgttctttttctggatcttcaacttctccctgattttgctgatttgggggattgagttggaaggggaaacatggctgcttcttctgcatctctttctggtgcttctgcttcggatcttctgaggagttcaaccagcggtttcaatggtgttcctttgagaacc

SEQ ID NO: 41495 - DNA, 371 bp, Glycine max
  Clone ID: LIB3139-033-P1-N1-C4
caaaactagtgcaactttgcaatttagaaagttagcagattgtgattttctcaagagaaactttaagcagatgtctaatgttttgtgggtggctcctgaagacaaggcgagtttatggtcacaacttcattatgtttcgtgtaataatctggaaatgcaagaagcttatcttgtcaatctcgtaaatgtgttacgagaactgtatttgcacagtccagaggaagctcgccaattgagaaggaaagctctctctcgtattgaatggctgcaaaaagctgatgtgcctaccatagcacagattgaagagttccattcgatgcagaggatgatgaatgctcctgattcaaatgataatattgatctactgttga

SEQ ID NO: 41496 - DNA, 372 bp, Glycine max
  Clone ID: LIB3139-033-P1-N1-C5
gttctgtagtgccacccacacccatcagggtttatgagcttttcctccaaatgctgaatcgtccatctccatttttcacccgatttctttgccagggttccagaaatgtttaattttaaacaaagatgagtacgactgaattatctaatatgaagcaacctcctgttccgctggcaaccctgattggccaggagctacgaaatggaaaaattgaaaaaccttttgtgaagtatgggcaggctggcttggcaaagaaaggagaagattactttttaatcaagacagattgccagagagttcctggggattcatcaacactcttttctgtctttgcgatctttgatgggcacaacggtatatctgctgctattt

SEQ ID NO: 41497 - DNA, 371 bp, Glycine max
  Clone ID: LIB3139-033-P1-N1-C6
aaggctacaattggtgactatttaggtcaacatgaagagtttccccttgctgtgatggatgcttatgtagattccatgaaattttctggatttaaatttgatactgcaatcagggagtttcttaaagggttccgacttcctggggaagctcaaaagatagatcgaatcatggaaaagtttgcagagagatactgtgcagacaatcctggcctttttaaaaatgcagatacagcttatgttctagcttatgctgttattatgttaaatactgatgctcataacccaatggtgtggcccaagatgtccaagtcagattttgttcgcatgaatgccagggatgatccggatgaatgtgctcctaaagaactact

SEQ ID NO: 41498 - DNA, 368 bp, Glycine max
  Clone ID: LIB3139-033-P1-N1-C8
gtggtgaatttcagttgtcttcaaaaggagcgacatgggatgagattgactttgaattcttgggcaatttgagcggcgacccatacatccttcacaccaacgtgtttagccaaggcaagggaaatagggagcaacaattctacctctggtttgacccaactgcagattttcacacctattccatcctatggaaccctcaacgtattgtgtaagtttctagttattatgcaatcctcaagaatattatcataaaatagaatcgatacgtgtttttttttttttttcctaacttgtgctggaagcaactgattaagtgtgtgtttgttaattttgtttcatttcagcttctcagtggatggaagtccaat

SEQ ID NO: 41499 - DNA, 371 bp, Glycine max
  Clone ID: LIB3139-033-P1-N1-C9
ggactccgtcagatccggcccctacggccagatcttgcgccccgacaacttcgtctttggccagtccggcgccggcaacaactgggccaaaggtcactacaccgaaggcgccgagctcatcgactccgtcctcgacgtcgtacgcaaagaagccgagaattgcgactgcttgcaagggtttcaagtgtgccattcgcttggtggaggaacgggttccggcatggggacgcttctgatctcgaagattcgggaggagtatccggatcggatgatgttgactttttccgtgtttccttctcccaaggtttctgataccgttgtggagccttacaatgctactctttctgttcaccagcttgttgagaatgctg

SEQ ID NO: 41500 - DNA, 372 bp, Glycine max
  Clone ID: LIB3139-033-P1-N1-D1
agggaattgggttctcttcctaaccctggccatcagcctgtgtgtctccggcgcattccaaatccaaaccgaaaccttgcccctccacaccctccctgagccacacatcctctcagaaaccctctcagaaccccaagaaactctctcgctctcacttcacctccacctccaccacatagacgccctctcctccaacaaaaccccagagcagctcttccacctcaggctccaacgcgacgccaagagagtcgaagccctcctcaaccaaatccatgcgcgcagatccgccggctccagtttcagcagctccatcatttcgggcctagcacaaggcagcggcgagtacttcacgcgcataggagttggcacacc

SEQ ID NO: 41501 - DNA, 369 bp, Glycine max
  Clone ID: LIB3139-033-P1-N1-D10
cccagcatgcagaattagagaattttttttcacaaactgttgatttgattcattgtgatctgcttctgctgggtggttggcaatgtctgctcctatgatcattgaccctatgatgatatcggcaccagaaactcaatcagcagcagctagcatactagttgcacaaagtgaagttgaatttgctgtatgtgactgttgtggactaacagaagagtgcaccccagcctatatagaaagaatcagagagaggtactttggaaaatgggtttgtgggttgtgtgctgaggctgttaaggatgaaattgtgaggtctgagagactttgttgcacagaagaagcaatggcttagcacatgaacttctgcaaaaa

SEQ ID NO: 41502 - DNA, 371 bp, Glycine max
  Clone ID: LIB3139-033-P1-N1-D12
ctaagacaggcaccatgtcacttcttaaccagctctttaacagaggcgttttcggcactcgatgcaaaacatgcctgaacctggcaatttcacgcattaagctgctgcaaaacaagagagatatgcaactgaaacaaatgtgcaaggagattagccaattcttgcaggctggccaagaggcaattgctagaatcagggtggagcatatcatacgggaacaaaatacatgggctgcatatgaaattttggagttgttctgtgaatttgttcttgcacgtgtacctataattgagaatcagagggagtgccccacggaattgcgagaagccattgcaagtataatttttgctgctcctagatgttcagatgta

SEQ ID NO: 41503 - DNA, 368 bp, Glycine max
  Clone ID: LIB3139-033-P1-N1-D2
caaaaccctgaagaaagacacagccattgtttacttttcattgattgagccaaagctttgtattttctgcgataattttccattgggtggaagaaagtctcaacctttattcgaaagagcaaggatctgagttgagttgagtgatcatgtgtggtggtgcgattatctccgacttcataccggcaggtcccgccagcggggcgcggcgcgtgaccgccgacatcctgtggccgagtttgaggaagcgcttctcgaagccgctgctggacgatgatttcgaggctgggttcagagaattcaaggatgattcggaaatcgaggatgttgatgacgaggacgatgaagacgaagaggagttgaagaagaag

SEQ ID NO: 41504 - DNA, 127 bp, Glycine max
  Clone ID: LIB3139-033-P1-N1-D3
gcaattgtaacaaaatagcaagaaactttccaatttcaatcgtgtctaatgaaattcacaatagaatatattatgttctactttgcattaaactcaagaaattgtaatatgccaatctttatccgtg

SEQ ID NO: 41505 - DNA, 372 bp, Glycine max
  Clone ID: LIB3139-033-P1-N1-D4
cttattatttgttctagagaagataaataaataaatggacaaatcattgtaagttgggactaataataatgcactagtagtaactcattcatcattccgtttccagttcaagaacttgttctactcttttatcctacgcactcctcccttcttatcctgcgcatctttcaccgagatcctccccttcgcatcttcactttccaccatttcagtgggaaagaatcatgagttgtttcagctgttgcgaagaggatgacctccacaaggctgctgaaagtggaggaccatacgtcgtaaaaaatccagcaggaaatgatggaaattatcttgcttctgaaactgcaaagcagggcactcagcctgttaaacctc

SEQ ID NO: 41506 - DNA, 370 bp, Glycine max
  Clone ID: LIB3139-033-P1-N1-D5
ggttgatacttatcataccaatcctgaaaatgcagtgcgtagtatttttgttgcgcctttcagaggcggaaggcccattcgggtggttacatttccgaataccattgtgcagattgaaccagacatgaattcaaggtttcagcttttgagtaccactaccaatggtgattttgttcaagggaaagatctcgcaatggttaaagttaatgtagcatgtgctgctgttggcttgacatcaagttacactccaactccattgttggaatctggtttgcaaaaagacagagggttaattgtggagtattttggaaggatgtcttacgttgctcataacgttaatcagccccaagagaaagatttgttagaggga

SEQ ID NO: 41507 - DNA, 366 bp, Glycine max
  Clone ID: LIB3139-033-P1-N1-D6
ctcgagccgaatcggctcgagcggctcgagcccaaccatccgtcgccacgtggtggaaaggtacccaaaaatactaccaactcataaagtcatcaccaaaactcaccctcactctcggtacccaaatcctcgacgagaactactccctaggaaaatcactcaccaacgacaacattgttagtttagcatccaagggtgcctcgaaagacgccatcaacgttgttctcacatcctcggacgtaaccgttgaaggattctgttccagtaggtgcgggacccatggctcctcggtgggtcctcgcaagttcgcttacgtgtgggtggggaactcggagacgcagtgcccgggccaatgcgcgtggccct

SEQ ID NO: 41508 - DNA, 363 bp, Glycine max
  Clone ID: LIB3139-033-P1-N1-D7
ggctgaagagctatttgaacttctcccaccctctaatatccaaaatttttaatcccaacgaatgtgcctgggcctatggcatgaacatttttgatttggaggcttggaggaagaccaatataagcaatgtttaccattattgggttgaacagaatatcaaatcagacctgagtttgttgcagctagggacattacctcctggattgatagcatttcatggttatgtccacgttattgatcctttctggcatatgctgggattgggatatcaggaaaatacaagttttgctgatgctgagagtgctggtgtcatccatttcaatggcagggcaaagccatggttagaaatagcttttccacaac

SEQ ID NO: 41509 - DNA, 368 bp, Glycine max
  Clone ID: LIB3139-033-P1-N1-D8
tgaagagtgaagagcagcgaggaggatgaaagaaaggcgttagagcagagtgaggcatcatcagaatctgaatctcacatgggcgaacagacgctaggtcaagcacaacccctccccgcccccgatgctgccacggcccactccgaactaaacaatgtccctcagccgacaacctccccagctacgaaaatccccctccgtccccgcaagatccggaaggtctctccggacccctccacctccgaagcccccatcaaacccgccaaacctgttggccgcaacaccacctccaaggctgctccgcctcgagccctgactgtggtccctcgcatagtggctcgctcactctcctgcgacggcgaggtcga

SEQ ID NO: 41510 - DNA, 359 bp, Glycine max
  Clone ID: LIB3139-033-P1-N1-D9
ccaaaaaccctaggtagagagctcttcctccctgtctcacagcaatggccgccggaggacgccctctcgtcaccgtgcaggccctcgacggtgacatggcaaccgatgcctccgccaccgttcccatccctgacgtcatgaaggcctctatccgccccgacatcgtcaatttcgtacactcgaacatctccaagaacagccgccagccatacgccgtcagtcgtcgcgctggtcaccagacctccgccgaatcctggggtaccggccgagccgtctcccgtatcccccgtgttcccggcggcggaacccaccgcgccggccaaggagcctttggaaacatgtgccgcggcggacgcatg

SEQ ID NO: 41511 - DNA, 264 bp, Glycine max
  unsure at all n locations
  Clone ID: LIB3139-033-P1-N1-E1
ggctatcatctattcatccaggatgcagcanagtacaagagaagggtccgccagcaggcaaagcaatatccacctcttctctagggttgcatcagctaaatttatgaactttttttactatggcagaggttccttctttggccccgggttaaaactgggtggccattgggataaagggctgccttaccattaaccatgaatgtttaagctatttatgattactcccagatctggaagaagtgttaatttttaaaaaaaatggga

SEQ ID NO: 41512 - DNA, 372 bp, Glycine max
  Clone ID: LIB3139-033-P1-N1-E10
aaaaaatctaaaactttcgttctagaaaaccagacgcaaacttttctttctacgggggctccaatttggccttaacgaaacgaagaatctcgcatcgatcgcgattcgaacatcggaatctggaagcaagcgatgtcaacctcgagccagcaccagttccgatatacacaaaccccttccaaggtcctgcaccttcgcaacctcccctgggaatgctccgaggaggagctcagagagctctgcagacccttcggtaagatcgtcaacaccaagtgcaatgtcggcgccaatcgcaaccaggcttttgtcgaattcgtggatctaaatcaagccatttcgatggtttcatattatgcttcatcttcagaacca

SEQ ID NO: 41513 - DNA, 100 bp, Glycine max
  Clone ID: LIB3139-033-P1-N1-E11
caaatatctggttgatgagtgtccttttgcatttgtgaactagtatgtaatattgtattcacttaaataaagcgcattactatgtgcaatgagtgtgttt

SEQ ID NO: 41514 - DNA, 368 bp, Glycine max
  Clone ID: LIB3139-033-P1-N1-E12
aaaaaaactaaaacagaaacaaaagatggttcatgagaggcaaaacaacatccatgttcttgttcttccataccctgcccaaggccacatcaacccccttgtccaattcgcaaaaagattagcttcaaagggtgtcaaagccacagttgccaccacccactacactgccaactccatcaatgcacccaacatcacggtcgaagccatctccgatggtttcgaccaagccggcttcgcccagaccaacaacaacgtgcaactcttccttgcctccttcagaacaaacggctccaggaccttgtctgagctcatcagaaaacaccaacaaactcccttccccgtcacctgcattgtctatgactcatttt

SEQ ID NO: 41515 - DNA, 368 bp, Glycine max
  Clone ID: LIB3139-033-P1-N1-E3
aaagcattccataggaatacacgttaaattatatacacagctctttaaatttccaaacttcaaagcagcttcgtagatcctcaatcatgtcttctatataagtacaaaccttcacccatctcacatatcacaacactgtcacaaaggaaaagtacttttttttttaaaaaaattatcttatttgagtgtgatcgatggcatacccaaacccttatccggcgcaaccgtatccctccacctccgtgccgatgccggcggtgcccaccgccgtgatcggcccccagttctgtgcgccctacccgctggatctggcggtggtgaagaaggtgatgacgctctccgacggtaactttgtggtcaccgacgtc

SEQ ID NO: 41516 - DNA, 375 bp, Glycine max
  Clone ID: LIB3139-033-P1-N1-E4
gaaggatacatctccatggagaatcagaacaacaacagggacaacaataaatattacgaggacaacgaccaagccgccaatgagaaatacttctacaacaacaacaacaatgatgatgctgccaacaacaggtattacaaaaccaaatctgtcaacagcaattacaacggcgagaggcagggtttgagtgacacgaggtttatagagggtggaaaatacttctatgatgttaagtctgaaaagtacaaccatccaacacaatatggtggctcaaccagaggagttaactcagaaaattggtccagcaacagaggttactttggcaacaacaatgtgaactccatggaaggttaccagaaccaggaggagtttgaa

SEQ ID NO: 41517 - DNA, 377 bp, Glycine max
  Clone ID: LIB3139-033-P1-N1-E5
aaaacctctcaatctataaacacactttccaagaacacagctataagaaccaaactgggtatggttctattaacaaaaaccttgacacaaagcttcaatatagaacgtgtggataccgaggacactgagaatattcatggaatgattgatacaatacccacagaagaaattgcgtgtagatcatgcatagaatgtgaactgctgctatgaataagatattttaggggaaggcgaccaggtctgatatttacacgcatctgctctcaagactgtgaattatggaatcctgcttgcacaaaagcaatgactatgtcatttaatccaaacccgtgttctgatgcatggagtttggaatttctgaagcgtaccggatttca

SEQ ID NO: 41518 - DNA, 237 bp, Glycine max
  Clone ID: LIB3139-033-P1-N1-E7
cttttcttggtggaattcaaaaatatgccactcccatgatgcccctagatgaagaaattctttctaaggttgcacaagatatggttgaggaatggtttgattgtgttgatgaggaggattcctttgaggaagtttctttaagtgcagcacttaatggtgttgagggtttggactatatggaaagaattaacattgccacattttgatggtttttatttatgtgcttttacgcaaaaa

SEQ ID NO: 41519 - DNA, 367 bp, Glycine max
  Clone ID: LIB3139-033-P1-N1-E9
ctcgagccgtctcagtcacatatgtgctttaccaatgctttctcccattcctttaacgtgtcaattcggtgtgcccacttcttgtttcatctagtttgggttaaagtgtggtgtcggtttgcttatatgatgtgctggtagttcattggtgaaaatctcataggtatttaacctctcaaaattccaacacatcgatctcttcccatccaccaaaccaattttccaattcaagatgacacaacaaccggacttcagttggatggttcccattgaagtgatgctgggtgccctctaccacggacaagtccaagcctgcagcatctcaagcgtcacggacgagcttcgaagcccgtacgaggcggttttc

SEQ ID NO: 41520 - DNA, 370 bp, Glycine max
  Clone ID: LIB3139-033-P1-N1-F1
cagagaacctcttttcctttacatttacctttcattcatacaagctcataagtcaattttggtttatcattcctagaagaaggaacctttaaccattgacatggccatggcatatgttgctagatcatcggagtcatctcaagtgcttaatttccattccactgctaaatggaatgctcactttgatgccttgaaacaaactaacaaactgatggtggttgatttcactgcttcatggtgtggaccttgcaaactcatggacccagttatccaagagtttgctacaaagtacagagatgtcgagtttgtgaagattgatgtggatgagttaatgggaatgccaactttcatgctgattaagaaaggcaac

SEQ ID NO: 41521 - DNA, 373 bp, Glycine max
  unsure at all n locations
  Clone ID: LIB3139-033-P1-N1-F10
agggaaggtaccctgcaaatcgcaaagaagaaaggccctctcattcctcttctgtgctattctctgcttcatttccattttcttccttctctcccagttcaaatctacctccacctcccaccactcccttcccacgttccaaatcgagaaacacgaataccaccgcggttcctgcgactactccgacggaacatggatccacgacccctcgaggactccgaggtacgacaatacctgcaaggagatcttcaagggctggaactgcctctccgcccacaaatccaacgccccacatctctccacgtggcgctggcagccccgcctctgcgatctcccccagttcgaccccgctgagttcctncgcactcacacc

SEQ ID NO: 41522 - DNA, 368 bp, Glycine max
  Clone ID: LIB3139-033-P1-N1-F11
caccggtgttagggaaggatgctacaattgagcaacttctgcctattttcctttctcttttgaaagacgagtttcctgatgtcaggctaaatattatcagcaagcttgatcaagtgaaccaggttattggtattgatttgttatctcagtctctgttgccagccatagtagaattagctgaggatcggcactggagagttcgacttgcaatcatagaatacatacccttattggcaagccagttgggtgttggtttttttgatgataagcttggagctctttgcatgcaatggctaaaggacaaggtatactcaatccgtgatgcagccgctaataacatcaaacgcttggcagaagaatttggaccg

SEQ ID NO: 41523 - DNA, 311 bp, Glycine max
  Clone ID: LIB3139-033-P1-N1-F2
atttccataaccttagtcatcttcttctttcatctttctccctaacggtatcgagggaaaaatatggcggaagaacacagatgccaggcaccgcgcttctgcgccaacaattgcggtttctttggcagccctgccacgcagaatatgtgctccaagtgctaccgcgatttccagctcaaggagcagcaatcttccaacgccaagatggttctcaatcagtcgctggttccttcaccgccaccggcggtgatttctcagccgtcgtcttcttcttcggccgcggtagatccgtcatcggcggtggttgatga

SEQ ID NO: 41524 - DNA, 447 bp, Glycine max
  unsure at all n locations
  Clone ID: LIB3139-033-P1-N1-F4
cttgcatgncctgcaggtgcgacttctagagtgatccccctccggggaaatttccaattcccacatttttcaagaaaatanaggaggccaaaaagggggcatatattgaatgtggaatggatttgttttncttattaggcgctatncctgaagccaaaggnaaatgatgatcggatattcctcggggatattccaaattccacatntttnctaagaaataaggaggcanaaaatgttcatatantgaattggaattatttgttttcttattaggcctatcctgaagccaaaggaaatgagatcggaattcctcggggaattccaattccacattttcaagaaataaggaggcaaaaatgttcatatatgaattggaattatttgttttcttattaggcctatcctgaagccaaaggaaatgagatcggaattcctcggtggtaccga

SEQ ID NO: 41525 - DNA, 372 bp, Glycine max
  Clone ID: LIB3139-033-P1-N1-F5
ggttgtcgatgtctctaaacaatttttccctgatatagcagtaggttttgaggacccacgtgtaacacttactgttggtgatggagttgcattcttgaagaatgttccagaaggaacttacgatgcagttatagtggattcatccgaccctattggccctgctcaagagctgtttgaaaaacccttttttgcgtccgttgcaaaggctcttcgtcctggaggagttgtgtgtactcaagcagaaagtatatggcttcatatgcacatcattgaggacattgtggctaattgtcgccaaatattcaaaggttctatcaactatgcatggaccacagttcctacatacccaagtgggatgattggttttatgct

SEQ ID NO: 41526 - DNA, 271 bp, Glycine max
  Clone ID: LIB3139-033-P1-N1-F6
ctttcttcttctctctccctcatgcagcctcttcgaagaaaaactcctctattcacctcagaaatggggacaatgaagggtcgcaagaacaacaacctctccatcttcgtggtggtgttctccatcttcctctttgggctcttcatgtacaacgaggatgttaagtccattgctgaattcccattctcgagtcccaaagcgcatgagacacaagaaggaggagaacctaataaacatgttgattctgttcaagacagtgttgttgttcaaa

SEQ ID NO: 41527 - DNA, 367 bp, Glycine max
  Clone ID: LIB3139-033-P1-N1-F7
cgtgtttcaaatcagaatactcgtggggtgaagaatattcatactgctgctgctgaacgcagtcacttagttaaaaattccacattgatgaattattctgttaggccttgttctcaaaacaagacattggggagggatgctcataatctgctggagtattttaagaagatgcaggctgagaatcctggtttcttctatgcgatacaacttgatgaagagaatcgtatgtctaatgtcttttgggcagatgcaagatcaaggacagcatacagttattacggagacacagttcatctggacacaacatacaaggtaaatcaatatagagtgccatttgctccttttactggggtaaatcatcatggtc

SEQ ID NO: 41528 - DNA, 368 bp, Glycine max
  Clone ID: LIB3139-033-P1-N1-F9
gtggacaaaatcagaaccacattcctgggaattgatcttcccaatagaggtatgtggggctaataatggttttgaaatgtggagttctgagtgggcaaatcaaacttcatggcatttgagtctccttattgacaatcccaaacagtctacagtttttgatattctcttgggaatctctcaagattttgaaattgctggtaatactcttatgccagctttttctgttccacaggctactgccagatcttctgaaaatgcggaatcctctgcatgatctggaatttatgttttctttcgcttgttcgtttgtttaattcaataaaggaaattaggcatgaccctcttgttgagtatgctctgcctatttg

SEQ ID NO: 41529 - DNA, 338 bp, Glycine max
  Clone ID: LIB3139-033-P1-N1-G10
cttttcccactgcctcatcaatcatcgtcaccaaacagacattcattcattccacgcgtccattctctctctaaatcgcattaccttcttctatctccttagttcccggcgagttcgtgcatcggagcctctaaatcgcattaacatcatcgaatcaaaccttccttctctttctcaactccagaatctcgtccttgtgagagaaaaaaaaaaagttagttagggttacgcacagttaattaattatttaataatagaaaaatgagctttcaggacatcgaggccggccggtccttcgcttgccgacgcaacctcatcaacggcaaacaagaccccac

SEQ ID NO: 41530 - DNA, 365 bp, Glycine max
  Clone ID: LIB3139-033-P1-N1-G11
tgactcttcacaatatatagtagtcttcaattcaatgtctgcacatgtaatggctgttacaggacttagagtttcatcgtttacaagctcacttgcttcatgcccatccatttatcaaccatggaacctatcgttacagacatctaaacgagggacgattcataataacttgtccatcaagtgcgttgctttcaatgacaacaaggtgcccagtcaaattgatcttcggacaaacaattttgagcaagttaaaagaaacagccaaatggcgttgctaaactcaagtgatccaatcaaaatattgaagatgattgacaccatccaaaggttaggaattgagcatcatttcaaagaagagatcaacg

SEQ ID NO: 41531 - DNA, 373 bp, Glycine max
  Clone ID: LIB3139-033-P1-N1-G12
cgagcaaccataccccacacccacgcatccttcttctcttgtcatttccccacactctctttccctccatgagcgccatggatttctcttccatctatggtgtctcacacaaacccttcctcaccctcttccttctcttccttctacctctccattctcactctcacaactctacaacctcagctcagattaactctaactccatcctcgtcgctcttctcgattcccattacaccgaactcgccgaacttgttgagaaagcgcttcttctccagcagcttgaagacgccgtcggcaaccacaacatcaccatcttcgccccccgaaaccaagcccttgaacgcgacttagaccctgaattcaagcgtttctt

SEQ ID NO: 41532 - DNA, 366 bp, Glycine max
  Clone ID: LIB3139-033-P1-N1-G3
cggagcctgacctctccttgaacataagccctccctctatctcagattctgaagccgccaaagatgttggaagctttggaaaagtgctttacagtgatatttgttcaacttctgattctggtagtagtggaggaagtgatttgagccacgagttccacaaccttggtcatcatcatcatcgtgagcccacattgaagttaggattcggaactgtggatttgaatccgcaccatcatcaagtacaaggtgttccaagaagcttcattcaccaccaccttcaacctcacatctatggccgcgatttcaaacgaagcgcaagagtcgttcatggtgtcaaaagaagtgtcagggctcctaggatgagat

SEQ ID NO: 41533 - DNA, 374 bp, Glycine max
  Clone ID: LIB3139-033-P1-N1-G4
actccttgctcttagccctcctcctcttcgccgccgtgggcaccgtcgcgatggcggtggccgcgtcctacgcctacgacatcctgatccgtcaggtggtgccagatgttggcgaagccgaagaggaggacaacctgctgaacgccgagcaccacttcgcgagcttcaaggccaagttcgccaagacctacgccaccaaggaggagcacgatcatcgcttcggcgtcttcaagtccaacctccgcagagccaggctgcacgccaagctcgacccctccgccgtccacggcgttaccaaattctccgatctaactccggccgagttccgccgccagttcctcggcctcaagccgctccgctttccggcgcacgcc

SEQ ID NO: 41534 - DNA, 374 bp, Glycine max
  Clone ID: LIB3139-033-P1-N1-G5
caccacccgtcagcaattcgagcaggatgtcgaccttcgagcccgtgatcgttatcgacggcaagggtcacctgcttggccgcctggccagcaccgtggccaagcagctgctcaacggccagaagatcgtggtcgttcgctgcgaggccctcaacatctccggagagttcttccgcgcgaagttgaagtactcggctttcctgcgcaagcagacccgttacaaccccacccgtggtggccccttccacttccgcgctccctccaagatgttctggcgcaccgtccgcggcatgattccccacaagaccgcccgtggcgccgccgccatggagcgtcttaagaccttcgagggtgtcccccagccctacgaccac

SEQ ID NO: 41535 - DNA, 340 bp, Glycine max
  Clone ID: LIB3139-033-P1-N1-G6
ctcgagccgggtttacccaccactgcttggattagttctgcagttaacaatcgctcctgagatatcaacaaaaggattcgcacagcacttgggaaaggtaagaaaattgtttttcttactagagttgatccttttccagtagctttactggctgttctttttggtgttaagaatgaaattctgagttctaacgccactaatcctatgctgacgcgacttcttgaaaactgtaagagtctcaaatatctggttgatgagtgtccttttgcatttgtgaactagtatgtaatattttattcacttaaataaagcgcattactatgtgcaatgagtgtgttta

SEQ ID NO: 41536 - DNA, 305 bp, Glycine max
  unsure at all n locations
  Clone ID: LIB3139-033-P1-N1-G7
accgattcctcgtcatcgtcacgagccgccgacacctgtgatcagcntcatcagcaggcggcggctgcccctctgagccggtacgaatcgcagaaacggcgagactggaacacctttaaccagtacttgaagaaccagacacccccagtttcgctttcacagtgcaacttcaaccacgtgcttgagttccttagctaccttgaccaatttgggaagaccaaagtccacttgcacggttgtatctttttcgggcagcctgacccgtccgcgccctgcacctgtgctctcagacaggcttgggggag

SEQ ID NO: 41537 - DNA, 109 bp, Glycine max
  Clone ID: LIB3139-033-P1-N1-G8
taagagtctcaaatatctggttgacgagtgtccttttgcatttgtgaactagtatgtaatattttattcacttaaataaagcgcattactatgtgcaatgagtgtgttt

SEQ ID NO: 41538 - DNA, 363 bp, Glycine max
  Clone ID: LIB3139-033-P1-N1-G9
agaaccgttgcttattcttggaggccaccaccacagttcacactttctttgtttcttattgagtttttggcttctcacttctttttttctttcacactctcaacgaagtgatttataacagtgtttaattgaaattccaaacatggattgggttcgaggagacgctgtcggacgaggaagctttgctaccgttagtttagctattccaacgacgaattacaatcagtttccgtctctaaccgtggttaagtccgctgacgctcaaacctcgtgctggctcagaaacgagaaacacgtgctggatcgcctaggttcgtgtccgaggataattcgctgcttcggagatgactgcagtttcgagaa

SEQ ID NO: 41539 - DNA, 364 bp, Glycine max
  Clone ID: LIB3139-033-P1-N1-H1
gctgattgacaagtatgatctgtatgggcaagtggcctatcctaaacatcacaaacaatatgatgttcctgacatatatcgcctagcagcaaagacaaagggtgttttcattaatccagctttcattgagccatttggtcttaccttaattgaggcagctgctcatggtttgccaattgttgctactaaaaatggaggtcctgttgatattcatagggtacttgacaatggtctgctcatagatccccatgatcagcagtctattgctgatgctcttttgaagcttgttagcaacaagcaactttgggcaaaatgtagacagaatgggttaaagaatattcatttattttcatggcccgagcac

SEQ ID NO: 41540 - DNA, 316 bp, Glycine max
  Clone ID: LIB3139-033-P1-N1-H10
cgaggagtctcctcaagctatcacgaagtcagcggatggctcattctctttaaagaccaacaaaggtacagtggacggtttctcacatattatgtttgctacaggacgcagacctaatactcagaacttaggcctggagtctgttggtgtgaaactagctaaagatggagctatagaggttgatgaatactctcaaacatcagtttcttcaatttgggcagttggagatgttacaaacaggataaatctcaccccagttgctttgatggagggaggagcattagtaaaaacgctgtttcaagataacccaacaaaa

SEQ ID NO: 41541 - DNA, 334 bp, Glycine max
  Clone ID: LIB3139-033-P1-N1-H11
cacttagagcttgacacgcatgcagcgcgcctcgtctcgtcgtattcgtctggaggtgcaggctctatgttatagcttttggaaatttggacgatgacaccatcaatcaggtggctcttctccacaagctgctgcagcatggagagattcatgaaaaagttgcgttgaaattttcacaagaggaatttcttacagcttggtcaactcaggtgcgtcccgcaacgactctgttggctgatgggtgcccatatttgtatgctatggtgcatgatagttcagtgtctacaataccaggtgattttgtcattggtgttaagttgacaaccataaacaa

SEQ ID NO: 41542 - DNA, 207 bp, Glycine max
  Clone ID: LIB3139-033-P1-N1-H12
gggagaagagaagttttgtgcaaaatccttgggaacagtaattggttttgccatttcaaagctgggaaagaacattcaagtactttcaagttcctttgtcaataagcaagagcaatacactgtggaaggagtgcagaatcttggagacaaagcagtgatgtgtcatgggctaaatttcagaactgcagtattttactgccataaagt

SEQ ID NO: 41543 - DNA, 125 bp, Glycine max
  Clone ID: LIB3139-033-P1-N1-H2
gaattaaacaaacgaacaagcgaaagaaattaggcatgaccctcttgttgagtatgctctgcctatctgaaaatttccacacctcttttaattgtcgtaatgatgtgtgaagtgtgtgttatttt

SEQ ID NO: 41544 - DNA, 371 bp, Glycine max
  Clone ID: LIB3139-033-P1-N1-H3
gtaaagaagccagtgctaggatttgttagtgaagcaatggctcaaaccatgttgctcatgtctagtgtctctagcagttattccgtggatttgaagaaagaccttttcctccaattgcagagtcaaagtttaaggcctaagttctctcagctctcattcaacccacttccatcatcaacttcttccttttcttcaccccgtacattcacaactctggccctcttcaaatctaagaccaaagccgctcctgctaagactaaggttacaaagccaaagcaaaaggttgaagatggtatctttggcacttctggaggatttggttttactaagcagaacgagctctttgtgggtcgtgttgctatgcttggttt

SEQ ID NO: 41545 - DNA, 277 bp, Glycine max
  Clone ID: LIB3139-033-P1-N1-H5
gaactactattgatgttgttttagttaatggtgttcttcatgaaggagaacaaatagttgtctgcggaatgcagggtcctatagttaccacaattcgagctttattgacacctcatccgatgaaggaacttcgtgtcaagggaacatatcttcatcacaaagaaatcaaagctgcaatgggtataaaaatcactgctcagggccttgaacatgccatcgctggcactggtttatatgtggtgaagcctgatgatgatttggaagatgttaaagaatc

SEQ ID NO: 41546 - DNA, 364 bp, Glycine max
  Clone ID: LIB3139-033-P1-N1-H7
gcagtatggatatattggcatgtaagcttccttttttgctatacttccctcttacggtgtttttatatgataagtattttttgaaactgctgtggtgctgtcagactatgataagttttctttggcaagcaatttaagaggcttgaacttgaaataactgaaatttgaagtgtgattggaactgaaatttactgagaccagctccctgcaatcagaggtaggcttccatactgaacacaaatggggacaatagggactaaaatgttgaccatgtcatcattgggacttgtaccatgtcatgcatgaacttcccaaaagcttaagctagtacttgaaggtttatgatttttctttttataaatct

SEQ ID NO: 41547 - DNA, 332 bp, Glycine max
  Clone ID: LIB3139-033-P1-N1-H9
cacagattgaagagttccattcgatgcagaggatgatgaatgctcctgattcaaatgataatattgatctactgttgagcattgatttgttgggtttacaaggagcaggtaaagcttttccaaacaagattgtttttgatgataagcttgtgttggctaacacacaagaattctttgatggaaattttccagtggattcttggttaccaatttttgtgaattgtctctatcctgtaagtcaattaccttcagaagctgtcgttgtaaatgttacatgtggtagtggacgtggtggtttcccaccactgtttggttttttttgcatttaaaat

SEQ ID NO: 41548 - DNA, 352 bp, Glycine max
  Clone ID: LIB3139-034-P1-N1-A10
agctattatactctctagagtaattgcggaatctgctagaattttctaataatggcgaaagacgttgagcaggtcacagagcaaggtgaatactccgcgaaggactaccatgaccctcctccggcaccgttgatcgacccagatgagctcacaaagtggtccttgtacagagccgccatagctgagttcatagcaacactcctttttctttacatcaccgtgttgaccattattggctacaagagacagagtgacaccaaaatccccggtaacaccgaatgtgacggcgttggcattttgggcatcgcttgggcccttcggtggcatgatcttcatccttgtttactgcact

SEQ ID NO: 41549 - DNA, 359 bp, Glycine max
  Clone ID: LIB3139-034-P1-N1-A11
ccatgatgggctcaatgctgctcagtctcagaccctgtctcaccaccatcttctttctcacactcacagtgctcaaggtttcagcatcatcctcagtgattttctacaacaagtgccagcacccagtgtggcccgggatccagcccagcgcaggaaagcccgttctggcccgcggaggcttcaagctcgccccaaaccgggcctactccctccagctccccgctctatggtccgggcgcttctggggccgccacggctgttccttcgacgccggcggccgggggcgctgcgccaccggggactgcggcgggtccctgttctgcaacggcatcggcggaagcccaccggcgaccctggcg

SEQ ID NO: 41550 - DNA, 332 bp, Glycine max
  Clone ID: LIB3139-034-P1-N1-A12
ctcgagcctattcggctcgagtgcagagtttgccgggtccattctctctatacccactcacctctcattcgttctggtcaatcaatcattcattcattcctattccttcttctttctcttccaattccaaatcacgatccttctttttccctctctagaaccttccattttcctctttccttttctgtctttctttactttttttcccttctaggctttctatctctattcaatctctatttattatttatctttaattcttttttttttaatttcttcttattttctattttttttttccatcactattctttttttttatcttttttttt

SEQ ID NO: 41551 - DNA, 344 bp, Glycine max
  Clone ID: LIB3139-034-P1-N1-A2
ccgcgatcacaggttgccgcaccttaaaaccggaaacaggggcaatcgttacttgttctcaagaatctacaaactttcttctgttttctctgcactcggttctttaggaaaagaaaatcactctctgtattgattacagacttcgtgaatcattttcttttcaactttcagttcacttgctgaacactctcctataaatatataggacttcgtgtcagatttgaacttttcctggctctttctcggatttctttcttattctcatcttctttaaattttaaggctcgtattttgtttctctaaactttctgttggactcatttgaaatacaacatgaagtttta

SEQ ID NO: 41552 - DNA, 347 bp, Glycine max
  Clone ID: LIB3139-034-P1-N1-A3
cagcgcctctgggttgtggacactgttgaagacaagggagtggaagctgttggatcacactgtccattacttgaggagctgcgtgtttttcctgcagatccctttgatgagggcattgttcatggggttactgaatcagggtttattgcagtctctcaaggatgcccgagacttcactatgttctctacttttgccgtcaaatgaccaatgctgctgttgctactgttgtccaaaactgtcctgactttactcatttccgactctgcatcatgcaccctggtcagctagattacttgacccaagaatcaatggatgaggcctttggagctgttgttaagacttgcac

SEQ ID NO: 41553 - DNA, 358 bp, Glycine max
  Clone ID: LIB3139-034-P1-N1-A4
gcagctgcttccagtttctctctctaaaactcgcaaaagcgaattactgaaaccctagcctctgtttctgtgtttatttacttcgattctacgcatcgaattcaattctctgtgatctgaacccgtgaaatcaatgtgcctctttcggaatcgcagagcgagcaacggtgaccgccatcatcatcgatgaagcgatcgggtcggtggcagaggactctgatcctcgctcttctctttctctccctcgttgctccgctcgtttacgtctctcacctcctcaacactctcacttccgacggacgacgagattttcttgatgatttatcgagttttacacataggtcagatcctttaaatg

SEQ ID NO: 41554 - DNA, 359 bp, Glycine max
  unsure at all n locations
  Clone ID: LIB3139-034-P1-N1-A5
aattatattataaaatgttgcgtttttttttatttatttttatattaaaataatttttaaatatatttaaatttttataatataattttataaaaaaagggcgtgccccccctttttttgagtttttttacacccggaatatttatttttgngaccgtgttcttttgaggcgtttcacaattttttttttttttgaggttttatttataagctttggcgtatttatttgtcttaactttttttttttttaagaattttttttctttttacatattttacacaaaatttagatccggaagcttttaattttaaagacctttgtttcctatttatgtgagcttatttacattttttttttt

SEQ ID NO: 41555 - DNA, 364 bp, Glycine max
  Clone ID: LIB3139-034-P1-N1-A7
gctcaaacagaatttgctgatatacaactagacctagatatggcagtggcgcaaaaagaaaaggaccctgatcctgctgtactgaagagactttctgagaagttgcatctaaggacaataaatgacctaaggaaagagtctagtgaattacctgaattgttgatcacaagtggtggagaactaggcgactcttttgaaatgatcacatcccttctcagcaaactgagggaatgcgtgctcacagaaaatcctgaagttggcactggtgaatgtgaaaaattgtcagttaagcacaggtctcccgtgatcccagatgattttcgatgtcctatatctcttgaactaatgaaggatcctgtaatag

SEQ ID NO: 41556 - DNA, 360 bp, Glycine max
  Clone ID: LIB3139-034-P1-N1-A8
caggccaaaaagattgatgaggagatccttcaggaagtggtgaaaatgggatttgacaggaatcaattggttgaatctcttgggaacaggatacaaaatgaggtttgtgcctttgattttgtctttctatatctgccagataatcccttactaccatccatatatttcagggtactgtggcatactatttgttattggacaaccgatttcgtgtttccagtggctatcttggagctgagtttcaagagaccatggattccggttttaatcaaatgcattccagtgaacttgcttcttcagttgttggaaaccgctttccaggctacatggaatatccaggagtaggatcgaggcaacagt

SEQ ID NO: 41557 - DNA, 356 bp, Glycine max
  Clone ID: LIB3139-034-P1-N1-A9
agaaactttaagcagatgtctaatgttttgtgggtggctcctgaggacaaggcgagtttatggtcacaacttcattatgtttcgtgtaataatctggaaatgcaagaagcttatcttgtcaatctcgtaaatgtgttacgagaattgtatttgcacagtccagaggaagctcgccaattgagaaggaaagctctctctcgtattgaatggctgcaaaaagctgatgtgcctaccatagcacagattgaagagtttcattcgatgcagaggatgatgaatgctcctgattcaaatgataatattgatctactgttgagcattgatttgttgggtttacaaggagcaggtaaagcttt

SEQ ID NO: 41558 - DNA, 361 bp, Glycine max
  Clone ID: LIB3139-034-P1-N1-B1
gagttgaatgtggaatcccttctggatttccgctcacagggatttgcaatagcatttttaatgagatgctcattagatatagctatgaaaaattactgcgccaggctaaagctccaagtatgtttttacaatccttcaaaaattttgtttctttgtgtgtgtatggtgatgataacttaattagtgttcatgaatatgtcaagccttactttagtggttctaaattgaaaagctttctagctggtcataatatcaccattactgatggtattgacaaaactagtgcaactttgcaatttagaaagttagcagattgtgattttctcaagagaaactttaagcagatgtctaatgttttatg

SEQ ID NO: 41559 - DNA, 343 bp, Glycine max
  Clone ID: LIB3139-034-P1-N1-B10
gattcaggaaaaagttgtattgaaattttcacaagaggaatttcttacagcttggtcaactcaggtgcgtcctgcaacaactctgttggctgatgggtgtccatatttgtatgctatggtgcatgatagttcagtgtctacaataccaggtgattttgtcattggtgttaagttgacaaccataaacaatatgtgtgcatatgggcttaatcctggtatttcaggttctcgtcttttgggcaccattcctcagtccatttcacagcaaactgtttggaatcaaatggcaacagtgagaacaccattgaattttgattctagcaagcagagcttttgtcaattt

SEQ ID NO: 41560 - DNA, 350 bp, Glycine max
  Clone ID: LIB3139-034-P1-N1-B11
aaagcattgaattcaaaaactaagttcatttcttgtgctttgctttattcctcaaaaccaaacatgtcgaacacatgcagcaactgtgactgcgctgacaagactaactgcaccaagggaaacagctatggtgttatagtagagactgagaagagctacatttagactgatgacatggatgatccagcatctgagcatgtttggaagtgcatgtgtggtactaactgctcttgctactgactgcacattgctgacattattgaatagcaaactgaatggaatgaaatgggaacagcgagaacaccattgaattttgattatagcaagctgagtttatgtgaactgtctat

SEQ ID NO: 41561 - DNA, 369 bp, Glycine max
  Clone ID: LIB3139-034-P1-N1-B2
gggtcaccccgacaagctgtgcgaccagatctctggtgcagtgctcgatgcgtgccttgaacaggaccctgacagcaaggttgcctgtgagacatgcaccaagaccaacatggtcatggtctttggagagatcacaaccaaggccaacgtagactatgagaagattgtccgtgacacatgccgcgaaattggattcatctctgatgatgttggtcttgatgctgacaaatgcaaggtgttggtcaacattgagcagcagagccctgatatcgcccagggtgtgcacggtcacttcaccaagcgcccagaggaggttggtgctggtgaccagggtcacatgtttggctatgccactgatgaaacccctga

SEQ ID NO: 41562 - DNA, 365 bp, Glycine max
  Clone ID: LIB3139-034-P1-N1-B3
cttaactagtaatatttattagaatttgctagagaatgagaagaataaacataataccccagatggcttcaaaaacttggtcctcccttgcccttttcctcacactcaacctcgttttcttctcacttgtctctgcatgcgggtatacaccatgccctggtccaaacccaaagccaaggcccaaccccaaccctaaccctaaccccagcccaagtggctcgtgcccccgtgacgcactcaaactaggtgtatgcgccaatgtgctaaacttggtgaacgccactttgggtcaaccaccagttaccccttgttgctcccttctcgatggtctcgttgaccttgaggctgcagtgtgcctttgcact

SEQ ID NO: 41563 - DNA, 354 bp, Glycine max
  Clone ID: LIB3139-034-P1-N1-B4
ttccttttcttgtcctgagtttcttgctttctcattttcgttcacaaacgtcttcattcatgccattttgcaaccacgatgacgcctccgtcttgcttagcttcaagagctcatttactctcgatagctcttctctctctaatccttggtgtgagtcttgtcatccaaagacagaatcatgggaaaatggtacgaattgctgcctgtgggaaggggtgagttgtgacaccaagtcaggtcacgtaattggcatagaccttagctgcagttgccttcaaggtgaatttcatcccaacaccactctcttcaaactcattcatcttcaaaaactcaaccttgccttcaattattttt

SEQ ID NO: 41564 - DNA, 360 bp, Glycine max
  unsure at all n locations
  Clone ID: LIB3139-034-P1-N1-B5
agaaaactttgccaaataatttttctgcagaattgctctgttgcaaattggatactgttactggccaatattatcctgagtgggctccaattaattgtcgagttcatcgacaaccaattcacatcactgaaggaaattatgtcagaaagcaagatgtcagcattgaatatgatgcatgtacaattccaaatgattgtggttcattggttgttgccaaggttggaaatcacaaacaaattgttggtttccatgttgctggaagcaaaggaagactgngatatgcttcattgataccatatgttgagccagttgtgcaagctcaaagtgctgaagtttactttgacttcttccctgtggagg

SEQ ID NO: 41565 - DNA, 358 bp, Glycine max
  Clone ID: LIB3139-034-P1-N1-B6
ctcggtgcataatcaatttttttggttcttgatttcctttctcttggttttgtgttgtcgttcagaactcgcacataatcttcttcttccttctcgattttcctcttcttcgaccttttctagggtttcgattcgttcaccaaagcgcgtctgtggtttctcttctcttcacgattttggggtcgaagcttggagtttagttttgccggcatgtccatgagtgagcgcaagactattgacctagatcaaggatgggattttatgcagaagggcattttgaagctgaagaacattctagaagggcttcccgagcctcagttcagctcggaggactatatgatgctctacacgaccatat

SEQ ID NO: 41566 - DNA, 365 bp, Glycine max
  Clone ID: LIB3139-034-P1-N1-B7
agcaacctctcaattgccagaagatgaacctcgtcgtgagacaataccttcgggtttaggtattcttgtgtccaatcgggaaagagggccgggaaatgatagtgtgcttcaagttgatgtggtcactatatcttccaacattttgtctggtagcagtgctgatgccaatgataatgatgccagaaggaatggtagaagattattttgggatgctttttcacgacgtagttctagaaggcttggtgattctcctaccattgtcttctctgctgggggtgctgatgattctggatctcaagatcgatggctagttgattttggtggtgatttgtcaaatgatggggttggaggtgcttccggatata

SEQ ID NO: 41567 - DNA, 312 bp, Glycine max
  Clone ID: LIB3139-034-P1-N1-B9
tgatgattgcacactcacgcacgttgaatagcgttagaaattgaccttaaaacaacattacttatatgaatagatcttggttcttcccggtgggggaccctctaatccaaattacacggttgctgtcgcttcatgaaagcctcacctatgccattcatattcataatcatattaacaacctcactactaccagttgccactgtcttaatttagtccacagccaccctcatgataatgcgcaactggaacgagaagtgggaaaataaaccaacctggtacagcgatccacgcaactgcgccaaagtgtatccc

SEQ ID NO: 41568 - DNA, 367 bp, Glycine max
  Clone ID: LIB3139-034-P1-N1-C1
ttcaaaaccacttgtttgttgcactccgcctcttccggtgctttctcattctcatacgcacccagtcacccagctttccctttttcctattttttttctctttttttattaaaaaaataaaaatgttgaagctttcgtgcaatggcttggaccgggctcactccctggcccaatgcggcttcgcgggccggcccgcctgcgccgtccctcgccggaggaggagcggcgtctccggattccggttgccggaaggcaggtcgatccgggtgtccgcggcggtgtcggcaaaggacggcgcggtggcgacccgggtagaggcggatcccggtacgctggcggaccggctgagggtggggagcttgacgga

SEQ ID NO: 41569 - DNA, 357 bp, Glycine max
  Clone ID: LIB3139-034-P1-N1-C11
caaacaaacacacttcacaactttgctttttctctcgttcaatgtcctcttcttccttctcccccgccactctcaccaccgagcaggagctttccgtcatcgttgccgcccttaccaacgtcgtcgccggctccacctccgcctccagctccttctccctccccgaattccgccttccacagacctctgatcctctcgccgccgcctgcctaatgccgccgccgccgccgccgagcatggacacttgtcgcgagtgcaacatcgcaggatgcctgggatgcaactttttcccggaggagaaaaagaagcagaagagggccaagaagaagtacagaggcgtgaggcagaggccctggg

SEQ ID NO: 41570 - DNA, 353 bp, Glycine max
  Clone ID: LIB3139-034-P1-N1-C12
ggaaatttggctgatgacaccatcaattttgaggcttttccccacaagctggtgcagtttggagagattcaggaaaaagttgtattgaaattttcacaagaggaatttcttacagcttggtcaactcaggtgcgtcctgcaacaactctgttagctgatgggtgtccatatttgtatgctatggtgcatgatagttcagtgtctacaataccaggtgattttgttattggtgttaagttgacaaccataaacaatatgtgtgcatatgggctcaatcctggtatttcaggttctcgtcttttgggcaccattcctcagtccatttcacagcaaactgtttggaatcaaatggc

SEQ ID NO: 41571 - DNA, 366 bp, Glycine max
  Clone ID: LIB3139-034-P1-N1-C2
gccgtaggttgacctccttccaccccgaaatcgaagaacttctttacagctctgtggagaatgaagaacacatatgcgtgctgaaggaccgcagcaagccgattatcttcaccatggcaaggttggaccgtgtgaagaacatcacaggactcgtggagtggtacggtaagaacgcgaagctgagggagttggtgaaccttgtggttgttgccggagacaggaggaaggagtcgaaggacttggaagagaaggccgagatgaagaagatgtacggcctgatcgagacctacaagttgaacgggcaattcagatggatttcatctcagatgaaccgtgtgaggaacggagagctgtaccgtgtgatct

SEQ ID NO: 41572 - DNA, 349 bp, Glycine max
  Clone ID: LIB3139-034-P1-N1-C3
caagtttccctccaggcttacatcggaacagaaaagtggcatcaagcgattattgacatctccctaagcaacaggggtagctcttcctaccatttagctaacattgcaagatgtcagttgttttatgcttggtttatttatattttcaaatggaaatccagatcacagtgacagcaatttcaattagaacagtttattagaggatgacatttgttaattggttcatgtcttaagtttttggtagtgaaaattttcttaaccacttattcacttgtttatgtgaaaagtgcctgtgcaagaattgaatttctttgtattagtattattcttacccccgtgttgcttttcc

SEQ ID NO: 41573 - DNA, 336 bp, Glycine max
  Clone ID: LIB3139-034-P1-N1-C4
agtgggcaaatcaaacttcatggcatttgagtttcctgatgtgacaatcccaaacagtctacagtttttgatattctcttgggaatctctcaagattttgaaattgctggtaatactcttatgccagctttttctgttccacaggctactgccagatcttctgaaaatgcggaatcctctgcatgatctggaattcgtgttttctttcgcttgttcgtttgtttaattcaataaaggaaattaggcatgaccctcttgttgagtatgctctgcctatctgaaaattgccacacctcttttaattgtcgtaatgatgtgtgaagtgtgtgttatttt

SEQ ID NO: 41574 - DNA, 352 bp, Glycine max
  Clone ID: LIB3139-034-P1-N1-C6
ctttggcacacaacactagctatagtaagctacactgatttgaggttggagaaatatggctaaagatgttgaggttcaagagcaaggaggagagtactctgcaaaagactaccatgaccctcctccagcacccttgttcgacccagaggagctcacacagtggtccttttatagagccctaatcgctgagttcatagcaacccttctcttcctttatgtcaccgtgctcaccattattggctacaaaaggcagactgatgccacgctaggtggcaccgagtgtgatggggttggcattttgggcatcgcttgggcctttggtggcatgatcttcatccttgtttactgcacc

SEQ ID NO: 41575 - DNA, 348 bp, Glycine max
  Clone ID: LIB3139-034-P1-N1-C7
ggcgaaggactttaggttgggatttgggaattagggttattcgcgtggcgaagatgattgaggtggttttgaacgatcgattggggaagaaggtgcgcgtgaagtgcaacgacgatgataccatcggcgacctgaagaagcttgtggcggctcagactggcacaagagccgacaagatccgcatccagaagtggtacaccatctacaaggatcacatcactctcaaggattacgagatccatgacggcatgggtctcgaactctactacaactaaacacaacaaggtgtgttttatgcgtaatatactatgtgctgggaatgggataagcgctaaatgtaattctgac

SEQ ID NO: 41576 - DNA, 358 bp, Glycine max
  Clone ID: LIB3139-034-P1-N1-C8
ctatcttatttctttctattcatttcttcattgggccatcaccatggtcaaggagaagaagaacgtggtggtcaagaacaagaagccaaacaacaatgccgacgagcttcacttccgcggcgtccggaagcgaccatggggccgctacgccgccgagatccgtgaccccggcaagaagacccgcgtctggctcggcaccttcgacaccgcctaggacgccgtccgcgcctatgacgccgccgcccgtaactttcgcggccccaaagccaaaaccaacttccccgtgccccccgacgacaacaacaacaacaacgttaacgtgaacaaaaacaagagtgttaacgttaaatctcacagt

SEQ ID NO: 41577 - DNA, 359 bp, Glycine max
  Clone ID: LIB3139-034-P1-N1-C9
gcttaatcctggtatttcaggttctcgtcttttgggcaccattcctcagtccatttcacagcaaactgtttggaatcaaatggcaacagtgagaacaccattgaattttgattctagcaagcagagcttttgtcaattttctatcgaccttctcggtggaggaattttagtggacaaaactggagattggatcacacttatacaaaattctccaattagtaacttgttgagagttgctgcttggaagaaaggctgtttaatggtcaagattgtgatgtctgggaatgcagcagtcaaaaggagtgattgggcctcattggtacaagtgtttttaacaaacagcaacagtacagagcatt

SEQ ID NO: 41578 - DNA, 354 bp, Glycine max
  Clone ID: LIB3139-034-P1-N1-D10
ctggaaacggatcctcggttgggctttcaacggagtcttgagtgctaccataatattcttcttctgcatcaacggaatggagaatcaagcattccgtaaagccggggaagttgctgatcttgaagttcttggtgccaccatgtacacttgtgttgtgtgggtggtgaattcccaaatggcattgtccattagttacttcacttacatacaacatttattcatatggggtggcattcttttctggtacatattcctcttagtgtatggaaccatggacccttctctatcaaccactgcctataaggtcttgattgaagcttgtgcaccagcaccatcttactggctcatcacttt

SEQ ID NO: 41579 - DNA, 353 bp, Glycine max
  Clone ID: LIB3139-034-P1-N1-D11
gtcaaatgcagatttttggacaaaacccacaccggatagttgagggctattccgaagagtttgagaccacttttctggagcacatgaagcgcagtcaccgattcagccgtgtggcagccactgtagtttataacgaatacataaacgatagacaccatgttcatatgaactccactcagtgggctacgcttactgagtttgttaagtacttgggtcgaactggcaaatgtaaggttgaggaaacacccaagggatggttcattacatatatagatagagattcagaaacccttttcaaggagaggatgaagaataagagaatcaaggcagatatggtagatgaagaaaagcaa

SEQ ID NO: 41580 - DNA, 356 bp, Glycine max
  Clone ID: LIB3139-034-P1-N1-D12
caagaagaaaaaaccgacacaaagatctagtcctagctagaatcaaacaggggcgatctcaccttcaagaacacatcgccatggcaaggaacttgcttcttgtgctttttgcagtagccaccctcctccatggctcagcagcccaaaccagacacatggtcggtgatgccacgggctggatcatccctgctggcggcgctgccacctacaccgcctgggcttgcaacaaaaccttcaccgtaaacgacactctcgtgttcaacttcgccaccggccaacacaacgtggccaaggtaacgaaatcggctttcgacgcgtgcaacggcgggagcgccgttttcaccctgacctccggt

SEQ ID NO: 41581 - DNA, 185 bp, Glycine max
  unsure at all n locations
  Clone ID: LIB3139-034-P1-N1-D2
cttcgttgttttgtatcaactgaaagatcacgttacgcggggcactcaaatcatctgggatacttgctagaaagaaataaccaatggcatgatgcgcttatggtttccatggtgctggtggtggtggcggtgtaggaaacatagggggaacagcagnagaaatggtatttaattttttgcgatgc

SEQ ID NO: 41582 - DNA, 364 bp, Glycine max
  Clone ID: LIB3139-034-P1-N1-D3
cacaagaggaatttcttacagcttggtcaactcaggtgcgtcctgcaacaactctgttggctgatgggtgtccatatttgtatgcaatggtgcatgatagttcagtgtctacaataccaggtgattttgtcattggtgtcaagttgacaaccataaacaatatgtgtgcatatgggctcaatcctggtatttcaggttctcgtcttttgggcaccattcctcagtccatttcacagcaaactgtttggaatcaaatggcaacagtgagaacaccattgaattttgattctagcaagcagagcttttgtcagttttctattgaccttctcggtggaggaatcttagtggacaaaactggagattg

SEQ ID NO: 41583 - DNA, 348 bp, Glycine max
  Clone ID: LIB3139-034-P1-N1-D4
acccaacccaatcttcaccttcgcccacaacaaatccgattcctgcatctcctccttcagcatcgctgcaaactttactttccatttttgtccttcctccccgagaaaaaaatggcgaacgcagcatctggtatggccgtccatgatgactgcaagctaaagtttttggagctcaaggcgaagaggacgtaccggtttatcgtttttaagattgaggagaagcagaagcaagttattgtggagaagctgggtgagcctgcaaatggttatgatgatttcgctgccagtcttcctgccgacgagtgtcgatatgctgtttatgattttgattttgtcactgaagagaat

SEQ ID NO: 41584 - DNA, 357 bp, Glycine max
  Clone ID: LIB3139-034-P1-N1-D5
accaaaccacatattaacttgtttgctctaagtcatggctgtgatcttgcacgcaaccaaagcaaacaagaatgctttcaagactctgattgcggcagagtacagtggcgtccaagtggaattggcccctaatttcgagatgggtgtctctaatagaactcctgaattccttaaaatgaatcccataggaaaggttcctgtcttggaaacgcccgatggtccagtctttgagagcaatgccattgctcgttacgttgctcgactcaagggtgacaacgctttgttctcatcttctgccattgataatgcccacattgaccagtggattgacttttcatccttggagatcgatgctaa

SEQ ID NO: 41585 - DNA, 358 bp, Glycine max
  Clone ID: LIB3139-034-P1-N1-D6
ctcgagccgaatcggctcgagcggctcgagcggctcgaggtatgtgaattctgcttgcagctgatggcgcaaattctgctccatgggactcttcatgccactatctatgaagtcgataagctcaaaattggtggaggcaactttttaaccaagatcgtacaaaacatcgaggagactgttggtattggaaaaggtgtcactaaactatatgcaaccattgatctagagaaggcacgagtggggaggaccagaattattgaaaaagagattaaaaatccaagatggtacgagtcctttcatatttattgtgcccatatggcatcaaacatcatatttacagtgaaagatgataatccta

SEQ ID NO: 41586 - DNA, 360 bp, Glycine max
  Clone ID: LIB3139-034-P1-N1-D8
ctcggatacagcattgaagacgttagaccaaacgggggaatcaagaaattcagatctgctgcttactccaactgcgctcgcaaaccttcctgatatccatccagattgatagttcattgcatgcaaccatagttttattaggttttttcttctttgttttcaattaggtttttgctgctctccttcaaactccgtctttccgaatcctctctttgtgattgtgttctgttctgcttcctaccgcgatagtttctcttctgaagcatggccatggcggtttctgcaattggttttgaaggtttcgagaagaggctggaaatatcctttttccagccgggactttttgctgaccctgaggga

SEQ ID NO: 41587 - DNA, 361 bp, Glycine max
  Clone ID: LIB3139-034-P1-N1-D9
gttgatagaaggtatggagctacaaggcactctgagagactttctccaaggcatgaagaaaaagaacggagacggtctgaagagactgtggtttctcaggatgatgccaaacgccgaaaagaagacgattttcgagatcgaaaacgtgaggaaattaaggtggaagagagggagcgggaaagagagaaagcaaacattctgaaggaagagttggatttaaatgccgcatccaagagacgtaaacccaagagggagcatttaccaactggtgaacctggtgagtactcacctgtggcccatccaccttcttccgctggtattggcatgtcactagcatatgatggaagggatagaggagaca

SEQ ID NO: 41588 - DNA, 366 bp, Glycine max
  Clone ID: LIB3139-034-P1-N1-E1
gaaataaaggctttcttgctgatgttcttgcaaagggggctcatgaattggaaaaacatgttgcttcataaaagcctcaaggatcaaattcctgctgttgacaagttgtattctactaaggttaataagtttgcaaaaaattatgaaccttagacaaagtgttgttggtgatcttaaacttcttactgatgggaagttgtatgagggtaagcatattcctgtatctaatattagtgcaggggaaaatcatgtagttcaaatacccttaatggcacaggaggaaattctgtcttctagtgcaagtgatttcagaactgcaatggtgagtaaaaatagcaaacctcaagctactgcaatgcatgtggg

SEQ ID NO: 41589 - DNA, 355 bp, Glycine max
  Clone ID: LIB3139-034-P1-N1-E10
ctccaactcgcacggcagcatcatcactttctccatgccaattaatacccacttctccatcttttccaatcctcaaacagcaatgcagattctcacgtagagagctcacaatctttagcaactcttgcttgctactactcttgggttctcaggcagtggatggatccagagcaagagcagaagaagacgttggtaacacaagtaacattgatcaactagaagagaatctggcttttgctgaagaagatgctgctaacataagcagcagtgatcaaccagaagaggatttgactttggcagaagatgatgttggtaacacaaggaacagtgatcaaccagaagagaatctgacttt

SEQ ID NO: 41590 - DNA, 355 bp, Glycine max
  Clone ID: LIB3139-034-P1-N1-E11
aaatatttatatgtacgtatatacatacatacacacagagacatggagaacaataatcatcatgccatggctgcaggtgctagtagtgattcaaacactagtgatcacaccaccccaatatcttcttcttgtgttaatgataacaacaacaataagttatacaaaggggtgagaaagcgaaagtgggggaaatgggtttctgaaatcaggcttcccaatagccgtgaacgaatatggctagggtcttatgactctcctgaaaaggcagcacgagccttcgatgctgccctttactgtctacgtggccgccatgccaagttcaatttccccaacacaccttgcaacatggacactg

SEQ ID NO: 41591 - DNA, 351 bp, Glycine max
  Clone ID: LIB3139-034-P1-N1-E12
cacgaactagatttaacgaaactttggagtccggacatgagagagaaagatgaggagggaggtgtaagaaactgggaagagaaggtggtggtcttgttgccattctgatctaaagcttgtgtctttctgcttcgtttgcatcttctgctgcgtaaagttgattcttttctgattcttccgtagatttcatctctgaaactagttctaatactttatctacagatctctatattctaggtgaaggtttgcttttgatccggcttgggagttttgatagacttgattttaactctttaagagccatatgctcacagtggtcggatatagtacatcagaagttcacacaagaga

SEQ ID NO: 41592 - DNA, 361 bp, Glycine max
  Clone ID: LIB3139-034-P1-N1-E2
ggttttgaaatgtggagttctgagtgggcaaatcaaactgcgtggcatttgagtttccttattgacaatcccaaacagtctacagtttttgatattctcttgggaatctctcaagattttgaaattgctggtaatactcttatgccagctttttctgttccacaggctactgccagatcttctgaaaatgcggaatcctctgcatgatctggaattcgtgttttctttcgcttgttcgtttgtttaattcaataaaggaaattaggcatgaccctcttgttgagtatgctctgcctatctgaaaatttccacacctcttttaattgtcgtaatgatgtgtgaagtgtgtgttattttaaaa

SEQ ID NO: 41593 - DNA, 361 bp, Glycine max
  Clone ID: LIB3139-034-P1-N1-E3
gaatatagtatggcacaatctagtggcaaaaaattggttgagtggctggttgcagcattattgttcattgccttgttgagtggtagtgcacatgctgttgcaatatgtaacattgactcaagtcaactgaacttgtgtcgtgctgcagttactggtcaaaaccctccaccacctgatgagaaatgctgtgcagttattcgccaggccaatttgcgttgcctctgcagttacaagtctatcctaccttcatttggaattaaccccaaaaatgctttggccttgcctgctaaatgtggtctacaattgcctcctaattgttgagtgctgtgaagcagttaacgaaggtcaagttcattacaag

SEQ ID NO: 41594 - DNA, 356 bp, Glycine max
  Clone ID: LIB3139-034-P1-N1-E4
acacattcctacatcttctgctgcgggggctggtgagggggatataaacagtatgaatatggcatcttcacagaggaatcctgctaacattccttctccaattcaacatcttgctcctggttcaccacttatgccaatggcttctcctgtggcaatgtttgatgtttctcctttccagccctctactgagatgtcggtacaagctcgatggtcacatgttcctaattcacaacttcctctgtcaatgccattgcagcaacaagaagggatacagacttctcagttcagccatgtcccttctgatgatcagccattaaatgccaaaaggtttaccggttctcgagcttcaacatctt

SEQ ID NO: 41595 - DNA, 324 bp, Glycine max
  Clone ID: LIB3139-034-P1-N1-E5
ggagtcagcttctctgcaaactgcatacaggagcgcaacatgggagtttgtttgagcgcccaaattaaagctgaaagcccatttaacactgtgttcaattcaaagtatgtgagtacagatggaaatgatctcggtagcacaaacgataaggtttcagcaaactcagttcctcagactcctcggagtgagggtgagatcttgcagtcatccaatttaaagagctttaccttgtcagaacttaagacggccactagaaatttgcgtccagatagcgtgttaggagaaggtgcgtttggatcagcttttaaggggtggatagatgag

SEQ ID NO: 41596 - DNA, 342 bp, Glycine max
  Clone ID: LIB3139-034-P1-N1-E6
ctggagattggatcacacttatacaaaattctccaattagtaacttgttgagagttgctgcttggaagaaaggctgtttaatggttaagattgtgatgtctgggaatgcagcagtcaaaaggagtgattgggcctcattggtacaagtgtttttaacaaacagcaacagtacagagcattttgttgcatgtaagtggacaaaatcggaaccacattcctgggaattgatcttcccaatagaggtatgtggtcctaataatggttttgaaatgtggaggtctgagtgggcaaatcaaactttatggcttttgtgttttccttattgccaatccaaacagtctt

SEQ ID NO: 41597 - DNA, 362 bp, Glycine max
  Clone ID: LIB3139-034-P1-N1-E7
ctcggcaacggatatctcggctcttgcatcgatgaagaacgtagcgaaatgcgatacttggtgtgaattgcagaatcccgtgaaccatcgagtctttgaacgcaagttgcgcccgaagccattaggccgagggcacgcctgcctgggtgtcacacatcgtttccccaacgcaaacatgtaacaatgttgctgcgcggggtgtatgctgacctcccgcgagcacccgcctcgtggttggttgaaatctgggttcatggccgacttcgccgtgataaaatggtggatgagccacgctcgagaccaatcacgtgcgagccggtcagttctggacccatcgacgaccctttgcgtgcacgcacgct

SEQ ID NO: 41598 - DNA, 360 bp, Glycine max
  Clone ID: LIB3139-034-P1-N1-E8
ctttcccttgacaaagtctctggctctggcttcaaatcaaagaaagaatacctatttgggaggattgatatgcagctcaagctcgttgctggcaactctgctggcactgtcactgcttactacttgtcatcccaagggccaacacatgatgagattgatttcgagtttttgggaaacctaagtggggacccttatattctccacacaaacatcttcacgcaaggcaaaggtaacagggagcaacagttctatctctggttcgaccccaccagaaacttccacacttattctatcatttggaagccccagcacatcatattcttggttgataacacaccaataagggtattcaagaatgct

SEQ ID NO: 41599 - DNA, 365 bp, Glycine max
  Clone ID: LIB3139-034-P1-N1-F1
ctcgagccgatcactttctctcgtttccccttcgcaggttttcccctcggaagagacatcgaagaaaatcacgtcacggcaatggaggaaaagcacgcagcagccaatgaatctgcacacgccgaatccaacggcgtctctcacggcgccgaccacggttggcagaaggtgacctacgctaagaagcagaagaagaagaccgttaacgccgccaacagcgccgattcccgcgcgaattccaacaagctcgttccgaacggcacgctgtccggcaacgatggcgttttccggtcgctcgagctgcagtcggaggaccggcgccggaaaattgtggaggcgaagaagctggccgatgccgcgtacga

SEQ ID NO: 41600 - DNA, 353 bp, Glycine max
  Clone ID: LIB3139-034-P1-N1-F10
ctcgagccataataatattatcgcctgcatccacagtaacagtacccctctcttcttcatcatttcatggaggattcttcagctggtgaagacaccaagacttgccctcgtggccactggagacccgctgaggatgaaaagcttagacaacttgttgaacaatatggtgcccaaaactggaattcaatcgctgaaaagctccaaggaagatcagggaaaagttgcagattaaggtggttcaatcagctggacccgagaatcaacagaaggccattcacggaagaggaagaagagaggctactcgcggcacatcgcattcacgggaacaagtgggcactcatagcgaggctttt

SEQ ID NO: 41601 - DNA, 346 bp, Glycine max
  Clone ID: LIB3139-034-P1-N1-F11
agagaataacgttggtgaaagaacgacgatgacggacgcagcgtccgattcacgaaacgatgcagccgtgcaagccaccaacgacgacgcttccgccagtaaattggatacatgaaagatgattatattcatttatttgtgagaaggcctgtgaggagatctccaatcattaatcgtggttactttgctcgttgggctgcatttcggaaacttctctatcagtttcttgatgttgagaaaaagacagatggagatgccccaattaagaagcagatattatcacttggagcaggctttgacacaacatattttcagttgcaggatgaggggaaaacaccatatatgt

SEQ ID NO: 41602 - DNA, 357 bp, Glycine max
  Clone ID: LIB3139-034-P1-N1-F12
gcgactccggcaggtgtcgcaggagctcaagcgcatgacctcgtccaagaagttcgatagggtcgacagggccaagtctggtgctgctcgtgccctcaaagggctcaagttcatgaccaaaaatgttggaaccgaaggttggtcccaggtggacaaacgctttgatgagttggccgttgatggcaaattgcccaaaacgcgcttcagtcagtgcattggcatgaacgagtcgaaggagtttgctggcgaattatttgatgcattatctcgtcgccggggcataacatcggcttccataagcaaggatcagttgcgcgaattttgggaacaaattacagaccagagctttgattcaag

SEQ ID NO: 41603 - DNA, 362 bp, Glycine max
  Clone ID: LIB3139-034-P1-N1-F2
ggaaaaggcgtcttcataaacgccgcccaaaacttctcatacccttttattcattccattcgtttctagggttttcttttctttgccgagaaaatgagagagtgcatttcgatccacattggccaggccggtatccaggttggaaacgcctgctgggaactctattgccttgaacacggcattcagcccgatggacagatgccgagtgacaagaccgttggcggaggagacgacgccttcaacacatttttcagcgagaccggcgccggaaagcacgtgccccgcgccgtcttcgtggatcttgaacccaccgtgatcgacgaagtccgaaccggtgcgtaccggcagctcttccacccgga

SEQ ID NO: 41604 - DNA, 364 bp, Glycine max
  Clone ID: LIB3139-034-P1-N1-F3
cattaaactcgttttttgctagaagcaggaagagaagagaaacatacaaaccacaaaataatcaattgagctacttactataagatttagatctcccaacagagagtttcacaaaattgccaagtacccttttcaggatcaaggaagagaatcaagaaccaacaaaaggtgttgttcattgttgtagttgtttgtaactgtagcaacaggaagatggttggaaagttggttgtggtgaggcttgagttggccatatctgagttgagctctctccttctgacaacctcggcacagacagcatgcaagggccaggccttcaccgaaaacaaggttttcaccacatgccgtgatcttcctcacctat

SEQ ID NO: 41605 - DNA, 357 bp, Glycine max
  Clone ID: LIB3139-034-P1-N1-F5
gtccgctgtagttctccagagaccaataagcaaaacaatggtgaagagcctccagagtcattatttatgaaggaattgaagaggagaggtatgacccctacttcattgcttgatgattacaaacaaagcgactatggacttgatgaagaggtgtatgtgaatgaagaagatagaggtttcccaaaaagaaaagctgtctcaaccaatgttgagaggagtctagacaatcagagggaacgttctatggcactgaacagtgaaggtcttgagggcttggtacctcgtgctaaacttcttttgacaattggaggaacattcttcttgggatttgggccattgatcctcataattgttgca

SEQ ID NO: 41606 - DNA, 357 bp, Glycine max
  Clone ID: LIB3139-034-P1-N1-F6
ttcctattttgtgcttagttttttttttctctctctgttttttgctgctcagcatcaagcaaaaggggaatttttattttttttaaaagaaagttttgttttgtgttgttttctaaacaagctttttttttccttcttctactactattacttccctctcttccctcataaattcagagtctttctgctctttcctaattgggtttgtacattcattgtctttggttgcagcccttttgcttctcattagcttctaatcactttcccaattgggttaagttcaaattgaagctggagaaagacttgtcagttttttctctctgaaagttgtcaatttttcgtgtgtttttttttttt

SEQ ID NO: 41607 - DNA, 362 bp, Glycine max
  Clone ID: LIB3139-034-P1-N1-F7
ttctagctagtcataacatcaccattactgatggtattgacaaaactagtgcaactttgcaacttagaaagttagcagattgtgattttctcaagagaaactttaagcagatgtctaatgttttgtgggtggctcctgaggacaaggcgagtttatggtcacaacttcattatgtttcgtgtaataatctggaaatgcaagaagcttatcttgtcaatctcgtaaatgtgttacgagaattgtatttgcacagtccagaggaagctcgccaattgagaaggaaagctctctctcgtattgaatggctgcaaaaagctgatgtgcctaccatagcacagattgaagagttccattcgatgcag

SEQ ID NO: 41608 - DNA, 358 bp, Glycine max
  Clone ID: LIB3139-034-P1-N1-F8
cccgagggatactctctctggttttgtgattacaaatacaatcaggagaatactgtttcttttgtgacattgaacaaggttggtggatttcttcagcggatggatttggctcgcaagtatgcatttggaaagatgcttgtgattggatcagatccaccatttaaggtgaaggggctgtggcttttccgtgggcaagaaatccctcaatttgtgattgatgaatgctatgacatggagctctacgaatggactaaggttgacatctctgacgaacctcaaaaggagcgtgtcaatcagatgattgaagattgtgaaccttttgagggcgaggctcttttggatgccaagtgcttcaagt

SEQ ID NO: 41609 - DNA, 363 bp, Glycine max
  Clone ID: LIB3139-034-P1-N1-F9
cgagaggagaggagagaagagaggaagttttgggggttgaatctatagaatagaatcaaaccaaattgaaagaagatcgatcgatcgatcgatggctctggtcggagttgaagtgaagcatgcggcggagggcgcaccggaggagaattgctccgccaagcccaccaagcagggcgagggcctccgccactactattctcacaacatccacgagcatcagctccttctccgtcaaaagacgcataacctcaaccgtcttgaggctcagagaaacgagctcaattccagggtgaggatgctgcgcgaagaattacagcttttgcaggaaccaggctcttatgttggtgaagtttgcaaagtcat

SEQ ID NO: 41610 - DNA, 361 bp, Glycine max
  unsure at all n locations
  Clone ID: LIB3139-034-P1-N1-G1
gcaattcctttatctttataagcaacttacacacacacacacacacatntcaaacctaaacccaaatccaaaccatttcagaatatagcaattgataattaattgatccgaattgttgcggaaatctcaaacctaaatccaaaccatctcagaatattgcaattgataattaacagatccaaatggtggttttagcgagaaagaaacgagtcactgatccgttcgacgacgaagccaaagcacgtctcgtcggcggcggcgaccaccggcaattgagctacgtcagcagcgggagcgaacattccggcaacggcgacggacactcgccgtgtctctccgagctcgtgcatgatttcctcga

SEQ ID NO: 41611 - DNA, 356 bp, Glycine max
  Clone ID: LIB3139-034-P1-N1-G10
ctcgagccgaatcggctcgagcggctcgagcctacaacaactctgttggctgatgggtgtccatatttgtatgctatggtgcatgatagttcagtgtctacaataccaggtgattttgtcattggtattaagttgacaaccataaacaatatgtgtgcatatgggctcaatcctggtatttcaggttctcgtcttttgggtaccattcctcagtctatttcacagcaaactgtttggaatcaaatggcaacagtgagaacaccattgaattttgattctagcaagcagagcttttgtcaattttctattgaccttctcggtggaggaattttagtggacaaaactggagattggat

SEQ ID NO: 41612 - DNA, 358 bp, Glycine max
  Clone ID: LIB3139-034-P1-N1-G11
gtcacgtaaaccatgcatcaccgcctcccaaattagggtttccgacaggcgcgtggaggaatcgatggcgaccgtgaatccgcagcctctgcagttcgaggaccctgctatacccgtcgacgacgatgacgacgacgacgacgacgacggcggtgatgatgacgctatggatgacttggaggatgcgaatgttaattcagtgaacgttgctgctaatgccgcggcgagtgtaaatcatgaagcggtagtggctatgccttccagaactagcgagctcactctttctttcgagggcgaggtttatgtctttcccgctatcactcctcagaaggtgcaagctgtcttgctgcttttggga

SEQ ID NO: 41613 - DNA, 355 bp, Glycine max
  Clone ID: LIB3139-034-P1-N1-G12
tttgaactctttgaaaatccttccatgttcacgtggcaggtggctgatatgcactacggcactggaactagcgtgacacggtgcagggacgtgttggcctccgagttcgagttttgttccgatcttaacaccactcgttttttaaagcgtatcattctagcagagaatcctgattttcttgcctttactggagataatattttcggatcaagttcacccgatgctgcagagtctctgtttagagcctttggccctgttatggaatcaggacttccttgggcagcagtgttgggaaaccatgaccaagaatcaactatggatcgtgaagagttaatgtctttaatctctcttatgg

SEQ ID NO: 41614 - DNA, 170 bp, Glycine max
  Clone ID: LIB3139-034-P1-N1-G3
ctggaattcgtgttttctttcgcttgttcgtttgttgaattcaataaaggaaattaggcatgaccctcttgttgagtatgctctgcctatctgaaaataacacacacttcacacatcattacgacaattaaaagaggtgtggaaatgatgtgtgaagtgtgtgttatttt

SEQ ID NO: 41615 - DNA, 205 bp, Glycine max
  Clone ID: LIB3139-034-P1-N1-G4
ctagagcgaaatgcgccaaatgagatcacgacttcactgtttaagataccaagggaaacgatattgaccttggaggctacaaaggaatggtcacttatcattgtcaatgttgcctcacaatgaaggcttgactaattgaaagatacactgtgctcagactgatgtttgaaaaacacaaacagaaaggtatgggaattcatggcat

SEQ ID NO: 41616 - DNA, 360 bp, Glycine max
  Clone ID: LIB3139-034-P1-N1-G5
aaaggagtgattgggcctcattggtacaagtgtttttaacaaacagcaacagtacagagcattttgatgcatgtaagtggacaaaatcggaaccacattcctgggaattgatcttcccaatagaggtatgtggtcctaataatggttttgaaatgtggagttctgagtgggcaaatcaaacttcatggcatttgagtttccttattgacaatcccaaacagtctacagtttttgatattctcttgggaatttctcaagattttgagattgctggtaatactcttatgccagctttttctgttccacaggctactgccagatcttctgaaaatgcggaatcctctgcatgatctggaattt

SEQ ID NO: 41617 - DNA, 361 bp, Glycine max
  Clone ID: LIB3139-034-P1-N1-G6
ccaaccttgggagctggcgaacaagcatacgatgttaattttgaatgggacagtgacttcggaattcccggtgcattttatattaagaacttcatgcaaaatgagttctacctcaagtctctaattctcgaagacattccaaaccacggaaccattcacttcgtatgcaactcctgggtttacaattcaaaaaactacaagactgatcgcattttctttgccaacaatacatatcttccaagcgagacaccagctccacttttgaagtacagagaagaagaattgaagaatgtaagaggggatggaactggagagcgcaaggaatgggataggatctatgattatgatgtctacaatgact

SEQ ID NO: 41618 - DNA, 359 bp, Glycine max
  Clone ID: LIB3139-034-P1-N1-G7
ggcttggttggctgttgacagcaaatacaaaactaggggaagaagtggtggctattttggctatggaaatgagaatgtagatggcttgaatgaactgaacagaggccctagggccaagggtggcaaaaaccaaaaaggttttgcaccaactattttggcagtcaaagggcagaacttgcctgcaagtttaggcaccgatgaagagaaagacaagactagtaccgttccggaccgtgatcagtataacaaagctgattttccagaagaatatactgatgctaaattttttgtcatcaagtcttacagtgaggatgatatccataagagtattaagtataacgtgtgggccagtacccaaa

SEQ ID NO: 41619 - DNA, 260 bp, Glycine max
  unsure at all n locations
  Clone ID: LIB3139-034-P1-N1-G8
gacaatttaaacaaatttgtctcttgatgatgttgaaactcctaaaggttctatgttggatcttaaaatttctcaatctaaaatggttcctccaactgngttcttggcaagtgccatcgtcgattgagaccaattaggatccgacctatctattttgggagtctaagcgtacaacttggccgcatgtttaggcacctgtccacgagcctgacatctgtcttccgtacgcgtcccttcgccagtattacaatcttattttt

SEQ ID NO: 41620 - DNA, 355 bp, Glycine max
  Clone ID: LIB3139-034-P1-N1-G9
ctcaggtgcgtcccgcaacgactctgttggctgatgggtgcccatatttgtatgctatggtgcatgatagttcagtgtctacaataccaggtgattttgtcattggtgttaagttgacaaccataaacaatatgtgtgcatatgggctcaatcctggtatttcaggttctcgtcttttgggcaccattcctcagtccatttcacagcaaactgtttggaatcaaatggcaacagtgagaacaccattgaattttgattctagcaagcagagcttttgtcaattttctattgaccttctcggtggaggaattttagtggacaaaactggagattggatcacacttatacaaaattc

SEQ ID NO: 41621 - DNA, 357 bp, Glycine max
  Clone ID: LIB3139-034-P1-N1-H1
atttggtttgtttgaggtcttgtatgtggctgcagatatgcaaaccttaaattcggtcctcgaatctttctgatcattggttgttttttattctttcaaatacattccaaaatctcttggaaattgcgagattcactgcttatcctagcagcagattttgggttctgacccaattattcattttccccaactgggtcttgtggattttttgttggggttttaaatttcgtgttgctgggtttgaaagttatttcctttcttccccgtctggattcaactcccaagtatttgctttaattggggtatttttttatttatcagaattgttaggttgctttgaggttttccaaggcttga

SEQ ID NO: 41622 - DNA, 357 bp, Glycine max
  Clone ID: LIB3139-034-P1-N1-H11
gcaaactgttcgcaatgcttttgttgatttgataacatggtaattggctgaaactttgcttgaactactattatgtatatgatatgatatggttttgtttccaaatttgagttgtgaccagtaaattttgatggtgaatcaatgaatgtatttgatgccatgactgatgttatcctgtcccattaagatacagatgggattcaaaatacgtgtgttgtttggagatgcatgtgcttaattgtgcaatctgcatgcaaatttcagtgtttatggctatgcaatgcttgttatcgatctcataaaccaaatggcaatggaaacgtagtcttttcgtatgtctattacttgatttcaagt

SEQ ID NO: 41623 - DNA, 360 bp, Glycine max
  Clone ID: LIB3139-034-P1-N1-H12
gagagtcctgaaacttgcgtgcgatgccttcactgacgacaacaacacatgactatggctcttctgagtcgagcctcttcacgcttccctcagctggtttcccctcaaagggtagtttcactccacacaacgctcccatctgtgaacgcattcccatgcacagccacgcctacaccatatgccccgccaccgcctccgtccgcttcctctcccgccggcgtttcgaaggcggcggagttcgtgatctcgaaggtggacgatctgatgaactgggcccgccgcggctccatctggcccatgaccttcggcctcgcctgctgcgccgtcgaaatgatgcataccggcgccgcccgctacgat

SEQ ID NO: 41624 - DNA, 359 bp, Glycine max
  Clone ID: LIB3139-034-P1-N1-H2
gttagttaatatataattaattattatggaattgcataactcatgcatgaataaaaacaagttgagaagatcgatgtagtgaaggaatggtctttcgtttctctttcatcaagttgttgtatacccaaaggccaaggacaacataattgtactatgactctatgagggccaatattggtatacttgttcaaactacataattttctgatctgccttgtatacaaagtcatgcaatattgccatagcatctttttaattattttctctgtttttctttgtctattgcatgtgtggttctgtgtgcatgtcagcctgtgtaagctttcccgtgagtacgttgggaaatgtacaagttagcg

SEQ ID NO: 41625 - DNA, 285 bp, Glycine max
  Clone ID: LIB3139-034-P1-N1-H3
ttgggaattaggttcgagtcaacactcatatccttatcctgtttctttcaatggaggggatttctgctttagcttgaatcccaacgctccgatgttcgtgccactcgcctatcggacggtggaggatttctccgaccagtggtgggacctcgttcactcctccccctggttccgcgactactggctccgcgagtgcttccaagatccccagttccaaaacgacgacgctttcgacttcgactttgacctagatctccaagatgaagatgaaagggaacgaaagga

SEQ ID NO: 41626 - DNA, 358 bp, Glycine max
  unsure at all n locations
  Clone ID: LIB3139-034-P1-N1-H4
gagagagagagagagatctatctatctatcaagatggcgttgttggttgagaaaacaagcagtggaagggagtacaaggtgaaggacatgacgcaagccgatttcggaagattggaaatcgagctggcggaggttgaaatgcccggcctcatgtcctcccgcaccgagttcggcccctctcaacccttcaagggcgctaggatcaccggctccctccacatgaccatccaaaccgccgtcctcatcgagaccctcaccgccctcggcgccgaggtccgctggtgctcctgcaacatcttctccacccaggaccatgccgccgccgncatcgcccgcgacagcgcctccgtcttcgcct

SEQ ID NO: 41627 - DNA, 358 bp, Glycine max
  Clone ID: LIB3139-034-P1-N1-H5
gccattatctcagcaagcatggagttagtgcaatcaggaggctgaggaaaactgataataatagaattgcaaaggcttgtggtgctgttattgtgaatagaccagatgaattgcaggagtctgatgttggtactggcgctgggttatttgaggttaagaaaattggagatgagtactttgcatttattgttgattgcaaagaacccaaggcttgtactgttctactaaggggtgctagtaaggatctattaaatgaagttgaaagaaacctacaggatgccatgtctgttgcaaggaacattataaaaaatccaaaacttgttcctggaggtggtgctacagagttgacagtgtcagc

SEQ ID NO: 41628 - DNA, 360 bp, Glycine max
  Clone ID: LIB3139-034-P1-N1-H6
cgggtcgagagagaaagtgaggcttttatttgattctaaagatgagacgtgctcttgctttgcttcctcttctcttcctgtttgtagcgattggggaatcaagaaaagatggaggaaaatattggaaaatgaacacgagagatcatcagatgccgaaaaaatttaaggctctcctcaaccaaaactttgagatccaatctgaaaagattctcaaaaccaaggaacaaattcttgaaggttctaaacatgattgcgaaaaatctctcgttaagaatactcacaccaccatattagaagattttgaaccaatatcaagtgttccaatttacagaaatgatgacatttatgctaaggaagaaa

SEQ ID NO: 41629 - DNA, 357 bp, Glycine max
  Clone ID: LIB3139-034-P1-N1-H7
attctagaaactgtgtacagacgcttgaaggacatgaaaacaatgttacagcaatatgtgctcatcctgagcttcctataataataacagcttcagaggattctactgttaaaatatgggatgctggtacttaaaaggttcaaaaccaagtttaactttggttttaagaaaagtttgagtattggatacaagaaaggatcattttaacttggatttggttgtgaccaaagatttctaattgttaagatttcagaaggaagaccccaataagccaacatctggtagccagatgactagttatgatgagcttaactgcccagagaacatcatattctgccgttggtgtttatttctgag

SEQ ID NO: 41630 - DNA, 356 bp, Glycine max
  Clone ID: LIB3139-034-P1-N1-H8
tttgttacacctagcttcttccttcattttctcatgatcaatattcaacaacatggctaatttgcaaggagggcctgactttgacaaaatctttcacttcctctccatttgcatccttgctttcatcaatgaaggctcttcctccctctcaagtgcattcatgaatgaaccatggtcatggggcctaagcattcccataagtttgtacgtgaaattcgcacttgagattcacactcaccttggaatctgcgttggggttggagtaccctctttggtctattggggtgccacacgtggtgccattgattggcactgggaagcagcattgaagctcaaccacgagatcttcaagacat

SEQ ID NO: 41631 - DNA, 356 bp, Glycine max
  unsure at all n locations
  Clone ID: LIB3139-034-P1-N1-H9
atgttatgtccggcatgtggaaaacaacagctgaaagatttttcctatggattggaggctttcgcccctctgagcttctaaaggttcttggccccctgattgaacccctgacggagcaacaacgtttggatatctataaccttggacaatcatgtcaacaagcagaagatgccctttcacaaggtatggacaaactccggcaaacacttgctgatagtgtagcagctgggcagttcatggaaggaacatatattccacagatgacttctgcaatggacaagttgaaagctctggtgagctntgtgaaccaggctgatcatcttcggcaggaaactttgcagcanatgtctcgaata

SEQ ID NO: 41632 - DNA, 372 bp, Glycine max
  Clone ID: LIB3139-035-P1-N1-A1
cggctcgaggctcaagcactgcctttcattgtgcttaattaaaaggcaaacctttgtacatgtgcgttgttttgaaacatctcatcaccacactaattatctcacactcaaagctatagaccaaattaaaatgaaaggaaacaacccctatttggttgtgattctcatacaaaccatatatgctgctatgattcttctctcaaaagtggcattcgatcatggcatggacagttttatcttcgtcttctatagacaggcagcagcaaccctctttttgacccctttcactttcttcttcgaatggaaaactgcaccacctatgcctttttggaccttctgcaagatttttttcatttctttatttgggattac

SEQ ID NO: 41633 - DNA, 366 bp, Glycine max
  Clone ID: LIB3139-035-P1-N1-A10
ggtttatttcctctcacgaatgtgatcccaggacctagtgtttttcaaatgcataacagcccatcctgtgaaatagttgcttatataatcaaattattcctaccaatacttgtattttccctatacctttcttcagttgattatggtgcaaattcttaattgatataatctattttagtctttaactcttattatgattcaatacatacctttttattcattctgttacctatgcagatttataatttcttgcaactttgtatttatgatttatctatttttttttttttatatttttattttttattatttttcttttttttattaagttttctttttttacaattagattaatttagttttaat

SEQ ID NO: 41634 - DNA, 307 bp, Glycine max
  Clone ID: LIB3139-035-P1-N1-A11
cgaataacatagattagcgttatgggtctcttcctttctaggaatttggcttgcaaattcatatacccttttcttttttccaataaggtttcaaaggatttgttccccaagcagttggagaacatgatgtctctggtctctcctcgtactggcaggcatttgcagcgctatgacaaaggctgtcgccaagttgtggggtgtgtttctcttccttctttccttcttctttctgggctttcttaaagttctgatttttatgggtttcattttctaaaattaatgtttttttttataaataatattacac

SEQ ID NO: 41635 - DNA, 364 bp, Glycine max
  Clone ID: LIB3139-035-P1-N1-A3
tttctctctctccgtttcccctttagacctctctctcacttgaaactccacaaccccattttcctttcctatgaccctattccaaatcaccaattctaattccattcttcaggtgttcaattgaattcgtgatgaagagggatcaccgagatagctgcggcggcggcggcggagggagtgtgaagggtgagtgttcctcaatgccgtcgaacgggaaggcaaatatgtgggaggaacaacaacaacaacaacaggggatggacgagttgctggcggcgttggggtacaaggttcgtgctttcgacatggccgacgtggcacagaagctggagcagttggagatggtcatgggttgtgcccaaga

SEQ ID NO: 41636 - DNA, 357 bp, Glycine max
  Clone ID: LIB3139-035-P1-N1-A4
tgctcgagctcgagccgctcgagccgctcgagccgaaaaattcacgtaacattctcttctgtgtcctaatcggaactcgcacaaattttgttatagtgatgtgatgtcattttagggtttttgaattgcgatgggtctgggaaacgatgacgatgacggagacacgcacaagtccttcggttcagtgccttgttcgatttgcctcgaggctgttaccgataacggtgatcgatcctgggccaagcttcaatgcggacatcaatttcatctcgattgcattggctcagccttcaatataaagggggcaatgcagtgccccaattgtcgtaagattgaaaaaggtcagtggctttatgc

SEQ ID NO: 41637 - DNA, 372 bp, Glycine max
  Clone ID: LIB3139-035-P1-N1-A5
ggtttatgtaccactgcccacaaaaactaatcttgtggaaactcccaaagaatggcagttggatttgccttgtgataagattccaagtgtgttaaccactactgatgagagattggttggcacagagcatgaaggatatgacccatttcttggtggtattcaaaaatatgcaactcccatgatgcctcttgatgaggagattctttccaaagttgcacaagacatggttgaagaatggtttgattgtgttgatgaggaggatacatttgaagaagtttctttgagtgctgcactcaatggtgttgaaggtttggactacatggaacgcattcctcttgccacttcagagggttttccccatgttctgtccag

SEQ ID NO: 41638 - DNA, 372 bp, Glycine max
  Clone ID: LIB3139-035-P1-N1-A6
ctgatatttacaccatctgctctcaagactgtgaattatggaatcctgcttgcacaaaagcaatgaccatgtcatttaatccaaacccgtgttctgatgcatggagtttggaatttctgaagcgtaccggatttcattgtgatatcatttgtgtcactggatggactgctaccccaatgcaggatgttcaggttacaattgattggtttatttcctctcaggaatgtgttcccaggacctattgtgttttaaatccacaaaatccttttgtgttaaataggtggatggggaaattgactttcccccagggcacttcccgaagtgttaaaagaatgcctctttctatagggggaggagctggtgcaaagaatg

SEQ ID NO: 41639 - DNA, 359 bp, Glycine max
  Clone ID: LIB3139-035-P1-N1-A7
aaagaatctagtgattttcgtttgcgttgctgttgcgactgagtgagtgaagatggcgtgcttgcacgaccacagttgcgaagaccatgactgttcctctaactggtctctctacaaacacatcgacctctccaaggtaactgctttgaatgaggcaaatccaggaagtgttaagtcagttttcaaagcttgggaagagcgtctggattcttctggggttcacttggaaagcaatgagggtgatcctgagttacttgtcttcattccatttacttcagatgtcaagattaagagcatatccatagttggtggagctgatggaacaagtccttccaagatgagagtgttcatcaatcgag

SEQ ID NO: 41640 - DNA, 368 bp, Glycine max
  Clone ID: LIB3139-035-P1-N1-A9
aacgctttgttctcatcttctgccattgataatgcccacattgaccagtggattgacttttcatccttggagatcgatgctaatattatgaaattatacctaccaagacttggatttgccccataccttcctccagttgaggagggtgcaaattctgcattgaagagagcatttgaggccttgaacactcatcttgcttccaatacatacctggttggccattctgttacccttgctgatatcataacgacgtgcaacttgtatttaggattcagccagctcttagttaagagcttcacctccgagttccctcacgtcgagaggtacttttggacattggtcaaccagcctaacttccgaaagatatt

SEQ ID NO: 41641 - DNA, 366 bp, Glycine max
  Clone ID: LIB3139-035-P1-N1-B1
cctcagtccatttcacagcaaactgtttggaatcaaatggcaacagtgagaacaccattgaattttgattctagcaagcagagcttttgtcaattttctatcgaccttctcggtggaggaattttagtggacaaaactggagattggatcacacttatacaaaattctccaattagtaacttgttgagagttgctgcttggaagaaaggctgtttaatggtcaagattgtgatgtctgggaatgcagcagtcaaaaggagtgattgggcctcattggtacaagtgtttttaacaaacagcaacagtacagagcattttgatgcatgtaagtggacaaaatcagaaccacattcctgggaattgatc

SEQ ID NO: 41642 - DNA, 195 bp, Glycine max
  Clone ID: LIB3139-035-P1-N1-B10
ggcattgatttgtctcggtgtaatcaaataataagtactgtagtgttaagtctttccttctgtatttgtttatttccccccactatgtggcattgatttgtctcggtgtaatcaaagttgctaaaagaacattttcaccatgaatttctatgttgaaagtgacttgataaaataatatttcaacagcttccatct

SEQ ID NO: 41643 - DNA, 351 bp, Glycine max
  Clone ID: LIB3139-035-P1-N1-B11
tgcataagtagccatggcccatccatacttcaatccagttagaaatgcagaaagtagtagaactcgagcacattgagttgttggtgcttgttgagatatggtgttcgttcttgacaggggggcaacagtctgaactgttatttctggtggaacttgcttttaggtgattcccctgttctgttgtaaaactcattttaattagctttttgcataatagttttgtttctggttttttaaaattatttttgggtggaaattcagctttctacaggtttatttgattgtgtgccaaaatttggaaatgaaatgttgattcaattttagaaaaatttttcgcgggttttttatgtt

SEQ ID NO: 41644 - DNA, 362 bp, Glycine max
  unsure at all n locations
  Clone ID: LIB3139-035-P1-N1-B12
ggtgtatttgtacttccaagncattaccttgtttctcgaccagagattgacaggacttctggtgaatatttagtgtataatggtattcggacttttgcttgcagtgagactgttaaatttggccacgtcacattcttctggaatggaaaccgctctgggtattttaatgcagaattggaggaatatgtggaaattcctagtgattctgggattacattcaatgaacaaccattaatgaaagcattgcagattgctgaaaaggctagggatgctattcttagcgggaaatttgatcaggtacgcgtcaacctttcaaatggtgacatggtggggcatacaggtgacattgaaacaacagttgt

SEQ ID NO: 41645 - DNA, 367 bp, Glycine max
  Clone ID: LIB3139-035-P1-N1-B2
ggaaaacaaagtatagagtgaaagaatgggtgagaaaagcaagattttgatcataggaggcaccggctacatcggcaaacatatagtggaagcaagcgcaaaggctggaaatcccacttttgctttggtgagggaatccacactctctgacccctccaaggcacaactcatccacaattttgaggctttgggcgttaatttggtccgcggggatctgtacgatcatgagaagttggtgaaagctatcaagcaagtagatgtcgtcatatccacgctgggtcacctgcagcttgccgatcagctcaagatcatcgctgccattaaggaagccggtaatgttaagaggtttttcccttcggaattcggt

SEQ ID NO: 41646 - DNA, 327 bp, Glycine max
  Clone ID: LIB3139-035-P1-N1-B3
tggttaacggatattaaagacacctctaaagaaggatatagttttgaagagatatgcatcaagaaagaagcgtttgagggagaagagaagttttgtgcaaaatccttgggaacagtaattggttttgccatttcaaagctgggaaagaacattcaagtactttcaagttcctttgtcaataagcaagagcaatacactgtggaaggagtgcagaatcttggagacaaagcagtgatgtgtcatgggctaaatttcagaactgcagtattttactgccataaagtccgtgaaacaacagctttcatggttccattggtggctggtgat

SEQ ID NO: 41647 - DNA, 374 bp, Glycine max
  Clone ID: LIB3139-035-P1-N1-B4
tcttgaagcatcttcagttaaatccatatctaaacagtctaatgtggtcagtaataccaaaggtgattcattgatgggtctggaaagccataaccaacagcttgccagttcctctgctgatgaacaggccaaagcagaagaagaatttaagaaatccttgtacggagctgctgctgatggaagcagtagtgatgaagaaggagtatccaaaatgaaaaaattacgcataaaaatacgagacaaaccaattgcctcttctactgtggatgtgaataagattaaggaagccactaagcagtttaaacttggtgaagggttagctccaccaatgagaagcaggtcctcatctggtggaagccaggatcttggtcaga

SEQ ID NO: 41648 - DNA, 365 bp, Glycine max
  Clone ID: LIB3139-035-P1-N1-B5
aaatcttgctttgtacagaagaggaaaagatggaagtgattagaaatagaggcattcctgctgatgttcttgcaaagcgagctcatgaatttgaaaaacatgttgctcatgaaagcctcaaggatcaaattcctgctgttgacaagttgtattctactaaggttaataagtttgcaaaaattatgaaccttagacaaagtgttgttggtgatcttaaacttcttactgatgggaagttgtatgagggtaagcatattcctgtatctaatattagtgcaggggaaaatcatgtagttcaaatacccttaatggcacaagaggaaattctgtcttctagtgcaaatgatttcagaactgcaatggtg

SEQ ID NO: 41649 - DNA, 370 bp, Glycine max
  Clone ID: LIB3139-035-P1-N1-B7
caatctcctctgcggtttccccttcttgttcttggcaacagtgagagcaccagcagtggccaaagcgttgaaaccgagtttaaggagagagttcatcgttcagcaaatgctctgcgaggatattttcagcctgaacgccaacaccgtcgccgccggcgaagatttctccgtcgacgacctatttgacttctctaacggctctcttcacaacgaacaacaacaagaatacgacgaagggaaacaaagtttatcggcttcagaggaccgcggagaagacgattgcaactccaattccaccggcgttttctatgattcacttttctccaccgaattagccgttccggccggtgatttggaggacctagaatgg

SEQ ID NO: 41650 - DNA, 340 bp, Glycine max
  Clone ID: LIB3139-035-P1-N1-B8
aaaagcgtcgtgggaggaaggaaagagcatacgtgttgcgttagtgtttagtgttatatctccgcagtggatcaaatcaaacaaacacttccatccatcaccctttctctctgcttagggttttgatcgcatcggatcttcactctcttctccgatctcaaaatgcccgccgtttatggagctcgcttgaccaccttcgaagactccgagaaggagagtgaatacggttacgttcgcaaggtatcaggaccagtcgtcgttgcagatggcatggctggggctgctatgtatgaactcgtgcgtgttggtcatgataatctcattggtgaaattattcgtc

SEQ ID NO: 41651 - DNA, 367 bp, Glycine max
  Clone ID: LIB3139-035-P1-N1-B9
ctttctctctctctctctctcagttctttgtaacgaaacgcaacgcaacgcaacgcaacgcaacacaaacgcacccttcctatactccgcagatcactctggcaccgttaattcggcgtcgccgtttcaaggaaaaaaggcattaaagaaaagattcccttggatcattcatggcatcaagatcatatgttaatctactagacttagctggaggtttactggatattcctcacacgccaaaaactattccaaggattatgacagttcctggagttatttctgatctggatgtttgtggtagatatgatggggattctgatgttagctcttctggttatcgggagcggaaaatccttgtggcaaacat

SEQ ID NO: 41652 - DNA, 369 bp, Glycine max
  unsure at all n locations
  Clone ID: LIB3139-035-P1-N1-C1
ctcgagccgattctgctcgagccacatccatctttgccttctgcatgttggttctctgtaaacagatactgcaaaagaagaataatattgaatatttggttgggttgaatccctgggttgaagcgttgcagacatcacggctattctaagagtgtctcgctctctcattcatgtcccaactgtacgacggaggacaggttgcgtaactgccaccaacccttcgccgcacggtgggcgtggtgctttgccttctgaaggtggtagcccttcagacttgctcttcttagctggtggtggttctgctgtcttctagcttcttcttaactcttttttctttttactactnttaagctaccttgttttcaaaat

SEQ ID NO: 41653 - DNA, 350 bp, Glycine max
  Clone ID: LIB3139-035-P1-N1-C10
cgaagcttttctcggttggttgccaggaaaatcgggtgtaagcttgttccacgaccatcagatgctcaaccagaatccctcaaccgcaccggatccacaccaagagcatccattgaatgggcacggcgttcccataagtccaaacactcagaaagttttacttgagtatcaagaaaccagagctcccctttcttttattcatgtatacatatagcagtgttgtgtggttttaaattttttgtacgagggaaagggaaggaaaatgtttcttaatccattatgcctttttatttcaccagtttgcatatctgaacattttccatttctttcccctcgtgtaaagtttgttg

SEQ ID NO: 41654 - DNA, 318 bp, Glycine max
  Clone ID: LIB3139-035-P1-N1-C11
tattataattatatgattaaaatggtggccacaggtggtattcctgagaatacaggtatagcattggcctgtgctatgaatagttcttttagggggcgcgccagttctgatatttacaccatctgctctcaagactgtgaattatggaatcctgcttgcacaaaagcaatgactatgtcatttaatccaaacctgtgttctgatgcatggagtttggaatttctgaagctttccgtgtttattctgttttttatttgctgttttggttggtcttgtttatttttttttttatatcttattattatttaattgtttttt

SEQ ID NO: 41655 - DNA, 366 bp, Glycine max
  Clone ID: LIB3139-035-P1-N1-C12
ctgtggttcggtttgtaaatcatggagggctgttacgaaagagattgttaagactcctgaacaatgtggaaggctcacatttcctatttcgttgaagcagcctggtcctcgtgattctccaatacagtgctttatcaggaggaacagagaaacttcaacatatctattgtacattggcctggtaccatcggagaatgagactgataagttgttattagctgccaaaaaggtaagaagggcaacaggcacagacttcgtcatatctttggttgcagatgatttttttcgctccagcaacacatatgttggaaaactcaggtctaattttttgggtaccaagttcactatttatgacagccaaccccc

SEQ ID NO: 41656 - DNA, 365 bp, Glycine max
  unsure at all n locations
  Clone ID: LIB3139-035-P1-N1-C2
gagaacgcgatgttttgttcctcttttgttcttccccttcccaatcttcaactttagggttcctttaatctcgttattcctcttcactcccaagctccgttcactccaacaacactccgatttagaaatggatggaccagctggccgaggtggtgctggcctggacatgtttctaccaaattataaattgggaaaaacactcgggattggatcttttggcaaggtgaaaattgcagaacatgtgttgactggccataaggttgcgatcaagatccttaaccgacgcaagataaagaacatggaaatggaagaaaaagtgagaagagaaatcaaaattttaagattgtcatgcatnctcacattat

SEQ ID NO: 41657 - DNA, 363 bp, Glycine max
  Clone ID: LIB3139-035-P1-N1-C3
atcactgatcctatactacgtcgttgccttcctggatcgaactgaaaccgagtgcttccaactccaagcttcaaggaccactaggatggtaaatgcactaactaggacgcggttacaagatggatatgtctcgtatccatgggagaggaggatgcaggagttgctatcagttcccaattctagcaattttctttcaatattacttcttcccaaagtttcagataggatagctgctcgctacaatgatgtggaggatacactagccagggcaaatacgtggctgaatgcagctcaagcttcaggtgtccctattgtctttatgaatgtccaaaccgagtccctacttactaagatctctggaga

SEQ ID NO: 41658 - DNA, 353 bp, Glycine max
  Clone ID: LIB3139-035-P1-N1-C4
gcgaggggttgactttcttgcccaccggtggacggccagccgtgggatctggtcactgttagaagctcataaccctaggctctgtaaaggggcgagccattgacctccgcctttctttttcatagcctaatgccttcaatgtcgatgtagaactcagcatccaatggctgccggactcattaacttcagcgttcatgcctgctctagctgatgacagaacagctgaatagactgactcagaaggtgatgttggcccaaaagcagacgaggaaagggcccttgtacactactactgtgtataacaccgatgtggactacccatgcactgagagaccacgctctatttttgaagc

SEQ ID NO: 41659 - DNA, 343 bp, Glycine max
  Clone ID: LIB3139-035-P1-N1-C5
gggtgttcccagatagagcaaaccggagaagtcgcacaccaagtgttcgacgaaacgcgtctcttatggtggatgcattccggcgattttagaagcattggacgcagttctcggtgtggacgaggctcttgggccgtgggaggagaggcttagcaacaaggagaggagcatcattttgaaggagcagctgaggtgggacagagctttggagattttcgagtggttcaacaaaaagggtcatgaattgaacacgattcattacaacatcatgctgaggagccttggcagggcccgtcagtggaggcgcgtggagagtttgtggaatgagatgaatgctagaggc

SEQ ID NO: 41660 - DNA, 237 bp, Glycine max
  Clone ID: LIB3139-035-P1-N1-C6
cggtgcttttctttcctgcagcctctcacacaacaggacagactatttgtgtagaggggggcttaacagtgactggtctctatataaatcagagaagctctaccaacacactatgtaacacactagtcttgacacatattctaccataagtgacaaataataaacaatgaccaaatcattagaatacgagctcggacccatatatatctgtgacatcttaaaaatttcaacgcaatc

SEQ ID NO: 41661 - DNA, 323 bp, Glycine max
  unsure at all n locations
  Clone ID: LIB3139-035-P1-N1-C7
cctttgttcactcttcttnnnttgcggctagggttttagcgcagcttcttctagatttaaggaagatgggtaaggaaaaggttcacatcagtattgtggtcattggccatgtcgactctgggaaatccactaccactggtcacctgatttacaagcttggaggcattgacaagcgtgttattgagaggtttgtgttgcaagctgctgagatgaacaagaggtctttcaagtatgcctgggtgctggacaaacttaaggctgagcgtgaaagaagaatcaccattgatattgctttgtggaagtttgaaacaacaaagtattat

SEQ ID NO: 41662 - DNA, 350 bp, Glycine max
  Clone ID: LIB3139-035-P1-N1-C8
gcctgattgtgacaaagaatagatcctcaatacaatgaggttcaggctcagatggaaacaaatttgtttaaattgtctcttgatgatgttgaaactcctaaaggttccatgttggatcttaaaatttctcaatctaaaattgcacttcccaagaacacagttggaggaaccattctgcgtagtgatttattggcaaattttttgacagagggcaattttagagcaagtgttgatttgcagcgcactcatcgtattagaggaatgattaaaatggtggccacagttggtattcctgagaatacaggtatagcattggcctgtgctatgaatagttcttttagggggcgcgc

SEQ ID NO: 41663 - DNA, 363 bp, Glycine max
  Clone ID: LIB3139-035-P1-N1-C9
gtgtacttctcacgtccttctaacgaggtgaatcttgttgaatggctcaagatgatggtggggacaaggagaactgaggaagttgtcgactcaaggcttgaagtgaaaccatcaatacgtgctttaaagtgtgctcttctagttgctcttagatgtgttgatcccgaagcagaaaagaggcccaaaatgagtcaggttgtgaggatgcttgaagccgacgaatatccattccgagaggatcgaagaaatagaaagagccgcaccgcgagcatggaaattgaatctctgaaagatatttctggtccatctgatgctgaaaagttgaagggtgggcatgcaccagaaacaactcaagggtaggat

SEQ ID NO: 41664 - DNA, 365 bp, Glycine max
  Clone ID: LIB3139-035-P1-N1-D1
gagaaaagcgtgaatcatgtcggacgaagagcatcacttcgattctcaggcggatgcgggagcgtccaagacgtatcctcagcaggctggtaccattcgcaagaatggctacatcgtcatcaaatccaggctttgcaaggttgtagaggtctctacgtcaaagacaggcaagcatggacatgcaaagtgtcactttgttgcaattgatatttttaatgggaaaaagcttgaagatattgttccatcatcccacaactgtgatgttccacatgtgaatcgcactgactatcagcttattgatatctctgaagacggctttgtgagtctgttgactgataatggaaataccaaggatgatctgaagc

SEQ ID NO: 41665 - DNA, 369 bp, Glycine max
  Clone ID: LIB3139-035-P1-N1-D10
catttccatcaagtttcagttccaaacaaaacccatgaaagtctttctccctcagtgatcatatattcattcagttctatacaaaatcctcaaaaactcttcctctctgccatgaccatggaatacagaaccttagaactcaacatcatatccgcaaaggacatcaagaatgttaatctcttctccaagatggacgtatacgccgccgtttcgctctccggtgaccctctccaccctcagggcgccaccacccacgtccacaaagacgccggcagcaaccccacgtggaactaccccgtgaaattctctgtcaacgaatcgctggcgaaggaaaatcgtttatctcttgagatcaagctcatctccgac

SEQ ID NO: 41666 - DNA, 332 bp, Glycine max
  Clone ID: LIB3139-035-P1-N1-D12
aaccagaaccacattcccgggaattaatcttgccaatagaggcatgtcttgctcctaatggcatctaaatgtggagttctaaccgggcaaatcaaactacatggcatcagagaagccctattgacaacacccaacagcctacaccgttccgataccctctcgacaatctctcacgatcgcgaaactgctggatatactcttatgccacctttttctgatccacatgctactgccagatcttatgcaaatgctgaatcctctgactgatctcgagcccaggctatctttcgatcgttcgctcgatttattccataaaggacaattcgcatgac

SEQ ID NO: 41667 - DNA, 372 bp, Glycine max
  Clone ID: LIB3139-035-P1-N1-D2
tctgaatccaattcttcttcttcttgttctctgtttaaggcaatacaacatttactactcatactcaaagtagcttagtgttttgtttagcatatcatggagaataataatcagtcgttttggcaattcagtgaccagctgaggttacaggcatccaatttggcgaacctttctctaaacgattcgatttggagcaacaattacatctccaagaggcgtgatgaaaggattaattttgacatcaaagtggggggtgagatcaactctttcaagtcaaaggatccagcttgtgattacaacgataacgtgaatggatctcttcttgccatgccttacaacaacaacaacaacaacaacattatttttgggtgt

SEQ ID NO: 41668 - DNA, 370 bp, Glycine max
  Clone ID: LIB3139-035-P1-N1-D4
ctcttaacaggtcttgcaagtgcactaatgggaggattcatgatatgcatcataatttgctgtactaaatctaagtcatccacacaagtaaaattctcgtttacgataaagaatggccaagatatagaatcattcttaaaaaaccatggagctctatcacagaagagatacaaattttcagaagttaagaaaatgaccaactccttcaaagttaaactaggtgaaggtggttttggtgcagtatacaaaggagagctactcagtggtgttcctgtggccgtaaagatattgaatgaatccaaaggaaatggtgaagacttcatcaatgaggttgctagcatcattagaacttctcatgtcaatgttgtca

SEQ ID NO: 41669 - DNA, 364 bp, Glycine max
  unsure at all n locations
  Clone ID: LIB3139-035-P1-N1-D5
tgattagtgtcggattggattggattagggaatattgggaaataactttccaaatatataatctgtggaaaaaacccactggttgagttttgattataaaattttatggcccaaactntatnatcaaaactcatcctgagagaccatccacagatatcacactaaggatagaaattttccgaagttcacaaaatgaccaacttccgccaagatcaaccaggccgaggtccgtgcggtcctacgcacacatgcgagcgtcttactggtgttcttggggccgctaatatattgtacgaatccaaaggaaacggtgaagacttcattaatgacgttgcctgtaccattagaacttgtcatgttaatg

SEQ ID NO: 41670 - DNA, 369 bp, Glycine max
  Clone ID: LIB3139-035-P1-N1-D6
ctctctcacatttcattacttctagcaggctattacatcttttccttcctctgtctacatttcatttcattcaaaacaatcatggcatctcttcattccacatgttcaacaaaaaccgtcctttatgcattggtattgttggcctcttccatggcaacttctaccaggattttgacataacatggggagatggtcgtgccaagatactcaacaacggcgatcttcttactctttcccttgacaaagcctccggatcagggtttcagtccaagaacgagtatctctttggcaagattgatatgcaactcaagcttgtacccggaaattctgcaggcactgtcactgcctattagcttctcagtggatggg

SEQ ID NO: 41671 - DNA, 363 bp, Glycine max
  Clone ID: LIB3139-035-P1-N1-D7
caatgatctctgagaccttcgtacatcgctctggtcgtactgggcgtgcaggaaaacaaggtaatgccattctgttgtacaccagtagccagcggagaacggttagatcccttgaacgtgatgtaggctgcaagtttgaatttgttagttcaccagctatggaagaggttttggaggcatctgctgagcaggttgttgccacactttgtggagttcatcccgagtctgttcagtttttcacccctactgcacagaaactgatcgaagaacaaggaacaagtgcccttgcagctgcacttgcacaactgagtggattctcccgaccaccatcatcccggtctcttatcacccatgaacagggat

SEQ ID NO: 41672 - DNA, 367 bp, Glycine max
  Clone ID: LIB3139-035-P1-N1-D8
aaaagctttctagctggtcataatatcaccattactgatggtattgacaaaactagtgcaactttgcaatttagaaagttagcagattgtgattttctcaagagaaactttaagcagatgtctaatgttttgtgggtggctcctgaagacaaggcgagtttatggtcacaacttcattatgtttcgtgtaataatctggaaatgcaagaagcttatcttgtcaatctcgtaaatgtgttacgagaactgtatttgcacagtccagaggaagctcgccaattgagaaggaaagctctctctcgtattgaatggctgcaaaaagctgatgtgcctaccatagcacagattgaagagttccattcgatgc

SEQ ID NO: 41673 - DNA, 365 bp, Glycine max
  Clone ID: LIB3139-035-P1-N1-E1
gttggagtggcggagatgacggtggagttcggaaaaggttgcagagacatagttaaacagagtctggtcaacgacgactcctacatcgtcaaaaacttcggaagagactcctacattggaaaaacagtgacagaacctttcgctaatcttttccagaaattgagtttcttcaacgagtacttgcccgaggataaagatcctcttcacgcttggtccgttattttcttcgtttccattctcgccttcttagctttgtatgcgaattttgaacgtgatgcgtacgcggcggccccggtgaagcatgtgtttgtgcatcctccgagtgctacttgcgtagtgcttcctgatggaaggtacatggcgta

SEQ ID NO: 41674 - DNA, 363 bp, Glycine max
  Clone ID: LIB3139-035-P1-N1-E10
aattgaactagttggtatctcactacaccacaggacactgcactcttttcaaaaccctaaccatggcttcagctccatcatcgccagaaactcctcccaacacaaacttcactgccacctctactcctccactcaagatttctcccgcaactcttcccaatcccaataacaaacgcttgctgatcggattatctatagggtttgcccttttatcttttgttttgatccttgtgattgcctttctcgtctacttccttcatcgggtaaggaaaaataaacgacataagagcttcgggagaataccacttcaagatggattctacgacgttcttggtgaaggtggttttggccatgtctacaaag

SEQ ID NO: 41675 - DNA, 364 bp, Glycine max
  Clone ID: LIB3139-035-P1-N1-E12
gttgtttcttcctctgagttccaactttcaccggagccaaatacacaacaaaatggggtttcagaagataagggtgggcaaccccatcgtcgaaatggatggggatgaaatgacccgagtgatttggaaactgataaaagataagcttattttcccttatttggagctggatattaagtattttgaccttggccttcctcatcgcgatgccactaatgatagagttactattgaaagcgctgaagctacactcaagtataatgtagctatcaaatgtgctactataactccagatgaagctcgtgtcaaggagtttaacttaaaacaaatgtggagaagtccaaatgggacgatccgaaacatt

SEQ ID NO: 41676 - DNA, 274 bp, Glycine max
  unsure at all n locations
  Clone ID: LIB3139-035-P1-N1-E2
gttttgtttacattctttaataaaggaaataatggcgactgggctgtgtttcataacattaaatagtgaagtatgaagcatgaacgttgcacaagcctaatttgcaataatttgtaacattaatattgtgttattctaatatttttatagataagnnngtgatgtaaaagacagaaaagtgtgatttctgaccattaaattttcttttgtcattaaccaataatgtaaaatattgtgtgagtaacaatgactcaatgatgaggatattatgtat

SEQ ID NO: 41677 - DNA, 367 bp, Glycine max
  Clone ID: LIB3139-035-P1-N1-E3
ctacaaggcatctcgatgcctatcagtccaattctgtatcagatttcgtggaaaatgggagcccggatggccttgacttcgatggtgaaatgagactaaaacttcaagaattggagagggctttgctttctgatgaagaagaggaggagcaaggcatatttgagactgttcaaagcatggagattgatcctgacatggtcgagtgggccaatccgcttcaagatatgctgctccatgactcaccaaaggagtcctcatcctcagattcttccaatcttagcagcatcagtagcaccaccaaagacacatcacaaaactcaccccaaacccctaagcaactgctttatgattgtgctaggatactttc

SEQ ID NO: 41678 - DNA, 368 bp, Glycine max
  Clone ID: LIB3139-035-P1-N1-E4
ctattttcgggtggagattacttcaagacagattaccaacaaaatgtaatctgcgaagaaggcaagttcagatctcggatgctttatgtcctttttgtggtgttagggatgaggaggtgtcccacctattttttcactgcacaaagatttggcctatttggtgggagactatataatggctgagtatcactacaggcttcccttccaatccagctcagcatttccttcagcactcctttgctcaagtggaagggttaagaagaagtaggtggcaaagttggtggatggctgtggtctggtctatatggaagatgaggaacagaattattttttccaatgattcttttaatggtagtaagcttgtagac

SEQ ID NO: 41679 - DNA, 351 bp, Glycine max
  Clone ID: LIB3139-035-P1-N1-E5
gtcgttttcttttcttccctaacgatctgaggaagacaccaagcttctctccacgcccttcttgggtaatctgaagtgcagcgatggcggatggattgcactcgcggcatccatcagtagttcagaagttatctggacagtcttatttgttgtctaggcttgcccctactcactcaagaaactattccacaactggtagttacttcaatggaggcttgcagtcttcgggtttggttccagtcatggcacatgcaccggctgagaaaggagtgtctggatttttgttggatttcatgatgggaggagtgtcggctgctgtgtccaagacggctgcggctccaatcgagcgag

SEQ ID NO: 41680 - DNA, 364 bp, Glycine max
  Clone ID: LIB3139-035-P1-N1-E6
cttaattcttacaatttattatctttctctaagaactcttccaattttttctctctcttcctctttagcttcatcgccatggcatcaccagcaagaaccttctttgccttcattctcgccgtcgtcgctctcttcttcgccgccgccaatgctcaagacctctccccggctccgagtcccgatgccggagcggcgggatccgtttcgagctccgtcgccatgatcggagcttcggttgtgctgtcattgatggctatcttgaagcattgaattcgttaatttcgttgggtttgtacaaaattgattcgttttatatacagagtggtgattatgagctttggtatctatacttataggtataccg

SEQ ID NO: 41681 - DNA, 353 bp, Glycine max
  Clone ID: LIB3139-035-P1-N1-E7
ggcggtttttgatgacatcaagcttgacgttcatctccaatgtcttggtggtcatggtggataggttctgggtaaagtagtatacagcctcttcaaagaggtccatcatggtttggtggctggaaagagcgaacatggttgatgacaggggtagaggtagaagttccggcagaggtagttgctgatggatggtaatatggaggggatgtcatggtaagagatggtttgcgctggcatggcagccatggaaggcagtcattgtctctcaatgaaagcaccaaatttgttagactctctggtttagaggaccagaaaccttccaagaagaagaagagaaataggaaaactcaaca

SEQ ID NO: 41682 - DNA, 318 bp, Glycine max
  unsure at all n locations
  Clone ID: LIB3139-035-P1-N1-E8
attttggttcttctgatgaagagatggaggatgctgatagtgacagtgatgatgagagtggtgatgaanatgatgatgaagagacccctcccaagaaggtggatctgggaaagaagagacccaatgagtctgcatcaaaaactccagtttcttccaagaaagccaaaaatgctactcctgaaaagactgatggtaagaaaggtggacatacagcaacttctcaccctgcaaagaaaggcggaaagacttccaacagcgaagccaaagccaagactcccaacagtgaagccaaagccaagactcctaagtctggtggac

SEQ ID NO: 41683 - DNA, 328 bp, Glycine max
  Clone ID: LIB3139-035-P1-N1-E9
attcggtgtagttcgcgcctcctccttctttggctccttcgcatagtgaagagaaagagagcaaaagcaaatcgtcttgccataatgggttgtgtaagcaaaacatgggagcggttgctggtgttgttactgctggggcatttgttttggctctttttgctggtgccttgatttggttttactctaagaagtttaagcgtgttaaaaagtttgattcacttggttcggagatcattagaatgccgaagcagtttagctacaaggagctgaattctgctaccaagtgcttcaatgcgaataggatcattggtcatggcgcgtttgggac

SEQ ID NO: 41684 - DNA, 362 bp, Glycine max
  Clone ID: LIB3139-035-P1-N1-F1
caattttagagcaagtgttgatttgcagcgcactcatcgtattagaggaatgattaaaatggtggccacagttggtattcctgagaatacaggtatagcattggcctgtgctatgaatagttcttttagggggcgcgccagttctgatatttacaccatctgctctcaagactgtgaattgtggaatcctgcttgcacaaaagcaatgactatgtcatttaatccaaacccgtgttctgatgcatggagtttggaatttttgaagcgtaccggatttcattgtgatatcatttgtgtcactgggtggactgccaccccaatgcaggatgttcaggttacaattgattggtttatttcctctc

SEQ ID NO: 41685 - DNA, 164 bp, Glycine max
  unsure at all n locations
  Clone ID: LIB3139-035-P1-N1-F10
gttttaatataaaaaacantcatcaatcattatcaacggtattttttagtgtaccctgccacaacaattatttctcctgcttttttattattctttcttttttcctagctctttcttttcacttacctatttctatattttatccttctaataccctatataat

SEQ ID NO: 41686 - DNA, 364 bp, Glycine max
  Clone ID: LIB3139-035-P1-N1-F11
gttgatagagaaaatgcattccagccctttgcttcttgaggaacccattaggatggcatccatccttgagccatccaagcctactttttttccggctatgacgaaaattgttggcacacttggtccaaagtcacgatcagttgatataatttcccattgccttgatgcaggaatgtctgtggcaaggtttgacttttcatggggtgatccagaataccatcaagagacattggaaaatttgagagttgctatcaaaagtaccaagaaactctgtgcggttatgctagatactgtgggtccagaattacagattgagaataagactgatcacccaatcacccttgaagcagacacattagttgtc

SEQ ID NO: 41687 - DNA, 368 bp, Glycine max
  Clone ID: LIB3139-035-P1-N1-F12
cgttaatcagccccaagagaaagatttgttggaaggaaatttttcctttgatattaaatctcgctctagattggaaaaagtttcctctacaaaagcacaatttgttagtggaaaaaccttcaaatatgatatagttggtgctggttcacattcttcagaagatttttctgaaaaggaagatcaagaaaaacccaaaaagattgatgccagattgagacaaagaatagatcctcaatacaatgaggttcaggctcagatggaaacaaatttgtttaaattgtctcttgatgatgttgaaactcctaaaggttccatgttggatcttaaaatttctcaatctaaaattgcacttcccaaaaacacagttg

SEQ ID NO: 41688 - DNA, 235 bp, Glycine max
  Clone ID: LIB3139-035-P1-N1-F2
gtgagttttgtttatttgaaattaacaagtagcaaagatggttggaatcatcggaggaaacaagggtcacaagataaaggggaacttggcgattatgcgaaagaatgtgttggatatcaacagcattaccagtgttaagggtgtcatcggaaccggcattaacatcattggaggagtcgtcgacaccgctactggtttcggcgtccacatcttcatacagtttattagtgccacc

SEQ ID NO: 41689 - DNA, 369 bp, Glycine max
  Clone ID: LIB3139-035-P1-N1-F4
gtgatttcagaactgcaatggtgagtaaaaatagcaaacctcaagctactgcaatgcatgtgggagctatagaaattatcattgatagtttcgcaagtcctgattgcaacatagttggtgcaatgcttttggttgatacttatcataccaatcctgaaaatgcagttcgtagtatttttgttgcgcctttcagaggcggaaggcccattcgggtggttacatttccgaataccattgtgcagattgaaccagacatgaattcaaggtttcagcttttgagtaccactaccaatggtgattttgttcaagggaaagatctcgcaatggttaaagttaatgtagcatgtgctgctgttggcttgacatcaa

SEQ ID NO: 41690 - DNA, 362 bp, Glycine max
  Clone ID: LIB3139-035-P1-N1-F5
agacaaaaaaattgtgtttttaaagattcctgtaagattgtaaaattttcctgcgcccaaatctgtctcttaaataaacttagcatttaccccctttaaaaaattcaattttttgtgtgatttttttggttgactgggtgtagaagtatctgaatcttcaatgggtagggtttaagtgaagttttgaggttttggagtatcttagttttttctttgatttgcataaaaatggagggaagagagaattttggtgttgtggtgggtgatgaggctccagagagcttccatgtggctcctagaattgagaacaacttggacttttcaagggcgaccgtgccggcgcctgcgccaccgacggaggg

SEQ ID NO: 41691 - DNA, 215 bp, Glycine max
  Clone ID: LIB3139-035-P1-N1-F6
ttacaaaaaaatttgttatgcaaagacacctgttagatcgtgaaatttttctacgcccaaaggtctctctaaaaaaaactaaacatttaccctctttaaaaaattcaatcttttgtgtgacttttttggttgactggttgtataattatcttaatcttcattcgtctggtttttaatgaatttttcatgtctttaattattcttatttttttctt

SEQ ID NO: 41692 - DNA, 334 bp, Glycine max
  Clone ID: LIB3139-035-P1-N1-F7
atggcattcgttgcctgaaaaattgttcagaagcttggacactgtaacacgtatgttaagattcacagcaccttttccacttcttgcatatcccgtgtacctttggggtaggagtcctggcaagactggttctcactttgaccctagcagtgacttgttcgttcccaatgaaagaaaagatgttattacttccacagcttgttgggctgctatgttgggattgcttgttggattggggtttgtaatgggtccaattcaacttcttaagctttatggtgttccctatgttatattcgtcatgtggttggatttggtgacttatttgcaccatcat

SEQ ID NO: 41693 - DNA, 354 bp, Glycine max
  Clone ID: LIB3139-035-P1-N1-F8
accactaatccctcgcaaagccctaaaactgagtttgtcatctctcagattagattccgatagacacagaaatggcttttcgttcaggttctctgtctcgctccttaatgtctacagctagggcatcactccgaccggcggcgccgtcgtcaacccttccccgcctccgtccgtcaccactcgccgcccctcgcgtccagtcccgccgcttttccatgcctgcttccaggaatttggggcaattagggtgcacacactcgcttttacctctgggcataacctgcatgacgtcacacattgctgtcagtgcccgtgcttgctgcgagctgtcccatgggaagaatggaaaagatg

SEQ ID NO: 41694 - DNA, 299 bp, Glycine max
  Clone ID: LIB3139-035-P1-N1-F9
ggccgtttcaccaacccatttacggtccccagaaccgagcacctttggttgcacccaacaacgacgtgggtctcgacggcatggttatcaacgtggctagtcttcttgctgggactgtcactaacccttttggaaatggctactttcaaggacccaaagaagctcctttggaagctggttcggcttgcactggggtttatggtaagggcgcgtatcctggctatgcagggaatctcttggtggaccccaccaccggtgccagttacaacgcgaatggggtcaacggaaggaagtatctg

SEQ ID NO: 41695 - DNA, 327 bp, Glycine max
  Clone ID: LIB3139-035-P1-N1-G1
tgttgttgtaactcgttcttcttcttttgttgttctgtgtttgtgtttgttttttctctcacctgaaaatgtcttgctgcggtggtaactgtggttgcggaagctcctgcaagtgcggcaacggctgcggaggctgcaagatgtacccagacttgagctacactgagtcaaccaccaccgagaccttggtcatgggagtggcacctgttaaggctcaatttgagggtgctgaaatgggtgtgcccgctgagaacgatggctgcaaatgtggaccaaactgctcctgcaacccctgcacttgcaagtgaggtgttgggagagcaagct

SEQ ID NO: 41696 - DNA, 348 bp, Glycine max
  Clone ID: LIB3139-035-P1-N1-G10
attcaaacgaaaccttccattaacaactgttcagatcattacatctacaaactaatttttaagaaaagaaatccacagaaaaccctagatctgcaacacaaccgtttttacagacacaggatatagacatccaatctcaagatttggatgaagtggagataatgcaacagccttcgcctaagtcgtgtgctcagattgactccctcatgcagaatgcatcataagttgatgaatactaacgtgaactttctgtttgtaacatgaatcatccagttgggggaatgtgtccgtctttatttggacatgccccttgcctgtaaatcaatcctgtattgaattcttaattta

SEQ ID NO: 41697 - DNA, 124 bp, Glycine max
  Clone ID: LIB3139-035-P1-N1-G11
gattttgttcctaaacacaaacaaaacccaccattgggaaatttttagatcattacagtatcaaactaaaattaaataaaagaaataaacaatactcccttattctactacacaaactatttta

SEQ ID NO: 41698 - DNA, 364 bp, Glycine max
  unsure at all n locations
  Clone ID: LIB3139-035-P1-N1-G12
actcgatcaactcaacacaaaccaaaactcaagctaaaattctcactctctctctcatctcgagatcatagtatcatattcaatatcatttcataccaaacacatggctttggaagctctcaactcaccaacaacaaccgctccatcttttccctttgacgacccaactattccatgggcgaaacgaaaacgttcaaagcgttctcgcgaccatccttctgaagaagagtacctcgccctctgcctcatcatgctcgctcgcggcggcaccaccaccgtcaacaaccgccacgtcagccctncaccgncacagccacagccacagccgacaccagatccttccaccaagctcagttacaaatgc

SEQ ID NO: 41699 - DNA, 317 bp, Glycine max
  Clone ID: LIB3139-035-P1-N1-G2
ctccattttagggttcactttgtatttgtaataccatttcctcgcgcggcactgcttgccgccgccgccgccgccgtcagcgtcagcaccaatggcagacgcatcttctctgccgacggatcaactcgccgccatcaccctcgacgaggttcccaaagctaatttctccgaccgcgtccccatccgatccatcatctcccgcaccgacggcggctcgggcctcgccggcaggaaagcgcgcgttggcggctgggtgaagacgggacgcaaagccgacaaggacgctttcgcgttcctggaaatcaacgacggaagct

SEQ ID NO: 41700 - DNA, 325 bp, Glycine max
  Clone ID: LIB3139-035-P1-N1-G3
ctcaatttataatttttctaccgcattacattaggtggcatgtgtataccttgttgatctacattctcccatcttttctcactgctgaaattaaatataagcggaatttgagtaatattcatatttccggcttattttacgacggcagatacaaattctggactaaacacgagaaaaatcttgctttgacagaagaggaaaagatggaagtgattagaaatagaggcattcctgctgatgttcttgcaaagcgagctcatgaatttgaaaaacatgttgctcatgaaagcctcaaggatcaaattcctgctgaagacaagttgga

SEQ ID NO: 41701 - DNA, 267 bp, Glycine max
  unsure at all n locations
  Clone ID: LIB3139-035-P1-N1-G6
ggaattttagtgttcaaaactggagattggatcacacttatgcaaaattctccaattagtaacttgttgagagttgctgcttggaagaaaggttgtttaatggtcaagattgtgatgtctgggaatgcagcagtcaaaaggagtgattgggcctcattgggacaagtgtttttaacaaacagcaacagtacagagcattttgatgcatgtaagtggacaaaatcaggaccacattcctgggaattaatcttcccantagaggtatgt

SEQ ID NO: 41702 - DNA, 271 bp, Glycine max
  Clone ID: LIB3139-035-P1-N1-G7
caagcttttcacatggaaatcggctcccccgcattccttaccctcgaagactattcttccttcttcttccctgacatggatcccattcccaattccaatgtcaacaagcgtcgtgcaaacaacgaccagttcgacttaaatgactccgcattcagccacctcctcaattccatcatggatcctaaccatttccaacaccaatccaaaccaatccaattcgactcctccccgaccaagagagctcgccgtgacctcctcgttctcgaagaca

SEQ ID NO: 41703 - DNA, 367 bp, Glycine max
  Clone ID: LIB3139-035-P1-N1-G8
ttttcatacaacacattctttctagacacgcaacacctagaagatttccttattctttgtggtgctaaaccgttgggatatagcaacaacatgttaggaatgaagagacatagagataatgaagggtcagagagcttagatttggcaaaatgtcttgtgctgttctcttgtccaatagaaagcaacaaggcacaacagaaaggttttggggctgtggaatttgagtgcaagacgtgcagccgcaagttctcttcttttcaagcactgggagggcacagggcaagccacaagaggcagaagctagagggggaagaactcaaagaacaagccaaaactcttagcttgtggaacaaaccaaaaatgcacg

SEQ ID NO: 41704 - DNA, 367 bp, Glycine max
  Clone ID: LIB3139-035-P1-N1-G9
gtaaatggtcgttatgatgcacagatttcagtatttggacacaaattgcagaagaaattagaggattctaaagtgtttgttgttggatctggtgctttgggatgcgaatttttaaaaaatcttgctctcatgggagtttcttgtggaagtcaggggaagctcactattactgatgatgatgtgatagagaagagtaacttaagcagacagttccttttccgtgattggaatattggacaggccaagtccacagttgctgcttcagctgctgcagctataaatcctagttttaatattgaagctctacaaaatcgggttggttctgaaactgagaatgtgtttaatgataccttctgggaaaacttga

SEQ ID NO: 41705 - DNA, 313 bp, Glycine max
  Clone ID: LIB3139-035-P1-N1-H1
tgggaatgcagcagtcaaaaggagtgattgggcctcattggtacaagtgtttttaacaaacagcaacagtacagagcatttcgatgcatgtaagtggacaaaatcggaaccacattcctgggaattgatcttcccaatagaggtatgtggtcctaataatggttttgaaatgtggagttctgagtgggcaaatcaaacttcatggcacttgagtttccttattgacaatcccaaacagtctacagtttttgatattctcttgggaatttctcaagattttgaaattgctggtaatactcttatgccagctttt

SEQ ID NO: 41706 - DNA, 362 bp, Glycine max
  Clone ID: LIB3139-035-P1-N1-H11
cccgggtcggatccggacgagctcaaggaggcgttcgaggtgttcgacacggatcgcgacgggaggatctcggcggaggagctgcttagggttttcaaggccatcggcgacgagcggtgcacgttagaggagtgccggcgcatgatagagggtgtggacagaaatggggacgggttcgtctgcttcgaggacttttctcgtatgatggagctgcagcagcagcgatgatgatgacgtggttgtgattgtgatgatgtcagatgatgatcatgatcatgttatgacttatgatgtgaaaatatatataagaaggaaggcaacttcattattttttttaatcccccttctgtcatttgcgtttg

SEQ ID NO: 41707 - DNA, 179 bp, Glycine max
  Clone ID: LIB3139-035-P1-N1-H12
gttctttttatgtggagatattttgttggagatctcgtctttgaagtttctaagatgacttctccctacattaaatgtacagtctctttcttcatagcatttggaaatttggctgatgataccatcaattttgaggcttttccccacaagctggtgcagtttggagagattcaggaaaa

SEQ ID NO: 41708 - DNA, 359 bp, Glycine max
  Clone ID: LIB3139-035-P1-N1-H3
caggtttctccgcctgagccattaagagtggacgtagagactacacctggatgggagacgtctgtagctcacggccaaatatcagagaacgttacagcaagggatccaaacgagcacacgcctccgtccgaaacacctgttgagcggcacagtcctcagcttccggattcaagcacagcacaaggtacgacatttacgtctcccgttgagtcccttacaactacaagagcgcgatcgtcccagttgttccagtcctcaccatcggcagggtctgtcctcgatactccactgaagcaggccgatacgcctaccggacctcagagcctcgcatcatcgcccccaacagccccgcgatcagt

SEQ ID NO: 41709 - DNA, 338 bp, Glycine max
  Clone ID: LIB3139-035-P1-N1-H5
tcgaaatcacgttccgctttctttccattgttctctccgatcccagaccttactccaaccacagagaatggactcgccggatagagtctctcatcatgcatcaaattgaaatcattgccatactttgtgaagaagaggaacaaaattccgacacacgtggcactgcaccaaccgctgatctcagcagcagcaatagcagcgtgagcagaagctacagcgaggcgagcctgcttcctcggcttgccacgtggtacaaatccagggacgtggcgcagaggatccttctctccgtggaatgccaaatgaggaggtgctcctacacgcttggtttgggcgag

SEQ ID NO: 41710 - DNA, 363 bp, Glycine max
  Clone ID: LIB3139-035-P1-N1-H7
ccggcttattttacgacggcagatacaaattctggactaaacacgagaaaaatcttgctttgacagaagaggaaaagatggaagtgattagaaatagaggcattcctgctgatgttcttgcaaagcgagctcatgaatttgaaaaacatgttgctcatgaaagcctcaaggatcaaattcctgctgttgacaagttgtattctactaaggttaataagtttgcaaaaattatgaaccttagacaaagtgttgttggtgatcttaaacttcttactgatgggaagttgtatgagggtaagcatattcctgtatctaatattagtgcaggggaaaatcatgtagttcaaatacccttaatggcac

SEQ ID NO: 41711 - DNA, 367 bp, Glycine max
  Clone ID: LIB3139-035-P1-N1-H8
gtcctgcctttcagattcgcactgtacttttgagtatgcaagctcttctaagtgcaccaaacccagatgatccgctttctgagaacattgccaagcattggaaatctaatgaggccgaggcagttgaaacggccaaggaatggacccggttatatgctagcggcgcttgatgctttggtggaaacttttggcttcaaataactatagtgtgggagtgtatgctatataactgtcaaattgaaatggaaatttggaggaattgtctaaactattttggagttaatattccccgtagcttccggttacctgttaattactttctttctcctggaagcattatcttggaacttgtatgaaaaatatgtga

SEQ ID NO: 41712 - DNA, 412 bp, Glycine max
  Clone ID: LIB3139-036-P1-N1-A1
tttcttttttccataaaactcacaaccaaatggagaaagcagaagaagaaagcgttgatttgggtgaaatatgtcttcggccccttcaagtctcagacctggatgatctgttggtgtggaccagtgatgaaaaggttgcggctttttgctcttgggatccttacagcagcaaagacgagggcattaacttcatccagaatatagcaagcaagtttctgtggtgcagagcaatatgcctcaaggatcgtgctattggctgtatttccctgtcctcgaattcagagcacgataaaagcaggagcagatccgcggaactagggtatgtgctgggttccaaatactggggcaaaggggttgccacggtggctgtgaaaaaagtggttaaggcttgcttgtctgagttgccacactt

SEQ ID NO: 41713 - DNA, 408 bp, Glycine max
  Clone ID: LIB3139-036-P1-N1-A10
cagacctttgtcaaacactggcattcaagctgggtcaaatactccggctgctccgcatcatcgtcggaggcccaagtcaacaaaaaggccttcaagaaggaggccgtcaagctggagaagcttcgccgacgccaggaaatcgccgccgtgttcgacgccacggccaacctctccgtcgacgaggaggaccccctcggcgggaactactgctacgtgccgctggtggagctgcagtccaagacgccgtctgacgttggcgagtggacgcgcgtggaggcgctcggcggcgcgctggagaacaattcggtgttgatccgagggagggcgcaggcgattctccccgtcgggaagaagatggcgtttctggtcatcagagagaacggtttcacccgtcaatgcttggtcaag

SEQ ID NO: 41714 - DNA, 414 bp, Glycine max
  Clone ID: LIB3139-036-P1-N1-A11
cacacactctcatagctgtagcggcgacactaagatcggagaaagaatggcgaaaacgacgtcgttgctgctctttacactgctcctcttcggaaccctagctctcatccaggcgaagaaatcgaaggaggatttgaaggaggtgacccacaaggtttactttgatgttgagattaatggaaaagaagcaggtcgtattgtaatgggtctttatgggaaggctgttccaaaaactgcagaaaacttccgagcactttgcacaggggaaaagggaactggtaaaagtggaaagcctctccattacaaaggtagctcattccatagaattattcctagctttatgcttcaaggaggtgattttacacaaggaaatggaatgggtggagaatcaatttacggagagaagtttgctga

SEQ ID NO: 41715 - DNA, 405 bp, Glycine max
  Clone ID: LIB3139-036-P1-N1-A12
caacaggctcactgagaaaacaatttttacttgcagagatttggacatcttggttgtctattatacaatagcaactcaatttagaaaatttctaccgcattacattaggtggcatctgtataccttgttgatctacattctcccatcttttctcactgctgaaattaaatataagcggaatttgagtaatattcatatttccggcttattttacgacggcagatacaaattctggactaaacacgagaaaaatcttgctttgacagaagaggaaaagatggaagtgattagaaatagaggcattcctgctgatgttcttgcaaagcgagctcatgaatttgaaaaacatgttgctcatgaaagcctcaaggatcaaattcctgcttgtgacaagttgtattctac

SEQ ID NO: 41716 - DNA, 244 bp, Glycine max
  Clone ID: LIB3139-036-P1-N1-A2
tcactatgttttttatttctcacaaccaaatgatgaaagcagaagaataaagcgttgatgtgggtgagatatttcttgggataatgaaagtctcaaacctgcatgatctgatggcgtaaacttgttataaaaacgccgcttttaaataaacttggcatccttacagtaggaaacactacatcgttgactctattcaaaatatactaagggtgttaatgttgagaaagcaatatgtcttaaggat

SEQ ID NO: 41717 - DNA, 322 bp, Glycine max
  Clone ID: LIB3139-036-P1-N1-A3
gcacaaggttcacagttacttcgatcgctcgctcgagagcgggcgctacactctcaagtatcgcggcagcatgtgggggtataagagatttttcaaaccggctcaacttgaggcgtcaactttcctcaaagaccaccgcttggagattaaccggaccgtgggtggtggggtgtgccccattggatggtccaaggtaaacacacaacacggttcccagagtgatatttgggcacacttttctatatgcttttagagaatgagggggtctcatattacactctctgtggggggggaaaagggtcatacacataaactcgggttg

SEQ ID NO: 41718 - DNA, 413 bp, Glycine max
  Clone ID: LIB3139-036-P1-N1-A4
acctacctctttttcttttttctaaacaacttcaccttcttcctcctcgatcatgtctcacttcaagggcaagtaccatgatgagcttatcgccaatgctgcgtacattggcactcctggaaagggtattcttgctgctgatgagtcaacagggacaattggcaagcgtttggccagcatcagtgtagagaacattgaatccaacaggcgagctcttagggagctgcttttcactgctcctggtgttcttcaatatctcagtggtgtcatcctctttgaggaaaccctctaccagagcacagctgcaggcaagccctttgtgaatgtcttgaaggaagctggtgtgcttcctgtcatcaaggttgacaagggcacagtcgagcttgctggaactaatggagaaaccaccactc

SEQ ID NO: 41719 - DNA, 396 bp, Glycine max
  Clone ID: LIB3139-036-P1-N1-A5
ggctcgagttcacttgatctcatcataatcgtcagcgtcaattgaagaagatgccgatcagaaacatcgccgtcggaaggcctgaagaggcgactcaccccgacacgttgaaggcggctttggctgagttcatctcaaccttcatcttcgtgttcgccggctcaggctccggcatcgcctacaacaagctcaccgacaacggcgctgccacccctgccggcctcatctccgcctccatcgcccatgcattcgccctcttcgtcgccgtctccgtcggcgccaacatctccggcggccacgtcaaccccgccgtcaccttcggcgccttcgtcggcggcaacatcaccttcctccgcggcatcgtctacgtcatcgcccagctcctcggctccatcg

SEQ ID NO: 41720 - DNA, 417 bp, Glycine max
  Clone ID: LIB3139-036-P1-N1-A6
tgaggttactgatgctacgttgtttgcatgcttttctgtctatcccagttgttcagatgcaagggttatgtgggatcagaagactgggcgttcaaggggatttggatttgtttcattccgtaaccaacaggatgcacaaagctctataaatgatttgactggtaagtggcttggaagtagacagatacgttgtaactgggcaacaaaaggtgctggtggtaatgaagagaagcaaaactcagatgcaaaaagtgtggtggaacttacaaatggctcatctgaagatggtaaagagacatctaacagtgatgctcctgagaacaatcctcagtatactactgtttatgtgggtaaccttgctccagaggtaactcaacttgatctccatcgccacttccatgctcttggggctggagt

SEQ ID NO: 41721 - DNA, 150 bp, Glycine max
  Clone ID: LIB3139-036-P1-N1-A8
gcacaaggttcacagccacttcgatcgctcgctcgagagcgggccctacactctcaagtatcgcggcagcatgtgggggtataagagatttttcaaacgggctcaacttgaggcgtcaactttcctcaaagacgactgcttgaagataaa

SEQ ID NO: 41722 - DNA, 411 bp, Glycine max
  Clone ID: LIB3139-036-P1-N1-B10
ctcctatttacacccctcaaatctgctttcaactttcacactcacaccaccaccatgacccttcctcaatcatttggctgtggacttgtgcaagcacccttggtgacaagctctggtcttcttactaaagtttggagtgttatctcttctcgtgatgaagacatagtttcatactcaggaaataatggactgtccttgaaagtttctgaggattcgggtttgacggttgttgcgtttgaggtcaacccggattttgatcttcaatctacagttgtttctttctctgatcccaaggagaataatttgaaccgctttgagtttctttgtaccaagaaacatccagatttctctgtcaacaagtctgtagttgatcttttttctaaaaatcttccgaggcttgatgagttgaag

SEQ ID NO: 41723 - DNA, 407 bp, Glycine max
  Clone ID: LIB3139-036-P1-N1-B11
aaacgcgtcaacgaaggcggcttctctctctcgtctcagcttttctcctttcgttcgctttcgcttttcgtgtcgccggtaaggcaattcgatacctctgaaccctaatcagacgcagccaccgtttagggtttccatcctcctctcatactttgcctgattgctttcgtgtttcgtttctctcttttcatttcaatttttgatacggtccgctgttgattgtattatatcctggaaaaagtaaagaacattataattggtttttgtcgtgtggatttttgaatgattgattagggttgtgtgaatcattgaaaaaaaattgaatcctccgttctgatttttccggagggttagggtttggaaatttggggatttttttagggtttgggtttgaaatacatttctct

SEQ ID NO: 41724 - DNA, 414 bp, Glycine max
  Clone ID: LIB3139-036-P1-N1-B12
ctcgagccgattcggctcgaggaagcaaccacgcatagcgcacacccaaatttcaattcccataattcaaaacgacgatccctctcaggattaaacgacaactaatcatcttcccaatcaccgcaccgccacctcgtgatggcggcaccaccacctcctcctccttcgacgccgtcgtttttgtcgccgacgcagaggtacgcggcgggcgcattgttcggcctggcacttcacgaggcccacctcaaccaaaccaacccgttaccgttacccgcttcggaggactcgctctctgaggaacaacgaaccagcagtagcagtggctccagcagcgactccgtttcggaagacccggatctttgggtccacagcaattcgggtttgctccgccccgtttttaagtttctagatatt

SEQ ID NO: 41725 - DNA, 412 bp, Glycine max
  Clone ID: LIB3139-036-P1-N1-B5
attgatttctccctcttcgctctctctcagtgaccagagacagatgatgatggagatggcgaagcgaaacgctgtcgttgcggcactcgcggcgttggtgctactcgcggcgagtgtggcggtggatgctcaggagaactcggacgtgaagacgctggtgaagtacaagcacgggaagaagtactgcgacaaaggatgggaatgtaagggctggtcaatttactgttgtaacctcaccattaccgattatttccagacctaccagttcgagaatctgttctccaagcggaactcgccggtggcgcacgcggtcggattttgggactaccactccttcatcgccgccgccgcgctttttgagcccggagggttcggcaccaccgggaacaagacgatgcagatgatggagatc

SEQ ID NO: 41726 - DNA, 413 bp, Glycine max
  Clone ID: LIB3139-036-P1-N1-B6
gagaatccgaggcgaatagaagagaaaaattaagatggaggggaaggagcaggatgtgtcgctgggagcgaacaagttcccggagagacagccgattgggacggcggcgcagagccaagacgacggcaaggactaccaggagccggcgccggcgccactggttgacccgacggagtttacgtcatggtccttttacagagcagggatagcagagtttgtggccacttttctgtttctatacatcactgtcttaaccgtcatgggagtcgccggggcttaattttaagtgcagtaccgttgggattcaaggaatcgcttgggcccttcggtggcatgatcttcgccctcgtttactgcaccgctggcatctcagggggacacataaacccggcggtgacatttgggctgttttt

SEQ ID NO: 41727 - DNA, 411 bp, Glycine max
  Clone ID: LIB3139-036-P1-N1-B7
ctgtttcagaagttgaatgtagtttggtgatacggagagaggttgccctgtcctgtcggtggctctgatctatgtatgacatttccacgatgctatatgcttgcttcgccatttcatcactagtgtcttcttgtcttggaagttgctatggaatctaggggttcaacaagctaaataaaagaatagtttgtttctgaaagtaaggtgataaagcatggagtttttgaaaatcaagaagttcagaaaatctcagaaagcagatggagaaaaggatttggcagacaaggcagtgcctgagcctgaggaaccaaagctgaacaccgactgtcctgatcagtgtaaatcagaaaacgcagattctgcaggtgaagctgaggatgatgatgattttattactaatgaggttaagag

SEQ ID NO: 41728 - DNA, 411 bp, Glycine max
  Clone ID: LIB3139-036-P1-N1-B8
cttgagccagacatgttcaggaacgctgcttcacgtcttagggtcatcagtgcccgttcgtgcagcagcagcaggatacctgccagtgccagatttgcaagttccgttgccacacaacaatcctcttctggtttgggtggtttatttggatggctcactggagaccgatccagttctttaccatctctggatttcccgcttccgggcgttacacttcccccttcattgcctgattttgttgcgcccggaaaaactattattactacactcccaaatggactcaaagtggcctctgaaacatcaccgactcccactgcgtcggttggcttatatgtagattgtggttcaatatacgagactccgataagttttggggctacacatctgctagaacgaatggctttcaagacc

SEQ ID NO: 41729 - DNA, 393 bp, Glycine max
  Clone ID: LIB3139-036-P1-N1-B9
gaaaggattgtcacatgcacttccctttactaacgtttcaacactagatcagctggaagatgttaaaagggtgttgtcatagtgtatatattgatagaaaaaagaagaagaaggaagtataatagaaaggaaaaggaaggaggggggaaataaataaagaaagatgcaagagttgatatacaaagttggtgagggtgactaaatcagattcttgagtgtgtgattgggtcttttggaaggcatgattcgttcattcattcagtgagcattacttgtttatgtaaagctttttagatttggcctgggactcaaaatcacacattattgcaaatatttttgtttttggtgaaattcattattggaagtattattgcaaatatttatcgtattctc

SEQ ID NO: 41730 - DNA, 414 bp, Glycine max
  unsure at all n locations
  Clone ID: LIB3139-036-P1-N1-C1
tggtcacaacttcattatgtttcgtgcaataatctggaaatgcaagaagcttatcttgtcaatctcgtaaatgtgttacgagaattgtatttgcacagtccagaggaagctcgccaattgagaaggaaagctctctctcgtattgaatggctgcaaaaagctgatgtgcctaccatagcacagattgaagagttccattcgatgcagaggatgatgaatgctcctgattcaaatgataatattgatctactgttgagcattgatttgttgggtttacaaggagcaggtaaagcttttccaaacaagattgtttttgatgataagctngtgttggctaacacacaagaattctttgatggaaattttccagtggattcttggttaccaatttttgtgaattgtctctatcctgta

SEQ ID NO: 41731 - DNA, 404 bp, Glycine max
  Clone ID: LIB3139-036-P1-N1-C10
attccaatatattccattctctctgggtatttccctacctctcccttcaagatgcagatctttgtcaagaccctcaccggcaagaccatcacccttgaggtggaaagctctgacaccatcgacaacgtcaaggccaagatccaggacaaggaaggaatccccccggaccagcaacgtctcattttcgccggaaagcaacttgaggacggccgtacccttgctgactacaacattcagaaggagagtactcttcaccttgtcctccgtctccgaggtggcatgcaaatctacagtaagacactcaccggcaagaccataaccctagaggttgaaagctccgacaccatcgataacgtcaaggccaagatccaggacaaggagggtatccccccggaccagcaacg

SEQ ID NO: 41732 - DNA, 98 bp, Glycine max
  Clone ID: LIB3139-036-P1-N1-C2
gaacatatatattttatatgatgaaacaaaaaaaaatgttctctcaagattattacatatttctagcataaatcttgagagaaatatgtaataatctc

SEQ ID NO: 41733 - DNA, 389 bp, Glycine max
  unsure at all n locations
  Clone ID: LIB3139-036-P1-N1-C3
gtggcttgaaaggtttgcttatgtgaacaccaccatctatccagtcactgccattccccttctcatttattgtatcttgcctgctgtctgtctgctgactaataagttcattattccacagatcagcaaccttgctagcatatggttcatctccctctttctgtccatctttgctactggaatcctggagatgaggtggagtggtgtcggaatcgacgagtggtggaggaatgaacagttttgggtcatcggtggtgtctcggcacatctctttgctggtttccaaggcttgctcaaagtgcttgctggaattgacaccaacttcactgtcacctncaaggcctcggatgaagactgagactttgcccgactatacatgttcaaatgga

SEQ ID NO: 41734 - DNA, 411 bp, Glycine max
  Clone ID: LIB3139-036-P1-N1-C4
atttcatccaattcttgctttttcaacgatcacagtgttgacccttgatgggtttttctcgtcgatcataagcatacccgggtttgtgaaaaaggtttctcctttccacgtgtggcttcacttgtcatcgatcctgagctccatatagcttgcaacgctgtggaactgtgtactttgttgctccttttctctgtttccccgtgtgtcaattcagcttaggccataactggatcacatgaaaatgaagccttcttcttccaatgaagaaaaccatgacgtggaaaatgccaagttggacaaagtcaaagttagaactcccagggaatggaagggtagttaaattgcacaatcaggccttgttgtctggacttgcatattgcttttcctcatgtggcatgatattggtcaaca

SEQ ID NO: 41735 - DNA, 203 bp, Glycine max
  Clone ID: LIB3139-036-P1-N1-C7
tcaggaaaatgttgttttgaaattttcacaggaggaatggctcacagcttggtcaactcaggtgcgtcctgcaacagctttggtgtgtgcggggtgcacatatgtgtgcgcaggggcgcgagagagtacagtgtacacaacccggggagattgtgacatgggtgtcaagtagacacccatacacaatatgtgcgcatatgggc

SEQ ID NO: 41736 - DNA, 361 bp, Glycine max
  Clone ID: LIB3139-036-P1-N1-C8
ataagcttgtgttggctaacacacaagaattctttgatggaaattttccagtggattcttggttaccaatttttgtgaattgtctctatcctgtaagtcaattaccttcagaagctgtcgttgtaaatgttacatgtggtagtggacgtggtggtttacccaccactgcttggattagttctgcagttaacaatcgctcctcagacatcaacaaaaggattcgcacagcacttgggaaaggtaagaaaattgtttttcttactagagttgatccttttccagtagctttattggctcgcctttttggcgttaagaatgaaattctgagttttaacgccactaaccctatgcttacgcgact

SEQ ID NO: 41737 - DNA, 395 bp, Glycine max
  unsure at all n locations
  Clone ID: LIB3139-036-P1-N1-C9
gatggtttgcgaacctgatgaaactgatttgaacatacgcatacctgctgtcatgcttccactagatgcaggtacaaggctcgaaaaaatgttggcaactacttcatctgtgtctgtgcagctgtactcgccacttcgaccagctgttgacgtagcagaagtatttctttggatgatggcagttcttaccatattgtgtgcatcatattggtcagcttggacgaccgagaagcagctattgaacaggataagttgctaaaggatgcttcagatgaactcccaaacactaaatatgctagtgttagtggagttgtaaatatgaatgtgaaagctacagtcctttttgttgtatttgcttcgtgtttcctgtttatgctntacaaactgatgtcgtc

SEQ ID NO: 41738 - DNA, 409 bp, Glycine max
  Clone ID: LIB3139-036-P1-N1-D10
cttggcgagcgtttatgatacagtgggattaagcttgctcttcctgcagaaagcactactggaacatgttttgtacaacaatacattgaatctatattggctcttcaagaagccagctcacaaggtgaatcccagacacagattcctcttgttattatgacatctgatgacacccatggacgtactttagagttattagaatcaaattcttattttggtttgcaacccacgcaagtaacacttttaaagcaggaaaaagttgcatgcttagaagataacgatgccaggcttgcattggaaccacaaaacaagtacaaaattcaggtatgaagctgggttgaaatgggttttattttttcaagatacaaatgggcttttattcaaggcaattccatcagcactgggcgtc

SEQ ID NO: 41739 - DNA, 409 bp, Glycine max
  Clone ID: LIB3139-036-P1-N1-D11
ggctccctacaactcctggccctttgctccacacacaaccctctctctccaatgctctcattgctgctctcaagagagcacaggctcaccagagaagggggtgcattgagcaacaacagcaacaacagcaaccacctcttctcaccatcaaggttgagcttgaacagctcatcatttctatccttgatgaccctagtgttagtagggttatgagagaagctggtttttcaagcactgttgttaagagtaatattgaagacacttcttcttcagcaccttctgttttctacaacagttctggtggtggtgttttctcttctcctggctcaccttctcccagtgagaagaataatgttttcaggcagaaccatttcttagctgcttacacttctaatgagtttagtagtac

SEQ ID NO: 41740 - DNA, 392 bp, Glycine max
  Clone ID: LIB3139-036-P1-N1-D2
ctcgagccgaatcggctcgagcggctcgaggaaaggacacacctgctgttggcttgttgttcaaggatggcaatttgtaagaaagatgtttggagagttgaatgtggaatcccttctggatttccgctcacagttatttgtaatagcatttttaatgagatgctcattagatatagctatgaaaaattactgcgccaggctaaagctccaagtatgtttttacaatccttcaaaaattttgtttctttgtgtgtgtatggtgatgataacttaattagtgttcatgaatatgtcaagccttactttagtggttctaaattgaaaagctttctagctggtcataatatcaccattactgatggtattgacaaaactagtgcaactttgcaatt

SEQ ID NO: 41741 - DNA, 406 bp, Glycine max
  unsure at all n locations
  Clone ID: LIB3139-036-P1-N1-D3
cactcccaagccaaattgatgtcgtcttcggagtcccaagaccccgccgccgccgcagcatcgtcggaggcccaagtcagcaaaaaggccgccaagaaggaggccgccaagctggagaagctccgccgacgccaggaaatcgccgccgcgttcgccgncacggccaacctttccgtcgacgaggaggaccccctcggcgggaactacggcgacgtgccgctggtggagctgcagtccaagacgccgtcggacgttggcgagtggacgcgcgtggaggcgctcggcggcgcgctggagaacaattcggtgttgatccgagggagggcgcatgcgattcgccccgtcgggaagaagatggcgtttctggtcatcagagagaacggtttcaccgttcaatgcttggtgc

SEQ ID NO: 41742 - DNA, 384 bp, Glycine max
  Clone ID: LIB3139-036-P1-N1-D7
gaagcgcgagagcctttgttgttcaagatgagagctaagtggaagaagaagcgcatgaggaggttgaagaggaagcgccgaaagatgagacaaagatctaagtaggtgcttgaacaaggagtggagatgatgtgcttttccatctgctaccagcttcatgacattttatgctgtcatggctcttatgatgatcttgaggtctagtggcgaggggagcttccatcttgactttagtttagctttactggtctaaagattgctgttttagtgtgggttaagttatgatattgagagttttgtgttatctaattatgtactggtacgttttgtatactttttggtttatcttaatagcttaaatattagtattttgagacgtgcatg

SEQ ID NO: 41743 - DNA, 402 bp, Glycine max
  Clone ID: LIB3139-036-P1-N1-D8
gtcaaccctttgagagttagaatggctgctgctattgaaatccccacaatagtgtttccaaactcctctgcccaacagaggatgccagtggttggaatgggatctgcccctgacttcacatgcaagaaagacacaaaggaggctatcattgaggccgtgaaacagggttacagacacttcgacactgctgctgcttatggctctgaacaggctctcggtgaagctctcaaggaagctatccatcttggcctcgtctcccgccaagacctctttgtcacttccaagctttgggtcaccgaaaatcatcctcatcttgtccttcctgctttgcgcaaatcacttaaaactcttcaactagagtacttggacctgtatctcatccactggcccctgagttctcag

SEQ ID NO: 41744 - DNA, 371 bp, Glycine max
  Clone ID: LIB3139-036-P1-N1-D9
gagatgcgtaagcgcatgggtatcaaggctgaggtgcccggtgttgagaactactacgacaagctgtaagcgaacttaccttgaatggatgatatcagatcctgtgtccttgtggatgcagaacctcaacaggctgctagcgaagacctgggacgcctgcctgagccccatagagaagccccttgcgaagacatcacggtggccttttgtcaaatgacaagccgccgagacaaggaaccaaaaaaatatggtaaataaattttgagggctagattgaggccataatcacggggaagctctccgcttggcttttatgtagtgatgtgccgatagtggaaacatgacaaaagaaatgatgactttttatgttc

SEQ ID NO: 41745 - DNA, 337 bp, Glycine max
  Clone ID: LIB3139-036-P1-N1-E1
attgttcttcaattctttccatcgttaacaaccttcattccatcctcgtatcggttattattaattttaattccacgtaatgggcaactccgtttcatgccccttggcgcctcctttgatgaagaattccaaggccacgagggttatcatccccaccggtgaagtcaagcaattcaaagagatcgtgaaggctgcggaactcatgctcgaacaccccaactattttttggtcaattctcgttctttgcatataggaagaagattctctgctctcggtgctgatgaagagttggagttcggcaacgtgtatatcttcttcccgatgaggagagtgaac

SEQ ID NO: 41746 - DNA, 406 bp, Glycine max
  Clone ID: LIB3139-036-P1-N1-E10
gcaggacactgtggagtccactgatttgttggatttgtgtcattagtttctttgttttggttactctaaacaagataattcccccctaggggcatatcagtttgcagatcacagtgaccatttgtgtatgaatttctaaggtcttgtcatggagtgtaatgcaaaatctctcgggcaatgggactgggagcacttattcttcttcaatacaaaagcagctgaaaatccaaggttacaaccaactgattgtagcagtgaagcagatcgggaaatcaacgttggaatgttgcatccatcaggtggtagtgcttgttctggctctgaactaatacatgcttcttcatcaaggagctcaaaatcagcttccaacaattcatcatcaaatggggatagcaaggcatctata

SEQ ID NO: 41747 - DNA, 396 bp, Glycine max
  Clone ID: LIB3139-036-P1-N1-E11
ctagagttaagagaggagatgggagaaatagaaagagaggagatgtcgtccacaaggtgggagaaggaggaggaagaagaagaagacgaggcccaaatggatatctggaagtacatatttgggtttgcggaactggcagagataaaatgtgcgattgagcttggcatagctgaagccatagagaagcatggaagtcccatgacactatcggcgatatcatcaagtttagggtgtgatacttcacatctgaagcgcatcatgaggttcctggtgcaaagaaagatattcaacggcgacgggcgcagcaggggctattctcaatcagctctgtcttgtctattgatgagaaacggcgaacacagcatggctcgttatctcttgctggagagtagtcct

SEQ ID NO: 41748 - DNA, 407 bp, Glycine max
  Clone ID: LIB3139-036-P1-N1-E12
accattgaattttgattctagcaagcagagcttttgtcaattttctattgaccttctcggtggaggaattttagtggacaaaactggagattggatcacacttatacaaaattctccaattagtaacttgttgagagttgctgcttggaagaaaggttgtttaatggtcaagattgtgatgtctgggaatgcagcagtcaaaaggagtgattgggcctcattggtacaagtgtttttaacaaacagcaacagtacagagcattttgatgcatgtaagtggacaaaatcagaaccacattcctgggaattaatcttcccaatagaggtatgtggtcctaataatggttttgaaatgtggagttctgagtgggcaaatcaaacttcatggcatttgagtttccttattg

SEQ ID NO: 41749 - DNA, 235 bp, Glycine max
  Clone ID: LIB3139-036-P1-N1-E2
ctctctctctctctctctctctctgaacaagagcctgcagccagagttagagggaaatcaagcacggctcaatcatcgaatcatagagaacacatacagaagaaggaaaagtggaaccctggaagctgatattgtaggaaggtttgcaagaaaacggattttgttttgagatatatgcatgtgcaagtgcatagggaaattaacaaaaaataagatgacatggtgcaatgactct

SEQ ID NO: 41750 - DNA, 395 bp, Glycine max
  unsure at all n locations
  Clone ID: LIB3139-036-P1-N1-E3
ctttttctttttttttgatcgtttgaaancattttcatcataagagaactatctacaagtgtttttacaagcttttccttttttctcccaccaaaaaagtactccaataaactagaggattttttaaaagaaaaaaattttgaaaagggtcccaccctttccctccagacaccagttcctttacaagccaacaccagaccaacatcgagcacatgactgagcggcaaacccttgataactgccatttgaatattttaatagagtcacggctatatgtgaaaggcaagagggaaaaaacactaacgactttttgaactaaacatatttgcacccaacatacaacgctcttttttccctaatatggcctctgttcatgagagagctaaattcctaaa

SEQ ID NO: 41751 - DNA, 404 bp, Glycine max
  Clone ID: LIB3139-036-P1-N1-E4
gttaaggttaatgtagtttgtgctgctgtgggcttgacatcaagttacactccaactccattgttggaatctggtttgcaaaaagacagagggttaattgtagagtattttggaaggatgtcttacgttgctcataacgttaatcagccccaagagaaagatttgttggagggaaatttttcctttgatattaaatctcgctctagattggaaaacgtttcctctacaaaagctcaatttgttagtggaaaaaccttcaaatatgatataattggtgctggttcacattcttcagaagattttcctgaaaaggaagatcaagaaaaacccaaaaagattgatgccagattgagacaaagaatagatcctcaatacaatgaggttcaggctcagatggaaacaaa

SEQ ID NO: 41752 - DNA, 410 bp, Glycine max
  Clone ID: LIB3139-036-P1-N1-E6
ggcttttattgggttgaactatgatctgaaatctccaaagtttgagttcttgtcacatgcaaagccttcactttttgaataccccaagcctactactgttcccaccactacttcaaccgtgaaacttcccactgctgttctgtcaacctcagctaaggctaaagctagggctaagaaagctgaagaacagaaggctaatgctgaaatttcatctgctcccgactctgcatcagctgtcccaagtggtggaaaaggaaagtcgtctggtgagaaggatggagactcaatgcaggttgatagcccaacaacggagaagaaatcagagcctgagccatcgtttgagattctgactaatcctgcaagggtggttcctgcacaggagaagtttattaaatttttgcaggacagca

SEQ ID NO: 41753 - DNA, 406 bp, Glycine max
  Clone ID: LIB3139-036-P1-N1-E7
gaaaatttctaccgcattacattaggtggcatctgtataccttgttgatctacattctcccatcttttctcactgctgaaattaaatataagcggaatttgagtaatattcatatttccggcttattttacgacggcagatacaaattctggactaaacacgagaaaaatcttgctttgacagaagaggaaaagatggaagtgattagaaatagaggcattcctgctgatgttcttgcaaagcgagctcatgaatttgaaaaacatgttgctcatgaaagcctcaaggatcaaattcctgctgttgacaagttgtattctactaaggttaataagtttgcaaaaattatgaaccttagacaaagtgttgttggtgatcttaaacttcttactgattggaaagtgta

SEQ ID NO: 41754 - DNA, 406 bp, Glycine max
  Clone ID: LIB3139-036-P1-N1-E8
gaaattttgtactgtatttcattagggggcatctgtatagctgggggatctacattctacgatcttttctcactgctgaaattaaatatcagcggaatttgagcaatattcatatttccggcttattttacgacggcagatacaaattctggactaaacactagataaatcttgctttgacagaagaggaaaagatggaagtgattagaaatagaggcattcctgctgatgttcttgcaaagcgagctcatgaatttgaaaaacatgttgctcatgaaagccttaaggatcaaattcctgctgttgacaagttgtattctactaacgttaataagtttgcaaaaattatgaaccttatacaaagtgttgttggtgatcttaaacttcttactgatgggaagttgta

SEQ ID NO: 41755 - DNA, 407 bp, Glycine max
  Clone ID: LIB3139-036-P1-N1-E9
cattaacatccatttttccagtgagcatcttgaccacagaagacatcgatgttaatgacagtaagataacaaaacctgccttaatttctgattttatggaccttaaagttagaaggaacgaagaaagtagtattgatatgaagaattcatctatgtatacaacctcttcttcagacaaccatgatagtaccatgtcatttgccacaactactacctttgcagcaatatatgatgaaagcatgtaaacattgatcaataagatttgtcctttactaaaaaaaatgttttgatttgtttaggcatgtatctcatgtaaattttgcaaccttttagatactttttgagtgatttttttcctggatgtagtcctccatgactaggaagttgctatgtgctgttctgtaaat

SEQ ID NO: 41756 - DNA, 405 bp, Glycine max
  Clone ID: LIB3139-036-P1-N1-F10
aaatggcaacagtgagaacaccattgaattttgattctagcaagcagagcttttgtcaattttctattgaccttctcggtggaggaattttagtggacaaaactggagattggatcacacttatacaaaattctccaattagtaacttgttgagagttgctgcttggaagaaaggctgtttaatggtcaagattgtgatgtctgggaatgcagcagtcaaaaggagtgattgggcctcattggtacaagtgtttttaacaaacagcaacagtacagagcattttgatgcatgtaagtggacaaaatcagaaccacattcctgggaattgatcttcccaatagaagtatgtggtcctaataatggttttgaaatgtggagttctgagtgggcaaatcaaacttcat

SEQ ID NO: 41757 - DNA, 403 bp, Glycine max
  Clone ID: LIB3139-036-P1-N1-F11
gttgagggaagttcaatcggcaactttgtgcttgagttggactttgaaccgtttaatgcatccttccctcgcccaactctgaacaagtccattggaaatggcgtcgagttcctcaaccgccacctttcggccaagctcttccatgacaaggagagcatgcagccactgcttgagttcctcaggcttcacagttataagggaaagaccatgatgttgaatgacaaagttcaaagcctggattctctccaacatgttttgagaaaagcagaagagtatctgatttcagttgctcctgaaacaccctactcggaattcgagaacagattccgggagattggtctggagaggggggtgggtgacactgccgagcgtgtcctcgagatgatccagcttctcctggacc

SEQ ID NO: 41758 - DNA, 405 bp, Glycine max
  Clone ID: LIB3139-036-P1-N1-F12
gaaggtgcaaggtctgttttgaacctgtctggaaccatgcttggatattacccgttgagagtgctaccttcaaaaactgctattgcccctgttaatccaacatttttgcccaggtctgaagatgaaagggagatgtgttcaagaacaatttattgcacaaatattgacaagaagcttactcaagccgatgtcaaacacttctttgaatctatttgtggagaggttcaacggttgaggcttcttggagattaccatcattcaactcgaattgcttttgttgagttcacagtggctgagagtgcaattgcagctctaagctgtagtggggtgattctgggttcactgcccataagggtaagtccatcgaagacaccagttcgatcacgtgctcctcgccctactatg

SEQ ID NO: 41759 - DNA, 410 bp, Glycine max
  Clone ID: LIB3139-036-P1-N1-F3
atcattccttttccctttttttttcggcaaaggccggtggcagcataggagcaggcgcacaccacagtcaaagaacaatctccactccaagcaacccaaagcgaatcggagattcaaactcagttcttcaactctctgatctccacttccacttcagcttcttcgccatggctaacgacgattgctgcgccacgcaactcatcgacggccacggcgagttcaacgtcgccggcctcgacagcttcatcaggaccgtcaatctcgccttctgcggactcttctacgccgtcgtcgcaatcatgggacctcagagtagcggggaagagcacgttaatgaatcatcttttccacacaagtttcagggagatggatgctttcaggggaagatctcaaacgaccaaaggcatttg

SEQ ID NO: 41760 - DNA, 395 bp, Glycine max
  Clone ID: LIB3139-036-P1-N1-F4
cttcctcctgtggttcgtatttatttcatttacgccgccgtcgtctccgccgcagagagcgatgtcttccgtcgaaacggagatggagccactcacgtcgggggccagcaaccgcataattccgctcctcaaggccctcagagcctccctcatcttcgtctacaccttcttcctctccttcctcctcttcgtcctcccccgccgccgccgcctctcccccgcggcggggccgccctctccgaagaagcatttgaggcggcgctggctcgtgcgcgaggaggaggacacgtgccgcagaagggcgctggcgcaggacgtgggaatgggtcgcgacgaagggtggtaccgctggagcacttccgtcttctacggggttcggaacaacgctctgtttt

SEQ ID NO: 41761 - DNA, 408 bp, Glycine max
  Clone ID: LIB3139-036-P1-N1-F6
gagtttgggaaggcaattgatggttcaattatgttgattgatgaggtccatactcctgattcaagtagatattggattgccaattcttacctggagcgctttcaaaatggtcttgagcctgaaaatattgacaaggagttcttgaggctgtggtttaaaagtcactgcaatccatatgaagatgaggtccttcctgatgctcctgaagatcttgtctgtgaattagcctggcgttacattttcttgtatgagactataacaaaatcaaagtttgaggtgcccttgaccgaggagcctatacatgaccgaatttcacgaaatgttgcatctgcactgtcatccttaaagtagcctgggaattatagggcactgttgtaattctgtattttaatatcttaatataaacta

SEQ ID NO: 41762 - DNA, 403 bp, Glycine max
  Clone ID: LIB3139-036-P1-N1-F7
gtggagtgtaacttcctatctatctgcatacattctgcaatgtcacaggaagagagattgaaacggtacaagggcttcaaagaagggaagcaaaggattctcgtggcaacagatttagttggaagggggattgacatagaacgtgttaatatagttattaactatgacatgcctgattctgctgatacttacttgcacagggtgggaagagctggcagatttggcacgaagggacttgcaattactttcgtgtcctctactgctgactctgaggttcttaatcaggtgcaatctaggtttgaggttgacataaagggacttgcaattactttcgtgtcctctactgctgactctgaggttcttaatcaggtgcaatctaggtttgaggttgacataaaagagc

SEQ ID NO: 41763 - DNA, 405 bp, Glycine max
  Clone ID: LIB3139-036-P1-N1-F8
cgttgttgccgttgaggtcacgggtggacctgaagttccattccaccctggaagagaggacaagcctgagccaccaccagagggtcgcttgcccgatgccactaagggttctgaccatttgagagatgtgtttggcaaagctatggggcttactgaccaagatatcgttgctctatctgggggtcacactattggagctgcacacaaggagcgttctggatttgagggtccctggacctctaatcctcttattttcgacaactcatacttcacggagttgttgagtggtgagaaggaaggtctccttcagctaccttctgacaaggctcttttgtctgaccctgtattccgccctctcgttgataaatatgcagcggacgaagatgccttctttgctgattacgc

SEQ ID NO: 41764 - DNA, 402 bp, Glycine max
  Clone ID: LIB3139-036-P1-N1-F9
ctcgagccgttctctatctctcccttcaagatgcagatcttcgtcaagaccctcaccggcaagaccatcacccttgaggtggaaagctctgacaccatcgacaacgtcaaggccaagatccaggacaaggaaggaatccccccggaccagcaacgtctcattttcgccggaaagcaacttgaggacggccgtacccttgctgactacaacattcagaaggagagtactcttcacctcgtcctccgtctccgtggtggcatgcagatcttcgttaagacactcaccggcaagaccataaccctagaggttgaaagctccgacaccatcgataacgtcaaggccaagatccaggacaaggagggtatccccccggaccagcaacgtctcatcttcgccggaaag

SEQ ID NO: 41765 - DNA, 398 bp, Glycine max
  unsure at all n locations
  Clone ID: LIB3139-036-P1-N1-G1
ctcaacccgttcgagctttgttaagtttgccgccagagaaaatggaacaggtggtgcaaatcataaggaggaggaatggacatttgaagcaggatggggatgagatcgagctagacattgaggctgttgacacagagacactttgggaacttgatcgattggtgactaattacaagaagatggttagcaagattaagaggcaggcattgatgggcaacattgacaacaacaacaacgatgtgcagtctaacaaaggcaacggggaattgccttctagcgagaagngtgatggggggccagttgaagtgaagaagccaaagaaagtagaagcaaggggacgaggatattgacatttggggatgagatgccaacgagtatgttcccccctgtggagattg

SEQ ID NO: 41766 - DNA, 404 bp, Glycine max
  Clone ID: LIB3139-036-P1-N1-G10
gagaaacgttttatcttgaccagtcattttaatggcaccatatgccagctgcacttgaagcgttctgaaggagagaatggagaagctaccaatcttctaaagggtagtctgttgaaaaccataattttcttagctgagatggtggggggtggtgtatagccttcaatagtgattaaaactcgtcttttgagcaaacaaatctttggttgttaggaggttgaatttgaaattcccttgtcatttggtacataacattttggggttgggttttgtatagaaggtataggaatgtaggtatagttaaactcttttctatggcccatttcaccatagtgggatctttatttgcttcagttggtgaagctccgcgaggatggggaaatgtgtaatgtttctacaggagc

SEQ ID NO: 41767 - DNA, 385 bp, Glycine max
  Clone ID: LIB3139-036-P1-N1-G11
ctcgagccgtttcctatctctcccttcaagatgcagatcttcgtcaagaccctcaccggcaagaccatcacccttgaggtggaaagctctgacaccatcgacaacgtcaaggccaagatccaggacaaggaaggaatccccccggaccagcaacgtctcattttcgccggaaagcaacttgaggacggccgtacccttgctgactacaacattcagaaggagagtactcttcacctcgtcctccgtctccgtggtggcatgcagatcttcgttaagacactcaccggcaagaccataaccctagaggttgaaagctccgacaccatcgataacgtcaaggccaagatccaggacaaggagggtatccccccggaccagcaacgtc

SEQ ID NO: 41768 - DNA, 350 bp, Glycine max
  Clone ID: LIB3139-036-P1-N1-G12
atctattggcatattttttgacagagggcaattttagagcaagtgttgatttgcagcgcactcatcgtattagaggaatgattaaaatggtggccacagttggtattcctgagaatacaggtatatcattggcctgtgctatgaatagttcttttagggggcgcgccagttctgatatttacaccatctgctctcaagactgtgaattgtggaatcctgcttgcacaaaagcaatgactatgtcatttaatccaaacccgagttctgatgcatggagtttggaatttctgaagcgtactggatttcattgcgatatcattggtgtcactagatagactgccaccccaatg

SEQ ID NO: 41769 - DNA, 393 bp, Glycine max
  Clone ID: LIB3139-036-P1-N1-G2
agaaggagtttcaaaatggattacctctgacgaaatccatagcatgacatactctgaagggaacggaactggaactagctaaccagttcccaaccattgaaggatgcacgcactgatcccactacagacctgagaaatgcatcgcccactatttgtgcctggaaccagacttgcttcacgagcaacgcagaggtcgtggacaccaacggccaaccctatatacacaacaccatgctgatgacttgaatcatctacacagtggccgcgattgacggtaccttcaaggtctcatcacatcgaacctgctaattgcaggagcatgacggaataaactatactgctggcacctatgcagctcccgggggagagcgtgtgccattcctctttaccatt

SEQ ID NO: 41770 - DNA, 309 bp, Glycine max
  Clone ID: LIB3139-036-P1-N1-G3
gggcgcaacttcattcgacatcgcctctccgatgcagcaggcagaagagcacctcgacgttctaaccaaaaccggcctaaaaaccggcgtgtccaagcccaggggagacgtgcatcgcgatggcgactaccaccgcgccgtccacgtttggatattcgcggagagcacgcgggaacttctcctccaacggcgcgcctcgtgcaaggcctcgtggcccgatctctgggatatttctagtgcccggcacatttccgctggtgattcgtccctcacctctgctagggggggagcttgaaagaagagttgggt

SEQ ID NO: 41771 - DNA, 399 bp, Glycine max
  Clone ID: LIB3139-036-P1-N1-G4
aatccatgagtagttcttagtgacgcacgtaatcatcttccaaatccaaccccatttcgcaaaagggtaggtaggcacttactttcaatgatggtggagacctcgacgctagggcacttccaccaccaaaggctcgaccttcgccgctgggtccccgcgttcttcacctcgcataagaccctcttgacccttctatggatcgccgccttcgcctccgcccaatggccttcaatttgacggatttcggtggggtcggtgacggcgttactctcaacaccgaggctttcgagagggccgtttctgcggtttctaagttcgggaagaaaggcggtgcgcagttgaatgtgcctcctggacgctggctcacggcgccgtttaatctcaccagccacatgactc

SEQ ID NO: 41772 - DNA, 392 bp, Glycine max
  Clone ID: LIB3139-036-P1-N1-G8
aacaaacacaacaacactctctcttctcgctcttggcttttcgctcttcactcactctcattcattcatttccaccgttcatggatccagtaagcgtgtggggtaacacgcccttggcgacggtggatcccgagatccatgacctcatcgagaaggagaagcgccgtcaatgccgcggaatcgagctcatcgcctccgagaacttcacctccttcgccgtcatcgaggccctcggcagcgctctcacgaacaaatactccgagggcatgccgggcaaccgctactacggcggcaatgaatacatcgaccagatcgaaaacctttgccgctcacgcgccctccaagcctttcacctcgacgcccaatcctggggcgtcaacgtccagccctac

SEQ ID NO: 41773 - DNA, 413 bp, Glycine max
  Clone ID: LIB3139-036-P1-N1-G9
attatatcaaccaaaccacctaaggagtaccttgaggcaaaagaaaaggaaaaaggggatgattcacagcacgaaaaggagaaaggggatgattcacagcatggaaaggcattaggcgaagatgaagcttgggggaaggaagtcccaagcttgaaaggtggtactatagaggattacaaggactacaatgtggatgaagatcttaatgatgaggaagaatttgatgaatcagacaagtcacatcataatgaagctccagaatatagacgtctaattgcaattcatgctgggaagcctaaaggtggattagcagaatgcctcaaagtggatcctgataaagtgagacgtctaagtttaagtgagcaacagcttgaaaaggctgccataaatcatggacaacaaattgtcaggtt

SEQ ID NO: 41774 - DNA, 411 bp, Glycine max
  Clone ID: LIB3139-036-P1-N1-H1
aggcagagcatactcaacaagagggtcatgcctaatttcctttattgaattaaacaaacgaacaagcgaaagaaaacacgaattccagatcatgcagaggattccgcattttcagaagatctggcagtagcctgtggaacagaaaaagctggcataagagtattaccagcaatttcaaaatcttgagagattcccaagagaatatcaaaaactgtagactgtttgggattgtcaataaggaaactcaaatgccatgaagtttgatttgcccactcagaactccacatttcaaaaccattattaggaccacatacctctattgggaagattaattcccaggaatgtggttctgattttgtccacttacatgcatcaaaatgctctgtactgttgctggttgttaaaaacact

SEQ ID NO: 41775 - DNA, 398 bp, Glycine max
  Clone ID: LIB3139-036-P1-N1-H11
attaatgttcctcgatcacgattccttcctgtgaaggcaacttcagatttgcttcttgtccagtctgacctctacactttggaagacggatttgtcattcggaacaaagctagggaaaatcctgaaaacccttctattgaactgggaccagaatttaagaaggttagcaacttcttgggccgcttcaagtcaattcctagtatcgttgagcttgacagtctaaaagtggctggtgatgtatggtttggagctggtgatatcctcaaggggaaagtcagcattgtatcaaagcccggtgtaaagctggaagttcccgacggtgttgccattgtagacaaggaaattaatggcccagaggacctgtgaggaagacagatgactttaactaaagaatgaat

SEQ ID NO: 41776 - DNA, 391 bp, Glycine max
  Clone ID: LIB3139-036-P1-N1-H12
atcgagaaaggtaagataaggtgacatgataatggctcgctcgttttcacgcgggtctctgcttcctctcgccatcgtttccttagtatgtctatttgtgatttccattgcaaaggaggaagccaccaagttggggacggtcattgggattgatcttggaacaacctattcatgtgttggtgtttacaagaacggccatgttggaatcatagccaatgatcaaggtaaccgtatcaccccatcgtgggttgctttcaccgacagtgagagactaattggagaggctgccaagaatctggcagctgtcaatccagaaaggaccatctttgatgtcaagagacttattggaagaaagtttgaagataaggaagttcaaagagatatgaagctt

SEQ ID NO: 41777 - DNA, 146 bp, Glycine max
  Clone ID: LIB3139-036-P1-N1-H3
ggtcctttcagtcagatactcctttacgctcttgttcattctcctgctgttatcaccttcacacattgctttaacaacaccaacactagcttacacactaacacaattagccaccaaaaataggcatacaaaccgcaacattcata

SEQ ID NO: 41778 - DNA, 407 bp, Glycine max
  Clone ID: LIB3139-036-P1-N1-H4
cccgtatccagataaggaagctgggcagcatccaatggcatacgtggtgaggaaggctggaagtagcttatcagaaactcaagttatggattttgttgcaggacaggtggctccgtacaagcggattcgaaaagtggcatttatttcctccatacccaaaaatccatctggcaaaattcttcggaaggatctcatcaaactcgcaacgtctaaactctgaatagatgagctttttcgtaatatattttttctatcggagttggacaagtgaggaaataatctttagctccttttttgctgtaattttctggcttgtttacttttgctgctttcatattatctgttctttgttcaacagtctattgtaatttgtagagaacaaagtgctgtgagtacaccttataggc

SEQ ID NO: 41779 - DNA, 321 bp, Glycine max
  Clone ID: LIB3139-036-P1-N1-H5
gaatgctcctgattcaaatgataatattgatctactgttgagcattgatttgttgggtttacaaggagcaggtaaagcttttccaaacaagattgtttttgatgataagcttgtgttggctaacacacaagaattctttgatggaaattttccagtggattcttggttaccaatttttgtgaattgtctttaccctgtaagtcaattaccttcagaagctgtcgtcgtaaatgttacatgtggtagtggacggtgtggtttacccaccactgattagtttagttctgcatttaacaatggctgctcatatatcaacaaaaa

SEQ ID NO: 41780 - DNA, 403 bp, Glycine max
  unsure at all n locations
  Clone ID: LIB3139-036-P1-N1-H6
cttctaacgtgagatctcagattgcaattgcctcttctcttctcccagaatcggtcactaatccgatatcatgaagctcgatacgactagtctcgaatcgtttcccacactgattgcacctcaaaacgacgtcgccggagaactctccgccgctccgttctttgaccttccgaattccaatgacttcgatgggttcttgaaagacgctattcagatggtgaagcccgcgaagggtactacaactcttgcttttatatttaaagagggtgttatggtagctgctgattctcgagctagcatgggaggatatatatcgtcgcagtctgtgaagaaaattatcgaaatcaatccgtatatgctngggacaatggctggtggtgctgctgattgccagttttggcac

SEQ ID NO: 41781 - DNA, 390 bp, Glycine max
  Clone ID: LIB3139-036-P1-N1-H7
gtatgagggtaagcatattcctgtatctaatattagtgcaggggaaaatcatgtagttcaaatacccttaatggcacaggaggaaattctgtcttctagtgcaagtgatttcagaactgcaatggtgagtaaaaatagcaaacctcaagctactgcaatgcatgtgggagctatagaaattatcattgatagtttcgcaagtcctgactgcaacatagttggtgcaatgcttttggttgatacttatcataccaatcctgaaaatgcagttcgtagtatttttgttgcgcctttcagaggcggaaggcccattcgggtggttacatttccgaataccattgtgcagattgaaccagacatgaattcaaggtttcagcttttgagtaccac

SEQ ID NO: 41782 - DNA, 412 bp, Glycine max
  Clone ID: LIB3139-036-P1-N1-H8
gagcaatgacgatggatattcgggaaggtcgtggtgtaggacccctgaaagatcacatctatctccacttgaatcacttacccccagatgtgctcaaagagagacttcctggcatctctgaaactgctgctatttttgctggtgtggatgttacaaaggaacccattcctgttttgccaactgtacattataacatgggcggtattcccacaaaccattatggagaggtggttaccattaaaggtgacaatccagatgcagtggttcctggattgatggctgccggggaaacggcctgtgcatcagtccatggtgccaataggcttggtgcaaattcacttctggatatcgttgtttttggtagagcttgtgctaatagagttgcagaaatccgtagaccaagagagaagca

SEQ ID NO: 41783 - DNA, 413 bp, Glycine max
  Clone ID: LIB3139-036-P1-N1-H9
gtcttttatcacattgaattcatccttctgtgttctgtttctttccttttcttcttgggcgaaaccctaatctccccccttcacccttcgtacaccgcgtcgcatctacttccatcttctctcagatccaatctccgattcttgcttcactatcacaagcaaacatgtctgcggctttggatatgaccctcgaagatataattaagaacaacaagaaatcttccctcgccaacaccaggggccgaggccgagcctcgggacccggacccgctcgccgcctccccaaccgtgccgccaatcgcgccgcaccgtatgccgctgccaaggcgccggagacagcttggaaacacgatatgtacgcgaaccagccagtggccgcggcgtatccaggtggtcgagcgtcttccatcgaa

SEQ ID NO: 41784 - DNA, 370 bp, Glycine max
  Clone ID: LIB3139-037-P1-N1-A1
aaagaaggtgcatcagcccttgacaatggcaatggtggcggaatcaccggaatctgacagtgacaacaactcctcaaaaaccaacaatcctcaaaccctcaatgaaacggcgccgtttcttgactacgctcttgcgcaggcccagctttaccacaaggccttcaacgacgccgtcgattcgacaatcgatactgcaaaatcccgtttctcccaaatccgctcaacttcttccgcccactttcaccagaccttggattctttggatgatctcaaatctcagtacactgcttatgagggtcttttgtttggaaagatcaaagagggtgtagttgttgcagcttcgcatccggtgattacatgtggggctact

SEQ ID NO: 41785 - DNA, 374 bp, Glycine max
  Clone ID: LIB3139-037-P1-N1-A10
ggctcgaggtggataatggcttcgttatcgctttgcatagccatgagagcacccactccctcagcttctctcattctcactaccccaaaaccatcttcactctctttgaaccttacccgcacttgctccagcgctcgctctccgctcctccattgctccttcctctcttctccttcccatctctcttccccttcctccgtttcaggcttgtcacttggattggatttgacatctaatgttgggaccagaagaggaaaaggttctggcctagttgtgagggcaggcaaggctgctctttgtctgactaagagaagcagatcaagaaaatcattggcacgcactcatggtttccgcaaaagaatgagcacaccagg

SEQ ID NO: 41786 - DNA, 372 bp, Glycine max
  Clone ID: LIB3139-037-P1-N1-A11
gcatcgtttttctccgctctttgattgcaccgtcgtaacccttcaaaccgacatgtgattgatgtgtgaattttgaggtggttgtgttccgtttgatgaaaatgagcgttatccgagtttctccatgtcttcctggggtttatgcctccccaattacatcgtctcagttacgccgccgcgattttaactcaagaccgcgttcattgccgatgatggggtttgaccctctctctgtggcttccctgagcctcagagccgaaccttcgcctcgcttgcaatgccagcctgcccttaaatcacggcgacctctcctcgtttgttttgccgccagtggacaaggaatgatggaaaataacagggtaatcatacatg

SEQ ID NO: 41787 - DNA, 374 bp, Glycine max
  Clone ID: LIB3139-037-P1-N1-A12
aaacaacacaaaattcattgcacagtgttattttcagtatcagcatcatggctccaattgcagtgggagatgtcattccagacggcattttggcttacttggatgaagaaaacaaaccccaaactgtctctattcactctctcgccgccggcaagaaagtcatcatctttggggttcccggtgccttcactcctacatgcagcttgaagcacgtgcctggcttcattgagagagcagaagagctgaaaggaaagggtgtggacgaaataatctgtatcagcgtgaatgatccctttgtgatgaactcatgggccaaaacgttcccagagaacaagcatgttaagttccttgctgatggtgcagccaaatacacc

SEQ ID NO: 41788 - DNA, 379 bp, Glycine max
  Clone ID: LIB3139-037-P1-N1-A2
cagcaacgttaacaatgggttctcgctacgaggtggaactgaagctctcatcggcacgcgctctcaagaacgtgaactggcgccatggcccgaaccgcccatacgtcgtcgtttgggtcgacccaagcaacaagctctcgacgcgcgtggacgaaagcggcgacactgacgcgaattgggaccaaacgctcacaattccgttgccaccaaagcctctcgaggatcaaacgttgtacatcgacgtggtccacgccggctcggaggaggacaccaagccgcttatcggctcggctcggctcaagctggtggacattctcgacgacgttggaatcggcgagcgcgtgagccgcacgctctcgctgaagcgtccctcggggag

SEQ ID NO: 41789 - DNA, 377 bp, Glycine max
  Clone ID: LIB3139-037-P1-N1-A3
aataataataataataataaaagaccaactccttggcttggcgcatctttattccctctcttctataaatcgttcgatcgttaattcctcgcacgagcttgtgtccgtcgtcaaaccatggagaatattggtgaggatcagtacggctacttgccggagaccgacctgtttttcccaaacgaagaccttggcagctgggcaataatggatggggaagcggtctcttggtactatgattcaagctccccggacggcaccggtgcttcttcatcggtggcatctaagaacattgtctccgagaggaatagaaggaagaagctcaacgataggcttttggcacttagagcagtggtccccaacattaccaagatggataa

SEQ ID NO: 41790 - DNA, 378 bp, Glycine max
  Clone ID: LIB3139-037-P1-N1-A6
atttgaactttttggcattcctcctgcccccaggggtgttcctcagattactgtgtgctttgacattgatgccaatggtattttgaacgtctctgccgaagataagaccactggccagaaaaataagatcactatcaccaatgacaagggtagactgtcaaaggaagatatcgagaagatggttcaagaggctgagaagtacaaatctgaggatgaagagcacaaaaagaaggttgaggccaagaatgctttggaaaactatgcatacaacatgaggaacactgtgaaggatgacaaaattggtgagaaacttgatcctactgacaagaagaagattgaggacgcaattgagcaagctatccagtggctagacagcaa

SEQ ID NO: 41791 - DNA, 373 bp, Glycine max
  Clone ID: LIB3139-037-P1-N1-A7
ctgattttgtaattgagttcgatcaaatagctcccagtactttaattgatttctgaatatcatcacttaatttgaaggaaagatggtgagcgtagctgagatccgccaggcacaaagggcagaaggcccagcaaccatccttgccattggaactgcaaacccaccaaactgtgttgatcagagcacctatcctgactactacttcagaatcaccaacagtgagcacatgaccgagctcaaagagaaattccagcgcatgtgtgacaagtctatgatcaagaggagatatatgtacctaaacgaagagatcttgaaagagaatccaaacatgtgtgcttacatggcaccttctttggatgctaggcaagacatg

SEQ ID NO: 41792 - DNA, 376 bp, Glycine max
  Clone ID: LIB3139-037-P1-N1-A9
gcatgggggtcatagatgtagaggacacaaactatgtgctacgagaagaagaagcaatttgggtgctaaaatagatccttacttacttgaatgagttactgtcaaaacttagagccatgttttctggagatcctggtaccacaattaagttggcagttttgctctttgttcttgccagatgtggcagctacataaccatttggaagatggccaaattcggcttctttggagtttttaccgtgccaaaaatctgctccttgtattctgcacagataactgcattcgcaaacttttggattcgacgatttcgggatgcttgggattcttgctctcacaaaaaggctgtggctcttggcatttttggccttgtatggaa

SEQ ID NO: 41793 - DNA, 357 bp, Glycine max
  Clone ID: LIB3139-037-P1-N1-B1
gatatggaagctgatgtttctattatttttgttgcgttttcaaaaccctaaattggagaaatcccaatttctccttctgtctttctgctttgtatgtttttcaaccaaaaaattgtgcttttcaaatcttttgctctgatgggtacttcaaatcttctcttgtttttctctctgatgagcctgtgtgctatggcggcttccaaggtggtgcttattgggaataatatcactctctcctttgatgatattgaagctaattttgccccagcagtcaaaggttctggaaaatatggggtcttatatttggcagaaccactggatgcgtgtgcagaattgacaaataaagttgaacaactt

SEQ ID NO: 41794 - DNA, 372 bp, Glycine max
  Clone ID: LIB3139-037-P1-N1-B10
ggccctcatgggttcaagtggaaaatggtcttctcatcaaggtacttctctgggatcacaggcttgatcacatgctctttgaggtcagcagcaatttcgtcattggtgacagtctcgtcgtgttgggtggagattagcacggtgtggacacgaaccggaaccctggcaccattgtcattgtaatactcaacggtcacttgggtcttcccatcaggcctcagccaagggcaggtaccgttcttgcgaacctcggtgagacgagcaccgagttttgttgcaagaacatggctcaatggcatcaattcaggggtttcatcagtggcatagccaaacatgtgaccctggtcaccagcaccaatttcttcaggtttt

SEQ ID NO: 41795 - DNA, 374 bp, Glycine max
  Clone ID: LIB3139-037-P1-N1-B11
gagaaagatttgttagagggaaatttttcctttgatattaaatctcgctctagattggaaaaagtttcctctacaaaagcacaatttgttagtggaaaaaccttcaaatatgatataattggtgctggttcacattcttcaggagattttcctgaaaaggaagatcaagaaaaacccaaaaagattgataccagattgagacaaagaatagatcctcaatacaatgaggttcaggctcagatggaaacaaatttgtttaaattgtctcttgatgatgttgaaactcctaaaggttctatgttggatcttaaaatttctcaatctaaaattgcacttcccaagaacacagttggaggaaccattctgcgtagtga

SEQ ID NO: 41796 - DNA, 373 bp, Glycine max
  Clone ID: LIB3139-037-P1-N1-B12
gtttgttgatccatctcttgtttcttgctttctttcttcaccatgtcacttgctgggaaaatcaccactgaaatcggggttcatgcaaccgctacaaagtggttcaacctcttcgcaacacaactccatcatgttcaaaacctaactgatagagtgcatggaaccaagctgcatcaaggtgaagactggcatcacaacgagacagtcaagcactggacttataccatagatggtaaggttacaacatgtctggagagtattgaatccattgatgaacagagcaaaacaatcacctacaagctcttcagtggtgacattgatcataattataagaactttaagttcatctttcaagccattgatgataatgatc

SEQ ID NO: 41797 - DNA, 379 bp, Glycine max
  Clone ID: LIB3139-037-P1-N1-B2
aacaaacgtacgcttctcattctctctctactcgttcagaagatgtttctcacaaggactgagtatgaccgaggagtcaacaccttttctcccgaaggccgtttgtttcaggttgagtatgcaatcgaagccatcaagctgggatcaactgcgattgggttgaagaccaaagaaggagttgtccttgcagttgaaaagcgcatcacatcgccgctcctggagcctagtagtgttgagaaaattatggaaattgatgagcacatcggttgtgcaatgagtgggttgattgcagatgctcgaacacttgttgagcatgcacgggtggaaactcagaatcacaggttctcctatggtgagcctatgactgttgagtccacca

SEQ ID NO: 41798 - DNA, 379 bp, Glycine max
  Clone ID: LIB3139-037-P1-N1-B3
cgagcaccagttttcccatcattgcaattgccataataggaataatggccacagcattcttgcttgtgagctactacatctttgtgatcaagtgctgcctcaattggcatcgaattgatgttctgagacgtttctctccatctagaaggcgtgaagatccaccaccaacatactcaccagccacagatactcgtggactagatgaggcactgatccggttaatcccagtgactcaatacaaagcacaacaaggggatgatagagactttggagagagaagattctgcgaatgcgctgtttgcttgaatgagtttcaagaagatgagaagctgagggttataccaaattgcagccatgtgtttcacattgattgcataga

SEQ ID NO: 41799 - DNA, 375 bp, Glycine max
  Clone ID: LIB3139-037-P1-N1-B5
cggctcgtgattacactcacactctttgtgaaaaaggggagtttcttattctttctagacgcttccattgatcggcgatttcttagacatggcggagcatcacgaacacgaggaagtgaagggtgagtccttgttggagaagatttctgggaagatccacgaccacgattcgtcatcttcgtcggattccgacaacgagaaaaccagcgcttctgactccttgaagtcaaaggttttcaggcttttcggcagagaaaagcccattcaccatgttcttggtggcggaaaaccggccgacgtttttctctggagaaacaagaagatatctgcatcgacactcggagttgcgaccgctatatgggttctgtttgaatt

SEQ ID NO: 41800 - DNA, 373 bp, Glycine max
  Clone ID: LIB3139-037-P1-N1-B6
gttgcactattatttgaaggctacaccatgaaggtatgatgattttcctataaaaatatgctcatatagccaggatcaacaatttaaacaagaaatgtgcacaagtgaataaatagtacaaattttttagattcatattattctttgatgatacatacggtcttgatgcttgtctaatttctagtgctgcctcattttctcataacctttttcagtttacttttcagcagaatagcttttttgtggcagccccctaagtactcacaagcatctcgataaagtgaaatttgatcaacaaattagctaaatttactgccatctttgtcctacctgaaccttatctgattgttttgtgtgccagattcgccaagtc

SEQ ID NO: 41801 - DNA, 351 bp, Glycine max
  Clone ID: LIB3139-037-P1-N1-B7
gccaagacagactgagttggcttgttgaatccaactgttggttgaaccaggcattggaggaggcagagttggaagtgcaagccaagacagactgagttgggtgcagaagaattacatgatttacaattactgcactgacaccaatagatttccacaaggccttcccccagagtgccaagcatcatgattgaattggttttcatttgtatggatgttcattcttttattctttgatacttgcaagttagtatatcttgaaacttttacacttaatttacatcatgattgtattacaagaaacggaaagaagcctcactaatatatcttgaatcttttacacttaatttacag

SEQ ID NO: 41802 - DNA, 371 bp, Glycine max
  Clone ID: LIB3139-037-P1-N1-B8
aatctgctttcaactttcacactcacaccaccaccatgacccttcctcaatcatttggctgtggacttgtgcaagcacccttggtgacaagctctggtcttcttactaaagtttggagtgttatctcttctcgtgatgaagacatagtttcatactcaggaaataatggactgtccttgaaagtttctgaggattcgggtttgacggttgttgcgtttgaggtcaacccggattttgatcttcaatctacagttgtttctttctctgatcccaaggagaataatttgaaccgctttgagtttctttgtaccaagaaacatccagatttctctgtcaacaagtctgtagttgatcttttttctaaaaatctt

SEQ ID NO: 41803 - DNA, 372 bp, Glycine max
  Clone ID: LIB3139-037-P1-N1-C10
tgaaattttgataaaccgcgatcacaggttgccgcaccttaaaaccggaaacaaaagcaatcgttacttgatttcaagaatttctcaatttctttctacttctttgtgtacgatttcttaagggaaagaaaatcactctctgtgctggccacagacttcgtgaatcattttcttttccacttttagtttatttgctgaacactctcctatttgatataggacttcgtgtcagatttaaacttcttctgtttctttctcagttctctgttcaatttcaagttcaagctggtgaaatcttggattagtgcttccactctcctatctggtataggacttcgtgggtagactattctatttctctccttctttcac

SEQ ID NO: 41804 - DNA, 372 bp, Glycine max
  Clone ID: LIB3139-037-P1-N1-C12
ctcgagccgaatcggctcgagctggttcactgcattttccatgcaaacaccaaacccatatcagtaccctataggaaagaaacggatgcaaccattgggaattcttgtttttgcctctgttatggcgacacttggactgcagataatcttggagtctacccgcacattaatatcttctgaaaatgcattcaacttgaccaaggaacaagagcgctgggttgtgggcattatgctttcagtgactttggtgaaattcctgctgatgatttactgtcgttcttttaccaatgagataattaaagcctatgcccaggatcacttttttgatgtgatcactaatatcattggccttattgctgcacttttggcaaa

SEQ ID NO: 41805 - DNA, 378 bp, Glycine max
  Clone ID: LIB3139-037-P1-N1-C2
tttctctctctagataggtaaaaatggctactccgccggtggtaaggtttccgatcttcacggcggtgagggcggtcggcgttgccgttactgttcttctgctgacgtgggccgtccatttcagaggaggcctcgctctcgtctctgataacaaagatctcatctttaatgtccatccagtgttgatggtgattgggcttgttctaatcaatggtgaagggatgcttgcatacaagactctatctggaactaaaaacttcaaaaaatcagttcatcttgcgttacagtttgccgctctcattttgagcttgattggtgtctgggctgcttggaagtttcacattgacaagggcattgacaatttctacagcctgcatt

SEQ ID NO: 41806 - DNA, 210 bp, Glycine max
  Clone ID: LIB3139-037-P1-N1-C4
gctttttttgttccacaggctactgccagatcttctgaaaatgcggaatcctctgcatgatctggaattcgtgttttctttcgcttgttcgtttgtttaattcaataaaggaaattaggcatgaccctcttgttgagtatgctctgcctatctgaaaatttccacacctcttttaattgtcgtaatgatgtgtgaagtgtgtgttatttt

SEQ ID NO: 41807 - DNA, 378 bp, Glycine max
  Clone ID: LIB3139-037-P1-N1-C5
atcaaagaggatccatctctgatgcgtgccattctttcttcaagctggtctttatttgatggattagaaaaactttcaagcatggcagacatagacggatcctgcatcaatgcattacccaggcgctcagccatggtcataaaattaggattctgcataacctgttgcatggttgaaaaatattgttgattatcgaagctagggatagcatcttgtggagctccttgaaaaaagaatggcacgcatcaaagaggatccatctctgaaacatattttggaggagatagagactggcggtcctgctgctatgatgaggtactggaataatgaggaggttttgcagaagttgggacaagccatgggtcttgccaattcggg

SEQ ID NO: 41808 - DNA, 371 bp, Glycine max
  Clone ID: LIB3139-037-P1-N1-C7
gtttgctcttgtgggcttgcaagagtatttctatgaccaagtgcctgactcaatgagaagccttggaatagcactttaccttagtgtcattggggctgcaagttttcttagtagtttattaataacaattgtggatcatgtcactggtaagattgggaagagttggattggtaaggatttgaatagtagccgcttggacaaattttactggcttcttgcagccatcaccacattgaacttgttcatgtttgtgatctttgctcgcaagtataactacaagaatgtgcaaaaggtggcagcggctgattgctacgaaggcaaaagtgaggatgatggatcagagacttgggtttgagttggtggaattcagt

SEQ ID NO: 41809 - DNA, 376 bp, Glycine max
  Clone ID: LIB3139-037-P1-N1-C8
aattaccctgtctttctgacccaaaaacatagtcccaaatcgaacaaaatcaatcaactaactcctccaacgttgttgttattatgcagacaacaagttccaacacctccggcgccacctcgatccgttccggcatggagctcttccaccgcgcgaaggcggtgcgcctccgcagccaccacgacaagtacctcctggccgacgaggacgaggagtccgtcacgcaagaccgcaacggatcctcccgcaacgccaagtggacggtggagctcatcccggagttcgacaacatcatcagactcaagagctgttacggaaaatacttgacggcgtccaaccagccgttactgctcggcgtgacggggcgcaaggtggt

SEQ ID NO: 41810 - DNA, 376 bp, Glycine max
  Clone ID: LIB3139-037-P1-N1-C9
tcgtaaaccaaatccctaattttctctctcttcaatggcgccgcagaaactcaacgattacgaacggaagcgactcgagaacattcgccgcaacgatgaaatgatggctgccctcaaactccactccaaagccacccaactctccaacttcaagcgtagtcaaagggttggaaccaaatcctacaacatgaaatcggaaaagaaacccaaaaccgaaaccccaattgtgattaggcgctccctccgaacaagaggtattccgccagattccaaaggtcttgtcggagattccgtgggccccaccactcccactaaaactaaaccttccgttgttaatttgggtcctatttccatggctgatgctcgtgaaagcgct

SEQ ID NO: 41811 - DNA, 374 bp, Glycine max
  Clone ID: LIB3139-037-P1-N1-D11
caagtaactaatcattcaaaagaaagacctgacgtgtgggttgatagccctgagaaatcaattattctgtctataaccagtgatattcgaactatagaatctgaggtattttctgcaccttacagtctcagatttcctaggattgacagggtgagatatgacaaagcttggtatgaatgccttgatgttcaatcatttatagaactggtacattctagcaacggtaccacacagagggatacagaatatggcagcaaacaggacagtaaaccaaaacgatcgaaatcctccactaggggagaaaagaaaaacttgtccattgttccttctcatttaattcaaactgatgtttccagcattaaggggggctcctt

SEQ ID NO: 41812 - DNA, 371 bp, Glycine max
  Clone ID: LIB3139-037-P1-N1-D12
cggctcgtggttcaacaggtgagactcagattactccaacccatgtatctgatgaagaggcaaaccttttcgccatgcaactagccagtgcctcagtactccctatggttctcaaatcagctcttgagcttgatctgttggaaatcatagccaaggctggccctggtgttcacctttccccctccgacattgcttctcggctcccaacacacaaccctgatgcacccgttatgttggaccgtatattgcgcctcttggcttgctacaatatcctctctttttctcttcgcactctccctcatggcaaggttgagaggctctatggtctcgcccctgttgctaagtacttggtcaggaacgaagatggtgtc

SEQ ID NO: 41813 - DNA, 371 bp, Glycine max
  Clone ID: LIB3139-037-P1-N1-D2
ctcggggcttacctcattcagaaccaatttcagtctgctggtaactctagtgctcttttcctaactgctgcagctcaaaatctgctgtgtctcaaattagcagaggagcttggggtgatagttccaaacccatgggttacttggtttaaagcagctagtttacctgccattgtttgtcttcttcttacgccattgattttgtacaagctctatccccctgtaatcaaagacacaccagaggctcctgccctggctgccaagaaactggaaagtatgggccctgtcactaaaaatgaatggattatggtcggcacaatgcttcttgcagtgtctttgtggatctttggagacactattggcatagcaagtgc

SEQ ID NO: 41814 - DNA, 221 bp, Glycine max
  Clone ID: LIB3139-037-P1-N1-D3
aaaatcttctgttccaccctgcatttcagcagagtgattctgttcactacaatgccatcatcactatcctctttcctccatatgggtcctattctctcccttcttgtactctcatgtgtgatttggtctagtagtgctcaaggaccaccttcacctggctactaccccagttccaaaaatagtcctgttagtttttatcaaggggttagaaacctatgggg

SEQ ID NO: 41815 - DNA, 376 bp, Glycine max
  Clone ID: LIB3139-037-P1-N1-D4
gacaagttttatatacataaactgaaactcttttattagcacttgtgttaggcttattagtccactcatattttcaggcacttctctcattcaagagtaatggcagaagcaacaaaagggtatgctgtggtcactggagcaaataagggaattggatttgcaatatgcaagcaattggcttctaatgggatcactgtggtgttgacagccagagatgagaagaggggtcttcaagctgtcgagaaactccaagagcttggtctttctggccatgtgggttttcatcaacttgatgttacagaccctgcaggaataagatcacttgcagatttcatcaggaacaaatttggaaaactagatatcttggtaaacaatg

SEQ ID NO: 41816 - DNA, 395 bp, Glycine max
  Clone ID: LIB3139-037-P1-N1-D6
atgccgcgtacgagctggaattggtcggggagacagtgctgctgagaagacgtgcgtgccgcgcaccgacaaccccgatgactcccacgactccaacgacaccgggatccgcgcgtaaagctgacaacgtttggaggagcgtcttcatcctgggagcaactccgccacaaagaccatcggtgctcagatgtttgcaaaccacttcccaacactcccactgctacgactggctgacagtggggagaccagaagcaggcaccgctgaaaggataagctaagaaaaccgtgggttgcatgtaaatattgtcgtttttcgttaagcacctgccacgtttgaatctactactaccattatgcgtcggaaattaattgctctgttgctgactcaaatatat

SEQ ID NO: 41817 - DNA, 373 bp, Glycine max
  Clone ID: LIB3139-037-P1-N1-D7
aggtgacttaccgacaccggacccatctccggcgacatctcaccgatctccggcgaatccccggtccccactttcttccctcgaaatgaatcccgagtatgattatctgttcaagctccttcttattggagactctggtgttggtaaatcatgccttcttctgagatttgctgatgattcgcacatcgagagctacataagcaccattggagttgattttaaaatacgtactgttgagcaggatggaaagaccattaaactacagatcgtctgtatttgataggcctttgtgtctctgtatctattgtgggacacagccgggcaagaacgatttaggacaatcaccagtagctactatcgtggggcccatggg

SEQ ID NO: 41818 - DNA, 377 bp, Glycine max
  Clone ID: LIB3139-037-P1-N1-D8
ttctcctttagacgaggcatcacgcgataaccatcagaatggttccgttcccgtcagagaacggcgttgaaggagacgacgagagagaagaggaagacgaagaggaagaagaagaagaggaagacgaagaagtggtggaagatgaagaagacgaagaggaaccgaggctcaagtaccagagaatgggaggtagcatcccttcgctgcttgcgagtgacgcggcgtcgtgtatcgccgtcgcggagcgcatgatcgctctcggcactcacggcggcaccgttcacatcctcgattttctcgggaatcaggttaaggaattctctgcacatgcttctgttgtcaatgaccttagctttgacacagaaggtgaatatatt

SEQ ID NO: 41819 - DNA, 372 bp, Glycine max
  Clone ID: LIB3139-037-P1-N1-E10
cttttcttttgtgcctgagaagccacttctctacttgcggttcttcttcttcttcttcttcaattttattcgattcgcttgctggaaaattctttgagtgagggagaggatgtctggtggcacacagaagagtctgagaaaagcacttggagcccttaaggacaccacaacagtctcgttggctaaggtcaacagtgattacaaggaattggacattgctatagttagagccacaaatcatgttgaacgtccggctaaggaaaaacatataagagctatattttcagctatctcagctacaagacccagggctgatgttgcctattgtatccacgcacttgccaggcggttatcaaagacacataactgggc

SEQ ID NO: 41820 - DNA, 374 bp, Glycine max
  Clone ID: LIB3139-037-P1-N1-E11
ggtaatgggagtagggtaagagttgtggttgatgcccctgcgcctggtgggaattacagttatatcgcagctgggtttaggcatgcctgtgtcatatctggtgatggtagcttgcattgttggggagacatggaggagggtcagaaaccaccgcaagctgggagcttcatttctctggcgttgggagagaagcgaagctgtgcacttggggacgacagaagagttgtgtgttgggggtccaataatttcagcatgccacgcagattgcaagacacttacttcgaatcaattgtggcaaagcgaaccgttttctgcggagtcttgtcttctgactattccttgctctgttggggttccaaaatatttgagtcaaa

SEQ ID NO: 41821 - DNA, 376 bp, Glycine max
  Clone ID: LIB3139-037-P1-N1-E12
cttcttaccatcaccattctgttctgtccactgctaatgaatatcttcaaatccgttttttccgaagacccggatcctccacgacccggatccaaccatgcatcgccagacaaagcaccggatccccattccccgccccgatcgaatgccaccgagtccgctgccggaggaggcggcggcgacggttggaacttcggcggcctcatcaaaacccttacatcgaaatcggaatccataattgagacctaccgtcgcgatctgcaggaattcggcaccggtttgaagaaagagatcgaggtcgcgcagggttctctcgggaccgtgggccacgtcatcgatgagttcggaaacaccgtcgtgaaaggaacggctcaga

SEQ ID NO: 41822 - DNA, 335 bp, Glycine max
  Clone ID: LIB3139-037-P1-N1-E2
gtttgatctcatgtatgccaagcgtgccttcgtccattggtacgtgggtgagggtatggaagaaggtgaattttcagaagcccgtgaggatcttgcagccctcgagaaggattatgaagaagtgggtgctgagtctggtgagggccaggatgaggacgaagactactagaatctacttcagattcttgttcttgtggtctttttctgttgttgtgtttgatgttcagatgtaccagtaccgttgtgggttttaatttggatgcattgtttttatgcttcgctgcttctgttacagacccaaacggaatggcaatatatattttgaccattgtctg

SEQ ID NO: 41823 - DNA, 371 bp, Glycine max
  Clone ID: LIB3139-037-P1-N1-E3
ccaccacttccaccacctcatgtaagtactaatttcccaccaccttaaaaaaaattgggttccactaaacaactacaaagtttcccttaacaatgcttctccttgtcctatatacccacatgggaatattatcatcttattttttcccctctaaaaattagtccacttttccatcaacatgtgccccctttcaatctctctcatgactcatcacaaccccagatcttaatcatctcatttaatctgaccctcttattttgtgtcatcgagttcactaaaaagatcagatttttcagtgaagcgagaagaaagaaacctaccccctccatgttgatactagtgcttggactagcttcagctacttttttagt

SEQ ID NO: 41824 - DNA, 376 bp, Glycine max
  Clone ID: LIB3139-037-P1-N1-E4
gtgcatggaacttagctgcatcaaggtgaagactggcatcacaacgagacagtcaagcactggacttataccatagatggtaaggttacaacatgtctggagagtattgaatccattgatgaacagagcaaaacaatcacctacaagctcttcagtggtgacattgatcataattataagaactttaagttcatctttcaagccattgatgataatgatcatggcggtactattatcaaatggaccgttgaatacgagaggcttcgtgaggaggttgatccttcatatggccacattgaatacctgcacaaatgcactaaagatattgatggtcatcttctcaaagcatagctagctctaaaagttatgcactaaa

SEQ ID NO: 41825 - DNA, 379 bp, Glycine max
  Clone ID: LIB3139-037-P1-N1-E5
tgaagagctggttgaatagatggcatcatggatctaggtggaggcattggaagggcaccactattatgagcataatattgtacaggaacacaaggaatattcattcccacaccacatatgatctcagttcacttctgttctagttccacgaccttatgttcttctttgtgctccaccatcatttatgtctatgatgcatacaccatttcaggcttatggctttgctatagttcgagctacaaatgatgttgaacctccagttcacgaaaaacatataagagctatattttcagctatctcagctacaagacccagggctgatgttgcctattgtatacacgcacttgccaggcggttatcaaagacacataactgggcg

SEQ ID NO: 41826 - DNA, 376 bp, Glycine max
  Clone ID: LIB3139-037-P1-N1-E6
agccatacgtgttgaaatcactcaacgaagtcgatgctataaatttatttcgccactctgcatccctgaatcagagtagctctgacattcctgagaatattgtcaaaaagattgcgagagggtgcagtggttctcccttggcacttatagtgactggcaaatcactaagtcgtgaaccaccgtgggcttggaacaacagggctaagaaactgtccaagggtcaaccaattcttgcttttagtgcagatgtgcttacttgtctccaaaaaagcttcgatgacttggatcctaaggtggctgagtgttttagggacctaagcttattccccgaagcccagaggatacctgctgctgcccttgttgatatatgggcaga

SEQ ID NO: 41827 - DNA, 177 bp, Glycine max
  Clone ID: LIB3139-037-P1-N1-E7
ctcgagctttaaaaatcaagtgtctgatcatatatattatgtatagatcaatagtttttaattacttttgtattgtttataaattgtatcaagtcatgtaaatagtaatacacagttccagtggttatttgcacacttaggaacatatgtaatgaataataaaaattatggttcttc

SEQ ID NO: 41828 - DNA, 374 bp, Glycine max
  Clone ID: LIB3139-037-P1-N1-E9
tcaaaaaccaagacactgttcatcaagctgctcaattatcaagccaactttgcttggttccactgcagaatttcagtttattcttatctccgtagattggattgaagggtgtgctgttaactttcctgtttgtttcatcttcaagctcaattctggttctgggtttatcttttactggaagacagactttgaggtagattccttataagtgggcataagttcaagtgtagagaatgagtcagcctaagattaagcgccgagttggtaagtatgaggtggggaggaccattggtgaaggtacatttgcaaaggtgaaatttgcaaggaactctgagacgggagaccctgtggctcttaaaattcttgataaggag

SEQ ID NO: 41829 - DNA, 377 bp, Glycine max
  Clone ID: LIB3139-037-P1-N1-F10
agagaatgcgggttgtttgttgctccaattcaggcgtgagtgccactcttccatctttcccttgtcccagattccctccactcattgcaatttcttcgatccgctttctaaattccacacccctccgttccactgcttcgccgcgacaagttacaagaatggcttcgaagaatgctcaacaagacacgcgcttagccagaatcgcctctgcgatccgagtcatccccgactttcctaagccaggaattttgtttcaggacataaccacgctgcttcttgatacaaaggctttcaaagacaccgttgacttgtttgttgagaggtacagagatcaaaacatcaatgttgtcgcaggagttgaagcaaggggctttata

SEQ ID NO: 41830 - DNA, 375 bp, Glycine max
  Clone ID: LIB3139-037-P1-N1-F12
aattttaataaaccgcgatcacaggttgccgcaccttaaaaccggaaacaaaagcaatcgttacttgatttcaagaatttctcaatttcttcctacttctttgtgtacgatttcttaagggaaagaaaatcactctctgtgctggtcacagacttcgtgaatcattttcttttccactcctagtttatttgctgaacactctcctatttgatataggacttcgtgtcagatttaaactttttctgtttctttctcagttctctgtttaatttcaagttcaagctggtgaaattttggattagtgctcccactctcctatctggtataggacttcgtgggtagacttttctacttctctcctttctttcactctct

SEQ ID NO: 41831 - DNA, 377 bp, Glycine max
  Clone ID: LIB3139-037-P1-N1-F3
ttgggctcgggtgtggatttcccagttgggaacgtgtcgtttttcttgtttttttcggggcatgttgcgggttcagtgattgcttccttggacatgaggaggatgcagaggtgggaactggcttggacttttgatgtgctcaatgttttgcaagctgtgaggttgctgggtacaagaggacattacactattgatttggccgtaggggttggtgctggaattctctttgattctttagctggcaagtacgaagatagcaaaaggaatgctgctctatccacaacccacagagcacaatttgattgcgtcaacaatgtggatatagctaaaaaaattaacaaatgatcatggaaaagtacacatggagtgtaaaagta

SEQ ID NO: 41832 - DNA, 379 bp, Glycine max
  Clone ID: LIB3139-037-P1-N1-F5
atgatgttgaaactcctaaaggttccatgttggatcttaaaatttctcaatctaaaattgcacttcccaagaacacagttggaggaaccattctgcgtagtgatctattggcaaattttttgacagagggcaattttagagcaagtgttgatttgcagcgcactcatcgtattaaaggaatgattaaaatggtggccacagttggtattcctgagaatacaggtatagcattggcctgtgctatgaatagttcttttagggggcgcgccagttctgatatttacaccatctgctctcaagactgtgaattatggaatcctgcttgcacaaaagcaatgactatgtcatttaatccaaacccgtgttctgatgcatggag

SEQ ID NO: 41833 - DNA, 377 bp, Glycine max
  Clone ID: LIB3139-037-P1-N1-F6
ctcgagcctattcggctcgaggttgggtttacaaggagcaggtaaagcttttccaaacaagattgtttttgatgataagcttgtgttggctaacacacaagaattctttgatggaaattttccagtggattcttggttaccaatttttgtgaattgtctttatcctgtaagtcaattacctccagaagctgtcgttgtaaatgttacatgtggtagtggacgtggtggtttacccaccactgcttggattagttctgcagttaacaatcgctcctcagatatcaacaaaaagattcgcacagcacttgggaaaggtaagaaaattgcttttcttactagagttgatccttttccagtagctttactggctgttcttt

SEQ ID NO: 41834 - DNA, 348 bp, Glycine max
  unsure at all n locations
  Clone ID: LIB3139-037-P1-N1-F7
acctttctacgtacgtgtgctgttaggatgcagtgtgctttgatgatgctttgatgaatatacactgtgctatataaagccttcaaacattgataaagagtaatatagngagcgaattttgcacgggtcttaaggatttcatactcagcggttttctctccacccatggcctcaagggtctgcataaggataggaacgaatattactcacgggaattcacttctcttaatcttattcaaactttggaagaaattcatgggagattacaagcctttttcatatttcggcattagcaaggactacaacattgatattaaccccaagtttattattgttaatggcaaattt

SEQ ID NO: 41835 - DNA, 373 bp, Glycine max
  Clone ID: LIB3139-037-P1-N1-F8
aaataggtggatgggaaaactgactttccctcagggcacttcccgaagtgttaagagaatgcctctttctatagggggaggagctggtgcaaagaatgctattctcatgaatatgccaaatgctgttctttcaatgtggagatattttgttggagatctcgtctttgaagtttctaagatgacttctccctacattaaatgtacagtctctttcttcatagcatttggaaatttggctgatgacaccatcaattttgaggcttttccccacaagctggtgcagtttggagagattcaggaaaaagttgtgttgaaattttcacaagaggaatttcttacagcttggtcaactcaggtgcgtcccgcaacgact

SEQ ID NO: 41836 - DNA, 373 bp, Glycine max
  Clone ID: LIB3139-037-P1-N1-F9
ggcaatttctagcaaaaacctaaagcacattcttattgcatgtgccaaagccatttcagacaatgatttgctaacggcacaatggctgatggatgaattaaggcagatggtgtcagtttctggcgatccggttcaacggttgggagcatacatgttggaaggacttgttgcccgattggccgcctctgggagttcaatatacaaatctttaagatgcaaagaaccagaaagtgctgagcttctctcctacatgcacatattgtatgaggtttgcccctacttcaagtttgggtacatgtctgcaaatggagccattgcagatgccatgaaagatgaagacagagttcacataattgatttccaaattggtcaa

SEQ ID NO: 41837 - DNA, 334 bp, Glycine max
  Clone ID: LIB3139-037-P1-N1-G1
caatgttccagtgaacttgagcttgctactcaactactgtggaaagggtgttcccaagggtttcgtctgctattaatgaataaacacttctataatgtgtagtttcctaatgtaaagtatgtctcaaggttctatttcgctatattcgttattcatcatcctttgtactttgtacttttgtattccgtatagccaacgaacatttcgttcgtaattggttattattattgttgtgatggttgaaacttgaaaggcttcgatctttcttgtagtctcacttctcttgtgtattctatgtgaaaaattctactaataaaaattctgcatttaagct

SEQ ID NO: 41838 - DNA, 374 bp, Glycine max
  Clone ID: LIB3139-037-P1-N1-G10
tcggaatcaacggatttggaagaattggccgtttggtggccagggtggctctgcagagagacgatgttgaactcgttgccgttaacgatcctttcattaccaccgattacatgacatacatgtttaaatacgacagtgttcacgggcactggaagcatcacgatgtcaccgttaaggatgagaagacccttctcttcggtgacaagccagtcactgtttttggacacaggaaccctgaagagatcccatggaagtcgactggagctgacatcattgttgagtccaccggagttttcaccgataaggataaggctgccgcacatttgaagggtggtgcaaagaaggttattatttctgcccccagtaaggatgcc

SEQ ID NO: 41839 - DNA, 373 bp, Glycine max
  Clone ID: LIB3139-037-P1-N1-G11
ggcgaaggttatcgagtactgcaagaagcacgtcgaggccgcgaatcccgaagacaaaccctccgaggacgatctcaatgcctgggacgctgaattcgtcaaggtcgaccaggccacgctcttcgatctcatcctggctgctaactacttgaacatcaagagcctgctggaccttacatgtcaaactgtagccgacatgatcaaggggaagactccagaggaaattcgcaagacctttaacattaagaatgacttcacccctgaggaggaagaggaagttcgtcgggaaaaccaatgggcatttgaatgattttgttaatctcaaaaaatctgaatcaaagatctgccatgtggatttatgctatgcttgttt

SEQ ID NO: 41840 - DNA, 374 bp, Glycine max
  Clone ID: LIB3139-037-P1-N1-G12
cctagcttccaaaatgaagttccaagttatagagcttctctttggtaaaagcaccccaaaacaaatggtcccaaaagtgactttgcttgcagtgtttgccatacttctattcactgtcacaccactctcgtaccctttgtttagatattcatcatcatcaacatcatcacctctgaagagcaataagcaattatcagagaagccatcgtcagcatttgatgatctaaatgagtcaacaagcttgccttcaacttccataaagaagtgtgacattttcactggggaatgggtgccgaacccaaaggctccatattacacaaacaaaacatgctgggctattcatgagcaccaaaactgcatgaagtatggaagac

SEQ ID NO: 41841 - DNA, 374 bp, Glycine max
  Clone ID: LIB3139-037-P1-N1-G2
tattttcactgctaagaaacttgaggatattgtgccctcttctcacaactgtgatgttcctcatgtgaatcgtactgattaccagctcattgatattgctgaggatggatttttgagtctgcttactgaaaatgggaacaccaaggatgacctcaagcttcccactgatgagagtctgctcactcagataaaggatggatttgctgagggcaaggatcttgttgtgtctgtcatgtctgctatgggtgaggaacagatttgcgccctgaaggatattgggccaaagaactagcttttggtgctggcagcctgttgtttctatttaagcaaagatccttttgtaagcctttatattggtttgttcaagacctggc

SEQ ID NO: 41842 - DNA, 383 bp, Glycine max
  Clone ID: LIB3139-037-P1-N1-G4
gaaaattgtttttcttaccagagttgatccttttccagtagctttactggctgttctttttggcgttaagaatgaaattctgagttctaacgccactaaccctatgctgacgcgacttcttgagaactgtaagagtctcaaatatctggttgatgagtgtccttttgcatttgtgaactagtatgtaatattttattcacttaaataaagcgcattactatgtgcaatgagtgtgtttaaatttaaagaaacaaaataagaactctagataatttcaagttcaaaaaaaaaaaaaaataaaaaaaaaaaaaaaaaaaaagggcggtcagacaaaatgatgactggaagacccgaaaataaattacggaaaaaaaaaagggggg

SEQ ID NO: 41843 - DNA, 380 bp, Glycine max
  Clone ID: LIB3139-037-P1-N1-G5
tggaccagtacccacctgattgcatcgtcgccgacaccatgtattcctgggcggatgacgtggccaacaacctccgcatcccacgacttgccttcaacggataccccctcttctccggcgccgccatgaagtgcgtcatatcacaccccgaactccattccgacacgggccctttcgtcatccccgattttcctcaccgcgtcaccatgccctccagaccacccaagatggccaccgccttcatggatcatctcctcaaaatagagctcaagagccacggcctcatcgtgaacagcttcgccgagctggacggagaagagtgcatccagcactacgagaaaagcacgggtcacaaggcttggcatcttgggccagcttgt

SEQ ID NO: 41844 - DNA, 380 bp, Glycine max
  Clone ID: LIB3139-037-P1-N1-G6
ctctaaaacagttaaccaacaagctttcttttatgctagtgaacgcgaagtccatcacaacgacatatttatattcggcatagataacaccgtactctctaatatcccatactatgaaaaacatggatatggggtggaggaatttaatgaaaccttatatgatgaatgggttaacaagggcgacgcaccggcattgccagagactcttaaaaattacaacaagctgttgtctcttggcttcaagattgtattcttgtcaggaagatatcttgacaaaatggccgtaacagaagcaaacctaaagaaggctggcttccacacatgggagcagttaattctcaaggatccacatcttatcactccaaatgcactttcataca

SEQ ID NO: 41845 - DNA, 375 bp, Glycine max
  Clone ID: LIB3139-037-P1-N1-G7
agaaggcctaccatgaacagctctcagtggcagaaattaccaacagtgcttttgagccatcgtccatgatggccaagtgtgatcctcgtcacggaaagtacatggcgtgttgcctgatgtaccgtggtgatgttgtgcccaaagatgtaaacgctgctgttgccaccatcaagaccaagaggaccattcagtttgtggattggtgccctactggtttcaagtgtggtattaactaccagccacctaccgttgttcctggaggcgaccttgccaaggtgcagagggcagtttgcatgatttcaaactccaccagtgtggctgaagtgtttggccgcattgatcacaagtttgatctcatgtatgccaagcgtgctt

SEQ ID NO: 41846 - DNA, 375 bp, Glycine max
  Clone ID: LIB3139-037-P1-N1-G8
cttaaacccctaaaatcactatgcaaaattccaaagtagctagagtcggagcttcgatcgttaaacagctctgcacaaggaattgtacatccttgtgtggagtaggatatattcgaagcgcaagatatcattacaagcaacctctgtttcaacatcattcatttactaagttatacaagggagccatgatagaaaagcataatttcctttcaacaatgactactaacaacactaccaaggaaaggagtgaacaagaacaagcgatatctgtaacttttattgataaggacggtgaggagaagcatatcaaagtccctgttggaatgtctatgttagaagctgctcatgaaaacgacatagaactagaaggagcat

SEQ ID NO: 41847 - DNA, 343 bp, Glycine max
  Clone ID: LIB3139-037-P1-N1-G9
ctgagacggtgatgagaggagagaaggagggcgtcgtggcttgggatattcggaagcgcttattcccggcacgaagaagcaagtgcgcgttggctcccaaacataagaaagggaaacaacataaacctgtataagctgtgctctggcctcaaacgtcttggatacttgatgaacccatgggacgggctattgaagccctaacttactacgcccactgtctcatcacatgacgccctatgctatgattgagctacaatatgcgaattctgtaactcttcatgctactgatgttgcacacactcctactactgttaacttgggcctacctaatggtgcttctgaa

SEQ ID NO: 41848 - DNA, 378 bp, Glycine max
  Clone ID: LIB3139-037-P1-N1-H1
cggctcgagctcgagccgaatcggctcgagcaataactgtgaaaatatggaatctcttttggtttcaggggcagagtcatttaagagtctatgctctttgataatttcccaatgccccaactttgtatcattctgtagagaaggattgcctgcgcccaacttgattactttcatggttattggctctgacaagttgaagtcgttgcctgatgagatgagtactcttctcccaaagttagaattgctccacatatcctactgcccagaaattgagtcgtttccagaagggggtatgccacctaacctgagaacagttgtgattgagaattgtgagaaactactgagcggcctagcatggccatctatgggcatgcttac

SEQ ID NO: 41849 - DNA, 377 bp, Glycine max
  Clone ID: LIB3139-037-P1-N1-H10
aagcaacacacacttcaatttatcagcatggcctccgttcagtgccacaaaacctgcaaagtgagctgccaacaggaaaaccagcacgcctcgtttgggcagaaagtttctgacttgttcaaagggcatcaacataatgaccacagctccaattatgccacccaaaccaaagtgctttcccagtcagggtcagggttaggccccttcaccaccaaaactcaaacacaatgcggttgcccccaaacacatctcagtaccactcatggctccaacacaaaaggccatggccatggccaagggagaattaagagggagcacaagagagggatgctgcagaacatcaaggatcgcttatcaggtgacaccagcagcgacag

SEQ ID NO: 41850 - DNA, 78 bp, Glycine max
  Clone ID: LIB3139-037-P1-N1-H11
gaattttgattctagcaagcagagcttttgtcaattttctatcgaccttctcgggggaggaattttagtggacaaaac

SEQ ID NO: 41851 - DNA, 370 bp, Glycine max
  Clone ID: LIB3139-037-P1-N1-H12
cgcggctcttccaggttgaatttgtttcttcgtaggttctgttgcagtgagaaatgggcactttctccttttgattttcccgtcgaatcaagcatcaaaatccgagctttttcttttttgcaagtggtttttttgatttggggtagatttttttctttctttttttgggcttcgtagtgcattgaattggcgcggcattcacttgaatttgcaacgtgggagccggagctgcgatgaagtgtggtgcttggagggtattctcaaagtagcacttaattcgaggttgaatgtttggtcagagcatggattctgcaagggatgctgcgggtggtgtggcagggacagtgctaattcccatgcgttttgtgtg

SEQ ID NO: 41852 - DNA, 373 bp, Glycine max
  Clone ID: LIB3139-037-P1-N1-H2
caagaacacagttggaggaaccattctgcgtagtgatctattggcaaattttttgacagagggcaattttagagcaagtgttgatttgcagcgcactcatcgtattaaaggaatgattaaaatggtggccacagttggtattcctgagaatacaggtatagcattggcctgtgctatgaatagttcttttagggggcgcgccagttctgatatttacaccatctgctctcaagactgtgaattatggaatcctgcttgcacaaaagcaatgactatgtcatttaatccaaacccgtgttctgatgcatggagtttggaatttctgaagcgtaccggatttcattgtgatatcatttgtgtcactggatggact

SEQ ID NO: 41853 - DNA, 369 bp, Glycine max
  Clone ID: LIB3139-037-P1-N1-H3
acaggaatacgcgcaggttctccgaatgctcggaaacggtcgctgcgaagcgatgtgcatcgacggcaccaagcgcctctgccacatccgcggcaagatgcacaagaaggtctggatcgccgccggcgacatcatcctcgtcggcctccgcgactaccaggacgacaaggctgacgtcatcctcaagtacatgcccgatgaggcccgcctcctcaaggcctacggcgagcttcccgacaccaccaggctcaacgagggcatcggcgccggccttgatgaggaggaggacggttccgggaatgattatattgagttcgaggatgaggatattgataagatttgaaacaaatacaaataattagggttttg

SEQ ID NO: 41854 - DNA, 316 bp, Glycine max
  Clone ID: LIB3139-037-P1-N1-H4
caccaatttatgagcttgtgctcatgtatttggggtgttgatccaatatgcgccctcatcatttatggttgaaacaagctcattctggtctttttttaattgcagttcatcaaatgatccgtactactgagctattgcgtagggtatttaccttctggtggttatgtcctatgcagttgaaagtatcacccctgcgttttattgaacagttacaagcaggttgttcttgcttattttatggagaaatgttaagacatctttaaaaaattgacctgagaaatgagttatttgactatttatctaaagttttactttc

SEQ ID NO: 41855 - DNA, 382 bp, Glycine max
  Clone ID: LIB3139-037-P1-N1-H6
ttctctgtctgcttcttcactttctctcgtttcaatcgaaaccaaaacaaaaacatgggcagaaaattcttcgtcggtggcaactggaaatgcaatgggaccactgaggaggtaaagaagattgttactactttgaatgaggctaaagtccctggagaagatgtcgtagaagttgttgtgagccctccttttgtgttccttcctgttgtaaaaagtttgctgcgccctgatttccatgtttcggcacaaaactgttgggttcgcaaaggtggtgcttataccggtgaggttagtgctgaaatgcttgttaatttgggaattccttgggttattattggtcactctgaacggaggcagcttttaaatgaatcaaacgagtttg

SEQ ID NO: 41856 - DNA, 371 bp, Glycine max
  Clone ID: LIB3139-037-P1-N1-H7
gcttctcgcttctctcagttcagtgcccagagtagaggctagagctcctttcagaagaccgaaacctagggttagtgttttcgttcttgtgcagactgcagagccatggaagccgcagtggtcgaccccggttccagcctcctcaaagccggtttcgcgattcccgatcaagctcccgccatgataattcctacccaaatgaagcgaatgctcgatgatgggtcgatgacggataacccggcagtcgatgacgttgccgttgatccggtgtgcagaggttatgtcagtgattgggatgccatggaggatttgctgcattatgtattgtatactggctttggatgggaaatgggcaatgaaagacaaatact

SEQ ID NO: 41857 - DNA, 374 bp, Glycine max
  Clone ID: LIB3139-037-P1-N1-H8
gataatgttagcccagattccacttcaccctctaaagatgctttgcttgaggaggcttgtaagaagtatgatgaggccactcgtctttgtcccacactgcatgatgctttctacaattgggctatagcaatttctgatcgggcaaagatgcgtggccgcacaaaggaagctgaagagctatggaagctggcaacacggaactatgaaaaagcagttcaacttaactggaacagtcctcaggcgctcaataactggggacttgctcttcaggaactcagtggcattgttccagctcgagaaaagcaaaagattgtgagaactgctatcagcaagtttcgtgcagccatacagttgcaatttgatttccatcgggc

SEQ ID NO: 41858 - DNA, 373 bp, Glycine max
  Clone ID: LIB3139-037-P1-N1-H9
gtgaactctaacagagtggaacactttgctagccatgatagcgccatcgaggagacaatgcaaatccatgcagtgcacatgccaccacaccagaccacacttcacaaactcatgcacagagtcttcgaaatcttcttaccagatgaccatgtccaccggttcaagaaccaaactcgctttaaaaaggttctcctcacacttcaatatatattccccataactgactgggccccaaactacaatcttaccctactgcggtctgacctcatctgtggtctcaccattggcagcctctccattcctgaaggaatcagttatgccaagcttgacaacttgccacctattcttgcattatatacgagatttgcatccc

SEQ ID NO: 41859 - DNA, 308 bp, Glycine max
  Clone ID: LIB3139-038-P1-N1-A10
ctcgagccgaatcggctcgagctcgagcggctctagcggctcgagctcgagccaaatcggatgcagagctattgatgcttaaggaattcccaacacttatcagtcaagcaacacatttgctggctactacctagccaacatgctacaagctggaaacacaaatgcccccagaaacaaagataatattctaggagattgtacaaccaaatctgtttataacacaggaaacgatatctgaacttattcaattaaatctgcggatgatacaagaaccttgaacgaaattgtttacatttgaccaccaaata

SEQ ID NO: 41860 - DNA, 397 bp, Glycine max
  Clone ID: LIB3139-038-P1-N1-A11
gatcaagaaaaacccaaaaagattgataccagattgagacaaagaatagatcctcaatacaatgaggttcaggctcagatggaaacaaatttgtttaaattgtctcttgatgatgttgaaactcctaaaggttctatgttggatcttaaaatttctcaatctaaaattgcacttcccaagaacacagttggaggaaccattctgcgtagtgatctattggcaaattttttgacagagggcaattttagagcaagtgttgatttgcagcgcactcatcgtattaaaggaatgattaaaatggtggccacagttggtattcctgagaatacaagtatagcattggcctgtgctatgaatagttcttttagggggcgcgccagttctgatatttacacca

SEQ ID NO: 41861 - DNA, 403 bp, Glycine max
  Clone ID: LIB3139-038-P1-N1-A12
atagaattcgccatgcaacatgccaagtccaagggtctctgccacaacggggattcggttgtggcacttcatcgtgtgggcactgcttctgtcatcaagatcttgactgtgaaatgatcaccccattacagggaattcttctgctgtttttggcaaattttttagatggtgcaaaagaggtctcgttatacctcttcatatctacattggatgcaaacttcaatcaaaagcatttatcaggatgggttacctgtttttcacatatcttatattactgttttttttttttttgttacatttgccttatcattgtggcgagcagccacctgctttcatttgttaagattttgtatgaggcttttggtgaaccaaaaaactagccacttctggattttgaattcta

SEQ ID NO: 41862 - DNA, 160 bp, Glycine max
  Clone ID: LIB3139-038-P1-N1-A3
aagagctatgacgtgcccctgcacgctgaagcgtcggatttgggttcgggccgcttttgaagtttttaagatgactcctccctccattaaaggtccagttttttttttaatagcattgggaaattgggttgataacaccatcaatttgggggtttttccc

SEQ ID NO: 41863 - DNA, 422 bp, Glycine max
  Clone ID: LIB3139-038-P1-N1-A5
ggtttttgtgatctgctagctacgatgggtaagggaacggggagtttcggtaagagaaggaacaagacccacaccctctgtgtgaggtgtggccgccgcagtttccacctccagaagagtcgttgcgccgcgtgcgctttccccgctgcgcgcaccaggaaatataactggagcgtgaaggccattaggagaaagaccaccggaactggaaggatgaggtacttgcgtaacgtgccccgtagatttaagagtggcttcagagacggtaccgaagctgcacccaggaagagaggagctgctgcctctacctaagctttgaataatagcaatttttgctgggtcagtgaattatataggatttaatgtttctatgttgatgccgagctctttggaacacgtttctttctgtcgttttaatttca

SEQ ID NO: 41864 - DNA, 376 bp, Glycine max
  unsure at all n locations
  Clone ID: LIB3139-038-P1-N1-A6
gaggaaaataatttcttttattaaaaaaaacttagaatcgaaacgaaaaatcgccatgaatcccaaaatcctcttcgtgtttgctctgcttctgaatctcgtatccaattcgttccaaaaccctaaccctaaaacccccaaatcaacgtcatcgcaggctcacgtggagctcatcaaccacggcttacccgccggtcttctccccgccaccaccgtcttgggctacgccgtgaaccgtacctncggtgactttaccgtcaagctcggcggggcgtgcaagatcacgctcccgccggacaactacgtcgccacctattccgacaccatcacaagggagatcgtgaaggggaaaatcgctgaactcgaggggattagg

SEQ ID NO: 41865 - DNA, 387 bp, Glycine max
  Clone ID: LIB3139-038-P1-N1-A7
aggatctagagaaatcatccctcatgtcccagaaaagttttgagaagcgattcgggcagtcaccagtgttcattgcttccaccttgatggaaaatggaggacttcctgaaggcacaaatagccaatcattggttaaggaggccatccatgttataagctgtggctatgaagagaagactgaatggggcaaagagattgggtggatttacggctcggtcacagaagatattttgactggattcaagatgcactgcagagggtggaaatcagtatattgcatgccaaagcgaccagcattcaagggatctgccccaataaatctatcagatagattgcaccaagttctgaggtgggctcttggctctgttgaaatttttcttagtcgtc

SEQ ID NO: 41866 - DNA, 411 bp, Glycine max
  Clone ID: LIB3139-038-P1-N1-A9
atttggaaatttggctgatgacaccatcaattttgaggcttttccccacaagctggtgcagtttggagagattcaggaaaaagttgtattgaaattttcacaagaggaatttcttacagcttggtcaactcaggtgcgtcctgcaacaactctgttggctgatgggtgtccatatttgtatgctatggtgcatgatagttcagtgtctacaataccaggtgattttgtcattggtgttaagttgacaaccataaacaatatgtgtgcatatgggcttaatcctggtatttcaggttctcgtcttttgggcaccattcctcagtccatttcacagcaaactgtttggaatcaaatggcaacagtgagaacaccattgaattttgattctagcaagcagagcttttgtcaatt

SEQ ID NO: 41867 - DNA, 414 bp, Glycine max
  unsure at all n locations
  Clone ID: LIB3139-038-P1-N1-B1
attaaatatgagtcttaagggatttttcgagggtggtgtcgcttccatcgtcgcaggctgcaccactcacccactcgacctcatcaaagttcgaatgcaacttcaagaaacccacactctccgcccagcctttgcctttcacgctcccactccaatgcctcctccgccgccctccggccccatctccgtcggcctccgcatcgttcagtcggagggactcgccgctcttttctccggcgtntncgccaccgtcctccgccagacgctctactccaccacccgcatgggcctctacgacgtcctcaagcgccactggaccgaccccgaccgcggaaccatgcccctcacaagaaaaatcacggccgggctcgtcgccggcgggatcggagccgccgtgggcaaccccgccgacgt

SEQ ID NO: 41868 - DNA, 417 bp, Glycine max
  Clone ID: LIB3139-038-P1-N1-B10
ctcaagagaaactttaggcagatgtctaatgttttgtgggtggctcctgaggacaaggcgagtttatggtcacaacttcattatgtttcatgtaataatctggaaatgcaagaagcttatcttgtcaatctcgtaaatgtgttacgagaattgtatttgcacagtccagaggaagctcgccaattgagaaggaaagctctctctcgtattgaatggctgcaaaaagctgatgtgcctaccatagcacagattgaagagttccattcgatgcagaggatgatgaatgctcctgattcaaatgataatatcgatctactgttgagcattgatttgttgggtttacaaggagcaggtaaagcttttccaaacaagattgtttttgatgataagcttgtgttggctaacacacaagaattc

SEQ ID NO: 41869 - DNA, 418 bp, Glycine max
  Clone ID: LIB3139-038-P1-N1-B11
ctcgagccgattcggctcgagagtttccgttaacgctctccaatacaaaataaccactcactgaatattcggtcgaagatgtccgccgccgaagaagctaaagttcccgccgtcgaaaagccggtggaggaggtgaaggcgccgaagcttgccaaggagaagaaacctaaggctccgaaggaaaagaagccgaaacaggccaaaactgcttctcatcctccatatctccagatgattaaggacgctttgattgctctgaacgagaaaggaggatcgagtccatatgcgatagcgaagtacatggaggagaagcacaaggcggtgcttcctgcgaatttcaagaagatactaggtctgcaactgaagaaccaagctgcgagagggaaactcgtcaagatcaaggcttcgtacaagttag

SEQ ID NO: 41870 - DNA, 411 bp, Glycine max
  Clone ID: LIB3139-038-P1-N1-B12
gatggtttgattaccaagcaagttatgagcaagatggcagaaatgataaacagtctttgtggtggtgatgaaaaattgatgcgtgaaaggacgcacctgctgttggcttgttgttcaaggatggcaatttgtaagaaagatgtttggagagttgaatgtggaatcccttctggatttccgctcacagttatttgcaatagcatttttaatgagatgctcattagatatagctatgaaaaattactgcgccaggctaaagctccaagtatgtttttacaatccttcaaaaattttgtttctttgtgtgtgtatggtgatgataacttaattagtgttcatgaatatgtcaagccttactttagtggttctaaattgaaaagctttctagctagtcataacatcaccattact

SEQ ID NO: 41871 - DNA, 410 bp, Glycine max
  Clone ID: LIB3139-038-P1-N1-B2
atctttcacaattcattaactttggagcctaaattaggtcattaatcaaagccatgaaaggaagcaagaagccttatctagttgtgatcctcatagaagccatctatgctgccatgtttctgctctcaaaagctgcatttgaccatggcatgaacaatttcatctttgtcttctatagacagacaacagccaccatattccttatcccttttgctttcttctttgaatgcaggaaaactgcacctcctttgaccttggtgaccttctgcaagatctttttcctttctttcctggggatcagtgcgagcttggacatatatggtattggacttatttacacttctgctactttagctgctgctaccacaaactgccttccagtcatcaccttcttcttggcgctcatactc

SEQ ID NO: 41872 - DNA, 213 bp, Glycine max
  Clone ID: LIB3139-038-P1-N1-B4
agggatgcagggtctaattattctgctccaagcttattgaatacagaatgtacctcaaatccattcaggtccaaaggtgcagaaaaatcttcttgggaaactaaaagtaattctaataagacctcctcatggggggctgcagtggataaaactggaattgcttcttatgcagatcaatcttgtggcttgggaaaaggtggagggagcttgggt

SEQ ID NO: 41873 - DNA, 401 bp, Glycine max
  Clone ID: LIB3139-038-P1-N1-B5
ctgcttaaagttttatgggtggctcctgaggacaaggcgagtttatggtcacaacttcattatgtttcgtgcaataatctggaaatgcaagaagcttatcttgtcaatctcgtaaatgtgttacgagaattgtatttgcacagtccagaggaagctcgccaattgagaaggaaagctctctctcgtattgaatggctgcaaaaagctgatgtgcctaccatagcacagattgaagagttccattcgatgcagaggatgatgaatgctcctgattcaaatgataatattgatctactgttgagcattgatttgttgggtttacaaggagcaggtaaagcttttccaaacaagattgtttttgatgataagcttgtgttggctaacacacaagaattctttga

SEQ ID NO: 41874 - DNA, 408 bp, Glycine max
  Clone ID: LIB3139-038-P1-N1-B7
gttgccatgaagcagcactttgtgcttgtacatggcataggtggaggaagttggtgctggtacaaaatccggtgccttatggagaattcaggctgcaaggtctcatgcatagacctcaaaagtgctggaattgatcaatctgatgctgattccgtgctatcttttgatgattacaataaaccacttatggatttcatgtctgatttgcctgagaacgaacaggttatattggtggggcacagcgctggagggttgagcattactcaggcctgtcacaagtttgcaaacaagattcgtttagctgtttatgtggcagcaactatgctcaagttcggattcctgaccgatcaagatcttaaagatggggtgcctgatttatccgagtatgtggatgtgtatgagctggga

SEQ ID NO: 41875 - DNA, 411 bp, Glycine max
  Clone ID: LIB3139-038-P1-N1-B8
tggcacttgatcttcctcatggtgggcatctgtcgcatggttatcagactgacaccaagaagatatcagctgtatctatattttttgaaacaatgccatacagattgaatgagagcactggttatatcgattatgaccagttggagaaaagtgcagtactttttaggccaaaattaatagttgctggtgctagtgcttatgctcgcctttatgattatgcacgtgttcgcaaggtctgtgataagcagaaggcagttctgttggctgatatggcacatatcagtggattggttgctgcaggtgttattccttctccttttgattatgcagatgttgtaacaaccacaacacataagtcacttcgtggaccacgtggggctatgattttcttcaggaagggtgtgaaagaga

SEQ ID NO: 41876 - DNA, 319 bp, Glycine max
  Clone ID: LIB3139-038-P1-N1-B9
attgaatggctgcaaaaagctgatgtgcctaccatagcacagattgaagagttccattcgatgcagaggatgatgaatgctcctgattcaaatgataatattgatttactgttgagcattgatttgttgggtttacaaggagcaggtaaagcttttccaaacaaaattgtttttgatgataagcttgtgttggctaacacacaagaattctttgatggaaattttccagtggattcttggttaccaatttttgtgaattgtctttatcctgtaagtcaattaccttcagaagctgtcgttgtaaatgttacatgtggta

SEQ ID NO: 41877 - DNA, 420 bp, Glycine max
  Clone ID: LIB3139-038-P1-N1-C1
gattgcattgtggtggaatgttttagtgcacaaaggtaaaaaagaaaaggggggtgaagattcgattggcaaggctcgggtgccggaaccacccattctatcgtgtggttgttacggatagcaaaacaacaagagatggcaagcaacttgaagttttaggtttctacaatcccgtcgcaggcaaggatgatgacaaaagaatgagcctcaaactggagagaatcaagtaagtatgtaatttccatatatttgtttaactcaaagattggaattatattacccatgtgaaatgtttctttatgaatttaataataggacactagaactttgattcccccttgtgttgtttaggtattggctttccgttggagctaagccttcagagcctgttgagcatcttctatttagagcaggtttagg

SEQ ID NO: 41878 - DNA, 387 bp, Glycine max
  Clone ID: LIB3139-038-P1-N1-C10
gggtgaagatatctgaactgttgaagtatccagttagaggtctcgtctttgagggtggcgatacgctggaagatttatcaaatgttgtttcagatgcctgtatatgtcttcagaacaacaacatacctttcaatgttcttatctctgactgtggaaagcaagtctatctgttaccacagtgttatgcagagaaacaagctcttggagaagtggatgctgagcttcttgacacccaagtgaatcctgctgtgtgggaaattagtgggcacatggttctaaagaggaagaaggattatgatgaggcatctgaaggcaatgcttggaggcttcttgcagaggtgtccctctctcaagagaggtttcaagaagtcaatgatcttatttttg

SEQ ID NO: 41879 - DNA, 396 bp, Glycine max
  Clone ID: LIB3139-038-P1-N1-C11
ggaaaggaatggagctacctcaggggtggtctaactactcttgatcgtgattatggatggatcaataacattcaccatgacattggcactcatgtcattcatcacctatttcctcaaattccacactatcacttagttgaggctactgaggctgctaagccagtgtttggaaaatattatagagaaccaaagaaatcagcagcacctcttccttttcaccttattggggaaataataaggagcttcaagactgaccattttgttagtgacacgggggatgttgtgtactatcaaaccgactctaagattaatggctcttccaaattagagtgaatattaaaattcttttctatatagacaagagaggcttatacacaattcttattgctttaaaga

SEQ ID NO: 41880 - DNA, 417 bp, Glycine max
  Clone ID: LIB3139-038-P1-N1-C12
cagaggcctacataaagcttaagaataccattctcaagcgcaagtccataaccagtttgtcaggatttttggaagttgctcctcattgtcttgcagcaatatatcctatttgcccgaacttaacatccttgaacttgagctatgcagcaggcattcagggtagtgatctgataaaactgattcgtcactgtgtgaaacttcagcgcttattgataatggattgcattggagacaaaggacttgatgttgtagctacttcatgtaaagacttgcaagaattgagggtgtttccatctgttccctttggaaatccagcagccgtcacagaaaaagggctggttgcaatatcaatgggttgccctaagcttcactcattgctctatttctgccaccagatgacaaatgctgcactcataa

SEQ ID NO: 41881 - DNA, 384 bp, Glycine max
  unsure at all n locations
  Clone ID: LIB3139-038-P1-N1-C5
ctcagaattctctaaaagagatctttttctgctctttgaagaaagaagggtctttgcttgattttggagatgtctctgctctcaaatctcatcaaccttaacctctccgataccaccgagaaggtgatcgcagagtacatatggatcggtggatcaggaatggacctgaggagcaaagcaaggactctcccaggaccagttagcgacccttcagagcttcccaagtggaactatgatggttccagcacangtcaagcttctggtgaagacagtgaagtgattttatacccacaagccattttcagggatccattcagaaggggtaacaatatcttggttatctgtgatgcctacactcctgctggagaacctattcccactaac

SEQ ID NO: 41882 - DNA, 411 bp, Glycine max
  unsure at all n locations
  Clone ID: LIB3139-038-P1-N1-C6
ccggaacacgcatatgtagctcctgatccgtttagagagacacaagctggggtccatttttcaaatggagcctggaatttgattcacccacagaacaagccgcgtgtgattgaggatggtgtgatgcanggttctgtaacagccacaggattgagggagaagaggagttatctcatgaatgatatgtcacatgaagaagagagaagcaacaagctttcttctgtctactccgatgattcggagccatctagcatgtttgatgaggtgctgctttgtaaggatggtaagagtccatccattttttatgctggccgtgaaccatcaccatcgcagattgctgactcangaggatctaatgggaagaaaacacgatcaaagagaggttccaataaggggacaagggncagcgtg

SEQ ID NO: 41883 - DNA, 409 bp, Glycine max
  Clone ID: LIB3139-038-P1-N1-C7
caaggtacagaagttgttaaagagagctctgatatcattattttggatgacaattttgcttcagttgtgaaggttagtcctcatttcttatttggaagattttgaactgttcttataaatgatgcatgtttaacatctaccttttgaaggactatttctggcattacttgaaatgcagaattgtaatttttttaatactttttgttttgtgagaggtatagaattaaggtgtatcccatagcctgatattattttatgtaagctgattatgaattgatgtttgaagcataagtggtactgcctttcaatttctttcgccaattcaggttgtcaaatgggggcggtctgtatatgcaaatattcagaaatttatccagtttcagcttacagtcaatatagcagcacttgc

SEQ ID NO: 41884 - DNA, 405 bp, Glycine max
  unsure at all n locations
  Clone ID: LIB3139-038-P1-N1-C8
cttcacttannttctccncnntatgganngtttannatcttgggtggtcccnngtcagaaggtnnttttaaannttttggtgagggggttcattnnatgaagnnaaaagggaccaagctnnntagttgtcaaggttgnnngaatcaaccttcataccctccatgnnngaatggaccttggtttggcccaatagggttacctggagtaagggcaaccgatanttctgtggttgcgattanttgttagttttgatgggtttgattacccaagcaagggttatgagccaagatgtgcagaannatgataaaccaagtcttttgtgggtgggtgatgaaaaattgatgccgtgaaaaggacacccacctgctgttggctgggtgttcaaggatggcaatttgtaagaaa

SEQ ID NO: 41885 - DNA, 415 bp, Glycine max
  Clone ID: LIB3139-038-P1-N1-C9
ccctcgcgcttccgccttcacactcgtcggagcacactcgccggaaaacactccccggcaaaaaaagaaaacctcaaagactaacccgagtcgttatagtgggttggagtgaacgaaaagaaacaaaggcaatacaaaaagggcaaacacgaatacacggttttcattctttcaccactcttgtttccttttacgacgtcgttatggaactcaagtttatgcagttttcgcaacacgttcttcctcattccccttcttcatctcaaaccctcgcttctgcactctcttccccttcatcgtccaaaacgcgaaccctagtgtgtcgtttcgtgaatcgctcgagcctctttccgaccaccacccgccttcttcggagaaccaaatcgtttgagcaccacgcgcttttcacgcgcag

SEQ ID NO: 41886 - DNA, 256 bp, Glycine max
  Clone ID: LIB3139-038-P1-N1-D1
ggcgggaggggggaaagtttatcaaaccctacccaacggacctgacttggtagggcattgcacccacacacttgtaacaacttgtggtaattttggtcctggggcaaaagtttaaagtaacggcaattgtactgctaaaggaggatcccctaaggctcgcgttgttgcctacaaaacatgcttgaataaacttgattaaagggggtgctattatgcagatattctagaaacatttgatcatgccatttattaaggg

SEQ ID NO: 41887 - DNA, 413 bp, Glycine max
  Clone ID: LIB3139-038-P1-N1-D10
aaaaggtagtggtaggtgtgatgacaaaagcactgctcctccttgcattggttgggtggaaatgatggcaccagtgttttctaaaaagtcttggcagtgtgtatggcatttgatccagaatgacttaatccatgcctggggcctggataggcagcttggctattgtgcacagggagatcgaatgcaaaatgttggtgtggttgattctgagtacatagttcatctgggtctgcctactcttgggggctcaaatggcaatgaggcaccatcaggctcctcaggagataatagagctaaagtaagcaacataggaattaggataatgtagatttatgcacctttagctccaattctcacccttgacaaaggaatatactacatgcaggttaggatgcagtcatacattgaaatgc

SEQ ID NO: 41888 - DNA, 415 bp, Glycine max
  Clone ID: LIB3139-038-P1-N1-D11
taaggaagacccatattcagagggtacaccacatataatccaattttcatcgtcattgatgcacacttaccccacccttctcttttttctttgttctatttaaataaataaaaaaattgaaaccttaaattcctagctgtcttcaatatcgtaaaactcactctgcaatcatcgattttgttttcctgtgatttagggtttgattctgatcgaaacccgcgccatggccatgttcgattccatcttcaacaaaggttttaaggctgccaaatgtaaaacattgctgaagctgacaattccgcgtataaagctgctaagaaacagacgagagattcagttgaagaacatgcggcgtgagattgccaagctacttgagactggacaagaagccacagctcgaattagggtatacctg

SEQ ID NO: 41889 - DNA, 406 bp, Glycine max
  Clone ID: LIB3139-038-P1-N1-D12
gagaaatcttcttccctttcacagactccttcagcagcaagaccacttgtaccccctggttttgcaagtacaaagttggaacgcaatttggcaaccaaaacatcccttaacactcattcaacagaggttggacgacctgcgcctggtgatactggagtcttggaagcatcagatgacaatggatttattcaacttaatgctgaagtaaaaggaaaggaggccatgggagctttcaatccagacaattcaaattctatcctatacaagctttttggtaacgcttcaacgctagacaatgacaaatcaactagtattgttgagcagcctgatcaaaaagcagatgagacatggagtccacatgccttccaatcttccaagtttgctcattggtttgttgaagaagaaa

SEQ ID NO: 41890 - DNA, 398 bp, Glycine max
  unsure at all n locations
  Clone ID: LIB3139-038-P1-N1-D6
tgctgttaaaagactttttttagatggcatccagggtcacagggggtggttggctgaagtcaactatctgggacagctttctcatcctcatctagtgagattgattgggttttgccttgaaaatgaacatcgccttctcgtctccgaatttatgccacgtggaagcttggaaaaccatttgttcaggagaggctcatatnttcaaccactttcttggagcttacgtttgaaggtagctcttgatgctgccaaagggcttgcatttctccacagtgcagaagcaaaagtgatatatagagattttaagacttcaaatatcttgctggattcaaaatataatgcaaaactttctgattttgggctggcaaaggatggaccaacaggtgacaaaagtcatg

SEQ ID NO: 41891 - DNA, 416 bp, Glycine max
  Clone ID: LIB3139-038-P1-N1-D7
cggctcgaggccaagtgaaagagagaagaaaagtcaaagacaatgtcagggatcattcacaagattgaggagacccttcatgtgggaggccacaagaaggaggaggagcacaagggtgagcagcaccatggtggagaatacaaaggggagcatcatggtgaacacagtactgaatacaaaggagagcatcatgttggtgagcacaagccggagcaccatggaggagaagagcacaaagaggggttcctagacaagatcaaggacaagatccacggcgaggagggtggcgccaccgccgagggcgagaagaagaagaagaagaaggagaagaagaagcatgaacatggccatgacagcagcagcagcagtgacagtgattagattatctcccactgctgcatcacctatatatctta

SEQ ID NO: 41892 - DNA, 349 bp, Glycine max
  Clone ID: LIB3139-038-P1-N1-D8
agaatatcatcttgactgatgttcgtgctgcatggaagcgtcccattacaaccacgcttgctcaagctggtttgctgcaacctagatttgtagatcccctcaacataacagcaatggcatgccctgctttcccattatgtcctctggcaattactgaagctgaacgtgggatacctaacatacttaagcggattcgtgatgtttttgataaggttggcctgaagtatagtgagtctgtggttgtaaggataactggctgccctaatggttgtgctagaccatacatggctgaacttggactagttggtgatggtccaaatagctatcagatttggcttggaggaaacca

SEQ ID NO: 41893 - DNA, 412 bp, Glycine max
  Clone ID: LIB3139-038-P1-N1-D9
gtcaagccttactttagtggttctaaattgaaaagctttctagctggtcataatatcaccattactgatggtattgacaaaactagtgcaactttgcaatttagaaagttagcagattgtgattttctcaagagaaactttaagcagatgtctaatgttttgtgggtggctcctgaggataaggcgagtttatggtcacaacttcattatgtttcgtgtaataatctggaaatgcaagaagcttatcttgtcaatctcgtaaatgtgttacgagaattgtatttgcacagtccagaggaagctcgccaattgagaaggaaagctctctctcgtattgaatggctgcaaaaagctgatgtgcctaccatagcacagattgaagagttccattcgatgcaaaggatgatgaatg

SEQ ID NO: 41894 - DNA, 415 bp, Glycine max
  unsure at all n locations
  Clone ID: LIB3139-038-P1-N1-E10
ctcgagccgcttgaaaatcctccttatcgatccaacaagcagcaaactcactgaacaaatccacaaacagaaacaaagatcctactcgtgtagatctaataacatcaccttcttcttctcctacagatcatgaattcctttcaagaatttgactcatcaaacacaaacagtaccaaagccaccaatttcccatcatcatcatcagcagcaccagcagcaacagcaccaccatgttcttcttcttcttcttcgaccactctgagccgctacgagaaccaaaagcggcgcgactggaacacgttcgggcagtacctncgcaaccacaggcccccactctcgctctcacggtgcagcggcgcgcacgtgctggagttcctgcggtacctcgaccagttcgggaaaaccaaggttcaca

SEQ ID NO: 41895 - DNA, 415 bp, Glycine max
  Clone ID: LIB3139-038-P1-N1-E11
catagttggtgcaatgcttttggttgatacttatcataccaatgctgaaaatgcagttcgtagtatttttgttgcgcctttcagaggcggaaggcccattcgggtggttacatttccgaataccattgtgcagattgaaccagacatgaattcaaggtttcagcttttgagtaccactaccaatggtgattttgttcaagggaaagatctcgcaatggttaaagttaatgtagcatgtgctgctgttggcttgacatcaagttacactccaactccattgttggaatctggtttgcaaaaagacagagggttaattgtggagtattttggaaagatgtcttacgttgctcataacgttaatcagccccaagagaaagatttgttagagggaaatttttcctttgatattaaatct

SEQ ID NO: 41896 - DNA, 400 bp, Glycine max
  Clone ID: LIB3139-038-P1-N1-E12
gcacacccttgttccatgaattcaaaaagcaagcttctttcttcttcaaggagaaaattaagactgctagattagctctaacagatgtcacccctgcagaactgatgacagaagaggcaacaagtggaaatccatgggccccagatgccagaactctcagatcaatttcaagggatgcttttgagctagacgattattggaggattgtggagattctgcataaaaggtttcttaaatttgaaaagaagaattggaggatctcttacaattccctgatcgtgcttgagcacttgttgactcatggaccagagagtgttgcggaggaatttaagagtgacaaagatgtcattagccaaatgaaaggttttcagtatattgatgacactggacaatgggtgca

SEQ ID NO: 41897 - DNA, 236 bp, Glycine max
  Clone ID: LIB3139-038-P1-N1-E3
ctggtgcaaagaatgctattctcatgaatatgccaaatgcttttctttcaatgtggagatattttggtggagatcctcgctttggaggttctaaaatgacttctccctaccttaaaatgtccggctttttcttcatagcatttgggaatttggcttgttaccccctcaaatttgggggtttttcccacaagcttgtgccaattggggaggatcaaggaaaaagtgtatttgaaatt

SEQ ID NO: 41898 - DNA, 108 bp, Glycine max
  Clone ID: LIB3139-038-P1-N1-E5
ttggaatcaaaccaatcttcattggaatggcctggtttggccaataaattactgagtaagggcaccgattttttgggttgcaatattcctagtttggagggttggata

SEQ ID NO: 41899 - DNA, 200 bp, Glycine max
  Clone ID: LIB3139-038-P1-N1-E6
gcaactttgcaatttataaagttagcagattgtgatttcctaggagccggcccataaaacattagacatgtgcttaaagtttctcttgagaaaatcacaatctgctaactttctaaagagaaactttaagcagatgtctaatgtttcatgggtggctcctgaggaaacactatctgctagctttccacattgcatgttgc

SEQ ID NO: 41900 - DNA, 402 bp, Glycine max
  Clone ID: LIB3139-038-P1-N1-E7
gttatttgcaatagcatttttaatgagatgctcattagatatagctatgaaaaattactgcgccaggctaaagctccaagtatgtttttacaatccttcaaaaattttgtttctttgtgtgtgtatggtgatgataacttaattagtgttcatgaatatgtcaagccttactttagtggttctaaattgaaaagctttctagctggtcataatatcaccattactgatggtattgacaaaactagtgcaactttgcaatttagaaagttagcagattgtgattttctcaagagaaactttaagcagatgtctaatgttttatgggtggctcctgaggacaaggcgagtttatggtcacaacttcattatgtttcgtgcaataatctggaaatgcaagaagct

SEQ ID NO: 41901 - DNA, 332 bp, Glycine max
  Clone ID: LIB3139-038-P1-N1-E8
tgctctctctctccctcttcctctccctccaaattttccttcattctcacgcgccgccgtggtttccgccggcggctactccctatccaccgcgcatccatcccgcttccctctcctcgcttttctcacaaaacaaaaaaaattaaaaatttctccggagactgggtattatcgttatcggtcactgggttaggttttgctgttcttcctagggttttattgtgtccaataacaagaggagggggaagggaaacaaaacaaaaaaaaaaaagaattaaaggcgaaaattagggatttttttttggaaaaaaaaaagagaaatttaagttatc

SEQ ID NO: 41902 - DNA, 396 bp, Glycine max
  unsure at all n locations
  Clone ID: LIB3139-038-P1-N1-E9
gagagaagtaatggcgaacatagacatcgaagggatcttgaagcagcagcagccttatgatgggcgcgttccgaagacgaagatagtgtgtactttgggccctgcttctcgatccgtagaaatgaccgagaagcttctgagggcagggatgaacgttgctcgtttcaatttctctcatggcacccacgactatcaccaggaaaccctcaacaatctcaagactgccatgcacaacactggcatactctgtgccgtcatgcttgacactaagggacctgagattcggactggttttctgaaagatggaaaacctattcaacttaaagaagggcaagaagtcaccataactactgattatgacattaaaggggatccggagatgatatncatgagtta

SEQ ID NO: 41903 - DNA, 407 bp, Glycine max
  Clone ID: LIB3139-038-P1-N1-F10
gaaagaaggtttttttagtatagttaacagcatggagagggaggaagatgttaaggttggagcacagaaattctcggagaggcaagcactgggtacaggagctaagagtgacaaggactacaaggaggcaccaccagcacccttgtttgagccaggggagttaaagtcatggtctttttacagagctgggatcgcagagtttgtggccacattcttgttcctctacatcactgtcttgactgtcatgggtgtcaacagggcacccaacaagtgctcttctgttggcattcaaggaattgcatgggcttttggtggcatgatctttgcccttgtctactgcactgctggaatatcaggtgggcacataaatccggcagtgacgttcggtttgtttctggctaggaagc

SEQ ID NO: 41904 - DNA, 316 bp, Glycine max
  Clone ID: LIB3139-038-P1-N1-F11
ggcttttgagggcgttggtagtaagaatggatatccatatccacatgctcctcacgtccatttcttgcttattctttatcactctgccgcagtccctctctcaaccaccatctgtcttcaattattcggcttgtaaggaatggccatacaactgtggaacactttccggcatcttctatccattctggggagagaaccgaccccctcattgtggtggcggcgaagcattcaagctgagctgccatgatgatattactactattctaattgcctcacataatttgatggtgaagaacattcacgacaccactcgaac

SEQ ID NO: 41905 - DNA, 412 bp, Glycine max
  Clone ID: LIB3139-038-P1-N1-F12
ctcgagccgcccgtatcatacaataattagtttctccaaaacaaattatttttaatccatttcatgtgttgtcaaaaaaaaaaagttccatttcatgcatgtttgaaaacataaaaatttgaaatcagcaattaaactgatcaaataaaactccttgtaggaattgatgcttgcaacaattgacaatccatcaaatgcttttgaatgggcacttgctgaaatgataaaccaaccggagttactccaccgagccgttgaagaattggatagtgtggtaggaaaagagagactggtccaagaatcagatatacctaaactcaactatgtgaaggcttgtgcaagagaagctcttcgccttcatcccattgcaccttttattcctccccatgtctctatgagtgacacactggtg

SEQ ID NO: 41906 - DNA, 264 bp, Glycine max
  Clone ID: LIB3139-038-P1-N1-F2
agaaactcctcagagatgtttgttggatcccttgcttggtcttggactgatccctcccttttggtgggaactttgggtcccacaattactttgtggggttattagctcaagccacttaacaaaaagaagaatcgcattttgggcttcatcaaaggggacagggcctaccaagtgggcggggggtattccggattggggccgaaatcaaaatggaaggtgcatttaaacatgtttttttaacgcgaaggccttctttaaaggggg

SEQ ID NO: 41907 - DNA, 416 bp, Glycine max
  Clone ID: LIB3139-038-P1-N1-F4
cacttatacaaaattctccaattagtaacttgttgagagttgctgcttggaagaaaggttgtttaatggtcaagattgtgatgtctgggaatgcagcagtcaaaaggagtgattggacctcattggtacaagtgtttttaacaaacagcaacagtacagagcattttgatgcatgtaagtggacaaaatcagaaccacattcctgggaattaatcttcccaatagaggtatgtggtcctaataatggttttgaaatgtggagttctgagtgggcaaatcaaacttcatggcatttgagtttccttattgacaatcccaaacagtctacagtttttgatattctcttgggaatctctcaagattttgaaattgctggtaatactcttatgccagctttttctgttccacaggctact

SEQ ID NO: 41908 - DNA, 411 bp, Glycine max
  Clone ID: LIB3139-038-P1-N1-F5
gtttctttttcttctatagagacacacggagagagtctcagagcaatagacacccttcaatggctaccactaaagtttacattgtttactattctacgtacggacatgttgagaagttagctgaagagattaaaaagggagctggttccgttgaaggtgtggaagcaaagctatggcaggtacctgaaacactttctgaagaggtccttgggaagatgggtgcacctccaaagagtgatgtaccgattattacacccaacgagctacctgaggctgatggcttattgcttggtttccccacaagatttggactgatggctgctcaattcaaagctttcatggatgcaactggaggcctgtggcgcacacaggcactagctggaaagcctgcaggaatcttttacagcactg

SEQ ID NO: 41909 - DNA, 416 bp, Glycine max
  Clone ID: LIB3139-038-P1-N1-F6
tgcaaactcttctcaatctggcaactttaatctaaatgttccatgaagtgctacaaatcatggtcatggcaatactgatcagttatggagcaataacagtaatctacagggcaatcatcaaatcccttattcacagccattaagaccaaacaacttcccattgcaacctccttttgcacctagtaattcatatacaccaaattcccatacttttccaacttcagtggttccacctaggactggtggtcccaatttcacttcaggaccacataccaatgtgccagatattggtagtctgagcatttctggatatcctaatagtgttcataacccacctattgttccgcaacggagtggggagttgaaacagaatcctaatagtaatgctccacttcttttaagatcaattgatgaca

SEQ ID NO: 41910 - DNA, 414 bp, Glycine max
  Clone ID: LIB3139-038-P1-N1-F7
gtaagaaagatgtttggagagttgaatgtggaatcccttctggagttccgctcacagttatttgtaatagcatttttaatgagatgctcattagatatagctatgaaaaattactgcgccaggctaaagctccaagtatgtttttacaatccttcaaaaattttgtttctttgtgtgtgtatggtgatgataacttaattagtgttcatgaatatgtcaagccttactttagtggttctaaattgaaaagctttctagctggtcataatatcaccattactgatggtattgacaaaactagtgcaactttgcaatttagaaagttagcagattgtgattttctcaagagaaactttaagcagatgtctaatgttttgtgggtggctcctgaggataaggcgagtttatggtcac

SEQ ID NO: 41911 - DNA, 232 bp, Glycine max
  Clone ID: LIB3139-038-P1-N1-F8
tgataaggctgctattgtgcgtgttaaggtgaagctcaagacacgtaaattactggactcccaacccacctcatctgatgctcccactcccacacaaagcgatactgagagaatggaagatagtgcaaatttgttggctgatatgaaactcagtactctgtctaagagagctgctagcatcaaaattaagtcttcatcaaaccaccagacattctcagcttccactcaacat

SEQ ID NO: 41912 - DNA, 413 bp, Glycine max
  Clone ID: LIB3139-038-P1-N1-F9
gggatggaggcatgttagtctcctttagtatggagttatgttgcgtatgctttgaccaagcatgcacaattgaggtaagaccctgtggccatcaaatgtgtgctcattgcaccctagcgctatgctgtcacaaaaagcttgatcctgctactaccggcctttctggaccagtttgtccattttgccgtggatccattcttcaattactggttgctaagattaacaaaatcagtgatacagaagtggaatctagccctatgaagccaaggagatcacggaaatcaaatttcagtgaagggagcagcagcttcaagagcttgtccggcatgggctcatatggaaggattgccggccgtaattcacggaaaattacagatgaaaagcaatgataaagtggtgctgattattttgat

SEQ ID NO: 41913 - DNA, 366 bp, Glycine max
  Clone ID: LIB3139-038-P1-N1-G1
tggacatactgggaagtggtaaaatactggctaacaggtgagttgaacaagaaacagcagtggctgttgggctgtttggtgttgagtgcagtgaatgagttgaagaagaagataaagaaaacaatgaaaagaggcatcatgagttcgaatctgtttctgtttccaattctcttttcatttgcctttctgtcctcgcccgtcctctctgcttcggatctgatcctcgccaaagttgaccgtcgcattgatctgacttcacagattgtgcgcatcactacttcactaaaagtacagaatacgggatctgatgttgtatctgagattttgctgtcctttcctgagaaccagacaagtaacttggcatac

SEQ ID NO: 41914 - DNA, 378 bp, Glycine max
  Clone ID: LIB3139-038-P1-N1-G10
gcgcactcatcgtattaaaggaatgattaaaatggtggccacagttggtattcctgagaatacaggtatagcattggcctgtgctatgaatagttcttttagggggcgcgccagttctgatatttacaccatctgctctcaagactgtgaattatggaatcctgcttgcacaaaagcaatgactatgtcatttaatccaaacccgtgttctgatgcatggagtttggaatttctgaagcgtaccggatttcattgtgatatcatttgtgtcactggatggactgccaccccaatgcaggatgttcaagttacaattgattggtttatttcctctcaagaatgtgttcccaggacctaatgtgttttaaatccacaaaa

SEQ ID NO: 41915 - DNA, 418 bp, Glycine max
  Clone ID: LIB3139-038-P1-N1-G11
ctcaacacgactgatgttaaggacgaaactagtgcagagttgctgtttagaaagaaagcagattgagattcaataaagagaaactttgaacagcagtataaagaaggggggatggctcctgatgacaacaagagtttataacaaccactaacttatcataccagttagaatcatgtaagtcaacaagcttataacgacaatcctgggaatggatcacgcgaatagagttttgacagcccaaaaaaggctttgcaatgtggagggaaaggtctctatatcatacaatatcgcaatagagcttacttacctacacataccaaacagtgaacagtttcagatgatgcataggaagatgaatacgactgagtaaaatgataatatacttctacggcagagcattgagttgcacaggctacaa

SEQ ID NO: 41916 - DNA, 420 bp, Glycine max
  Clone ID: LIB3139-038-P1-N1-G2
ctcgagccgattttcgttggcttcttcagatgttgagtaccgttgctttgtcggtgggctcgcttgggccactgacgaccaagctctcgagagagccttctctcagtacggcgaaatcgttgaaacgaagattatcaacgatcgtgagactggaagatccaggggttttggatttgtgaccttcgcctcggagcagtccatgaaagacgccatctaagggatgaacggccaaaaccttgacggccgtaacatcactgttaacgaagctcagtccctctgtggctgtggcagcggatgcggtggatgtggtggtttttgaggttgtcggtgtgctttgctgagaaccagacaagtaacttggcatacttgaaggcagcacttggtgaagggaagggaaaagcaaaaccattttttggtgtt

SEQ ID NO: 41917 - DNA, 403 bp, Glycine max
  unsure at all n locations
  Clone ID: LIB3139-038-P1-N1-G4
cagcttggtaaatgcaccatattaagttgttgctgccccggttgcaaagacaaaggtcccacaggttgaaacgactgggaatgatgatggagggatagatagtgattaacaggcaaggttagacaatttaagaaagatgtaatctttcctctatgatatcagggactctagttttactggaaaaattgatgctcanttgtaccatatagcaataattgagaagttgtgcgaggaattgatgaactcatggttataaaaatgatggttttcttaaataaaatagtgttgtgtaacaatggagtatcctttgaaattattaattttgtagtaaacagggtgtaggttgtgtatctaatgtacatatcgattgatattttgatgtgcactgattcttttcgtgcat

SEQ ID NO: 41918 - DNA, 411 bp, Glycine max
  Clone ID: LIB3139-038-P1-N1-G5
gagaatccgaggcgaatagaaaagaaaaattaaaatggaggggaaggagcaggatgtgtcgctgggagcgaacaagttcccggagagacagccgattgggacggcggcgcagagccaagacgacggcaaggactaccaggagccggcgccggcgccactggttgacccgacggagtttacgtcatggtccttttacagagcagggatagcagagtttgtggccacttttctgtttctatacatcactgtcttaaccgtcatgggagtcgccggggctaagtctaagtgcagtaccgttgggattcaaggaatcgcttgggccttcggtggcatgatcttcgccctcgtttactgcaccgctggcatctcaaggggacacataaaccccggggtgacatttgggctgttttt

SEQ ID NO: 41919 - DNA, 337 bp, Glycine max
  Clone ID: LIB3139-038-P1-N1-G6
cggctcgagattttggccagaaaaagtgaacagtgcgcgtgcccattgctggcagacatggaatgtggtctccgaacgcttctttccgaatgctcttattgggacttcttcaatagcagcacaatgaaaagaacttgtataaaaaacagaaacccaacatttttctcgtgaaacgttcttcgttgaccatggagctctctgtgcccttcagatttcgatcacggaaccttctcttaccctctacacacatacccattacctaccctttcaaggattaaccaccctttttaactaagtttgtgaacaaacccaagatttctaaactaaccgtgagagc

SEQ ID NO: 41920 - DNA, 373 bp, Glycine max
  Clone ID: LIB3139-038-P1-N1-G7
ctttcaagtgttgagctcattacagaaccccagttaaatgcagatgttgcaggtaatactgtctctgggccagggcttctgaaattacctaaacgtgggagggagaacaatggttcttttagaggtaatcttcatgctgagttttcaacaagcaatgaaaatgaaatggtgtccaaatctgtaaaagatttatcacctgtagaatatggctctgctgactgcaatcttctgaataactccgaaattgttaaatttgatgcattggtggattttgaacctaatacctacttctctctgactgaactgctccacacagacgataatagtcaatttgaggaagctaatgcatctggggacttaaggtatttgaaaa

SEQ ID NO: 41921 - DNA, 413 bp, Glycine max
  Clone ID: LIB3139-038-P1-N1-G8
cgaaaacccacttctggatcttctggtgtaaaggccattagaagctttagaaattttctaattgagttggtgtatagtgttgaagggggtgaaatctggagcccagtttgttagttgttactcacttcatctgtaagctcataggttgaaccctctttttttggagacttacctgggaaaagatgatgatgtttgaagatatggggttttgtggcgatttggatatgttatgtgtttctcttggagagggggatattgctgtgagacaaactgaaccggatcctgtagttgaggatgactacagtgatgaagaaattgatgtggatgaacttgagaagaggatgtggagggacaaaatgcgtcacaagcgattgaaagaacaaaccaagtccaaggaagggactgatgcaaca

SEQ ID NO: 41922 - DNA, 414 bp, Glycine max
  Clone ID: LIB3139-038-P1-N1-G9
gggacaaggatgccatggactcctacaggtccttgttggaccgccagtttcggatgacccctgccacctgcaatgtcctgttggaggccttgcttaaccattccaagacctctgaggcttggtctctttttgataacatgttggacaatcacacccctcccaatttccaggctgttaactctgactcctttaatattatggtcaatcactgcttcaagcttggaaactttgagcttgccctttctacttttaagaaggttggatccaagcctaactctaagccctttgccatggatgttgccggctacaacaatatcattgctaggttttgtgagaatgcgatgctgtcccaagccgagaccttgttcgaagaactctgctctaaatctttgagccccgatgtgcccactcata

SEQ ID NO: 41923 - DNA, 101 bp, Glycine max
  unsure at all n locations
  Clone ID: LIB3139-038-P1-N1-H1
gttagtctaaggtaacccactttgagaattctcataaaagttgcatgccttttggattggaaggttgttgcaaatggggaaaggtnntgtgttgttgtttt

SEQ ID NO: 41924 - DNA, 318 bp, Glycine max
  Clone ID: LIB3139-038-P1-N1-H10
ggtttaccctcatgttgcaactgggttctctgatacatctgcttttctgagggaacttactctcaagtccatgctaattctggctccaaagctgtctcaaaggaccttttcaggatcattattaaagcatatgtcaaagttacaggttgatgaagaaccagctatacgaacaaatactaccatcttattgggaaatattgcaagccacttaaatgaagggaccagaaaaagagtgttgataaatgcatttacacgccgtgctttacgtgatacctttccccctgctagaggagcaagcattatggctttatgtgcaac

SEQ ID NO: 41925 - DNA, 399 bp, Glycine max
  Clone ID: LIB3139-038-P1-N1-H11
caggctcactgagaaaacaatttttacttgcagagatttggacatcttggttgtctattatacaatagcaactcaatttagaaaatttctaccgcattacattaggtggcatctgtatactttgttgatctacattctcccatcttttctcactgctgaaattaaatataagcggaatttgagtaatattcatatttccggcttattttacgacggcagatacaaattctggactaaacacgagaaaaatcttgctttgacagaagaggaaaagatggaagtgattagaaatagaggcattcctgctgatgttcttgcaaagcgagctcatgaatttgaaaaacatgttgctcatgaaagccttcaggatcaaatttctgctgttgacaagttgtattc

SEQ ID NO: 41926 - DNA, 169 bp, Glycine max
  Clone ID: LIB3139-038-P1-N1-H12
ctcaattccattcacttttcagaaccctggacacagcacatcatgatgactttcatcagcctaactttgggggttcttcaataaaaaaagggggtccaagggaaccttggcacgacatccattcttgacttggagggcctattgcttgggatgttttggtcaactttta

SEQ ID NO: 41927 - DNA, 363 bp, Glycine max
  unsure at all n locations
  Clone ID: LIB3139-038-P1-N1-H3
ggaggctgtcaccatattggttgcagtattgaactttcatgataaattcacttggttgaaaggatgtggcctattaactattatggttggtgtcagtttgtttaattggtacaaataccttaagcttcagaagggacatgctggtggcagtgatgtggaagagcattcaagagattctgcagctaaatatgtaattctcgaggagatggatgaacaagaagatggcatctgaaaccattatgcaccaaatagttcaaagccaaacaatgatctctaaagacctctgggaacaaaataatcttncagcaacatgcagttggccttcgccatctcatctttttgagaaacacctgtttatgtacc

SEQ ID NO: 41928 - DNA, 392 bp, Glycine max
  Clone ID: LIB3139-038-P1-N1-H7
aaaatggtggccacagttggtattcctgagaatacaggtatagcattggcctgtgctatgaatagttgttttagggggcgcgccagttctgatatttacaccatctgctctcaagactgtgaattatggaatcctgcttgcacaaaagcaatgactatgtcatttaatccaaacccgtgttctgatgcatggagtttggaatttctgaagcgtaccggatttcattgtgatatcatttgtgtcactggatggactgccaccccaatgcaggatgttcaggttacaattgattggtttatttcctctcaggaatgtgttcccaggacctattgtgttttaaatccacaaaatccttttgtgttaaataggtggatgggaaaactgacttttcc

SEQ ID NO: 41929 - DNA, 408 bp, Glycine max
  Clone ID: LIB3139-038-P1-N1-H8
aaaaaaaaaaaaaaaattaaaaaaaaaaaaaaaaaaaaaaaaaaagaaaaaaaaaaaaaaaaaaaaaaagaaaaaaaaaaaaaaaaaaaaaaaaaaaaaaaaaaaaaaaaaaaaaaaaaaaaaaaaaaaaaaaaaaaaaaggggggggcccccaataaggggctctgccacccgggaaaaaaattcgggccgggcccctggggggtcccaatttttccttaaggggggggttataaaagtgggggaaaaaaagggaaaagggggttcccggggaaaaaaggatttccgtgaaaaattccaaaaaaaaaaaagccgggaggaataaagggaaagcccggggggccttaagggggggccaaacccaaataaatggggtgggccaaatggcccttttccaaaggggaaaac

SEQ ID NO: 41930 - DNA, 322 bp, Glycine max
  Clone ID: LIB3139-038-P1-N1-H9
cgataaccctcagtattttatcatccagagcgagcgctacttagactcatctatactactgacgcataagtgttgttcctactaccaccatatgaaggaaaaccagaagaagaacctggagcacgtatcgacagatttacagccgcattgacgcccaaagccatccagacactctctgaggatttcagcgcgagagctataaagaagaatgtacgcattcatggacaccacaagaatgctaagcacatgtgtgctagagtgactggtgacaacttgggtatacgtgaacgatccgcagatctcatactacaaaatcgactac

SEQ ID NO: 41931 - DNA, 374 bp, Glycine max
  Clone ID: LIB3139-039-P1-N1-A1
ctcgagccgaatcggctcgagatgataacttaattagtgttcatgaatatgtcaagccttactttagtggttctaaattgaaaagctttctagctggtcataatatcaccattactgatggtattgacaaaaactagtgcaactttgcaatttagaaagttagcagattgtgattttctcaagagaaactttaagcagatgtctaatgttttgtgggtggctcctgaagacaaggcgagtttatggtcacaacttcattatgtttcgtgtaataatctggaaatgcaagaagcttatcttgtcaatctcgtaaatgtgttacgagaactgtatttgcacagtccagaggaagctcgccaattgagaaggaaagc

SEQ ID NO: 41932 - DNA, 367 bp, Glycine max
  Clone ID: LIB3139-039-P1-N1-A10
gttggagatctcgtctttgaagtttctaagatgactgctccctacattaaatgtacagtctctttcttcatagcatttggaaatttggctgatgacaccatcaattttgaggcttttccccacaagctggtgcagtttggagagattcaggaaaaagttgtgttgaaattttcacaagaggaatttcttacagcttggtcaactcaggtgcgtcccgcaacgactctgttggctgatgggtgcccatatttgtatgctatggtgcatgatagttcagtgtctacaataccaggtgattttgtcattggtgttaagttgacaaccataaacaatatgtgtgcatatgggctcaatcctggtatttcag

SEQ ID NO: 41933 - DNA, 375 bp, Glycine max
  Clone ID: LIB3139-039-P1-N1-A11
tgctgttattgaaataacagagtgggtggaagttcctagaaagaatttgaccatagagaattcaaccgtttcatcaaatgtttcagctgaatctgctgcgggtaatagttctgaagaaaacaacgaaagcgtgcaaactgatagtgggattaataagacatccaacattagttcagaggagcaagctgctgctgagcctgctacagagaaaaagctgaaaaagcggacctttagggtaccattaaagattgtagagaagataactggatttggaatgtctctatcacaagattttcttgctgaagccaaaagaaaactacaagtactagataaaaaagatgcagacagaaaaagaacagctgagttaaaaaataa

SEQ ID NO: 41934 - DNA, 374 bp, Glycine max
  Clone ID: LIB3139-039-P1-N1-A12
ctatcctttctctttttcttctctctcaacaacttcaccttcttcctcctcgatcatgtctcacttcaagggcaagtaccatgatgagcttatcgccaatgctgcgtacattggcactcctggaaagggtattcttgctgctgatgagtcaacagggacaattggcaagcgtttggccagcatcagtgtagagaacattgaatccaacaggcgagctcttagggagctgcttttcactgctcctggtgttcttcaatatctcagtggtgtcatcctctttgaggaaaccctctaccagagcacagctgcaggcaagccctttgtgaatgtcttgaaggaagctggtgtgcttcctggcatcaaggttgacaagg

SEQ ID NO: 41935 - DNA, 382 bp, Glycine max
  Clone ID: LIB3139-039-P1-N1-A2
gaagagctatgacgtgcaacgcacccttacgctaagcaattcaattcgaggtccagaggaagtctcgccaattgagaaggaaagctctctctcgtattgaatggctgcaaaaagctgatgtgcctaccatagcacagattgaagagttctattcgatgcagaggatgatgaatgctcctgattcaaatgataatattgatctactgttgagcattgatttgttgggtttacaaggagcaggtaaagcttttccaaacaagattgtttttgatgataagcttgtgttggctaacacacaagaattctttgatggaaattttccagtggattcttggttaccaatttttgtgaattgtctctatcctgtaagtcaattaccttc

SEQ ID NO: 41936 - DNA, 371 bp, Glycine max
  Clone ID: LIB3139-039-P1-N1-A3
gaagagtttggtgcattggtcctgtttcactcagcaacaaggatgaactagacaaggctgagagagggaacaaggcttcaattgatgagcatttttgcttgaagtggcttgattcgcagaaaccaaagggtgtgatctatgtgtgccttggaagcatgtgtaacataacatcacttcagttaatagagcttggtttggccttggaagcctcaaaaagacccttcatttgggtcattagggaagggaatcaattgggggaattggagaagtggattaaggaagaggggtttgaggaaaggaccaaagatcgaagccttgtgattcatggttgggctcctcaggtactgattctttcacacccttcgattgga

SEQ ID NO: 41937 - DNA, 376 bp, Glycine max
  Clone ID: LIB3139-039-P1-N1-A4
tcttgcttcttgcttctattacttgcttctttcttcaccatgtcacttgctgggaaaatgaccactgaaattggggttcatgcaaccgctgcaaagtggttcaacctctttgcaacacaacttcatcatgttcaaaaccttactgatagagtacatggaaccaagctgcatcaaggtgaagactggcatcacaacgagacagtcaaacactggacttataccatagatggtaaggctacaacatgtctggagagtattgaatccattgatgaacagaacaaaacaatcacctacaagctcttcagtggagacattgatcataagtataagaaatttaagttcacctttcaagccattgataaggatcaaggcggtg

SEQ ID NO: 41938 - DNA, 374 bp, Glycine max
  Clone ID: LIB3139-039-P1-N1-A5
caaaggcatggaaaggaagcaaaccaagatgaacaagtcaaggattagttgctcttattcttcttctgtgatggatccttacaagaccttaagaatacaacgcggtgcctctgaatctgaggtcaggaaggctttcaggcagcttgctctgcagtaccatccagacgtgtgcagagggagcaattgtggggtgcagtttcacgaaatcaacgaggcttatgatactgtgatggccaacttaagaggagaatcaaatgcgacagaatcgtatgaggcttattatgatgctggaattgatgagccactgaggggaatgaacgatccagattgggacatgtgggaagagtggattgggtggaaggagcaggaatccg

SEQ ID NO: 41939 - DNA, 375 bp, Glycine max
  Clone ID: LIB3139-039-P1-N1-A6
gagccccacttctcgcaaacgtgtacccttacttcgcctatgttaacaaccaacaaagcattggtcttgactatgccttgtttactaaacatggtaacaacgaggttgggtaccaaaacctgtttgatgcattgttggattctctatacgctgctcttgagaaagtaggggcaccaaatgtgaaggttgttgtgtctgagagtggttggccatctgaaggtggagttggagcaactgttcaaaacgcaggaacctattaccgcaatttgattaatcatgccaaaggtggaacccccaagaggcctagtggacccatagagacttacctctttgccatgtttgatgaaaaccagaaggatggtcctgaaatcgaac

SEQ ID NO: 41940 - DNA, 373 bp, Glycine max
  Clone ID: LIB3139-039-P1-N1-A7
gaataaatcttttgctcttcctaaaccgtttgatatagagggtgctggtgggtttgaggaaattgatactccaaatgccccattgaggaaacctaagtcaaagctgattggaaagaatctggctagcatctcagtggcattgttcgcttccgctaattaagaagaacagtgactggacaaggaaaaagaagcaacttgtgatggcacggacaatttctcttgttttgggtagttctgtgaacagatagtattaatttgttatgtgtatattagttggtacttggtagattagagagggacttgatacatacttagaagatctcactagctgatttcacacgttttgaaatagtctttacaagctaaatcttct

SEQ ID NO: 41941 - DNA, 375 bp, Glycine max
  Clone ID: LIB3139-039-P1-N1-A8
tcgtcactctcgtgggtcccaccctcaaggacgaggtgatgaagatcacgccggtccagaagcagacccgggccgggcagaggacccggttcaaggccttcgtcgtcgtcggagacaacaacggccacgtcgggctgggcgtgaagtgcagcaaggaagtggcgacagctattcgtggcgcgattattctggcgaagctgtctgttatccccgtgaggagggggtactgggggaacaagatcgggaagccccacaccgtcccgtgcaaggttacggggaagtgcggctccgttaccgttaggatggttcccgcgccgagaggttcggggatcgtggcggctagggttcccaagaaggtgctgcagttcgcgggga

SEQ ID NO: 41942 - DNA, 374 bp, Glycine max
  Clone ID: LIB3139-039-P1-N1-A9
cggctcgtgtttgaaacccaacccaatttcaccgttgctagctcttgtttcttttttgtcggagaaaataataataacaatatataatgtcggttgaggagatgcagtcacagaagaggaatgtgtttgacgcagaaacggcgtcgtccttggtgaaggagctgagggacaacttcggttcgggaaggactcggagttatgaatggagagtgtcacaagtgaaggctctgttgaaggcggtggttgataacgaggaacagatcgtcgacgctcttcgttccgacctagccaagcctccactcgaaaccatcgtctacgaggttggtatgtttaaaaactcatgtgaagtcatactgaaggaattgaaacaatgg

SEQ ID NO: 41943 - DNA, 374 bp, Glycine max
  Clone ID: LIB3139-039-P1-N1-B1
cgaggatgtttttatcatcgacttgggttgtcaaaatagagcccatattgttcaccagatcggtgaaacctgcagaaactatggttttttccaggtgattaatcacggggtggctttagaagccgcaaaggaaatggcagaggtggcacatggattcttcaagttgccagtggaggagaagctgaaattgtactctgaagacccctcaaagacaatgagactgtccactagttttaatgttaaaaaagagacggtgcataattggagggattatcttagacttcactgctatcctttggacaaatatgctcctgaatggccttctaatccaccctctttcaaggaaactgtgacagaatactgcacattagtta

SEQ ID NO: 41944 - DNA, 353 bp, Glycine max
  unsure at all n locations
  Clone ID: LIB3139-039-P1-N1-B10
gcagtgtttgagattgaccctgccaaagaccttgaggcttctgaggcttatcctgacgtgaaatacaccactgtttctgaatatttggatcagtttgtctgatttccgaaatcttaggaaccaaagcacttttatgatgttatcactctgcaaaatgcttaataaaattaatgcagtttttccttttctttcagaaaaggcctttttgcaacactaccattgtggcattgtttgtttcgtggtggttgctggtgtttgtcctgttctgaagaacctatccccattaatgtaatgttatacctgaaaaataataatataatctgtgctactgtttgcacaaaaaanaaatntnt

SEQ ID NO: 41945 - DNA, 374 bp, Glycine max
  Clone ID: LIB3139-039-P1-N1-B12
ctctttttctagccctcacctcaacgctgcatggtcgcgtcgtctcacgaggtgcatatagtaaagagggaaaatgagtcgaggaggcgcagtagcagcagcgaagggaaagaagaagggtgctacattcaccattgactgtgcaaagccagtggaagataagatcatggacattgcttctctcgaaaagtttcttcaagagaggatcaaggttggtggcaaagctggtgctcttggtgacagtatcactgttacccgcgagaagaccaagatcattgtcacctctgacagtaacttttccaaacggtatttgaagtacttgacgaagaagtacttgaagaaacacaatgtgcgagactggctcagagtgattg

SEQ ID NO: 41946 - DNA, 374 bp, Glycine max
  Clone ID: LIB3139-039-P1-N1-B2
gcttgtagtagtaaggttactaaattatgtgacttggggattgatgaccttgtttgttcggttggctgggctcagcgtggtacacaccttgctgttggaacaagcaatggtaaagttcagatttgggatgcatctcgatgcaagaagataagatctctggagggtcatcggttacgtgttggggccttggcttggagttcatctcttttgtcttctggtggcagggataagaatatttatcaaagagatatccgtgcacaagaagattttgtcagtaaattatcagggcacaaatcagaggtttgtggactgaagtggtcttatgataaccgtgagttggcatctggaggaaatgacaacagattgtttgtttg

SEQ ID NO: 41947 - DNA, 380 bp, Glycine max
  Clone ID: LIB3139-039-P1-N1-B3
tcctccactttttactccctcattcccaccaaatctgtaggcccccaatcccaccccctcattcccaacaccaggcccgccctccggcccaagcccggcccatccccttccatcttcgccgttcacgccgccgagcccgccaaaaaccccgtcgtcaccgacaagcccaagccccaagcccaacaacctcccccggcctcggcccgggcaacgaaatgggccgtggacagctggaagtcaaagaaagccctgcagctgcccgaatacccgagccaggaggagctggagtccgtcctcaaaaccctcgaggcttttcctccaatcgtcttcgccggtgaggccaggacattggaggagcatctcgccgaggccgccatggg

SEQ ID NO: 41948 - DNA, 345 bp, Glycine max
  Clone ID: LIB3139-039-P1-N1-B4
cgaagaattattacagactgagtaattggtctctctgccggcgttgcttctacacacaatgaaggtcaaagttatatcacgctccgtggatgagttcacccgagagcgaagtcaagaccttcagagggtgttccggaattacgatcccagccttcgtcctcaagagaaggcggtggagtatgtgcgtgctgttaatgcggtgaagttggacaagatatttgcaagaccatttattggagcattggatgggcatgtagatgctgtttcgtgtatgacgaggaaccctagccagttgaaagggattttcttcagttcgatggatggagatattcgtctctgggattt

SEQ ID NO: 41949 - DNA, 379 bp, Glycine max
  unsure at all n locations
  Clone ID: LIB3139-039-P1-N1-B5
gaggaaagtaataaagaagtagagagagagagagggaggatgaggggaggggaggagagatctactacaggnattcgaaagaagggaagcggagtgaggcaatggctggtactggacggcaaaggagagacggaggtcgtggaggccgggaagcacgccatcatgaggcggacgggactccccgcgcgagacctgcgtatattggaccctctcttgtcctacccctccacccttcttggccgtgagagggccatcgttatcaacttggagcacattaaggccatcatcaccgcccaagagctccttctcctcaactttcgcgacccctccgttacccccttccttcatgagctccaggcaaggatcattctccaccaca

SEQ ID NO: 41950 - DNA, 377 bp, Glycine max
  Clone ID: LIB3139-039-P1-N1-B6
tgattttttacttcgggacttcttggataaattatatggagaaaataagaaggaaaaaatggagcttctgaaagggttaaccatcggaagggatgatacttcaagaatttcacctcttcaacaagaggttctcatcgtctggggagaagaagaccgaatatttccggtgaagttggcccacgaactaaaagagataatcagtaaaaaggcaagattggaattgataaaagaggcatcccatgtgcctcaaatggaaaagccaggagaattcaacaacattctcctaaatttcttacaggagcattcttgagtattatataaattaggggcacaatttgtctacatgcgaacgagaatggctacaacaagcgaatacg

SEQ ID NO: 41951 - DNA, 374 bp, Glycine max
  Clone ID: LIB3139-039-P1-N1-B7
ctttacttttcctcctccctctctcttccaaacacacgttcttaaccatggcagcaccatcttcagagacaaagtcaccatcatcctcgaacacgcagcttccgctgaaaccaatcccaggcagctacggaatgccgttttttggagcaataagcgacagacacaactacttctaccaccaaggacgcgacaagttcttcgcgacgaggattgaaaaacacaactccaccgtgatccgaaccaacatgcctccggggcccttcatctcctcggaccctcgtgtcgtcgcgttgttggacggtgcctccttcccgatcctcttcgacaacgacaaggtcgagaagctcaacgttctcgacggcaccttcatgcct

SEQ ID NO: 41952 - DNA, 372 bp, Glycine max
  Clone ID: LIB3139-039-P1-N1-B8
gtcaatttaccaatttattttttttatagttcccatgcacttaacgtaagaaatccttcaccttcacttctaaaatctctcttttcccaaatccaccaatctcactcacacacaaatcagaattcacacccacataccaacacaatctctctgaattgaaacccaccatgttgattaaagggcatcaaattaaggcaccaattttggtcctcaatttgttccttgtcctaatttgttccacagcttcttccgtcaacgttgttgaatcaaggaaacttgatgagaccactccagtgcctgccacaaacggtactgaagaaaagtgtggatcatgtggtggtaccacttatccgtcgccaccgccaccgttac

SEQ ID NO: 41953 - DNA, 372 bp, Glycine max
  Clone ID: LIB3139-039-P1-N1-B9
ttctgttatgatgcactacatggggttggtggagcatatgcaaagagtatatttgtggatgagcttggggcacaagaaagctctttactgaactgtacaccaaaggaagactttggaggaggacacccagaccccaatttgacatatgcaaaagagttggttgctcgtatgggattgggcaaatccgaaccacaagatgatcccccagagtttggtgctgcttctgatggtgatgcagatcgcaacatgatacttggtaaaaggttttttgtcactccttcagattccgtggccattatcgctgcaaatgccgttgaagctataccatacttttctgctggttaaagggtgttgccaggagcatgccaacct

SEQ ID NO: 41954 - DNA, 372 bp, Glycine max
  Clone ID: LIB3139-039-P1-N1-C1
ctccctatggtgtttaatcttgtggtccgtcagaagtttttaaattttgtgaggttcattatgaagaaaagggacaagcttagttgtcaagttggaatcaacccatactccatggaatggactggtttggccaatagattactgagtaagggcaacgatattctgtgttgcgattatgctagttttgatggtttgattaccaagcaagttatgagcaagatggcagaaatgataaacagtctttgtggtggtgatggaaaattgatgcgtgaaaggacacacctgctgttggcttgttgttcaaggatggcaatttgtaagaaagatatttggagagttgaatgtggaatcccttctggatttccgctcaca

SEQ ID NO: 41955 - DNA, 376 bp, Glycine max
  Clone ID: LIB3139-039-P1-N1-C10
ccacaaacaacaaggttggttcaacttgtgtgaagggattggaacatggaaaatcttggtggttctagtcgtaggaaagcaattgaggagcttcttagagggcgtgattctgcccaacaacttaagagtgtcatcaatgggacttatgatgatggatcagccaccccatttgctcaacaacttgtgaaagaggtgctcatgtccttcacaaactccctcttgtttttgcacaacaaccccacttctgaatcacatcatgtcttcaatgttcaagtatgggactctcccaagtctgaggactctcaagagagcaattgcaaaagctccaccattaaggaaccaagagggtgctacaagagaagaagaactgaacaaa

SEQ ID NO: 41956 - DNA, 375 bp, Glycine max
  Clone ID: LIB3139-039-P1-N1-C12
agataattagagtttgcttatccatataacagatcacccgaacagaagagggaggggactggtttgcggagtcaattggacttctgcgagcttagaatcctctctcctttatttattaacgaaatcatagtcattagtcttggctagtgctgttggggactctttttcacaaagcgtgcatgtaacagcatccatgttttggtgatctttgagttgagaagagagaaaaatttaagttgaaaaagtgagggatattgaagctaaaacaatgggtgcagtttgttgctgtttcaatgttgatgattttgaagattatatgaatccaaatagttctgtatataggaactgtatgtgtctcagttgcttcgtacagaa

SEQ ID NO: 41957 - DNA, 377 bp, Glycine max
  Clone ID: LIB3139-039-P1-N1-C2
ccgataccccatgttcgtcgtcttcagccgctcaagattctggtggatcttccggaaaggtgacagaagtagggtctccaagtggagtgatggtttcacctgaacaaaactctagaacacgttctaggagtcacggggcaagatggacccgaacgcgaactggaacagtttcatatcatagaaatcaacaaactcctgggtccgtcagttctcatggaagtgcccctttgccggggagaaaagctcagacggtgaatgggaactacttgctgaattttcaatatgacccaatatcccgttctcaaccacggggtcctcctccttctcctacaacaagaaggcatcggaagaggaagccgtacagcaaagatttgttt

SEQ ID NO: 41958 - DNA, 327 bp, Glycine max
  Clone ID: LIB3139-039-P1-N1-C3
acagtttatatttctcgcgaacacactttctcagtagcgcggtgggttgttcggtcacggcgctaacaatgaaacaccacgcaataacgctagtaacgatatactgacacgacaattcgagaactgtcaagagctcaaatatctggtagctgagcgtacataagaaaaggagaacgggtgtcggatactctataaactgaaaactagcgcagtgcgctgtgcaacgagcgaacattcgtgttcgcgtgtgtgcgtttctttttttgttcctttgttcttttcggagcttctgggatgtctccggctagaagaggatgacccccggaa

SEQ ID NO: 41959 - DNA, 378 bp, Glycine max
  Clone ID: LIB3139-039-P1-N1-C4
tgataacttaattagtgttcatgaatatgtcaagccttattttagtggttctaaattgaaaagctttctagctggtcataatatcaccattactgatggtattgataaaactagtgcaactttgcaatttagaaagttagcagattgtgattttctcaagagaaactttaagcagatgtctaatgttttgtgggtggctcctgaggacaaggcgagtttatggtcacaacttcattatgtttcgtgtaataatctggaaatgcaagaagcttatcttgttaatctcgtaaatgtgttacgagaattgtatttgcacagtccagaggaagctcgccaattgagaaggaaagctctctctcgtattgaatggctgcaaaa

SEQ ID NO: 41960 - DNA, 377 bp, Glycine max
  Clone ID: LIB3139-039-P1-N1-C5
attttaattaatcgcgatcacaggttgccgcaccttaaaaccggaaacaaaagcaatcgttacttgatttcaagaatttctcaatttcttcctacttctttgtgtacgatttcttaagggaaagaaaatcactctctgtgctggtcacagacttcgtgaatcattttcttttccactcctagtttatttgctgaacactctcctatttgatataggacttcgtgtcagatttaaactttttctgtttctttctcagttctctgtttaatttcaagttcaagctggtgaaattttggattagtgctcccactctcctatctggtataggacttcgtgggtagacttttctacttctctcctttctttcactctcttct

SEQ ID NO: 41961 - DNA, 369 bp, Glycine max
  Clone ID: LIB3139-039-P1-N1-C6
tattaacatcagtcatatataacagggaaattaaatcgtcttttaatggctctttcaccactcggcatgcttctggtcattgccaccatcttactcccattcaatattgttgtggccaaggaatttgttgttggcgatgatcatggatggacaataggctttgattacgcagcttgggctgcagataagaccttccaggttggggacctacttgtgttcaagtatgctgttggaaaacacaacgtgttcaaagtgaatggaacagcatttcagagctgcacgattcctccagcaagtgaggcattgaccactggaagtgatcgtattgtgttggcaattcctggcagaaaatggtacatatgtggtgtt

SEQ ID NO: 41962 - DNA, 359 bp, Glycine max
  Clone ID: LIB3139-039-P1-N1-C7
tgatgtattaagatgcagaagaggtaaccgtgtgtgggcattcactttcctaatccgtggaaccaacgaacgaacgaagacactgcaatctagaaaaaagttttgaactttgatgcacggaaagccttcatgcccgaccatgacatgtaccattttgatcacatggacgaagacgatttttttgacgaaattgatgaccaaaaccatggtaggggtgttggggatgctgctcttgatgaatatgagatgcttactaaggtgactgatacaacagctgctcaagcaagaaagggaaaggacattcagggaattccatgggaaagtttgaacatatctagggagaggtatagattgacaag

SEQ ID NO: 41963 - DNA, 376 bp, Glycine max
  Clone ID: LIB3139-039-P1-N1-D10
atcatggttttgttgacagagaagtcaattgagccatgatgatgatggcaagaagaccaggtatcattcccaactgtttcaaggttgcaggcaaggccaaatttctaccgcattacattaggtggcatctgtataccttgttgatctacattctcccatcttttctcactgctgaaattaaatataagcggaatttgagtaatattcatatttccggcttattttacgacggcagatacaaattctggactaaacacgagaaaaatcttgctttgacagaagaggaaaagatggaagtgattagaaatagaggcattcctgctgatgttcttgcaaagcgagctcatgaatttgaaaaacatgttgctcatgaaag

SEQ ID NO: 41964 - DNA, 375 bp, Glycine max
  unsure at all n locations
  Clone ID: LIB3139-039-P1-N1-D11
cggctcgtgaaaaaaatgaagaaaaagggcgtcatttcctcgccacaccctgtttcgtgaagctcagtgcatcaagatctctctctctgtaatcgaaaatgagcaagggaccgggtctctttaccgatatcggcaaaaaatccaaagatcttttgactaaggactacaactccgatcagaaactcaccatttcctcatacagcatctccggagtggccctcacttcaacatctgtcaagaaaggaggactctccactggggatgtggcagcactgtacaagtataagaacactattattgatgttaaactggacaccgcatcaactatctncacaaccctcacattcaatgacgttcttccatccaccaagacta

SEQ ID NO: 41965 - DNA, 375 bp, Glycine max
  Clone ID: LIB3139-039-P1-N1-D12
taacttgtatacagtgtgatgaaaatgaaggtccttggtttcttcgttgctacaattgtggtagcatggcaatgccatgcgtacgatatgttccctctccgaatgaacactggctatggtgcccgtactccggaggtgaaatgcgcaagttggaggcttgctgtggaagcacacaacatctttggctttgagaccattcctgaagagtgcgttgaagcaacaaaggaatacatccatggcgaacaatatagatcagactccaaaacagttaaccaacaagcttacttttatgccagagacctcgaagtccatcccaaggacacatttgtgttcagtatagatggcaccgtactctctaatattccatactacaaa

SEQ ID NO: 41966 - DNA, 373 bp, Glycine max
  unsure at all n locations
  Clone ID: LIB3139-039-P1-N1-D2
gagttacaaggcttttggaccctgccccaatgattggagcgtggcacagaaactcattttaaaagggtgtgagcctttaccaagaagaaggtgctttgctaaaacaatttctaaggtgggtcttcttcacccttttcccacctcgctttggaaagctccagtcaacaacactgttaactggagtggtttaggttgcaagaattttgagtgtttgaagggtaagaagttgagtagagattgcattggttgctttgatttggttaatgggtatgagaatcaaaggtttgtgaagtctaggagtaagaatgattntctaattgatgatgttttggcatcgggaagtggtggaattcggattggacttgatgttgga

SEQ ID NO: 41967 - DNA, 321 bp, Glycine max
  Clone ID: LIB3139-039-P1-N1-D3
gggcttaatcctggtatttcaggttctcgtcttttgggcaccattcctcagtccatttcacagcaaactgtttggaatcaaatggcaacagtgagaacaccattgaattttgattctagcaagcagagcttttgtcaattttctatcgaccttctcggtggaggaattttagtggacaaaactggagattggatcacacttatacaaaattctccaattagtaacttgttgagagttgctgcttggaagaaaggctgtttaatggtcaagattgtgatgtctgggaatgcagcagtcaaaaggagtgattgggcctcattg

SEQ ID NO: 41968 - DNA, 378 bp, Glycine max
  Clone ID: LIB3139-039-P1-N1-D5
ggcaatatttgttaataagctgtttatgataaattaccacgatgtctatgttccatttcttgacgagatcaatgcccttgatggtagaaaatcctatgctacccgcaccatatttttcttgacaccacttggcactctcaagcctattgctatagaacttagcctcggaccaagttccggatggaaacgtgtagttacccctcctgtggatgcaactacaaattggaagtggcagcttgccaaagctcatgtttgtgccaatgacgctggtgtgcaccaacttgttaaccattggttgcgcacacatgcctgcatggaaccatttatattgtctgctcataggcaattaagtgcaatgcatcctgtttttaagctgtg

SEQ ID NO: 41969 - DNA, 375 bp, Glycine max
  Clone ID: LIB3139-039-P1-N1-D6
agctcgtggactgccgcaccctcgccgactacaacagccagaaggaatcaacccttcaccgggtcctccgtctccgtggtggcatgcagatcttcgttaagaccctcaccggcaagactattaccctagaagtcgaaagctccgacaccatcgacaacgtcaaggctaagattcaggacaaggagggaatccccccagaccagcagaggctgatcttcgccgggaagcagatcgaggacggacgcacccttgctgactacaacatccagaaggagtcaactctccacttggtgttgcgtcttcgtggtggtatgcagattttcgtgaagactcttacgggtaagactattaccctcgaggtggagagctctgaca

SEQ ID NO: 41970 - DNA, 372 bp, Glycine max
  Clone ID: LIB3139-039-P1-N1-D7
ctcgagcctaatcggctcgagggttatctctattctggattctgaatcttggatttgatttctacttttcaatgattactgagagctttattttatctccgtgattttgggttaatctacctgtgttatttcgtccttggaaattatctccctcaattctatctttctttgtttcattatgggcatttcacaatttagtgcttcatgattgctgcttgggtctcaaaggaagataagaaattttgtttatatttatcttctcaacaggagcaataagggacgggtttggttggctttcactttggtttcgagaatctgcatttgggtttgaagaactatgcaaatcttctttcatcattttcttgataatta

SEQ ID NO: 41971 - DNA, 57 bp, Glycine max
  Clone ID: LIB3139-039-P1-N1-D8
gttttagtctcaaaatctgttcttgtcattctatatgtataaaaaaaagttaatatg

SEQ ID NO: 41972 - DNA, 373 bp, Glycine max
  Clone ID: LIB3139-039-P1-N1-D9
ccgttatatgaggaaaacaagggagcttggatgctgggttttttgcttggccatggcggccaaaacaatttttttttatcggtttaagatggccaaggtggtttccacaattccaacaattgggtttaatgtcgaaacagcggtgtaacaacatttaaatttaagtgtggggtttttgggggcgaacacatgtctcgccctatttgaggtgttacttttcaaatactcaagcaataatctatgttgttgattcaagtgacgttgataggcttgtgatagctaacgaggagttccatgcaattttggaggaggaagaactaaaaggtgcagttgttctcattttcgcaaacaagcaggacctttctggtgcact

SEQ ID NO: 41973 - DNA, 376 bp, Glycine max
  Clone ID: LIB3139-039-P1-N1-E1
gggaaaactgtctttccctcagggcacttcccgaagtgtgaagagaatgcctctttctatagggggaggagctggtgcaaagaatgctattctcatgaatatgccaaatgctgttctttcaatgtggagatattttgttggagatctcgtctttgaagtttctaagatgacttctccctacattaaatgtacagtctctttcttcatagcatttggaaatttggctgatgacaccatcaattttgaggcttttccccacaagctggtgcagtttggagagattcaggaaaaagttgtgttgaaattttcacacgaggaatttcttacagcttggtcaactcaagtgcgtcccgcaacgactctgttggctgatggg

SEQ ID NO: 41974 - DNA, 358 bp, Glycine max
  unsure at all n locations
  Clone ID: LIB3139-039-P1-N1-E10
ggatgctctccaattgagaaggaaagctctctgtcgtattgaatggctgcaaaaagctgatgtgcctaccatagcacagattgaagagttccattcgatgcagaggatgatgaatgctcctgattcaaatgataatattgatttactgttgagcattgatttgttgggtttacaaggagcaggtaaagcttttccaaacaaaattgtttttgatgataagcttgtgttggctaacacacaagaattctttgatggaaattttccagtggattcttggctaccaattnttgtgaattgtctttatcctgtaagtcaattaccttcagaagctgtcgttgtaaatgttacatgtggtagt

SEQ ID NO: 41975 - DNA, 339 bp, Glycine max
  Clone ID: LIB3139-039-P1-N1-E11
cttattttttctttttctccttctaattctttgttgcccttcacctattacaagccactcacactaacacaaaaacatggaactaagcaccatgttttgcttgtgtgcttcgtttctcttcattgttctcttcagggcactcatcaaaccttattatgtctccaaacgccgtgacttgccactcccacctggctccatgggttggccttacataggagaaacctttcaaatgtattctcaagatccaaatgtcttctttgcctcaaaaataaaaaggtttggctctatgttcaagtcccacattctaggttggccctgcgtgatgatttccagccccga

SEQ ID NO: 41976 - DNA, 376 bp, Glycine max
  Clone ID: LIB3139-039-P1-N1-E12
ctcgagctggtgtttttaacaaacagcaacagtacagagcattttgatgcatgtaagtggacaaaatcagaaccacattcctgggaattaatcttcccaatagaggtatgtggtcctaataatggttttgaaatgtggagttctgagtgggcaaatcaaacttcatggcatttgagtttccttattgacaatcccaaacagtctacagtttttgatattctcttgggaatctctcaagattttgaaattgctggtaatactcttatgccagctttttctgttccacaggctactgccagatcttctgaaaatgcggaatcctctgcatgatctggaattcgtgttttctttcgcttgttcgtttgtttaattcaat

SEQ ID NO: 41977 - DNA, 370 bp, Glycine max
  unsure at all n locations
  Clone ID: LIB3139-039-P1-N1-E3
cttacactcaccggcgagtccatctcgcgccaccgtcgactcagctccggccatcgccgttggttccctcactttctcactcttcttcttcttcttcttcttcttcttcttcttcttcttcttctcagcggaaatatgccttctcagaaggttgaaacgggtcatcaagacacggtccatgatgttgcaatggattactatggtaagaggctggccacggcttcatcagatcacacaatcaagataattggggtgagcaactcggcctctcagcatctagcaaccttgaccggtcaccaaggacctgtatggcaagtggtgtgggctcacccctaagttgggttctctactngcgtcttgttcctatgat

SEQ ID NO: 41978 - DNA, 375 bp, Glycine max
  Clone ID: LIB3139-039-P1-N1-E4
aaaacaatcatttaaaaaaaaggtccactgaagtgggggcgcttgacccatttcgccctgcccatggctcaaccaaaatccatgcttcggaattagggtttccattcggatttcgtaagtctggtgcccaatttcgtgactccgagcgacgtaaaaggggaagggaaagggatgaggatttggggatcggagatcgtgttcgccatattgctctgtgggaccctttcatgcaccgctcaagctcatcacatcactgccagcacctgcccggctcgctccatcctcgatttcgtgttagggttttcagatttcacatgccaacttcccaattctcttggatccattgccgtcaccgagggagatgaggtttctttg

SEQ ID NO: 41979 - DNA, 380 bp, Glycine max
  Clone ID: LIB3139-039-P1-N1-E5
cttcctttcctaccaaaatttccctttcacacttcacaaaaaagaaatactaaatgatttgtcagtagcagcaaacatgtccagcaagggaaaggagatagcagaaggatcatcaacaacaacaacagcaacaagatcctctcatggaggtgacgatcatcatcatcaccacaatcagcagcagcagcaacaacaacaacagttaccactgagtcgctatgagtctcagaagagaagggattggaacacttttggacagtacctgaggaaccaaaggcctccagtggcactttctcagtgcagctccaaccatgttcttgagttccttcgctacttggaccagtttgggaagaccaaagtgcactcacaagggtgcttgt

SEQ ID NO: 41980 - DNA, 91 bp, Glycine max
  Clone ID: LIB3139-039-P1-N1-E6
tatctgccaattcacattttatacaggcagaaagaacaattcaatgatggagttggctatagttggaatgatggccttaggcccagctgca

SEQ ID NO: 41981 - DNA, 373 bp, Glycine max
  Clone ID: LIB3139-039-P1-N1-E7
ctcgagcctcttgctggattcagatggaccaacaggtgacaaaagtcatgtctccaccagggtaatgggaacctacggatacgcagcacctgaatatctagccacaggtcatcttactgctaagagcgatgtctatagttttggggttgtcctgctggaaatgttgtctggcaagagggctgttgacaagaatagaccatctggacaacacaatttggtggaatgggctaaaccttacctggcaaacaagcgtaagatatttcgtgtgttggacacccggctcgaaggacaatattcaacagatgatgcctgtaagctagccacccttgccttgcggtgcctatcaatagaatccaagttcaggccaaacatg

SEQ ID NO: 41982 - DNA, 372 bp, Glycine max
  Clone ID: LIB3139-039-P1-N1-E8
gtgggaattatccgaagaggctcagaaaaaagggcaacttcgcaactcgtgaatcgattactgtagaaattgtcgtcgattctatataaaacatattaggcactggctaccattttgaattctggttgagggattgaagtgtgattataggtggaggaggatggcttgtaggggatgctgggaatgccttttgaagcttttgaacttcatattgactcttgctggtctggccatggtgggctacgggatttatctgtttgttgaatacaataaagcttgggataatactctcaatttcagtgaggataaaacggaagttcaatttggcagacccatgctagtggttgtgtctctgtccaacagttttttaga

SEQ ID NO: 41983 - DNA, 375 bp, Glycine max
  Clone ID: LIB3139-039-P1-N1-E9
ctttaatttataaggaatttccaagcatctaccccagctgagacaagcagtactattccacaagttgatcatccatgcctccaatacaaaacaaagccatcattgaatagcaccaaggtatcaaattcaagttccaaagtattctcaaatcatccatgtgatttatccttgtcaagtctccacccaaatgagaaacattcctcccagagcttatctcacacaagaattgctgaaccaagcaacttgaccttaacaaagcaaccaaatcatatgaaggcagacataggtgcttcaagagataataatatggttgatggtgcttccctagtgtttgataaacttgtttgtgggaaacccttgcctcaaattggtaga

SEQ ID NO: 41984 - DNA, 379 bp, Glycine max
  unsure at all n locations
  Clone ID: LIB3139-039-P1-N1-F1
cttccataaccatgggtatctccaccatcgcttctccttttgactccatcatcttcgatttggacgacaccttgtacccctccagcaccggaattgacaagtgcgtcaagaaaaacatccaactctttctcatccagaaatgcggattctcagaatccaaagccttgacccaacgagttgagctcttcaaaacctacggaagcacccttgccggcttaagagcacaaggcctcgatatcactgcagaggactaccacggtttcgtgcacggaaggctaccttacgactccatcgacactgatcatcagttacggaacctcctcttgagcatcaaacaaaagaaaaatgttnntactaattctgacaggattcacgcgat

SEQ ID NO: 41985 - DNA, 372 bp, Glycine max
  Clone ID: LIB3139-039-P1-N1-F10
gtttcgttgtctctcccatcctttcgcattctcaatacccttttgatttgtgaaaggaaagcaaacatggttgatcaggtccaacaccctacaatcatggacaaggttgctggtcagctccatctccgttctggtctttcatctggtattagaagttatgatggagcctaccgccacccagctatgtaccaaagaccctcttttgggaattactcgaatgctgcattgcagtttcctgtgatgcccacatgcaaagctaccatggatttgtctgctactgcaacatctgcctcacccgtctttgttgctgctccagcagagaaaggccattttcttttagactttctcatgggaggtgtttcagcagctgtc

SEQ ID NO: 41986 - DNA, 287 bp, Glycine max
  Clone ID: LIB3139-039-P1-N1-F11
tgtgcttttacaaccggaaccgatgcctgtgcatgaacctgcggcggcgcgcccttctccattgaatagccttaagcaccgtggtaccgcagcgaagttcagccgcgaagggtgcgtaattgccgtccgtgcagggaagctggcacaaaactggcgctcgccggtgttccggcgggagtatttcccctatcgggtcggttggacctttgcggacttggacccgaaggtcacctcccttgattggagccccgactcgaaatacctcgttgccgggtccaaggatttga

SEQ ID NO: 41987 - DNA, 183 bp, Glycine max
  Clone ID: LIB3139-039-P1-N1-F12
ctctagttggaaaaattccagtttttctggatggtggaattctccgagggacagatgtttttaaagcactagctcttggagcagctggtgtatttattggtagacctgtggtgttctcattggctgctgatggtgagactggtgtgagaaaagtacttcaaatgcttcgtgatgaatttggac

SEQ ID NO: 41988 - DNA, 377 bp, Glycine max
  Clone ID: LIB3139-039-P1-N1-F2
ctcgagccgaatcggctcgaggctagaagcaataagatgaaaatgaaagtgcttgttttgtttgttgctacagttttggtagcatatgaatgccatggctcagactaccagaagttccctctccaaatgaaaactgggtttggtgggcaatacagcaatgaggtggcatgtgccagttggaggcttggcgtggaagcaaacaacgtagtcaagtggcaaactgttcctgcagcttgcggagagtacatagctgactacgttctaggagaccaatatagatcagattccaaaacagttaaccaacaagcttatttctatgctaaatccctcaaactcaccaacaaagatgtctttgtcttggacgttgacgacactac

SEQ ID NO: 41989 - DNA, 374 bp, Glycine max
  Clone ID: LIB3139-039-P1-N1-F3
gtacgacatattaagacagggcctaagagaaagtgttgtagataggatacagagagaaagagaaatggattctcattgggttcgaatggtgcttctcattgcttgcattcttccagctttggttgaatgcagagtgaggcactacaaatttcatgtggtgtctaaacaaaccaatagattgtgttcaagcaaatctattgtcaccattaatgggaagttcccaggacccacactttacgctagggaagatgatacagtgctggtcaaagtcattaaccaagtcaaccacaacgttaccatccattggcatggtgtgaggcaattgagaactggttgggctgatggacctgcatatgtcacacagtgcccaattc

SEQ ID NO: 41990 - DNA, 377 bp, Glycine max
  Clone ID: LIB3139-039-P1-N1-F4
atagccactttttactcactcactcttgttgccttcatggccaagccagtgtccattgaggtatggaacccaagtggcaaatacagagttgtcagcaccaaaccaatgcctggaactcgttggatcaatcttctcattcaaaatgatgttcgccttgaaatatgtaccgagaagaaaacgattttgtcagttgaagacatcattgctttgattggtgataagtgcgatggagttattggacagttgactgaagactggggagaagagttgttctctgctttgagcaaagcgggaggcaaagctttcagtaacatggctgttggttataacaacgtggatgttgatgctgcaaacaagtatggtgttgctgttggaaa

SEQ ID NO: 41991 - DNA, 193 bp, Glycine max
  Clone ID: LIB3139-039-P1-N1-F7
ggctactttcagatcttctgaaaatgcggaatcctctgcatgatctggaattcgtgttttctttcgcttgttcgtttgtttaattcaataaaggaaattaggcatgaccctcttgttgagtatgctctgcctatctgaaaatttccacacctcttttaattgtcgtaatgatgtgtgaagtgtgtgttatttt

SEQ ID NO: 41992 - DNA, 375 bp, Glycine max
  unsure at all n locations
  Clone ID: LIB3139-039-P1-N1-F8
aaacatatgggtttaaggttaaggcactttaagactgttactgctgtagaatggcaccggaaaggtgactacttttcgacagtgatgccagcaggtgaatcaagagcagttctgatacaccagttatccaaaaagcttacgcaaagacttccattcaaattacatggacttgctgttaggtcaaccttccatccatcccgttccatcttctttgtttgtaccaaaaagagtgttcgtgtgtatgatttactgaagaccaagatcataaaaaagcttgatactgggcttcgtgaagcttcatccattgcagttcatcctggaggtgataatttaattgtgggtagcaaagaggggaagatgtngtggtttgacatg

SEQ ID NO: 41993 - DNA, 356 bp, Glycine max
  unsure at all n locations
  Clone ID: LIB3139-039-P1-N1-F9
tgaagccagcgagtgagtgagcgagccaggtagggttttcggtgttcccctctttgtgttcgttcgcgacgatggggtccatccccgatccaggcgagttgagcgagttgactcaaccgagcttcaacgagttccagcgccaaacctttttaatgaccagctgcaccctcctctggaaggagctctccgaccacttctcctccctcgagcaagacctcaaccacaaatccgaagccctcaagcgcaagattcacaccctcgacaactccacctcggactccctccgccttctcgaccaccgcgaaacctctctcgacgccactctccagatcgccctncgaacgctcgacacgcgc

SEQ ID NO: 41994 - DNA, 378 bp, Glycine max
  Clone ID: LIB3139-039-P1-N1-G1
caatttgttagtggaaaaaccttcaaatatgatataattggtgctggttcacattcttcaggagattttcctgaaaaggaagatcaagaaaaacccaaaaagattgataccagattgagacaaagaatagatcctcaatacaatgaggttcaggctcagatggaaacaaatttgtttaaattgtctcttgatgatgttgaaactcctaaaggttctatgttggatcttaaaatttctcaatctaaaattgcacttcccaagaacacagttggaggaaccattctgcgtagtgatctattggcaaattttttgacagaaggcaattttagagcaagtgttgatttgcagcgcactcatcgtattaaaggaatgattaaa

SEQ ID NO: 41995 - DNA, 296 bp, Glycine max
  unsure at all n locations
  Clone ID: LIB3139-039-P1-N1-G10
tttcacttaaatcatggatttcttgcaagcacagaaaatcagatacttgtgggtgtggccgggccgtgtagccattggcttgggcagtatatctctattcatccaagaagaccaaaggttgcttggacccaagaactttaaggcattcaaacttgtaagcgncacagctgagccataatgttgcaaagttcacatttgcactcaacacctacatctgtttgggtcttcaattggcaacacataagttgaggggtaagatgctaagtgaaaggtataaaccattactctactacttg

SEQ ID NO: 41996 - DNA, 373 bp, Glycine max
  Clone ID: LIB3139-039-P1-N1-G2
ttctatactgaacaggtacatcctgacctgagcaaggcagacaagaagcgcctgtgtgggattctagactgccaaagattgtccccagaagtgcgtgcccatgcagtaaaaaacgagcttctgccattaagaaccgttgtgcaacttctctattttgaacaagacaaaggctctaaggcaaccacaagtcacaaactgccaaagccacatgagatactgctgggagcaaaacatagaccagctacagctacaactaaagaagaattcaatagagaagaaattagagaaagggaccaccacaaaactaaaagatctgatggtaagttgttggccttggacttggaaaaaaagatggctataagaggagaagaca

SEQ ID NO: 41997 - DNA, 379 bp, Glycine max
  Clone ID: LIB3139-039-P1-N1-G5
aaattttgtgaggttcattatgaagaaaagggacaaacttagttgtcaagttggaatcaacccatactccatggaatggactggtttggccaatagattactgagtaagggcaatgatattctgtgttgcgattatgctagttttgatggtttgattaccaagcaagttatgagcaagatggcagaaatgataaacagtctttgtggtggtgatgaaaaattgatgcgtgaaaggacgcacctgctgttggcttgttgttcaaggatggcaatttgtaagaaagatgtttggagagttgaatgtggaatcccttctggatttccgctcacagttatttgcaatagcatttttaatgagatgctcattagatatagctat

SEQ ID NO: 41998 - DNA, 382 bp, Glycine max
  Clone ID: LIB3139-039-P1-N1-G6
gcgcaaggcggttttcgactccctccgccaccctctttttgccaccttcgccccgtccaggcccacgcgccgccaccacgttgccacctccaccatcccggagtgcgacgagtccgacgcctccaccgtggactccgcctcgggccgctgggttagtttccaggttcagacgacgatggtggctgcggcggcggctgctcctccttcgcctacctttaacctcatgaagcccgcgatgcagcagatcgctgcccaggaaggcatgcagtggggttctgttgccgagagaggcagaggaggctccgattttgacttcgagaatggcagagtgaaaccctgggagggtgagagaatacacgaggttggaatggatgatttggag

SEQ ID NO: 41999 - DNA, 362 bp, Glycine max
  Clone ID: LIB3139-039-P1-N1-G7
ctcatatcaaaaacatcgccaatattcacgtcgcgattcgcgaaaaccgaaaagcttaatcgcttctcattcaattcccggatccaaacagaacccattattttcctttccgtttcttaatttcttaatcttctttcaaatttaaggattggaccgctgccggccgtccgtgcggatgaccaccaatttctttgggtttccatcgtatactcggatcccgaagtgttcacgtatttagaacccttcgtgtttcgcagatcttttctgagctcgcattttctgcattcgctggcgacaaattcccgaagcttcgcgctcgaggaggcgttcggacatgtgtcgcggttctccggcgcgttgct

SEQ ID NO: 42000 - DNA, 373 bp, Glycine max
  unsure at all n locations
  Clone ID: LIB3139-039-P1-N1-G8
ttgtgttttcgtcggaaggaagagaagatgagtgagaatttgatggagaaagtgagcgcactgggagagcgcctgaaaatcggaggcgtggaagtggggagaaagatgagcgaggggatgagctccatgagtttcaagctcaaggagttcttccagcctgggcccaatcaggccgacaagcttgtggaggacgctacttccgaggccctggacgagcccgaatgggccctcaatctcgatctctgcgacctcgtcaacaccgacaagctcaactgcgtcgaactcgtccgcggaatcaagaagcggatcattctcaagagccctagggttcagtacctcgcccttgtcctnctcgaaaccctagtcaagaact

SEQ ID NO: 42001 - DNA, 349 bp, Glycine max
  Clone ID: LIB3139-039-P1-N1-G9
agatacaattattattaacctaatcttttccctgttatttttataaaatgtacgtttttcagtcattttttttattgctccgcacaaaaaagtattattcaactttttagatattaaatacgtctttatataagacatattgatagtaatataatgtaataaaattaaaaatatttttttttaggttttttgtgttcttataatggtttatgagttataaacctttttaaataatacattattgtgaaaataaaggaaaattagactagatatttatataatgttatatatacctactgttatatccgttcttgaagtgttaattgttacagtgcctgttttattaaca

SEQ ID NO: 42002 - DNA, 363 bp, Glycine max
  Clone ID: LIB3139-039-P1-N1-H1
ctcgagcctcatgcatgaaacaacacgtgtttcttcaattggttaattttctctggaatacccttttggaaaacatagactccaagagcaagatacttgacatcataagtgaaccttctcatctattatttgatgctgcagaagttggtaattttggtttttgtctgagcttattagtgcttatcccagcttgatatgggaagtggatagcagaaacagaagtataattcacacagctgttttgaatcgacatgctagcatctacaacctcatacacgaaatagggtctataaaagatattatagtgacatttgccggagaagaagacgagaacactttattgcatttggctgcaaaattagc

SEQ ID NO: 42003 - DNA, 374 bp, Glycine max
  Clone ID: LIB3139-039-P1-N1-H2
gatcttaatcttcttactgatgggaagttgtatgagggtgagcatattcctgtatctaatattagtgcaggggaaaatcatgtagttcaaatacccttaatggcacaggaggaaattctgtcttctagtgcaagtgatttcagaactgcaatggtgagtaaaaatagcaaacctcaagctactgcaatgcatgtgggagctatagaaattatcattgatagtttcgcaagtcctgattgcaacatagttggtgcaatgcttttggttgatacttatcataccaatcctgaaaatgcagttcgtagtatttttgttgcgcctttcagaggcggaaggcccattcgggtggttacatttccgaataccattgtgca

SEQ ID NO: 42004 - DNA, 346 bp, Glycine max
  Clone ID: LIB3139-039-P1-N1-H3
gcattctttgatgtgcacgagcaagaaggaagccacccaggaggggttcatctagagatgacgggtcagaatgtgaccgagtgcattggtgggtcaaggacggtcacatttgatgacttgagctcacgttaccacacacactgtgacccaaggctcaatgcttcacaatctcttgagcttgctttcatcatcgccgagcgtttgagaaagagcaggatcagatcgcagcaacctcttgcccctctaggagtgtaaaagtgccttcaaaaccaacaagagaaagatatttttgttcttttttttttttgtcctacatatttattattaatcgatggttgtcactttg

SEQ ID NO: 42005 - DNA, 427 bp, Glycine max
  Clone ID: LIB3139-039-P1-N1-H4
agaagtgctatgacgtgcacggctccctaacgtaagctttcggttcgggtcgaggtctacttataattatctgtatctatctgtctcttgcatggaatggtagatttgaggtgaagacgttccacattggtcaggtcccgatctcacgatggggaagtcaccaggaaaatggatcaaaactgtactgttcgggaaaaagtcatctaaatcaaatatttcaaaaggcagagagaagcttgttaatcaaaaaggagtagtagttacctccaaggtgccagaaactggtttggctttagaaccaacctccgatactattgccagacatgaggaagatccagagctggaaaataaagaagcagaaaatgttttacccgggaatcaagaaatagacacagtgggatcaattaatgaagatgctgcactagat

SEQ ID NO: 42006 - DNA, 311 bp, Glycine max
  unsure at all n locations
  Clone ID: LIB3139-039-P1-N1-H6
accaatttcaaatgcacatcttcgctctgcactcaattccgttctgcgggatgctcctcatccacagatgcatcatgcatatttgacgtcatatatgcatgatgcatctgtgacgtcaaatacggtgacaattccatctcccgcggcttcttgagtcaggagcgccttaccatcaccgccaccgacatcgtccacgacttcctctttggctgtggccaagacaacgagggcctcttcaggggcaccgccggcctcatgggcctcagccgccaccccatttnctttgtccaacaaacctnctcaatttacaa

SEQ ID NO: 42007 - DNA, 258 bp, Glycine max
  Clone ID: LIB3139-039-P1-N1-H7
tcactatttatgccaacgtagactatgtgaagatcgtccgtgacacatgccgagaagttggatacatttttgttgatggtggtcttgatgctgtcatatgcacggtgttgttgaacattgaacaaaaaagtcttgatattgtccagcgtgtgcacggatacttaaccaagcgcccaatggagggtggtgctaccgtcctgtgtaatatgtttggttatagcactgatgaaacatgttaacacatacctgtgagtcatg

SEQ ID NO: 42008 - DNA, 374 bp, Glycine max
  unsure at all n locations
  Clone ID: LIB3139-039-P1-N1-H8
ctcgtattttggatttgggtgttggctttctggagtggacattaatacgcaacagagttttgaggctttaaatcaacgggcagtggctgtggtggtggaccccattcagagtgtgaaaggcaaagtggtaattgatgctttccggctgattaatccacaaactatgatgctaggtcaggaaccacgacagacaacttccaacctgggccatctaaacaagccatctatccaagctctgatccatggcttgaatagacattattactccatagcaattaattacagaaagaatgaacttgaagagaagatgttgcttaaccttcacaaaaagaagtggactgatggtttgacactcangcattttgattcacatt

SEQ ID NO: 42009 - DNA, 368 bp, Glycine max
  Clone ID: LIB3139-039-P1-N1-H9
gacaaacttagttgtcaagttggaatcaacccatactccatggaatggactggttgggccaatagattactgagtaagggcaatgatattctgtgttgcgattatgctagttttgatggtttgattaccaagcaagttatgagcaagatggcagaaatgataaacagtctttgtggtggtgatgaaaaattgatgcgtgaaaggacgcacctgctgttggcttgttgttcaaggatggcaatttgtaagaaagatgtttggagagttgaatgtggaatcccttctggatttccgctcacagttatttgcaatagcatttttaatgagatgctcattagatatagctatgaaaaattactgcgccaggc

SEQ ID NO: 42010 - DNA, 395 bp, Glycine max
  Clone ID: LIB3139-040-P1-N1-A10
gagaaggacatggatgttgttgtgactaagacagcaattggcgtgcttggagatttagctgatactttgggtagtaacgctggcccgttgattcagcaatctgtgtccagcaaagacttccttaaagagtgtttatcatctgatgatcatttgattaaggaatctgcggaatgggccaagttggcaatcagtcgagcaatttctttttgaggctgttgctatttcctggcttctagttctcttgcatacatttgcatttgttgcgtgtgggggtctcaactgcatacatgagttgggtcatcaccatttttgggaacaggtgttcggtcctttggttgtctgcatttcatgtcagcaacatggtcatggagtctgctttttcatttttaattttt

SEQ ID NO: 42011 - DNA, 298 bp, Glycine max
  unsure at all n locations
  Clone ID: LIB3139-040-P1-N1-A11
cgcggacgaagccggaatacactacagatcttgacaaaatngttgaaagacaaaaacagaaaaaaacgggcgatttttaaaaggggcggcgccccaaaaaacactgcaaaccgagaaccagcaatctgaaaaacatcaaacacatccaaaccgaaaggatcaaatcccagcagcatacaagtaaggaaccaccaaaatgaaccaagttgccaaaaatacgaaccttaaacaaaggaggctggggcaacttaaacgcttttcttatttttacttacatcaccataagcagattcctgta

SEQ ID NO: 42012 - DNA, 248 bp, Glycine max
  Clone ID: LIB3139-040-P1-N1-A12
catgggaagccaaaaaaccactcaagggggagaaagtaccttcttaactaaaaagggttccaacactcttggcaagggacttttgcactactactggcttctaataatctgattgctaaaattttctctatgcggccttccctctaactcaaacctgctcttttttttctgtattatattatgaatttccccctcttttttgtgaacttggattgagacccatcagaacatatatattttatacgatg

SEQ ID NO: 42013 - DNA, 423 bp, Glycine max
  Clone ID: LIB3139-040-P1-N1-A3
aagatctatgacgacgcacgcgcgcgcgcgcgcgcgaattttgggttggcgccgacattggcgtggttttacggaaactgggttaagcgcgtctggagtgggagtgggacacccttgaagcccaatgagtcactcgacgttttcctcttcgcgcttttcaatgagaaccagaaaacgggtcccacatcggagaggaactacggcttgttttatccaagtcagaagaaggtttatgatattcagctcacggcggaggcgccaccgtccggagttgggaagagccaggttccggtgagcggtgacgtgacgacgtcgtctaagggccagacgtggtgcgtggcgaatggccgttcttcggagaagaaactgcagaacgctcttaactacgcttgcggagagggtggggctgattgcactcccatt

SEQ ID NO: 42014 - DNA, 395 bp, Glycine max
  Clone ID: LIB3139-040-P1-N1-A5
gctctttttttctttccttttttccttccctctcaacttcattttccggtcaaatagtaacactagagaacaaaagctctggctagaacttgtaatgtatatgcaagccatcatcattcagaacaattagtgcatcatcctccttcaactgaagaactttatttaatttgctcctaaaatattttgtcagaggatgtggtgcagtaatcctttgccattccttctttatttttaagcttacagcatctgcaatcatctcttattattacttcaaaggggcgatcacactatcattcattcagctgatcttgaagattttgtggcaggcataaaacctgcaatgagatggctttttcccagcaaatttcatgcttcaaacccctcaccatgatgat

SEQ ID NO: 42015 - DNA, 227 bp, Glycine max
  Clone ID: LIB3139-040-P1-N1-A7
accattcctgggggctttctatttgcctgccactgaactatcacaactcaatactcatctccccaaaacttaaattaattaacaaacaatagatctcacttaacataacgccattttcgtgctttgatggacttgcctagccaagagcttttgtgatagccaagttgcgaagcgcgtcgcggatctgtaatacgacatactgcatcggtccaatggctgggagtaac

SEQ ID NO: 42016 - DNA, 328 bp, Glycine max
  Clone ID: LIB3139-040-P1-N1-A8
ctctattttcctagcttatgattccttctccaatggctcttgccggttccactacttcttcctcttcagctgcagcagcagcagcagcgtcgagctctttcttctcgcgccttggatcttcatcggacgctaaagctccgcaaattggttcctttcggtttccggagaggcctcaagtttcgtctggtgttgttaatttaactcaaagacgctcctcggtgaggccactcaatgccgaaccgcaacggaatgattctgttgttcctcttgcagcaactatcgttgctcctgaggttgagaaggagaaagaagattttgagcaattagc

SEQ ID NO: 42017 - DNA, 393 bp, Glycine max
  Clone ID: LIB3139-040-P1-N1-A9
ggtgttatccatgcttctttaacaggtcgaagaagagcaagatggtatacttttcgccatgaacatgatgtctaccatggtgtatccgtttgtggttcggaccgcgattgagttagggatctttgacatcatagcgaaagccggtgaaggtgcgaagctatcagcagaggagattatagagcaacttggcacaaagaaccctgaagctcccacgatgttggaccggcttctcaggttattggctagtcactccatgctatcttcctctcttgatactgaagatctccaacatggccaaaactctcctaagaggctctatagtcttacctatgcttccaagtattttgtcactgatgctgatggtgtctagttcggagctaccttgaacttact

SEQ ID NO: 42018 - DNA, 379 bp, Glycine max
  unsure at all n locations
  Clone ID: LIB3139-040-P1-N1-B1
cgccgaaagctgggaatttggttcgagtgcaaattaagccatgttccttttcatactncaatccagttagaaatgcagaaagtagtagaactcgagcacattgagttgttggtgcttgttgagatatggtgttcgttcttgacaggggggcaacagtctgaactgttatttctggtggaacttgcttttaggtgattcccctgttctgttgtaaaactcattttaattagctttttgcataatagttttgtttctggttttttaaaattatttttgggtggaaattcagctctctacagttttatttgattgtgtgccaaaatttggaaatgaaatgtggattcaatttcagaaaaattatccgcgtgtttttttatgt

SEQ ID NO: 42019 - DNA, 391 bp, Glycine max
  Clone ID: LIB3139-040-P1-N1-B10
agctcatggacattttttcaaaaatctgactcagaaagtgcgagtccaaattgttacatctgaaaagagttactggcatgtgtatgatcctgacaagtttcagatgtttgacaacagtgaaataggtctttattctaatcccactttggaagatatcccacattcagcttgggaccttttttgctgggacagtgagaaaactttgccaaataatttttctgcagaattgctctcttgcaaattggatactgttactggccaatattatcctgagtgggctccaattaattgtcgagttcatcgacaaccaattcacatcactgaaggaaattatgtcagaaagcaagatgtcagcattgaatatgatgcatgtacaattccaaatgattgt

SEQ ID NO: 42020 - DNA, 340 bp, Glycine max
  Clone ID: LIB3139-040-P1-N1-B12
cacaggttcaacttgttagggggatcaaaacattcctagattggaatatggcaaaactggtgttctagtcgaggaaagcaattgaggagctccttaagggcgtgattggccaaacaactagaggcatcaaggagttggaagatggacataacaacccatcatttgtgacaactggaggagtgctagtcttaccaactccttcgtcttgaaacacccactttgaatccatgatgtttcatgttcaagttggaattccagtctgaggactccaagagagcaattgcaagagctcatattaagacgtgagggtgctacagagagagaactgacaacatgggga

SEQ ID NO: 42021 - DNA, 372 bp, Glycine max
  unsure at all n locations
  Clone ID: LIB3139-040-P1-N1-B2
tagagtccgctcaaagttcaaggatttgctcctttcctcgccgccaccgccgccgatgatcaagaaacgccaagagcgggaggggctgctccccggtggcggcggcggcggcttcgggttccgattacgaagcggttccggtttccggcgcggcggcgccgcctcactcaggcttagactgctgagaagagcttggcgacctgtgctccaatccatccctgagtagtcagtcactcactgttattatttactgttgtgaaattattattagttcttatgaacttattacggttttgtttattaataattcttagggtgaaattaatatattatcacatttattgtaattnctacttttgtgtaattattttt

SEQ ID NO: 42022 - DNA, 278 bp, Glycine max
  unsure at all n locations
  Clone ID: LIB3139-040-P1-N1-B6
ctggaaattcggttcgaggccaccgaagcctaataatgcgccgcctaaaagtggctacggctataatgcgctgccgcaaacggcgtcgtatgggcaggggagcggttacgggtacgcgccacaagaggagaagaagaagagtaagtttggtgggatggggacgggattggctgtgggtgcggntgctggggctctaggtggaatcgcacccgaggagggtgctgagtatgnngaggacaagattgaagatgacgtggcggaaagagtggaggatgatc

SEQ ID NO: 42023 - DNA, 398 bp, Glycine max
  Clone ID: LIB3139-040-P1-N1-B7
gagatatccagtgcttttttgttgtagcagcgagagaaggaaggaggaaagatgaacacagacatcactgcatcgacgaagccagagtaccctgtcattgatcgtaaccctcccttcaccaaagtcgtcggcaacttcaacaccctcgactatctccgattcgtcaccatcaccggcgtttctgtcaccgtcggctatctctccgggattaagcctggaattaggggtccgtcgatggttacagggggcttgatcggagtgatgggtgggttcatgtatgcttaccagaactccgctggtagactcatgggtttcttccccaacgatgatgaggtagctcgctacaacaaaaaataatccttttttttcgtctctcgtttcaaaaaaaaagaagaaga

SEQ ID NO: 42024 - DNA, 352 bp, Glycine max
  Clone ID: LIB3139-040-P1-N1-B8
gttttatcttatgtcttttttctattgaccttctcggtggaggaattttagtggacaaaactggagattggatcacacttatacaaaattctccaattagtaacttgttgagagttgctgcttggaagaaaggttgtttaatggtcaagattgtgatgtctgggaatgcagcagtcaaaaggagtgattgggcctcattggtacaagtgtttttaacaaacagcaacagtacagagcattttgatgcatgtaagtggacaaaatcagaaccacattcctgggaattaatcttcccaatagaggtatgtggtcctaataatggttttgaaatgtggagttctgagtgggcaaa

SEQ ID NO: 42025 - DNA, 343 bp, Glycine max
  Clone ID: LIB3139-040-P1-N1-B9
ttgataggaggcccatacataaatgcaaagatgcaaaaaaaagaaaaaaatttgaaagggagaaataaataaaggtagcgaaaagaaggaaaaaaatataaactcatctttgttctgctgtctgatgcatgcacgtctggtcctttgatcatgaccactgagggtctcttcgcatgtcgtttttgagccccatcgtgattctattctcagaaacaggagaatcgagggcgagaaagccggggaaaaagtcacctttctttctttctttctttctttcatttaataaaaaaaatctcttttttctacatcttgttctccatttcttttctcaagggttttggat

SEQ ID NO: 42026 - DNA, 394 bp, Glycine max
  unsure at all n locations
  Clone ID: LIB3139-040-P1-N1-C11
agactgtgaattatggaatcctgcttgcacaaaagcaatgactatgtcatttaatccaaacccgtgttctgatgcatggagtttggaatttctgaagcgtaccggatttcattgtgatatcatttgtgtcactggatggactgccaccccaatgcaggatgttcaggttacaattgattggtttatttcctctcaggaatgtgttcccaggacctattgtgttttaaatccacaaaatccttttgtgttaaataggtggatgggaaaactgactttccctcagggcacttcccgaagtgttaagagaatgcctctntctatagggggaggagctggtgcaaagaatgctattctcatgaatatgccaaatgctgttctttcaatgtggagatat

SEQ ID NO: 42027 - DNA, 371 bp, Glycine max
  unsure at all n locations
  Clone ID: LIB3139-040-P1-N1-C12
cctatctttgcttanttttcctgcattaattattctctccctgggattaccaagctctgcaactgggcttctcaacatggagtatcgtctcctacccatttttactttactcaatcttgcactggtggcaanccatgctgctttacctcctgaagtttactggaagtcggngctncctactacgccaatgccaaaagccatcactgatatccnnaaccccgattgggtggaagagaaaagtacctcagtgaatgttggaggcaagggcgtaaacttgcatgcaggaaaaggaggaggtggcaccaatgtcaacttttgtggaaatggatcagtttggtgcttgatcgtgctttctggtcttaagggaaagc

SEQ ID NO: 42028 - DNA, 407 bp, Glycine max
  Clone ID: LIB3139-040-P1-N1-C4
tcggttcgaggcaggttgcaacaattttgattttggatgccagtaaacagcctgatgaggaatttttagcccaggtttcaatggtatcaaggctgaagcatgaaaattttgttcagttgcttggatattgcattgatggaagctcccgtattcttgcttatcagtttgcatctaatgggtctcttcatgatattttacacggcagaaaaggtgttaaaggagcacagcctggtccagttttgacatgggcacaaagagtaaaaattgctgtaggggctgcaagaggacttgaatacttgcatgagaaggctgatccacatattattcaccgggacatcaagtcaaggaatgggcttaatctttgatgatgatgttgctaaaattgcagattttgatttatcaaatca

SEQ ID NO: 42029 - DNA, 412 bp, Glycine max
  Clone ID: LIB3139-040-P1-N1-C5
aatttgggctcgagatttatttcacaaaattttttacagagaaagacactcggagacctggcaggacttaatcaatggctgtcaaagtttatattgtgtactactccatgtatgggcatgttgagaaactagcagaagaaataaagaaaggggctttcctctgtggaaggtgttgaggccaaattatggccaggtacctgagacgctgcaggatgaggtgctcggtaagatgagtgcaccacccaagagcgatgtaccagtcattaccccgaatgaactatccgaggctgatggctttgtattcggcttcccaacaaggtttggaatgatggctgctcagtttaaagcttttctagatgctactggaggcttatggagagcacaacagcttgcaggcaagcctgctggcatc

SEQ ID NO: 42030 - DNA, 421 bp, Glycine max
  unsure at all n locations
  Clone ID: LIB3139-040-P1-N1-C6
gaaagctcgaatttcggttcgcgctaatttgtccaaaaggtttaaacatggagagtaaatgtccgtttgcagggatgtgaccttgagcatgggtatttgtgtggcaccatggaagctcttaatgttcctatggcagacacaccagtagtaacgnnctgggaaggggagatagttgatacaaagaactatactttcttcaccggnaaatgggaggcatctccagaggatgatataaggcactggtctaaatttccatctttttctcccttattgggccaagtggaggctgatggtggcaagtctttggacctgagcaactatccttacatattcatgaggtggaaggagcaatacttcgtgaatgttggaacagactgtggattaaccatagccggattttactacatttgtttctcttgca

SEQ ID NO: 42031 - DNA, 363 bp, Glycine max
  unsure at all n locations
  Clone ID: LIB3139-040-P1-N1-C7
cgtcaatggcagttattgttttctgatgatcccccaaagctcgggtcccttgccataattgctggctcctctcccactctactcgtcctccaaaccctaatttgaacctcacccccaaaattcagtgtctcagctttctttttttctttttggcttttgaaattttgagttgctccctgccatgggcgcgccggagaaatcgcagaccaacaccaatccgatgcagcgtgtcaaggtctaccgtatgaatgatgacgggaaatgggatgacaagggcactgggcatgtcactgntgattatttggagcgattggaagagctgggtttatttgtttttgatgaagaagacaatgaaaacatact

SEQ ID NO: 42032 - DNA, 391 bp, Glycine max
  Clone ID: LIB3139-040-P1-N1-C9
gaatttggatagggtttttgaccacaaggcattgcatgatacctgttctacatttggaaatatcctttcgtgcaaggtagctacggattcatctgggcaatcaaaaggctatggctttgttcaatttgataatgaggaatctgcccaaaaagctatagagaagctgaatggtatgctgttgaatgataaacaagtgtacgtgggacccttccttcgcaagcaagagagagaaagtgctgctgacaaggcaaaattcaacaatgtttttgtgaagaatctatcagaatcaaccaccgatgatgagttgaagaacacttttggtgaatttggaactattactagtgctgtagtaatgagggatggggatgggaaatcaaagtgttttggattt

SEQ ID NO: 42033 - DNA, 405 bp, Glycine max
  Clone ID: LIB3139-040-P1-N1-D1
attcggttcgagggagccgtaaagaggttctggaaagcagatctggcagtgacaacatggatggtggttctggtgatgattttgatgctgccgacaacccaccgaggaaaaaacgctatcaccgacacactcctcagcaaattcaagagcttgaatcgctcttcaaggagtgtcctcacccggatgagaagcaaaggcttgaactcagcagaaggcttaatttggaaacgaggcaagtaaagttttggttccaaaatcgaagaacacaaatgaagacacaattggaacggcacgagaactcgctgctaaggcaagagaatgacaagcttagagctgaaaacatgtctatgagggaagccatgagaaatcccatatgctcaaactgtggaggtcctgctatgatcg

SEQ ID NO: 42034 - DNA, 390 bp, Glycine max
  Clone ID: LIB3139-040-P1-N1-D11
gacaattgttgtttactttattcttttggagctgagaatctcaagttaaatgtagcctgtcacagaaaagttctgtgttgtcatcaagttaaaaatctcaagttcagatgctaggcaataattttgatagactatatttggaaatttacacgaagtggttgttttttctccttctgtattttggagcatatttatcatgtattcatttgctgatgatggtagtgtcataactctaattcacgagaaagcactacctcttatctatttaacacacctattacatgttatttcttgtacgtttctggacatggttttttgtatttccaatactggtaaagcttatcatagagaaatgccatgtggtgctgtgatttttcagagatttggtgc

SEQ ID NO: 42035 - DNA, 76 bp, Glycine max
  Clone ID: LIB3139-040-P1-N1-D12
gttaagaattcctccccgggggaacggacgaaagggagcgctattttgcaaaaagaaggctttcacaaagaagatg

SEQ ID NO: 42036 - DNA, 409 bp, Glycine max
  Clone ID: LIB3139-040-P1-N1-D2
aatttcggttcgagtccacttcctttttgggtttttatgatggccatggaggtaaagtggttgcaaagttttgtgccaagtatcttcaccagcaggtgctcaagaatgaagcatacatagctggagatataggaacctctcttaaggaatcatttttcagaatggacgacatgatgcgtggtcaaaggggatggagggaattagcagttttgggtgataagatagacaagtttaatggtaagatagaagggttgatttggtctccacgaagcagacatagtaaggagcaagatgatacttgggcctttgaggagggccctcattctaattttgctggaccaacttcaggaagcactgcatgtgttgcaattattagaaacaacaaactttttgtagcaaatgccggtga

SEQ ID NO: 42037 - DNA, 399 bp, Glycine max
  Clone ID: LIB3139-040-P1-N1-D3
ctctttctctcacatggttttctgttctccaagattcctaacccgcctcctactcctctctgccatacccatcggaatcatcgtcactttggagcgagcccaacccgccacccacgtctaccactaccacagttccggctggttccgagaatgcgccaagtgggattctcatcatcgccgcttcattgtttccttcttcgaaggtggtcttggtcaggttaagctgccggagaaggattccgagtcgtcctcgtcatcgccgccgttggaggaagtcacggtggtcagagatgcacacttggccggaaatgcgtcattgggcatcgccattgacccacccagaaatcgagtcctcgttgttaacgctgacgtcatcggtaatcgatacggtgcgcttgc

SEQ ID NO: 42038 - DNA, 396 bp, Glycine max
  Clone ID: LIB3139-040-P1-N1-D4
ctccgattgcaagcaatttactccttcaattccttcttcgattcaacaaaccgatggaattacgatactctcaaaaacttccgtcaaatttctccggtcgttcagaatcacctcaagcaggtttattttactctgtgtttcgccgtggttgctgcggctgttggggcttaccttcatgtcctcttgaacattgggggttttcttactacagtggcatgcgtgggaagcagtgtttggttactctcgacacctccttttgaagagaggaaaagagtgactttgttgatggccgcatcactgtttcagggtgcctctattggacccttgatagatttggctattcaaatcgatccaagccttatctttagtgcatttgtgggaacatccttggccttt

SEQ ID NO: 42039 - DNA, 391 bp, Glycine max
  Clone ID: LIB3139-040-P1-N1-D6
cgatgaactccctaagttttttgatgatacacaggacccaaaaacgtggttctataaaggaggccttcattcaagccaaaccatggaaggtccattcaaccaagcgtccctatgcccaccctattggggtatatccatggttaacggatattaaagccacctgtaaagaaggatatagtttggaagagatatgcatcaagaaagaagcgtttgagggagaagagaagttttgggcaaaatccttgggaacagtaatgggttttgccatttcaaagctgggaaagaacattcaagtactttcaagttcctttgtcaataagcaagagcaatacactgtggaaggagtgcagaatcttggagacaaagcagtgatgtgtcatgggctaaattt

SEQ ID NO: 42040 - DNA, 210 bp, Glycine max
  Clone ID: LIB3139-040-P1-N1-D7
tttttttaaaataacttacacttcacacatcattacgacaattaaaagaggtgtggaaattttcagataggcagagcatactcaacaagagggtcatgcctaatttcctttattgaattaaacaaacgaacaagcgaaagaaaacacgaattccagatcatgcagaggattccgcattttcagaagatctggcagtagcctgtggaacag

SEQ ID NO: 42041 - DNA, 394 bp, Glycine max
  Clone ID: LIB3139-040-P1-N1-D8
tttgtcttcttccctgtgtaggttgatagtcaagagggagttgcgtcacattggtgaattgaaatctggtgtctatgttccactgcctacaaaaactaatttggtggaaactcccaaggaatggcaactggatctaccttgtgacaaaattcctagtgtcttgactacaactgatgagagattggtaggcacagaacatgagggatatgatccttttcttggtggaattcaaaaatatgctactcccatgatgcccctagatgaagaaattctttctaaggttgcacaagatatggttgaggaatggtttgattgtgttgatgaggaggattcctttgaggaagtttctttaagtgcagcactcaatggtgttgagggtttggactatatggaa

SEQ ID NO: 42042 - DNA, 389 bp, Glycine max
  unsure at all n locations
  Clone ID: LIB3139-040-P1-N1-D9
aatttctgaagcgttctgtatttcattgcgatatcatttgtgtcactggatggactgccaccccaatgcaggatgttcaggttacaattgattggtttatttcctctcaggaatgtgttcccaggacctattgtgttttaaatccacaaaatccttttgtgttaaataggtggatgggaaaattgactttcccccagggcacttcccgaagtgttaagagaatgcctctttctatagggggaggagctggtgcaaagaatgctattctcatgaatatgccaaatgctgntctttcaatgtggagatattttgttggagatctcgtctttgaagtttctaagatgacttctccctacattaaatgtacagtctctttcttcatagcattt

SEQ ID NO: 42043 - DNA, 406 bp, Glycine max
  Clone ID: LIB3139-040-P1-N1-E1
aaattcggttggagcacgcgtggaacgcgatttaccaaatcgccgagtcgtggatccacgcgtcgcggaaggttctagagaggatcgcagacgcggtgctctccagaaccttcgagaaggcggctgaggactgctacgccgtggaaaggatctggaagcttctcgcggaggtggaggacctccacctgatgatggatccggacgatttcttgagactgaagaatcagctctcggtgaaatcctccggcggcgaaacggcttcgttctgcttcaggtcgaaggagttggttgaactgacgaagatgtgcagagatctgaggcacaaggtgccggagatattggagggtggggtggatccgaagggaggaccgaggattcaagaggcggcgatgaagctctacgtttc

SEQ ID NO: 42044 - DNA, 390 bp, Glycine max
  Clone ID: LIB3139-040-P1-N1-E10
ggtaacagtgagatctccattgaattttgattctagcaagcagagcttttgtcaattttctattgaccttctcggtggaggaattttagtggacaaaactggagattggatcacacttatacaaaattctccaattagtaacttgttgagagttgctgcttggaagaaaggttgtttaatggtcaagattgtgatgtctgggaatgcagcagtcaaaaggagtgattgggcctcattggtacaagtgtttttaacaaacagcaacagtacagagcattttgatgcatgtaagtggacaaaatcagaaccacattcctgggaattaatcttcccaatagaggtatgtggtcctaataatggttttgaaatgtggagttctgagtgggcaaa

SEQ ID NO: 42045 - DNA, 215 bp, Glycine max
  Clone ID: LIB3139-040-P1-N1-E3
cgaaagctggaaattcggttcgagcccgaagtgttaaacgatttcctcttgctatagggggcggagctggggcaaaaatggctactcacaagaatatgccaaatgcagctctttcaatgcggagatgttaggttggagatctcttctttgaaacccataaaacaacttctcattacattaaatgtacaacatataacttcattgcatcctggaat

SEQ ID NO: 42046 - DNA, 410 bp, Glycine max
  unsure at all n locations
  Clone ID: LIB3139-040-P1-N1-E4
gaaagctcgaatttcggttcgagatttttctgatgacaccttcttattttgaggcttttccccacaagctggtgcagtttggagagattcaggaaaaagttgtattgaaattttcacaagaggaatttcttacagcttggtcaactcaggtgcgtcctgcaacaactctgttggctgatgggtgtccatatttgtatgctatggngcatgaaagttcagtgtctacaataccaggtgattttgtcattggtgttaagttgacaaccataaacaatatgtgtgcatatgggcttaatcctggtatttcaggttctcgtcttttgggcaccattcctcagtccatttcacagcaaactgtttggaatcaaatggcaacagtgagaacaccattgaattttgattctagcaag

SEQ ID NO: 42047 - DNA, 415 bp, Glycine max
  Clone ID: LIB3139-040-P1-N1-E5
atgccccccgccgaaggctcggattcggttcgagcattgttgaatggaatttgttgttatgttccactgcctacaaaaactaattgatggaaactcccaaggaatggcaactggatctaccttgggacaaaattcctaggggcttgacttccactggtgaaaggttggtagggaccaaaccttgagggttttaaccttttcttggtgggaatcaaaaattatgccattccattgatgcccttaattgaaaaaattttttttaaggttgcccaggatttggttgaggaatggttggatggtgtggttgaggaggattccttggaggaagttcttttaagggcagacttaaatggggtggagggttgggcctttttggaaggattccttttggccacatttgagggttttcctaatg

SEQ ID NO: 42048 - DNA, 370 bp, Glycine max
  Clone ID: LIB3139-040-P1-N1-E7
cacaaagcgggttactgtctgttcaagctaccatctctctctgtctttcttagtgcctccttgccagaagttaaaatggcccaagaaactttcctattcacatctgaatcagtgaacgaggggcaccctgacaagctctgtgaccagatctccgatgctgtgctcgatgcatgcttggagcaggaccctgacagcaaggttgcctgtgaaacctgcaccaagaccaacatggtgatggttttcggagagatcacaaccaaggccaacgtggactatgagaagattgtgcgtgacacatgcaggaacattggttttgtctctgatgatgttggtcttgatgctgacaactgcaaggtcctcgtcaacattg

SEQ ID NO: 42049 - DNA, 310 bp, Glycine max
  unsure at all n locations
  Clone ID: LIB3139-040-P1-N1-E9
gagtaacgcagaccgtggcgtttccagttcgaaagggaaatgaaagtgtctttgttggtgaagggtaggtgagagaaacgaaaggggtgtgtgttgggttgaataggtatagataggatcaatgagcaacaacaaacgcaggaaaggtggtgtgtgtgacgggtgcttctggtttcatagcttcatggatcgncaaattccttctccaacgtggttacactgtcagggccaccgntcgctacccaagtaatctgaaaaaggtagatcacttgtttaaacttgagggcgcaaaagagaggttgcagctgtt

SEQ ID NO: 42050 - DNA, 376 bp, Glycine max
  Clone ID: LIB3139-040-P1-N1-F1
ttatccaggctacctatgacaggctcctttccgaggcacccaaatacaaactcattactccttccattctctctgaccgtttgagggtatcttctatcatcacttttttttattattattcttatgttaaaggattattcttattgatgggagcgtttgtgttggtgatgttttgattcatttcatttattttgttgttcttaaaattaaattgtgaattataagagctttaatgtgggtgaggtctcagttatagctattccttaattggtagtcgtctataagatctgcattcctagactgattgattgtatggagcatatgtttggtattggtatgttcttaattgggattatctagactgattggttgggta

SEQ ID NO: 42051 - DNA, 375 bp, Glycine max
  Clone ID: LIB3139-040-P1-N1-F10
ggaaaaagtttctttcaaaagcacaattgtagtggaaaaaccttcaaatatgatataattgggctggtcacattctcagaagattttcctgaaaaggaagatcaagaaaaacccaaaaagattgatgccagattgagacaaagaatagatcctcaatacaatgaggttaggctcagatggaaacaaatttgttaaattgtctttgtgatgtgaaactcctaaggttccatgttggatcttaaaatttctcaatcgtaaattgcacttccaagacacagttggaggaaccattctgcgtagtgatctattggcaaatttttgacagagcaatttagagcaagtgttgatttgcagcgcactcatcgataaaggatg

SEQ ID NO: 42052 - DNA, 332 bp, Glycine max
  Clone ID: LIB3139-040-P1-N1-F12
cttttctgaccctcaattttttttttggagcatcgtgctgtgataatatatatactctcttcttttcttttcttttcttttttttttttccttttcaagatttatggagatccctgggttagggttagatataatatttctgtagcatttttcaattggttcaactctctctctttttattctctcccaaaagaagaacatttttttctagagtagttggtgtttattatttttgctttggtggtgtgtgaggattgtgtggtgtgatctgattttataaacctagggtttttgatagcggggaaattgatgttgatgaaggtgtgtatgag

SEQ ID NO: 42053 - DNA, 369 bp, Glycine max
  Clone ID: LIB3139-040-P1-N1-F2
gttcgggtccttatttacagggttttcttttctttctctctctctctctgcaaaagctacgaagctgtgttctgatccttcaaattaggttgtttgctttttttggggagttaaatggatgctaggccgtggatttggtcaatttgatctcaattgaaattttttagtatttctgatggacttcgaaaactagttctagagctctcccaaaacaccatcagaagacggctgggattcaaacccttgaggcaaaagacacagggtcttctttgcagaagggggagaaaacagagctggctgctcctgtggatttgtctatgtatgcagcgaacgcatccaagcagaataccggtgaaactgctgaaatca

SEQ ID NO: 42054 - DNA, 391 bp, Glycine max
  Clone ID: LIB3139-040-P1-N1-F3
cgaggtgctgtttccttattttttcaaaaactgcatgaaccctctctttttcaccgaaccttcctttgttctttcccttcaattttttattcacggcaaagatgggtgagagtaacagcaacaagaagaggaagttaatttgccgcgaagaagaacatgaagaggaggaggagaccaaaatggagacgttctttgctctggtgagaaacttccgcgacacacgtgatcggtggatgggtctgaggtcaggtgaccgcaagagcaagaggggtaagattatcactgccaaggaagaaaatatagtttggaaacccacgtttcagcttgaggatttcgctgatgagcaagctcggtgccgaaactctttggaacctagtgcgtcatctcagag

SEQ ID NO: 42055 - DNA, 403 bp, Glycine max
  Clone ID: LIB3139-040-P1-N1-F5
aacagattgtggaagtaatgtcccggatctgaaggaggagatggagaagcagtttgtggaccttctcagtgaggagttgaagttgcaagagtctgttactgaagcaaacacccggcacatgaacataactttggctgaagcaaaaagagtggcttctcagtaccagagagaggcagataaatgcattgctgcaactgaaacatgcgagcaggcaagagaacgtgctcaggccatacttaccaaggggaaaaagatgactttggtgtgggagaaacgagctcgtcaaatgggttgggaaggagaataactgcataagttttgttatttatattctttatggctataatcatgatcgtggttttatacaagtatacaagcaaaatgcttgagttgtcaaatttaa

SEQ ID NO: 42056 - DNA, 392 bp, Glycine max
  Clone ID: LIB3139-040-P1-N1-F8
ctcgagccgattcggttcgagagattatgcatgcaaaatcatgtgctgatctttataaagttattggtgaggatttttggttggctacctggtgcaacagtactgcatttgaagggaagcagcttgaaggaactaggataaaccttgtaaaaatgggagagcatggttttgactttgcaatcaaaacaccttgtacccctgctagatgggaagattttgacgaagaaatgacagtggcatgggaaactctctgcaatgcttactgtggtgaaaactatgggtctactgacttcgacacgcttgaaaacgtgcgagatgcaattttaaggatgacatattactggtataactttatgccactgtctaggggatcggcaggggttggatttata

SEQ ID NO: 42057 - DNA, 392 bp, Glycine max
  Clone ID: LIB3139-040-P1-N1-F9
ctcgtgccgctgcttttttcacacttctgtttattattgtcatcgatcttgccattggaatgttgccacatgttgataactttgcgcatattgggggattcctctcaggatttctccttgggtttattttgctgctccgtcctcaatttgggtggttagaacaacaacgtctccatgctggtgttcacctcaagtccaaatacaaggcttaccaatatgttctatggattgtctctgccattttactgattgttgggttatctattgctctagtgatgctattccggggtgagagtggatatgatcactgccattggtgtcactatctaacatgtgttccaacttctaaatggaaatgcaatgacaattaaacaaaagggcatgagctatcg

SEQ ID NO: 42058 - DNA, 394 bp, Glycine max
  Clone ID: LIB3139-040-P1-N1-G10
agctaaacaagggaatgaagggataattgagtgtgtggtgtgtagtgtggcagctccgtcagcgtgagatggacgccgcagcaacaggttcggagctgaacaagtccggaagcggaggttcggagcgaagtgaggacagcggaggagggatatttgagtactctggctgggtttatcacttgggagtgaattccattggccatgagtactgtcatctccgattcctcttcattaggggaaagtatgtctccatgtacaagcgtgatcctcacgataaccctggcctcaaacctattaggcagggagttgtaggacccacgctaatggtggaggagctaggtcgttgaaaggtcaacaatggggatccttatgttttactgtttttcaatcgatt

SEQ ID NO: 42059 - DNA, 422 bp, Glycine max
  Clone ID: LIB3139-040-P1-N1-G3
ccccgccgaaacttcgaatttcggttcgagtgcgtattgattaatggtttaatttttggacagagggcaattttggagcaagtgttgatttgcagcgcactcatcgtattagaggaatgattaaaatggtggccacagttggtattcctgagaatacaggtatagcattggcctgtgctatgaatagttcttttagggggcgcgccagttctgatatttacaccatctgctctcaagactgtgaattgtggaatcctgcttgcacaaaagcaatgactatgtcatttaatccaaacccgtgttctgatgcatggagtttggaatttttgaagcgtaccggatttcattgtgatatcatttgtgtcactgggtggactgccaccccaatgcatgatgttcaggttacaattgattggtttatt

SEQ ID NO: 42060 - DNA, 210 bp, Glycine max
  Clone ID: LIB3139-040-P1-N1-G5
ctcgctgtttgattcatcactctgaaagaaaacgagaagacatttctgcttagattgctgacaagcatttgcctccactgcttgccctttcaccgctctcacgtccttttgcagataagaagatacatgtacaatgacgtattacgccttggtgatgctcagacattgttgaattgttcccttgttcaaccgtacacaacaaataaaact

SEQ ID NO: 42061 - DNA, 397 bp, Glycine max
  Clone ID: LIB3139-040-P1-N1-G7
gtagataggagctccattcgaagtggtggcgcgtatggctgcggctaagcaagagtttgaggcacggcaaagatcttcagttggttcaagggaaacttcaaaagaccctgaacttgaccaattcatggaagcatactatgacatgcttgtgaagtatagagaggaattaacaaggcctattcaagaggctatggatttcatgcgaaggatagaaactcagctaaatatgctttgcaatggacccgtgcggatcttctctgatgataaatgtgaaggtgccggttcatcagaagaggatcaagacaacagtggaggagaaacagaacttcccgagattgatccccgagcagaagaccgtgaactcaaaaaccacttgctgaagaagtacagtggttac

SEQ ID NO: 42062 - DNA, 398 bp, Glycine max
  Clone ID: LIB3139-040-P1-N1-G8
ctaaccactttgcttttgttatggagtttcgttgccttccattggttttctctctcaatctgatcctgatgacagctcatgctgccatacctccagaagtttactgggaaaggatgcttccaaataccccaatgcccaaagcaatcatagactttctaaaccttgatcaacttcctctttggtatggtgctaaggaaacccaatctacagatcaaatattcctgtatgatgctaagaaaacccaatcaacagatcaagttcctcctatcttttatggtgataagaaaacccaatcaacagatgaagttcctcctatcttttatggtgctaagaaaactcaatcaatagatggagttcctcctatcttttatggtgctaagaaaacccaatcaacagat

SEQ ID NO: 42063 - DNA, 357 bp, Glycine max
  unsure at all n locations
  Clone ID: LIB3139-040-P1-N1-G9
tgcgttttcaacactgttcgcgcgtcggagggttcttatttggggcacattaaagaagagttggggcataagagtgtgttttcggtcgggccgttgggattgggtcgggctgagtccgacccaaatagaggatccgaggttttgcgtttgcttgacgaggtggaggaagaagcgtcggtgttgtacgtttgctttgggagtcagaagctgatgagaaaggaacaaatggaagcattggcggnggtatcagaaaaatcctaaactttatttttgttggcggcgaagacggcttccacgaaggaatttattgatgaagggttcgggttggtaccggatgggtttgcggaatcgtttttc

SEQ ID NO: 42064 - DNA, 412 bp, Glycine max
  Clone ID: LIB3139-040-P1-N1-H1
gaatttgggttggagttaactcgaagattttaattaacgctggcccacgcgcctacagttacgcgtacgatgacaagaccagcacgtttacgtgcgcttctgctgcggcttacaccatcactttttgtccttctcctaacagtaatcccagtcagaaatcatggcaggggcaaaaccctaaatcagatagtagtggctcggcttcatcttcttctgggtcgccacaaattaacaacggcacaattgtgtatataggtagcatggatccaagtgaattatggtccgcaggtagtacccacgtgcgggaatctcaaaccattgcgggctttgtcagtatcaccatcgctgtttggctcttgtgccacctctgttaatttgttcttaaaacaaactatgcccatgaactatgttt

SEQ ID NO: 42065 - DNA, 397 bp, Glycine max
  unsure at all n locations
  Clone ID: LIB3139-040-P1-N1-H10
ggcgcaagaagcagtcttatgtcatgcgcttcttgcagcgggtgaggtgctgggagtataggcagcaaccttccattgttcgtttgacaaggtctacccgccctgacaaggctcgtcgcttgggcttcaaggctaagcagggctatgtgatttaccgtgttcgtgttaggaggggtggccgaaagagaccagttcccaaaggtattgtttatgggaagcccacaaaccagggagttacccaactgaaatttcagcgaagcaagaggtcagttgccgaggagcgagctggacggaagctgggtggacttagggtcctcaattcttactgggtgaatgaggactctacttataaatactntgaggtgattctgggtgatgttgctcatgctgctattag

SEQ ID NO: 42066 - DNA, 399 bp, Glycine max
  Clone ID: LIB3139-040-P1-N1-H12
ctcgagccgattcttcttgaggagctctattatcattttttgggtactgatcaatcacaagatattctgtgttggagggatcctgagaatcctaaatatatgtttggaggaactgttactgaggatggcaagtatgttcttctctatatcgaagaagggtgtgatccagttaacaagctttattactgtgacttgtctgaacttccaaacgggctggaaggttttcggaatgagagttccctcctcccatttgtcaagctggttgataaatttgatggacaatatcaagccattgcaaatgatgacacattgtttacatttttaactaacaaagatgccccaaaatataaactagtccgagtagatttgaaagaaccaaatgcttggaccgatgttatc

SEQ ID NO: 42067 - DNA, 404 bp, Glycine max
  unsure at all n locations
  Clone ID: LIB3139-040-P1-N1-H2
caaaagctggaatttgggttcgagaaaagaagaccagggattttttttacaactatgtaaatcagttgtgcgagagcttgccgagtccaaatggagagtcagtagtagactgtaatagcatttatggattgcctaacatcacgtttactgttggagacaaacctttcaccctcactcctgagcagtatattctgaaaactggagaaggcattgcagaagtttgccttagtgggtttattgcttttgacattcctcctccacggggtcctctctggattcttggggatgttttcatgagggtatatcacaccgtctttgactatggcaatctccgagttggttttgccaaagctgcctaacaagacatgttggagattatatanggcatgttttaataaagctcg

SEQ ID NO: 42068 - DNA, 379 bp, Glycine max
  unsure at all n locations
  Clone ID: LIB3139-040-P1-N1-H4
accctcncacactctctctctggggctatcatggctttgcccaatcagcaaaccgaggattaccctagtttcaaactcgtcatcgtcggtgacggcggtacaggaaagacaacgttcgtgaaaaggcatcttaccggtgaattcgagaaaaaatacgaaccgaccattggagtggaggttcacccattggatttcttcacaaactgcggaaagattcgcttctactgttgggatactgctggacaagagaagtttggtggcctcagagatggatattatatccatgggcaatgtgcgattataatgtttgatgttactgcccgtctaacatacaaaaatgtccctacctggcaccgggatctttgccgggtctgtgaaa

SEQ ID NO: 42069 - DNA, 397 bp, Glycine max
  Clone ID: LIB3139-040-P1-N1-H6
ctccagccaaatcttttttagagcgcaatatcaatggttatgatttttgggtcattggtcatggtttcggccagtggacagatgctagcagaaaaacatataatctagtggatgccctgactagacacactgcacaggtgtatccaaaatcctggactactatattggtgtctttggataaccaaggcatgtggaacttgaggtctgcaatatgggaaaggcaatatcttgggcaaaagttctatcttagagtgtggaatgcacagaaaagccttgctaatgaatatgacattcccaataatgttctgctttgtggcaaagctgttggacatcacccttagtatatatatcggtgtattttctggtcatgagggcttgactacacaactagaattat

SEQ ID NO: 42070 - DNA, 394 bp, Glycine max
  unsure at all n locations
  Clone ID: LIB3139-040-P1-N1-H8
caaaaacttaagttttttccttgcgttttgctttcttcctcaaaaccaaacatgtcgaacacatgcggcaactgcgactgcgctgacaagactagctgcaccaagggaaacagctatggtgttattgtagagactgagaagagttacatcgagactgttgtcatggatgttccagcagctgagcatgatgggaagtgcaagtgtggcactaactgcacttgcacggactgcacctgtggccattaaggaatatgtatgaaaatgtaattgccatgtgtntggcaatacaaatatccaaataatgtaatctttgtatgaataaatgngtgtgctgttatcctacttcaagtctgggtagtcatgcagtctgaatcatttcaagttcctggcttag

SEQ ID NO: 42071 - DNA, 359 bp, Glycine max
  Clone ID: LIB3139-040-P1-N1-H9
ggaagaagtctgcagttatataggtgggaagttcttttgacccactctcaaatggttcagttggctgaaacactagatatatactatgtggatccttattcgctaccttataaacaattatcctgtggtgtggctgccaagtttgcaaacgtgtacaataaaaaggggaattcttttccaaaattgttgtcattcgcccttgcaagtggtatatttcttgtagcaattagtgctctgggtcaattttggttgccttgggtatgcaagggaaggaaacactctgtagaacatagatctctaccatcatcggaagggaagggtgcaatgaatgacttttttgatacaaaaaagttggaaga

SEQ ID NO: 42072 - DNA, 359 bp, Glycine max
  Clone ID: LIB3139-041-P1-N1-A1
cagaaactgctgttctattccttaagacccacgacagtgtctttgcaagcaggcctagaactcaagcatctaaatacatgtcttatggaactaggggcatagtgtttactgagtatggtccctattggcgcaacgtgagaaaggtgtgcaccacagaacttctaagtgcatcaaaagttgtgatgcttgctcctttgaggaggcaggagttaggaatacttgtcaagtcactctaaaaagcagcagcctcacatgatgttgtgaatgtcagcgacaaagttggggagcttatatccaatattggctgtaaaatgatacttggccgcaatagggacgatagattcgacctaaaagggctt

SEQ ID NO: 42073 - DNA, 311 bp, Glycine max
  Clone ID: LIB3139-041-P1-N1-A11
ctcctaccaacgagggttacatctatgcgtgggcggcccctccttaccactattagctagcatagctctatggatatgaagaatatgtgcaacgaataaaagaaagcgatagaaaaggaagaagaagcgcttcgcgatgcacgaaagagaagaattggaagcaaagtttcggcgttttgtcttttataaaaaaaatgttaaatcattataattttctatgatagggattggtttcttgtcttttttcttttgattatgaatatctgtgtattttaacagttgtaaagcacttgcgcccttgctgcatgatc

SEQ ID NO: 42074 - DNA, 344 bp, Glycine max
  Clone ID: LIB3139-041-P1-N1-A12
atttttctttcactccacattgtgcacccttcatgggcatggcaaaactaaaagaccgttcatcttttgtcacattggtggcacttcttctagcagtgtctcttttcgttgctccaacatcctcaacatccagaaaaactattctcaagcaccacccttacccaacaaaagggttccgagtcatgcttcgccacgttgattcgggtaaaaatttaaccaaactagagcgtgtccaacacgggatcaagcgtgggaagagtaggcttcagaggcttaatgcaatggtgttggcagcatcaacactagattctgaagatcaattagaagcccctattcatgcaggg

SEQ ID NO: 42075 - DNA, 370 bp, Glycine max
  Clone ID: LIB3139-041-P1-N1-A2
ccgcgccgtaacgctcgaatcggctcggtactgccaatgattggatcaccctatggacctcttggtgtggctccgtctcgagcaatgcggactctcttcacatggtctataacctgctaccggtccaccaatttcccctggagtcttcatgtcaccatttactcctggtgtttggcctggagcacgaggtgtcgatatgaatattataggtgtaccacctgcagtgtctcctgtacccccaggtccacgatttaatgctgcttatatagggaacccaccaaatcctgttatgtattataaccaatcaggccctggaagggtaatgcccccaagcattttgtacttctggttttaatcctacaggatcaat

SEQ ID NO: 42076 - DNA, 236 bp, Glycine max
  Clone ID: LIB3139-041-P1-N1-A3
aattttagtggttaaaactggagattggatcacactgatgcaaaattctccaattagtgacttgttgagagttgctgcttggaagaaaggttgtttaatggtcaagaatgagatgtgttgaaatgtatcaatctaaaagagggcttgggtctgatttggggcaagtgtttctgacaaacaccaacacagcagtgcatatgtgatgcatgttggtcgacgaaacaagcaacactttt

SEQ ID NO: 42077 - DNA, 338 bp, Glycine max
  Clone ID: LIB3139-041-P1-N1-A4
ggcgatcatttctagagaagaagggccttacgaaggaggagattgatgaagcctttcagcgtgttccagattcagctccaactgtgcagacaggtggtgtaaatcaagatgggcaattgaaatcatcatcaaacattcagcaacaagccccaacaacaaactttgcagccgggttacctggttttaccgggggtaaatacttaatggggaccctattaaccctcagatttcactggtcccatgcccttattgcagttggattactggctgcttcaggtgctggaacagctataataattaagaattctgttctcccttgggtaaaatcttggatacct

SEQ ID NO: 42078 - DNA, 348 bp, Glycine max
  Clone ID: LIB3139-041-P1-N1-A5
ttcaaatttttctttctattaatctgaaacaagttatgaggcatgaagatccagtgcgacgtgtgtaacaaacagcaggcatcgttgttctgcaccgccgacgaagccgccctatgcgacggctgcgaccaccgagtccaccacgccaacaagctcgcctgcaaacaccaacgcttctccctcagccacccctctgcaaaacattttcctctctgcgatgtttgccaggagagaagagcctttgtgttttgtcagcaagatagagcgattctgtgcaaagagtgtgacgtgcccgttcattctgccaacgacctcaccaagaaccataacaggtttcttctcactggg

SEQ ID NO: 42079 - DNA, 347 bp, Glycine max
  Clone ID: LIB3139-041-P1-N1-A6
gggtgagaaaagcaagattttgatcataggaggcaccggctacatcggcaaacatatagtggaagcaagcgcaaaggctggaaatcccacttttgctttggtgagggaatccacactctctgacccctccaaggcacaactcatccacaattttgaggctttgggcgttaatttggtccgcgtaagacttctctcaaactatttaatcttaatttcatttcagtctactaattaatggcaatggcagggggatctgtacgatcatgagaagttggtgaaagctatcaagcaagtagatgtcgtcatatccacgctgggtcacctgcagcttgccgatcagctcaaga

SEQ ID NO: 42080 - DNA, 358 bp, Glycine max
  Clone ID: LIB3139-041-P1-N1-A7
ggcgcgtgttctgagcccagatcctaccgtcaaggttgttacaacccagcttttcgaacgacccagtggctacaagatgtcagaaccaaacttcttctacgtcgtcaactctgcgcatctcaaccagtccgactttggaatcttgttcccatggttgacgcagaagatcttcaaggctgaacagcccgagcgagcgcttcgtcttaacctccgcgcccagctccagatgcttcgcgagaacaacgtccccgtcagtcgtacattcgctggagacctcgttgacggtacttcgttcgataagctcgacaagttcaacgaagccaacggcgatccctgcaaagacggcatcaacaatgat

SEQ ID NO: 42081 - DNA, 326 bp, Glycine max
  Clone ID: LIB3139-041-P1-N1-A9
ctctagctttgaaagaccagattcataatttagttgtaaccaatagcttatcttgtttcattccgcaggggactggtgtcaaggttcagtcattgaatggagaatcaaagttgttaaattctagtaaatatgtgaagtgcttggctcatgttcatgggaaattatactgtggatgccatgacagtagtgttcaggagatacatttggccactggaacagtcaacactattcaaagtggttataaaagattacttgggaaagcaaatcctattcatgcactgcaaattcatggtgaacttatatatgcagctggctcttccttggat

SEQ ID NO: 42082 - DNA, 343 bp, Glycine max
  Clone ID: LIB3139-041-P1-N1-B10
tggcctttttctggtggaactgcaacttcacttgataatgcaagaacttacaacacaaacttggttcggaatgtgaagcaaggaacaccaaaaaggcctggtagaccccttgaaacttatgtgtttgccatgtttgaagaaaatcagaagcagccagagtatgagaagttttgggggctcttccttccaaataaacagctcaaatactctattaatttgaattagttattagaagtatatatagtttataagaaataagggctatgatttcaagtgaagcttccataattgacctagaagaggcagctatggagctttatctgaactgttggagtcaatatgt

SEQ ID NO: 42083 - DNA, 342 bp, Glycine max
  Clone ID: LIB3139-041-P1-N1-B12
ggatgtatttagaaaacacaacacgaatttcattgcggagtgttattttgagtatcagcatcaatggctccaattgcagtgggaaacgtgattccagacggcattttggcttacttggatgaagaaaacaaaccccaaactgtctccattcactctctcgccaccggcaagaaagtcatcatctttggggttcccggtgccttcactcctacttgcagcttgaagcacgttcctggcttcattgagagagcagaagagctgaaagggaagggtgtggacgaaataatctgtatcagtgtgaatgatccatttgtgatgaactcatgggccaaaacattccca

SEQ ID NO: 42084 - DNA, 352 bp, Glycine max
  Clone ID: LIB3139-041-P1-N1-B2
cagtaatggtgttattatgaccagctagaaagctagcagagtgtgattttctcaagagaaactttaagcagatgtctaatgttttatgggtggctcctgaggacaaggcgagtttatggtcacaacttcattatgtttcgtgcaataatctggaaatgcaagaagcttatcttgtcaatctcgtaaatgtgttacgagaattgtatttgcacagtccagaggaagctcgccaattgagaaggaaagctctctctcgtattgaatggctgcaaaaagctgatgtgcctaccatagcacagattgaagagttccattcgatgcaaaggatgatgaatgctcctgattcaaatga

SEQ ID NO: 42085 - DNA, 355 bp, Glycine max
  Clone ID: LIB3139-041-P1-N1-B3
acagaaacgattcattatttgtgagttacatctcttacaataagattattcatggttttctattctcctgttatgttattacttcaatattccttgatgtagaccaaaaagagatgttcttatgcttcccatgggctggcacgatgccggaacttacgatgctaagaccaagactggtggacctaacggttctatccgtaacgaggaagagtattctcacggtgccaacaatggctagaagaaagctattgatttctgtgaggaagggaaggaaaaacatcctaaaatgtcatatgctggtctttaccatttttcaatctaaaattgcactttccaagaacgggggtcccacaat

SEQ ID NO: 42086 - DNA, 344 bp, Glycine max
  Clone ID: LIB3139-041-P1-N1-B4
gttgttccatgctctctgaggcagaaagacattattaatagcaatcctattaatgctaataactctagcatcagtactagagtccgaatggaaggagtatggccttcttcaccacatttgaatgccactccaaaccttttttctgatcccaataacaacaacagcaacaacggcgtttcggcacgatcactgatctctggttatcctaatgttccatctagatcaagtgatggtcccacatgcgacggtgtggaagatgggaaaaagactgagaactcccttgattgctggttatttggagttaatttgactaacaattgtagcaacgttattactactccttc

SEQ ID NO: 42087 - DNA, 345 bp, Glycine max
  Clone ID: LIB3139-041-P1-N1-B5
agagtgctttgacttgagaatggccttgccagtggtcgtcgacgcatagtacctcaaagaggtcgacaaggctcgccgcgatctccgcgcactcatcgctaacaggaactgcgctcctctcatgcttcgattggcctggcacgatgccggaacttacgatgctaagaccaagactggtggacctaacggttcgatccgtaacgaggaagagtattctcacggcgccaacaatggcttgaagaaggctattgatttctgtgaggaagtgaaggaaaaacatcctaaaattacatatgcagatctctaccagcttgcgggtgttgttgcagttgaggttaccggggg

SEQ ID NO: 42088 - DNA, 346 bp, Glycine max
  Clone ID: LIB3139-041-P1-N1-B6
cgccgcttattcacaacatgttgatatctcgctctcggggcttcagcccacagatacgcgcttatgcagccgtgtcctcgcggccgtccaggccaagcggccggagaaagctgccctcaattggactcgatcatttcatccaaagacaacgcgtagtgtcgttatggagagacatagtgagagctctcaataaaattcctccatcgcctacccgagacgagctgcgtcgctatgctcgcactgagtttgagaggaatcggaatgtcactgatattacacatataagatacctcatttcgactgggaagaccgaattcgactcgatgaaacgttacatagaggagca

SEQ ID NO: 42089 - DNA, 344 bp, Glycine max
  Clone ID: LIB3139-041-P1-N1-B7
cgggtatttgtgttgtcccaaagaaagagcatctttgtgctttctttcatcaccgatggaagagactgagatgggttcaaaaaccaagacttttacctttgaggaggtggctaagcacaatcacaggaaggattgctggattatagtcaaagggaaggtgtatgatgtcaccccatttttggatgatcatccaggaggtgatgaagttttagtgactgcaacagagaaggatgccaccactgattttgaagatattgggcacagtgattcagcaacagagatgatggaaaaatactttgttggtgaggttgacacccacacttcttcagcacaagttaccagca

SEQ ID NO: 42090 - DNA, 354 bp, Glycine max
  Clone ID: LIB3139-041-P1-N1-B8
atttgtttgagggaaatttttcctttgatattaaatgtcgctctagattggaaaaagtttcctctacaaaagcacaatttgttagtggaaaaaccttcaaatatgatataattggtgctggttcacattcttcaggagattttcctgaaaaggaagatcaagaaaaacccaaaaagattgataccagattgagacaaagaatagatcctcaatacaatgaggttcaggctcagatggaaacaaatttgtttaaattgtctcttgatgatgttgaaactcctaaaggttctatgttggatcttaaaatttctcaatctaaaattgcacttcccaagaacacagttggaggaacca

SEQ ID NO: 42091 - DNA, 351 bp, Glycine max
  Clone ID: LIB3139-041-P1-N1-B9
gctttagtaatgaaatatgtttggcagtatgatcccattaaaaactcttggactgaggccagtccaatgtcagttggtagagcctattgcaagacaggtatattaaacaacaagctttatgttgttggaggggttactaggtgtcgtggtggactaagccctcttcaatctgcagaagtatatgaccctcatacaggcatgtggtcccaattacctagcatgccttttgcaagagctcaagtgttgcccacttgctttttggctgacttactcaagcctattgccacaggaatggcttcatacaggggaaggttattcgttcctcaaagtttgtattgctggccatttttt

SEQ ID NO: 42092 - DNA, 355 bp, Glycine max
  Clone ID: LIB3139-041-P1-N1-C1
tcttctcacggccagggttttagggcagcttctttctttgagattaagtttcagtagtaatgggtaaggaaaaggttcacattaacatcgtggtcattggccatgtcgactctgggaagtcaaccaccaccggtcaccttatctacaagctcggaggtattgacaagcgtgtcatcgagagattcgagaaggaagctgctgagatgaataagaggtctttcaagtatgcctgggtgcttgacaagctcaaggctgagcgtgaaagaggaatcaccattgatattgctctgtggaagtttgagaccacaaagtactactgcacagtcattgatgcccctggacatagggatttcat
